(19) United States
(12) Patent Application Publication
(10) Pub. No.: US 2024/0066150 A1
(43) Pub. Date: Feb. 29, 2024

(54) MATERIALS AND METHODS FOR TREATMENT OF PAIN RELATED DISORDERS

(71) Applicant: Vertex Phamaceuticals Incorporated, Boston, MA (US)

(72) Inventors: Ante Sven Lundberg, Cambridge, MA (US); Samarth Kulkarni, Cambridge, MA (US); Lawrence Klein, Cambridge, MA (US); Hari Kumar Padmanabhan, Cambridge, MA (US)

(21) Appl. No.: 18/466,575

(22) Filed: Sep. 13, 2023

Related U.S. Application Data
(62) Division of application No. 16/315,540, filed on Jan. 4, 2019, now Pat. No. 11,801,313.
(60) Provisional application No. 62/461,876, filed on Feb. 22, 2017.
(60) Provisional application No. 62/358,769, filed on Jul. 6, 2016.

(51) Int. Cl. A61K 48/00; A61K 9/00; A61K 9/127; A61K 9/51; A61K 35/30; A61P 43/00; C07K 14/705; C12N 5/0775; C12N 5/0793; C12N 9/22; C12N 15/113; C12N 15/90

(52) U.S. Cl. CPC A61K 48/0066; A61K 9/0019; A61K 9/127; A61K 9/51; A61K 35/30; A61P 43/00; C07K 14/705; C12N 5/0619; C12N 5/0663; C12N 9/22; C12N 15/1138; C12N 15/907; C12N 2310/20

(57) ABSTRACT

The present application provides materials and methods for treating a patient with one or more conditions associated with SCN10A whether ex vivo or in vivo. In addition, the present application provides materials and methods for editing and/or modulating the expression of SCN10A gene in a cell by genome editing.

### RELATED APPLICATIONS

[0001] This application is a Divisional of U.S. application Ser. No. 16/315,540 which is a national stage of PCT Application No. PCT/IB2017/054081 filed on Jul. 6, 2017, which claims priority to U.S. Provisional Application No. 62/358,769 filed Jul. 6, 2016, and U.S. Provisional Application No. 62/461,876 filed Feb. 22, 2017, all of which are incorporated herein in their entirety by reference.

### FIELD

[0002] The present disclosure relates to the field of gene editing and specifically to the alteration of the Sodium Channel, Voltage Gated, Type X Alpha Subunit (SCN10A) gene.

### INCORPORATION BY REFERENCE OF SEQUENCE LISTING

[0003] This application contains a Sequence Listing that has been submitted on a read-only optical disc (DVD-R) in computer readable format and is hereby incorporated by reference in its entirety. The computer readable file, created Aug. 31, 2023, is named 105414-771025_SL.xml and is about 130,158,592 bytes in size.

### BACKGROUND

[0004] Genome engineering refers to the strategies and techniques for the targeted, specific modification of the genetic information (genome) of living organisms. Genome engineering is a very active field of research because of the wide range of possible applications, particularly in the areas of human health. For example, genome engineering can be used to alter (e.g., correct or knock-out) a gene carrying a harmful mutation or to explore the function of a gene. Early technologies developed to insert a transgene into a living cell were often limited by the random nature of the insertion of the new sequence into the genome. Random insertions into the genome may result in disrupting normal regulation of neighboring genes leading to severe unwanted effects. Furthermore, random integration technologies offer little reproducibility, as there is no guarantee that the sequence would be inserted at the same place in two different cells. Recent genome engineering strategies, such as zinc finger nucleases (ZFNs), transcription activator like effector nucleases (TALENs), homing endonucleases (HEs) and MegaTALs, enable a specific area of the DNA to be modified, thereby increasing the precision of the correction or insertion compared to early technologies. These newer platforms offer a much larger degree of reproducibility, but still have their limitations.

[0005] Despite efforts from researchers and medical professionals worldwide who have been trying to address genetic disorders, and despite the promise of genome engineering approaches, there still remains a critical need for developing safe and effective treatments involving SCN10A related indications.

[0006] By using genome engineering tools to create permanent changes to the genome that can address the SCN10A related disorders or conditions with as few as a single treatment, the resulting therapy may completely remedy certain SCN10A related indications and/or diseases.

### SUMMARY

[0007] Provided herein are cellular, ex vivo and in vivo methods for creating permanent changes to the genome by introducing one or more insertions, deletions or mutations of at least one nucleotide within or near the Sodium Channel, Voltage Gated, Type X Alpha Subunit (SCN10A) gene or other DNA sequences that encode regulatory elements of the SCN10A gene by genome editing and reducing or eliminating Sodium Channel, Voltage Gated, Type X Alpha Subunit (SCN10A) gene products, which can be used to treat pain. Also provided performing herein are components and compositions, and vectors for performing such methods.

[0008] Provided herein is a method for editing a Sodium Channel, Voltage Gated, Type X Alpha Subunit (SCN10A) gene in a cell by genome editing comprising: introducing into the cell one or more deoxyribonucleic acid (DNA) endonucleases to effect one or more single-strand breaks (SSBs) or double-strand breaks (DSBs) within or near the SCN10A gene or SCN10A regulatory elements that results in one or more permanent insertions, deletions or mutations of at least one nucleotide within or near the SCN10A gene, thereby reducing or eliminating the expression or function of SCN10A gene products.

[0009] Also provided herein is an ex vivo method for treating a patient having an SCN10A related condition or disorder comprising: editing a patient specific induced pluripotent stem cell (iPSC) within or near a Sodium Channel, Voltage Gated, Type X Alpha Subunit (SCN10A) gene or other DNA sequences that encode regulatory elements of the SCN10A gene; differentiating the edited iPSC into a neuron of the peripheral nervous system; and administering the neuron of the peripheral nervous system into the patient.

[0010] In some aspects, the editing step comprises: introducing into the iPSC one or more deoxyribonucleic acid (DNA) endonucleases to effect one or more single-strand breaks (SSBs) or double-strand breaks (DSBs) within or near the SCN10A gene or SCN10A regulatory elements that results in one or more permanent insertions, deletions or mutations of at least one nucleotide within or near the SCN1OA gene, thereby reducing or eliminating the expression or function of SCN10A gene products.

[0011] Also provided herein is an ex vivo method for treating a patient having an SCN10A related condition or disorder comprising: editing a mesenchymal stem cell within or near a Sodium Channel, Voltage Gated, Type X Alpha Subunit (SCN10A) gene or other DNA sequences that encode regulatory elements of the SCN10A gene; differentiating the edited mesenchymal stem cell into a neuron of the peripheral nervous system; and administering the neuron of the peripheral nervous system into the patient.

[0012] In some aspects, the editing step comprises: introducing into the mesenchymal stem cell one or more deoxyribonucleic acid (DNA) endonucleases to effect one or more single-strand breaks (SSBs) or double-strand breaks (DSBs) within or near the SCN10A gene or SCN10A regulatory elements that results in one or more permanent insertions, deletions or mutations of at least one nucleotide within or near the SCN10A gene, thereby reducing or eliminating the expression or function of SCN10A gene products.

[0013] Also provided herein is an in vivo method for treating a patient with an SCN10A related disorder comprising: editing the Sodium Channel, Voltage Gated, Type X Alpha Subunit (SCN10A) gene in a cell of the patient.

[0014] In some aspects, the editing step comprises: introducing into the cell one or more deoxyribonucleic acid (DNA) endonucleases to effect one or more single-strand breaks (SSBs) or double-strand breaks (DSBs) within or near the SCN10A gene or SCN10A regulatory elements that results in one or more permanent insertions, deletions or mutations of at least one nucleotide within or near the SCN10A gene, thereby reducing or eliminating the expression or function of SCN10A gene products.

[0015] In some aspects, the cell is a neuron of the peripheral nervous system. In some aspects, the one or more deoxyribonucleic acid (DNA) endonuclease is delivered to the neuron of the peripheral nervous system via direct intraganglionic or intraspinal injection, or intrathecal delivery.

[0016] Also provided herein is a method of altering the contiguous genomic sequence of an SCN10A gene in a cell comprising: contacting the cell with one or more deoxyribonucleic acid (DNA) endonuclease to effect one or more single-strand breaks (SSBs) or double-strand breaks (DSBs). In some aspects, the alteration of the contiguous genomic sequence occurs in one or more exons of the SCN10A gene.

[0017] In some aspects, the one or more deoxyribonucleic acid (DNA) endonuclease is selected from any of those sequences in SEQ ID NOs: 1-620 and variants having at least 90% homology to any of those disclosed in SEQ ID NOs: 1-620.

[0018] In some aspects, the one or more deoxyribonucleic acid (DNA) endonuclease is one or more protein or polypeptide. In some aspects, the one or more deoxyribonucleic acid (DNA) endonuclease is one or more polynucleotide encoding the one or more DNA endonuclease. In some aspects, the one or more deoxyribonucleic acid (DNA) endonuclease is one or more ribonucleic acid (RNA) encoding the one or more DNA endonuclease. In some aspects, the one or more ribonucleic acid (RNA) is one or more chemically modified RNA. In some aspects, the one or more ribonucleic acid (RNA) is chemically modified in the coding region. In some aspects, the one or more polynucleotide or one or more ribonucleic acid (RNA) is codon optimized.

[0019] In some aspects, the methods further comprise: introducing into the cell one or more gRNA or one or more sgRNA. In some aspects, the one or more gRNA or one or more sgRNA comprises a spacer sequence that is complementary to a DNA sequence within or near the SCN10A gene. In some aspects, the one or more gRNA or one or more sgRNA is chemically modified. In some aspects, the one or more gRNA or one or more sgRNA is pre-complexed with the one or more deoxyribonucleic acid (DNA) endonuclease. In some aspects, the pre-complexing involves a covalent attachment of the one or more gRNA or one or more sgRNA to the one or more deoxyribonucleic acid (DNA) endonuclease.

[0020] In some aspects, the one or more deoxyribonucleic acid (DNA) endonuclease is formulated in a liposome or lipid nanoparticle. In some aspects, the one or more deoxyribonucleic acid (DNA) endonuclease is formulated in a liposome or lipid nanoparticle which also comprises the one or more gRNA or one or more sgRNA.

[0021] In some aspects, the one or more deoxyribonucleic acid (DNA) endonuclease is encoded in an AAV vector particle. In some aspects, the one or more gRNA or one or more sgRNA is encoded in an AAV vector particle. In some aspects, the one or more deoxyribonucleic acid (DNA) endonuclease is encoded in an AAV vector particle which also encodes the one or more gRNA or one or more sgRNA. In some aspects, the AAV vector particle is selected from the group consisting of any of those disclosed in SEQ ID NOs: 47345302 and Table 2.

[0022] Also provided herein is a single-molecule guide RNA comprising: at least a spacer sequence that is an RNA sequence corresponding to any of SEQ ID NOs: 5305-76012. In some aspects, the single-molecule guide RNA further comprises a spacer extension region. In some aspects, the single-molecule guide RNA further comprises a tracrRNA extension region. In some aspects, the single-molecule guide RNA is chemically modified.

[0023] In some aspects, the single-molecule guide RNA is pre-complexed with a sited-directed polypeptide. In some aspects, the site-directed polypeptide is a DNA endonuclease. In some aspects, the DNA endonuclease is a Cas9 or CPf1 endonuclease. In some aspects, the Cas9 or Cpf1 endonuclease is selected from a group consisting of: S. pyogenes Cas9, S. aureus Cas9, N. meningitides Cas9, S. thermophilus CRISPR1 Cas9, S. thermophilus CRISPR 3 Cas9, T. denticola Cas9, L. bacterium ND2006 Cpf1 and Acidaminococcus sp. BV3L6 Cpf1, and variants having at least 90% homology to these endonucleases. In some aspects, the Cas9 or Cpf1 endonuclease comprises one or more nuclear localization signals (NLSs). In some aspects, at least one NLS is at or within 50 amino acids of the amino-terminus of the Cas9 or Cpf1 endonuclease and/or at least one NLS is at or within 50 amino acids of the carboxy-terminus of the Cas9 or Cpf1 endonuclease.

[0024] Also provided herein is RNA encoding the single-molecule guide polynucleotide described herein.

[0025] Also provided herein is RNA encoding the CRISPR/Cas system described herein.

[0026] Also provided herein is a DNA encoding the single-molecule guide RNA described herein.

[0027] Also provided herein is a DNA encoding the CRISPR/Cas system described herein.

[0028] Also provided herein is a vector comprising a DNA encoding the single-molecule guide RNA or CRISPR/Cas system. In some aspects, the vector is a plasmid. In some aspects, the vector is an AAV vector particle, wherein the AAV vector particle is selected from those listed in SEQ ID NOs: 4734-5302 or Table 2.

### BRIEF DESCRIPTION OF THE DRAWINGS

[0029] Various aspects of materials and methods disclosed and described in this specification can be better understood by reference to the accompanying figures, in which:

[0030] FIGS. 1A-B depict the type II CRISPR/Cas system;

[0031] FIG. 1A is a depiction of the type II CRISPR/Cas system including gRNA;

[0032] FIG. 1B is another depiction of the type II CRISPR/Cas system including sgRNA;

[0033] FIGS. 2A-H describe the cutting efficiencies of S. pyogenes gRNAs selected via an in-vitro transcribed (IVT) gRNA screen;

[0034] FIG. 2A describes the cutting efficiencies in the range of 90.4-98.6% of S. pyogenes gRNAs selected via an in-vitro transcribed (IVT) gRNA screen;

[0035] FIG. 2B describes the cutting efficiencies in the range of 84.6-90.3% of S. pyogenes gRNAs selected via an in-vitro transcribed (IVT) gRNA screen;

[0036] FIG. 2C describes the cutting efficiencies in the range of 78.7-84.3% of S. pyogenes gRNAs selected via an in-vitro transcribed (IVT) gRNA screen;

[0037] FIG. 2D describes the cutting efficiencies in the range of 71.4-77.6% of S. pyogenes gRNAs selected via an in-vitro transcribed (IVT) gRNA screen;

[0038] FIG. 2E describes the cutting efficiencies in the range of 62-71.4% of S. pyogenes gRNAs selected via an in-vitro transcribed (IVT) gRNA screen;

[0039] FIG. 2F describes the cutting efficiencies in the range of 44-59.9% of S. pyogenes gRNAs selected via an in-vitro transcribed (IVT) gRNA screen;

[0040] FIG. 2G describes the cutting efficiencies in the range of 15.4-43.7% of S. pyogenes gRNAs selected via an in-vitro transcribed (IVT) gRNA screen;

[0041] FIG. 2H describes the cutting efficiencies in the range of 1.6-14.7% of S. pyogenes gRNAs selected via an in-vitro transcribed (IVT) gRNA screen;

[0042] FIGS. 3A-C describe the cutting efficiency of S. pyogenes gRNAs in HEK293T cells targeting the SCN10A gene;

[0043] FIG. 3A describes the cutting efficiency in the range of 81.1-98.6% of S. pyogenes gRNAs in HEK293T cells targeting the SCN10A gene;

[0044] FIG. 3B describes the cutting efficiency in the range of 62.1-81.1% of S. pyogenes gRNAs in HEK293T cells targeting the SCN10A gene; and

[0045] FIG. 3C describes the cutting efficiency in the range of 1.6-62% of S. pyogenes gRNAs in HEK293T cells targeting the SCN10A gene.

### BRIEF DESCRIPTION OF SEQUENCE LISTING

[0046] SEQ ID NOs: 1-620 are Cas endonuclease ortholog sequences.

[0047] SEQ ID NOs: 621-631 do not include sequences.

[0048] SEQ ID NOs: 632-4715 are microRNA sequences.

[0049] SEQ ID NOs: 4716-4733 do not include sequences.

[0050] SEQ ID NOs: 4734-5302 are AAV serotype sequences.

[0051] SEQ ID NO: 5303 is a SCN10A nucleotide sequence.

[0052] SEQ ID NO: 5304 is a gene sequence including 1-5 kilobase pairs upstream and/or downstream of the SCN1OA gene.

[0053] SEQ ID NOs: 5305-5702 are 20 bp spacer sequences for targeting within or near a SCN10A gene or other DNA sequence that encodes a regulatory element of the SCN10A gene with a T. denticola Cas9 endonuclease.

[0054] SEQ ID NOs: 5703-6771 are 20 bp spacer sequences for targeting within or near a SCN10A gene or other DNA sequence that encodes a regulatory element of the SCN10A gene with a S. thermophilus Cas9 endonuclease.

[0055] SEQ ID NOs: 6772-9983 are 20 bp spacer sequences for targeting within or near a SCN10A gene or other DNA sequence that encodes a regulatory element of the SCN10A gene with a S. aureus Cas9 endonuclease.

[0056] SEQ ID NOs: 9984-12753 are 20 bp spacer sequences for targeting within or near a SCN10A gene or other DNA sequence that encodes a regulatory element of the SCN10A gene with a N. meningitides Cas9 endonuclease.

[0057] SEQ ID NOs: 12754-40530 are 20 bp spacer sequences for targeting within or near a SCN10A gene or other DNA sequence that encodes a regulatory element of the SCN10A gene with a S. pyogenes Cas9 endonuclease.

[0058] SEQ ID NOs: 40531-76012 are 20 bp spacer sequences for targeting within or near a SCN10A gene or other DNA sequence that encodes a regulatory element of the SCN10A gene with an Acidaminococcus, a Lachnospiraceae, and a Franciscella Novicida Cpf1 endonuclease.

[0059] SEQ ID NOs: 76013-76042 do not include sequences.

[0060] SEQ TD NO: 76043 is a sample guide RNA (gRNA) for a S. pyogenes Cas9 endonuclease.

[0061] SEQ ID NOs: 76044-76046 show sample sgRNA sequences.

### DETAILED DESCRIPTION

### I. Introduction

### Genome Editing

[0062] The present disclosure provides strategies and techniques for the targeted, specific alteration of the genetic information (genome) of living organisms. As used herein, the term “alteration” or “alteration of genetic information” refers to any change in the genome of a cell. In the context of treating genetic disorders, alterations may include, but are not limited to, insertion, deletion and correction. As used herein, the term “insertion” refers to an addition of one or more nucleotides in a DNA sequence. Insertions can range from small insertions of a few nucleotides to insertions of large segments such as a cDNA or a gene. The term “deletion” refers to a loss or removal of one or more nucleotides in a DNA sequence or a loss or removal of the function of a gene. In some cases, a deletion can include, for example, a loss of a few nucleotides, an exon, an intron, a gene segment, or the entire sequence of a gene. In some cases, deletion of a gene refers to the elimination or reduction of the function or expression of a gene or its gene product. This can result from not only a deletion of sequences within or near the gene, but also other events (e.g., insertion, nonsense mutation) that disrupt the expression of the gene. The term “correction” as used herein, refers to a change of one or more nucleotides of a genome in a cell, whether by insertion, deletion or substitution. Such correction may result in a more favorable genotypic or phenotypic outcome, whether in structure or function, to the genomic site which was corrected. One non-limiting example of a “correction” includes the correction of a mutant or defective sequence to a wild-type sequence which restores structure or function to a gene or its gene product(s). Depending on the nature of the mutation, correction may be achieved via various strategies disclosed herein. In one non-limiting example, a missense mutation may be corrected by replacing the region containing the mutation with its wild-type counterpart. As another example, duplication mutations (e.g., repeat expansions) in a gene may be corrected by removing the extra sequences.

[0063] In some aspects, alterations may also include a gene knock-in, knock-out or knock-down. As used herein, the term “knock-in” refers to an addition of a DNA sequence, or fragment thereof into a genome. Such DNA sequences to be knocked-in may include an entire gene or genes, may include regulatory sequences associated with a gene or any portion or fragment of the foregoing. For example, a cDNA encoding the wild-type protein may be inserted into the genome of a cell carrying a mutant gene. Knock-in strategies need not replace the defective gene, in whole or in part. In some cases, a knock-in strategy may further involve substitution of an existing sequence with the provided sequence, e.g., substitution of a mutant allele with a wild-type copy. On the other hand, the term “knock-out” refers to the elimination of a gene or the expression of a gene. For example, a gene can be knocked out by either a deletion or an addition of a nucleotide sequence that leads to a disruption of the reading frame. As another example, a gene may be knocked out by replacing a part of the gene with an irrelevant sequence. Finally, the term “knock-down” as used herein refers to reduction in the expression of a gene or its gene product(s). As a result of a gene knock-down, the protein activity or function may be attenuated or the protein levels may be reduced or eliminated.

[0064] Genome editing generally refers to the process of modifying the nucleotide sequence of a genome, preferably in a precise or pre-determined manner. Examples of methods of genome editing described herein include methods of using site-directed nucleases to cut deoxyribonucleic acid (DNA) at precise target locations in the genome, thereby creating single-strand or double-strand DNA breaks at particular locations within the genome. Such breaks can be and regularly are repaired by natural, endogenous cellular processes, such as homology-directed repair (HDR) and non-homologous end joining (NHEJ), as reviewed in Cox et al., Nature Medicine 21(2), 121-31 (2015). These two main DNA repair processes consist of a family of alternative pathways. NHEJ directly joins the DNA ends resulting from a double-strand break, sometimes with the loss or addition of nucleotide sequence, which may disrupt or enhance gene expression. HDR utilizes a homologous sequence, or donor sequence, as a template for inserting a defined DNA sequence at the break point. The homologous sequence can be in the endogenous genome, such as a sister chromatid. Alternatively, the donor can be an exogenous nucleic acid, such as a plasmid, a single-strand oligonucleotide, a double-stranded oligonucleotide, a duplex oligonucleotide or a virus, that has regions of high homology with the nuclease-cleaved locus, but which can also contain additional sequence or sequence changes including deletions that can be incorporated into the cleaved target locus. A third repair mechanism can be microhomology-mediated end joining (MMEJ), also referred to as “Alternative NHEJ,” in which the genetic outcome is similar to NHEJ in that small deletions and insertions can occur at the cleavage site. MMEJ can make use of homologous sequences of a few base pairs flanking the DNA break site to drive a more favored DNA end joining repair outcome, and recent reports have further elucidated the molecular mechanism of this process; see, e.g., Cho and Greenberg, Nature 518, 174-76 (2015); Kent et al., Nature Structural and Molecular Biology, Adv. Online doi:10.1038/nsmb.2961(2015); Mateos-Gomez et al., Nature 518, 254-57 (2015); Ceccaldi et al., Nature 528, 258-62 (2015). In some instances, it may be possible to predict likely repair outcomes based on analysis of potential microhomologies at the site of the DNA break.

[0065] Each of these genome editing mechanisms can be used to create desired genomic alterations. A step in the genome editing process can be to create one or two DNA breaks, the latter as double-strand breaks or as two single-stranded breaks, in the target locus as near the site of intended mutation. This can be achieved via the use of site-directed polypeptides, as described and illustrated herein.

### CRISPR Endonuclease System

[0066] A CRISPR (Clustered Regularly Interspaced Short Palindromic Repeats) genomic locus can be found in the genomes of many prokaryotes (e.g., bacteria and archaea). In prokaryotes, the CRISPR locus encodes products that function as a type of immune system to help defend the prokaryotes against foreign invaders, such as virus and phage. There are three stages of CRISPR locus function: integration of new sequences into the CRISPR locus, expression of CRISPR RNA (crRNA), and silencing of foreign invader nucleic acid. Five types of CRISPR systems (e.g., Type I, Type II, Type III, Type U, and Type V) have been identified.

[0067] A CRISPR locus includes a number of short repeating sequences referred to as “repeats.” When expressed, the repeats can form secondary structures (e.g., hairpins) and/or comprise unstructured single-stranded sequences. The repeats usually occur in clusters and frequently diverge between species. The repeats are regularly interspaced with unique intervening sequences referred to as “spacers,” resulting in a repeat-spacer-repeat locus architecture. The spacers are identical to or have high homology with known foreign invader sequences. A spacer-repeat unit encodes a crisprRNA (crRNA), which is processed into a mature form of the spacer-repeat unit. A crRNA comprises a “seed” or spacer sequence that is involved in targeting a target nucleic acid (in the naturally occurring form in prokaryotes, the spacer sequence targets the foreign invader nucleic acid). A spacer sequence is located at the 5′ or 3′ end of the crRNA.

[0068] A CRISPR locus also comprises polynucleotide sequences encoding CRISPR Associated (Cas) genes. Cas genes encode endonucleases involved in the biogenesis and the interference stages of crRNA function in prokaryotes. Some Cas genes comprise homologous secondary and/or tertiary structures.

### Type H CRISPR Systems

[0069] crRNA biogenesis in a Type II CRISPR system in nature requires a trans-activating CRISPR RNA (tracrRNA). Non-limiting examples of Type II CRISPR systems are shown in FIGS. 1A and 1B. The tracrRNA can be modified by endogenous RNase1I1, and then hybridizes to a crRNA repeat in the pre-crRNA array. Endogenous RNase1I1 can be recruited to cleave the pre-crRNA. Cleaved crRNAs can be subjected to exoribonuclease trimming to produce the mature crRNA form (e.g., 5′ trimming). The tracrRNA can remain hybridized to the crRNA, and the tracrRNA and the crRNA associate with a site-directed polypeptide (e.g., Cas9). The crRNA of the crRNA-tracrRNA-Cas9 complex can guide the complex to a target nucleic acid to which the crRNA can hybridize. Hybridization of the crRNA to the target nucleic acid can activate Cas9 for targeted nucleic acid cleavage. The target nucleic acid in a Type II CRISPR system is referred to as a protospacer adjacent motif (PAM). In nature, the PAM is essential to facilitate binding of a site-directed polypeptide (e.g., Cas9) to the target nucleic acid. Type II systems (also referred to as Nmeni or CASS4) are further subdivided into Type II-A (CASS4) and II-B (CASS4a). Jinek et al., Science, 337(6096):816-821 (2012) showed that the CRISPR/Cas9 system is useful for RNA-programmable genome editing, and international patent application publication number WO2013/176772 provides numerous examples and applications of the CRISPR/Cas endonuclease system for site-specific gene editing.

### Type V CRISPR Systems

[0070] Type V CRISPR systems have several important differences from Type II systems. For example, Cpf1 is a single RNA-guided endonuclease that, in contrast to Type II systems, lacks tracrRNA. In fact, Cpf1-associated CRISPR arrays can be processed into mature crRNAs without the requirement of an additional trans-activating tracrRNA. The Type V CRISPR array can be processed into short mature crRNAs of 42-44 nucleotides in length, with each mature crRNA beginning with 19 nucleotides of direct repeat followed by 23-25 nucleotides of spacer sequence. In contrast, mature crRNAs in Type II systems can start with 20-24 nucleotides of spacer sequence followed by about 22 nucleotides of direct repeat. Also, Cpf1 can utilize a T-rich protospacer-adjacent motif such that Cpf1-crRNA complexes efficiently cleave target DNA preceded by a short T-rich PAM, which is in contrast to the G-rich PAM following the target DNA for Type II systems. Thus, Type V systems cleave at a point that is distant from the PAM, while Type II systems cleave at a point that is adjacent to the PAM. In addition, in contrast to Type II systems, Cpf1 cleaves DNA via a staggered DNA double-stranded break with a 4 or 5 nucleotide 5′ overhang. Type II systems cleave via a blunt double-stranded break. Similar to Type II systems, Cpf1 contains a predicted RuvC-like endonuclease domain, but lacks a second HNH endonuclease domain, which is in contrast to Type II systems.

### Cas Genes/Polypeptides and Protospacer Adjacent Motifs

[0071] Exemplary CRISPR/Cas polypeptides include the Cas9 polypeptides as published in Fonfara et al., Nucleic Acids Research, 42: 2577-2590 (2014). The CRISPR/Cas gene naming system has undergone extensive rewriting since the Cas genes were discovered. Fonfara et al. also provides PAM sequences for the Cas9 polypeptides from various species (see also Table 1 infra).

### II. Compositions and Methods of the Disclosure

[0072] Provided herein are cellular, ex vivo and in vivo methods for using genome engineering tools to create permanent changes to the genome by deleting or mutating the SCN10A gene or other DNA sequences that encode regulatory elements of the SCN10A gene. Such methods use endonucleases, such as CRISPR-associated (Cas9, Cpf1 and the like) nucleases, to permanently edit within or near the genomic locus of the SCN10A gene or other DNA sequences that encode regulatory elements of the SCN10A gene. In this way, examples set forth in the present disclosure can help to reduce or eliminate the expression of the SCN10A gene with as few as a single treatment (rather than deliver potential therapies for the lifetime of the patient).

### Site-Directed Polypeptides (Endonucleases, Enzymes)

[0073] A site-directed polypeptide is a nuclease used in genome editing to cleave DNA. The site-directed polypeptide can be administered to a cell or a patient as either: one or more polypeptides, or one or more mRNAs encoding the polypeptide. Any of the enzymes or orthologs listed in SEQ ID NOs: 1-620, or disclosed herein, may be utilized in the methods herein. Single-molecule guide RNA can be pre-complexed with a site-directed polypeptide. The site-directed polypeptide can be any of the DNA endonuclease disclosed herein.

[0074] In the context of a CRISPR/Cas9 or CRISPR/Cpf1 system, the site-directed polypeptide can bind to a guide RNA that, in turn, specifies the site in the target DNA to which the polypeptide is directed. In the CRISPR/Cas9 or CRISPR/Cpf1 systems disclosed herein, the site-directed polypeptide can be an endonuclease, such as a DNA endonuclease.

[0075] A site-directed polypeptide can comprise a plurality of nucleic acid-cleaving (i.e., nuclease) domains. Two or more nucleic acid-cleaving domains can be linked together via a linker. For example, the linker can comprise a flexible linker. Linkers can comprise 1, 2, 3, 4, 5, 6, 7, 8, 9, 10, 11, 12, 13, 14, 15, 16, 17, 18, 19, 20, 21, 22, 23, 24, 25, 30, 35, 40 or more amino acids in length.

[0076] Naturally-occurring wild-type Cas9 enzymes comprise two nuclease domains, a HNH nuclease domain and a RuvC domain. Herein, the term “Cas9” refers to both a naturally-occurring and a recombinant Cas9. Cas9 enzymes contemplated herein can comprise a HNH or HNH-like nuclease domain, and/or a RuvC or RuvC-like nuclease domain.

[0077] HNH or HNH-like domains comprise a McrA-like fold. HNH or HNH-like domains comprises two antiparallel β-strands and an a-helix. HNH or HNH-like domains comprises a metal binding site (e.g., a divalent cation binding site). HNH or HNH-like domains can cleave one strand of a target nucleic acid (e.g., the complementary strand of the crRNA targeted strand).

[0078] RuvC or RuvC-like domains comprise an RNaseH or RNaseH-like fold. RuvC/RNaseH domains are involved in a diverse set of nucleic acid-based functions including acting on both RNA and DNA. The RNaseH domain comprises 5 13-strands surrounded by a plurality of ct-helices. RuvC/RNaseH or RuvC/RNaseH-like domains comprise a metal binding site (e.g., a divalent cation binding site). RuvC/RNaseH or RuvC/RNaseH-like domains can cleave one strand of a target nucleic acid (e.g., the non-complementary strand of a double-stranded target DNA).

[0079] Site-directed polypeptides can introduce double-strand breaks or single-strand breaks in nucleic acids, e.g., genomic DNA. The double-strand break can stimulate a cell's endogenous DNA-repair pathways (e.g., homology-dependent repair (HDR) or NHEJ or alternative non-homologous end joining (A-NFIEJ) or microhomology-mediated end joining (MMEJ)). NHEJ can repair cleaved target nucleic acid without the need for a homologous template. This can sometimes result in small deletions or insertions (indels) in the target nucleic acid at the site of cleavage, and can lead to disruption or alteration of gene expression. HDR can occur when a homologous repair template, or donor, is available. The homologous donor template can comprise sequences that are homologous to sequences flanking the target nucleic acid cleavage site. The sister chromatid can be used by the cell as the repair template. However, for the purposes of genome editing, the repair template can be supplied as an exogenous nucleic acid, such as a plasmid, duplex oligonucleotide, single-strand oligonucleotide or viral nucleic acid. With exogenous donor templates, an additional nucleic acid sequence (such as a transgene) or modification (such as a single or multiple base change or a deletion) can be introduced between the flanking regions of homology so that the additional or altered nucleic acid sequence also becomes incorporated into the target locus. MMEJ can result in a genetic outcome that is similar to NHEJ in that small deletions and insertions can occur at the cleavage site. MMEJ can make use of homologous sequences of a few base pairs flanking the cleavage site to drive a favored end-joining DNA repair outcome. In some instances, it may be possible to predict likely repair outcomes based on analysis of potential microhomologies in the nuclease target regions.

[0080] Thus, in some cases, homologous recombination can be used to insert an exogenous polynucleotide sequence into the target nucleic acid cleavage site. An exogenous polynucleotide sequence is termed a “donor polynucleotide” (or donor or donor sequence) herein. The donor polynucleotide, a portion of the donor polynucleotide, a copy of the donor polynucleotide, or a portion of a copy of the donor polynucleotide can be inserted into the target nucleic acid cleavage site. The donor polynucleotide can be an exogenous polynucleotide sequence, i.e., a sequence that does not naturally occur at the target nucleic acid cleavage site.

[0081] The modifications of the target DNA due to NHEJ and/or HDR can lead to, for example, mutations, deletions, alterations, integrations, gene correction, gene replacement, gene tagging, transgene insertion, nucleotide deletion, gene disruption, translocations and/or gene mutation. The processes of deleting genomic DNA and integrating non-native nucleic acid into genomic DNA are examples of genome editing.

[0082] The site-directed polypeptide can comprise an amino acid sequence having at least 10%, at least 15%, at least 20%, at least 30%, at least 40%, at least 50%, at least 60%, at least 70%, at least 75%, at least 80%, at least 85%, at least 90%, at least 95%, at least 99%, or 100% amino acid sequence identity to a wild-type exemplary site-directed polypeptide [e.g., Cas9 from S. pyogenes, US2014/0068797 Sequence ID No. 8 or Sapranauskas et al., Nucleic Acids Res, 39(21): 9275-9282 (2011)], and various other site-directed polypeptides. The site-directed polypeptide can comprise at least 70, 75, 80, 85, 90, 95, 97, 99, or 100% identity to a wild-type site-directed polypeptide (e.g., Cas9 from S. pyogenes, supra) over 10 contiguous amino acids. The site-directed polypeptide can comprise at most: 70, 75, 80, 85, 90, 95, 97, 99, or 100% identity to a wild-type site-directed polypeptide (e.g., Cas9 from S. pyogenes, supra) over 10 contiguous amino acids. The site-directed polypeptide can comprise at least: 70, 75, 80, 85, 90, 95, 97, 99, or 100% identity to a wild-type site-directed polypeptide (e.g., Cas9 from S. pyogenes, supra) over 10 contiguous amino acids in a HNH nuclease domain of the site-directed polypeptide. The site-directed polypeptide can comprise at most: 70, 75, 80, 85, 90, 95, 97, 99, or 100% identity to a wild-type site-directed polypeptide (e.g., Cas9 from S. pyogenes, supra) over 10 contiguous amino acids in a HNH nuclease domain of the site-directed polypeptide. The site-directed polypeptide can comprise at least: 70, 75, 80, 85, 90, 95, 97, 99, or 100% identity to a wild-type site-directed polypeptide (e.g., Cas9 from S. pyogenes, supra) over 10 contiguous amino acids in a RuvC nuclease domain of the site-directed polypeptide. The site-directed polypeptide can comprise at most: 70, 75, 80, 85, 90, 95, 97, 99, or 100% identity to a wild-type site-directed polypeptide (e.g., Cas9 from S. pyogenes, supra) over 10 contiguous amino acids in a RuvC nuclease domain of the site-directed polypeptide.

[0083] The site-directed polypeptide can comprise a modified form of a wild-type exemplary site-directed polypeptide. The modified form of the wild-type exemplary site-directed polypeptide can comprise a mutation that reduces the nucleic acid-cleaving activity of the site-directed polypeptide. The modified form of the wild-type exemplary site-directed polypeptide can have less than 90%, less than 80%, less than 70%, less than 60%, less than 50%, less than 40%, less than 30%, less than 20%, less than 10%, less than 5%, or less than 1% of the nucleic acid-cleaving activity of the wild-type exemplary site-directed polypeptide (e.g., Cas9 from S. pyogenes, supra). The modified form of the site-directed polypeptide can have no substantial nucleic acid-cleaving activity. When a site-directed polypeptide is a modified form that has no substantial nucleic acid-cleaving activity, it is referred to herein as “enzymatically inactive.”

[0084] The modified form of the site-directed polypeptide can comprise a mutation such that it can induce a single-strand break (SSB) on a target nucleic acid (e.g., by cutting only one of the sugar-phosphate backbones of a double-strand target nucleic acid). In some aspects, the mutation can result in less than 90%, less than 80%, less than 70%, less than 60%, less than 50%, less than 40%, less than 30%, less than 20%, less than 10%, less than 5%, or less than 1% of the nucleic acid-cleaving activity in one or more of the plurality of nucleic acid-cleaving domains of the wild-type site directed polypeptide (e.g., Cas9 from S. pyogenes, supra). In some aspects, the mutation can result in one or more of the plurality of nucleic acid-cleaving domains retaining the ability to cleave the complementary strand of the target nucleic acid, but reducing its ability to cleave the non-complementary strand of the target nucleic acid. The mutation can result in one or more of the plurality of nucleic acid-cleaving domains retaining the ability to cleave the non-complementary strand of the target nucleic acid, but reducing its ability to cleave the complementary strand of the target nucleic acid. For example, residues in the wild-type exemplary S. pyogenes Cas9 polypeptide, such as Asp10, His840, Asn854 and Asn856, are mutated to inactivate one or more of the plurality of nucleic acid-cleaving domains (e.g., nuclease domains). The residues to be mutated can correspond to residues Asp10, His840, Asn854 and Asn856 in the wild-type exemplary S. pyogenes Cas9 polypeptide (e.g., as determined by sequence and/or structural alignment). Non-limiting examples of mutations include D1OA, H840A, N854A or N856A. One skilled in the art will recognize that mutations other than alanine substitutions can be suitable.

[0085] In some aspects, a D1OA mutation can be combined with one or more of H840A, N854A, or N856A mutations to produce a site-directed polypeptide substantially lacking DNA cleavage activity. A H840A mutation can be combined with one or more of D1OA, N854A, or N856A mutations to produce a site-directed polypeptide substantially lacking DNA cleavage activity. A N854A mutation can be combined with one or more of H840A, D1OA, or N856A mutations to produce a site-directed polypeptide substantially lacking DNA cleavage activity. A N856A mutation can be combined with one or more of H840A, N854A, or D 10A mutations to produce a site-directed polypeptide substantially lacking DNA cleavage activity. Site-directed polypeptides that comprise one substantially inactive nuclease domain are referred to as “nickases.”

[0086] Nickase variants of RNA-guided endonucleases, for example Cas9, can be used to increase the specificity of CRISPR-mediated genome editing. Wild type Cas9 is typically guided by a single guide RNA designed to hybridize with a specified 20 nucleotide sequence in the target sequence (such as an endogenous genomic locus). However, several mismatches can be tolerated between the guide RNA and the target locus, effectively reducing the length of required homology in the target site to, for example, as little as 13 nt of homology, and thereby resulting in elevated potential for binding and double-strand nucleic acid cleavage by the CRISPR/Cas9 complex elsewhere in the target genome also known as off-target cleavage. Because nickase variants of Cas9 each only cut one strand, in order to create a double-strand break it is necessary for a pair of nickases to bind in close proximity and on opposite strands of the target nucleic acid, thereby creating a pair of nicks, which is the equivalent of a double-strand break. This requires that two separate guide RNAs—one for each nickase—must bind in close proximity and on opposite strands of the target nucleic acid. This requirement essentially doubles the minimum length of homology needed for the double-strand break to occur, thereby reducing the likelihood that a double-strand cleavage event will occur elsewhere in the genome, where the two guide RNA sites—if they exist—are unlikely to be sufficiently close to each other to enable the double-strand break to form. As described in the art, nickases can also be used to promote HDR versus NHEJ. HDR can be used to introduce selected changes into target sites in the genome through the use of specific donor sequences that effectively mediate the desired changes.

[0087] Mutations contemplated can include substitutions, additions, and deletions, or any combination thereof. The mutation converts the mutated amino acid to alanine. The mutation converts the mutated amino acid to another amino acid (e.g., glycine, serine, threonine, cysteine, valine, leucine, isoleucine, methionine, proline, phenylalanine, tyrosine, tryptophan, aspartic acid, glutamic acid, asparagine, glutamine, histidine, lysine, or arginine). The mutation converts the mutated amino acid to a non-natural amino acid (e.g., selenomethionine). The mutation converts the mutated amino acid to amino acid mimics (e.g., phosphomimics). The mutation can be a conservative mutation. For example, the mutation converts the mutated amino acid to amino acids that resemble the size, shape, charge, polarity, conformation, and/or rotamers of the mutated amino acids (e.g., cysteine/serine mutation, lysine/asparagine mutation, histidine/phenylalanine mutation). The mutation can cause a shift in reading frame and/or the creation of a premature stop codon. Mutations can cause changes to regulatory regions of genes or loci that affect expression of one or more genes.

[0088] The site-directed polypeptide (e.g., variant, mutated, enzymatically inactive and/or conditionally enzymatically inactive site-directed polypeptide) can target nucleic acid. The site-directed polypeptide (e.g., variant, mutated, enzymatically inactive and/or conditionally enzymatically inactive endoribonuclease) can target DNA. The site-directed polypeptide (e.g., variant, mutated, enzymatically inactive and/or conditionally enzymatically inactive endoribonuclease) can target RNA.

[0089] The site-directed polypeptide can comprise one or more non-native sequences (e.g., the site-directed polypeptide is a fusion protein).

[0090] The site-directed polypeptide can comprise an amino acid sequence comprising at least 15% amino acid identity to a Cas9 from a bacterium (e.g., S. pyogenes), a nucleic acid binding domain, and two nucleic acid cleaving domains (i.e., a HNH domain and a RuvC domain).

[0091] The site-directed polypeptide can comprise an amino acid sequence comprising at least 15% amino acid identity to a Cas9 from a bacterium (e.g., S. pyogenes), and two nucleic acid cleaving domains (i.e., a HNH domain and a RuvC domain).

[0092] The site-directed polypeptide can comprise an amino acid sequence comprising at least 15% amino acid identity to a Cas9 from a bacterium (e.g., S. pyogenes), and two nucleic acid cleaving domains, wherein one or both of the nucleic acid cleaving domains comprise at least 50% amino acid identity to a nuclease domain from Cas9 from a bacterium (e.g., S. pyogenes).

[0093] The site-directed polypeptide can comprise an amino acid sequence comprising at least 15% amino acid identity to a Cas9 from a bacterium (e.g., S. pyogenes), two nucleic acid cleaving domains (i.e., a HNH domain and a RuvC domain), and a non-native sequence (for example, a nuclear localization signal) or a linker linking the site-directed polypeptide to a non-native sequence.

[0094] The site-directed polypeptide can comprise an amino acid sequence comprising at least 15% amino acid identity to a Cas9 from a bacterium (e.g., S. pyogenes), two nucleic acid cleaving domains (i.e., a HNH domain and a RuvC domain), wherein the site-directed polypeptide comprises a mutation in one or both of the nucleic acid cleaving domains that reduces the cleaving activity of the nuclease domains by at least 50%.

[0095] The site-directed polypeptide can comprise an amino acid sequence comprising at least 15% amino acid identity to a Cas9 from a bacterium (e.g., S. pyogenes), and two nucleic acid cleaving domains (i.e., a HNH domain and a RuvC domain), wherein one of the nuclease domains comprises mutation of aspartic acid 10, and/or wherein one of the nuclease domains can comprise a mutation of histidine 840, and wherein the mutation reduces the cleaving activity of the nuclease domain(s) by at least 50%.

[0096] The one or more site-directed polypeptides, e.g. DNA endonucleases, can comprise two nickases that together effect one double-strand break at a specific locus in the genome, or four nickases that together effect or cause two double-strand breaks at specific loci in the genome. Alternatively, one site-directed polypeptide, e.g. DNA endonuclease, can effect or cause one double-strand break at a specific locus in the genome.

[0097] Non-limiting examples of Cas9 orthologs from other bacterial strains include but are not limited to, Cas proteins identified in Acaryochloris marina MBIC11017; Acetohalobium arabaticum DSM 5501; Acidithiobacillus caldus; Acidithiobacillus ferrooxidans ATCC 23270; Alicyclobacillus acidocaldarius LAA1; Alicyclobacillus acidocaldarius subsp. acidocaldarius DSM 446; Allochromatium vinosum DSM 180; Ammonifex degensii KC4; Anabaena variabilis ATCC 29413; Arthrospira maxima CS-328; Arthrospira platensis str. Paraca; Arthrospira sp. PCC 8005; Bacillus pseudomycoides DSM 12442; Bacillus selenitireducens MLS10; Burkholderiales bacterium 1 1 47; Caldicellulosiruptor becscii DSM 6725; Candidatus Desulforudis audaxviator MP104C; Caldicellulosiruptor hydrothermalis 108; Clostridium phage c-st; Clostridium botulinum A3 str. Loch Maree; Clostridium botulinum Ba4 str. 657; Clostridium difficile QCD-63q42; Crocosphaera watsonii WH 8501; Cyanothece sp. ATCC 51142; Cyanothece sp. CCY0110; Cyanothece sp. PCC 7424; Cyanothece sp. PCC 7822; Exiguobacterium sibiricum 255-15; Finegoldia magna ATCC 29328; Ktedonobacter racemifer DSM 44963; Lactobacillus delbrueckii subsp. bulgaricus PB2003/044-T3-4; Lactobacillus salivarius ATCC 11741; Lisle Ria innocua; Lyngbya sp. PCC 8106; Marinobacler sp. ELB17; Methanohalobium evestigatum Z-7303; Microcystis phage Ma-LMM01; Microcystis aeruginosa NIES-843; Microscilla marina ATCC 23134; Microcoleus chthonoplastes PCC 7420; Neisseria meningitidis; Nitrosococcus halophilus Nc4; Nocardiopsis dassonvillei subsp. dassonvillei DSM 43111; Nodularia spumigena CCY9414; Nostoc sp. PCC 7120; Oscillatoria sp. PCC 6506; Pelotomaculum thermopropionicum SI; Petrotoga mobilis SJ95; Polaromonas naphthalenivorans CJ2; Polaromonas sp. J5666; Pseudoalteromonas haloplanktis TAC125; Streptomyces pristinaespiralis ATCC 25486; Streptomyces pristinaespiralis ATCC 25486; Streptococcus thermophilus; Streptomyces viridochromogenes DSM 40736; Streptosporangium roseum DSM 43021; Synechococcus sp. PCC 7335; and Thermosipho africanus TCF52B (Chylinski et al., RNA Biol., 2013; 10(5): 726-737).

[0098] In addition to Cas9 orthologs, other Cas9 variants such as fusion proteins of inactive dCas9 and effector domains with different functions may be served as a platform for genetic modulation. Any of the foregoing enzymes may be useful in the present disclosure.

[0099] Further examples of endonucleases that may be utilized in the present disclosure are provided in SEQ ID NOs: 1-620. These proteins may be modified before use or may be encoded in a nucleic acid sequence such as a DNA, RNA or mRNA or within a vector construct such as the plasmids or AAV vectors taught herein. Further, they may be codon optimized.

[0100] SEQ ID NOs: 1-620 disclose a non-exhaustive listing of endonuclease sequences. Genome-targeting Nucleic Acid

[0101] The present disclosure provides a genome-targeting nucleic acid that can direct the activities of an associated polypeptide (e.g., a site-directed polypeptide) to a specific target sequence within a target nucleic acid. The genome-targeting nucleic acid can be an RNA. A genome-targeting RNA is referred to as a “guide RNA” or “gRNA” herein. A guide RNA can comprise at least a spacer sequence that hybridizes to a target nucleic acid sequence of interest, and a CRISPR repeat sequence. In Type II systems, the gRNA also comprises a second RNA called the tracrRNA sequence. In the Type II guide RNA (gRNA), the CRISPR repeat sequence and tracrRNA sequence hybridize to each other to form a duplex. In the Type V guide RNA (gRNA), the crRNA forms a duplex. In both systems, the duplex can bind a site-directed polypeptide, such that the guide RNA and site-direct polypeptide form a complex. The genome-targeting nucleic acid can provide target specificity to the complex by virtue of its association with the site-directed polypeptide. The genome-targeting nucleic acid thus can direct the activity of the site-directed polypeptide.

[0102] Exemplary guide RNAs include the spacer sequences in SEQ ID NOs: 5305-76012 of the Sequence Listing. As is understood by the person of ordinary skill in the art, each guide RNA can be designed to include a spacer sequence complementary to its genomic target sequence. For example, each of the spacer sequences in SEQ ID NOs: 5305-76012 of the Sequence Listing can be put into a single RNA chimera or a crRNA (along with a corresponding tracrRNA). See Jinek et al., Science, 337, 816-821 (2012) and Deltcheva et al., Nature, 471, 602-607 (2011).

[0103] The genome-targeting nucleic acid can be a double-molecule guide RNA. The genome-targeting nucleic acid can be a single-molecule guide RNA.

[0104] A double-molecule guide RNA can comprise two strands of RNA. The first strand comprises in the 5′ to 3′ direction, an optional spacer extension sequence, a spacer sequence and a minimum CRISPR repeat sequence. The second strand can comprise a minimum tracrRNA sequence (complementary to the minimum CRISPR repeat sequence), a 3′ tracrRNA sequence and an optional tracrRNA extension sequence.

[0105] A single-molecule guide RNA (sgRNA) in a Type II system can comprise, in the 5′ to 3′ direction, an optional spacer extension sequence, a spacer sequence, a minimum CRISPR repeat sequence, a single-molecule guide linker, a minimum tracrRNA sequence, a 3′ tracrRNA sequence and an optional tracrRNA extension sequence. The optional tracrRNA extension can comprise elements that contribute additional functionality (e.g., stability) to the guide RNA. The single-molecule guide linker can link the minimum CRISPR repeat and the minimum tracrRNA sequence to form a hairpin structure. The optional tracrRNA extension can comprise one or more hairpins.

[0106] The sgRNA can comprise a 20 nucleotide spacer sequence at the 5′ end of the sgRNA sequence. The sgRNA can comprise a less than a 20 nucleotide spacer sequence at the 5′ end of the sgRNA sequence. The sgRNA can comprise a more than 20 nucleotide spacer sequence at the 5′ end of the sgRNA sequence. The sgRNA can comprise a variable length spacer sequence with 17-30 nucleotides at the 5′ end of the sgRNA sequence (see Table 1).

[0107] The sgRNA can comprise no uracil at the 3′end of the sgRNA sequence, such as in SEQ ID NO: 76045 of Table 1. The sgRNA can comprise one or more uracil at the 3′end of the sgRNA sequence, such as in SEQ ID NO: 76046 in Table 1. For example, the sgRNA can comprise 1 uracil (U) at the 3′ end of the sgRNA sequence. The sgRNA can comprise 2 uracil (UU) at the 3′ end of the sgRNA sequence. The sgRNA can comprise 3 uracil (UUU) at the 3′ end of the sgRNA sequence. The sgRNA can comprise 4 uracil (UUUU) at the 3′ end of the sgRNA sequence. The sgRNA can comprise 5 uracil (UUUUU) at the 3′ end of the sgRNA sequence. The sgRNA can comprise 6 uracil (UUUUUU) at the 3′ end of the sgRNA sequence. The sgRNA can comprise 7 uracil ( ) at the 3′ end of the sgRNA sequence. The sgRNA can comprise 8 uracil (U) at the 3′ end of the sgRNA sequence.

[0108] The sgRNA can be unmodified or modified. For example, modified sgRNAs can comprise one or more 2′-O-methyl phosphorothioate nucleotides.

TABLE 1

| SEQ | |
|---|---|
| ID NO. | sgRNA sequence |
| 76044 | nnnnnnnnnnnnnnnnnnnnguuuuagagcuagaaauagcaag |
| | uuaaaauaaggcuaguccguuaucaacuuga aaaaguggcac |
| | cgagucggugcuuuu |
| 76045 | nnnnnnnnnnnnnnnnnnnngutiuuagagcuagaaauagcaa |
| | gutiaaaauaaggcuaguccguuaucaacuuga aaaaguggc |
| | accgagucggugc |
| 76046 | n₍₁₇₋₃₀₎guuuuagagcuagaaauagcaaguuaaaauaaggcua |
| | guccguuaucaacuugaaaaagu |
| | ggcaccgagucggugcu₍₁₋₈₎ |

[0109] A single-molecule guide RNA (sgRNA) in a Type V system can comprise, in the 5′ to 3′ direction, a minimum CRISPR repeat sequence and a spacer sequence.

[0110] By way of illustration, guide RNAs used in the CRISPR/Cas9 or CRISPR/Cpf1 system, or other smaller RNAs can be readily synthesized by chemical means, as illustrated below and described in the art. While chemical synthetic procedures are continually expanding, purifications of such RNAs by procedures such as high performance liquid chromatography (HPLC, which avoids the use of gels such as PAGE) tends to become more challenging as polynucleotide lengths increase significantly beyond a hundred or so nucleotides. One approach used for generating RNAs of greater length is to produce two or more molecules that are ligated together. Much longer RNAs, such as those encoding a Cas9 or Cpf1 endonuclease, are more readily generated enzymatically. Various types of RNA modifications can be introduced during or after chemical synthesis and/or enzymatic generation of RNAs, e.g., modifications that enhance stability, reduce the likelihood or degree of innate immune response, and/or enhance other attributes, as described in the art.

### Spacer Extension Sequence

[0111] In some examples of genome-targeting nucleic acids, a spacer extension sequence can modify activity, provide stability and/or provide a location for modifications of a genome-targeting nucleic acid. A spacer extension sequence can modify on- or off-target activity or specificity. In some examples, a spacer extension sequence can be provided. The spacer extension sequence can have a length of more than 1, 5, 10, 15, 20, 25, 30, 35, 40, 45, 50, 60, 70, 80, 90, 100, 120, 140, 160, 180, 200, 220, 240, 260, 280, 300, 320, 340, 360, 380, 400, 1000, 2000, 3000, 4000, 5000, 6000, or 7000 or more nucleotides. The spacer extension sequence can have a length of less than 1, 5, 10, 15, 20, 25, 30, 35, 40, 45, 50, 60, 70, 80, 90, 100, 120, 140, 160, 180, 200, 220, 240, 260, 280, 300, 320, 340, 360, 380, 400, 1000, 2000, 3000, 4000, 5000, 6000, 7000 or more nucleotides. The spacer extension sequence can be less than 10 nucleotides in length. The spacer extension sequence can be between 10-30 nucleotides in length. The spacer extension sequence can be between 30-70 nucleotides in length.

[0112] The spacer extension sequence can comprise another moiety (e.g., a stability control sequence, an endoribonuclease binding sequence, a ribozyme). The moiety can decrease or increase the stability of a nucleic acid targeting nucleic acid. The moiety can be a transcriptional terminator segment (i.e., a transcription termination sequence). The moiety can function in a eukaryotic cell. The moiety can function in a prokaryotic cell. The moiety can function in both eukaryotic and prokaryotic cells. Non-limiting examples of suitable moieties include: a 5′ cap (e.g., a 7-methylguanylate cap (m7 G)), a riboswitch sequence (e.g., to allow for regulated stability and/or regulated accessibility by proteins and protein complexes), a sequence that forms a dsRNA duplex (i.e., a hairpin), a sequence that targets the RNA to a subcellular location (e.g., nucleus, mitochondria, chloroplasts, and the like), a modification or sequence that provides for tracking (e.g., direct conjugation to a fluorescent molecule, conjugation to a moiety that facilitates fluorescent detection, a sequence that allows for fluorescent detection, etc.), and/or a modification or sequence that provides a binding site for proteins (e.g., proteins that act on DNA, including transcriptional activators, transcriptional repressors, DNA methyltransferases, DNA demethylases, histone acetyltransferases, histone deacetylases, and the like).

### Spacer Sequence

[0113] The spacer sequence hybridizes to a sequence in a target nucleic acid of interest. The spacer of a genome-targeting nucleic acid can interact with a target nucleic acid in a sequence-specific manner via hybridization (i.e., base pairing). The nucleotide sequence of the spacer can vary depending on the sequence of the target nucleic acid of interest.

[0114] In a CRISPR/Cas system herein, the spacer sequence can be designed to hybridize to a target nucleic acid that is located 5′ of a PAM of the Cas9 enzyme used in the system. The spacer may perfectly match the target sequence or may have mismatches. Each Cas9 enzyme has a particular PAM sequence that it recognizes in a target DNA. For example, S. pyogenes recognizes in a target nucleic acid a PAM that comprises the sequence 5′-NRG-3′, where R comprises either A or G, where N is any nucleotide and N is immediately 3′ of the target nucleic acid sequence targeted by the spacer sequence.

[0115] The target nucleic acid sequence can comprise 20 nucleotides. The target nucleic acid can comprise less than 20 nucleotides. The target nucleic acid can comprise more than 20 nucleotides. The target nucleic acid can comprise at least: 5, 10, 15, 16, 17, 18, 19, 20, 21, 22, 23, 24, 25, 30 or more nucleotides. The target nucleic acid can comprise at most: 5, 10, 15, 16, 17, 18, 19, 20, 21, 22, 23, 24, 25, 30 or more nucleotides. The target nucleic acid sequence can comprise 20 bases immediately 5′ of the first nucleotide of the PAM. For example, in a sequence comprising 5′-NN G-3′ (SEQ ID NO: 76043), the target nucleic acid can comprise the sequence that corresponds to the Ns, wherein N is any nucleotide, and the underlined NRG sequence is the S. pyogenes PAM. This target nucleic acid sequence is often referred to as the PAM strand, and the complementary nucleic acid sequence is often referred to the non-PAM strand. One of skill in the art would recognize that the spacer sequence hybridizes to the non-PAM strand of the target nucleic acid (FIGS. 1A and 1B).

[0116] The spacer sequence that hybridizes to the target nucleic acid can have a length of at least about 6 nucleotides (nt). The spacer sequence can be at least about 6 nt, at least about 10 nt, at least about 15 nt, at least about 18 nt, at least about 19 nt, at least about 20 nt, at least about 25 nt, at least about 30 nt, at least about 35 nt or at least about 40 nt, from about 6 nt to about 80 nt, from about 6 nt to about 50 nt, from about 6 nt to about 45 nt, from about 6 nt to about 40 nt, from about 6 nt to about 35 nt, from about 6 nt to about 30 nt, from about 6 nt to about 25 nt, from about 6 nt to about 20 nt, from about 6 nt to about 19 nt, from about 10 nt to about 50 nt, from about 10 nt to about 45 nt, from about 10 nt to about 40 nt, from about 10 nt to about 35 nt, from about 10 nt to about 30 nt, from about 10 nt to about 25 nt, from about 10 nt to about 20 nt, from about 10 nt to about 19 nt, from about 19 nt to about 25 nt, from about 19 nt to about 30 nt, from about 19 nt to about 35 nt, from about 19 nt to about 40 nt, from about 19 nt to about 45 nt, from about 19 nt to about 50 nt, from about 19 nt to about 60 nt, from about 20 nt to about 25 nt, from about 20 nt to about 30 nt, from about 20 nt to about 35 nt, from about 20 nt to about 40 nt, from about 20 nt to about 45 nt, from about 20 nt to about 50 nt, or from about 20 nt to about 60 nt. In some examples, the spacer sequence can comprise 20 nucleotides. In some examples, the spacer can comprise 19 nucleotides. In some examples, the spacer can comprise 18 nucleotides. In some examples, the spacer can comprise 22 nucleotides.

[0117] In some examples, the percent complementarity between the spacer sequence and the target nucleic acid is at least about 30%, at least about 40%, at least about 50%, at least about 60%, at least about 65%, at least about 70%, at least about 75%, at least about 80%, at least about 85%, at least about 90%, at least about 95%, at least about 97%, at least about 98%, at least about 99%, or 100%. In some examples, the percent complementarity between the spacer sequence and the target nucleic acid is at most about 30%, at most about 40%, at most about 50%, at most about 60%, at most about 65%, at most about 70%, at most about 75%, at most about 80%, at most about 85%, at most about 90%, at most about 95%, at most about 97%, at most about 98%, at most about 99%, or 100%. In some examples, the percent complementarity between the spacer sequence and the target nucleic acid is 100% over the six contiguous 5′-most nucleotides of the target sequence of the complementary strand of the target nucleic acid. The percent complementarity between the spacer sequence and the target nucleic acid can be at least 60% over about 20 contiguous nucleotides. The length of the spacer sequence and the target nucleic acid can differ by 1 to 6 nucleotides, which may be thought of as a bulge or bulges.

[0118] The spacer sequence can be designed or chosen using a computer program. The computer program can use variables, such as predicted melting temperature, secondary structure formation, predicted annealing temperature, sequence identity, genomic context, chromatin accessibility, % GC, frequency of genomic occurrence (e.g., of sequences that are identical or are similar but vary in one or more spots as a result of mismatch, insertion or deletion), methylation status, presence of SNPs, and the like.

### Minimum CRISPR Repeat Sequence

[0119] In some aspects, a minimum CRISPR repeat sequence is a sequence with at least about 30%, about 40%, about 50%, about 60%, about 65%, about 70%, about 75%, about 80%, about 85%, about 90%, about 95%, or 100% sequence identity to a reference CRISPR repeat sequence (e.g., crRNA from S. pyogenes).

[0120] In some aspects, a minimum CRISPR repeat sequence comprises nucleotides that can hybridize to a minimum tracrRNA sequence in a cell. The minimum CRISPR repeat sequence and a minimum tracrRNA sequence can form a duplex, i.e. a base-paired double-stranded structure. Together, the minimum CRISPR repeat sequence and the minimum tracrRNA sequence can bind to the site-directed polypeptide. At least a part of the minimum CRISPR repeat sequence can hybridize to the minimum tracrRNA sequence. At least a part of the minimum CRISPR repeat sequence can comprise at least about 30%, about 40%, about 50%, about 60%, about 65%, about 70%, about 75%, about 80%, about 85%, about 90%, about 95%, or 100% complementary to the minimum tracrRNA sequence. In some aspects, at least a part of the minimum CRISPR repeat sequence comprises at most about 30%, about 40%, about 50%, about 60%, about 65%, about 70%, about 75%, about 80%, about 85%, about 90%, about 95%, or 100% complementary to the minimum tracrRNA sequence.

[0121] The minimum CRISPR repeat sequence can have a length from about 7 nucleotides to about 100 nucleotides. For example, the length of the minimum CRISPR repeat sequence is from about 7 nucleotides (nt) to about 50 nt, from about 7 nt to about 40 nt, from about 7 nt to about 30 nt, from about 7 nt to about 25 nt, from about 7 nt to about 20 nt, from about 7 nt to about 15 nt, from about 8 nt to about 40 nt, from about 8 nt to about 30 nt, from about 8 nt to about 25 nt, from about 8 nt to about 20 nt, from about 8 nt to about 15 nt, from about 15 nt to about 100 nt, from about 15 nt to about 80 nt, from about 15 nt to about 50 nt, from about 15 nt to about 40 nt, from about 15 nt to about 30 nt, or from about 15 nt to about 25 nt. In some aspects, the minimum CRISPR repeat sequence is approximately 9 nucleotides in length. In some aspects, the minimum CRISPR repeat sequence is approximately 12 nucleotides in length.

[0122] The minimum CRISPR repeat sequence can be at least about 60% identical to a reference minimum CRISPR repeat sequence (e.g., wild-type crRNA from S. pyogenes) over a stretch of at least 6, 7, or 8 contiguous nucleotides. For example, the minimum CRISPR repeat sequence can be at least about 65% identical, at least about 70% identical, at least about 75% identical, at least about 80% identical, at least about 85% identical, at least about 90% identical, at least about 95% identical, at least about 98% identical, at least about 99% identical or 100% identical to a reference minimum CRISPR repeat sequence over a stretch of at least 6, 7, or 8 contiguous nucleotides.

Minimum tracrRNA Sequence

[0123] A minimum tracrRNA sequence can be a sequence with at least about 30%, about 40%, about 50%, about 60%, about 65%, about 70%, about 75%, about 80%, about 85%, about 90%, about 95%, or 100% sequence identity to a reference tracrRNA sequence (e.g., wild type tracrRNA from S. pyogenes).

[0124] A minimum tracrRNA sequence can comprise nucleotides that hybridize to a minimum CRISPR repeat sequence in a cell. A minimum tracrRNA sequence and a minimum CRISPR repeat sequence form a duplex, i.e. a base-paired double-stranded structure. Together, the minimum tracrRNA sequence and the minimum CRISPR repeat can bind to a site-directed polypeptide. At least a part of the minimum tracrRNA sequence can hybridize to the minimum CRISPR repeat sequence. The minimum tracrRNA sequence can be at least about 30%, about 40%, about 50%, about 60%, about 65%, about 70%, about 75%, about 80%, about 85%, about 90%, about 95%, or 100% complementary to the minimum CRISPR repeat sequence.

[0125] The minimum tracrRNA sequence can have a length from about 7 nucleotides to about 100 nucleotides. For example, the minimum tracrRNA sequence can be from about 7 nucleotides (nt) to about 50 nt, from about 7 nt to about 40 nt, from about 7 nt to about 30 nt, from about 7 nt to about 25 nt, from about 7 nt to about 20 nt, from about 7 nt to about 15 nt, from about 8 nt to about 40 nt, from about 8 nt to about 30 nt, from about 8 nt to about 25 nt, from about 8 nt to about 20 nt, from about 8 nt to about 15 nt, from about 15 nt to about 100 nt, from about 15 nt to about 80 nt, from about 15 nt to about 50 nt, from about 15 nt to about 40 nt, from about 15 nt to about 30 nt or from about 15 nt to about 25 nt long. The minimum tracrRNA sequence can be approximately 9 nucleotides in length. The minimum tracrRNA sequence can be approximately 12 nucleotides. The minimum tracrRNA can consist of tracrRNA nt 23-48 described in Jinek et al., supra.

[0126] The minimum tracrRNA sequence can be at least about 60% identical to a reference minimum tracrRNA (e.g., wild type, tracrRNA from S. pyogenes) sequence over a stretch of at least 6, 7, or 8 contiguous nucleotides. For example, the minimum tracrRNA sequence can be at least about 65% identical, about 70% identical, about 75% identical, about 80% identical, about 85% identical, about 90% identical, about 95% identical, about 98% identical, about 99% identical or 100% identical to a reference minimum tracrRNA sequence over a stretch of at least 6, 7, or 8 contiguous nucleotides.

[0127] The duplex between the minimum CRISPR RNA and the minimum tracrRNA can comprise a double helix. The duplex between the minimum CRISPR RNA and the minimum tracrRNA can comprise at least about 1, 2, 3, 4, 5, 6, 7, 8, 9, or 10 or more nucleotides. The duplex between the minimum CRISPR RNA and the minimum tracrRNA can comprise at most about 1, 2, 3, 4, 5, 6, 7, 8, 9, or 10 or more nucleotides.

[0128] The duplex can comprise a mismatch (i.e., the two strands of the duplex are not 100% complementary). The duplex can comprise at least about 1, 2, 3, 4, or 5 or mismatches. The duplex can comprise at most about 1, 2, 3, 4, or 5 or mismatches. The duplex can comprise no more than 2 mismatches.

### Bulges

[0129] In some cases, there can be a “bulge” in the duplex between the minimum CRISPR RNA and the minimum tracrRNA. A bulge is an unpaired region of nucleotides within the duplex. A bulge can contribute to the binding of the duplex to the site-directed polypeptide. The bulge can comprise, on one side of the duplex, an unpaired 5′-XXXY-3′ where X is any purine and Y comprises a nucleotide that can form a wobble pair with a nucleotide on the opposite strand, and an unpaired nucleotide region on the other side of the duplex. The number of unpaired nucleotides on the two sides of the duplex can be different.

[0130] In one example, the bulge can comprise an unpaired purine (e.g., adenine) on the minimum CRISPR repeat strand of the bulge. In some examples, the bulge can comprise an unpaired 5′-AAGY-3′ of the minimum tracrRNA sequence strand of the bulge, where Y comprises a nucleotide that can form a wobble pairing with a nucleotide on the minimum CRISPR repeat strand.

[0131] A bulge on the minimum CRISPR repeat side of the duplex can comprise at least 1, 2, 3, 4, or 5 or more unpaired nucleotides. A bulge on the minimum CRISPR repeat side of the duplex can comprise at most 1, 2, 3, 4, or 5 or more unpaired nucleotides. A bulge on the minimum CRISPR repeat side of the duplex can comprise 1 unpaired nucleotide.

[0132] A bulge on the minimum tracrRNA sequence side of the duplex can comprise at least 1, 2, 3, 4, 5, 6, 7, 8, 9, or 10 or more unpaired nucleotides. A bulge on the minimum tracrRNA sequence side of the duplex can comprise at most 1, 2, 3, 4, 5, 6, 7, 8, 9, or 10 or more unpaired nucleotides. A bulge on a second side of the duplex (e.g., the minimum tracrRNA sequence side of the duplex) can comprise 4 unpaired nucleotides.

[0133] A bulge can comprise at least one wobble pairing. In some examples, a bulge can comprise at most one wobble pairing. A bulge can comprise at least one purine nucleotide. A bulge can comprise at least 3 purine nucleotides. A bulge sequence can comprise at least 5 purine nucleotides. A bulge sequence can comprise at least one guanine nucleotide. In some examples, a bulge sequence can comprise at least one adenine nucleotide.

### Hairpins

[0134] In various examples, one or more hairpins can be located 3′ to the minimum tracrRNA in the 3′ tracrRNA sequence.

[0135] The hairpin can start at least about 1, 2, 3, 4, 5, 6, 7, 8, 9, 10, 15, or 20 or more nucleotides 3′ from the last paired nucleotide in the minimum CRISPR repeat and minimum tracrRNA sequence duplex. The hairpin can start at most about 1, 2, 3, 4, 5, 6, 7, 8, 9 or 10 or more nucleotides 3′ of the last paired nucleotide in the minimum CRISPR repeat and minimum tracrRNA sequence duplex.

[0136] The hairpin can comprise at least about 1, 2, 3, 4, 5, 6, 7, 8, 9, 10, 15, or 20 or more consecutive nucleotides. The hairpin can comprise at most about 1, 2, 3, 4, 5, 6, 7, 8, 9, 10, 15, or more consecutive nucleotides.

[0137] The hairpin can comprise a CC dinucleotide (i.e., two consecutive cytosine nucleotides).

[0138] The hairpin can comprise duplexed nucleotides (e.g., nucleotides in a hairpin, hybridized together). For example, a hairpin can comprise a CC dinucleotide that is hybridized to a GG dinucleotide in a hairpin duplex of the 3′ tracrRNA sequence.

[0139] One or more of the hairpins can interact with guide RNA-interacting regions of a site-directed polypeptide.

[0140] In some examples, there are two or more hairpins, and in other examples there are three or more hairpins.

3′ tracrRNA Sequence

[0141] A 3′ tracrRNA sequence can comprise a sequence with at least about 30%, about 40%, about 50%, about 60%, about 65%, about 70%, about 75%, about 80%, about 85%, about 90%, about 95%, or 100% sequence identity to a reference tracrRNA sequence (e.g., a tracrRNA from S. pyogenes).

[0142] The 3′ tracrRNA sequence can have a length from about 6 nucleotides to about 100 nucleotides. For example, the 3′ tracrRNA sequence can have a length from about 6 nucleotides (nt) to about 50 nt, from about 6 nt to about 40 nt, from about 6 nt to about 30 nt, from about 6 nt to about 25 nt, from about 6 nt to about 20 nt, from about 6 nt to about 15 nt, from about 8 nt to about 40 nt, from about 8 nt to about 30 nt, from about 8 nt to about 25 nt, from about 8 nt to about 20 nt, from about 8 nt to about 15 nt, from about 15 nt to about 100 nt, from about 15 nt to about 80 nt, from about 15 nt to about 50 nt, from about 15 nt to about 40 nt, from about 15 nt to about 30 nt, or from about 15 nt to about 25 nt. The 3′ tracrRNA sequence can have a length of approximately 14 nucleotides.

[0143] The 3′ tracrRNA sequence can be at least about 60% identical to a reference 3′ tracrRNA sequence (e.g., wild type 3′ tracrRNA sequence from S. pyogenes) over a stretch of at least 6, 7, or 8 contiguous nucleotides. For example, the 3′ tracrRNA sequence can be at least about 60% identical, about 65% identical, about 70% identical, about 75% identical, about 80% identical, about 85% identical, about 90% identical, about 95% identical, about 98% identical, about 99% identical, or 100% identical, to a reference 3′ tracrRNA sequence (e.g., wild type 3′ tracrRNA sequence from S. pyogenes) over a stretch of at least 6, 7, or 8 contiguous nucleotides.

[0144] The 3′ tracrRNA sequence can comprise more than one duplexed region (e.g., hairpin, hybridized region). The 3′ tracrRNA sequence can comprise two duplexed regions.

[0145] The 3′ tracrRNA sequence can comprise a stem loop structure. The stem loop structure in the 3′ tracrRNA can comprise at least 1, 2, 3, 4, 5, 6, 7, 8, 9, 10, 15 or 20 or more nucleotides. The stem loop structure in the 3′ tracrRNA can comprise at most 1, 2, 3, 4, 5, 6, 7, 8, 9 or 10 or more nucleotides. The stem loop structure can comprise a functional moiety. For example, the stem loop structure can comprise an aptamer, a ribozyme, a protein-interacting hairpin, a CRISPR array, an intron, or an exon. The stem loop structure can comprise at least about 1, 2, 3, 4, or 5 or more functional moieties. The stem loop structure can comprise at most about 1, 2, 3, 4, or 5 or more functional moieties.

[0146] The hairpin in the 3′ tracrRNA sequence can comprise a P-domain. In some examples, the P-domain can comprise a double-stranded region in the hairpin. tracrRNA Extension Sequence

[0147] A tracrRNA extension sequence may be provided whether the tracrRNA is in the context of single-molecule guides or double-molecule guides. The tracrRNA extension sequence can have a length from about 1 nucleotide to about 400 nucleotides. The tracrRNA extension sequence can have a length of more than 1, 5, 10, 15, 20, 25, 30, 35, 40, 45, 50, 60, 70, 80, 90, 100, 120, 140, 160, 180, 200, 220, 240, 260, 280, 300, 320, 340, 360, 380, or 400 nucleotides. The tracrRNA extension sequence can have a length from about 20 to about 5000 or more nucleotides. The tracrRNA extension sequence can have a length of more than 1000 nucleotides. The tracrRNA extension sequence can have a length of less than 1, 5, 10, 15, 20, 25, 30, 35, 40, 45, 50, 60, 70, 80, 90, 100, 120, 140, 160, 180, 200, 220, 240, 260, 280, 300, 320, 340, 360, 380, 400 or more nucleotides. The tracrRNA extension sequence can have a length of less than 1000 nucleotides. The tracrRNA extension sequence can comprise less than 10 nucleotides in length. The tracrRNA extension sequence can be 10-30 nucleotides in length. The tracrRNA extension sequence can be 30-70 nucleotides in length.

[0148] The tracrRNA extension sequence can comprise a functional moiety (e.g., a stability control sequence, ribozyme, endoribonuclease binding sequence). The functional moiety can comprise a transcriptional terminator segment (i.e., a transcription termination sequence). The functional moiety can have a total length from about 10 nucleotides (nt) to about 100 nucleotides, from about 10 nt to about 20 nt, from about 20 nt to about 30 nt, from about 30 nt to about 40 nt, from about 40 nt to about 50 nt, from about 50 nt to about 60 nt, from about 60 nt to about 70 nt, from about 70 nt to about 80 nt, from about 80 nt to about 90 nt, or from about 90 nt to about 100 nt, from about 15 nt to about 80 nt, from about 15 nt to about 50 nt, from about 15 nt to about 40 nt, from about 15 nt to about 30 nt, or from about 15 nt to about 25 nt. The functional moiety can function in a eukaryotic cell. The functional moiety can function in a prokaryotic cell. The functional moiety can function in both eukaryotic and prokaryotic cells.

[0149] Non-limiting examples of suitable tracrRNA extension functional moieties include a 3′ poly-adenylated tail, a riboswitch sequence (e.g., to allow for regulated stability and/or regulated accessibility by proteins and protein complexes), a sequence that forms a dsRNA duplex (i.e., a hairpin), a sequence that targets the RNA to a subcellular location (e.g., nucleus, mitochondria, chloroplasts, and the like), a modification or sequence that provides for tracking (e.g., direct conjugation to a fluorescent molecule, conjugation to a moiety that facilitates fluorescent detection, a sequence that allows for fluorescent detection, etc.), and/or a modification or sequence that provides a binding site for proteins (e.g., proteins that act on DNA, including transcriptional activators, transcriptional repressors, DNA methyltransferases, DNA demethylases, histone acetyltransferases, histone deacetylases, and the like). The tracrRNA extension sequence can comprise a primer binding site or a molecular index (e.g., barcode sequence). The tracrRNA extension sequence can comprise one or more affinity tags.

### Single-Molecule Guide Linker Sequence

[0150] The linker sequence of a single-molecule guide nucleic acid can have a length from about 3 nucleotides to about 100 nucleotides. In Jinek et al., supra, for example, a simple 4 nucleotide “tetraloop” (-GAAA-) was used, Science, 337(6096):816-821 (2012). An illustrative linker has a length from about 3 nucleotides (nt) to about 90 nt, from about 3 nt to about 80 nt, from about 3 nt to about 70 nt, from about 3 nt to about 60 nt, from about 3 nt to about 50 nt, from about 3 nt to about 40 nt, from about 3 nt to about 30 nt, from about 3 nt to about 20 nt, from about 3 nt to about 10 nt. For example, the linker can have a length from about 3 nt to about 5 nt, from about 5 nt to about 10 nt, from about 10 nt to about 15 nt, from about 15 nt to about 20 nt, from about 20 nt to about 25 nt, from about 25 nt to about 30 nt, from about 30 nt to about 35 nt, from about 35 nt to about 40 nt, from about 40 nt to about 50 nt, from about 50 nt to about 60 nt, from about 60 nt to about 70 nt, from about 70 nt to about 80 nt, from about 80 nt to about 90 nt, or from about 90 nt to about 100 nt. The linker of a single-molecule guide nucleic acid can be between 4 and 40 nucleotides. The linker can be at least about 100, 500, 1000, 1500, 2000, 2500, 3000, 3500, 4000, 4500, 5000, 5500, 6000, 6500, or 7000 or more nucleotides. The linker can be at most about 100, 500, 1000, 1500, 2000, 2500, 3000, 3500, 4000, 4500, 5000, 5500, 6000, 6500, or 7000 or more nucleotides.

[0151] Linkers can comprise any of a variety of sequences, although in some examples the linker will not comprise sequences that have extensive regions of homology with other portions of the guide RNA, which might cause intramolecular binding that could interfere with other functional regions of the guide. In Jinek et al., supra, a simple 4 nucleotide sequence -GAAA- was used, Science, 337(6096):816-821 (2012), but numerous other sequences, including longer sequences can likewise be used.

[0152] The linker sequence can comprise a functional moiety. For example, the linker sequence can comprise one or more features, including an aptamer, a ribozyme, a protein-interacting hairpin, a protein binding site, a CRISPR array, an intron, or an exon. The linker sequence can comprise at least about 1, 2, 3, 4, or 5 or more functional moieties. In some examples, the linker sequence can comprise at most about 1, 2, 3, 4, or 5 or more functional moieties.

### Nucleic Acid Modifications (Chemical and Structural Modifications)

[0153] In some aspects, polynucleotides introduced into cells can comprise one or more modifications that can be used individually or in combination, for example, to enhance activity, stability or specificity, alter delivery, reduce innate immune responses in host cells, or for other enhancements, as further described herein and known in the art.

[0154] In certain examples, modified polynucleotides can be used in the CRISPR/Cas9 or CRISPR/Cpf1 system, in which case the guide RNAs (either single-molecule guides or double-molecule guides) and/or a DNA or an RNA encoding a Cas9 or Cpf1 endonuclease introduced into a cell can be modified, as described and illustrated below. Such modified polynucleotides can be used in the CRISPR/Cas9 or CRISPR/Cpf1 system to edit any one or more genomic loci.

[0155] Using the CRISPR/Cas9 or CRISPR/Cpf1 system for purposes of non-limiting illustrations of such uses, modifications of guide RNAs can be used to enhance the formation or stability of the CRISPR/Cas9 or CRISPR/Cpf1 genome editing complex comprising guide RNAs, which can be single-molecule guides or double-molecule, and a Cas9 or Cpf1 endonuclease. Modifications of guide RNAs can also or alternatively be used to enhance the initiation, stability or kinetics of interactions between the genome editing complex with the target sequence in the genome, which can be used, for example, to enhance on-target activity. Modifications of guide RNAs can also or alternatively be used to enhance specificity, e.g., the relative rates of genome editing at the on-target site as compared to effects at other (off-target) sites.

[0156] Modifications can also or alternatively be used to increase the stability of a guide RNA, e.g., by increasing its resistance to degradation by ribonucleases (RNases) present in a cell, thereby causing its half-life in the cell to be increased. Modifications enhancing guide RNA half-life can be particularly useful in aspects in which a Cas9 or Cpf1 endonuclease is introduced into the cell to be edited via an RNA that needs to be translated in order to generate endonuclease, because increasing the half-life of guide RNAs introduced at the same time as the RNA encoding the endonuclease can be used to increase the time that the guide RNAs and the encoded Cas9 or Cpf1 endonuclease co-exist in the cell.

[0157] Modifications can also or alternatively be used to decrease the likelihood or degree to which RNAs introduced into cells elicit innate immune responses. Such responses, which have been well characterized in the context of RNA interference (RNAi), including small-interfering RNAs (siRNAs), as described below and in the art, tend to be associated with reduced half-life of the RNA and/or the elicitation of cytokines or other factors associated with immune responses.

[0158] One or more types of modifications can also be made to RNAs encoding an endonuclease that are introduced into a cell, including, without limitation, modifications that enhance the stability of the RNA (such as by increasing its degradation by RNases present in the cell), modifications that enhance translation of the resulting product (i.e. the endonuclease), and/or modifications that decrease the likelihood or degree to which the RNAs introduced into cells elicit innate immune responses.

[0159] Combinations of modifications, such as the foregoing and others, can likewise be used. In the case of CRISPR/Cas9 or CRISPR/Cpf1, for example, one or more types of modifications can be made to guide RNAs (including those exemplified above), and/or one or more types of modifications can be made to RNAs encoding Cas endonuclease (including those exemplified above).

[0160] By way of illustration, guide RNAs used in the CRISPR/Cas9 or CRISPR/Cpf1 system, or other smaller RNAs can be readily synthesized by chemical means, enabling a number of modifications to be readily incorporated, as illustrated below and described in the art. While chemical synthetic procedures are continually expanding, purifications of such RNAs by procedures such as high-performance liquid chromatography (I-IPLC, which avoids the use of gels such as PAGE) tends to become more challenging as polynucleotide lengths increase significantly beyond a hundred or so nucleotides. One approach that can be used for generating chemically-modified RNAs of greater length is to produce two or more molecules that are ligated together. Much longer RNAs, such as those encoding a Cas9 endonuclease, are more readily generated enzymatically. While fewer types of modifications are available for use in enzymatically produced RNAs, there are still modifications that can be used to, e.g., enhance stability, reduce the likelihood or degree of innate immune response, and/or enhance other attributes, as described further below and in the art; and new types of modifications are regularly being developed.

[0161] By way of illustration of various types of modifications, especially those used frequently with smaller chemically synthesized RNAs, modifications can comprise one or more nucleotides modified at the 2′ position of the sugar, in some aspects a 2′-O-alkyl, 2′-O-alkyl-O-alkyl, or 2′-fluoro-modified nucleotide. In some examples, RNA modifications include 2′-fluoro, 2′-amino or 2′-O-methyl modifications on the ribose of pyrimidines, abasic residues, or an inverted base at the 3′ end of the RNA. Such modifications are routinely incorporated into oligonucleotides and these oligonucleotides have been shown to have a higher Tm (i.e., higher target binding affinity) than 2′-deoxyoligonucleotides against a given target.

[0162] A number of nucleotide and nucleoside modifications have been shown to make the oligonucleotide into which they are incorporated more resistant to nuclease digestion than the native oligonucleotide; these modified oligos survive intact for a longer time than unmodified oligonucleotides. Specific examples of modified oligonucleotides include those comprising modified backbones, for example, phosphorothioates, phosphotriesters, methyl phosphonates, short chain alkyl or cycloalkyl intersugar linkages or short chain heteroatomic or heterocyclic intersugar linkages. Some oligonucleotides are oligonucleotides with phosphorothioate backbones and those with heteroatom backbones, particularly CH₂—NHO—CH₂, CH, —N(CH₃)—O—CH₂ (known as a methylene(methylimino) or MIMI backbone), CH₂—O—N(CH₃)—CH₂, CH₂—N(CH₃)—N(CH₃)—CH₂ and O—N(CH₃)—CH₂—CH₂ backbones, wherein the native phosphodiester backbone is represented as 0- P- 0- CH,); amide backbones [see De Mesmaeker et al., Ace. Chem. Res., 28:366-374 (1995)]; morpholino backbone structures (see Summerton and Weller, U.S. Pat. No. 5,034,506); peptide nucleic acid (PNA) backbone (wherein the phosphodiester backbone of the oligonucleotide is replaced with a polyamide backbone, the nucleotides being bound directly or indirectly to the aza nitrogen atoms of the polyamide backbone, see Nielsen et al., Science 1991, 254, 1497). Phosphorus-containing linkages include, but are not limited to, phosphorothioates, chiral phosphorothioates, phosphorodithioates, phosphotriesters, aminoalkylphosphotriesters, methyl and other alkyl phosphonates comprising 3′alkylene phosphonates and chiral phosphonates, phosphinates, phosphoramidates comprising 3′-amino phosphoramidate and aminoalkylphosphoramidates, thionophosphoramidates, thionoalkylphosphonates, thionoalkylphosphotriesters, and boranophosphates having normal 3′-5′ linkages, 2′-5′ linked analogs of these, and those having inverted polarity wherein the adjacent pairs of nucleoside units are linked 3′-5′ to 5′-3′ or 2′-5′ to 5′-2′; see U.S. Pat. Nos. 3,687,808; 4,469,863; 4,476,301; 5,023,243; 5,177,196; 5,188,897; 5,264,423; 5,276,019; 5,278,302; 5,286,717; 5,321,131; 5,399,676; 5,405,939; 5,453,496; 5,455,233; 5,466,677; 5,476,925; 5,519,126; 5,536,821; 5,541,306; 5,550,111; 5,563,253; 5,571,799; 5,587,361; and 5,625,050.

[0163] Morpholino-based oligomeric compounds are described in Braasch and David Corey, Biochemistry, 41(14): 4503-4510 (2002); Genesis, Volume 30, Issue 3, (2001); Heasman, Dev. Biol., 243: 209-214 (2002); Nasevicius et al., Nat. Genet., 26:216-220 (2000); Lacerra et al., Proc. Natl. Acad. Sci., 97: 9591-9596 (2000); and U.S. Pat. No. 5,034,506, issued Jul. 23, 1991.

[0164] Cyclohexenyl nucleic acid oligonucleotide mimetics are described in Wang et al., J. Am. Chem. Soc., 122: 8595-8602 (2000).

[0165] Modified oligonucleotide backbones that do not include a phosphorus atom therein have backbones that are formed by short chain alkyl or cycloalkyl internucleoside linkages, mixed heteroatom and alkyl or cycloalkyl internucleoside linkages, or one or more short chain heteroatomic or heterocyclic internucleoside linkages. These comprise those having morpholino linkages (formed in part from the sugar portion of a nucleoside); siloxane backbones; sulfide, sulfoxide and sulfone backbones; formacetyl and thioformacetyl backbones; methylene formacetyl and thioformacetyl backbones; alkene containing backbones; sulfamate backbones; methyleneimino and methylenehydrazino backbones; sulfonate and sulfonamide backbones; amide backbones; and others having mixed N, O, S, and CH₂ component parts; see U.S. Pat. Nos. 5,034,506; 5,166,315; 5,185,444; 5,214,134; 5,216,141; 5,235,033; 5,264,562; 5,264,564; 5,405,938; 5,434,257; 5,466,677; 5,470,967; 5,489,677; 5,541,307; 5,561,225; 5,596,086; 5,602,240; 5,610,289; 5,602,240; 5,608,046; 5,610,289; 5,618,704; 5,623,070; 5,663,312; 5,633,360; 5,677,437; and 5,677,439.

[0166] One or more substituted sugar moieties can also be included, e.g., one of the following at the 2′ position: OH, SH, SCH₃, F, OCN, OCH₃OCH₃, OCH₃O(CH₂)n CH₃, O(CH₂)n NH₂, or O(CH₂)n CH₃, where n is from 1 to about 10; C1 to C10 lower alkyl, alkoxyalkoxy, substituted lower alkyl, alkaryl or aralkyl; Cl; Br; CN; CF₃; OCF₃; O-, S-, or N-alkyl; O-, S-, or N-alkenyl; SOCH₃; SO₂CH₃; ONO₂; NO₂; N₃; NH₂; heterocycloalkyl; heterocycloalkaryl; aminoalkylamino; polyalkylamino; substituted silyl; an RNA cleaving group; a reporter group; an intercalator; a group for improving the pharmacokinetic properties of an oligonucleotide; or a group for improving the pharmacodynamic properties of an oligonucleotide and other substituents having similar properties. In some aspects, a modification includes 2′-methoxyethoxy (2′-O—CH₂CH₂OCH₃, also known as 2′-O-(2-methoxyethyl)) (Martin et al, HeIv. Chim. Acta, 1995, 78, 486). Other modifications include 2′-methoxy (2′-O—CH₃), 2′-propoxy (2′-OCH₂CH₂CH₃) and 2′-fluoro (2′-F). Similar modifications may also be made at other positions on the oligonucleotide, particularly the 3′ position of the sugar on the 3′ terminal nucleotide and the 5′ position of 5′ terminal nucleotide. Oligonucleotides may also have sugar mimetics, such as cyclobutyls in place of the pentofuranosyl group.

[0167] In some examples, both a sugar and an internucleoside linkage, i.e., the backbone, of the nucleotide units can be replaced with novel groups. The base units can be maintained for hybridization with an appropriate nucleic acid target compound. One such oligomeric compound, an oligonucleotide mimetic that has been shown to have excellent hybridization properties, is referred to as a peptide nucleic acid (PNA). In PNA compounds, the sugar-backbone of an oligonucleotide can be replaced with an amide containing backbone, for example, an aminoethylglycine backbone. The nucleobases can be retained and bound directly or indirectly to aza nitrogen atoms of the amide portion of the backbone. Representative U.S. patents that teach the preparation of PNA compounds comprise, but are not limited to, U.S. Pat. Nos. 5,539,082; 5,714,331; and 5,719,262. Further teaching of PNA compounds can be found in Nielsen et al, Science, 254: 1497-1500 (1991).

[0168] Guide RNAs can also include, additionally or alternatively, nucleobase (often referred to in the art simply as “base”) modifications or substitutions. As used herein, “unmodified” or “natural” nucleobases include adenine (A), guanine (G), thymine (T), cytosine (C), and uracil (U). Modified nucleobases include nucleobases found only infrequently or transiently in natural nucleic acids, e.g., hypoxanthine, 6-methyladenine, 5-Me pyrimidines, particularly 5-methylcytosine (also referred to as 5-methyl-2′ deoxycytosine and often referred to in the art as 5-Me-C), 5-hydroxymethylcytosine (HMC), glycosyl HMC and gentobiosyl HMC, as well as synthetic nucleobases, e.g., 2-aminoadenine, 2-(methylamino) adenine, 2-(imidazolylalkyl)adenine, 2-(aminoalklyamino) adenine or other heterosubstituted alkyl adenines, 2-thiouracil, 2-thiothymine, 5-bromouracil, 5-hydroxymethyluracil, 8-azaguanine, 7-deazaguanine, N6 (6-aminohexyl) adenine, and 2,6-diaminopurine. Kornberg, A., DNA Replication, W. H. Freeman & Co., San Francisco, pp. 75-77 (1980); Gebeyehu et al., Nucl. Acids Res. 15:4513 (1997). A “universal” base known in the art, e.g., inosine, can also be included. 5-Me-C substitutions have been shown to increase nucleic acid duplex stability by 0.6-1.2° C. (Sanghvi, Y. S., in Crooke, S. T. and Lebleu, B., eds., Antisense Research and Applications, CRC Press, Boca Raton, 1993, pp. 276-278) and are aspects of base substitutions.

[0169] Modified nucleobases can comprise other synthetic and natural nucleobases, such as 5-methylcytosine (5-me-C), 5-hydroxymethyl cytosine, xanthine, hypoxanthine, 2-aminoadenine, 6-methyl and other alkyl derivatives of adenine and guanine, 2-propyl and other alkyl derivatives of adenine and guanine, 2-thiouracil, 2-thiothymine and 2-thiocytosine, 5-halouracil and cytosine, 5-propynyl uracil and cytosine, 6-azo uracil, cytosine and thymine, 5-uracil (pseudo-uracil), 4-thiouracil, 8-halo, 8-amino, 8-thiol, 8-thioalkyl, 8-hydroxyl and other 8-substituted adenines and guanines, 5-halo particularly 5-bromo, 5-trifluoromethyl and other 5-substituted uracils and cytosines, 7-methylquanine and 7-methyladenine, 8-azaguanine and 8-azaadenine, 7-deazaguanine and 7-deazaadenine, and 3-deazaguanine and 3-deazaadenine.

[0170] Further, nucleobases can comprise those disclosed in U.S. Pat. No. 3,687,808, those disclosed in ‘The Concise Encyclopedia of Polymer Science And Engineering’, pages 858-859, Kroschwitz, J. I., ed. John Wiley & Sons, 1990, those disclosed by Englisch et al., Angewandle Chemie, International Edition', 1991, 30, page 613, and those disclosed by Sanghvi, Y. S., Chapter 15, Antisense Research and Applications', pages 289-302, Crooke, S. T. and Lebleu, B. ea., CRC Press, 1993. Certain of these nucleobases are particularly useful for increasing the binding affinity of the oligomeric compounds of the present disclosure. These include 5-substituted pyrimidines, 6-azapyrimidines and N-2, N-6 and 0-6 substituted purines, comprising 2-aminopropyladenine, 5-propynyluracil and 5-propynylcytosine. 5-methylcytosine substitutions have been shown to increase nucleic acid duplex stability by 0.6-1.2° C. (Sanghvi, Y. S., Crooke, S. T. and Lebleu, B., eds, ‘Antisense Research and Applications’, CRC Press, Boca Raton, 1993, pp. 276-278) and are aspects of base substitutions, even more particularly when combined with 2′-O-methoxyethyl sugar modifications. Modified nucleobases are described in U.S. Pat. No. 3,687,808, as well as U.S. Pat. Nos. 4,845,205; 5,130,302; 5,134,066; 5,175,273; 5,367,066; 5,432,272; 5,457,187; 5,459,255; 5,484,908; 5,502,177; 5,525,711; 5,552,540; 5,587,469; 5,596,091; 5,614,617; 5,681,941; 5,750,692; 5,763,588; 5,830,653; 6,005,096; and U.S. Patent Application Publication 2003/0158403.

[0171] Thus, the term “modified” refers to a non-natural sugar, phosphate, or base that is incorporated into a guide RNA, an endonuclease, or both a guide RNA and an endonuclease. It is not necessary for all positions in a given oligonucleotide to be uniformly modified, and in fact more than one of the aforementioned modifications can be incorporated in a single oligonucleotide, or even in a single nucleoside within an oligonucleotide.

[0172] The guide RNAs and/or mRNA (or DNA) encoding an endonuclease can be chemically linked to one or more moieties or conjugates that enhance the activity, cellular distribution, or cellular uptake of the oligonucleotide. Such moieties comprise, but are not limited to, lipid moieties such as a cholesterol moiety [Letsinger et al., Proc. Natl. Acad. Sci. USA, 86: 6553-6556 (1989)]; cholic acid [Manoharan et al., Bioorg. Med. Chem. Let., 4: 1053-1060 (1994)]; a thioether, e.g., hexyl-S-tritylthiol [Manoharan et al, Ann. N. Y. Acad. Sci., 660:306-309 (1992) and Manoharan et al., Bioorg. Med. Chem. Let., 3: 2765-2770 (1993)]; a thiocholesterol [Oberhauser et al., Nucl. Acids Res., 20: 533-538 (1992)]; an aliphatic chain, e.g., dodecandiol or undecyl residues [Kabanov et al., FEB S Lett., 259: 327-330 (1990) and Svinarchuk et al., Biochimie, 75: 49-54 (1993)]; a phospholipid, e.g., di-hexadecyl-rac-glycerol or triethylammonium 1,2-di-O-hexadecyl-rac-glycero-3-H-phosphonate [Manoharan et al., Tetrahedron Lett., 36: 3651-3654 (1995) and Shea et al., Nucl. Acids Res., 18: 3777-3783 (1990)]; a polyamine or a polyethylene glycol chain [Mancharan et al., Nucleosides & Nucleotides, 14: 969-973 (1995)]; adamantane acetic acid [Manoharan et al., Tetrahedron Lett., 36: 3651-3654 (1995)]; a palmityl moiety [(Mishra et al., Biochim. Biophys. Acta, 1264: 229237 (1995)]; or an octadecylamine or hexylamino-carbonyl-t oxycholesterol moiety [Crooke et al., J. Pharmacol. Exp. Ther., 277: 923-937 (1996)]. See also U.S. Pat. Nos. 4,828,979; 4,948,882; 5,218,105; 5,525,465; 5,541,313; 5,545,730; 5,552,538; 5,578,717; 5,580,731; 5,580,731; 5,591,584; 5,109,124; 5,118,802; 5,138,045; 5,414,077; 5,486,603; 5,512,439; 5,578,718; 5,608,046; 4,587,044; 4,605,735; 4,667,025; 4,762,779; 4,789,737; 4,824,941; 4,835,263; 4,876,335; 4,904,582; 4,958,013; 5,082,830; 5,112,963; 5,214,136; 5,082,830; 5,112,963; 5,214,136; 5,245,022; 5,254,469; 5,258,506; 5,262,536; 5,272,250; 5,292,873; 5,317,098; 5,371,241; 5,391,723; 5,416,203; 5,451,463; 5,510,475; 5,512,667; 5,514,785; 5,565,552; 5,567,810; 5,574,142; 5,585,481; 5,587,371; 5,595,726; 5,597,696; 5,599,923; 5,599,928 and 5,688,941.

[0173] Sugars and other moieties can be used to target proteins and complexes comprising nucleotides, such as cationic polysomes and liposomes, to particular sites. For example, hepatic cell directed transfer can be mediated via asialoglycoprotein receptors (ASGPRs); see, e.g., Hu, et al., Protein Pept Lett. 21(10):1025-30 (2014). Other systems known in the art and regularly developed can be used to target biomolecules of use in the present case and/or complexes thereof to particular target cells of interest.

[0174] These targeting moieties or conjugates can include conjugate groups covalently bound to functional groups, such as primary or secondary hydroxyl groups. Conjugate groups of the present disclosure include intercalators, reporter molecules, polyamines, polyamides, polyethylene glycols, polyethers, groups that enhance the pharmacodynamic properties of oligomers, and groups that enhance the pharmacokinetic properties of oligomers. Typical conjugate groups include cholesterols, lipids, phospholipids, biotin, phenazine, folate, phenanthridine, anthraquinone, acridine, fluoresceins, rhodamines, coumarins, and dyes. Groups that enhance the pharmacodynamic properties, in the context of this disclosure, include groups that improve uptake, enhance resistance to degradation, and/or strengthen sequence-specific hybridization with the target nucleic acid. Groups that enhance the pharmacokinetic properties, in the context of this present disclosure, include groups that improve uptake, distribution, metabolism or excretion of the compounds of the present disclosure. Representative conjugate groups are disclosed in International Patent Application No. PCT/US92/09196, filed Oct. 23, 1992 (published as WO1993007883), and U.S. Pat. No. 6,287,860. Conjugate moieties include, but are not limited to, lipid moieties such as a cholesterol moiety, cholic acid, a thioether, e.g., hexyl-5-tritylthiol, a thiocholesterol, an aliphatic chain, e.g., dodecandiol or undecyl residues, a phospholipid, e.g., di-hexadecyl-rac-glycerol or triethylammonium 1,2-di-O-hexadecyl-rac-glycero-3-H-phosphonate, a polyamine or a polyethylene glycol chain, or adamantane acetic acid, a palmityl moiety, or an octadecylamine or hexylamino-carbonyl-oxy cholesterol moiety. See, e.g., U.S. Pat. Nos. 4,828,979; 4,948,882; 5,218,105; 5,525,465; 5,541,313; 5,545,730; 5,552,538; 5,578,717, 5,580,731; 5,580,731; 5,591,584; 5,109,124; 5,118,802; 5,138,045; 5,414,077; 5,486,603; 5,512,439; 5,578,718; 5,608,046; 4,587,044; 4,605,735; 4,667,025; 4,762,779; 4,789,737; 4,824,941; 4,835,263; 4,876,335; 4,904,582; 4,958,013; 5,082,830; 5,112,963; 5,214,136; 5,082,830; 5,112,963; 5,214,136; 5,245,022; 5,254,469; 5,258,506; 5,262,536; 5,272,250; 5,292,873; 5,317,098; 5,371,241; 5,391,723; 5,416,203, 5,451,463; 5,510,475; 5,512,667; 5,514,785; 5,565,552; 5,567,810; 5,574,142; 5,585,481; 5,587,371; 5,595,726; 5,597,696; 5,599,923; 5,599,928 and 5,688,941.

[0175] Longer polynucleotides that are less amenable to chemical synthesis and are typically produced by enzymatic synthesis can also be modified by various means. Such modifications can include, for example, the introduction of certain nucleotide analogs, the incorporation of particular sequences or other moieties at the 5′ or 3′ ends of molecules, and other modifications. By way of illustration, the mRNA encoding Cas9 is approximately 4 kb in length and can be synthesized by in vitro transcription. Modifications to the mRNA can be applied to, e.g., increase its translation or stability (such as by increasing its resistance to degradation with a cell), or to reduce the tendency of the RNA to elicit an innate immune response that is often observed in cells following introduction of exogenous RNAs, particularly longer RNAs such as that encoding Cas9.

[0176] Numerous such modifications have been described in the art, such as polyA tails, 5′ cap analogs (e.g., Anti Reverse Cap Analog (ARCA) or m7G(5′)ppp(5′)G (mCAP)), modified 5′ or 3′ untranslated regions (UTRs), use of modified bases (such as Pseudo-UTP, 2-Thio-UTP, 5-Methylcytidine-5′-Triphosphate (5-Methyl-CTP) or N6-Methyl-ATP), or treatment with phosphatase to remove 5′ terminal phosphates. These and other modifications are known in the art, and new modifications of RNAs are regularly being developed.

[0177] There are numerous commercial suppliers of modified RNAs, including for example, TriLink Biotech, AxoLabs, Bio-Synthesis Inc., Dharmacon and many others. As described by TriLink, for example, 5-Methyl-CTP can be used to impart desirable characteristics, such as increased nuclease stability, increased translation or reduced interaction of innate immune receptors with in vitro transcribed RNA. 5-Methyl cyti dine-5′-Triphosphate (5-Methyl-CTP), N6-Methyl-ATP, as well as Pseudo-UTP and 2-Thio-UTP, have also been shown to reduce innate immune stimulation in culture and in vivo while enhancing translation, as illustrated in publications by Kormann el al. and Warren et al. referred to below.

[0178] It has been shown that chemically modified mRNA delivered in vivo can be used to achieve improved therapeutic effects; see, e.g., Kormann et al., Nature Biotechnology 29, 154-157 (2011). Such modifications can be used, for example, to increase the stability of the RNA molecule and/or reduce its immunogenicity. Using chemical modifications such as Pseudo-U, N6-Methyl-A, 2-Thio-U and 5-Methyl-C, it was found that substituting just one quarter of the uridine and cytidine residues with 2-Thio-U and 5-Methyl-C respectively resulted in a significant decrease in toll-like receptor (TLR) mediated recognition of the mRNA in mice. By reducing the activation of the innate immune system, these modifications can be used to effectively increase the stability and longevity of the mRNA in vivo; see, e.g., Kormann et al., supra.

[0179] It has also been shown that repeated administration of synthetic messenger RNAs incorporating modifications designed to bypass innate anti-viral responses can reprogram differentiated human cells to pluripotency. See, e.g., Warren, et al., Cell Stem Cell, 7(5):618-30 (2010). Such modified mRNAs that act as primary reprogramming proteins can be an efficient means of reprogramming multiple human cell types. Such cells are referred to as induced pluripotency stem cells (iPSCs), and it was found that enzymatically synthesized RNA incorporating 5-Methyl-CTP, Pseudo-UTP and an Anti Reverse Cap Analog (ARCA) could be used to effectively evade the cell's antiviral response; see, e.g., Warren et al., supra.

[0180] Other modifications of polynucleotides described in the art include, for example, the use of polyA tails, the addition of 5′ cap analogs (such as m7G(5′)ppp(5′)G (mCAP)), modifications of 5′ or 3′ untranslated regions (UTRs), or treatment with phosphatase to remove 5′ terminal phosphates—and new approaches are regularly being developed.

[0181] A number of compositions and techniques applicable to the generation of modified RNAs for use herein have been developed in connection with the modification of RNA interference (RNAi), including small-interfering RNAs (siRNAs). siRNAs present particular challenges in vivo because their effects on gene silencing via mRNA interference are generally transient, which can require repeat administration. In addition, siRNAs are double-stranded RNAs (dsRNA) and mammalian cells have immune responses that have evolved to detect and neutralize dsRNA, which is often a by-product of viral infection. Thus, there are mammalian enzymes such as PKR (dsRNA-responsive kinase), and potentially retinoic acid-inducible gene I (RIG-I), that can mediate cellular responses to dsRNA, as well as Toll-like receptors (such as TLR3, TLR7 and TLR8) that can trigger the induction of cytokines in response to such molecules; see, e.g., the reviews by Angart et al., Pharmaceuticals (Basel) 6(4): 440-468 (2013); Kanasty et al., Molecular Therapy 20(3): 513-524 (2012); Burnett et al., Biotechnol J. 6(9):1130-46 (2011); Judge and MacLachlan, Hum Gene Ther 19(2):111-24 (2008); and references cited therein.

[0182] A large variety of modifications have been developed and applied to enhance RNA stability, reduce innate immune responses, and/or achieve other benefits that can be useful in connection with the introduction of polynucleotides into human cells, as described herein; see, e.g., the reviews by Whitehead K A et al., Annual Review of Chemical and Biomolecular Engineering, 2: 77-96 (2011); Gaglione and Messere, Mini Rev Med Chem, 10(7):578-95 (2010); Chernolovskaya et al, Curr Opin Mol Ther., 12(2):158-67 (2010); Deleavey et al., Curr Protoc Nucleic Acid Chem Chapter 16:Unit 16.3 (2009); Behlke, Oligonucleotides 18(4):305-19 (2008); Fucini et al., Nucleic Acid Ther 22(3): 205-210 (2012); Bremsen et al., Front Genet 3:154 (2012).

[0183] As noted above, there are a number of commercial suppliers of modified RNAs, many of which have specialized in modifications designed to improve the effectiveness of siRNAs. A variety of approaches are offered based on various findings reported in the literature. For example, Dharmacon notes that replacement of a non-bridging oxygen with sulfur (phosphorothioate, PS) has been extensively used to improve nuclease resistance of siRNAs, as reported by Kole, Nature Reviews Drug Discovery 11:125-140 (2012). Modifications of the 2′-position of the ribose have been reported to improve nuclease resistance of the internucleotide phosphate bond while increasing duplex stability (Tm), which has also been shown to provide protection from immune activation. A combination of moderate PS backbone modifications with small, well-tolerated 2′-substitutions (2′-O-Methyl, 2′-Fluoro, 2′-Hydro) have been associated with highly stable siRNAs for applications in vivo, as reported by Soutschek et al. Nature 432:173-178 (2004); and 2′-O-Methyl modifications have been reported to be effective in improving stability as reported by Volkov, Oligonucleotides 19:191-202 (2009). With respect to decreasing the induction of innate immune responses, modifying specific sequences with 2′-O-Methyl, 2′-Fluoro, 2′-Hydro have been reported to reduce TLR7/TLR8 interaction while generally preserving silencing activity; see, e.g., Judge et al., Mol. Ther. 13:494-505 (2006); and Cekaite et al., J. Mol. Biol. 365:90-108 (2007). Additional modifications, such as 2-thiouracil, pseudouracil, 5-methylcytosine, 5-methyluracil, and N6-methyladenosine have also been shown to minimize the immune effects mediated by TLR3, TLR7, and TLR8; see, e.g., Kariko, K. et al., Immunity 23:165-175 (2005).

[0184] As is also known in the art, and commercially available, a number of conjugates can be applied to polynucleotides, such as RNAs, for use herein that can enhance their delivery and/or uptake by cells, including for example, cholesterol, tocopherol and folic acid, lipids, peptides, polymers, linkers and aptamers; see, e.g., the review by Winkler, Ther. Deliv. 4:791809 (2013), and references cited therein.

### Codon-Optimization

[0185] A polynucleotide encoding a site-directed polypeptide can be codon-optimized according to methods standard in the art for expression in the cell containing the target DNA of interest. For example, if the intended target nucleic acid is in a human cell, a human codon-optimized polynucleotide encoding Cas9 is contemplated for use for producing the Cas9 polypeptide.

### Complexes of a Genome-Targeting Nucleic Acid and a Site-Directed Polypeptide

[0186] A genome-targeting nucleic acid interacts with a site-directed polypeptide (e.g., a nucleic acid-guided nuclease such as Cas9), thereby forming a complex. The genome-targeting nucleic acid guides the site-directed polypeptide to a target nucleic acid.

### Ribonucleoprotein Complexes (RNPs)

[0187] The site-directed polypeptide and genome-targeting nucleic acid can each be administered separately to a cell or a patient. On the other hand, the site-directed polypeptide can be pre-complexed with one or more guide RNAs, or one or more crRNA together with a tracrRNA. The pre-complexed material can then be administered to a cell or a patient. Such pre-complexed material is known as a ribonucleoprotein particle (RNP). The site-directed polypeptide in the RNP can be, for example, a Cas9 endonuclease or a Cpf1 endonuclease. The site-directed polypeptide can be flanked at the N-terminus, the C-terminus, or both the N-terminus and C-terminus by one or more nuclear localization signals (NLSs). For example, a Cas9 endonuclease can be flanked by two NLSs, one NLS located at the N-terminus and the second NLS located at the C-terminus. The NLS can be any NLS known in the art, such as a SV40 NLS. The weight ratio of genome-targeting nucleic acid to site-directed polypeptide in the RNP can be 1:1. For example, the weight ratio of sgRNA to Cas9 endonuclease in the RNP can be 1:1.

### Nucleic Acids Encoding System Components

[0188] The present disclosure provides a nucleic acid comprising a nucleotide sequence encoding a genome-targeting nucleic acid of the disclosure, a site-directed polypeptide of the disclosure, and/or any nucleic acid or proteinaceous molecule necessary to carry out the aspects of the methods of the disclosure.

[0189] The nucleic acid encoding a genome-targeting nucleic acid of the disclosure, a site-directed polypeptide of the disclosure, and/or any nucleic acid or proteinaceous molecule necessary to carry out the aspects of the methods of the disclosure can comprise a vector (e.g., a recombinant expression vector).

[0190] The term “vector” refers to a nucleic acid molecule capable of transporting another nucleic acid to which it has been linked. One type of vector is a “plasmid”, which refers to a circular double-stranded DNA loop into which additional nucleic acid segments can be ligated. Another type of vector is a viral vector, wherein additional nucleic acid segments can be ligated into the viral genome. Certain vectors are capable of autonomous replication in a host cell into which they are introduced (e.g., bacterial vectors having a bacterial origin of replication and episomal mammalian vectors). Other vectors (e.g., non-episomal mammalian vectors) are integrated into the genome of a host cell upon introduction into the host cell, and thereby are replicated along with the host genome.

[0191] In some examples, vectors can be capable of directing the expression of nucleic acids to which they are operatively linked. Such vectors are referred to herein as “recombinant expression vectors”, or more simply “expression vectors”, which serve equivalent functions.

[0192] The term “operably linked” means that the nucleotide sequence of interest is linked to regulatory sequence(s) in a manner that allows for expression of the nucleotide sequence. The term “regulatory sequence” is intended to include, for example, promoters, enhancers and other expression control elements (e.g., polyadenylation signals). Such regulatory sequences are well known in the art and are described, for example, in Goeddel; Gene Expression Technology: Methods in Enzymology 185, Academic Press, San Diego, CA (1990). Regulatory sequences include those that direct constitutive expression of a nucleotide sequence in many types of host cells, and those that direct expression of the nucleotide sequence only in certain host cells (e.g., tissue-specific regulatory sequences). It will be appreciated by those skilled in the art that the design of the expression vector can depend on such factors as the choice of the target cell, the level of expression desired, and the like.

[0193] Expression vectors contemplated include, but are not limited to, viral vectors based on vaccinia virus, poliovirus, adenovirus, adeno-associated virus, SV40, herpes simplex virus, human immunodeficiency virus, retrovirus (e.g., Murine Leukemia Virus, spleen necrosis virus, and vectors derived from retroviruses such as Rous Sarcoma Virus, Harvey Sarcoma Virus, avian leukosis virus, a lentivirus, human immunodeficiency virus, myeloproliferative sarcoma virus, and mammary tumor virus) and other recombinant vectors. Other vectors contemplated for eukaryotic target cells include, but are not limited to, the vectors pXT1, pSG5, pSVK3, pBPV, pMSG, and pSVLSV40 (Pharmacia). Other vectors can be used so long as they are compatible with the host cell.

[0194] In some examples, a vector can comprise one or more transcription and/or translation control elements. Depending on the host/vector system utilized, any of a number of suitable transcription and translation control elements, including constitutive and inducible promoters, transcription enhancer elements, transcription terminators, etc. can be used in the expression vector. The vector can be a self-inactivating vector that either inactivates the viral sequences or the components of the CRISPR machinery or other elements.

[0195] Non-limiting examples of suitable eukaryotic promoters (i.e., promoters functional in a eukaryotic cell) include those from cytomegalovirus (CMV) immediate early, herpes simplex virus (HSV) thymidine kinase, early and late SV40, long terminal repeats (LTRs) from retrovirus, human elongation factor-1 promoter (EF1), a hybrid construct comprising the cytomegalovirus (CMV) enhancer fused to the chicken beta-actin promoter (CAG), murine stem cell virus promoter (MSCV), phosphoglycerate kinase-1 locus promoter (PGK), and mouse metallothionein-I.

[0196] For expressing small RNAs, including guide RNAs used in connection with Cas endonuclease, various promoters such as RNA polymerase III promoters, including for example U6 and H1, can be advantageous. Descriptions of and parameters for enhancing the use of such promoters are known in art, and additional information and approaches are regularly being described; see, e.g., Ma, H. et al., Molecular Therapy—Nucleic Acids 3, ei61 (2014) doi:10.1038/mtna.2014.12.

[0197] The expression vector can also contain a ribosome binding site for translation initiation and a transcription terminator. The expression vector can also comprise appropriate sequences for amplifying expression. The expression vector can also include nucleotide sequences encoding non-native tags (e.g., histidine tag, hemagglutinin tag, green fluorescent protein, etc.) that are fused to the site-directed polypeptide, thus resulting in a fusion protein.

[0198] A promoter can be an inducible promoter (e.g., a heat shock promoter, tetracycline-regulated promoter, steroid-regulated promoter, metal-regulated promoter, estrogen receptor-regulated promoter, etc.). The promoter can be a constitutive promoter (e.g., CMV promoter, UBC promoter). In some cases, the promoter can be a spatially restricted and/or temporally restricted promoter (e.g., a tissue specific promoter, a cell type specific promoter, etc.).

[0199] The nucleic acid encoding a genome-targeting nucleic acid of the disclosure and/or a site-directed polypeptide can be packaged into or on the surface of delivery vehicles for delivery to cells. Delivery vehicles contemplated include, but are not limited to, nanospheres, liposomes, quantum dots, nanoparticles, polyethylene glycol particles, hydrogels, and micelles. As described in the art, a variety of targeting moieties can be used to enhance the preferential interaction of such vehicles with desired cell types or locations.

[0200] Introduction of the complexes, polypeptides, and nucleic acids of the disclosure into cells can occur by viral or bacteriophage infection, transfection, conjugation, protoplast fusion, lipofection, electroporation, nucleofection, calcium phosphate precipitation, polyethyleneimine (PEI)-mediated transfection, DEAE-dextran mediated transfection, liposome-mediated transfection, particle gun technology, calcium phosphate precipitation, direct micro-injection, nanoparticle-mediated nucleic acid delivery, and the like.

### Therapeutic Approach

[0201] Provided herein are methods for treating a patient with pain. An aspect of such method is an ex vivo cell-based therapy. For example, a biopsy of the patient's peripheral nerves is performed. The nerve tissue can be isolated from the patient's skin or leg. Then, a cell of the peripheral nervous system (e.g., a neuron or a glial cell such as Schwann cell in nerves or satellite glial cell in ganglia) is isolated from the biopsied material. Then, the chromosomal DNA of the cell of the peripheral nervous system (e.g., a neuron, or a glial cell such as Schwann cell in nerves or satellite glial cell in ganglia) can be edited using the materials and methods described herein. Finally, the edited cell of the peripheral nervous system (e.g., a neuron or a glial cell such as Schwann cell in nerves or satellite glial cell in ganglia) is implanted into the patient. Any source or type of cell may be used as the progenitor cell.

[0202] Another aspect of such method is an ex vivo cell-based therapy. For example, a patient specific induced pluripotent stem cell (iPSC) can be created. Then, the chromosomal DNA of these iPSC cells can be edited using the materials and methods described herein. Next, the genome-edited iPSCs can be differentiated into cells of the peripheral nervous system (e.g., a neuron or a glial cell such as Schwann cell in nerves or satellite glial cell in ganglia). Finally, the differentiated cells of the peripheral nervous system (e.g., a neuron or a glial cell such as Schwann cell in nerves or satellite glial cell in ganglia) are implanted into the patient.

[0203] Yet another aspect of such method is an ex vivo cell-based therapy. For example, a mesenchymal stem cell can be isolated from the patient, which can be isolated from the patient's bone marrow or peripheral blood. Next, the chromosomal DNA of these mesenchymal stem cells can be edited using the materials and methods described herein. Next, the genome-edited mesenchymal stem cells can be differentiated into cells of the peripheral nervous system (e.g., a neuron or a glial cell such as Schwann cell in nerves or satellite glial cell in ganglia). Finally, the differentiated cells of the peripheral nervous system (e.g., a neuron or a glial cell such as Schwann cell in nerves or satellite glial cell in ganglia) are implanted into the patient.

[0204] One advantage of an ex vivo cell therapy approach is the ability to conduct a comprehensive analysis of the therapeutic prior to administration. Nuclease-based therapeutics can have some level of off-target effects. Performing gene editing ex vivo allows one to characterize the edited cell population prior to implantation. The present disclosure includes sequencing the entire genome of the edited cells to ensure that the off-target effects, if any, can be in genomic locations associated with minimal risk to the patient. Furthermore, populations of specific cells, including clonal populations, can be isolated prior to implantation.

[0205] Another advantage of ex vivo cell therapy relates to genetic modification in iPSCs compared to other primary cell sources. iPSCs are prolific, making it easy to obtain the large number of cells that will be required for a cell-based therapy. Furthermore, iPSCs are an ideal cell type for performing clonal isolations. This allows screening for the correct genomic modification, without risking a decrease in viability. In contrast, other primary cells, such as glial cells, are viable for only a few passages and difficult to clonally expand. Thus, manipulation of iPSCs for the treatment of pain can be much easier, and can shorten the amount of time needed to make the desired genetic modification.

[0206] Methods can also include an in vivo based therapy. Chromosomal DNA of the cells in the patient is edited using the materials and methods described herein. In some aspects, the target cell in an in vivo based therapy is a neuron of the peripheral nervous system.

[0207] Although certain cells present an attractive target for ex vivo treatment and therapy, increased efficacy in delivery may permit direct in vivo delivery to such cells. Ideally the targeting and editing would be directed to the relevant cells. Cleavage in other cells can also be prevented by the use of promoters only active in certain cells and or developmental stages. Additional promoters are inducible, and therefore can be temporally controlled if the nuclease is delivered as a plasmid. The amount of time that delivered RNA and protein remain in the cell can also be adjusted using treatments or domains added to change the half-life. In vivo treatment would eliminate a number of treatment steps, but a lower rate of delivery can require higher rates of editing. In vivo treatment can eliminate problems and losses from ex vivo treatment and engraftment and post-engraftment integration of neurons and glial cells appropriately into existing brain circuits.

[0208] An advantage of in vivo gene therapy can be the ease of therapeutic production and administration. The same therapeutic approach and therapy will have the potential to be used to treat more than one patient, for example a number of patients who share the same or similar genotype or allele. In contrast, ex vivo cell therapy typically requires using a patient's own cells, which are isolated, manipulated and returned to the same patient.

[0209] Also provided herein is a cellular method for editing the SCN10A gene in a cell by genome editing. For example, a cell can be isolated from a patient or animal. Then, the chromosomal DNA of the cell can be edited using the materials and methods described herein.

[0210] The methods provided herein, regardless of whether a cellular or ex vivo or in vivo method, can involve reducing (knock-down) or eliminating (knock-out) the expression of the SCN10A gene by introducing one or more insertions, deletions or mutations within or near the SCN10A gene or other DNA sequences that encode regulatory elements of the SCN10A gene.

[0211] For example, the knock-down or knock-out strategy can involve disrupting the reading frame in the SCN10A gene by introducing random insertions or deletions (indels) that arise due to the imprecise NHEJ repair pathway. This can be achieved by inducing one single stranded break or double stranded break in the SCN10A gene with one or more CRISPR endonucleases and a gRNA (e.g., crRNA+tracrRNA, or sgRNA), or two or more single stranded breaks or double stranded breaks in the SCN10A gene with two or more CRISPR endonucleases and two or more sgRNAs. This approach can require development and optimization of sgRNAs for the SCN10A gene.

[0212] Alternatively, the knock-down or knock-out strategy can also involve deletion of one or more segments within or near the SCN10A gene or other DNA sequences that encode regulatory elements of the SCN10A gene. This deletion strategy requires at least a pair of gRNAs (e.g., crRNA+tracrRNA, or sgRNA) capable of binding to two different sites within or near the SCN10A gene and one or more CRISPR endonucleases. The CRISPR endonucleases, configured with the two gRNAs, induce two double stranded breaks at the desired locations. After cleavage, the two ends, regardless of whether blunt or with overhangs, can be joined by NHEJ, leading to the deletion of the intervening segment. NHEJ repair pathways can lead to insertions, deletions or mutations at the joints.

[0213] In addition to the above genome editing strategies, another strategy involves modulating expression, function, or activity of SCN10A by editing in the regulatory sequence.

[0214] In addition to the editing options listed above, Cas9 or similar proteins can be used to target effector domains to the same target sites that can be identified for editing, or additional target sites within range of the effector domain. A range of chromatin modifying enzymes, methylases or demethylases can be used to alter expression of the target gene. One possibility is decreasing the expression of the SCN10A protein if a mutation leads to undesirable activity. These types of epigenetic regulation have some advantages, particularly as they are limited in possible off-target effects.

[0215] A number of types of genomic target sites can be present in addition to the coding and splicing sequences.

[0216] The regulation of transcription and translation implicates a number of different classes of sites that interact with cellular proteins or nucleotides. Often the DNA binding sites of transcription factors or other proteins can be targeted for mutation or deletion to study the role of the site, though they can also be targeted to change gene expression. Sites can be added through non-homologous end joining NHEJ or direct genome editing by homology directed repair (UDR). Increased use of genome sequencing, RNA expression and genome-wide studies of transcription factor binding have increased our ability to identify how the sites lead to developmental or temporal gene regulation. These control systems can be direct or can involve extensive cooperative regulation that can require the integration of activities from multiple enhancers. Transcription factors typically bind 6-12 bp-long degenerate DNA sequences. The low level of specificity provided by individual sites suggests that complex interactions and rules are involved in binding and the functional outcome. Binding sites with less degeneracy can provide simpler means of regulation. Artificial transcription factors can be designed to specify longer sequences that have less similar sequences in the genome and have lower potential for off-target cleavage. Any of these types of binding sites can be mutated, deleted or even created to enable changes in gene regulation or expression (Canver, M. C. et al., Nature (2015)).

[0217] Another class of gene regulatory regions having these features is microRNA (miRNA) binding sites. miRNAs are non-coding RNAs that play key roles in post-transcriptional gene regulation. miRNA can regulate the expression of 30% of all mammalian protein-encoding genes. Specific and potent gene silencing by double stranded RNA (RNAi) was discovered, plus additional small noncoding RNA (Canver, M. C. et al., Nature (2015)). The largest class of non-coding RNAs important for gene silencing is miRNAs. In mammals, miRNAs are first transcribed as a long RNA transcript, which can be separate transcriptional units, part of protein introns, or other transcripts. The long transcripts are called primary miRNA (pri-miRNA) that include imperfectly base-paired hairpin structures. These pri-miRNA can be cleaved into one or more shorter precursor miRNAs (pre-miRNAs) by Microprocessor, a protein complex in the nucleus, involving Drosha.

[0218] Pre-miRNAs are short stem loops 70 nucleotides in length with a 2-nucleotide 3′-overhang that are exported, into the mature 19-25 nucleotide miRNA:miRNA* duplexes. The miRNA strand with lower base pairing stability (the guide strand) can be loaded onto the RNA-induced silencing complex (RISC). The passenger strand (marked with *), can be functional, but is usually degraded. The mature miRNA tethers RISC to partly complementary sequence motifs in target mRNAs predominantly found within the 3′ untranslated regions (UTRs) and induces posttranscriptional gene silencing (Bartel, D. P. Cell 136, 215-233 (2009); Saj, A. & Lai, E. C. Curr Opin Genet Dev 21, 504-510 (2011)).

[0219] miRNAs can be important in development, differentiation, cell cycle and growth control, and in virtually all biological pathways in mammals and other multicellular organisms. miRNAs can also be involved in cell cycle control, apoptosis and stem cell differentiation, hematopoiesis, hypoxia, muscle development, neurogenesis, insulin secretion, cholesterol metabolism, aging, viral replication and immune responses.

[0220] A single miRNA can target hundreds of different mRNA transcripts, while an individual miRNA transcript can be targeted by many different miRNAs. More than 28645 microRNAs have been annotated in the latest release of miRBase (v.21). Some miRNAs can be encoded by multiple loci, some of which can be expressed from tandemly co-transcribed clusters. The features allow for complex regulatory networks with multiple pathways and feedback controls. miRNAs can be integral parts of these feedback and regulatory circuits and can help regulate gene expression by keeping protein production within limits (Herranz, H. & Cohen, S. M. Genes Dev 24, 1339-1344 (2010); Posadas, D. M. & Carthew, R. W. Curr Opin Genet Dev 27, 1-6 (2014)).

[0221] miRNA can also be important in a large number of human diseases that are associated with abnormal miRNA expression. This association underscores the importance of the miRNA regulatory pathway. Recent miRNA deletion studies have linked miRNA with regulation of the immune responses (Stern-Ginossar, N. et al., Science 317, 376-381 (2007)).

[0222] miRNA also has a strong link to cancer and can play a role in different types of cancer. miRNAs have been found to be downregulated in a number of tumors. miRNA can be important in the regulation of key cancer-related pathways, such as cell cycle control and the DNA damage response, and can therefore be used in diagnosis and can be targeted clinically. MicroRNAs can delicately regulate the balance of angiogenesis, such that experiments depleting all microRNAs suppress tumor angiogenesis (Chen, S. et al., Genes Dev 28, 1054-1067 (2014)).

[0223] As has been shown for protein coding genes, miRNA genes can also be subject to epigenetic changes occurring with cancer. Many miRNA loci can be associated with CpG islands increasing their opportunity for regulation by DNA methylation (Weber, B., Stresemann, C., Brueckner, B. & Lyko, F. Cell Cycle 6, 1001-1005 (2007)). The majority of studies have used treatment with chromatin remodeling drugs to reveal epigenetically silenced miRNAs.

[0224] In addition to their role in RNA silencing, miRNA can also activate translation (Posadas, D. M. & Carthew, R. W. Curr Opin Genet Dev 27, 1-6 (2014)). Knocking out miRNA sites may lead to decreased expression of the targeted gene, while introducing these sites may increase expression.

[0225] Individual miRNA can be knocked out most effectively by mutating the seed sequence (bases 2-8 of the microRNA), which can be important for binding specificity. Cleavage in this region, followed by mis-repair by NHEJ can effectively abolish miRNA function by blocking binding to target sites. miRNA could also be inhibited by specific targeting of the special loop region adjacent to the palindromic sequence. Catalytically inactive Cas9 can also be used to inhibit shRNA expression (Zhao, Y. et al., Sci Rep 4, 3943 (2014)). In addition to targeting the miRNA, the binding sites can also be targeted and mutated to prevent the silencing by miRNA.

[0226] According to the present disclosure, any of the microRNA (miRNA) or their binding sites may be incorporated into the compositions of the invention.

[0227] The compositions may have a region such as, but not limited to, a region comprising the sequence of any of the microRNAs listed in SEQ ID NOs: 632-4715, the reverse complement of the microRNAs listed in SEQ ID NOs: 632-4715 or the microRNA anti-seed region of any of the microRNAs listed in SEQ ID NOs: 632-4715.

[0228] The compositions of the present disclosure may comprise one or more microRNA target sequences, microRNA sequences, or microRNA seeds. Such sequences may correspond to any known microRNA such as those taught in U.S. Publication 2005/0261218 and U.S. Publication 2005/0059005. As a non-limiting example, known microRNAs, their sequences and their binding site sequences in the human genome are listed in SEQ ID NOs: 632-4715.

[0229] A microRNA sequence comprises a “seed” sequence, i.e., a sequence in the region of positions 2-8 of the mature microRNA, which sequence has perfect Watson-Crick complementarity to the miRNA target sequence. A microRNA seed may comprise positions 2-8 or 2-7 of the mature microRNA. In some aspects, a microRNA seed may comprise 7 nucleotides (e.g., nucleotides 2-8 of the mature microRNA), wherein the seed-complementary site in the corresponding miRNA target is flanked by an adenine (A) opposed to microRNA position 1. In some aspects, a microRNA seed may comprise 6 nucleotides (e.g., nucleotides 2-7 of the mature microRNA), wherein the seed-complementary site in the corresponding miRNA target is flanked by an adenine (A) opposed to microRNA position 1. See for example, Grimson A, Farh K K, Johnston W K, Garrett-Engele P, Lim L P, Bartel D P; Mol Cell. 2007 Jul. 6; 27(1):91-105. The bases of the microRNA seed have complete complementarity with the target sequence.

[0230] Identification of microRNA, microRNA target regions, and their expression patterns and role in biology have been reported (Bonauer et al., Curr Drug Targets 2010 11:943-949; Anand and Cheresh Curr Opin Hematol 2011 18:171-176; Contreras and Rao Leukemia 2012 26:404-413 (2011 Dec. 20. doi: 10.1038/leu.2011.356); Bartel Cell 2009 136:215-233; Landgraf et al, Cell, 2007 129:1401-1414; Gentner and Naldini, Tissue Antigens. 2012 80:393-403).

[0231] For example, if the composition is not intended to be delivered to the liver but ends up there, then miR-122, a microRNA abundant in liver, can inhibit the expression of the sequence delivered if one or multiple target sites of miR-122 are engineered into the polynucleotide encoding that target sequence. Introduction of one or multiple binding sites for different microRNA can be engineered to further decrease the longevity, stability, and protein translation hence providing an additional layer of tenability.

[0232] As used herein, the term “microRNA site” refers to a microRNA target site or a microRNA recognition site, or any nucleotide sequence to which a microRNA binds or associates. It should be understood that “binding” may follow traditional Watson-Crick hybridization rules or may reflect any stable association of the microRNA with the target sequence at or adjacent to the microRNA site.

[0233] Conversely, for the purposes of the compositions of the present disclosure, microRNA binding sites can be engineered out of (i.e. removed from) sequences in which they naturally occur in order to increase protein expression in specific tissues.

[0234] Specifically, microRNAs are known to be differentially expressed in immune cells (also called hematopoietic cells), such as antigen presenting cells (APCs) (e.g. dendritic cells and macrophages), macrophages, monocytes, B lymphocytes, T lymphocytes, granulocytes, natural killer cells, etc. Immune cell specific microRNAs are involved in immunogenicity, autoimmunity, the immune-response to infection, inflammation, as well as unwanted immune response after gene therapy and tissue/organ transplantation. Immune cells specific microRNAs also regulate many aspects of development, proliferation, differentiation and apoptosis of hematopoietic cells (immune cells). For example, miR-142 and miR-146 are exclusively expressed in the immune cells, particularly abundant in myeloid dendritic cells. Introducing the miR-142 binding site into the 3′-UTR of a polypeptide of the present disclosure can selectively suppress the gene expression in the antigen presenting cells through miR-142 mediated mRNA degradation, limiting antigen presentation in professional APCs (e.g. dendritic cells) and thereby preventing antigen-mediated immune response after gene delivery (see, Annoni A et al., blood, 2009, 114, 5152-5161).

[0235] In one example, microRNAs binding sites that are known to be expressed in immune cells, in particular, the antigen presenting cells, can be engineered into the polynucleotides to suppress the expression of the polynucleotide in APCs through microRNA mediated RNA degradation, subduing the antigen-mediated immune response, while the expression of the polynucleotide is maintained in non-immune cells where the immune cell specific microRNAs are not expressed.

[0236] Many microRNA expression studies have been conducted, and are described in the art, to profile the differential expression of microRNAs in various cancer cells/tissues and other diseases. Some microRNAs are abnormally over-expressed in certain cancer cells and others are under-expressed. For example, microRNAs are differentially expressed in cancer cells (WO2008/154098, US2013/0059015, US2013/0042333, WO2011/157294); cancer stem cells (US2012/0053224); pancreatic cancers and diseases (US2009/0131348, US2011/0171646, US2010/0286232, U.S. Pat. No. 8,389,210); asthma and inflammation (U.S. Pat. No. 8,415,096); prostate cancer (US2013/0053264); hepatocellular carcinoma (WO2012/151212, US2012/0329672, WO2008/054828, U.S. Pat. No. 8,252,538); lung cancer cells (WO2011/076143, WO2013/033640, WO2009/070653, US2010/0323357); cutaneous T-cell lymphoma (WO2013/011378); colorectal cancer cells (WO2011/0281756, WO2011/076142); cancer positive lymph nodes (WO2009/100430, US2009/0263803); nasopharyngeal carcinoma (EP2112235); chronic obstructive pulmonary disease (US2012/0264626, US2013/0053263); thyroid cancer (WO2013/066678); ovarian cancer cells (US2012/0309645, WO2011/095623); breast cancer cells (WO2008/154098, WO2007/081740, US2012/0214699), leukemia and lymphoma (WO2008/073915, US2009/0092974, US2012/0316081, US2012/0283310, WO2010/018563).

[0237] Non-limiting examples of microRNA sequences and the targeted tissues and/or cells are disclosed in SEQ ID NOs: 632-4715.

### Genome Engineering Strategies

[0238] In some aspects, the methods of the present disclosure can involve editing one or both alleles. Gene editing to modify the allele(s) has the advantage of permanently altering the target gene or gene products.

[0239] A step of the ex vivo methods of the present disclosure can comprise editing the cells of the peripheral nervous system (e.g., a neuron or a glial cell such as Schwann cell in nerves or satellite glial cell in ganglia) isolated from the patient using genome engineering. Alternatively, a step of the ex vivo methods of the present disclosure can comprise editing the patient specific iPSC or mesenchymal stem cell. Likewise, a step of the in vivo methods of the present disclosure involves editing the cells in patients experiencing pain using genome engineering. Similarly, a step in the cellular methods of the present disclosure can comprise editing the SCN10A gene in a human cell by genome engineering.

[0240] Any CRISPR endonuclease may be used in the methods of the present disclosure, each CRISPR endonuclease having its own associated PAM, which may or may not be disease specific.

[0241] For example, expression of the SCN10A gene may be disrupted or eliminated by introducing random insertions or deletions (indels) that arise due to the imprecise NHEJ repair pathway. The target regions may be the coding sequences of the SCN10A gene (i.e., exons). Inserting or deleting nucleotides into the coding sequence of a gene may cause a “frame shift” where the normal 3-letter codon pattern is disturbed. In this way, gene expression and therefore protein production can be reduced or eliminated. This approach may also be used to target any intron, intron:exon junction, or regulatory DNA element of the SCN10A gene where sequence alteration may interfere with the expression of the SCN10A gene.

[0242] As another example, NHEJ can also be used to delete segments of the gene, either directly or by altering splice donor or acceptor sites through cleavage by one gRNA targeting several locations, or several gRNAs. This can be useful if small random indels are inefficient to knock-out the target gene. Pairs of gRNAs have been used for this type of deletions.

[0243] Without a donor present, the ends from a DNA break or ends from different breaks can be joined using the several non-homologous repair pathways in which the DNA ends are joined with little or no base-pairing at the junction. In addition to canonical NHEJ, there are similar repair mechanisms, such as alt-NHEJ. If there are two breaks, the intervening segment can be deleted or inverted. NHEJ repair pathways can lead to insertions, deletions or mutations at the joints.

[0244] NHEJ can also lead to homology-independent target integration. For example, inclusion of a nuclease target site on a donor plasmid can promote integration of a transgene into the chromosomal double-strand break following in vivo nuclease cleavage of both the donor and the chromosome (Cristea., Biotechnol Bioeng. 2013 March; 110(3):871-80). NHEJ was used to insert a 15-kb inducible gene expression cassette into a defined locus in human cell lines after nuclease cleavage. (See e.g., Maresca, M., Lin, V. G., Guo, N. & Yang, Y., Genome Res 23, 539-546 (2013); Cristea et al. Biotechnology and Bioengineering 2013; Suzuki et al. Nature, 540, 144-149 (2016)). The integrated sequence may disrupt the reading frame of the SCN10A gene or alter the structure of the gene.

[0245] As a further alternative, homology directed repair (HDR) can also be used to knock-out a gene or alter the gene function. For example, the HDR knock-out strategy can involve disrupting the structure or function of the SCN10A gene by inserting into the SCN10A gene a non-functional or irrelevant sequence. This can be achieved by inducing one single stranded break or double stranded break in the gene of interest with one or more CRISPR endonucleases and a gRNA (e.g., crRNA+tracrRNA, or sgRNA), or two or more single stranded breaks or double stranded breaks in the gene of interest with one or more CRISPR endonucleases and two or more gRNAs, in the presence of a donor DNA template introduced exogenously to direct the cellular DSB response to Homology-Directed Repair (the donor DNA template can be a short single stranded oligonucleotide, a short double stranded oligonucleotide, a long single or double stranded DNA molecule). This approach can require development and optimization of gRNAs and donor DNA molecules for the SCN10A gene.

[0246] Homology directed repair (HDR) is essentially an error-free mechanism that uses a supplied homologous DNA sequence as a template during DSB repair. The rate of HDR is a function of the distance between the mutation and the cut site so choosing overlapping or nearest target sites is important. Templates can include extra sequences flanked by the homologous regions or can contain a sequence that differs from the genomic sequence, thus allowing sequence editing.

[0247] The most common form of HDR is homologous recombination. There are additional pathways for HDR, including single-strand annealing and alternative-HDR. Genome engineering tools allow researchers to manipulate the cellular homologous recombination pathways to create site-specific modifications to the genome. It has been found that cells can repair a double-stranded break using a synthetic donor molecule provided in trans. Therefore, by introducing a double-stranded break near a specific mutation and providing a suitable donor, targeted changes can be made in the genome. Specific cleavage increases the rate of HDR more than 1,000 fold above the rate of 1 in 10⁶ cells receiving a homologous donor alone. The rate of homology directed repair (HDR) at a particular nucleotide is a function of the distance to the cut site, so choosing overlapping or nearest target sites is important. Gene editing offers the advantage over gene addition, as editing in situ leaves the rest of the genome unperturbed.

[0248] Supplied donors for editing by HDR vary markedly but can contain the intended sequence with small or large flanking homology arms to allow annealing to the genomic DNA. The homology regions flanking the introduced genetic changes can be 30 bp or smaller, or as large as a multi-kilobase cassette that can contain promoters, cDNAs, etc. Both single-stranded and double-stranded oligonucleotide donors have been used. These oligonucleotides range in size from less than 100 nt to over many kb, though longer ssDNA can also be generated and used. Double-stranded donors can be used, including PCR amplicons, plasmids, and mini-circles. In general, it has been found that an AAV vector can be a very effective means of delivery of a donor template, though the packaging limits for individual donors is <5 kb. Active transcription of the donor increased HDR three-fold, indicating the inclusion of promoter may increase conversion. Conversely, CpG methylation of the donor decreased gene expression and HDR.

[0249] In addition to wild-type endonucleases, such as Cas9, nickase variants exist that have one or the other nuclease domain inactivated resulting in cutting of only one DNA strand. HDR can be directed from individual C as nickases or using pairs of nickases that flank the target area. Donors can be single-stranded, nicked, or dsDNA.

[0250] The donor DNA can be supplied with the nuclease or independently by a variety of different methods, for example by transfection, nano-particle, micro-injection, or viral transduction. A range of tethering options has been proposed to increase the availability of the donors for HDR. Examples include attaching the donor to the nuclease, attaching to DNA binding proteins that bind nearby, or attaching to proteins that are involved in DNA end binding or repair.

[0251] The repair pathway choice can be guided by a number of culture conditions, such as those that influence cell cycling, or by targeting of DNA repair and associated proteins. For example, to increase HDR, key NHEJ molecules can be suppressed, such as KU70, KU80 or DNA lipase IV.

[0252] In addition to genome editing by NHEJ or HDR, site-specific gene insertions have been conducted that use both the NHEJ pathway and HDR. A combination approach may be applicable in certain settings, possibly including intron/exon borders. NHEJ may prove effective for ligation in the intron, while the error-free HDR may be better suited in the coding region.

[0253] The SCN10A gene contains a number of exons as shown in Table 3. Any one or more of these exons or nearby introns can be targeted in order to create one or more indels that disrupt the reading frame and eventually eliminate the abnormal SCN10A protein activity.

[0254] In some aspects, the methods can provide gRNA pairs that make a deletion by cutting the gene twice at locations flanking an unwanted sequence. This sequence may include one or more exons, introns, intron:exon junctions, other DNA sequences encoding regulatory elements of the SCN10A gene or combinations thereof. The cutting can be accomplished by a pair of DNA endonucleases that each makes a DSB in the genome, or by multiple nickases that together make a DSB in the genome.

[0255] Alternatively, the methods can provide one gRNA to make one double-strand cut within a coding or splicing sequence. The double-strand cut can be made by a single DNA endonuclease or multiple nickases that together make a DSB in the genome.

[0256] Splicing donor and acceptors are generally within 100 base pairs of the neighboring intron. In some examples, methods can provide gRNAs that cut approximately +/−100-3100 bp with respect to each exon/intron junction of interest.

[0257] For any of the genome editing strategies, gene editing can be confirmed by sequencing or PCR analysis.

### Target Sequence Selection

[0258] Shifts in the location of the 5′ boundary and/or the 3′ boundary relative to particular reference loci can be used to facilitate or enhance particular applications of gene editing, which depend in part on the endonuclease system selected for the editing, as further described and illustrated herein.

[0259] In a first non-limiting example of such target sequence selection, many endonuclease systems have rules or criteria that can guide the initial selection of potential target sites for cleavage, such as the requirement of a PAM sequence motif in a particular position adjacent to the DNA cleavage sites in the case of CRISPR Type II or Type V endonucleases.

[0260] In another non-limiting example of target sequence selection or optimization, the frequency of off-target activity for a particular combination of target sequence and gene editing endonuclease (i.e. the frequency of DSBs occurring at sites other than the selected target sequence) can be assessed relative to the frequency of on-target activity. In some cases, cells that have been correctly edited at the desired locus can have a selective advantage relative to other cells. Illustrative, but non-limiting, examples of a selective advantage include the acquisition of attributes such as enhanced rates of replication, persistence, resistance to certain conditions, enhanced rates of successful engraftment or persistence in vivo following introduction into a patient, and other attributes associated with the maintenance or increased numbers or viability of such cells. In other cases, cells that have been correctly edited at the desired locus can be positively selected for by one or more screening methods used to identify, sort or otherwise select for cells that have been correctly edited. Both selective advantage and directed selection methods can take advantage of the phenotype associated with the alteration. In some cases, cells can be edited two or more times in order to create a second modification that creates a new phenotype that is used to select or purify the intended population of cells. Such a second modification could be created by adding a second gRNA enabling expresssion of a selectable or screenable marker. In some cases, cells can be correctly edited at the desired locus using a DNA fragment that contains the cDNA and also a selectable marker.

[0261] Whether any selective advantage is applicable or any directed selection is to be applied in a particular case, target sequence selection can also be guided by consideration of off-target frequencies in order to enhance the effectiveness of the application and/or reduce the potential for undesired alterations at sites other than the desired target. As described further and illustrated herein and in the art, the occurrence of off-target activity can be influenced by a number of factors including similarities and dissimilarities between the target site and various off-target sites, as well as the particular endonuclease used. Bioinformatics tools are available that assist in the prediction of off-target activity, and frequently such tools can also be used to identify the most likely sites of off-target activity, which can then be assessed in experimental settings to evaluate relative frequencies of off-target to on-target activity, thereby allowing the selection of sequences that have higher relative on-target activities. Illustrative examples of such techniques are provided herein, and others are known in the art.

[0262] Another aspect of target sequence selection relates to homologous recombination events. Sequences sharing regions of homology can serve as focal points for homologous recombination events that result in deletion of intervening sequences. Such recombination events occur during the normal course of replication of chromosomes and other DNA sequences, and also at other times when DNA sequences are being synthesized, such as in the case of repairs of double-strand breaks (DSBs), which occur on a regular basis during the normal cell replication cycle but can also be enhanced by the occurrence of various events (such as UV light and other inducers of DNA breakage) or the presence of certain agents (such as various chemical inducers). Many such inducers cause DSBs to occur indiscriminately in the genome, and DSBs can be regularly induced and repaired in normal cells. During repair, the original sequence can be reconstructed with complete fidelity, however, in some cases, small insertions or deletions (referred to as “indels”) are introduced at the DSB site.

[0263] DSBs can also be specifically induced at particular locations, as in the case of the endonucleases systems described herein, which can be used to cause directed or preferential gene modification events at selected chromosomal locations. The tendency for homologous sequences to be subject to recombination in the context of DNA repair (as well as replication) can be taken advantage of in a number of circumstances, and is the basis for one application of gene editing systems, such as CRISPR, in which homology directed repair is used to insert a sequence of interest, provided through use of a “donor” polynucleotide, into a desired chromosomal location.

[0264] Regions of homology between particular sequences, which can be small regions of “microhomology” that can comprise as few as ten base pairs or less, can also be used to bring about desired deletions. For example, a single DSB can be introduced at a site that exhibits microhomology with a nearby sequence. During the normal course of repair of such DSB, a result that occurs with high frequency is the deletion of the intervening sequence as a result of recombination being facilitated by the DSB and concomitant cellular repair process.

[0265] In some circumstances, however, selecting target sequences within regions of homology can also give rise to much larger deletions, including gene fusions (when the deletions are in coding regions), which may or may not be desired given the particular circumstances.

[0266] The examples provided herein further illustrate the selection of various target regions for the creation of DSBs designed to induce insertions, deletions or mutations that result in reduction or elimination of SCN10A protein activity, as well as the selection of specific target sequences within such regions that are designed to minimize off-target events relative to on-target events.

### Human Cells

[0267] For ameliorating pain or any disorder associated with SCN10A, as described and illustrated herein, the principal targets for gene editing are human cells. For example, in the ex vivo methods, the human cells can be somatic cells, which after being modified using the techniques as described, can give rise to differentiated cells, e.g., neurons of the peripheral nervous system or progenitor cells. For example, in the in vivo methods, the human cells may be neurons of the peripheral nervous system, or cells from other affected organs.

[0268] By performing gene editing in autologous cells that are derived from and therefore already completely matched with the patient in need, it is possible to generate cells that can be safely re-introduced into the patient, and effectively give rise to a population of cells that will be effective in ameliorating one or more clinical conditions associated with the patient's disease.

[0269] Stem cells are capable of both proliferation and giving rise to more progenitor cells, these in turn having the ability to generate a large number of mother cells that can in turn give rise to differentiated or differentiable daughter cells. The daughter cells themselves can be induced to proliferate and produce progeny that subsequently differentiate into one or more mature cell types, while also retaining one or more cells with parental developmental potential. The term “stem cell” refers then, to a cell with the capacity or potential, under particular circumstances, to differentiate to a more specialized or differentiated phenotype, and which retains the capacity, under certain circumstances, to proliferate without substantially differentiating. In one aspect, the term progenitor or stem cell refers to a generalized mother cell whose descendants (progeny) specialize, often in different directions, by differentiation, e.g., by acquiring completely individual characters, as occurs in progressive diversification of embryonic cells and tissues. Cellular differentiation is a complex process typically occurring through many cell divisions. A differentiated cell may derive from a multipotent cell that itself is derived from a multipotent cell, and so on. While each of these multipotent cells may be considered stem cells, the range of cell types that each can give rise to may vary considerably. Some differentiated cells also have the capacity to give rise to cells of greater developmental potential. Such capacity may be natural or may be induced artificially upon treatment with various factors. In many biological instances, stem cells can also be “multipotent” because they can produce progeny of more than one distinct cell type, but this is not required for “stem-ness.”

[0270] Self-renewal can be another important aspect of the stem cell. In theory, self-renewal can occur by either of two major mechanisms. Stem cells can divide asymmetrically, with one daughter retaining the stem state and the other daughter expressing some distinct other specific function and phenotype. Alternatively, some of the stem cells in a population can divide symmetrically into two stems, thus maintaining some stem cells in the population as a whole, while other cells in the population give rise to differentiated progeny only. Generally, “progenitor cells” have a cellular phenotype that is more primitive (i.e., is at an earlier step along a developmental pathway or progression than is a fully differentiated cell). Often, progenitor cells also have significant or very high-proliferative potential. Progenitor cells can give rise to multiple distinct differentiated cell types or to a single differentiated cell type, depending on the developmental pathway and on the environment in which the cells develop and differentiate.

[0271] In the context of cell ontogeny, the adjective “differentiated,” or “differentiating” is a relative term. A “differentiated cell” is a cell that has progressed further down the developmental pathway than the cell to which it is being compared. Thus, stem cells can differentiate into lineage-restricted precursor cells (such as a neural progenitor cell), which in turn can differentiate into other types of precursor cells further down the pathway (such as a neural precursor), and then to an end-stage differentiated cell, such as a neural, which plays a characteristic role in a certain tissue type, and may or may not retain the capacity to proliferate further.

### Induced Pluripotent Stem Cells

[0272] The genetically engineered human cells described herein can be induced pluripotent stem cells (iPSCs). An advantage of using iPSCs is that the cells can be derived from the same subject to which the progenitor cells are to be administered. That is, a somatic cell can be obtained from a subject, reprogrammed to an induced pluripotent stem cell, and then re-differentiated into a progenitor cell to be administered to the subject (e.g., autologous cells). Because the progenitors are essentially derived from an autologous source, the risk of engraftment rejection or allergic response can be reduced compared to the use of cells from another subject or group of subjects. In addition, the use of iPSCs negates the need for cells obtained from an embryonic source. Thus, in one aspect, the stem cells used in the disclosed methods are not embryonic stem cells.

[0273] Although differentiation is generally irreversible under physiological contexts, several methods have been recently developed to reprogram somatic cells to iPSCs. Exemplary methods are known to those of skill in the art and are described briefly herein below.

[0274] The term “reprogramming” refers to a process that alters or reverses the differentiation state of a differentiated cell (e.g., a somatic cell). Stated another way, reprogramming refers to a process of driving the differentiation of a cell backwards to a more undifferentiated or more primitive type of cell. It should be noted that placing many primary cells in culture can lead to some loss of fully differentiated characteristics. Thus, simply culturing such cells included in the term differentiated cells does not render these cells non-differentiated cells (e.g., undifferentiated cells) or pluripotent cells. The transition of a differentiated cell to pluripotency requires a reprogramming stimulus beyond the stimuli that lead to partial loss of differentiated character in culture. Reprogrammed cells also have the characteristic of the capacity of extended passaging without loss of growth potential, relative to primary cell parents, which generally have capacity for only a limited number of divisions in culture.

[0275] The cell to be reprogrammed can be either partially or terminally differentiated prior to reprogramming. Reprogramming can encompass complete reversion of the differentiation state of a differentiated cell (e.g., a somatic cell) to a pluripotent state or a multipotent state. Reprogramming can encompass complete or partial reversion of the differentiation state of a differentiated cell (e.g., a somatic cell) to an undifferentiated cell (e.g., an embryonic-like cell). Reprogramming can result in expression of particular genes by the cells, the expression of which further contributes to reprogramming. In certain examples described herein, reprogramming of a differentiated cell (e.g., a somatic cell) can cause the differentiated cell to assume an undifferentiated state (e.g., is an undifferentiated cell). The resulting cells are referred to as “reprogrammed cells,” or “induced pluripotent stem cells (iPSCs or iPS cells).”

[0276] Reprogramming can involve alteration, e.g., reversal, of at least some of the heritable patterns of nucleic acid modification (e.g., methylation), chromatin condensation, epigenetic changes, genomic imprinting, etc., that occur during cellular differentiation. Reprogramming is distinct from simply maintaining the existing undifferentiated state of a cell that is already pluripotent or maintaining the existing less than fully differentiated state of a cell that is already a multipotent cell (e.g., a myogenic stem cell). Reprogramming is also distinct from promoting the self-renewal or proliferation of cells that are already pluripotent or multipotent, although the compositions and methods described herein can also be of use for such purposes, in some examples.

[0277] Many methods are known in the art that can be used to generate pluripotent stem cells from somatic cells. Any such method that reprograms a somatic cell to the pluripotent phenotype would be appropriate for use in the methods described herein.

[0278] Reprogramming methodologies for generating pluripotent cells using defined combinations of transcription factors have been described. Mouse somatic cells can be converted to ES cell-like cells with expanded developmental potential by the direct transduction of Oct4, Sox2, Klf4, and c-Myc; see, e.g., Takahashi and Yamanaka, Cell 126(4): 663-76 (2006). iPSCs resemble ES cells, as they restore the pluripotency-associated transcriptional circuitry and much of the epigenetic landscape. In addition, mouse iPSCs satisfy all the standard assays for pluripotency: specifically, in vitro differentiation into cell types of the three germ layers, teratoma formation, contribution to chimeras, germline transmission [see, e.g., Maherali and Hochedlinger, Cell Stem Cell. 3(6):595-605 (2008)], and tetraploid complementation.

[0279] Human iPSCs can be obtained using similar transduction methods, and the transcription factor trio, OCT4, SOX2, and NANOG, has been established as the core set of transcription factors that govern pluripotency; see, e.g., Budniatzky and Gepstein, Stem Cells Transl Med. 3(4):448-57 (2014); Barrett et al., Stem Cells Trans Med 3:1-6 sctm.2014-0121 (2014); Focosi et al., Blood Cancer Journal 4: e211 (2014); and references cited therein. The production of iPSCs can be achieved by the introduction of nucleic acid sequences encoding stem cell-associated genes into an adult, somatic cell, historically using viral vectors.

[0280] iPSCs can be generated or derived from terminally differentiated somatic cells, as well as from adult stem cells, or somatic stem cells. That is, a non-pluripotent progenitor cell can be rendered pluripotent or multipotent by reprogramming. In such instances, it may not be necessary to include as many reprogramming factors as required to reprogram a terminally differentiated cell. Further, reprogramming can be induced by the non-viral introduction of reprogramming factors, e.g., by introducing the proteins themselves, or by introducing nucleic acids that encode the reprogramming factors, or by introducing messenger RNAs that upon translation produce the reprogramming factors (see e.g., Warren et al., Cell Stem Cell, 7(5):618-30 (2010). Reprogramming can be achieved by introducing a combination of nucleic acids encoding stem cell-associated genes, including, for example, Oct-4 (also known as Oct-3/4 or Pouf51), Sox1, Sox2, Sox3, Sox 15, Sox 18, NANOG, Klf1, Klf2, Klf4, Klf5, NR5A2, c-Myc, 1-Myc, n-Myc, Rem2, Tert, and LIN28. Reprogramming using the methods and compositions described herein can further comprise introducing one or more of Oct-3/4, a member of the Sox family, a member of the Klf family, and a member of the Myc family to a somatic cell. The methods and compositions described herein can further comprise introducing one or more of each of Oct-4, Sox2, Nanog, c-MYC and Klf4 for reprogramming. As noted above, the exact method used for reprogramming is not necessarily critical to the methods and compositions described herein. However, where cells differentiated from the reprogrammed cells are to be used in, e.g., human therapy, in one aspect the reprogramming is not effected by a method that alters the genome. Thus, in such examples, reprogramming can be achieved, e.g., without the use of viral or plasmid vectors.

[0281] The efficiency of reprogramming (i.e., the number of reprogrammed cells) derived from a population of starting cells can be enhanced by the addition of various agents, e.g., small molecules, as shown by Shi et al., Cell-Stem Cell 2:525-528 (2008); Huangfu et al., Nature Biotechnology 26(7):795-797 (2008) and Marson et al., Cell-Stem Cell 3: 132-135 (2008). Thus, an agent or combination of agents that enhance the efficiency or rate of induced pluripotent stem cell production can be used in the production of patient-specific or disease-specific iPSCs. Some non-limiting examples of agents that enhance reprogramming efficiency include soluble Wnt, Wnt conditioned media, BIX-01294 (a G9a histone methyltransferase), PD0325901 (a MEK inhibitor), DNA methyltransferase inhibitors, histone deacetylase (HDAC) inhibitors, valproic acid, 5′-azacytidine, dexamethasone, suberoylanilide, hydroxamic acid (SAHA), vitamin C, and trichostatin (TSA), among others.

[0282] Other non-limiting examples of reprogramming enhancing agents include: Suberoylanilide Hydroxamic Acid (SAHA (e.g., MK0683, vorinostat) and other hydroxamic acids), BML-210, Depudecin (e.g., (−)-Depudecin), HC Toxin, Nullscript (4-(1,3-Dioxo-1H,3H-benzo[de]isoquinolin-2-yl)-N-hydroxybutanamide), Phenylbutyrate (e.g., sodium phenylbutyrate) and Valproic Acid ((VP A) and other short chain fatty acids), Scriptaid, Suramin Sodium, Trichostatin A (TSA), APHA Compound 8, Apicidin, Sodium Butyrate, pivaloyloxymethyl butyrate (Pivanex, AN-9), Trapoxin B, Chlamydocin, Depsipeptide (also known as FR901228 or FK228), benzamides (e.g., CI-994 (e.g., N-acetyl dinaline) and MS-27-275), MGCD0103, NVP-LAQ-824, CBHA (m-carboxycinnaminic acid bishydroxamic acid), JNJ16241199, Tubacin, A-161906, proxamide, oxamflatin, 3-Cl-UCHA (e.g., 6-(3-chl orophenylureido) caproic hydroxamic acid), AOE (2-amino-8-oxo-9, 10-epoxydecanoic acid), CHAP31 and CHAP 50. Other reprogramming enhancing agents include, for example, dominant negative forms of the HDACs (e.g., catalytically inactive forms), siRNA inhibitors of the HDACs, and antibodies that specifically bind to the HDACs. Such inhibitors are available, e.g., from BIOMOL International, Fukasawa, Merck Biosciences, Novara s, Gloucester Pharmaceuticals, Titan Pharmaceuticals, MethylGene, and Sigma Aldrich.

[0283] To confirm the induction of pluripotent stem cells for use with the methods described herein, isolated clones can be tested for the expression of a stem cell marker. Such expression in a cell derived from a somatic cell identifies the cells as induced pluripotent stem cells. Stem cell markers can be selected from the non-limiting group including SSEA3, SSEA4, CD9, Nanog, Fbx15, Ecatl, Esgl, Eras, Gdf3, Fgf4, Cripto, Daxl, Zpf296, Slc2a3, Rexl, Utfl, and Natl. In one case, for example, a cell that expresses Oct4 or Nanog is identified as pluripotent. Methods for detecting the expression of such markers can include, for example, RT-PCR and immunological methods that detect the presence of the encoded polypeptides, such as Western blots or flow cytometric analyses. Detection can involve not only RT-PCR, but can also include detection of protein markers. Intracellular markers may be best identified via RT-PCR, or protein detection methods such as immunocytochemistry, while cell surface markers are readily identified, e.g., by immunocytochemistry.

[0284] The pluripotent stem cell character of isolated cells can be confirmed by tests evaluating the ability of the iPSCs to differentiate into cells of each of the three germ layers. As one example, teratoma formation in nude mice can be used to evaluate the pluripotent character of the isolated clones. The cells can be introduced into nude mice and histology and/or immunohistochemistry can be performed on a tumor arising from the cells. The growth of a tumor comprising cells from all three germ layers, for example, further indicates that the cells are pluripotent stem cells.

### Cells of the Peripheral Nervous System

[0285] In some aspects, the genetically engineered human cells described herein are neurons and nerves outside of the brain and spinal cord. Neurons, which process information, and glial cells, which provide mechanical and metabolic support to the nervous system, are the two main classes of cells of the peripheral nervous system. Non-limiting examples of neurons include sensory neurons (collect impulses from the sensory receptors in areas such as skin, muscles, and organs and carries those impulses through the nerves to the CNS) and motor neurons (collect outgoing messages from the CNS and delivers them to the appropriate body organs, instructing them what action needs to be taken). Non-limiting examples of glial cells include Schwann cells in nerves or satellite cells in ganglia.

Creating Patient Specific iPSCs

[0286] One step of the ex vivo methods of the present disclosure can involve creating a patient specific iPS cell, patient specific iPS cells, or a patient specific iPS cell line. There are many established methods in the art for creating patient specific iPS cells, as described in Takahashi and Yamanaka 2006; Takahashi, Tanabe et al. 2007. For example, the creating step can comprise: a) isolating a somatic cell, such as a skin cell or fibroblast, from the patient; and b) introducing a set of pluripotency-associated genes into the somatic cell in order to induce the cell to become a pluripotent stem cell. The set of pluripotency-associated genes can be one or more of the genes selected from the group consisting of OCT4, SOX1, SOX2, SOX3, SOX15, SOX18, NANOG, KLF1, KLF2, KLF4, KLF5, c-MYC, n-MYC, REM2, TERT and LIN28.

### Performing a Biopsy or Aspirate of the Patient's Tissue

[0287] A biopsy or aspirate is a sample of tissue or fluid taken from the body. There are many different kinds of biopsies or aspirates. Nearly all of them involve using a sharp tool to remove a small amount of tissue. If the biopsy will be on the skin or other sensitive area, numbing medicine can be applied first. A biopsy or aspirate may be performed according to any of the known methods in the art. For example, in a bone marrow aspirate, a large needle is used to enter the pelvis bone to collect bone marrow. For example, in the case of a nerve biopsy from skin or leg to isolate neurons of the peripheral nervous system, the nerve segment is excised inflicting minimal mechanical injury. Squeezing or stretching the nerve is avoided and excessive removal of fat or connective tissue is not attempted.

### Isolating a Neuron of the Peripheral Nervous System

[0288] Neurons of the peripheral nervous system may be isolated according to any known method in the art. For example, the nerve segment is excised inflicting minimal mechanical injury under aseptic conditions. Squeezing or stretching the nerve is strictly avoided and excessive removal of fat or connective tissue is not attempted. Since, nerve fibers are very sensitive to mechanical injury, the proximal nerve cut is performed first. Following the isolation, the outermost connective tissue layer, the epineurium, is removed and collected for enzymatic digestion. The fibers are teased with the help of fine forceps until all fascicles are separated into individual fibers. The epineurium and teased fibers are then subjected to enzymatic digestion overnight with dispase II and type I collagenase. The digested products are filtered and collected by centrifugation. The resulting cell suspensions are plated onto adhesive PLL/laminin substrate. The adherent cells are cultured for analysis (Andersen et al., Scientific Reports-Nature, 2016, 6:31781).

### Isolating a Mesenchymal Stem Cell

[0289] Mesenchymal stem cells can be isolated according to any method known in the art, such as from a patient's bone marrow or peripheral blood. For example, marrow aspirate can be collected into a syringe with heparin. Cells can be washed and centrifuged on a Percoll. The cells can be cultured in Dulbecco's modified Eagle's medium (DMEM) (low glucose) containing 10% fetal bovine serum (FBS) (Pittinger M E, Mackay A M, Beck S C et al., Science 1999; 284:143-147).

### Genetically Modified Cells

[0290] The term “genetically modified cell” refers to a cell that comprises at least one genetic modification introduced by genome editing (e.g., using the CRISPR/Cas9 or CRISPR/Cpf1 system). In some ex vivo examples herein, the genetically modified cell can be genetically modified progenitor cell. In some in vivo examples herein, the genetically modified cell can be a genetically modified neuron of the peripheral nervous system. A genetically modified cell comprising an exogenous genome-targeting nucleic acid and/or an exogenous nucleic acid encoding a genome-targeting nucleic acid is contemplated herein.

[0291] The term “control treated population” describes a population of cells that has been treated with identical media, viral induction, nucleic acid sequences, temperature, confluency, flask size, pH, etc., with the exception of the addition of the genome editing components. Any method known in the art can be used to measure transcription of SCNI OA gene or protein expression or activity, for example Western Blot analysis of the SCN10A protein or real time PCR for quantifying SCN10A mRNA.

[0292] The term “isolated cell” refers to a cell that has been removed from an organism in which it was originally found, or a descendant of such a cell. Optionally, the cell can be cultured in vitro, e.g., under defined conditions or in the presence of other cells. Optionally, the cell can be later introduced into a second organism or re-introduced into the organism from which it (or the cell from which it is descended) was isolated.

[0293] The term “isolated population” with respect to an isolated population of cells refers to a population of cells that has been removed and separated from a mixed or heterogeneous population of cells. In some cases, the isolated population can be a substantially pure population of cells, as compared to the heterogeneous population from which the cells were isolated or enriched. In some cases, the isolated population can be an isolated population of human progenitor cells, e.g., a substantially pure population of human progenitor cells, as compared to a heterogeneous population of cells comprising human progenitor cells and cells from which the human progenitor cells were derived.

[0294] The term “substantially enhanced,” with respect to a particular cell population, refers to a population of cells in which the occurrence of a particular type of cell is increased relative to pre-existing or reference levels, by at least 2-fold, at least 3-, at least 4-, at least 5-, at least 6-, at least 7-, at least 8-, at least 9, at least 10-, at least 20-, at least 50-, at least 100-, at least 400-, at least 1000-, at least 5000-, at least 20000-, at least 100000- or more fold depending, e.g., on the desired levels of such cells for ameliorating pain.

[0295] The term “substantially enriched” with respect to a particular cell population, refers to a population of cells that is at least about 10%, about 20%, about 30%, about 40%, about 50%, about 60%, about 70% or more with respect to the cells making up a total cell population.

[0296] The term “substantially pure” with respect to a particular cell population, refers to a population of cells that is at least about 75%, at least about 85%, at least about 90%, or at least about 95% pure, with respect to the cells making up a total cell population. That is, the terms “substantially pure” or “essentially purified,” with regard to a population of progenitor cells, refers to a population of cells that contain fewer than about 20%, about 15%, about 10%, about 9%, about 8%, about 7%, about 6%, about 5%, about 4%, about 3%, about 2%, about 1%, or less than 1%, of cells that are not progenitor cells as defined by the terms herein.

Differentiation of Genome-Edited iPSCs into Cells of the Peripheral Nervous System

[0297] Another step of the ex vivo methods of the present disclosure can comprise differentiating the genome-edited iPSCs into cells of the peripheral nervous system (e.g., a neuron or a glial cell such as Schwann cell in nerves or satellite glial cell in ganglia). The differentiating step may be performed according to any method known in the art. For example, neuronal differentiation of iPSCs is induced using a combination of brain-derived neurotrophic factor (BDNF), glial cell-derived neurotrophic factor (GDNF), nerve growth factor (NGF) and dibutyryl cyclic AMP (dbcAMP). Then, the iPSCs-derived neural cells are further differentiated into Schwann cells using ciliary neurotrophic factor (CNTF), neuregulin 113 and dbcAMP (Wang et al., Biomaterials. 2011; 32(22): 5023-5032).

Differentiation Qf Genome-Edited Mesenchymal Stem Cells into Cells of the Peripheral Nervous System

[0298] Another step of the ex vivo methods of the present disclosure can comprise differentiating the genome-edited mesenchymal stem cells into cells of the peripheral nervous system (e.g., a neuron or a glial cell such as Schwann cell in nerves or satellite glial cell in ganglia). The differentiating step may be performed according to any method known in the art. For example, MSC are treated with various factors and hormones, including basic fibroblast growth factor, human recombinant platelet derived growth factor, forskolin, and glial growth factor-2 (Ladak et al., Experimental Neurology 228 (2011) 242-252).

Implanting Cells into Patients

[0299] Another step of the ex vivo methods of the present disclosure can comprise implanting the genome-edited neurons of the peripheral nervous system into patients. This implanting step may be accomplished using any method of implantation known in the art. For example, the genetically modified cells may be injected directly in the patient's blood or otherwise administered to the patient.

### III. Formulations and Delivery

### Pharmaceutically Acceptable Carriers

[0300] The ex vivo methods of administering progenitor cells to a subject contemplated herein involve the use of therapeutic compositions comprising progenitor cells.

[0301] Therapeutic compositions can contain a physiologically tolerable carrier together with the cell composition, and optionally at least one additional bioactive agent as described herein, dissolved or dispersed therein as an active ingredient. In some cases, the therapeutic composition is not substantially immunogenic when administered to a mammal or human patient for therapeutic purposes, unless so desired.

[0302] In general, the progenitor cells described herein can be administered as a suspension with a pharmaceutically acceptable carrier. One of skill in the art will recognize that a pharmaceutically acceptable carrier to be used in a cell composition will not include buffers, compounds, cryopreservation agents, preservatives, or other agents in amounts that substantially interfere with the viability of the cells to be delivered to the subject. A formulation comprising cells can include e.g., osmotic buffers that permit cell membrane integrity to be maintained, and optionally, nutrients to maintain cell viability or enhance engraftment upon administration. Such formulations and suspensions are known to those of skill in the art and/or can be adapted for use with the progenitor cells, as described herein, using routine experimentation.

[0303] A cell composition can also be emulsified or presented as a liposome composition, provided that the emulsification procedure does not adversely affect cell viability. The cells and any other active ingredient can be mixed with excipients that are pharmaceutically acceptable and compatible with the active ingredient, and in amounts suitable for use in the therapeutic methods described herein.

[0304] Additional agents included in a cell composition can include pharmaceutically acceptable salts of the components therein. Pharmaceutically acceptable salts include the acid addition salts (formed with the free amino groups of the polypeptide) that are formed with inorganic acids, such as, for example, hydrochloric or phosphoric acids, or such organic acids as acetic, tartaric, mandelic and the like. Salts formed with the free carboxyl groups can also be derived from inorganic bases, such as, for example, sodium, potassium, ammonium, calcium or ferric hydroxides, and such organic bases as isopropyl amine, trimethylamine, 2-ethylamino ethanol, histidine, procaine and the like.

[0305] Physiologically tolerable carriers are well known in the art. Exemplary liquid carriers are sterile aqueous solutions that contain no materials in addition to the active ingredients and water, or contain a buffer such as sodium phosphate at physiological pH value, physiological saline or both, such as phosphate-buffered saline. Still further, aqueous carriers can contain more than one buffer salt, as well as salts such as sodium and potassium chlorides, dextrose, polyethylene glycol and other solutes. Liquid compositions can also contain liquid phases in addition to and to the exclusion of water. Exemplary of such additional liquid phases are glycerin, vegetable oils such as cottonseed oil, and water-oil emulsions. The amount of an active compound used in the cell compositions that is effective in the treatment of a particular disorder or condition can depend on the nature of the disorder or condition, and can be determined by standard clinical techniques.

### Guide RNA Formulation

[0306] Guide RNAs of the present disclosure can be formulated with pharmaceutically acceptable excipients such as carriers, solvents, stabilizers, adjuvants, diluents, etc., depending upon the particular mode of administration and dosage form. Guide RNA compositions can be formulated to achieve a physiologically compatible pH, and range from a pH of about 3 to a pH of about 11, about pH 3 to about pH 7, depending on the formulation and route of administration. In some cases, the pH can be adjusted to a range from about pH 5.0 to about pH 8. In some cases, the compositions can comprise a therapeutically effective amount of at least one compound as described herein, together with one or more pharmaceutically acceptable excipients. Optionally, the compositions can comprise a combination of the compounds described herein, or can include a second active ingredient useful in the treatment or prevention of bacterial growth (for example and without limitation, anti-bacterial or anti-microbial agents), or can include a combination of reagents of the present disclosure.

[0307] Suitable excipients include, for example, carrier molecules that include large, slowly metabolized macromolecules such as proteins, polysaccharides, polylactic acids, polyglycolic acids, polymeric amino acids, amino acid copolymers, and inactive virus particles. Other exemplary excipients can include antioxidants (for example and without limitation, ascorbic acid), chelating agents (for example and without limitation, EDTA), carbohydrates (for example and without limitation, dextrin, hydroxyalkylcellulose, and hydroxyalkylmethylcellulose), stearic acid, liquids (for example and without limitation, oils, water, saline, glycerol and ethanol), wetting or emulsifying agents, pH buffering substances, and the like.

### Delivery

[0308] Guide RNA polynucleotides (RNA or DNA) and/or endonuclease polynucleotide(s) (RNA or DNA) can be delivered by viral or non-viral delivery vehicles known in the art. Alternatively, endonuclease polypeptide(s) can be delivered by viral or non-viral delivery vehicles known in the art, such as electroporation or lipid nanoparticles. In further alternative aspects, the DNA endonuclease can be delivered as one or more polypeptides, either alone or pre-complexed with one or more guide RNAs, or one or more crRNA together with a tracrRNA.

[0309] Polynucleotides can be delivered by non-viral delivery vehicles including, but not limited to, nanoparticles, liposomes, ribonucleoproteins, positively charged peptides, small molecule RNA-conjugates, aptamer-RNA chimeras, and RNA-fusion protein complexes. Some exemplary non-viral delivery vehicles are described in Peer and Lieberman, Gene Therapy, 18: 1127-1133 (2011) (which focuses on non-viral delivery vehicles for siRNA that are also useful for delivery of other polynucleotides).

[0310] For polynucleotides of the present disclosure, the formulation may be selected from any of those taught, for example, in International Application PCT/US2012/069610.

[0311] Polynucleotides, such as guide RNA, sgRNA, and mRNA encoding an endonuclease, may be delivered to a cell or a patient by a lipid nanoparticle (LNP).

[0312] A LNP refers to any particle having a diameter of less than 1000 nm, 500 nm, 250 nm, 200 nm, 150 nm, 100 nm, 75 nm, 50 nm, or 25 nm. Alternatively, a nanoparticle may range in size from 1-1000 nm, 1-500 nm, 1-250 nm, 25-200 nm, 25-100 nm, 35-75 nm, or 25-60 nm.

[0313] LNPs may be made from cationic, anionic, or neutral lipids. Neutral lipids, such as the fusogenic phospholipid DOPE or the membrane component cholesterol, may be included in LNPs as ‘helper lipids’ to enhance transfection activity and nanoparticle stability. Limitations of cationic lipids include low efficacy owing to poor stability and rapid clearance, as well as the generation of inflammatory or anti-inflammatory responses.

[0314] LNPs may also be comprised of hydrophobic lipids, hydrophilic lipids, or both hydrophobic and hydrophilic lipids.

[0315] Any lipid or combination of lipids that are known in the art can be used to produce a LNP. Examples of lipids used to produce LNPs are: DOTMA, DOSPA, DOTAP, DMRIE, DC-cholesterol, DOTAP-cholesterol, GAP-DMORIE-DPyPE, and GL67A-DOPE-DMPE polyethylene glycol (PEG). Examples of cationic lipids are: 98N12-5, C12-200, DLin-KC2-DMA (KC2), DLin-MC3-DMA (MC3), XTC, MD1, and 7C1. Examples of neutral lipids are: DPSC, DPPC, POPC, DOPE, and SM. Examples of PEG-modified lipids are: PEG-DMG, PEG-CerC14, and PEG-CerC20.

[0316] The lipids can be combined in any number of molar ratios to produce a LNP. In addition, the polynucleotide(s) can be combined with lipid(s) in a wide range of molar ratios to produce a LNP.

[0317] As stated previously, the site-directed polypeptide and genome-targeting nucleic acid can each be administered separately to a cell or a patient. On the other hand, the site-directed polypeptide can be pre-complexed with one or more guide RNAs, or one or more crRNA together with a tracrRNA. The pre-complexed material can then be administered to a cell or a patient. Such pre-complexed material is known as a ribonucleoprotein particle (RNP).

[0318] RNA is capable of forming specific interactions with RNA or DNA. While this property is exploited in many biological processes, it also comes with the risk of promiscuous interactions in a nucleic acid-rich cellular environment. One solution to this problem is the formation of ribonucleoprotein particles (RNPs), in which the RNA is pre-complexed with an endonuclease. Another benefit of the RNP is protection of the RNA from degradation.

[0319] The endonuclease in the RNP can be modified or unmodified. Likewise, the gRNA, crRNA, tracrRNA, or sgRNA can be modified or unmodified. Numerous modifications are known in the art and can be used.

[0320] The endonuclease and sgRNA can be generally combined in a 1:1 molar ratio. Alternatively, the endonuclease, crRNA and tracrRNA can be generally combined in a 1:1:1 molar ratio. However, a wide range of molar ratios can be used to produce a RNP.

### AAV (Adeno Associated Virus)

[0321] A recombinant adeno-associated virus (AAV) vector can be used for delivery. Techniques to produce rAAV particles, in which an AAV genome to be packaged that includes the polynucleotide to be delivered, rep and cap genes, and helper virus functions are provided to a cell are standard in the art. Production of rAAV typically requires that the following components are present within a single cell (denoted herein as a packaging cell): a rAAV genome, AAV rep and cap genes separate from (i.e., not in) the rAAV genome, and helper virus functions. The AAV rep and cap genes may be from any AAV serotype for which recombinant virus can be derived, and may be from a different AAV serotype than the rAAV genome ITRs, including, but not limited to, AAV serotypes described herein. Production of pseudotyped rAAV is disclosed in, for example, international patent application publication number WO 01/83692.

### AAV Serotypes

[0322] AAV particles packaging polynucleotides encoding compositions of the present disclosure, e.g., endonucleases, donor sequences, or RNA guide molecules, of the present disclosure may comprise or be derived from any natural or recombinant AAV serotype. According to the present disclosure, the AAV particles may utilize or be based on a serotype selected from any of the following serotypes, and variants thereof including but not limited to AAV1, AAV10, AAV106.1/hu.37, AAV11, AAV114.3/hu.40, AAV12, AAV127.2/hu.41, AAV127.5/hu.42, AAV128.1/hu.43, AAV128.3/hu.44, AAV130.4/hu.48, AAV145.1/hu.53, AAV145.5/hu.54, AAV145.6/hu.55, AAV16.12/hu. 11, AAV16.3, AAV16.8/hu.10, AAV161.10/hu.60, AAV161.6/hu.61, AAV1-7/rh.48, AAV1-8/rh.49, AAV2, AAV2.5T, AAV2-15/rh.62, AAV223.1, AAV223.2, AAV223.4, AAV223.5, AAV223.6, AAV223.7, AAV2-3/rh.61, AAV24.1, AAV2-4/rh.50, AAV2-5/rh.51, AAV27.3, AAV29.3/bb.1, AAV29.5/bb.2, AAV2G9, AAV-2-pre-miRNA-101, AAV3, AAV3.1/hu.6, AAV3.1/hu.9, AAV3-11/rh.53, AAV3-3, AAV33.12/hu.17, AAV33.4/hu.15, AAV33.8/hu.16, AAV3-9/rh.52, AAV3a, AAV3b, AAV4, AAV4-19/rh.55, AAV42.12, AAV42-10, AAV42-11, AAV42-12, AAV42-13, AAV42-15, AAV42-lb, AAV42-2, AAV42-3a, AAV42-3b, AAV42-4, AAV42-5a, AAV42-5b, AAV42-6b, AAV42-8, AAV42-aa, AAV43-1, AAV43-12, AAV43-20, AAV43-21, AAV43-23, AAV43-25, AAV43-5, AAV4-4, AAV44.1, AAV44.2, AAV44.5, AAV46.2/hu.28, AAV46.6/hu.29, AAV4-8/r11.64, AAV4-8/rh.64, AAV4-9/rh.54, AAV5, AAV52.1/hu.20, AAV52/hu.19, AAV5-22/rh.58, AAV5-3/rh.57, AAV54.1/hu.21, AAV54.2/hu.22, AAV54.4R/hu.27, AAV54.5/hu.23, AAV54.7/hu.24, AAV58.2/hu.25, AAV6, AAV6.1, AAV6.1.2, AAV6.2, AAV7, AAV7.2, AAV7.3/hu.7, AAV8, AAV-8b, AAV-8h, AAV9, AAV9.11, AAV9.13, AAV9.16, AAV9.24, AAV9.45, AAV9.47, AAV9.61, AAV9.68, AAV9.84, AAV9.9, AAVA3.3, AAVA3.4, AAVA3.5, AAVA3.7, AAV-b, AAVC1, AAVC2, AAVC5, AAVCh.5, AAVCh.5R1, AAVcy.2, AAVcy.3, AAVcy.4, AAVcy.5, AAVCy.5R1, AAVCy.5R2, AAVCy.5R3, AAVCy.5R4, AAVcy.6, AAV-DJ, AAV-DJ8, AAVF3, AAVFS, AAV-h, AAVH-1/hu.1, AAVH2, AAVH-5/hu.3, AAVH6, AAVhE1.1, AAVhER1.14, AAVhEr1.16, AAVhEr1.18, AAVhER1.23, AAVhEr1.35, AAVhEr1.36, AAVhEr1.5, AAVhEr1.7, AAVhEr1.8, AAVhEr2.16, AAVhEr2.29, AAVhEr2.30, AAVhEr2.31, AAVhEr2.36, AAVhEr2.4, AAVhEr3.1, AAVhu.1, AAVhu.10, AAVhu.11, AAVhu.11, AAVhu.12, AAVhu.13, AAVhu.14/9, AAVhu.15, AAVhu.16, AAVhu.17, AAVhu.18, AAVhu.19, AAVhu.2, AAVhu.20, AAVhu.21, AAVhu.22, AAVhu.23.2, AAVhu.24, AAVhu.25, AAVhu.27, AAVhu.28, AAVhu.29, AAVhu.29R, AAVhu.3, AAVhu.31, AAVhu.32, AAVhu.34, AAVhu.35, AAVhu.37, AAVhu.39, AAVhu.4, AAVhu.40, AAVhu.41, AAVhu.42, AAVhu.43, AAVhu.44, AAVhu.44R1, AAVhu.44R2, AAVhu.44R3, AAVhu.45, AAVhu.46, AAVhu.47, AAVhu.48, AAVhu.48R1, AAVhu.48R2, AAVhu.48R3, AAVhu.49, AAVhu.5, AAVhu.51, AAVhu.52, AAVhu.53, AAVhu.54, AAVhu.55, AAVhu.56, AAVhu.57, AAVhu.58, AAVhu.6, AAVhu.60, AAVhu.61, AAVhu.63, AAVhu.64, AAVhu.66, AAVhu.67, AAVhu.7, AAVhu.8, AAVhu.9, AAVhu.t 19, AAVLG-10/rh.40, AAVLG-4/rh.38, AAVLG-9/hu.39, AAVLG-9/hu.39, AAV-LKO1, AAV-LK02, AAVLK03, AAV-LK03, AAV-LK04, AAV-LK05, AAV-LK06, AAV-LK07, AAV-LK08, AAV-LKO9, AAV-LK10, AAV-LK 11, AAV-LK12, AAV-LK13, AAV-LK14, AAV-LK15, AAV-LK17, AAV-LK18, AAV-LK19, AAVN721-8/rh.43, AAV-PAEC, AAV-PAEC 11, AAV-PAEC12, AAV-PAEC2, AAV-PAEC4, AAV-PAEC6, AAV-PAEC7, AAV-PAEC8, AAVpi.1, AAVpi.2, AAVpi.3, AAVrh.10, AAVrh.12, AAVrh.13, AAVrh.13R, AAVrh.14, AAVrh.17, AAVrh.18, AAVrh.19, AAVrh.2, AAVrh.20, AAVrh.21, AAVrh.22, AAVrh.23, AAVrh.24, AAVrh.25, AAVrh.2R, AAVrh.31, AAVrh.32, AAVrh.33, AAVrh.34, AAVrh.35, AAVrh.36, AAVrh.37, AAVrh.37R2, AAVrh.38, AAVrh.39, AAVrh.40, AAVrh.43, AAVrh.44, AAVrh.45, AAVrh.46, AAVrh.47, AAVrh.48, AAVrh.48, AAVrh.48.1, AAVrh.48.1.2, AAVrh.48.2, AAVrh.49, AAVrh.50, AAVrh.51, AAVrh.52, AAVrh.53, AAVrh.54, AAVrh.55, AAVrh.56, AAVrh.57, AAVrh.58, AAVrh.59, AAVrh.60, AAVrh.61, AAVrh.62, AAVrh.64, AAVrh.64R1, AAVrh.64R2, AAVrh.65, AAVrh.67, AAVrh.68, AAVrh.69, AAVrh.70, AAVrh.72, AAVrh.73, AAVrh.74, AAVrh.8, AAVrh.8R, AAVrh8R, AAVrh8R A586R mutant, AAVrh8R R533A mutant, BAAV, BNP61 AAV, BNP62 AAV, BNP63 AAV, bovine AAV, caprine AAV, Japanese AAV 10, true type AAV (ttAAV), UPENN AAV 10, AAV-LK16, AAAV, AAV Shuffle 100-1, AAV Shuffle 100-2, AAV Shuffle 100-3, AAV Shuffle 100-7, AAV Shuffle 102, AAV Shuffle 10-6, AAV Shuffle 10-8, AAV SM 100-10, AAV SM 100-3, AAV SM 10-1, AAV SM 10-2, and/or AAV SM 10-8.

[0323] In some aspects, the AAV serotype may be, or have, a mutation in the AAV9 sequence as described by N Pulicherla et al. (Molecular Therapy 19(6):1070-1078 (2011)), such as but not limited to, AAV9.9, AAV9.11, AAV9.13, AAV9.16, AAV9.24, AAV9.45, AAV9.47, AAV9.61, AAV9.68, AAV9.84.

[0324] In some aspects, the AAV serotype may be, or have, a sequence as described in U.S. Pat. No. 6,156,303, such as, but not limited to, AAV3B (SEQ ID NO: 1 and 10 of U.S. Pat. No. 6,156,303), AAV6 (SEQ ID NO: 2, 7 and 11 of U.S. Pat. No. 6,156,303), AAV2 (SEQ ID NO: 3 and 8 of U.S. Pat. No. 6,156,303), AAV3A (SEQ ID NO: 4 and 9, of U.S. Pat. No. 6,156,303), or derivatives thereof.

[0325] In some aspects, the serotype may be AAVDJ or a variant thereof, such as AAVDJ8 (or AAV-DJ8), as described by Grimm et al. (Journal of Virology 82(12): 5887-5911 (2008)). The amino acid sequence of AAVDJ8 may comprise two or more mutations in order to remove the heparin binding domain (HBD). As a non-limiting example, the AAV-DJ sequence described as SEQ ID NO: 1 in U.S. Pat. No. 7,588,772: (1) R587Q where arginine (R; Arg) at amino acid 587 is changed to glutamine (Q; Gln) and (2) R590T where arginine (R; Arg) at amino acid 590 is changed to threonine (T; Thr). As another non-limiting example, may comprise three mutations: (1) K406R where lysine (K; Lys) at amino acid 406 is changed to arginine (R; Arg), (2) R587Q where arginine (R; Arg) at amino acid 587 is changed to glutamine (Q; Gln) and (3) R590T where arginine (R; Arg) at amino acid 590 is changed to threonine (T; Thr).

[0326] In some examples, the AAV serotype may be, or have, a sequence as described in International Publication No. WO2015121501, such as, but not limited to, true type AAV (ttAAV) (SEQ ID NO: 2 of WO2015121501), “UPenn AAV10” (SEQ ID NO: 8 of WO2015121501), “Japanese AAV10” (SEQ ID NO: 9 of WO2015121501), or variants thereof

[0327] According to the present disclosure, AAV capsid serotype selection or use may be from a variety of species. In one example, the AAV may be an avian AAV (AAAV). The AAAV serotype may be, or have, a sequence as described in U.S. Pat. No. 9,238,800, such as, but not limited to, AAAV (SEQ ID NO: 1, 2, 4, 6, 8, 10, 12, and 14 of U.S. Pat. No. 9,238,800), or variants thereof

[0328] In one example, the AAV may be a bovine AAV (BAAV). The BAAV serotype may be, or have, a sequence as described in U.S. Pat. No. 9,193,769, such as, but not limited to, BAAV (SEQ ID NO: 1 and 6 of U.S. Pat. No. 9,193,769), or variants thereof. The BAAV serotype may be or have a sequence as described in U.S. Pat. No. 7,427,396, such as, but not limited to, BAAV (SEQ ID NO: 5 and 6 of U.S. Pat. No. 7,427,396), or variants thereof.

[0329] In one example, the AAV may be a caprine AAV. The caprine AAV serotype may be, or have, a sequence as described in U.S. Pat. No. 7,427,396, such as, but not limited to, caprine AAV (SEQ ID NO: 3 of U.S. Pat. No. 7,427,396), or variants thereof

[0330] In other examples the AAV may be engineered as a hybrid AAV from two or more parental serotypes. In one example, the AAV may be AAV2G9 which comprises sequences from AAV2 and AAV9. The AAV2G9 AAV serotype may be, or have, a sequence as described in U.S. Patent Publication No. US20160017005.

[0331] In one example, the AAV may be a serotype generated by the AAV9 capsid library with mutations in amino acids 390-627 (VP1 numbering) as described by Pulicherla et al. (Molecular Therapy 19(6):1070-1078 (2011). The serotype and corresponding nucleotide and amino acid substitutions may be, but is not limited to, AAV9.1 (G1594C; D532H), AAV6.2 (T1418A and T1436X; V473D and I479K), AAV9.3 (T1238A; F413Y), AAV9.4 (T1250C and A1617T; F417S), AAV9.5 (A1235G, A1314T, A1642G, C1760T; Q412R, T548A, A587V), AAV9.6 (T1231A; F411I), AAV9.9 (G1203A, G1785T; W595C), AAV9.10 (A1500G, T1676C; M559T), AAV9.11 (A1425T, A1702C, A1769T; T568P, Q590L), AAV9.13 (A1369C, A1720T; N457H, T574S), AAV9.14 (T1340A, T1362C, T1560C, G1713A; L447H), AAV9.16 (A1775T; Q592L), AAV9.24 (T1507C, T1521G; W503R), AAV9.26 (A1337G, A1769C; Y446C, Q590P), AAV9.33 (A1667C; D556A), AAV9.34 (A1534G, C1794T; N512D), AAV9.35 (A1289T, T1450A, C1494T, A1515T, C1794A, G1816A; Q430L, Y484N, N98K, V606I), AAV9.40 (A1694T, E565V), AAV9.41 (A1348T, T1362C; T450S), AAV9.44 (A1684C, A1701T, A1737G; N562H, K567N), AAV9.45 (A1492T, C1804T; N498Y, L602F), AAV9.46 (G1441C, T1525C, T1549G; G481R, W509R, L517V), 9.47 (G1241A, G1358A, A1669G, C1745T; S414N, G453D, K557E, T582I), AAV9.48 (C1445T, A1736T; P482L, Q579L), AAV9.50 (A1638T, C1683T, T1805A; Q546H, L602H), AAV9.53 (G1301A, A1405C, C1664T, G1811T; R134Q, S469R, A555V, G604V), AAV9.54 (C1531A, T1609A; L511I, L537M), AAV9.55 (T1605A; F535L), AAV9.58 (C1475T, C1579A; T492I, H527N), AAV.59 (T1336C; Y446H), AAV9.61 (A1493T; N498I), AAV9.64 (C1531A, A1617T; L511I), AAV9.65 (C1335T, T1530C, C1568A; A523D), AAV9.68 (C1510A; P504T), AAV9.80 (G1441A;G481R), AAV9.83 (C1402A, A1500T; P468T, E500D), AAV9.87 (T1464C, T1468C; S490P), AAV9.90 (A1196T; Y399F), AAV9.91 (T1316G, A1583T, C1782G, T1806C; L439R, K5281), AAV9.93 (A1273G, A1421G, A1638C, C1712T, G1732A, A1744T, A1832T; S425G, Q474R, Q546H, P571L, G578R, T582S, D611V), AAV9.94 (A1675T; M559L) and AAV9.95 (T1605A; F535L).

[0332] In one example, the AAV may be a serotype comprising at least one AAV capsid CD8+ T-cell epitope. As a non-limiting example, the serotype may be AAV1, AAV2 or AAV8.

[0333] In one example, the AAV may be a variant, such as PHP.A or PHP.B as described in Deverman. 2016. Nature Biotechnology. 34(2): 204-209.

[0334] In one example, the AAV may be a serotype selected from any of those found in SEQ ID NOs: 4734-5302 and Table 2.

[0335] In one example, the AAV may be encoded by a sequence, fragment or variant as described in SEQ ID NOs: 4734-5302 and Table 2.

[0336] General principles of rAAV production are reviewed in, for example, Carter, 1992, Current Opinions in Biotechnology, 1533-539; and Muzyczka, 1992, Curr. Topics in Microbial. and Immunol., 158:97-129). Various approaches are described in Ratschin et al., Mol. Cell. Biol. 4:2072 (1984); Hermonat et al., Proc. Natl. Acad. Sci. USA, 81:6466 (1984); Tratschin et al., Mol. Cell. Biol. 5:3251 (1985); McLaughlin et al., J. Virol., 62:1963 (1988); and Lebkowski et al., 1988 Mol. Cell. Biol., 7:349 (1988). Samulski et al. (1989, J. Virol., 63:3822-3828); U.S. Pat. No. 5,173,414; WO 95/13365 and corresponding U.S. Pat. No. 5,658,776; WO 95/13392; WO 96/17947; PCT/US98/18600; WO 97/09441 (PCT/US96/14423); WO 97/08298 (PCT/US96/13872); WO 97/21825 (PCT/US96/20777); WO 97/06243 (PCT/FR96/01064); WO 99/11764; Perrin et al. (1995) Vaccine 13:1244-1250; Paul et al. (1993) Human Gene Therapy 4:609-615; Clark et al. (1996) Gene Therapy 3:1124-1132; U.S. Pat. Nos. 5,786,211; 5,871,982; and 6,258,595.

[0337] AAV vector serotypes can be matched to target cell types. For example, the following exemplary cell types can be transduced by the indicated AAV serotypes among others.

TABLE 2
Tissue/Cell Types and Serotypes

| | |
|---|---|
| Tissue/Cell Type | Serotype |
| Liver | AAV3, AAV8, AAV5, AAV9 |
| Skeletal muscle | AAV1, AAV7, AAV6, AAV8, AAV9 |
| Central nervous system | AAV5, AAV1, AAV4, AAV9 |
| RPE | AAV5, AAV4 |
| Photoreceptor cells | AAV5 |
| Lung | AAV9 |
| Heart | AAV8 |
| Pancreas | AAV8 |
| Kidney | AAV2, AAV8 |
| Hematopoietic stem cells | AAV6 |

[0338] In addition to adeno-associated viral vectors, other viral vectors can be used. Such viral vectors include, but are not limited to, lentivirus, alphavirus, enterovirus, pestivirus, baculovirus, herpesvirus, Epstein Barr virus, papovavirus, poxvirus, vaccinia virus, and herpes simplex virus.

[0339] In some aspects, Cas9 mRNA, sgRNA targeting one or two sites in SCN10A gene, and donor DNA can each be separately formulated into lipid nanoparticles, or are all co-formulated into one lipid nanoparticle.

[0340] In some aspects, Cas9 mRNA can be formulated in a lipid nanoparticle, while sgRNA and donor DNA can be delivered in an AAV vector.

[0341] Options are available to deliver the Cas9 nuclease as a DNA plasmid, as mRNA or as a protein. The guide RNA can be expressed from the same DNA, or can also be delivered as an RNA. The RNA can be chemically modified to alter or improve its half-life, or decrease the likelihood or degree of immune response. The endonuclease protein can be complexed with the gRNA prior to delivery. Viral vectors allow efficient delivery; split versions of Cas9 and smaller orthologs of Cas9 can be packaged in AAV, as can donors for HDR. A range of non-viral delivery methods also exist that can deliver each of these components, or non-viral and viral methods can be employed in tandem. For example, nano-particles can be used to deliver the protein and guide RNA, while AAV can be used to deliver a donor DNA.

[0342] In some aspects of the in vivo based therapy described herein, the viral vector(s) encoding the endonuclease, guide RNA and/or donor DNA may be delivered to the neurons of the peripheral neural system, such as primary sensory and motor neurons, via direct intraganglionic or intraspinal injection, or intrathecal delivery (Hoyng et al., Front Mol Neurosci. 2015 Jul. 15; 8:32).

### IV. Dosing and Administration

[0343] The terms “administering,” “introducing” and “transplanting” are used interchangeably in the context of the placement of cells, e.g., progenitor cells, into a subject, by a method or route that results in at least partial localization of the introduced cells at a desired site, such as a site of injury or repair, such that a desired effect(s) is produced. The cells e.g., progenitor cells, or their differentiated progeny can be administered by any appropriate route that results in delivery to a desired location in the subject where at least a portion of the implanted cells or components of the cells remain viable. The period of viability of the cells after administration to a subject can be as short as a few hours, e.g., twenty-four hours, to a few days, to as long as several years, or even the life time of the patient, i.e., long-term engraftment. For example, in some aspects described herein, an effective amount of progenitor cells is administered via a systemic route of administration, such as an intraperitoneal or intravenous route.

[0344] The terms “individual,” “subject,” “host” and “patient” are used interchangeably herein and refer to any subject for whom diagnosis, treatment or therapy is desired. In some aspects, the subject is a mammal. In some aspects, the subject is a human being.

[0345] When provided prophylactically, progenitor cells described herein can be administered to a subject in advance of any symptom of pain. Accordingly, the prophylactic administration of a progenitor cell population serves to prevent pain.

[0346] A progenitor cell population being administered according to the methods described herein can comprise allogeneic progenitor cells obtained from one or more donors. Such progenitors may be of any cellular or tissue origin, e.g., liver, muscle, cardiac, etc. “Allogeneic” refers to a progenitor cell or biological samples comprising progenitor cells obtained from one or more different donors of the same species, where the genes at one or more loci are not identical. For example, a liver progenitor cell population being administered to a subject can be derived from one more unrelated donor subjects, or from one or more non-identical siblings. In some cases, syngeneic progenitor cell populations can be used, such as those obtained from genetically identical animals, or from identical twins. The progenitor cells can be autologous cells; that is, the progenitor cells are obtained or isolated from a subject and administered to the same subject, i.e., the donor and recipient are the same.

[0347] The term “effective amount” refers to the amount of a population of progenitor cells or their progeny needed to prevent or alleviate at least one or more signs or symptoms of pain, and relates to a sufficient amount of a composition to provide the desired effect, e.g., to treat a subject having pain. The term “therapeutically effective amount” therefore refers to an amount of progenitor cells or a composition comprising progenitor cells that is sufficient to promote a particular effect when administered to a typical subject, such as one who has or is at risk for pain. An effective amount would also include an amount sufficient to prevent or delay the development of a symptom of the disease, alter the course of a symptom of the disease (for example but not limited to, slow the progression of a symptom of the disease), or reverse a symptom of the disease. It is understood that for any given case, an appropriate “effective amount” can be determined by one of ordinary skill in the art using routine experimentation.

[0348] For use in the various aspects described herein, an effective amount of progenitor cells comprises at least 102 progenitor cells, at least 5×102 progenitor cells, at least 103 progenitor cells, at least 5×103 progenitor cells, at least 104 progenitor cells, at least 5×104 progenitor cells, at least 105 progenitor cells, at least 2×105 progenitor cells, at least 3×105 progenitor cells, at least 4×105 progenitor cells, at least 5×105 progenitor cells, at least 6×105 progenitor cells, at least 7×105 progenitor cells, at least 8×105 progenitor cells, at least 9×105 progenitor cells, at least 1×106 progenitor cells, at least 2×106 progenitor cells, at least 3×106 progenitor cells, at least 4×106 progenitor cells, at least 5×106 progenitor cells, at least 6×106 progenitor cells, at least 7×106 progenitor cells, at least 8×106 progenitor cells, at least 9×106 progenitor cells, or multiples thereof. The progenitor cells can be derived from one or more donors, or can be obtained from an autologous source. In some examples described herein, the progenitor cells can be expanded in culture prior to administration to a subject in need thereof.

[0349] Modest and incremental decreases in the levels of SCNI OA expressed in cells of patients having pain can be beneficial for ameliorating one or more symptoms of the disease, for increasing long-term survival, and/or for reducing side effects associated with other treatments. Upon administration of such cells to human patients, the presence of progenitors that are producing decreased levels of SCN10A is beneficial. In some cases, effective treatment of a subject gives rise to at least about 3%, 5% or 7% reduction in SCN10A relative to total SCN10A in the treated subject. In some examples, the reduction in SCN10A will be at least about 10% of total SCN10A. In some examples, the reduction in SCN10A will be at least about 20% to 30% of total SCN10A. Similarly, the introduction of even relatively limited subpopulations of cells having significantly reduced levels of SCN10A can be beneficial in various patients because in some situations normalized cells will have a selective advantage relative to diseased cells. However, even modest levels of progenitors with reduced levels of SCN10A can be beneficial for ameliorating one or more aspects of pain in patients. In some examples, about 10%, about 20%, about 30%, about 40%, about 50%, about 60%, about 70%, about 80%, about 90% or more of the neural progenitors in patients to whom such cells are administered are producing decreased levels of SCN10A.

[0350] “Administered” refers to the delivery of a progenitor cell composition into a subject by a method or route that results in at least partial localization of the cell composition at a desired site. A cell composition can be administered by any appropriate route that results in effective treatment in the subject, i.e. administration results in delivery to a desired location in the subject where at least a portion of the composition delivered, i.e. at least 1×104 cells are delivered to the desired site for a period of time.

[0351] In one aspect of the method, the pharmaceutical composition may be administered via a route such as, but not limited to, enteral (into the intestine), gastroenteral, epidural (into the dura matter), oral (by way of the mouth), transdermal, peridural, intracerebral (into the cerebrum), intracerebroventricular (into the cerebral ventricles), epicutaneous (application onto the skin), intradermal, (into the skin itself), subcutaneous (under the skin), nasal administration (through the nose), intravenous (into a vein), intravenous bolus, intravenous drip, intraarterial (into an artery), intramuscular (into a muscle), intracardiac (into the heart), intraosseous infusion (into the bone marrow), intrathecal (into the spinal canal), intraperitoneal, (infusion or injection into the peritoneum), intravesical infusion, intravitreal, (through the eye), intracavemous injection (into a pathologic cavity) intracavitary (into the base of the penis), intravaginal administration, intrauterine, extra-amniotic administration, transdermal (diffusion through the intact skin for systemic distribution), transmucosal (diffusion through a mucous membrane), transvaginal, insufflation (snorting), sublingual, sublabial, enema, eye drops (onto the conjunctiva), in ear drops, auricular (in or by way of the ear), buccal (directed toward the cheek), conjunctival, cutaneous, dental (to a tooth or teeth), electro-osmosis, endocervical, endosinusial, endotracheal, extracorporeal, hemodialysis, infiltration, interstitial, intra-abdominal, intra-amniotic, intra-articular, intrabiliary, intrabronchial, intrabursal, intracartilaginous (within a cartilage), intracaudal (within the cauda equine), intracisternal (within the ci sterna magna cerebellomedularis), intracorneal (within the cornea), dental intracornal, intracoronary (within the coronary arteries), intracorporus cavernosum (within the dilatable spaces of the corponis cavernosa of the penis), intradiscal (within a disc), intraductal (within a duct of a gland), intraduodenal (within the duodenum), intradural (within or beneath the dura), intraepidermal (to the epidermis), intraesophageal (to the esophagus), intragastric (within the stomach), intragingival (within the gingivae), intraileal (within the distal portion of the small intestine), intralesional (within or introduced directly to a localized lesion), intraluminal (within a lumen of a tube), intralymphatic (within the lymph), intramedullary (within the marrow cavity of a bone), intrameningeal (within the meninges), intramyocardial (within the myocardium), intraocular (within the eye), intraovarian (within the ovary), intrapericardial (within the pericardium), intrapleural (within the pleura), intraprostatic (within the prostate gland), intrapulmonary (within the lungs or its bronchi), intrasinal (within the nasal or periorbital sinuses), intraspinal (within the vertebral column), intrasynovial (within the synovial cavity of a joint), intratendinous (within a tendon), intratesticular (within the testicle), intrathecal (within the cerebrospinal fluid at any level of the cerebrospinal axis), intrathoracic (within the thorax), intratubular (within the tubules of an organ), intratumor (within a tumor), intratympanic (within the auras media), intravascular (within a vessel or vessels), intraventricular (within a ventricle), iontophoresis (by means of electric current where ions of soluble salts migrate into the tissues of the body), irrigation (to bathe or flush open wounds or body cavities), laryngeal (directly upon the larynx), nasogastric (through the nose and into the stomach), occlusive dressing technique (topical route administration, which is then covered by a dressing that occludes the area), ophthalmic (to the external eye), oropharyngeal (directly to the mouth and pharynx), parenteral, percutaneous, periarticular, peridural, perineural, periodontal, rectal, respiratory (within the respiratory tract by inhaling orally or nasally for local or systemic effect), retrobulbar (behind the pons or behind the eyeball), intramyocardial (entering the myocardium), soft tissue, subarachnoid, subconjunctival, submucosal, topical, transplacental (through or across the placenta), transtracheal (through the wall of the trachea), transtympanic (across or through the tympanic cavity), ureteral (to the ureter), urethral (to the urethra), vaginal, caudal block, diagnostic, nerve block, biliary perfusion, cardiac perfusion, photopheresis and spinal.

[0352] Modes of administration include injection, infusion, instillation, and/or ingestion. “Injection” includes, without limitation, intravenous, intramuscular, intra-arterial, intrathecal, intraventricular, intracapsular, intraorbital, intracardiac, intradermal, intraperitoneal, transtracheal, subcutaneous, subcuticular, intraarticular, sub capsular, subarachnoid, intraspinal, intracerebro spinal, and intrasternal injection and infusion. In some examples, the route is intravenous. For the delivery of cells, administration by injection or infusion can be made.

[0353] The cells can be administered systemically. The phrases “systemic administration,” “administered systemically”, “peripheral administration” and “administered peripherally” refer to the administration of a population of progenitor cells other than directly into a target site, tissue, or organ, such that it enters, instead, the subject's circulatory system and, thus, is subject to metabolism and other like processes.

[0354] The efficacy of a treatment comprising a composition for the treatment of pain can be determined by the skilled clinician. However, a treatment is considered “effective treatment,” if any one or all of the signs or symptoms of, as but one example, levels of SCN10A are altered in a beneficial manner (e.g., decreased by at least 10%), or other clinically accepted symptoms or markers of disease are improved or ameliorated. Efficacy can also be measured by failure of an individual to worsen as assessed by hospitalization or need for medical interventions (e.g., progression of the disease is halted or at least slowed). Methods of measuring these indicators are known to those of skill in the art and/or described herein. Treatment includes any treatment of a disease in an individual or an animal (some non-limiting examples include a human, or a mammal) and includes: (1) inhibiting the disease, e.g., arresting, or slowing the progression of symptoms; or (2) relieving the disease, e.g., causing regression of symptoms; and (3) preventing or reducing the likelihood of the development of symptoms.

[0355] The treatment according to the present disclosure can ameliorate one or more symptoms associated with pain by decreasing or altering the amount of the SCN10A protein in the individual.

### V. Features and Properties of the Sodium Channel, Voltage Gated, Type X Alpha Subunit (SCN10A) Gene

[0356] SCN10A has been associated with diseases and disorders such as, but not limited to, Congenital Pain Insensitivity, Asthma, Ataxia, Atrial Fibrillation, Malignant neoplasm of breast, Hypertrophic Cardiomyopathy, Cardiovascular Diseases, Cerebellar Diseases, Dyspepsia, Experimental Autoimmune Encephalomyelitis, Primary Erythermalgia, Heart Block, Hereditary Sensory Autonomic Neuropathy Type 5, Hyperalgesia, Acute Myelocytic Leukemia, Multiple Sclerosis, Neuralgia, Neuroblastoma, Pain, Postherpetic neuralgia, Tobacco Use Disorder, Trigeminal Neuralgia, Ventricular Fibrillation, Synovial Cyst, Sciatic Neuropathy, Chronic pain, Fibrillation, Hematologic Neoplasms, Electrocardiogram: P-R interval, Neuropathy, Breast Carcinoma, Central neuroblastoma, Varicella zoster, Brugada Syndrome (disorder), Myxoid cyst, Channelopathies, Compressive Neuropathies, Paroxysmal Extreme Pain Disorder, High grade atrioventricular block, Small Fiber Neuropathy, and Familial Episodic Pain Syndrome 2. Editing the SCN10A gene using any of the methods described herein may be used to treat, prevent and/or mitigate the symptoms of the diseases and disorders described herein.

[0357] The gene SCN10A encodes the alpha subunit of a voltage-gated sodium channel named NaV1.8. NaV1.8 is primarily expressed in the sensory neurons of the dorsal root ganglion and plays an important role in neuropathic pain mechanisms. Mutations in the SCN10A gene have been found in patients with familial episodic pain syndrome type 2. Familial episodic pain syndrome type 2 is a rare autosomal dominant neurologic disorder characterized by adult-onset of paroxysmal pain in the feet region. The episodes are generally triggered by heat, cold, chemicals and certain surfaces. Patients may also develop hypersensitivity to touch and elevated response to pain stimulus. Currently no treatment is available for this disease. Warmth has been shown to relieve the pain episodes. SCN10A gene mutations are also responsible for about 5 percent of the cases of small fiber neuropathy. Small fiber neuropathy is a condition characterized by severe pain attacks and insensitivity to pain. The pain attacks are usually described as numbness, stabbing or burning, or abnormal skin sensations such as tingling or itchiness. Currently, there is no cure for small fiber peripheral neuropathy. Treatment options include intravenous immunoglobulin (IVIG) and plasmapheresis.

[0358] In one example, the gene is Sodium Channel, Voltage Gated, Type X Alpha Subunit (SCN10A) which may also be referred to Sodium Voltage-Gated Channel Alpha Subunit 10, Sodium Channel Voltage-Gated Type X Alpha Polypeptide, Voltage-Gated Sodium Channel Subunit Alpha Nav1.8, Sodium Channel Protein Type X Subunit Alpha, Peripheral Nerve Sodium Channel 3, HPN3, PN3, Nav1.8, FEPS2, and SNS. SCN10A has a cytogenetic location of 3p22.2 and the genomic coordinate are on Chromosome 3 on the reserve strand at position 38,696,802-38,794,010. The nucleotide sequence of SCN10A is shown as SEQ TD NO: 5303. AC216038.1 is the gene upstream of SCN10A on the reverse strand and SCNSA is the gene downstream of SCN10A on the reverse strand. SCN10A has a NCBI gene ID of 6336, Uniprot ID of Q9Y5Y9 and Ensembl Gene ID of ENSG00000185313. SCN10A has 6380 SNPs, 26 introns and 27 exons. The exon identifier from Ensembl and the start/stop sites of the introns and exons are shown in Table 3.

TABLE 3
Introns and Exons for SCN10A

| Exon | | | Intron | | |
|---|---|---|---|---|---|
| No. | Exon ID | Start/Stop | No. | Intron based on Exon ID | Start/Stop |
| EX1 | ENSE0000 | 38, 794, 010- | INT1 | Intron ENSE00001291560- | 38, 793, 740- |
| | 1291560 | 38, 793, 741 | | ENSE0000 1506954 | 38, 792, 169 |
| EX2 | ENSE00001506954 | 38, 792, 168- | INT2 | Intron ENSE00001506954- | 38, 792, 049- |
| | | 38, 792, 050 | | ENSE00001293479 | 38, 789, 037 |
| EX3 | ENSE00001293479 | 38, 789, 036- | INT3 | Intron ENSE00001293479- | 38, 788, 955- |
| | | 38, 788, 956 | | ENSE00001305210 | 38, 771, 408 |
| EX4 | EN SE0000 | 38, 771, 407- | 1NT4 | Intron EN SE00001305210- | 38, 771, 278- |
| | 1305210 | 38, 771, 279 | | ENSE0000 1329482 | 38, 763, 597 |
| EX5 | ENSE00001329482 | 38, 763, 596- | INT5 | Intron ENSE00001329482- | 38, 763, 504- |
| | | 38, 763, 505 | | ENSE00001307525 | 38, 761, 384 |
| EX6 | ENSE00001307525 | 38, 761, 383- | INT6 | Intron ENSE00001307525- | 38, 761, 191- |
| | | 38, 761, 192 | | ENSE00001322375 | 38, 760, 748 |
| EX7 | ENSE00001322375 | 38, 760, 747- | INT7 | Intron ENSE00001322375- | 38, 760, 680- |
| | | 38, 760, 681 | | ENSE000013 12847 | 38, 757, 160 |
| EX8 | ENSE00001312847 | 38, 757, 159- | INT8 | Intron ENSE00001312847- | 38, 757, 017 |
| | | 38, 757, 018 | | ENSE0000 1292750 | 38, 756, 872 |
| EX9 | ENSE00001292750 | 38, 756, 871- | INT9 | Intron ENSE00001292750- | 38, 756, 673- |
| | | 38, 756, 674 | | ENSE00001304652 | 38, 755, 959 |
| EX10 | ENSE00001304652 | 38, 755, 958- | INT10 | Intron ENSE00001304652- | 38, 755, 787- |
| | | 38, 755, 788 | | ENSE00001320501 | 38, 752, 513 |
| EX11 | ENSE0000 | 38, 752, 512- | INT11 | Intron ENSE00001320501- | 38, 752, 218- |
| | 1320501 | 38, 752, 219 | | ENSE00001303498 | 38, 750, 185 |
| EX12 | ENSE00001303498 | 38, 750, 184- | INT12 | Intron ENSE00001303498- | 38, 750, 072- |
| | | 38, 750, 073 | | ENSE00001321148 | 38, 742, 530 |
| EX13 | ENSE00001321148 | 38, 742, 529- | INT13 | Intron ENSE00001321148- | 38, 742, 290- |
| | | 38, 742, 291 | | ENSE00001302623 | 38, 739, 689 |
| EX14 | ENSE00001302623 | 38, 739, 688- | 1NT14 | Intron ENSE00001302623- | 38, 739, 514- |
| | | 38, 739, 515 | | ENSE00001330855 | 38, 728, 902 |
| EX15 | ENSE00001330855 | 38, 728, 901- | INT15 | Intron ENSE00001330855- | 38, 728, 541- |
| | | 38, 728, 542 | | ENSE00001301249 | 38, 727, 053 |
| EX16 | ENSE00001301249 | 38, 727, 052- | INT16 | Intron ENSE00001301249- | 38, 726, 605- |
| | | 38, 726, 606 | | ENSE00001329092 | 38, 725, 315 |
| EX17 | ENSE00001329092 | 38, 725, 314- | INT17 | Intron ENSE00001329092- | 38, 725, 173- |
| | | 38, 725, 174 | | ENSE00001301271 | 38, 723, 554 |
| EX18 | ENSE00001301271 | 38, 723, 553- | 1NT18 | Intron ENSE00001301271- | 38, 723, 429- |
| | | 38, 723, 430 | | ENSE000013 16335 | 38, 722, 413 |
| EX19 | ENSE00001316335 | 38, 722, 412- | INT19 | Intron ENSE00001316335- | 38, 722, 257- |
| | | 38, 722, 258 | | ENSE00001294963 | 38, 718, 827 |
| EX20 | ENSE00001294963 | 38, 718, 826- | INT20 | Intron ENSE00001294963- | 38, 718, 652- |
| | | 38, 718, 653 | | ENSE000013 15747 | 38, 714, 081 |
| EX21 | ENSE00001315747 | 38, 714, 080- | INT21 | Intron ENSE00001315747- | 38, 713, 957- |
| | | 38, 713, 958 | | ENSE00001297926 | 38, 712, 446 |
| EX22 | ENSE00001297926 | 38, 712, 445- | INT22 | Intron ENSE00001297926- | 38, 712, 160- |
| | | 38, 712, 161 | | ENSE00001759661 | 38, 710, 898 |
| EX23 | ENSE00001759661 | 38, 710, 897- | INT23 | Intron ENSE00001759661- | 38, 710, 843- |
| | | 38, 710, 844 | | ENSE00001506953 | 38, 709, 616 |
| EX24 | ENSE00001506953 | 38, 709, 615- | INT24 | Intron ENSE00001506953- | 38, 709, 477- |
| | | 38, 709, 478 | | ENSE0000 1660906 | 38, 707, 384 |
| EX25 | ENSE0000 | 38, 707, 383- | INT25 | Intron ENSE0000 1660906- | 38, 707, 278- |
| | 1660906 | 38, 707, 279 | | ENSE00001297075 | 38, 702, 110 |
| EX26 | ENSE00001297075 | 38, 702, 109- | 1NT26 | Intron ENSE00001297075- | 38, 701, 838- |
| | | 38, 701, 839 | | ENSE00001712334 | 38, 698, 563 |
| EX27 | ENSE00001712334 | 38, 698, 562- | | | |
| | | 38, 696, 802 | | | |

[0359] Table 4 provides information on all of the transcripts for the SCN10A gene based on the Ensembl database. Provided in Table 4 are the transcript TD from Ensembl and corresponding NCBI RefSeq ID for the transcript, the translation TD from Ensembl and the corresponding NCBI RefSeq ID for the protein, the biotype of the transcript sequence as classified by Ensembl and the exons and introns in the transcript based on the information in Table 3.

TABLE 4
Transcript Information for SCN10A

| | | | Protein | | | |
|---|---|---|---|---|---|---|
| | Transcript | | NCBI | | | |
| Transcript | NCBI | Translation | RefSeq | Sequence | Exon ID from | Intron ID from |
| ID | RefSeq ID | ID | ID | Biotype | Table 3 | Table 3 |
| ENST0000 | NM_000030 | ENSP00000 | NP_000021 | Protein | EX1, EX2, EX3, | INT1, INT2, INT3, |
| 0307503.3 | | 302620 | | coding | EX4, EX5, EX6, | INT4, INT5, INT6, |
| | | | | | EX7, EX8, EX9, | INT7, INT8, INT9, |
| | | | | | EX10, EX11 | INT10 |
| ENST0000 | — | — | — | Retained | EX12, EX13, | INT11, INT12 |
| 0470255.1 | | | | intron | EX14 | |
| ENST0000 | — | — | — | Retained | EX15, EX16, | INT13, INT14, |
| 0472436.1 | | | | intron | EX17, EX18, | INT15, INT16 |
| | | | | | EX19 | |
| ENST0000 | — | — | — | Retained | EX20, EX21, | INT17, INT18, |
| 0476698.1 | | | | intron | EX22, EX23 | INT19 |

[0360] SCN10A has 6380 SNPs and the NCBI rs number and/or UniProt VAR number for this SCN10A gene are rs7630989, rs6795970, rs12632942, rs6599241, rs35332705, VAR 064748, rs138404783, VAR 070879, VAR 070880, VAR 070881, VAR 070882, rs4676597, rs4676598, rs6422143, rs6767948, rs6776034, rs6763628, rs6783110, rs6777775, rs6764493, rs6794914, rs6784303, rs6795880, rs6799038, rs6781740, rs6803189, rs6599243, rs6599244, rs6599245, rs6599246, rs6599247, rs6599248, rs6599249, rs6599252, rs6599253, rs6599256, rs6599260, rs6599261, rs6800541, rs6790396, rs6797763, rs6798087, rs6775197, rs6790627, rs6798015, rs7430323, rs7430438, rs6599259, rs7430451, rs6802294, rs6791171, rs6793226, rs6599257, rs6599255, rs7430726, rs6599254, rs6599251, rs6599250, rs7431144, rs7373595, rs7374030, rs6599242, rs7374804, rs7375034, rs7375036, rs6599240, rs6599239, rs6796459, rs6796336, rs7428167, rs6799257, rs7428538, rs6780103, rs7432787, rs7432804, rs6763876, rs7429946, rs7433306, rs6771157, rs7433430, rs6767699, rs7628873, rs6763282, rs6767287, rs6767286, rs7617547, rs4676595, rs4676594, rs7650384, rs7635221, rs4676479, rs4629274, rs4426622, rs7610489, rs9825762, rs4420805, rs4420804, rs7651106, rs7641844, rs4417808, rs9827941, rs4414778, rs4390861, rs9311198, rs9828268, rs9847662, rs9811498, rs9836531, rs4369974, rs7644127, rs3923697, rs7644332, rs9836859, rs3923696, rs9637536, rs9844265, rs4072090, rs9844577, rs4072089, rs9861456, rs9862441, rs9875610, rs9846774, rs9884052, rs6801957, rs9851471, rs9990137, rs7430283, rs11129800, rs11129801, rs142217269, rs151090729, rs4076737, rs4426623, rs4622847, rs5848486, rs4676596, rs11129802, rs11129803, rs7430439, rs11129805, rs11129806, rs7430477, rs7611456, rs10212338, rs9878604, rs7430861, rs10212535, rs7372672, rs7373373, rs6805187, rs11710462, rs7374599, rs9879472, rs7426951, rs7431703, rs11711860, rs11711936, rs11711941, rs9874436, rs6809264, rs11712354, rs7428232, rs11927856, rs7432727, rs12487090, rs12494065, rs7615140, rs11707331, rs12631918, rs11928905, rs7433352, rs11707961, rs12487551, rs11929645, rs12495205, rs7433723, rs7433958, rs7639104, rs9815458, rs12054245, rs11721285, rs9815891, rs11922082, rs7617919, rs12634001, rs7635325, rs11716493, rs12489221, rs11915567, rs12496750, rs11709828, rs7618620, rs11710161, rs12497173, rs12497868, rs12497918, rs9816817, rs9809798, rs12635859, rs12635869, rs12490478, rs7641702, rs9818087, rs12636153, rs11925007, rs12491593, rs13315383, rs11917835, rs9311196, rs9311197, rs9828737, rs9828912, rs9820042, rs9848976, rs9830687, rs13071311, rs28535395, rs9876564, rs11129799, rs13087440, rs35164567, rs11129804, rs34758568, rs34292044, rs34292377, rs11129807, rs34314583, rs11129808, rs9872482, rs10428132, rs34804756, rs28706149, rs10428168, rs35395591, rs35396916, rs11710461, rs35301534, rs34392360, rs9866540, rs34397514, rs28448349, rs10637333, rs11711062, rs9874633, rs35463820, rs35464547, rs11705730, rs34455861, rs11719241, rs35486880, rs11344113, rs34478094, rs3 5496543, rs34919067, rs11714394, rs11928917, rs11396392, rs34929296, rs56654680, rs34930893, rs56661472, rs11715513, rs34515439, rs34516179, rs56704765, rs34074715, rs11708587, rs12633214, rs35993937, rs56824318, rs11921917, rs34987014, rs11922415, rs34105543, rs59468016, rs34152407, rs11716467, rs11710006, rs12172962, rs35652104, rs35048311, rs12172966, rs57122706, rs36085822, rs35052238, rs11924846, rs12636123, rs34667147, rs58410551, rs11926158, rs12630795, rs59640942, rs57203624, rs12638536, rs12638572, rs35710839, rs60847476, rs34700431, rs13085808, rs56128837, rs62242398, rs62242399, rs13319504, rs28523323, rs62242432, rs34260359, rs28570344, rs62242435, rs34756581, rs62242438, rs62242443, rs62242444, rs35212276, rs62242446, rs62242447, rs62242448, rs62242450, rs62242453, rs57326399, rs59733668, rs34777803, rs57346275, rs13325628, rs34786326, rs35389751, rs60969309, rs62244065, rs62244070, rs62244071, rs62244072, rs62244073, rs62244074, rs62244075, rs62244076, rs34846255, rs28435458, rs62244079, rs34422505, rs34890249, rs55791366, rs35466104, rs13095477, rs35904829, rs62244107, rs62244108, rs55849713, rs62244110, rs62244111, rs56406440, rs13096893, rs35523546, rs61014925, rs59856101, rs59858965, rs13098827, rs59914178, rs35993330, rs58792349, rs58802016, rs35998249, rs58883392, rs58915895, rs35847006, rs58141279, rs36057862, rs56040630, rs60218401, rs55742609, rs34177393, rs56051560, rs71635876, rs60240656, rs34204621, rs34205252, rs55779957, rs60773084, rs71085335, rs71085336, rs59639785, rs60349808, rs35094360, rs35095264, rs60874265, rs58025631, rs62242429, rs62242430, rs71323673, rs71323674, rs71323675, rs71323676, rs62242433, rs72864370, rs72864377, rs62242434, rs72864392, rs72866235, rs72866253, rs62242436, rs72866260, rs72866265, rs72866266, rs72866267, rs62242445, rs72866278, rs35734463, rs62243860, rs73825863, rs62243861, rs62243 862, rs73825866, rs73825867, rs73825878, rs73825880, rs62244077, rs72867808, rs72869618, rs72867855, rs73825864, rs73825865, rs73825883, rs62244078, rs73826323, rs73826324, rs62244080, rs62244081, rs73826357, rs73826358, rs62244103, rs74848784, rs66689339, rs74341073, rs62244104, rs62244105, rs75859611, rs62244106, rs74928884, rs62244109, rs62244112, rs59790671, rs74445516, rs58684946, rs56206213, rs58760012, rs35818440, rs60118537, rs68001863, rs77019133, rs57803396, rs55749331, rs71635874, rs61349119, rs60278090, rs71085334, rs57905522, rs73064529, rs61487238, rs73064536, rs57989962, rs73064548, rs73064557, rs73064559, rs61533375, rs77049337, rs71301300, rs60554541, rs74548823, rs74551923, rs74792924, rs77084265, rs76017498, rs75497516, rs72864380, rs72866259, rs72866270, rs72869620, rs73825887, rs75508287, rs76535930, rs74587293, rs73826305, rs73826306, rs73826310, rs75088937, rs73826321, rs77136813, rs73826327, rs75562946, rs77539009, rs73826334, rs75161427, rs73826359, rs76096312, rs74348091, rs76104711, rs74675938, rs75615812, rs78095083, rs74363987, rs77216806, rs75864725, rs74419042, rs74423 849, rs75223 091, rs79217981, rs75888476, rs76984993, rs75660637, rs77261744, rs79228310, rs76987412, rs76424950, rs76187325, rs76724272, rs76724601, rs75927671, rs77297345, rs76728612, rs77304538, rs73060441, rs73060459, rs73062575, rs75284873, rs79267898, rs79269945, rs73062578, rs75310964, rs78768858, rs73062597, rs76462455, rs76786776, rs79773522, rs111682647, rs74498991, rs79793362, rs75012427, rs73064510, rs76290694, rs73064534, rs78824521, rs73064540, rs76846477, rs76849067, rs78837622, rs76853317, rs76853763, rs73064564, rs75990457, rs79839232, rs111749776, rs75991777, rs75062405, rs77787358, rs78326800, rs76523292, rs76354991, rs78881985, rs75498327, rs77804526, rs113295398, rs113298187, rs113298850, rs111771510, rs75070682, rs114949831, rs76534052, rs78911227, rs75074341, rs78916443, rs76542202, rs75085393, rs74598043, rs77499968, rs79868348, rs75108240, rs77833542, rs75559840, rs79414348, rs114963216, rs78376096, rs76600452, rs75165224, rs76104186, rs79432320, rs74687684, rs138792429, rs79919374, rs76656205, rs76666162, rs74717885, rs138808791, rs138809523, rs116592903, rs77614747, rs78136603, rs78430219, rs77279149, rs113442317, rs138832868, rs77639339, rs76202479, rs75273348, rs115053604, rs115070820, rs115079583, rs75276273, rs138887070, rs77666771, rs113510244, rs138906518, rs113517900, rs78764004, rs79065817, rs115145298, rs113546895, rs76784957, rs76250276, rs79788213, rs115174567, rs78268156, rs75788951, rs80059486, rs111706092, rs138982168, rs78533485, rs116747483, rs116757635, rs77400992, rs77429609, rs78555408, rs77430470, rs116775165, rs78572037, rs111749887, rs78030662, rs115278916, rs77447156, rs112096867, rs77792382, rs111763460, rs139073590, rs139077552, rs113641258, rs115304862, rs79637588, rs113307245, rs78072216, rs115322672, rs139127319, rs79657050, rs116839902, rs112167921, rs78911172, rs139145771, rs77494117, rs77498602, rs140584680, rs77832548, rs140586646, rs140586837, rs112208946, rs142285029, rs139183312, rs78925986, rs142291710, rs115398609, rs79696334, rs79699948, rs111788645, rs78375070, rs116978510, rs139202682, rs140609990, rs139209095, rs113702854, rs142290902, rs140612029, rs111791003, rs144011676, rs139234051, rs113349048, rs117054214, rs115461401, rs115463830, rs113350292, rs117127921, rs144037687, rs138786127, rs117172096, rs80226178, rs145641317, rs111818369, rs78408010, rs145646766, rs80231475, rs78972291, rs145653270, rs140705012, rs144060047, rs78425180, rs78425552, rs79952096, rs142379529, rs115041752, rs117290569, rs113822182, rs138839539, rs116628149, rs117326062, rs139332101, rs80255330, rs80002357, rs80006519, rs111929446, rs140747561, rs113846326, rs139342389, rs138953921, rs78517441, rs117410794, rs139355449, rs145712124, rs144106464, rs115540622, rs140780000, rs78521824, rs112412281, rs145756648, rs140797187, rs144141505, rs113905052, rs113906876, rs145763796, rs111987089, rs142452408, rs115578032, rs142456544, rs112438902, rs115176845, rs116740463, rs115210980, rs112448598, rs139015515, rs113939511, rs139026574, rs115253440, rs80325317, rs115279590, rs112098638, rs113636288, rs80128036, rs79171423, rs140566252, rs113990917, rs145847820, rs140870671, rs142520904, rs142531478, rs142537392, rs139164311, rs80353453, rs140620366, rs144258322, rs117971941, rs144270136, rs113721356, rs144280576, rs145900411, rs112241763, rs145909172, rs139221219, rs142577858, rs80189337, rs139497781, rs144304164, rs140924179, rs113743626, rs142607973, rs142609868, rs145623369, rs145638853, rs145644439, rs140694303, rs113795932, rs144060105, rs145966245, rs144343627, rs144350950, rs139303119, rs137858823, rs113815422, rs140718301, rs142653846, rs140967053, rs114121783, rs113823503, rs146002710, rs139318118, rs146012997, rs145694222, rs144397305, rs140744190, rs145695788, rs112374164, rs146030335, rs137906740, rs137907619, rs139590561, rs139347661, rs115758563, rs139603863, rs115776862, rs142731973, rs114191117, rs140788096, rs113913395, rs137938197, rs139621796, rs140816989, rs114202728, rs112442677, rs141030398, rs145791541, rs139638446, rs140825889, rs142773696, rs141044126, rs115823268, rs112451159, rs139655085, rs115824540, rs137972593, rs139436496, rs80330106, rs115837249, rs117781194, rs142804903, rs144220322, rs117804016, rs139453999, rs117826090, rs138013199, rs146136000, rs80353358, rs142540598, rs118031740, rs118048890, rs115887811, rs114058400, rs111335090, rs114268288, rs146147517, rs112776922, rs141120303, rs142884499, rs145916303, rs112795612, rs139778465, rs138063699, rs115938712, rs112807185, rs146151670, rs115945867, rs141158867, rs112814239, rs118142546, rs112557765, rs112821664, rs142619328, rs146217391, rs144632769, rs118176556, rs111393144, rs141202753, rs114348777, rs114088444, rs142954440, rs142621106, rs142629016, rs142644472, rs114107846, rs139874134, rs137859898, rs116018808, rs139885935, rs146254874, rs144379693, rs139911346, rs139914498, rs114130638, rs114138805, rs112604496, rs142698764, rs146028829, rs141278729, rs141281250, rs141283962, rs115757457, rs138164487, rs141296602, rs111280947, rs116076958, rs114191901, rs116083182, rs112666781, rs141313658, rs139628764, rs144482572, rs139988577, rs139643125, rs115823858, rs144508177, rs141368548, rs112711636, rs146336567, rs144763796, rs138262927, rs146347267, rs112718371, rs112992581, rs116160784, rs143101885, rs143105432, rs138286254, rs137991764, rs142813340, rs139687189, rs141072660, rs138298994, rs138299054, rs114266972, rs111535759, rs144546246, rs115880750, rs112774699, rs146386441, rs138329907, rs146388287, rs138332359, rs111558766, rs143138384, rs144583356, rs146410320, rs139793167, rs111560636, rs141493524, rs144831552, rs115954335, rs115961894, rs144618012, rs114346323, rs141207048, rs139861061, rs139868704, rs111608351, rs138413438, rs139869028, rs139871010, rs144872087, rs144663135, rs144682166, rs146266397, rs138441634, rs138140385, rs146504454, rs138446432, rs114675199, rs116283332, rs141265556, rs146269698, rs146536985, rs138147559, rs144701286, rs138479208, rs114406379, rs143024212, rs143264613, rs144944369, rs143031301, rs140226239, rs 114730273, rs144953866, rs140231835, rs143277276, rs143033805, rs144962987, rs144965407, rs113228724, rs112947752, rs143061067, rs138522956, rs112962289, rs143067587, rs138244837, rs138532656, rs143092568, rs113004353, rs144993642, rs141622599, rs138290893, rs144788268, rs140288103, rs145032037, rs148912801, rs138584614, rs116371612, rs114527316, rs111535651, rs140292361, rs116186275, rs147344305, rs140083486, rs116378536, rs147345366, rs146662148, rs146665502, rs114543527, rs143150064, rs140129291, rs140123977, rs147360518, rs147376215, rs148963942, rs140304433, rs111582470, rs114596106, rs146704349, rs111588318, rs146438705, rs148975124, rs141514848, rs140158387, rs146474062, rs143418279, rs143423796, rs138416003, rs143185270, rs145106473, rs141703064, rs143438557, rs146479108, rs147445259, rs111620886, rs143208505, rs140203445, rs144919534, rs141575712, rs143491160, rs138477203, rs149052241, rs141738882, rs143496663, rs146542549, rs138702864, rs138489639, rs140226131, rs147482520, rs116317277, rs145182287, rs143523403, rs146582696, rs140453378, rs116529743, rs141763377, rs140239113, rs141767849, rs149102632, rs149103805, rs146593371, rs146596599, rs138739418, rs138739984, rs149123514, rs147289725, rs145238729, rs143303688, rs140490223, rs145243270, rs145245086, rs138540340, rs140273297, rs138751097, rs116353929, rs147549873, rs141801022, rs145034515, rs141808591, rs138760782, rs140292358, rs141648641, rs116378521, rs138769910, rs147354941, rs149167436, rs145051453, rs143399681, rs146689576, rs183565671, rs183561912, rs150686487, rs183573402, rs183577345, rs183580604, rs183581155, rs148965675, rs183569836, rs141869733, rs145298386, rs146901495, rs146699775, rs140330685, rs149229532, rs143668889, rs143411470, rs147622431, rs145313578, rs183615396, rs145092172, rs150729991, rs148979438, rs146711476, rs143687224, rs141906309, rs116437284, rs147636922, rs147640811, rs143427574, rs143451118, rs143708033, rs149027411, rs181865293, rs143709643, rs145340027, rs141723935, rs185522622, rs185522810, rs181869465, rs185525142, rs141930243, rs181871003, rs185526823, rs147660344, rs146769210, rs143478744, rs146775048, rs185539195, rs140413972, rs147468252, rs147477938, rs146955434, rs141953246, rs140434227, rs 140436497, rs143744796, rs145364412, rs138718091, rs149301359, rs146965005, rs150817162, rs146985578, rs185593694, rs185602718, rs146811771, rs140473643, rs146999807, rs138738471, rs146832752, rs147748936, rs143816790, rs183768930, rs138746965, rs183788942, rs149399848, rs183791427, rs150923753, rs183799730, rs143575643, rs183805939, rs142093923, rs183818018, rs149136109, rs183822564, rs183831195, rs185711973, rs150636831, rs141806774, rs147803028, rs145481788, rs150972147, rs141810266, rs149155352, rs147080011, rs185745985, rs143601316, rs147089455, rs141828577, rs143610297, rs185754710, rs142163092, rs185756108, rs150671251, rs141861200, rs142173735, rs151025175, rs147835034, rs142177791, rs147836380, rs185779729, rs147844607, rs183584046, rs149496163, rs141878212, rs183921174, rs185796360, rs150711867, rs145311098, rs147627083, rs149504103, rs181850230, rs147130891, rs182065304, rs147150438, rs147150831, rs141902986, rs143688921, rs145334310, rs149263149, rs151102881, rs145337110, rs145555974, rs142235256, rs145340685, rs185534939, rs150773437, rs182099780, rs143727515, rs151122253, rs149543388, rs145568435, rs182114202, rs142254865, rs182116133, rs145585399, rs149284340, rs150781655, rs145589241, rs151153639, rs181883390, rs185892805, rs181886540, rs181887848, rs142276689, rs150794611, rs151164057, rs143785361, rs147726233, rs182150399, rs150869539, rs189087246, rs147245558, rs147246725, rs185913998, rs147248202, rs182159310, rs187294988, rs185622522, rs143836137, rs182164162, rs189095754, rs183802558, rs182172558, rs182172623, rs185925201, rs149423420, rs190751314, rs149438235, rs184067623, rs182182858, rs187321885, rs142124216, rs142130662, rs147961692, rs187344188, rs187345429, rs187347944, rs150977149, rs151236225, rs142153580, rs145498582, rs149618725, rs147093541, rs147989553, rs185763094, rs149628162, rs192543709, rs143920053, rs149491608, rs190819062, rs186001967, rs143937123, rs147127695, rs143944251, rs186018447, rs190838007, rs142203398, rs142203439, rs151303346, rs148044382, rs182070940, rs148046286, rs186037221, rs190856768, rs189166554, rs149673049, rs149682089, rs182084800, rs151100738, rs149685953, rs143975030, rs186083535, rs186088932, rs186097291, rs145560590, rs142241210, rs189208614, rs148118014, rs180693528, rs189211409, rs142241842, rs189220337, rs142243747, rs149734017, rs184015310, rs182369811, rs149558965, rs189232400, rs148138968, rs180715583, rs184021595, rs182136867, rs184024677, rs149567375, rs147235762, rs189244893, rs184253074, rs180722746, rs189247011, rs184253923, rs147238494, rs142283415, rs192680745, rs192684234, rs180743233, rs182411879, rs147248566, rs148181348, rs182418286, rs182421319, rs151182542, rs180758590, rs187566637, rs187568429, rs182435282, rs189097686, rs187577232, rs147942405, rs182180325, rs189321138, rs187593401, rs147952331, rs184074681, rs192761449, rs190781749, rs187355509, rs148255093, rs148256707, rs147979545, rs192532318, rs149883899, rs191074489, rs187364105, rs190809335, rs191083658, rs190810052, rs192819009, rs186301583, rs192827045, rs191110084, rs149931081, rs182549545, rs148330433, rs182555158, rs149642957, rs182562114, rs190832282, rs149954509, rs186334861, rs151291523, rs186351725, rs192569261, rs186353077, rs148364832, rs186355136, rs148041371, rs186031413, rs186360219, rs189460985, rs189463163, rs184183338, rs151330784, rs189182365, rs186079267, rs186099028, rs184218959, rs189216600, rs148129688, rs180706783, rs184236774, rs192901914, rs187765626, rs184495331, rs189487117, rs150018770, rs189494075, rs180717173, rs189504269, rs192670717, rs148429438, rs187511640, rs184249898, rs191234485, rs182387080, rs187808137, rs182673367, rs184545297, rs148450274, rs191246407, rs186138216, rs191250432, rs182390557, rs187841420, rs186473085, rs187855541, rs150111722, rs150112735, rs192704694, rs180755356, rs186194268, rs192741793, rs150127567, rs180993353, rs149825659, rs148504955, rs187603966, rs184344137, rs191041515, rs181012760, rs191050433, rs191056911, rs148527743, rs181028945, rs182782223, rs193068892, rs149879183, rs149892218, rs184393798, rs192814896, rs148339462, rs189651151, rs191141552, rs191367686, rs191368319, rs191370507, rs193092710, rs191371907, rs191378981, rs187722586, rs189676945, rs191397139, rs189453271, rs191399247, rs191157471, rs148577011, rs184460575, rs187992932, rs148586849, rs184707511, rs186364625, rs150247775, rs189468147, rs188008774, rs184718295, rs184472270, rs150260693, rs189723257, rs188022604, rs150270652, rs187741942, rs188026845, rs189736165, rs193171154, rs184474289, rs193176707, rs186659213, rs148619598, rs189471696, rs186665407, rs189758917, rs184480031, rs189475537, rs148392780, rs150006666, rs187780686, rs184521520, rs150041813, rs186699158, rs193230387, rs193235425, rs192941210, rs192946276, rs184550594, rs182690100, rs182726729, rs182731407, rs188104502, rs148663098, rs188122503, rs183001463, rs193013326, rs150123110, rs181263201, rs148504740, rs193028715, rs181265856, rs183011735, rs184835712, rs193035864, rs181010831, rs184837674, rs181014358, rs181275300, rs183022993, rs181278078, rs181280574, rs183030743, rs148691494, rs148525974, rs150385277, rs186779968, rs150392923, rs191590117, rs189885172, rs181035483, rs188175436, rs188177089, rs182787957, rs150404802, rs148537653, rs182790885, rs199503439, rs188190842, rs182796893, rs189902292, rs181048561, rs199518078, rs191389107, rs184687608, rs184692730, rs191630392, rs189929388, rs150427788, rs193136857, rs187998850, rs199535863, rs199537685, rs188002678, rs184720281, rs199542685, rs150442007, rs191651308, rs184937383, rs148748248, rs191661504, rs184733410, rs184946896, rs184955143, rs184961423, rs189981811, rs191624001, rs188281457, rs191625632, rs148734327, rs191639316, rs184925249, rs189741283, rs189753266, rs148785001, rs190003294, rs148626845, rs150301002, rs186674163, rs199618633, rs181191577, rs183204453, rs190032565, rs181470229, rs148639634, rs188068490, rs181478384, rs186694207, rs150333337, rs193244433, rs150522419, rs181490761, rs188102848, rs148657856, rs150532132, rs150342209, rs188358961, rs182981064, rs188367936, rs186940666, rs181514587, rs181524665, rs186740589, rs183006080, rs185089440, rs188134250, rs184831220, rs188400109, rs183283744, rs186753079, rs199700318, rs199703203, rs183015228, rs183290427, rs183290817, rs148905110, rs188413410, rs183019891, rs188418456, rs199715855, rs190126408, rs186981332, rs150584170, rs150383700, rs186988319, rs199734710, rs181307118, rs191600920, rs191610642, rs148715852, rs191869263, rs189901931, rs199517448, rs189916807, rs189985920, rs150476713, rs190178542, rs199541482, rs199556289, rs185184782, rs191894457, rs150480773, rs202040659, rs148778612, rs191925752, rs148780220, rs186885716, rs190176472, rs199593898, rs181665883, rs183406464, rs202063632, rs183412380, rs190240971, rs190014395, rs150501065, rs183417225, rs181460611, rs191958854, rs181462461, rs190272533, rs185281319, rs202094206, rs199865446, rs185287024, rs188582091, rs185299050, rs185024438, rs181475638, rs188338964, rs181483923, rs199641736, rs199645904, rs186929314, rs190308492, rs202117012, rs199892190, rs148851890, rs188365902, rs148875365, rs185086938, rs187137475, rs186966076, rs188399816, rs188630630, rs187147755, rs202131976, rs187154278, rs202134330, rs150565310, rs187164654, rs202143516, rs199704443, rs188656041, rs183295052, rs183539858, rs369390668, rs187193759, rs369399424, rs199727999, rs186993303, rs202174472, rs199973777, rs190147347, rs192095965, rs188444642, rs190158143, rs190162168, rs371446733, rs199758845, rs371452205, rs202189258, rs200584416, rs191878936, rs371463277, rs373492703, rs183344898, rs202197776, rs202029201, rs202199966, rs373504863, rs375572917, rs192146782, rs199787775, rs369471212, rs200601591, rs202025197, rs192162577, rs375588154, rs200046448, rs191920966, rs375598820, rs181660507, rs369497131, rs181663245, rs200063383, rs371531127, rs199812598, rs200597401, rs181665495, rs188826311, rs192219936, rs188832627, rs200108785, rs200645452, rs188541589, rs181682865, rs375655711, rs181688711, rs369562725, rs190265437, rs190293501, rs190298288, rs187111894, rs185309002, rs190301922, rs199882603, rs267599803, rs267599804, rs187118004, rs267599806, rs190315816, rs190317291, rs369570716, rs200138840, rs188856233, rs190498981, rs188860567, rs188616319, rs200539683, rs187140106, rs188622649, rs199927297, rs367555222, rs371606581, rs199931920, rs367566025, rs200163378, rs188660331, rs369399641, rs367571651, rs367571807, rs371613636, rs369608086, rs371423872, rs188884870, rs202176279, rs200577751, rs375711571, rs369417568, rs369423609, rs200583405, rs202192818, rs200737144, rs188912723, rs369449920, rs3 69642696, rs188914048, rs192134065, rs200610228, rs192166263, rs369658549, rs200761212, rs369656358, rs375765886, rs367661413, rs375766727, rs369495152, rs190535962, rs3 71527903, rs200249016, rs190540941, rs375799332, rs190546528, rs200798617, rs3 69509292, rs373709275, rs188806060, rs190531276, rs200087066, rs188836606, rs200111928, rs373589491, rs267599796, rs192385827, rs367751260, rs373745889, rs267599797, rs267599798, rs267599799, rs267599800, rs200304117, rs267599801, rs367769201, rs267599802, rs375886082, rs200324539, rs373781396, rs200332178, rs267599805, rs200870389, rs375904859, rs267599807, rs267599808, rs192414996, rs375913659, rs373801645, rs375924387, rs373809612, rs192265142, rs367548480, rs375935709, rs371600996, rs200901459, rs371602570, rs369774732, rs375940680, rs192268894, rs373828290, rs371808910, rs371609091, rs373851282, rs3 69602237, rs371834340, rs371834396, rs200699649, rs200174644, rs200713724, rs200714519, rs192467232, rs189079827, rs373642730, rs373910122, rs369827785, rs369629253, rs367612792, rs371904852, rs200443068, rs367618914, rs192487302, rs367955173, rs200448110, rs375735101, rs367960285, rs192493052, rs188918938, rs188923501, rs200237524, rs371924465, rs200993949, rs192495980, rs377606777, rs376067342, rs369668580, rs376077436, rs376077984, rs371945432, rs200267333, rs377618865, rs373714409, rs190555109, rs201024779, rs201025253, rs368004835, rs3 67725043, rs528335161, rs200815649, rs200823247, rs367743519, rs190564167, rs371995171, rs3 74029324, rs375858081, rs201053512, rs201054824, rs528370535, rs372009758, rs373750985, rs369923291, rs367760568, rs190568652, rs376148432, rs532092884, rs532095679, rs375874475, rs372025323, rs192396596, rs373784889, rs201068959, rs373795368, rs374060366, rs200879597, rs200889952, rs369945036, rs374066106, rs530311911, rs375926577, rs200361632, rs375940201, rs377716847, rs371803816, rs201091432, rs200918296, rs189057351, rs376193439, rs374093540, rs369978695, rs373876714, rs369984227, rs371863409, rs373893549, rs377757205, rs3 73 895 507, rs192475064, rs367943464, rs376226677, rs192482373, rs371909817, rs386396393, rs532177433, rs192488609, rs376251291, rs373947111, rs368159955, rs376057050, rs376057473, rs192504766, rs532196313, rs530398209, rs376266826, rs532199869, rs376080236, rs376090722, rs376099070, rs372137132, rs201026317, rs372138097, rs377649113, rs372142892, rs372146969, rs201041635, rs528506058, rs3 68186964, rs371987028, rs530423836, rs368191733, rs369906031, rs370084146, rs374033766, rs528371544, rs376146289, rs386660286, rs368207036, rs532090835, rs376153813, rs3 6993 5924, rs530301579, rs528540075, rs372191342, rs368065439, rs376163268, rs528393007, rs377708853, rs528549934, rs377708955, rs370131320, rs376343695, rs3 74242803, rs376346970, rs377714367, rs532274257, rs369959721, rs369970181, rs376355408, rs377731348, rs530501593, rs530503299, rs368271861, rs528426085, rs201106879, rs532149322, rs372256771, rs376220561, rs372090047, rs372268339, rs370200847, rs370202955, rs368312678, rs370208223, rs377766905, rs370009920, rs532339395, rs368326176, rs528637794, rs376432760, rs201126911, rs368335170, rs376437999, rs532353167, rs368148239, rs368338265, rs368154191, rs376439863, rs374341474, rs530392612, rs372316396, rs201148315, rs201149530, rs372131801, rs374363082, rs530585904, rs532389161, rs376480649, rs530401954, rs370279521, rs372134830, rs368394544, rs530404498, rs201158753, rs376505122, rs201330370, rs3 68408162, rs3703 11310, rs201342036, rs201342332, rs532426034, rs532431716, rs368183774, rs370321547, rs530422724, rs370324099, rs376528831, rs370332130, rs532442522, rs201 170821, rs530663455, rs528738403, rs201 174558, rs374447261, rs376547262, rs532229141, rs528745360, rs376306161, rs528749741, rs374458684, rs370362441, rs368212766, rs370096923, rs201397469, rs376590413, rs530450174, rs532492937, rs532497883, rs201412394, rs532246999, rs528793833, rs530718233, rs201417933, rs201191510, rs376615330, rs201427366, rs368530024, rs372497560, rs53073 5828, rs372199281, rs368232949, rs372203138, rs528820774, rs530467294, rs201443063, rs528563285, rs368548643, rs376640157, rs528834599, rs3 72527026, rs530760750, rs368250071, rs374566362, rs370465585, rs370467140, rs372539263, rs372540950, rs368582725, rs201474854, rs374252851, rs530493685, rs201234101, rs376680141, rs376686011, rs528588768, rs376688035, rs372250251, rs370505237, rs530798879, rs368613923, rs532310183, rs368287697, rs374319143, rs374319726, rs372593412, rs201511271, rs368334638, rs201279997, rs201280426, rs530569146, rs374352107, rs374355638, rs372606098, rs374357474, rs368652459, rs370545434, rs368655741, rs397989266, rs530838760, rs370553488, rs376743851, rs3 97725667, rs528925445, rs532630465, rs372625886, rs374658847, rs374381704, rs372368062, rs532653015, rs372368914, rs532659414, rs530879729, rs528718885, rs374422986, rs201574155, rs201575317, rs370610736, rs376542161, rs376810032, rs374444864, rs397781638, rs370354229, rs372702302, rs368468072, rs376825175, rs532682987, rs398091423, rs376830369, rs376830959, rs370373215, rs372714131, rs530924737, rs372716583, rs376837810, rs372462555, rs201415200, rs397823933, rs368768407, rs529018314, rs532696447, rs530737082, rs372731104, rs370435340, rs368776882, rs530946608, rs530738355, rs368783421, rs368784330, rs376864885, rs532708277, rs527245666, rs368793970, rs530969195, rs368807551, rs530740152, rs368548450, rs201645018, rs374811115, rs374813241, rs374813942, rs201461161, rs370483003, rs370722965, rs532571006, rs527290934, rs532741358, rs368833802, rs374832092, rs374834768, rs529092927, rs370747628, rs527308424, rs529096752, rs532577670, rs397940263, rs370757130, rs370779258, rs368882064, rs532774213, rs201698323, rs531051960, rs527343838, rs532587981, rs528880554, rs530805325, rs201706560, rs376710013, rs201715075, rs370528120, rs368637625, rs376719832, rs530821160, rs531087683, rs368641131, rs368641356, rs527386555, rs527386649, rs528905838, rs370542880, rs374943538, rs370554884, rs368680871, rs370576142, rs372907454, rs370880796, rs532837881, rs201753955, rs368972137, rs376780249, rs527426975, rs527429406, rs370603046, rs368988162, rs532852883, rs372674279, rs368994663, rs374712004, rs529232924, rs370912250, rs532677120, rs201789970, rs370916238, rs370917734, rs376815753, rs369008282, rs531149183, rs375012793, rs531153501, rs529249887, rs201588811, rs528992131, rs201815569, rs376833295, rs532889539, rs529010473, rs532891533, rs376840011, rs201827217, rs398105784, rs527496324, rs374757251, rs531187706, rs532903401, rs530941689, rs368781697, rs375092799, rs530977123, rs369107357, rs201871493, rs373062032, rs369118138, rs375110584, rs530980304, rs532943940, rs529077212, rs201659685, rs201660983, rs373083732, rs373085099, rs369137515, rs375130652, rs373090976, rs373090978, rs527567934, rs527577666, rs369175449, rs369177599, rs529364243, rs372804021, rs377243610, rs527612542, rs369198406, rs531287695, rs531288030, rs201680315, rs532780338, rs201703460, rs529136771, rs375206783, rs370805147, rs201955990, rs529406007, rs373178280, rs373180523, rs377000636, rs375226637, rs532793715, rs532795095, rs370823133, rs371155753, rs371161866, rs531091887, rs529430738, rs377023962, rs373209450, rs532821156, rs201748424, rs529186479, rs201985536, rs527401897, rs532839682, rs377064303, rs529449733, rs531352324, rs527429750, rs368992843, rs368997757, rs371207458, rs373246821, rs531141746, rs529242846, rs529251876, rs377340092, rs377121469, rs527726784, rs531378087, rs531378148, rs377351542, rs377136135, rs527529994, rs527741146, rs371256706, rs371258438, rs371261235, rs371262603, rs529501356, rs533085687, rs531398994, rs371190261, rs529508826, rs373289508, rs373289770, rs371276636, rs373294325, rs531174002, rs533101173, rs373312464, rs527779170, rs529536286, rs371319837, rs371324921, rs370960686, rs370965011, rs371331011, rs373340363, rs537561639, rs371337228, rs371339739, rs371341956, rs533123408, rs373347787, rs371344658, rs375383218, rs533996130, rs373351802, rs529287701, rs531193598, rs527814504, rs537585716, rs529297933, rs377191016, rs375119710, rs377197892, rs533136525, rs373370616, rs527556006, rs534025340, rs534034285, rs531476633, rs373128353, rs377467259, rs527838045, rs371378512, rs533152242, rs373391820, rs375425965, rs373153845, rs373411320, rs375444748, rs537640516, rs375445266, rs537640883, rs377492327, rs373160617, rs537644424, rs527869814, rs533005675, rs529608147, rs375206276, rs377268502, rs375460544, rs527889225, rs529415423, rs373186045, rs527896905, rs534112672, rs527898450, rs531534134, rs377285775, rs527659306, rs527667182, rs541087152, rs375493653, rs375495589, rs373207903, rs373470651, rs541104437, rs53303 5283, rs534145207, rs373216811, rs371174915, rs537719396, rs527925946, rs371182579, rs373484435, rs533222318, rs533224721, rs527689419, rs375274122, rs534170958, rs375533691, rs527945373, rs534180924, rs534182984, rs373239972, rs373299553, rs527706401, rs529465857, rs544723760, rs373253430, rs371221408, rs527975518, rs377342185, rs533267440, rs548630441, rs527981727, rs541186547, rs369341391, rs531615941, rs533980472, rs552363373, rs537817433, rs541210169, rs533293722, rs534248589, rs529741154, rs537826926, rs529486277, rs373337849, rs533089192, rs529562840, rs548605926, rs548693615, rs548695367, rs534270052, rs533335356, rs548710273, rs528036607, rs531580640, rs541269701, rs375561969, rs529780064, rs375393229, rs528043716, rs527816139, rs531668087, rs528048587, rs533362361, rs537873404, rs528054745, rs533371459, rs375397639, rs537589520, rs375401531, rs537596005, rs548758031, rs552474728, rs552475236, rs548766538, rs534320104, rs529831406, rs533149362, rs527845696, rs375446335, rs548776154, rs531709513, rs541336587, rs534336374, rs529845623, rs537647764, rs531719725, rs531726594, rs529856627, rs529861077, rs529610244, rs537935929, rs544900253, rs529879143, rs375458594, rs541064909, rs377518708, rs541077292, rs537693173, rs548839995, rs548840715, rs531765618, rs552561226, rs552564806, rs531537455, rs373466551, rs534395258, rs537715922, rs373480698, rs531799424, rs528148307, rs537718192, rs537988553, rs533495341, rs533221803, rs541438339, rs531817090, rs531827263, rs548903231, rs548903941, rs533229786, rs552625227, rs544986234, rs534163 83 8, rs541470385, rs548928131, rs541266364, rs529978453, rs548606038, rs545005755, rs541495996, rs552676116, rs537784098, rs552331272, rs533569467, rs538053655, rs544731403, rs545041202, rs548635836, rs534483515, rs534483979, rs531616533, rs5 52697740, rs552697972, rs531637327, rs552701019, rs528207959, rs548997227, rs534255473, rs541528275, rs531919864, rs541246661, rs549012584, rs544786609, rs549028107, rs534512754, rs531950539, rs528235662, rs531961820, rs528025263, rs552652367, rs538109523, rs552432767, rs528040799, rs552783622, rs552786924, rs5333 52974, rs537878584, rs549093627, rs528274909, rs541595468, rs528292089, rs549117810, rs534302559, rs534576907, rs528065454, rs549122638, rs528301097, rs532025611, rs544845391, rs532031683, rs534586191, rs544855532, rs545175018, rs545176630, rs533719310, rs549145751, rs530167608, rs529833633, rs552864534, rs556555939, rs541325272, rs530179501, rs545200437, rs538184714, rs533745851, rs533414998, rs541664626, rs560631745, rs541681008, rs560651179, rs541686252, rs552926060, rs556599635, rs556603094, rs549191107, rs534651601, rs533788730, rs564642885, rs552946000, rs538224121, rs533799439, rs537932874, rs531749825, rs560686621, rs541710974, rs560689703, rs545286195, rs560701216, rs564675504, rs533447134, rs533453573, rs549218933, rs552994545, rs529890639, rs552551109, rs544929875, rs541747884, rs553018502, rs534391364, rs560762028, rs548866389, rs553033988, rs560772996, rs552586846, rs548883242, rs548890238, rs552623477, rs528166781, rs541475904, rs538289254, rs534725275, rs560799904, rs530007804, rs5 56708490, rs553079982, rs538305462, rs568929429, rs538045341, rs541806054, rs538109678, rs541813611, rs533576361, rs560847027, rs568953105, rs548983995, rs533583465, rs538064426, rs530038819, rs568962634, rs552720521, rs538332029, rs564864074, rs549015878, rs545100883, rs538359152, rs541858070, rs534529524, rs549324716, rs564901373, rs564904479, rs564812162, rs553188541, rs538116333, rs5 52795944, rs556798151, rs541804553, rs545511554, rs560838702, rs545513037, rs549087044, rs538152809, rs533697506, rs560969762, rs545168308, rs552848228, rs564957486, rs538413808, rs549151040, rs564959023, rs549358948, rs549359376, rs545194304, rs538419177, rs541899935, rs532080737, rs533800261, rs534661314, rs564683716, rs564684092, rs561004333, rs552998607, rs549229157, rs534870324, rs541923723, rs553291751, rs538474463, rs569104556, rs569111728, rs564712470, rs569113870, rs541945980, rs545338176, rs538498693, rs533862692, rs560778802, rs533876575, rs534925255, rs545634400, rs565081842, rs541967141, rs538280482, rs553047061, rs538547128, rs553383175, rs560786134, rs541983082, rs569168744, rs569173187, rs534720210, rs549264025, rs553198970, rs545684846, rs569187768, rs569033866, rs565154037, rs556959343, rs549341906, rs565159780, rs565160041, rs561179339, rs549343940, rs556968079, rs535005346, rs553109931, rs553110152, rs549473092, rs541819382, rs556986297, rs553112654, rs545433120, rs569217647, rs545463713, rs542028713, rs557011350, rs549492178, rs538356389, rs569020006, rs553188228, rs560964601, rs557031273, rs565151632, rs545695796, rs545513830, rs564941540, rs553505777, rs564943632, rs545530625, rs535073221, rs553241209, rs534829443, rs569261408, rs542077418, rs538424833, rs549363739, rs553522655, rs553256315, rs565252693, rs561002322, rs545792078, rs545793355, rs553541087, rs557089187, rs538432148, rs553260454, rs553274082, rs541943675, rs565043664, rs542114408, rs545818948, rs557116983, rs535135021, rs545834669, rs561303200, rs561076996, rs553345031, rs542150774, rs557149576, rs549417348, rs561114332, rs553381404, rs534955920, rs542162046, rs549576562, rs549458141, rs561323138, rs561166361, rs561 168246, rs557034954, rs557178092, rs538779705, rs553629979, rs565360656, rs569337654, rs561222929, rs535193986, rs569343615, rs553641547, rs569196602, rs569199529, rs557037295, rs553438803, rs553445383, rs553659120, rs565389275, rs553450279, rs557214946, rs542211065, rs553671274, rs557220292, rs535228630, rs535019900, rs538621149, rs557015322, rs538826221, rs549496498, rs545929782, rs565418897, rs542041294, rs538837620, rs549505560, rs561388615, rs553508395, rs565433973, rs542063894, rs542042787, rs553513535, rs542243991, rs538849156, rs542071129, rs569264903, rs565450907, rs553722145, rs561249795, rs5 57072486, rs553533907, rs565457429, rs565458714, rs535276217, rs549697762, rs549699376, rs542269135, rs557296011, rs561426585, rs535106728, rs538890121, rs542182004, rs557317287, rs538902148, rs535312761, rs557095386, rs557327045, rs565278706, rs542108994, rs535326832, rs565518840, rs549751601, rs535115766, rs535344588, rs569316735, rs549767442, rs565536879, rs561469411, rs557363840, rs569449017, rs549776383, rs565548682, rs565551040, rs553823792, rs557383939, rs538750257, rs549795936, rs553599466, rs549797185, rs553599560, rs535162313, rs546079854, rs549816209, rs557157259, rs557160502, rs538986722, rs553618576, rs535183488, rs557440160, rs538775892, rs535200883, rs546004301, rs569347355, rs565385729, rs549621186, rs557209188, rs557472446, rs542438681, rs545907456, rs539041435, rs553913580, rs557226717, rs557229007, rs557231872, rs542226063, rs542456890, rs535242654, rs553928700, rs549894343, rs557504772, rs549658115, rs542237413, rs557511994, rs549908911, rs535253686, rs546175363, rs535484821, rs549919467, rs545944280, rs565704817, rs542243936, rs561399032, rs561405092, rs557547731, rs549685862, rs542509395, rs546214652, rs565453934, rs546215663, rs561408063, rs545991022, rs557314075, rs553982941, rs539124418, rs561606670, rs557574984, rs538914388, rs535427130, rs549981864, rs565625383, rs546124690, rs546130204, rs565766555, rs539034735, rs539040773, rs553913825, rs557602335, rs542554745, rs542558524, rs553914657, rs554017366, rs550011049, rs565790219, rs5 53784643, rs539173833, rs561645651, rs539179209, rs539183118, rs557352376, rs561655654, rs550047175, rs561665122, rs565533505, rs565567431, rs546311890, rs539215014, rs546066782, rs557396705, rs569465856, rs569471272, rs565843348, rs549823502, rs565601743, rs542632013, rs542632865, rs539229154, rs538998631, rs565855338, rs561521580, rs549850091, rs542643176, rs539249630, rs554097921, rs569716586, rs565660414, rs535550332, rs549879065, rs550122039, rs546156126, rs539267572, rs549902035, rs550131740, rs561726036, rs557734517, rs535478504, rs565916645, rs569751087, rs539295491, rs539299029, rs561756896, rs557761142, rs557513728, rs535496347, rs565940670, rs569543941, rs542719049, rs542496759, rs549942024, rs554169478, rs557550820, rs561806415, rs539118922, rs569815835, rs546216545, rs539352777, rs546218384, rs546219353, rs561825066, rs569832699, rs557578610, rs535766593, rs535767766, rs561838356, rs539382432, rs561614357, rs561860619, rs539386649, rs539386852, rs549987875, rs565767073, rs566036762, rs546478774, rs542801831, rs565890648, rs569877978, rs561620672, rs561627139, rs554012126, rs535566301, rs539406222, rs565793009, rs546491492, rs554244349, rs535671384, rs542588820, rs550292008, rs550056630, rs550294226, rs554062977, rs554252787, rs542832809, rs569904203, rs569669996, rs546316704, rs539436179, rs5 50070310, rs566088937, rs569674985, rs539452689, rs550335201, rs565844486, rs554284141, rs542875735, rs557955529, rs546540133, rs557960582, rs569678808, rs542896410, rs569978717, rs539487614, rs535901586, rs539489539, rs539489876, rs542637647, rs550386068, rs542914501, rs535644932, rs546568309, rs546336229, rs539260152, rs535913192, rs565893128, rs542672440, rs566044822, rs535925070, rs561969220, rs546589893, rs566046950, rs550260345, rs542806189, rs539531796, rs546484939, rs535808196, rs569888576, rs565908359, rs557762342, rs558048852, rs56593 5036, rs570058097, rs554372535, rs558081471, rs542713151, rs539575481, rs554154472, rs566232416, rs569798035, rs565967558, rs542748350, rs566247081, rs557819130, rs557823984, rs557824244, rs565998770, rs566023334, rs550518697, rs539387247, rs557891070, rs535932779, rs558143874, rs535817837, rs561959910, rs550538024, rs561960357, rs539415464, rs542830028, rs562091717, rs570137634, rs562095289, rs570145386, rs539428695, rs539434769, rs570161889, rs566303521, rs566306563, rs550317300, rs566098822, rs569941115, rs546713439, rs562153386, rs554298287, rs554314288, rs557994738, rs561948453, rs566339153, rs557999097, rs546576407, rs566190328, rs543047549, rs550639468, rs542950459, rs558037918, rs535937573, rs570033000, rs570037688, rs539613616, rs570133513, rs562227978, rs562083952, rs550684795, rs566389371, rs558303567, rs558303944, rs554419150, rs570040996, rs550697745, rs550453096, rs558082557, rs536134669, rs562029428, rs570305967, rs539737713, rs535981759, rs550720126, rs570093154, rs550500385, rs535988775, rs570100791, rs550742780, rs562312310, rs558365277, rs566436397, rs543259254, rs562323901, rs536169328, rs558120108, rs562064826, rs546833887, rs550515527, rs536187108, rs535998323, rs550791035, rs562091549, rs562083950, rs539627192, rs554436808, rs543300903, rs562145285, rs543104450, rs539654093, rs539807168, rs562161170, rs546720431, rs566481881, rs539672749, rs55843 5701, rs570218617, rs562183661, rs562196559, rs543133113, rs546745005, rs543132839, rs5 50843290, rs550845895, rs562417776, rs539838432, rs558475731, rs543368282, rs543374005, rs562395121, rs558255957, rs543381042, rs536248326, rs539693867, rs539875539, rs566535038, rs554701659, rs570495212, rs562220425, rs570262409, rs566372781, rs539704919, rs543179493, rs539891892, rs558544036, rs558305325, rs558316454, rs562263006, rs554733806, rs570297775, rs550705817, rs566562404, rs558563868, rs543446158, rs562516908, rs570545452, rs543219384, rs554772874, rs554530019, rs554774669, rs554531018, rs562286761, rs543469924, rs546954387, rs570320602, rs536169927, rs558384946, rs546965918, rs539942232, rs539944659, rs566604715, rs570590018, rs546972113, rs536314608, rs570591366, rs562577196, rs566459394, rs558632233, rs546978504, rs562584140, rs550788909, rs558639346, rs543296358, rs536191389, rs543520479, rs570387360, rs554841206, rs566626931, rs566628711, rs543297536, rs558662033, rs539801579, rs554859167, rs554597273, rs554598088, rs554867521, rs570644854, rs558679007, rs543559797, rs551073147, rs536360171, rs554896245, rs570662964, rs543574832, rs566476097, rs543314471, rs536373517, rs547040703, rs570409419, rs566667607, rs550825845, rs550829115, rs566494492, rs543590133, rs546866780, rs562683151, rs554674005, rs540009230, rs566676845, rs551120006, rs570697807, rs570470232, rs562460418, rs566512376, rs543604520, rs554953151, rs550902759, rs562729444, rs554710753, rs558531553, rs566545229, rs554713839, rs550920542, rs566553725, rs543646551, rs540046777, rs543651491, rs550925190, rs550927979, rs550932310, rs562534202, rs562539996, rs562543136, rs555016660, rs555017817, rs543469607, rs562777298, rs558826084, rs570566948, rs554790599, rs555040790, rs546962950, rs546974447, rs547174324, rs558638155, rs558640467, rs570608672, rs570611176, rs554852805, rs566773145, rs536515480, rs558857800, rs562615672, rs566780115, rs536518560, rs558667707, rs551054474, rs562659842, rs558870171, rs558879829, rs562662746, rs570850004, rs536378937, rs554917970, rs566819640, rs566819747, rs570682027, rs570682325, rs536556466, rs547242462, rs551106826, rs540127066, rs554927360, rs543771540, rs566839490, rs540017210, rs555144412, rs570878620, rs562900499, rs547091370, rs566851258, rs540145101, rs547072501, rs547277814, rs562916365, rs540151196, rs551346309, rs547290831, rs551352401, rs551352507, rs555184897, rs547298150, rs547078962, rs543793996, rs555189413, rs558903351, rs558930737, rs562739851, rs547312685, rs566709145, rs555210681, rs558786750, rs566913539, rs562972646, rs558791009, rs551405814, rs558791264, rs536446347, rs547350742, rs566717656, rs543868401, rs558965887, rs566945486, rs555257971, rs555007276, rs563027295, rs536686009, rs536690468, rs566722601, rs543659591, rs551469899, rs54713 9370, rs547139778, rs551200168, rs570775612, rs536474508, rs543690232, rs551487809, rs555050939, rs567026450, rs543929158, rs536499919, rs536739568, rs543701791, rs562816924, rs551523372, rs540088548, rs547186946, rs551252968, rs56705 5420, rs571087292, rs563110484, rs563117996, rs571099335, rs567076510, rs571107837, rs551258407, rs559051242, rs536789092, rs567101152, rs551577522, rs555098760, rs559063321, rs555427556, rs563165056, rs562852262, rs567125783, rs547231436, rs563172047, rs536546848, rs558883300, rs540357371, rs543998510, rs570853808, rs566823128, rs551625796, rs540375049, rs540381696, rs540384823, rs551638849, rs547245439, rs555489730, rs570871621, rs536849628, rs571202836, rs562944602, rs540134025, rs540401578, rs540408526, rs536616422, rs547597464, rs551665285, rs536872363, rs555523932, rs555526169, rs567208157, rs547303217, rs54043 5213, rs540440718, rs563281935, rs555566484, rs571277896, rs558937636, rs543834085, rs536633848, rs536649755, rs567269429, rs544103213, rs555592459, rs547339606, rs551407725, rs567279252, rs555249303, rs570980957, rs555294563, rs547395011, rs547403253, rs563356861, rs555641156, rs536979545, rs555646896, rs551738284, rs555649722, rs571023678, rs551741701, rs571353333, rs555656668, rs543906030, rs540247915, rs563063023, rs536719675, rs547739724, rs547434765, rs563398907, rs571374544, rs563088270, rs551512256, rs555697633, rs555355386, rs567050922, rs540289986, rs563427850, rs547789572, rs540292319, rs571416972, rs540593967, rs563444595, rs571422766, rs571433209, rs567086181, rs567109885, rs555436937, rs536812861, rs547827972, rs536813836, rs540357212, rs551613713, rs555453515, rs537091263, rs536846404, rs567169368, rs536856876, rs571482337, rs551816827, rs536859847, rs563514624, rs551664025, rs555538871, rs537119698, rs544090516, rs563300599, rs537121501, rs540673857, rs555827256, rs536929970, rs571508089, rs571508668, rs536935483, rs555592945, rs547679346, rs555836866, rs559166014, rs571323007, rs551724326, rs555635702, rs567506502, rs567507724, rs536971399, rs563566970, rs571352583, rs563568347, rs551844242, rs559340497, rs551846278, rs551846743, rs559341841, rs547931286, rs544151150, rs563577745, rs563382713, rs547737303, rs536996846, rs559363106, rs571364152, rs571558410, rs563595280, rs571567928, rs567350465, rs540563293, rs555899416, rs555902023, rs540753264, rs547970431, rs567363248, rs563415295, rs547983951, rs544173340, rs537043752, rs537214406, rs547812246, rs551879480, rs547993868, rs548000107, rs571435808, rs567420353, rs559424092, rs547823486, rs563483716, rs540629441, rs540629515, rs555976770, rs555777449, rs551809589, rs567446716, rs567641815, rs567646528, rs571660279, rs559261006, rs544349356, rs548065850, rs540840346, rs559276331, rs559278483, rs551928440, rs567689357, rs551929310, rs559279810, rs571504242, rs537318827, rs547895473, rs551940292, rs559532875, rs547878540, rs556065157, rs537345532, rs544388762, rs544393130, rs540895241, rs540866519, rs544257311, rs559556837, rs559309453, rs547899913, rs571753726, rs563746387, rs567761568, rs563757457, rs537379654, rs567498471, rs544427671, rs544262353, rs556121669, rs540690647, rs556127297, rs559598698, rs559606541, rs537405489, rs559321279, rs540706169, rs551987834, rs559337010, rs559347626, rs544465965, rs571550179, rs563806842, rs548230137, rs540986538, rs544487528, rs540728015, rs571850223, rs556197881, rs555884132, rs547949414, rs541001709, rs567863701, rs559372796, rs559680959, rs552019644, rs567869203, rs567870454, rs547961099, rs541016855, rs567879125, rs541021339, rs571586522, rs544522476, rs540767323, rs555921135, rs537482386, rs571594220, rs548285643, rs547989866, rs556253885, rs563871364, rs577033710, rs567599038, rs544321880, rs571620138, rs572884688, rs537243271, rs540808581, rs571637853, rs548036815, rs559451854, rs567936071, rs572895474, rs577054727, rs571650383, rs559767097, rs548336215, rs563896028, rs556305053, rs577068480, rs555995534, rs556309001, rs577070742, rs548344372, rs540844595, rs567959669, rs567961754, rs571688001, rs537313785, rs548095617, rs559791432, rs551946194, rs571988542, rs577105076, rs577106997, rs571995770, rs56773 0925, rs559814837, rs548390003, rs563934615, rs548396932, rs544640074, rs556079236, rs559560231, rs571750965, rs577128601, rs544426243, rs568011120, rs568013209, rs540928678, rs572034102, rs552131496, rs556122502, rs568022195, rs556145294, rs537412583, rs563794521, rs548206366, rs572052337, rs568041807, rs571831052, rs568049189, rs568058428, rs573030624, rs544489108, rs552170259, rs548247489, rs563828707, rs568078114, rs556212440, rs572088894, rs552021815, rs548274362, rs544523548, rs563990413, rs556235464, rs544529883, rs571903551, rs548309130, rs573077502, rs572106664, rs568110435, rs559955686, rs567924525, rs572112442, rs567926424, rs577045354, rs552234790, rs573113401, rs552058068, rs568148811, rs573121367, rs548550253, rs559998638, rs556287145, rs571938005, rs548558872, rs572890684, rs577290955, rs577292261, rs572150714, rs559765216, rs572155672, rs572158471, rs544586948, rs572913959, rs573160601, rs747712985, rs560043632, rs573167200, rs563907502, rs571973015, rs556526024, rs556327353, rs567975949, rs760198840, rs760210419, rs573205862, rs560088419, rs544623102, rs755845974, rs760222861, rs747770564, rs544640954, rs560106879, rs568266593, rs755863114, rs573235194, rs568274876, rs544640966, rs564101462, rs560103717, rs747793 551, rs760248036, rs751663294, rs751664345, rs577362467, rs577369950, rs573248764, rs560125265, rs560139002, rs747803001, rs755887904, rs564110432, rs556367826, rs563942887, rs572985335, rs760269028, rs760270839, rs573269726, rs573274989, rs755911728, rs568318953, rs568021757, rs552135679, rs751707408, rs548426846, rs548434418, rs564139342, rs572051591, rs552153259, rs572072274, rs751715959, rs577188062, rs564146980, rs747848559, rs568341536, rs559908081, rs552188124, rs755939021, rs577206764, rs760317521, rs755948736, rs751743006, rs548476386, rs747872827, rs568369197, rs755960815, rs751754553, rs560223974, rs548479685, rs755974168, rs556435037, rs552196596, rs747896126, rs560244168, rs747652031, rs577224235, rs560258646, rs564222571, rs747919920, rs747920698, rs751799865, rs564232803, rs559961814, rs573094174, rs568132972, rs556477565, rs573125212, rs760392111, rs751811657, rs747935767, rs564034713, rs747687632, rs573403776, rs568440721, rs573407011, rs568443175, rs756030608, rs756033415, rs760408414, rs568181862, rs577306835, rs756041910, rs756046052, rs760422077, rs751843738, rs556510801, rs560051435, rs564286021, rs572378208, rs747984594, rs747722134, rs560069352, rs760197604, rs560342878, rs747758544, rs755880912, rs564315556, rs747802842, rs564319674, rs748001649, rs756097705, rs756101883, rs747806350, rs564327126, rs751895172, rs560367843, rs573263034, rs760268052, rs568526655, rs748023 590, rs755919537, rs572260364, rs577555445, rs573294722, rs560394921, rs573510446, rs756133876, rs747839312, rs760511521, rs564370775, rs564376248, rs564376364, rs564139682, rs568563556, rs756152385, rs747840172, rs748066260, rs755927850, rs568572679, rs756164092, rs760534890, rs573300647, rs755934945, rs577592262, rs564406770, rs572457547, rs760552076, rs568591083, rs756188538, rs573308926, rs760562998, rs760563121, rs760570118, rs748111999, rs560198805, rs760579685, rs756216388, rs747872225, rs564189021, rs560233324, rs752008994, rs760354089, rs751778116, rs573361908, rs564233597, rs760385297, rs756235256, rs573614189, rs564467006, rs560275772, rs756017969, rs751810656, rs756253735, rs752039226, rs760396460, rs748161647, rs573639338, rs752049714, rs564246741, rs756283462, rs756036768, rs752075001, rs751831496, rs568467023, rs560552869, rs564283486, rs573454368, rs751868849, rs573456185, rs756083960, rs573680167, rs760664319, rs751875406, rs752090289, rs572396332, rs568710098, rs573691588, rs756314691, rs568714294, rs560573477, rs573699383, rs756323206, rs760471899, rs760479501, rs751898764, rs568534435, rs752116103, rs748034773, rs760504745, rs560600463, rs760708481, rs760714819, rs573514386, rs572557414, rs572557958, rs748254868, rs564377275, rs568762604, rs568763194, rs564589023, rs748061016, rs756162245, rs756166577, rs568771006, rs572446618, rs751979729, rs764601912, rs764605517, rs760741465, rs748114059, rs568620077, rs756383690, rs756384871, rs756391400, rs568788881, rs756217888, rs760588798, rs573602750, rs752180138, rs564623778, rs764627821, rs748299503, rs764629910, rs748130651, rs573784861, rs756408393, rs760595864, rs756232724, rs760773412, rs564463915, rs572496260, rs568653598, rs756251559, rs760779022, rs760781539, rs573635982, rs573652549, rs764654464, rs764654987, rs752068753, rs769305453, rs568692918, rs572619991, rs573832704, rs577665160, rs577761370, rs756466412, rs577665609, rs764690747, rs769329264, rs573852888, rs573675286, rs748196037, rs748367875, rs756300662, rs748197749, rs769359391, rs748203432, rs760863009, rs752091198, rs748223187, rs773898368, rs773899834, rs760887512, rs769397943, rs572545263, rs748230012, rs560591096, rs760702095, rs756547221, rs769403605, rs573916611, rs769405373, rs577691821, rs760899135, rs760714916, rs764778710, rs568759555, rs560626809, rs577708424, rs760913893, rs760731022, rs769428087, rs752151307, rs573942940, rs756582059, rs760926092, rs748456913, rs773957562, rs756374806, rs752355335, rs752164940, rs773961853, rs764816927, rs769453577, rs748280577, rs752176014, rs748472979, rs748292693, rs773973849, rs756396678, rs748477123, rs764831522, rs773986296, rs769475897, rs773989494, rs748488874, rs760962529, rs573989260, rs764630000, rs577731358, rs764860091, rs760978530, rs764864844, rs774010599, rs760982318, rs756646387, rs752189483, rs752410640, rs774021506, rs764642317, rs756660471, rs752418450, rs756665161, rs760775128, rs752425890, rs573795407, rs769274495, rs748536445, rs774042540, rs774048085, rs748545555, rs764904906, rs769280972, rs764652287, rs756440425, rs760811102, rs752447253, rs752235456, rs761032088, rs769555239, rs572796375, rs574058322, rs774068807, rs756705591, rs748349778, rs769336373, rs769338143, rs572806703, rs577774022, rs76493 9256, rs756720374, rs764945437, rs748582085, rs764945982, rs752476251, rs760841353, rs756513893, rs764950876, rs752287839, rs756729306, rs752297787, rs572669937, rs748598416, rs774106005, rs769399952, rs764965507, rs752311316, rs752497016, rs756746876, rs773911266, rs756751094, rs577975798, rs769406266, rs574113216, rs756760486, rs773923447, rs764988719, rs774134060, rs577817761, rs574123608, rs577819850, rs756774376, rs748441157, rs769427963, rs769635948, rs577828656, rs773960161, rs572703392, rs774161475, rs774166363, rs769655303, rs573964931, rs752360938, rs756801766, rs765030112, rs756607238, rs773975660, rs769663323, rs769485808, rs765038582, rs769489930, rs752404557, rs760993327, rs577891615, rs752570519, rs756669277, rs769526833, rs752577872, rs756686221, rs752579270, rs765055750, rs774053639, rs774056463, rs769547374, rs765060451, rs756834336, rs769697350, rs748688074, rs769552330, rs761176538, rs748569277, rs764931376, rs752602102, rs748570604, rs577938233, rs765079537, rs572821828, rs769714725, rs769715263, rs748702455, rs778946702, rs761194066, rs769584093, rs769728383, rs769584739, rs574226258, rs756733895, rs752623537, rs572831835, rs769737839, rs748724583, rs769751821, rs764963646, rs574251268, rs756744372, rs574252861, rs778985925, rs572843309, rs572847858, rs765130065, rs778995848, rs748620885, rs774135156, rs761102708, rs748634639, rs778858396, rs769640361, rs748638838, rs756924729, rs769789991, rs774160058, rs765025378, rs778880075, rs748774375, rs765030749, rs752560435, rs748779730, rs761272117, rs574168108, rs761275474, rs774331029, rs748665185, rs752569189, rs761285678, rs774336593, rs774337248, rs774186159, rs769825005, rs774186312, rs765046340, rs765197037, rs748804697, rs774192739, rs774347834, rs752719194, rs765053376, rs774353243, rs769686936, rs752584469, rs769689165, rs761175735, rs748821446, rs774216408, rs779085566, rs756992674, rs752600325, rs779091257, rs756848600, rs774223726, rs769864516, rs757002620, rs578072520, rs752618492, rs778955408, rs748715760, rs756876862, rs578225050, rs761341190, rs774391562, rs757014692, rs761222522, rs779115346, rs574371001, rs761349593, rs748854017, rs774405519, rs774414609, rs769756282, rs769900279, rs765269419, rs578248325, rs757039020, rs779142152, rs765273 810, rs761368462, rs752647546, rs752648254, rs748747222, rs578129064, rs761376071, rs752793643, rs779155954, rs756912570, rs761242853, rs578133960, rs779008588, rs765147928, rs765157924, rs761387896, rs765298863, rs574289184, rs748900042, rs7489003 59, rs748903647, rs765161179, rs779182285, rs774457893, rs779184623, rs774462243, rs769947455, rs761268185, rs774315933, rs769807467, rs757082613, rs779198432, rs574313122, rs574313734, rs774474141, rs756962592, rs769962695, rs765336626, rs578179995, rs752711411, rs574458913, rs769976728, rs774491733, rs769977897, rs774492634, rs774493534, rs779222384, rs774495164, rs752715110, rs761443956, rs765353110, rs761448083, rs745307800, rs756977771, rs761309525, rs779077329, rs578196436, rs774519441, rs770004970, rs761315687, rs761316770, rs574495530, rs774529527, rs761321050, rs774530252, rs765386986, rs748973626, rs748973627, rs757133463, rs748828225, rs765230695, rs779266099, rs752748793, rs757136675, rs774383876, rs574508392, rs779272569, rs774384874, rs769871282, rs770029029, rs774547298, rs769874133, rs765247065, rs774550874, rs574389937, rs779283236, rs779147250, rs757155404, rs578257388, rs761502544, rs757050845, rs770047247, rs765419083, rs761505273, rs774567217, rs749011196, rs749015 876, rs752793109, rs748883560, rs574552014, rs757176136, rs745369385, rs748885768, rs770070419, rs761530507, rs765451793, rs757058117, rs757058373, rs761536633, rs765295464, rs774442218, rs745390122, rs757067340, rs765311703, rs765322398, rs761415711, rs779195227, rs779200595, rs779345846, rs752825541, rs769960587, rs765475427, rs769967116, rs748927605, rs779225765, rs574586398, rs752941011, rs770122720, rs574596795, rs574597445, rs761455103, rs757118229, rs779382905, rs779383112, rs745429338, rs745312595, rs761462940, rs574491673, rs761597194, rs761599494, rs757243333, rs779410370, rs779412843, rs761466880, rs752975240, rs765539315, rs745457404, rs765540362, rs774686210, rs765546386, rs770179183, rs761616081, rs748971093, rs765389948, rs749126779, rs757269251, rs770197217, rs770020418, rs774536578, rs749134108, rs770210545, rs770023198, rs774545314, rs749138801, rs779274547, rs574677268, rs770030745, rs765586176, rs753012958, rs761655939, rs753017550, rs757294772, rs574515837, rs745506408, rs745343181, rs757302657, rs753027988, rs757155232, rs770251203, rs749000689, rs774760378, rs765623505, rs745532972, rs770046573, rs770060375, rs761698317, rs749020551, rs761700759, rs745542495, rs749193663, rs779316495, rs770276976, rs745545483, rs774783309, rs752912874, rs757338538, rs752914303, rs745550587, rs745552413, rs745555704, rs752918908, rs770088715, rs749044361, rs749045543, rs77953 8718, rs774803610, rs757355631, rs749045802, rs761730085, rs749046670, rs765670414, rs753086820, rs770097595, rs745578485, rs774820137, rs761742228, rs757371555, rs774611591, rs761743865, rs745582743, rs770320994, rs765684724, rs770101312, rs779349603, rs761751891, rs774830324, rs761752275, rs779575384, rs574752911, rs7573 82094, rs765477377, rs752933949, rs749250622, rs745599005, rs753105639, rs761559688, rs779590735, rs745420346, rs770135265, rs770141285, rs770360889, rs761592302, rs765724186, rs753121973, rs749095875, rs752973981, rs757410960, rs749117765, rs745472367, rs761787288, rs765731405, rs779616180, rs765736652, rs574663613, rs770200336, rs574785603, rs770210577, rs745491835, rs745633219, rs753004431, rs774726498, rs779471280, rs765746165, rs779477877, rs761678822, rs770389881, rs765749735, rs774758781, rs774892364, rs761691614, rs749308980, rs774895449, rs574710974, rs749314067, rs765634312, rs745659019, rs779519063, rs574808625, rs765772575, rs779524550, rs779527264, rs770288343, rs765652414, rs76183 5406, rs770429425, rs770429498, rs749207703, rs757347565, rs774806601, rs779551067, rs745681042, rs779688634, rs779692735, rs770450864, rs770453628, rs779560080, rs765682141, rs574840762, rs779569968, rs757487913, rs779570073, rs745700374, rs765697384, rs757496015, rs774835951, rs757389590, rs765826592, rs753204125, rs745608356, rs761883445, rs774853006, rs774855939, rs779605405, rs779733116, rs749391786, rs774983974, rs774861680, rs753221656, rs765853804, rs774988933, rs770504391, rs574776736, rs761786138, rs765871927, rs749413567, rs761787151, rs779771044, rs749417123, rs749420331, rs757549090, rs574892965, rs745630620, rs774876702, rs753137535, rs749292402, rs7703 84951, rs753142305, rs757424866, rs770559204, rs749296741, rs757582827, rs770389041, rs574921751, rs775055950, rs779823900, rs745797756, rs761976295, rs779830823, rs77963 6717, rs765936472, rs574932883, rs774893568, rs770596799, rs779646839, rs765947401, rs745658149, rs749321856, rs765953951, rs765958206, rs765958383, rs770416224, rs749492905, rs765775433, rs770614031, rs775094954, rs745835571, rs779872969, rs765776366, rs749328659, rs775106546, rs761840011, rs779676546, rs749342215, rs745850175, rs770635323, rs749513977, rs574967040, rs757470309, rs749515018, rs753321711, rs757647411, rs757486010, rs574972566, rs775119800, rs765812732, rs574842120, rs779901678, rs745698392, rs757655001, rs779905648, rs770653074, rs762043644, rs761871771, rs745868315, rs779715334, rs745708008, rs779913231, rs753205323, rs762052761, rs779723844, rs574987020, rs766017851, rs753205934, rs779924149, rs770669912, rs766021133, rs745881008, rs757672460, rs779931477, rs757675244, rs745891504, rs745720580, rs749394350, rs770506883, rs761916613, rs753238988, rs766044564, rs745762687, rs749549443, rs770540650, rs766047928, rs770543896, rs766050222, rs779958907, rs753367594, rs753367750, rs770546945, rs775031885, rs749436136, rs775181872, rs757572498, rs753266326, rs770710528, rs779820760, rs775064110, rs762101797, rs765937462, rs775188334, rs745921364, rs762105442, rs779844461, rs757713821, rs779981593, rs762112528, rs775198435, rs766078662, rs757721860, rs762119038, rs753292241, rs745939820, rs761996873, rs575031922, rs753297701, rs753300339, rs780011851, rs762017425, rs780018527, rs749507043, rs780019769, rs765983788, rs775233897, rs749598140, rs766117144, rs765984332, rs757641675, rs770636887, rs753407034, rs770767590, rs757762973, rs757647835, rs745974735, rs762173213, rs775212916, rs762173683, rs766143542, rs766143752, rs757649900, rs766145406, rs753427557, rs770795008, rs765997845, rs745993374, rs766001573, rs749524029, rs775273379, rs779911081, rs745999522, rs753434251, rs779911858, rs746006325, rs766166455, rs766168053, rs757803577, rs745875354, rs749633081, rs770814654, rs757805145, rs766015302, rs753445557, rs74963 8814, rs766019743, rs775298771, rs766188571, rs766037522, rs779945160, rs779949952, rs766044301, rs745900932, rs749655279, rs575095661, rs762083371, rs762085792, rs746046381, rs575100124, rs757846947, rs746054703, rs749673345, rs762086376, rs766057731, rs770705124, rs757869091, rs775181164, rs757704367, rs749695349, rs746081425, rs762099447, rs775185585, rs749702419, rs775186985, rs749562570, rs780172964, rs745922042, rs749707385, rs766263293, rs746096974, rs753384202, rs770791590, rs749714011, rs770918284, rs775401705, rs746107172, rs780003258, rs766280872, rs753519453, rs780008142, rs745954161, rs762315463, rs757752502, rs770939500, rs749597155, rs757929982, rs746128576, rs762152102, rs770947399, rs745964149, rs749743958, rs762335489, rs770766600, rs775245150, rs76233 8672, rs780228898, rs749614271, rs753552486, rs775449793, rs766319359, rs766323 563, rs780245371, rs746154682, rs762181334, rs775472222, rs766280701, rs775475182, rs757977555, rs757978975, rs770931151, rs780267296, rs770997764, rs757916036, rs780205945, rs575157657, rs757992394, rs771005418, rs746180135, rs762183067, rs766362780, rs771009038, rs780061636, rs771009307, rs7623 87126, rs766367727, rs766368581, rs757792173, rs780073349, rs766168331, rs780082796, rs775297492, rs775308110, rs757826438, rs780315709, rs758035498, rs762422669, rs770839574, rs749652481, rs762425469, rs746218660, rs780326732, rs775552644, rs746031362, rs771057618, rs762437124, rs770850567, rs775563265, rs74983 5090, rs75783 8799, rs753474398, rs762450422, rs762451403, rs758068950, rs753662928, rs770871086, rs771079501, rs770875574, rs753673609, rs762466666, rs766449347, rs762473664, rs775363269, rs746269664, rs746270782, rs746076834, rs771101017, rs746273137, rs758100507, rs753696139, rs780164986, rs780387548, rs775617305, rs780390487, rs758105444, rs757884371, rs762493123, rs766475288, rs746092299, rs746281706, rs775383486, rs757893141, rs758115802, rs749713541, rs753714258, rs766488010, rs753719223, rs749713677, rs753720414, rs766492868, rs771125854, rs762511001, rs780231784, rs758127073, rs771127702, rs749766209, rs746169464, rs575274775, rs762376230, rs775491720, rs753731740, rs775657564, rs775428073, rs775658964, rs749742970, rs762335602, rs762541504, rs771150797, rs746322011, rs758157003, rs749749377, rs762362270, rs771157610, rs758162211, rs762517868, rs766357122, rs749788807, rs749911248, rs771128445, rs575274484, rs746333565, rs753596686, rs775704461, rs771173856, rs746341917, rs746186643, rs780475560, rs746193804, rs775516663, rs753780938, rs771029510, rs766560991, rs771189138, rs758197140, rs780302599, rs775728693, rs746361329, rs775527212, rs762415812, rs753 803 834, rs762600386, rs746374330, rs753631651, rs780320948, rs780518212, rs575221910, rs746232012, rs758224718, rs775568883, rs766428601, rs746384549, rs758230618, rs762616423, rs753826066, rs766603395, rs780534207, rs762621610, rs775580341, rs753832717, rs749958831, rs766443908, rs758090555, rs749960657, rs766627036, rs749963613, rs775788526, rs746408560, rs762644135, rs775609117, rs575400838, rs766468653, rs780569370, rs758269206, rs753878572, rs746441956, rs766667358, rs780601275, rs749990021, rs780602857, rs766670853, rs575437081, rs766674528, rs766682646, rs780617288, rs749868817, rs746281239, rs775624502, rs753912194, rs766696780, rs758110703, rs746471952, rs749875280, rs762508511, rs758126114, rs758333653, rs753735005, rs771145743, rs753759590, rs753730859, rs780649338, rs766723996, rs575311491, rs746490599, rs775672433, rs762546488, rs750026382, rs766734425, rs766531730, rs771158339, rs575476915, rs771335500, rs766747934, rs753923061, rs766753318, rs771361606, rs780692388, rs771339289, rs775930399, rs750047913, rs762554421, rs780641886, rs746531650, rs780663065, rs780709751, rs758359046, rs758401577, rs575498348, rs575538498, rs780717013, rs771165869, rs758177964, rs758362118, rs762568013, rs753995270, rs575546172, rs754000384, rs775967011, rs780475811, rs750073618, rs758184076, rs766560373, rs771404139, rs780740066, rs758424092, rs775723799, rs775980483, rs766574301, rs746365474, rs775982060, rs780743261, rs775748778, rs775986548, rs775986905, rs575362555, rs575363802, rs762610159, rs771215180, rs754025046, rs771423403, rs771215781, rs762819950, rs780535184, rs771434272, rs746403296, rs753841483, rs749967206, rs753855829, rs575598081, rs766831850, rs750002472, rs780784061, rs750002879, rs758466985, rs771302766, rs750107407, rs746469766, rs758473504, rs771319793, rs750014529, rs758333222, rs775875097, rs780797534, rs746507836, rs775929381, rs746606580, rs746608262, rs766854459, rs776039606, rs780804421, rs762855694, rs771473590, rs766751199, rs754088416, rs575521978, rs758499272, rs753976053, rs766770334, rs766872709, rs753990717, rs750148431, rs771385490, rs754113248, rs746653389, rs758402469, rs753992475, rs575539306, rs762783481, rs762795708, rs754010144, rs762798134, rs775979839, rs746559821, rs754016875, rs766804365, rs762808748, rs771524228, rs750178119, rs758433908, rs780751943, rs758434866, rs771423880, rs758554451, rs575698436, rs750188485, rs776134843, rs762920542, rs758449196, rs771434449, rs746690639, rs776012316, rs771435919, rs776013782, rs758459277, rs780784333, rs575719667, rs754171794, rs750213847, rs766952453, rs758590686, rs766837720, rs780924547, rs754187409, rs758470618, rs762843583, rs762945483, rs766966889, rs754065137, rs766846969, rs766975773, rs771583859, rs766847092, rs758621159, rs754210541, rs575763004, rs746745673, rs762847850, rs776046182, rs575769280, rs771476914, rs575770408, rs766867806, rs750130001, rs758503519, rs780977957, rs750273256, rs754234000, rs762987248, rs746766606, rs780828772, rs754113034, rs750278291, rs780990971, rs767019803, rs762994113, rs762995346, rs758532401, rs771603133, rs767026353, rs750286697, rs758662550, rs776247771, rs780966765, rs754123422, rs754254854, rs575674713, rs754260453, rs781015534, rs776265470, rs776101575, rs746799288, rs781027767, rs776275747, rs780859151, rs750166682, rs776278401, rs754277291, rs746661487, rs763023634, rs780861535, rs575828647, rs758698366, rs771515339, rs771671647, rs746817534, rs754130748, rs758706192, rs776296970, rs781058660, rs762905000, rs767087921, rs781073957, rs750176719, rs766913758, rs763057284, rs762907750, rs746840181, rs754138099, rs776123078, rs750196811, rs781090887, rs750196938, rs776332744, rs781094408, rs776335691, rs776339969, rs754159937, rs754163459, rs750374458, rs771555935, rs746701844, rs763084100, rs754170644, rs781118074, rs771 744938, rs750392389, rs762942133, rs762944719, rs758771328, rs57573 8479, rs758608464, rs746727958, rs780945258, rs771599013, rs750400627, rs776209381, rs776384816, rs780974867, rs771766533, rs776389291, rs758638925, rs750288334, rs758791887, rs780987748, rs575929383, rs771620501, rs746879575, rs767161420, rs750283733, rs767025015, rs754392803, rs771771881, rs763111072, rs767168384, rs750289902, rs771771293, rs776395377, rs776408436, rs763004187, rs781167842, rs746795885, rs767177596, rs767179565, rs763130803, rs767182627, rs746803551, rs754414288, rs781030516, rs754277304, rs758693649, rs754423728, rs750452203, rs575833682, rs763148676, rs754292067, rs750340252, rs776442345, rs754437136, rs776321471, rs781206011, rs758843257, rs781207680, rs776449588, rs758848166, rs776454881, rs771703842, rs758859852, rs771844291, rs575996626, rs776328434, rs763172665, rs781086455, rs776331034, rs781089009, rs767234541, rs771715327, rs767236606, rs758877832, rs767110682, rs575881882, rs771867178, rs750506837, rs776341567, rs776343691, rs754351607, rs746947857, rs781266351, rs750518410, rs781273186, rs576039139, rs754361671, rs758899405, rs575903723, rs767267531, rs767270878, rs767274571, rs781289127, rs576055087, rs763221534, rs771903251, rs776529322, rs750395451, rs771909114, rs746970730, rs767293664, rs754365087, rs750554318, rs767296018, rs758774462, rs781131021, rs781315161, rs758775915, rs750404570, rs763241368, rs771928708, rs758936629, rs776552739, rs781329345, rs771942011, rs754380358, rs750420726, rs771946379, rs754563130, rs776571904, rs576102011, rs758798171, rs781354223, rs758799589, rs746883877, rs747009227, rs763118413, rs758803250, rs776405690, rs758806756, rs776593982, rs771960223, rs781354273, rs576108786, rs758811128, rs763134030, rs781392093, rs772000148, rs754610376, rs754612029, rs754418161, rs776429606, rs767192897, rs763318541, rs763148029, rs758836437, rs767391545, rs754432361, rs576154990, rs758842113, rs747044382, rs776458960, rs781231591, rs754632333, rs747051634, rs763174985, rs772030273, rs776649512, rs750655728, rs781427492, rs776654856, rs750492945, rs746932296, rs781437757, rs759031742, rs763182916, rs772046878, rs750674693, rs576018668, rs750676187, rs759042231, rs759046460, rs776680396, rs750505680, rs576021476, rs776692770, rs772072696, rs767245856, rs576031277, rs759060934, rs776696997, rs758898721, rs781280482, rs758916739, rs746975981, rs772082757, rs754689622, rs763393390, rs767298025, rs771922320, rs754536091, rs763240132, rs781334318, rs758948313, rs754711370, rs750599889, rs781360926, rs747108606, rs776744339, rs747114420, rs781522333, rs767498321, rs754728500, rs781527310, rs754576613, rs576118666, rs763291307, rs781379123, rs576133520, rs750760393, rs763303269, rs767522254, rs763455818, rs759129745, rs781553622, rs750771811, rs759136534, rs771997067, rs754612627, rs750782749, rs750637603, rs750637916, rs759150971, rs776804111, rs763484389, rs772012841, rs750640718, rs767563344, rs759012413, rs747164471, rs754623438, rs763328099, rs763332642, rs776648911, rs767411176, rs750810963, rs763504898, rs750662267, rs747174454, rs576175413, rs747178697, rs750822746, rs772052667, rs747072299, rs750691811, rs781619317, rs781470413, rs767602286, rs772074431, rs576343392, rs747084510, rs776699270, rs776705318, rs763390654, rs750849384, rs576210690, rs763542745, rs576221019, rs747102578, rs750859796, rs772241396, rs767635284, rs759084930, rs772104715, rs772249614, rs772104719, rs763415127, rs759227621, rs772121042, rs776897115, rs763436339, rs776762727, rs772259945, rs747129870, rs750759174, rs576265608, rs767519344, rs747230718, rs781565727, rs763470456, rs776924295, rs781701921, rs767547476, rs772170435, rs776808849, rs576303348, rs772182443, rs763611276, rs750803674, rs747254617, rs759164988, rs750925394, rs772187879, rs767716042, rs759286277, rs772316620, rs767720034, rs747265713, rs576441486, rs576442593, rs576317168, rs767579929, rs576447789, rs781742545, rs781602929, rs77683 8045, rs750944515, rs754939557, rs750823852, rs759184414, rs772337925, rs781755935, rs754944624, rs747182076, rs772342034, rs754948723, rs776994087, rs772347276, rs781764568, rs776996732, rs750830318, rs772218330, rs754959762, rs767609550, rs759198338, rs763674067, rs747296872, rs763674655, rs776861032, rs777013080, rs747194917, rs772232639, rs767767715, rs750853186, rs747204704, rs576493632, rs759342224, rs763692492, rs747208899, rs754988399, rs759348920, rs576503650, rs763559997, rs772250879, rs772397018, rs576372722, rs763709961, rs772258370, rs767657096, rs751007056, rs767657762, rs747321219, rs759236402, rs763721335, rs759373663, rs767813915, rs767815241, rs767805536, rs772406653, rs781681456, rs776912238, rs759383943, rs751026757, rs767670989, rs781688312, rs751028661, rs759386121, rs772430907, rs772282168, rs767836512, rs781705809, rs747245817, rs750913756, rs576560375, rs747348729, rs767699386, rs747250221, rs754901587, rs755057019, rs777112698, rs781720615, rs759422250, rs759422516, rs781730421, rs772321918, rs763780033, rs763635896, rs751076013, rs747368499, rs772328426, rs754932586, rs755086147, rs776983342, rs576596271, rs759456830, rs772336808, rs777159266, rs772498793, rs755100226, rs576609411, rs767906427, rs759308804, rs763814663, rs763817509, rs755110001, rs750960477, rs763821142, rs759472994, rs759319080, rs754960592, rs777005707, rs763674675, rs576626275, rs772520972, rs767925497, rs754969861, rs747298935, rs777190579, rs759332513, rs777191601, rs763835764, rs777200066, rs777204274, rs763850479, rs576646549, rs763681979, rs767957891, rs767960115, rs777033750, rs747309536, rs767793827, rs772563699, rs767798619, rs772401890, rs777053793, rs777240104, rs772571344, rs747429212, rs576677862, rs772414988, rs751166640, rs759378061, rs759533284, rs751023155, rs777254106, rs767987787, rs777075020, rs755026641, rs767826811, rs751167068, rs777264933, rs755191658, rs777084010, rs755192243, rs772436481, rs772437430, rs759403389, rs747350875, rs751191760, rs768010524, rs777110111, rs763764330, rs755059022, rs777121485, rs772613599, rs755067126, rs576719685, rs576722503, rs777299593, rs759578019, rs777303311, rs759579892, rs755075016, rs576587762, rs759445364, rs772484960, rs796089470, rs751224909, rs759458296, rs772637938, rs759596143, rs751101455, rs755244424, rs755244545, rs763819415, rs759473985, rs763963972, rs751243180, rs777336791, rs777336835, rs763969514, rs759474253, rs767919206, rs755254955, rs772515740, rs759611310, rs772524427, rs576760756, rs576630960, rs576632316, rs751252199, rs777347844, rs777353402, rs747486328, rs772552344, rs755279767, rs763868327, rs772557957, rs772562566, rs764007884, rs751281512, rs755296842, rs763878639, rs796192020, rs777237438, rs751162345, rs759528801, rs755192222, rs759672954, rs759682828, rs764055874, rs796227008, rs764061799, rs755339494, rs767984404, rs751324932, rs777258179, rs751326575, rs755185309, rs576840353, rs767994360, rs772590811, rs751330443, rs755345820, rs576845470, rs772757323, rs777430556, rs768168022, rs759693337, rs751327608, rs777269612, rs755363786, rs796277063, rs796278245, rs764095900, rs772779126, rs796294894, rs763911156, rs576875910, rs768006927, rs759735617, rs777275948, rs768205617, rs759744820, rs768207163, rs763916801, rs763919951, rs751196812, rs759562845, rs777291191, rs796076372, rs764133033, rs751218362, rs777507730, rs759581950, rs772821624, rs751220371, rs755419349, rs576914536, rs751404091, rs751404377, rs764154554, rs755426294, rs751410337, rs768244583, rs755234769, rs755435149, rs768253809, rs772645482, rs751237565, rs772850179, rs747474998, rs759799166, rs777337458, rs747478059, rs777551972, rs755448967, rs796121812, rs777556622, rs751438322, rs772865443, rs759810657, rs759811932, rs772663640, rs772869110, rs777345301, rs796405217, rs576958615, rs772878006, rs751252167, rs777359688, rs768093278, rs751271372, rs777368805, rs759655903, rs759831926, rs747508932, rs576969601, rs772891496, rs777591347, rs751464268, rs777599790, rs755311800, rs777604789, rs768314082, rs768128277, rs777606824, rs747613024, rs764233083, rs764038861, rs751484106, rs576996766, rs755344373, rs755345260, rs576999040, rs772917999, rs755510163, rs772926214, rs755515271, rs777633592, rs777634572, rs796478901, rs768167768, rs751340142, rs764260671, rs777642089, rs768347496, rs751514125, rs759880550, rs764081453, rs777661319, rs777667084, rs751344454, rs777670484, rs576996944, rs777638368, rs755553717, rs577018765, rs777474412, rs796298037, rs764298538, rs796544253, rs777691463, rs777483324, rs7776983 81, rs772798048, rs751558593, rs755392832, rs764316581, rs75993 0945, rs759751843, rs751383252, rs759934734, rs764327465, rs751384151, rs751574392, rs796329030, rs772810661, rs751394310, rs777516552, rs796368194, rs764168768, rs764349805, rs751593824, rs755609430, rs764170812, rs796620506, rs777546671, rs759989589, rs755645351, rs772854933, rs796383620, rs777787015, rs796661192, rs764401492, rs768495538, rs759804091, rs768500142, rs764191883, rs768502292, rs768502791, rs768278218, rs796412093, rs772881421, rs755469501, rs777579309, rs764208467, rs755474416, rs764212354, rs759842238, rs576987267, rs777611685, rs768531741, rs768541787, rs796744438, rs764239305, rs755530255, rs768556721, rs768368073, rs759900839, rs773155259, rs796529169, rs773159968, rs760073097, rs796533460, rs772974795, rs768566944, rs764298098, rs755570717, rs759921753, rs751558751, rs777896190, rs777904932, rs796576438, rs777905744, rs764325028, rs760106760, rs760114670, rs773008809, rs796835517, rs764330725, rs755591769, rs751577582, rs796845806, rs764543219, rs773224139, rs777950383, rs777731699, rs759953813, rs764550997, rs760141969, rs759955803, rs777740480, rs777774052, rs773070471, rs768476929, rs768496766, rs764414043, rs777815787, rs796694081, rs796694101, rs760026563, rs796700180, rs773281939, rs755688608, rs764437535, rs768521742, rs777835811, rs768526554, rs773290901, rs764448482, rs764470746, rs773149634, rs773296210, rs764476034, rs755728923, rs768563062, rs778052433, rs773319945, rs773324319, rs778042620, rs768733994, rs778044205, rs796997004, rs777881741, rs796770436, rs773363279, rs760077726, rs768571080, rs755743161, rs755746264, rs778131383, rs768785644, rs796800104, rs755764082, rs773399478, rs778148727, rs773404082, rs773407415, rs796831631, rs773409661, rs778156878, rs778169470, rs773434635, rs768614341, rs760124796, rs768620339, rs768630061, rs796861842, rs768896216, rs768635377, rs764555780, rs777963398, rs768925741, rs796872491, rs773243150, rs773548355, rs768950086, rs777977216, rs773579566, rs773584404, rs778340398, rs768979263, rs777980971, rs778342059, rs760165295, rs796906115, rs778353317, rs796911608, rs773605150, rs773607669, rs773612358, rs778370172, rs773267272, rs778010263, rs796934830, rs773630002, rs778389269, rs773638118, rs778399130, rs778018364, rs760193524, rs769050524, rs769051766, rs773660515, rs773662455, rs773289430, rs778020847, rs796950423, rs778026525, rs796952236, rs768707927, rs797021864, rs773694181, rs797021885, rs778095154, rs778101444, rs778112566, rs778116360, rs778511180, rs778520180, rs778131235, rs769153 572, rs768784571, rs778135942, rs778544716, rs773394234, rs778570842, rs769103536, rs773808340, rs778583925, rs768805863, rs778204738, rs773 825993, rs778619776, rs778206648, rs773484114, rs769253996, rs778233737, rs773495523, rs778719114, rs768908878, rs778754301, rs778264419, rs773524240, rs778772059, rs778798631, rs768926509, rs768929143, rs778810623, rs778814075, rs778842299, rs768965165, rs778340868, rs768981921, rs778351672, rs778360453, rs769013651, rs773623537, rs769023489, rs773645974, rs778416357, rs773667417, rs773667774, rs773676018, rs769071290, rs769071361, rs769076003, rs778449285, rs778498254, rs773 812695, rs769108171, rs769128763, rs778511014, rs773757900, rs778532226, rs769157145, rs769187039, rs769200257, rs778601005, rs778620135, rs769245631, rs773 877069 rs778704122, rs778720482, rs778756741, rs778760038, rs778806841, and rs778810425.

[0361] In one example, the guide RNA used in the present disclosure may comprise at least one 20 nucleotide (nt) target nucleic acid sequence listed in Table 5. Provided in Table 5 are the gene symbol and the sequence identifier of the gene (Gene SEQ ID NO), the gene sequence including 1-5 kilobase pairs upstream and/or downstream of the target gene (Extended Gene SEQ ID NO), and the 20 nt target nucleic acid sequence (20 nt Target Sequence SEQ ID NO). In the sequence listing the respective target gene, the strand for targeting the gene (noted by a (+) strand or (−) strand in the sequence listing), the associated PAM type and the PAM sequence are described for each of the 20 nt target nucleic acid sequences (SEQ ID NO: 5305-76012). It is understood in the art that the spacer sequence, where “T” is “U,” may be an RNA sequence corresponding to the 20 nt sequences listed in Table 5.

TABLE 5
Nucleic Acid Sequences

| | Gene SEQ | Extended Gene | 20 nt Target |
|---|---|---|---|
| Gene Symbol | ID NO | SEQ ID NO | Sequence SEQ ID NO |
| SCN10A | 5303 | 5304 | 5305-76012 |

[0362] In one example, the guide RNA used in the present disclosure may comprise at least one spacer sequence that, where “T” is “U”, may be an RNA sequence corresponding to a 20 nucleotide (nt) target sequence such as, but not limited to, any of SEQ ID NO: 5305-76012.

[0363] In one example, the guide RNA used in the present disclosure may comprise at least one spacer sequence which, where “T” is “U,” is an RNA sequence corresponding to the 20 nt sequences such as, but not limited to, any of SEQ ID NO: 5305-76012.

[0364] In one example, a guide RNA may comprise a 20 nucleotide (nt) target nucleic acid sequence associated with the PAM type such as, but not limited to, NAAAAC, NNAGAAW, NNGRRT, NNNNGHTT, NRG, or YTN. As a non-limiting example, the 20 nt target nucleic acid sequence for a specific target gene and a specific PAM type may be, where “T” is “U,” the RNA sequence corresponding to any one of the 20 nt nucleic acid sequences in Table 6.

TABLE 6
Nucleic Acid Sequences by PAM Type

| | PAM: | | PAM: | | | |
|---|---|---|---|---|---|---|
| | NAAAAC | PAM: | NNGRRT | PAM: | | |
| | 20 nt Target | NNAGAAW | Nucleic | NNNNGHTT | PAM: NRG | PAM: YTN |
| | Nucleic | 20 nt Target | 20 nt | 20 nt Target | 20 nt Target | 20 nt Target |
| Gene | Acid | Nucleic Acid | Target Acid | Nucleic Acid | Nucleic Acid | Nucleic Acid |
| Symbol | SEQ ID NO | SEQ ID NO | SEQ ID NO | SEQ ID NO | SEQ ID NO | SEQ ID NO |
| SCN10A | 5305-5702 | 5703-6771 | 6772-9983 | 9984-12753 | 12754-40530 | 40531-76012 |

[0365] In one example, a guide RNA may comprise a 20 nucleotide (nt) target nucleic acid sequence associated with the YTN PAM type. As a non-limiting example, the 20 nt target nucleic acid sequence for a specific target gene may comprise a 20 nt core sequence where the 20 nt core sequence, where “T” is “U,” may be the RNA sequence corresponding to SEQ ID NO: 40531-76012. As another non-limiting example, the 20 nt target nucleic acid sequence for a specific target gene may comprise a core sequence where the core sequence, where “T” is “U,” may be a fragment, segment or region of the RNA sequence corresponding to any of SEQ ID NO: 40531-76012.

### VI. Other Therapeutic Approaches

[0366] Gene editing can be conducted using nucleases engineered to target specific sequences. To date there are four major types of nucleases: meganucleases and their derivatives, zinc finger nucleases (ZFNs), transcription activator like effector nucleases (TALENs), and CRISPR-Cas9 nuclease systems. The nuclease platforms vary in difficulty of design, targeting density and mode of action, particularly as the specificity of ZFNs and TALENs is through protein-DNA interactions, while RNA-DNA interactions primarily guide Cas9.

[0367] CRISPR endonucleases, such as Cas9, can be used in the methods of the present disclosure. However, the teachings described herein, such as therapeutic target sites, could be applied to other forms of endonucleases, such as ZFNs, TALENs, HEs, or MegaTALs, or using combinations of nucleases. However, in order to apply the teachings of the present disclosure to such endonucleases, one would need to, among other things, engineer proteins directed to the specific target sites.

[0368] Additional binding domains can be fused to the Cas9 protein to increase specificity. The target sites of these constructs would map to the identified gRNA specified site, but would require additional binding motifs, such as for a zinc finger domain. In the case of Mega-TAL, a meganuclease can be fused to a TALE DNA-binding domain. The meganuclease domain can increase specificity and provide the cleavage. Similarly, inactivated or dead Cas9 (dCas9) can be fused to a cleavage domain and require the sgRNA/Cas9 target site and adjacent binding site for the fused DNA-binding domain. This likely would require some protein engineering of the dCas9, in addition to the catalytic inactivation, to decrease binding without the additional binding site.

### Zinc Finger Nucleuses

[0369] Zinc finger nucleases (ZFNs) are modular proteins comprised of an engineered zinc finger DNA binding domain linked to the catalytic domain of the type II endonuclease Fokl. Because Fokl functions only as a dimer, a pair of ZFNs must be engineered to bind to cognate target “half-site” sequences on opposite DNA strands and with precise spacing between them to enable the catalytically active Fokl dimer to form. Upon dimerization of the Fokl domain, which itself has no sequence specificity per se, a DNA double-strand break is generated between the ZFN half-sites as the initiating step in genome editing.

[0370] The DNA binding domain of each ZFN is typically comprised of 3-6 zinc fingers of the abundant Cys2-His2 architecture, with each finger primarily recognizing a triplet of nucleotides on one strand of the target DNA sequence, although cross-strand interaction with a fourth nucleotide also can be important. Alteration of the amino acids of a finger in positions that make key contacts with the DNA alters the sequence specificity of a given finger. Thus, a four-finger zinc finger protein will selectively recognize a 12 bp target sequence, where the target sequence is a composite of the triplet preferences contributed by each finger, although triplet preference can be influenced to varying degrees by neighboring fingers. An important aspect of ZFNs is that they can be readily re-targeted to almost any genomic address simply by modifying individual fingers, although considerable expertise is required to do this well. In most applications of ZFNs, proteins of 4-6 fingers are used, recognizing 12-18 bp respectively. Hence, a pair of ZFNs will typically recognize a combined target sequence of 24-36 bp, not including the typical 5-7 bp spacer between half-sites. The binding sites can be separated further with larger spacers, including 15-17 bp. A target sequence of this length is likely to be unique in the human genome, assuming repetitive sequences or gene homologs are excluded during the design process. Nevertheless, the ZFN protein-DNA interactions are not absolute in their specificity so off-target binding and cleavage events do occur, either as a heterodimer between the two ZFNs, or as a homodimer of one or the other of the ZFNs. The latter possibility has been effectively eliminated by engineering the dimerization interface of the Fokl domain to create “plus” and “minus” variants, also known as obligate heterodimer variants, which can only dimerize with each other, and not with themselves. Forcing the obligate heterodimer prevents formation of the homodimer. This has greatly enhanced specificity of ZFNs, as well as any other nuclease that adopts these FokI variants.

[0371] A variety of ZFN-based systems have been described in the art, modifications thereof are regularly reported, and numerous references describe rules and parameters that are used to guide the design of ZFNs; see, e.g., Segal et al., Proc Natl Acad Sci USA 96(6):2758-63 (1999); Dreier B et al., J Mol Biol. 303(4):489-502 (2000); Liu Q et al., J Biol Chem. 277(6):3850-6 (2002); Dreier et al., J Biol Chem 280(42):35588-97 (2005); and Dreier et al., J Biol Chem. 276(31):29466-78 (2001).

### Transcription Activator-Like Effector Nucleases (TALENs)

[0372] TALENs represent another format of modular nucleases whereby, as with ZFNs, an engineered DNA binding domain is linked to the Fokl nuclease domain, and a pair of TALENs operates in tandem to achieve targeted DNA cleavage. The major difference from ZFNs is the nature of the DNA binding domain and the associated target DNA sequence recognition properties. The TALEN DNA binding domain derives from TALE proteins, which were originally described in the plant bacterial pathogen Xanthomonas sp. TALEs are comprised of tandem arrays of 33-35 amino acid repeats, with each repeat recognizing a single basepair in the target DNA sequence that is typically up to 20 bp in length, giving a total target sequence length of up to 40 bp. Nucleotide specificity of each repeat is determined by the repeat variable diresidue (RVD), which includes just two amino acids at positions 12 and 13. The bases guanine, adenine, cytosine and thymine are predominantly recognized by the four RVDs: Asn-Asn, Asn-Ile, His-Asp and Asn-Gly, respectively. This constitutes a much simpler recognition code than for zinc fingers, and thus represents an advantage over the latter for nuclease design. Nevertheless, as with ZFNs, the protein-DNA interactions of TALENs are not absolute in their specificity, and TALENs have also benefitted from the use of obligate heterodimer variants of the Fokl domain to reduce off-target activity.

[0373] Additional variants of the Fokl domain have been created that are deactivated in their catalytic function. If one half of either a TALEN or a ZFN pair contains an inactive Fokl domain, then only single-strand DNA cleavage (nicking) will occur at the target site, rather than a DSB. The outcome is comparable to the use of CRISPR/Cas9 or CRISPR/Cpf1 “nickase” mutants in which one of the Cas9 cleavage domains has been deactivated. DNA nicks can be used to drive genome editing by HDR, but at lower efficiency than with a DSB. The main benefit is that off-target nicks are quickly and accurately repaired, unlike the DSB, which is prone to NHEJ-mediated mis-repair.

[0374] A variety of TALEN-based systems have been described in the art, and modifications thereof are regularly reported; see, e.g., Boch, Science 326(5959):1509-12 (2009); Mak et al., Science 335(6069):716-9 (2012); and Moscou et al., Science 326(5959):1501 (2009). The use of TALENs based on the “Golden Gate” platform, or cloning scheme, has been described by multiple groups; see, e.g., Cermak et al., Nucleic Acids Res. 39(12):e82 (2011); Li et al., Nucleic Acids Res. 39(14):6315-25(2011); Weber et al., PLoS One. 6(2):e16765 (2011); Wang et al., J Genet Genomics 41(6):339-47, Epub 2014 May 17 (2014); and Cermak T et al., Methods Mol Biol. 1239:133-59 (2015).

### Homing Endonucleases

[0375] Homing endonucleases (HEs) are sequence-specific endonucleases that have long recognition sequences (14-44 base pairs) and cleave DNA with high specificity—often at sites unique in the genome. There are at least six known families of HEs as classified by their structure, including GIY-YIG, His-Cis box, H-N-H, PD-(D/E)×K, and Vsr-like that are derived from a broad range of hosts, including eukarya, protists, bacteria, archaea, cyanobacteria and phage. As with ZFNs and TALENs, HEs can be used to create a DSB at a target locus as the initial step in genome editing. In addition, some natural and engineered HEs cut only a single strand of DNA, thereby functioning as site-specific nickases. The large target sequence of HEs and the specificity that they offer have made them attractive candidates to create site-specific DSBs.

[0376] A variety of HE-based systems have been described in the art, and modifications thereof are regularly reported; see, e.g., the reviews by Steentoft et al., Glycobiology 24(8):663-80 (2014); Belfort and Bonocora, Methods Mol Biol. 1123:1-26 (2014); Hafez and Hausner, Genome 55(8):553-69 (2012); and references cited therein.

### MegaTAL/Tev-mTALEN/MegaTev

[0377] As further examples of hybrid nucleases, the MegaTAL platform and Tev-mTALEN platform use a fusion of TALE DNA binding domains and catalytically active HEs, taking advantage of both the tunable DNA binding and specificity of the TALE, as well as the cleavage sequence specificity of the HE; see, e.g., Boissel et al., NAR 42: 2591-2601 (2014); Kleinstiver et al., G3 4:1155-65 (2014); and Boissel and Scharenberg, Methods Mol. Biol. 1239: 171-96 (2015).

[0378] In a further variation, the MegaTev architecture is the fusion of a meganuclease (Mega) with the nuclease domain derived from the GIY-YIG homing endonuclease I-Teel (Tev). The two active sites are positioned—30 bp apart on a DNA substrate and generate two DSBs with non-compatible cohesive ends; see, e.g., Wolfs et al., NAR 42, 8816-29 (2014). It is anticipated that other combinations of existing nuclease-based approaches will evolve and be useful in achieving the targeted genome modifications described herein.

dCas9-Fokl or dCpf1-Fokl and Other Nucleases

[0379] Combining the structural and functional properties of the nuclease platforms described above offers a further approach to genome editing that can potentially overcome some of the inherent deficiencies. As an example, the CRISPR genome editing system typically uses a single Cas9 endonuclease to create a DSB. The specificity of targeting is driven by a 20 or 24 nucleotide sequence in the guide RNA that undergoes Watson-Crick base-pairing with the target DNA (plus an additional 2 bases in the adjacent NAG or NGG PAM sequence in the case of Cas9 from S. pyogenes). Such a sequence is long enough to be unique in the human genome, however, the specificity of the RNA/DNA interaction is not absolute, with significant promiscuity sometimes tolerated, particularly in the 5′ half of the target sequence, effectively reducing the number of bases that drive specificity. One solution to this has been to completely deactivate the Cas9 or Cpf1 catalytic function retaining only the RNA-guided DNA binding function and instead fusing a Fokl domain to the deactivated Cas9; see, e.g., Tsai et al., Nature Biotech 32: 569-76 (2014); and Guilinger et al., Nature Biotech. 32: 577-82 (2014). Because Fokl must dimerize to become catalytically active, two guide RNAs are required to tether two Fokl fusions in close proximity to form the dimer and cleave DNA. This essentially doubles the number of bases in the combined target sites, thereby increasing the stringency of targeting by CRISPR-based systems.

[0380] As further example, fusion of the TALE DNA binding domain to a catalytically active HE, such as I-Teel, takes advantage of both the tunable DNA binding and specificity of the TALE, as well as the cleavage sequence specificity of I-Teel, with the expectation that off-target cleavage can be further reduced.

### VII. Kits

[0381] The present disclosure provides kits for carrying out the methods described herein. A kit can include one or more of a genome-targeting nucleic acid, a polynucleotide encoding a genome-targeting nucleic acid, a site-directed polypeptide, a polynucleotide encoding a site-directed polypeptide, and/or any nucleic acid or proteinaceous molecule necessary to carry out the aspects of the methods described herein, or any combination thereof

[0382] A kit can comprise: (1) a vector comprising a nucleotide sequence encoding a genome-targeting nucleic acid, (2) the site-directed polypeptide or a vector comprising a nucleotide sequence encoding the site-directed polypeptide, and (3) a reagent for reconstitution and/or dilution of the vector(s) and or polypeptide.

[0383] A kit can comprise: (1) a vector comprising (i) a nucleotide sequence encoding a genome-targeting nucleic acid, and (ii) a nucleotide sequence encoding the site-directed polypeptide; and (2) a reagent for reconstitution and/or dilution of the vector.

[0384] In any of the above kits, the kit can comprise a single-molecule guide genome-targeting nucleic acid. In any of the above kits, the kit can comprise a double-molecule genome-targeting nucleic acid. In any of the above kits, the kit can comprise two or more double-molecule guides or single-molecule guides. The kits can comprise a vector that encodes the nucleic acid targeting nucleic acid.

[0385] In any of the above kits, the kit can further comprise a polynucleotide to be inserted to effect the desired genetic modification.

[0386] Components of a kit can be in separate containers, or combined in a single container.

[0387] Any kit described above can further comprise one or more additional reagents, where such additional reagents are selected from a buffer, a buffer for introducing a polypeptide or polynucleotide into a cell, a wash buffer, a control reagent, a control vector, a control RNA polynucleotide, a reagent for in vitro production of the polypeptide from DNA, adaptors for sequencing and the like. A buffer can be a stabilization buffer, a reconstituting buffer, a diluting buffer, or the like. A kit can also comprise one or more components that can be used to facilitate or enhance the on-target binding or the cleavage of DNA by the endonuclease, or improve the specificity of targeting.

[0388] In addition to the above-mentioned components, a kit can further comprise instructions for using the components of the kit to practice the methods. The instructions for practicing the methods can be recorded on a suitable recording medium. For example, the instructions can be printed on a substrate, such as paper or plastic, etc. The instructions can be present in the kits as a package insert, in the labeling of the container of the kit or components thereof (i.e., associated with the packaging or subpackaging), etc. The instructions can be present as an electronic storage data file present on a suitable computer readable storage medium, e.g. CD-ROM, diskette, flash drive, etc. In some instances, the actual instructions are not present in the kit, but means for obtaining the instructions from a remote source (e.g. via the Internet), can be provided. An example of this case is a kit that comprises a web address where the instructions can be viewed and/or from which the instructions can be downloaded. As with the instructions, this means for obtaining the instructions can be recorded on a suitable substrate.

### VIII. Specific Methods and Compositions of the Invention

[0389] Accordingly, the present disclosure relates in particular to the following non-limiting methods according to the present disclosure: In a first method, Method 1, the present disclosure provides a method for editing a Sodium Channel, Voltage Gated, Type X Alpha Subunit (SCN10A) gene in a cell by genome editing comprising: introducing into the cell one or more deoxyribonucleic acid (DNA) endonucleases to effect one or more single-strand breaks (SSBs) or double-strand breaks (DSBs) within or near the SCN10A gene or SCN10A regulatory elements that results in one or more permanent insertions, deletions or mutations of at least one nucleotide within or near the SCN10A gene, thereby reducing or eliminating the expression or function of SCN10A gene products.

[0390] In another method, Method 2, the present disclosure provides an ex vivo method for treating a patient having an SCN10A related condition or disorder comprising: editing a patient specific induced pluripotent stem cell (iPSC) within or near a Sodium Channel, Voltage Gated, Type X Alpha Subunit (SCN10A) gene or other DNA sequences that encode regulatory elements of the SCN10A gene; differentiating the edited iPSC into a neuron of the peripheral nervous system; and administering the neuron of the peripheral nervous system to the patient.

[0391] In another method, Method 3, the present disclosure provides an ex vivo method for treating a patient having an SCN10A related condition or disorder comprising: obtaining a patient specific induced pluripotent stem cell (iPSC); editing the iPSC within or near a Sodium Channel, Voltage Gated, Type X Alpha Subunit (SCN10A) gene or other DNA sequences that encode regulatory elements of the SCN10A gene; differentiating the edited iPSC into a neuron of the peripheral nervous system; and administering the neuron of the peripheral nervous system to the patient.

[0392] In another method, Method 4, the present disclosure provides the method of Methods 2 or 3, wherein the editing step comprises: introducing into the iPSC one or more deoxyribonucleic acid (DNA) endonucleases to effect one or more single-strand breaks (SSBs) or double-strand breaks (DSBs) within or near the SCN10A gene or SCN10A regulatory elements that results in one or more permanent insertions, deletions or mutations of at least one nucleotide within or near the SCN10A gene, thereby reducing or eliminating the expression or function of SCN10A gene products.

[0393] In another method, Method 5, the present disclosure provides an ex vivo method for treating a patient having an SCN10A related condition or disorder comprising: editing a mesenchymal stem cell within or near a Sodium Channel, Voltage Gated, Type X Alpha Subunit (SCN10A) gene or other DNA sequences that encode regulatory elements of the SCN10A gene; differentiating the edited mesenchymal stem cell into a neuron of the peripheral nervous system; and administering the neuron of the peripheral nervous system to the patient.

[0394] In another method, Method 6, the present disclosure provides an ex vivo method for treating a patient having an SCN10A related condition or disorder comprising: obtaining a mesenchymal stem cell from the patient; editing the mesenchymal stem cell within or near a Sodium Channel, Voltage Gated, Type X Alpha Subunit (SCN10A) gene or other DNA sequences that encode regulatory elements of the SCN10A gene; differentiating the edited mesenchymal stem cell into a neuron of the peripheral nervous system; and administering the neuron of the peripheral nervous system to the patient.

[0395] In another method, Method 7, the present disclosure provides the method of Methods 5 or 6, wherein the editing step comprises: introducing into the mesenchymal stem cell one or more deoxyribonucleic acid (DNA) endonucleases to effect one or more single-strand breaks (SSBs) or double-strand breaks (DSBs) within or near the SCN10A gene or SCN10A regulatory elements that results in one or more permanent insertions, deletions or mutations of at least one nucleotide within or near the SCN10A gene, thereby reducing or eliminating the expression or function of SCN10A gene products.

[0396] In another method, Method 8, the present disclosure provides an in vivo method for treating a patient with an SCN10A related disorder comprising: editing the Sodium Channel, Voltage Gated, Type X Alpha Subunit (SCN10A) gene in a cell of the patient.

[0397] In another method, Method 9, the present disclosure provides the method of Method 8, wherein the editing step comprises: introducing into the cell one or more deoxyribonucleic acid (DNA) endonucleases to effect one or more single-strand breaks (SSBs) or double-strand breaks (DSBs) within or near the SCN10A gene or SCN10A regulatory elements that results in one or more permanent insertions, deletions or mutations of at least one nucleotide within or near the SCN10A gene, thereby reducing or eliminating the expression or function of SCN10A gene products.

[0398] In another method, Method 10, the present disclosure provides the method of any one of Methods 8-9, wherein the cell is a neuron of the peripheral nervous system.

[0399] In another method, Method 11, the present disclosure provides the method of Method 10, wherein the one or more deoxyribonucleic acid (DNA) endonuclease is delivered to the neuron of the peripheral nervous system via direct intraganglionic or intraspinal injection, or intrathecal delivery.

[0400] In another method, Method 12, the present disclosure provides a method of altering the contiguous genomic sequence of an SCN10A gene in a cell comprising: contacting the cell with one or more deoxyribonucleic acid (DNA) endonuclease to effect one or more single-strand breaks (SSBs) or double-strand breaks (DSBs).

[0401] In another method, Method 13, the present disclosure provides the method of Method 12, wherein the alteration of the contiguous genomic sequence occurs in one or more exons of the SCN10A gene.

[0402] In another method, Method 14, the present disclosure provides the method of any one of Methods 1-13, wherein the one or more deoxyribonucleic acid (DNA) endonuclease is selected from any of those sequences in SEQ ID NOs: 1-620 and variants having at least 90% homology to any of those sequences disclosed in SEQ ID NOs: 1-620.

[0403] In another method, Method 15, the present disclosure provides the method of Method 14, wherein the one or more deoxyribonucleic acid (DNA) endonuclease is one or more protein or polypeptide.

[0404] In another method, Method 16, the present disclosure provides the method of Method 14, wherein the one or more deoxyribonucleic acid (DNA) endonuclease is one or more polynucleotide encoding the one or more DNA endonuclease.

[0405] In another method, Method 17, the present disclosure provides the method of Method 16, wherein the one or more deoxyribonucleic acid (DNA) endonuclease is one or more ribonucleic acid (RNA) encoding the one or more DNA endonuclease.

[0406] In another method, Method 18, the present disclosure provides the method of Method 17, wherein the one or more ribonucleic acid (RNA) is one or more chemically modified RNA.

[0407] In another method, Method 19, the present disclosure provides the method of Method 18, wherein the one or more ribonucleic acid (RNA) is chemically modified in the coding region.

[0408] In another method, Method 20, the present disclosure provides the method of any one of Methods 16-19, wherein the one or more polynucleotide or one or more ribonucleic acid (RNA) is codon optimized.

[0409] In another method, Method 21, the present disclosure provides the method of any one of Methods 1-20, wherein the method further comprises: introducing into the cell one or more gRNA or one or more sgRNA.

[0410] In another method, Method 22, the present disclosure provides the method of Method 21, wherein the one or more gRNA or one or more sgRNA comprises a spacer sequence that is complementary to a DNA sequence within or near the SCN10A gene.

[0411] In another method, Method 23, the present disclosure provides the method of any of the Methods 21-22, wherein the one or more gRNA or one or more sgRNA is chemically modified.

[0412] In another method, Method 24, the present disclosure provides the method of any one of Methods 21-23, wherein the one or more gRNA or one or more sgRNA is pre-complexed with the one or more deoxyribonucleic acid (DNA) endonuclease.

[0413] In another method, Method 25, the present disclosure provides the method of Method 24, wherein the pre-complexing involves a covalent attachment of the one or more gRNA or one or more sgRNA to the one or more deoxyribonucleic acid (DNA) endonuclease.

[0414] In another method, Method 26, the present disclosure provides the method of any one of Methods 14-25, wherein the one or more deoxyribonucleic acid (DNA) endonuclease is formulated in a liposome or lipid nanoparticle.

[0415] In another method, Method 27, the present disclosure provides the method of any one of Methods 21-25, wherein the one or more deoxyribonucleic acid (DNA) endonuclease is formulated in a liposome or lipid nanoparticle which also comprises the one or more gRNA or one or more sgRNA.

[0416] In another method, Method 28, the present disclosure provides the method of any one of Methods 12, or 21-22, wherein the one or more deoxyribonucleic acid (DNA) endonuclease is encoded in an AAV vector particle.

[0417] In another method, Method 29, the present disclosure provides the method of any of the Methods 21-22, wherein the one or more gRNA or one or more sgRNA is encoded in an AAV vector particle.

[0418] In another method, Method 30, the present disclosure provides the method of any of the Methods 21-22, wherein the one or more deoxyribonucleic acid (DNA) endonuclease is encoded in an AAV vector particle which also encodes the one or more gRNA or one or more sgRNA.

[0419] In another method, Method 31, the present disclosure provides the method of any of the Methods 28-30, where the AAV vector particle is selected from the group consisting of any of those disclosed in SEQ ID NOs: 4734-5302 and Table 2.

[0420] The present disclosure also provides a composition, Composition 1, comprising a single-molecule guide RNA comprising: at least a spacer sequence that is an RNA sequence corresponding to any of SEQ ID NOs: 5305-76012.

[0421] In another composition, Composition 2, the present disclosure provides the single-molecule guide RNA of Composition 1, wherein the single-molecule guide RNA further comprises a spacer extension region.

[0422] In another composition, Composition 3, the present disclosure provides the single-molecule guide RNA of Composition 1, wherein the single-molecule guide RNA further comprises a tracrRNA extension region.

[0423] In another composition, Composition 4, the present disclosure provides the single-molecule guide RNA of Compositions 1-3, wherein the single-molecule guide RNA is chemically modified.

[0424] In another composition, Composition 5, the present disclosure provides a single-molecule guide RNA of Compositions 1-4 pre-complexed with a site-directed polypeptide.

[0425] In another composition, Composition 6, the present disclosure provides a single-molecule guide RNA of Compositions 1-5 pre-complexed with a DNA endonuclease.

[0426] In another composition, Composition 7, the present disclosure provides the composition of Composition 6, wherein the DNA endonuclease is a Cas9 or Cpf1 endonuclease.

[0427] In another composition, Composition 8, the present disclosure provides the composition of Composition 7, wherein the Cas9 or Cpf1 endonuclease is selected from the group consisting of: S. pyogenes Cas9, S. aureus Cas9, N. meningitides Cas9, S. thermophilus CRISPR1 Cas9, S. thermophilus CRISPR 3 Cas9, T. denticola Cas9, L. bacterium ND2006 Cpf1 and Acidaminococcus sp. BV3L6 Cpf1, and variants having at least 90% homology to the endonucleases.

[0428] In another composition, Composition 9, the present disclosure provides the composition of Composition 8, wherein the Cas9 or Cpf1 endonuclease comprises one or more nuclear localization signals (NLSs).

[0429] In another composition, Composition 10, the present disclosure provides the composition of Composition 9, wherein at least one NLS is at or within 50 amino acids of the amino-terminus of the Cas9 or Cpf1 endonuclease and/or at least one NLS is at or within 50 amino acids of the carboxy-terminus of the Cas9 or Cpf1 endonuclease.

[0430] In another composition, Composition 11, the present disclosure provides a DNA encoding the single-molecule guide RNA of any of Compositions 1-4.

[0431] In another composition, Composition 12, the present disclosure provides a non-naturally occurring CRISPR/Cas system comprising a polynucleotide encoding a Cas9 or Cpf1 endonuclease and at least one single-molecule guide RNA of Compositions 1-4.

[0432] In another composition, Composition 13, the present disclosure provides the CRISPR/Cas system of Composition 12, wherein the polynucleotide encoding a Cas9 or Cpf1 endonuclease is selected from the group consisting of: S. pyogenes Cas9, S. aureus Cas9, N. meningitides Cas9, S. thermophilus CRISPR1 Cas9, S. thermophilus CRISPR 3 Cas9, T. denticola Cas9, L. bacterium ND2006 Cpf1 and Acidaminococcus sp. BV3L6 Cpf1, and variants having at least 90% homology to the endonucleases.

[0433] In another composition, Composition 14, the present disclosure provides the CRISPR/Cas system of Composition 13, wherein the polynucleotide encoding a Cas9 or Cpf1 endonuclease comprises one or more nuclear localization signals (NLSs).

[0434] In another composition, Composition 15, the present disclosure provides the CRISPR/Cas system of Composition 14, wherein at least one NLS is at or within 50 amino acids of the amino-terminus of the polynucleotide encoding a Cas9 or Cpf1 endonuclease and/or at least one NLS is at or within 50 amino acids of the carboxy-terminus of the polynucleotide encoding a Cas9 or Cpf1 endonuclease.

[0435] In another composition, Composition 16, the present disclosure provides the CRISPR/Cas system of Composition 15, wherein the polynucleotide encoding a Cas9 or Cpf1 endonuclease is codon optimized for expression in a eukaryotic cell.

[0436] In another composition, Composition 17, the present disclosure provides a DNA encoding the CRISPR/Cas system of any one of Compositions 12-16.

[0437] In another composition, Composition 18, the present disclosure provides a vector comprising the DNA of any one of Compositions 12-17.

[0438] In another composition, Composition 19, the present disclosure provides the vector of Composition 18, wherein the vector is a plasmid. In another composition, Composition 20, the present disclosure provides the vector of Composition 18, wherein the vector is an AAV vector particle, and the AAV vector particle is selected from the group consisting of those disclosed in SEQ ID NOs: 4734-5302 and Table 2.

### IX. Definitions

[0439] The term “comprising” or “comprises” is used in reference to compositions, methods, and respective component(s) thereof, that are essential to the present disclosure, yet open to the inclusion of unspecified elements, whether essential or not.

[0440] The term “consisting essentially of refers to those elements required for a given aspect. The term permits the presence of additional elements that do not materially affect the basic and novel or functional characteristic(s) of that aspect of the present disclosure.

[0441] The term “consisting of refers to compositions, methods, and respective components thereof as described herein, which are exclusive of any element not recited in that description of the aspect.

[0442] The singular forms “a,” “an,” and “the” include plural references, unless the context clearly dictates otherwise.

[0443] Any numerical range recited in this specification describes all sub-ranges of the same numerical precision (i.e., having the same number of specified digits) subsumed within the recited range. For example, a recited range of “1.0 to 10.0” describes all sub-ranges between (and including) the recited minimum value of 1.0 and the recited maximum value of 10.0, such as, for example, “2.4 to 7.6,” even if the range of “2.4 to 7.6” is not expressly recited in the text of the specification. Accordingly, the Applicant reserves the right to amend this specification, including the claims, to expressly recite any sub-range of the same numerical precision subsumed within the ranges expressly recited in this specification. All such ranges are inherently described in this specification such that amending to expressly recite any such sub-ranges will comply with written description, sufficiency of description, and added matter requirements, including the requirements under 35 U.S.C. § 112(a) and Article 123(2) EPC. Also, unless expressly specified or otherwise required by context, all numerical parameters described in this specification (such as those expressing values, ranges, amounts, percentages, and the like) may be read as if prefaced by the word “about,” even if the word “about” does not expressly appear before a number. Additionally, numerical parameters described in this specification should be construed in light of the number of reported significant digits, numerical precision, and by applying ordinary rounding techniques. It is also understood that numerical parameters described in this specification will necessarily possess the inherent variability characteristic of the underlying measurement techniques used to determine the numerical value of the parameter.

[0444] The details of one or more examples of the present disclosure are set forth in the accompanying description below. Although any materials and methods similar or equivalent to those described herein can be used in the practice or testing of the present disclosure, the preferred materials and methods are now described. Other features, objects and advantages of the present disclosure will be apparent from the description. In the description, the singular forms also include the plural unless the context clearly dictates otherwise. Unless defined otherwise, all technical and scientific terms used herein have the same meaning as commonly understood by one of ordinary skill in the art to which this present disclosure belongs. In the case of conflict, the present description will control.

[0445] The present disclosure is further illustrated by the following non-limiting examples.

### X. Examples

[0446] The present disclosure will be more fully understood by reference to the following examples, which provide illustrative non-limiting aspects of the invention.

[0447] The examples describe the use of the CRISPR system as an illustrative genome editing technique to create defined therapeutic genomic deletions, insertions, or replacements, termed “genomic modifications” herein, in the SCN10A gene that lead to permanent deletion or mutation of the SCN10A gene, that reduce or eliminate SCN10A protein activity.

[0448] Various Cas orthologs are evaluated for cutting. gRNAs are delivered as RNA and expressed from the U6 promoter in plasmids. The corresponding Cas protein is either knocked into the cell line of interest and constitutively expressed, delivered as mRNA, or delivered as protein. The gRNA activity in all formats is evaluated using TIDE analysis in FIEK293T cells.

[0449] Introduction of the defined therapeutic modifications represents a novel therapeutic strategy for the potential amelioration of Pain, as described and illustrated herein.

### Example 1—CRISPR/SpCas9 Target Sites for the SCN10A Gene

[0450] Regions of the SCN10A gene were scanned for target sites. Each area was scanned for a protospacer adjacent motif (PAM) having the sequence NRG. gRNA 20 bp spacer sequences corresponding to the PAM were then identified, as shown in SEQ ID NOs: 12754-40530 of the Sequence Listing.

### Example 2—CRISPR/SaCas9 Target Sites for the SCN10A Gene

[0451] Regions of the SCN10A gene were scanned for target sites. Each area was scanned for a protospacer adjacent motif (PAM) having the sequence NNGRRT. gRNA 20 bp spacer sequences corresponding to the PAM were then identified, as shown in SEQ ID NOs: 6772 9983 of the Sequence Listing.

### Example 3—CRISPR/StCas9 Target Sites for the SCN10A Gene

[0452] Regions of the SCN10A gene were scanned for target sites. Each area was scanned for a protospacer adjacent motif (PAM) having the sequence NNAGAAW. gRNA 20 bp spacer sequences corresponding to the PAM were then identified, as shown in SEQ ID NOs: 5703 6771 of the Sequence Listing.

### Example 4—CRISPR/TdCas9 Target Sites for the SCN10A Gene

[0453] Regions of the SCN10A gene were scanned for target sites. Each area was scanned for a protospacer adjacent motif (PAM) having the sequence NAAAAC. gRNA 20 bp spacer sequences corresponding to the PAM were then identified, as shown in SEQ ID NOs: 5305 5702 of the Sequence Listing.

### Example 5—CRISPR/NmCas9 Target Sites for the SCN10A Gene

[0454] Regions of the SCN10A gene were scanned for target sites. Each area was scanned for a protospacer adjacent motif (PAM) having the sequence NNNNGHTT. gRNA 20 bp spacer sequences corresponding to the PAM were then identified, as shown in SEQ ID NOs: 9984-12753 of the Sequence Listing.

### Example 6—CRISPR/Cpf1 Target Sites for the SCN10A Gene

[0455] Regions of the SCN10A gene were scanned for target sites. Each area was scanned for a protospacer adjacent motif (PAM) having the sequence YTN. gRNA 20 bp spacer sequences corresponding to the PAM were then identified, as shown in SEQ ID NOs: 40531-76012 of the Sequence Listing.

### Example 7—Bioinformatics Analysis of the Guide Strands

[0456] Candidate guides will then be screened and selected in a single process or multi-step process that involves both theoretical binding and experimentally assessed activity at both on-target and off-target sites. By way of illustration, candidate guides having sequences that match a particular on-target site, such as a site within the SCN10A gene, with adjacent PAM can be assessed for their potential to cleave at off-target sites having similar sequences, using one or more of a variety of bioinformatics tools available for assessing off-target binding, as described and illustrated in more detail below, in order to assess the likelihood of effects at chromosomal positions other than those intended.

[0457] Candidates predicted to have relatively lower potential for off-target activity can then be assessed experimentally to measure their on-target activity, and then off-target activities at various sites. Preferred guides have sufficiently high on-target activity to achieve desired levels of gene editing at the selected locus, and relatively lower off-target activity to reduce the likelihood of alterations at other chromosomal loci. The ratio of on-target to off-target activity is often referred to as the “specificity” of a guide.

[0458] For initial screening of predicted off-target activities, there are a number of bioinformatics tools known and publicly available that can be used to predict the most likely off-target sites; and since binding to target sites in the CRISPR/Cas9 or CRISPR/Cpf1 nuclease system is driven by Watson-Crick base pairing between complementary sequences, the degree of dissimilarity (and therefore reduced potential for off-target binding) is essentially related to primary sequence differences: mismatches and bulges, i.e. bases that are changed to a non-complementary base, and insertions or deletions of bases in the potential off-target site relative to the target site. An exemplary bioinformatics tool called COSMID (CRISPR Off-target Sites with Mismatches, Insertions and Deletions) (available on the web at crispr.bme.gatech.edu) compiles such similarities. Other bioinformatics tools include, but are not limited to autoCOSMID and CCTop.

[0459] Bioinformatics were used to minimize off-target cleavage in order to reduce the detrimental effects of mutations and chromosomal rearrangements. Studies on CRISPR/Cas9 systems suggested the possibility of off-target activity due to non-specific hybridization of the guide strand to DNA sequences with base pair mismatches and/or bulges, particularly at positions distal from the PAM region. Therefore, it is important to have a bioinformatics tool that can identify potential off-target sites that have insertions and/or deletions between the RNA guide strand and genomic sequences, in addition to base-pair mismatches. Bioinformatics tools based upon the off-target prediction algorithm CCTop were used to search genomes for potential CRISPR off-target sites (CCTop is available on the web at crispr.cos.uni-heidelberg.de/). The output ranked lists of the potential off-target sites based on the number and location of mismatches, allowing more informed choice of target sites, and avoiding the use of sites with more likely off-target cleavage.

[0460] Additional bioinformatics pipelines were employed that weigh the estimated on- and/or off-target activity of gRNA targeting sites in a region. Other features that may be used to predict activity include information about the cell type in question, DNA accessibility, chromatin state, transcription factor binding sites, transcription factor binding data, and other CHIP-seq data. Additional factors were weighed that predict editing efficiency, such as relative positions and directions of pairs of gRNAs, local sequence features and micro-homologies.

[0461] Initial evaluation and screening of CRISPR/Cas9 target sites focused on Exons 1-17 of the SCN10A gene, Introns 1-16, sequences located 100-300 bp upstream of Exon 1, and 100-300 bp of the flanking intronic sequences. These gRNAs can also be used to edit one or more nucleotides, exonic sequences and/or intronic sequences.

[0462] Initial bioinformatics analysis identified, 1095 gRNAs targeting Exons 1-17 of the SCN10A gene, Introns 1-16, sequences located 100-300 bp upstream of Exon 1, and 100-300 bp sequences flanking the intronic sequences. Further analysis of predicted off-target sites and evaluation of the gRNA target site within the SCN10A gene resulted in 192 gRNAs selected for screening. The prioritized list of 192 single gRNAs targeting Exons 1-9 of the SCN10A gene was tested for cutting efficiencies using spCas9 (Table 7).

TABLE 7

| SEQ | | |
|---|---|---|
| ID NO. | Name | Sequence |
| 39402 | SCN10A_Int2_Int3 T10 | AATAAACTGAACCACCTGAA |
| 40002 | SCN10A_Up_Intl_T15 | GCTCCCCGATCAGTTCTGCT |
| 36723 | SCN10A_Int4_Int5_T6 | GGGGTATCATTAGCCTAGAA |
| 26074 | SCN10A_Up Intl T2 | ACCGGGTAAGAGCTACTAGT |
| 26190 | SCN10A_Up Intl T47 | GGAGCAAAGACATAACCCTG |
| 26150 | SCN10A_Up Intl T21 | GCTGTTCTGACAATCAAGAT |
| 36719 | SCN10A_Int4_Int5 T25 | GCATAAATAAGGATAACCTG |
| 39795 | SCN10AIntlint2 T12 | GAATAGCCACAGGGCCCGAG |
| 26087 | SCN10A_Up Intl T10 | GCTCCCAGCAGAACTGATCG |
| 36293 | SCN10A Int5 Intl T46 | CATGGATGAGGTAGCACACA |
| 40057 | SCN10A_Up Intl T33 | ATTCCCCTGCAAGGCATTCA |
| 40058 | SCN10A_Up Intl T53 | TTCCCCTGCAAGGCATTCAG |
| 39998 | SCN10A_Up Intl T14 | GAACGGATCTAGATCCTCCA |
| 26180 | SCN10A_Up Intl T36 | CCTCCCCTGAATGCCTTGCA |
| 39415 | SCN10A_Int2_Int3 T12 | ATTTACTGAGTGCCTAAGCT |
| 25533 | SCN10A_Int2_Int3 T7 | TTCCTTAACACAGGCCTTTC |
| 39994 | SCN10A_Up Intl T26 | ACCCGGTGTGTGCTGTAGAA |
| 36253 | SCN10A Int5 Intl T12 | CAACCAGACCTTGGTCCCTA |
| 40026 | SCN10A_Up Intl T5 | GTGACTCCGGAGTAAAGCGA |
| 26063 | SCN10A_Up Intl T45 | CCAGCCCAGAAAGTCCTCCT |
| 40023 | SCN10A_Up Intl T34 | TCTATCTCCACCAGTGACTC |
| 39809 | SCN10AIntlint2 T20 | AACATGAGAGGCATTATCTC |
| 40006 | SCN10A Up Intl T19 | GGGAGCTCACCATAGAACTT |
| 39379 | SCN10A_Int2_Int3 T11 | AGCATTACCCACATGAGGCA |
| 26089 | SCN10A_Up Intl T35 | GAGCTCCCAGCAGAACTGAT |
| 25882 | SCN10A_Intl_int2 T23 | ACATTTATGGTGCTGAACAA |
| 36249 | SCN10A Int5 Intl T7 | CCTGTCCCTATATGATACCA |
| 39755 | SCN10AIntlint2 T14 | TGTGTCTTGGGACTGCTTTG |
| 25878 | SCN10AInt1int2 T19 | ACAAAGGGAGGACCATTTCC |
| 36716 | SCN10A_Int4Int5 T21 | GGATGCATGCAGCATAAATA |
| 26189 | SCN10A_Up Intl T40 | AGACATAACCCTGAGGCACC |
| 39797 | SCN10AIntlint2 T1 | GGCCCGAGTGGCACTAAACC |
| 39973 | SCN10A_Up Intl T37 | GCAGACTGCCACATCACCCA |
| 22560 | SCN10A_Int5_Int7 T16 | GTGGGGCTGCAACTCTTCAA |
| 21875 | SCN10A Intl Int9 T12 | GGCCCTCGAGATGCTCCGGA |
| 25520 | SCN10AInt2Int3 T2 | TATCCTGCCATGCCTCATGT |
| 36713 | SCN10A_Int4_Int5 T26 | CTCTGCAAGCAAGGGTCCTG |
| 26080 | SCN10A_Up Intl T43 | ATCCGTTCTACAGCACACAC |
| 39822 | SCN10AIntlint2 T15 | GGTCAATGAGAGTCAAATGC |
| 22561 | SCN10A_Int5_Int7 T19 | GGTGGGGCTGCAACTCTTCA |
| 26079 | SCN10A_Up Intl T20 | TCCGTTCTACAGCACACACC |
| 26128 | SCN10A_Up Intl T3 | CAACTTCCGTCGCTTTACTC |
| 26187 | SCN10A Up Intl T55 | CATAACCCTGAGGCACCTGG |
| 22817 | SCN10A_Int4_Int5 T2 | GGCACAGCAATAGATCTCCG |
| 39997 | SCN10A_Up Intl T11 | AGAACGGATCTAGATCCTCC |
| 26093 | SCN10A_Up Intl T24 | AACCAGCTGCCCAAGTTCTA |
| 23800 | SCN10A_Int3_Int4 T6 | TCACGTACCTGAGAGATCCT |
| 22542 | SCN10A Int5 Intl T5 | TGGACCCTTGGTATCATATA |
| 25874 | SCN10AIntlint2 T11 | TTAGTGCCACTCGGGCCCTG |
| 22816 | SCN10AInt4Int5 T1 | GCACAGCAATAGATCTCCGT |
| 40034 | SCN10A_Up Intl T16 | TAGTTTCGAGGGATCCAATG |
| 26129 | SCN10A Up Intl T32 | GAGAAGATGGAATTCCCCAT |
| 39992 | SCN10A_Up Intl T13 | TCCTACTAGTAGCTCTTACC |
| 22551 | SCN10A_Int5_Int7 T27 | GTGAGTGGAGTCTCTTCCAT |
| 21893 | SCN10A_Int7_Int9 T9 | TGTAGTCACCATGGCGTATG |
| 39972 | SCN10A_Up Intl T28 | AGCAGACTGCCACATCACCC |
| 36289 | SCN10A_Int5Int7 T28 | ATGACAGTGGTATGACCACA |
| 37540 | SCN10A_Int3_Int4 T11 | GCCAGTTCCAAGGATCTCTC |
| 22778 | SCN10A_Int4_Int5 T16 | TAGTAAGAGACAGTGTGACC |
| 36693 | SCN10A Int4 Int5 T23 | CTGTGAATAAATGCTCACCT |
| 22834 | SCN10A_Int4_Int5 T13 | TGTCAGTGTCAGTCTATAGA |
| 22806 | SCN10A_Int4_Int5 T29 | AAAACAGTTTCTGTGATCCC |
| 36718 | SCN10A_Int4Int5 T3 0 | AGCATAAATAAGGATAACCT |
| 22825 | SCN10A_Int4_Int5 T32 | TTTATGCTGCATGCATCCCC |
| 36717 | SCN10A_Int4Int5 T15 | CAGCATAAATAAGGATAACC |
| 39399 | SCN10A_Int2_Int3 T8 | TTTCTCTGGAAGGTCAGTTC |
| 22827 | SCN 10AInt4Int5 T4 | TTCTAGGCTAATGATACCCC |
| 35706 | SCN10A Intl Int9 T18 | CTCCAACCAAGTCTGCGTGG |
| 40033 | SCN10A_Up Intl T7 | TTAGTTTCGAGGGATCCAAT |
| 39789 | SCN10AIntlint2 T13 | GTTCTTCTGATCAGGTTGAA |
| 36710 | SCN10A_Int4_Int5 T31 | GTCAGCATCTCTGCAAGCAA |
| 35714 | SCN10A_Int7_Int9 T22 | CTGCTGGTAGAGGCGTTCCC |
| 39381 | SCN10A Int2 Int3 T4 | TTACCCACATGAGGCATGGC |
| 22579 | SCN10A_Int5_Int7 T38 | TGTGTGCTACCTCATCCATG |
| 39776 | SCN10AInt1int2 T3 | CAAGGTCTAATTGTAACACG |
| 26085 | SCN10A_Up Intl T18 | AGAACTGATCGGGGAGCCCC |
| 40056 | SCN10A Up Intl T38 | CATTCCCCTGCAAGGCATTC |
| 22512 | SCN10AInt5Int7 T34 | GTGACTTTACAACTTCCATG |
| 22543 | SCN10AInt5Int7 T8 | TTGGACCCTTGGTATCATAT |
| 40046 | SCN10A_Up Intl T29 | AGAGGTGACAGCTTGCCCAC |
| 22485 | SCN10A_Int5_Int7 T41 | ACTTCTGACCCCTTACTGTG |
| 23772 | SCN10A_Int3_Int4 T13 | GGTCCCACTTGGACAGAGTG |
| 25864 | SCN10AInt 1 int2 T10 | GTGTCCAGTACCTTCTTTAG |
| 39792 | SCN10AInt 1 int2 T24 | TGAAAGGACTGAATAGCCAC |
| 39404 | SCN10A Int2 Int3 T1 | CACCTGAAAGGCCTGTGTTA |
| 22521 | SCN10AInt5Int7 T44 | CAAGTCATTCTACCTCTGCT |
| 25535 | SCN10A_Int2_Int3 T9 | TCTCAGCTTTTCCTTAACAC |
| 25875 | SCN10A-Int1 int2 T4 | TTCCCGGTTTAGTGCCACTC |
| 36291 | SCN10A_Int5_Int7 T3 7 | GTGGTATGACCACATGGATG |
| 39787 | SCN10AIntlint2 T6 | TGATGGCCGTTCTTCTGATC |
| 21849 | SCN10A_Int7_Int9 T6 | GGCACCGTTTAGGGAGCTAT |
| 23776 | SCN10Alnt31nt4 T9 | AGGAGACAGGGCTAACATGC |
| 23799 | SCN10A Int3 Int4 T8 | ACCTGAGAGATCCTTGGAAC |
| 26083 | SCN10A_Up Int1 T50 | ACTGATCGGGGAGCCCCTGG |
| 37560 | SCN10A_Int3_Int4 T14 | AAGGAGTGTCAACTGTGCCA |
| 36680 | SCN10A_Int4_Int5 T7 | GGGGACAATAGTCTTTGCCC |
| 37527 | SCN10A_Int3_Int4 T16 | TCTCCACACTCTGTCCAAGT |
| 39378 | SCN10A Int2 Int3 T3 | GATTCAGCATTACCCACATG |
| 26151 | SCN10A_Up Intl T49 | GGCTGTTCTGACAATCAAGA |
| 25879 | SCN10AInt1int2 T29 | TTATGGTGCTGAACAAAGGG |
| 35705 | SCN10A_Int7_Int9 T13 | CCTCCAACCAAGTCTGCGTG |
| 26177 | SCN10A Up Intl T46 | TGAATGCCTTGCAGGGGAAT |
| 36683 | SCN10AInt4Int5 T28 | CTTTGCCCTGGAACCTTACA |
| 26181 | SCN10A_Up Int I T25 | GCCTCCCCTGAATGCCTTGC |
| 26125 | SCN10A_Up Intl T22 | CTTTACTCCGGAGTCACTGG |
| 40005 | SCN10A_Up Intl T17 | TGGGAGCTCACCATAGAACT |
| 39759 | SCN10AInt 1 int2 T16 | TGGGGTGTGGGACACATTAA |
| 22507 | SCN10A_Int5_Int7 T47 | CACTGAGTACATGTAGCCAA |
| 37563 | SCN10A_Int3_Int4 T3 | CTGTGCCATGGAGTGTACTC |
| 36669 | SCN10A Int4 Int5 T9 | ACTGTCTCTTACTAGTGAAG |
| 39766 | SCN10AIntli nt2 T27 | TTTGGGATTCAATTGGATAA |
| 37566 | SCN10A_Int3_Int4 T4 | TGCCATGGAGTGTACTCAGG |
| 26168 | SCN10A_Up Intl T51 | GAGGAGCCAAGTGTGAGTTC |
| 39798 | SCN10AInt 1 int2 T9 | AGTGGCACTAAACCGGGAAA |
| 21853 | SCN10A_Int7_Int9 T5 | CTTCAATTAGGGCACCGTTT |
| 36184 | SCN10A_Int5_Int7 T42 | GATCCATTGCCACACAGTAA |
| 22546 | SCN 10Alnt5Int7 T15 | CATAGGGACCAAGGTCTGGT |
| 40032 | SCN10A Up Intl T8 | GTTAGTTTCGAGGGATCCAA |
| 22481 | SCN10A_Int5Int7 T25 | GTGGCAATGGATCTGACTCA |
| 37565 | SCN10A_Int3_Int4 T7 | GTGCCATGGAGTGTACTCAG |
| 40010 | SCN10A_Up Intl T39 | GAACTTGGGCAGCTGGTTGC |
| 39999 | SCN10A_Up Intl T12 | AACGGATCTAGATCCTCCAG |
| 40031 | SCN10A Up Intl T4 | ACGGAAGTTGTTAGTTTCGA |
| 36711 | SCN10A_Int4_Int5 T18 | ATCTCTGCAAGCAAGGGTCC |
| 22498 | SCN10AInt5Int7 T21 | GCATTCACCACACAAGGCTT |
| 39818 | SCN10A_Intl_int2 T22 | AGAAGGGCTCTGGGAACTAC |
| 22822 | SCN10A Int4 Int5 T11 | CAGAGATGCTGACTAACTTC |
| 26179 | SCN10A_Up Intl T42 | CTCCCCTGAATGCCTTGCAG |
| 25521 | SCN I 0AInt2Int3 T5 | TTATCCTGCCATGCCTCATG |
| 21856 | SCN10A_Int7_Int9 T20 | CTGGACTAGCCACTTCAATT |
| 39796 | SCN10AIntlint2 T2 | GGGCCCGAGTGGCACTAAAC |
| 37564 | SCN10A_Int3_Int4 T10 | TGTGCCATGGAGTGTACTCA |
| 22528 | SCN10A_Int5_Int7 T3 5 | TGCTCAGCATCCCTCTTGCA |
| 37583 | SCN10A_Int3_Int4 T17 | ATATCACCAAGGTGATGAGG |
| 22577 | SCN10A Int5 Intl T4 | TACCACTGTCATCTTCCCGC |
| 21847 | SCN10A_Int7_Int9 T11 | ACCGTTTAGGGAGCTATAGG |
| 36168 | SCN10A_Int5_Int7 T31 | TCTGTGCCCATAATATGCCA |
| 36702 | SCN10A_Int4_Int5 T14 | TGCTGTGCCAACATATCTGT |
| 35704 | SCN10A_Int7_Int9 T4 | GCCTCCAACCAAGTCTGCGT |
| 22795 | SCN10A_Int4_Int5 T10 | AAGAACCCTGTAAGGTTCCA |
| 21926 | SCN10A_Int7_Int9 T1 | TTCCCCCACGCAGACTTGGT |
| 26097 | SCN 10A_Up Intl T44 | AGAGAAGCCTCGGCCCCAGC |
| 36692 | SCN10A Int4 Int5 T17 | TCTGTGAATAAATGCTCACC |
| 22484 | SCN10A_Int5_Int7 T20 | GACCCCTTACTGTGTGGCAA |
| 39775 | SCN10AIntlint2 T30 | GGTACTGGACACAGTAGGCA |
| 22538 | SCN10A_Int5_Int7 T18 | TTGGTATCATATAGGGACAG |
| 25529 | SCN10A_Int2_Int3 T6 | ATTTATTACGGTCACTATTT |
| 22540 | SCN10A Int5 Intl T1 | CCTTGGTATCATATAGGGAC |
| 36207 | SCN10A_Int5_Int7 T29 | ATGTACTCAGTGGGCATGCT |
| 26126 | SCN I 0A_Up Intl T6 | TCGCTTTACTCCGGAGTCAC |
| 36671 | SCN10A_Int4_Int5 T12 | CTTACTAGTGAAGAGGCCTT |
| 39769 | SCN10A Intl int2 T21 | CTGTTGCTAACCTCTAAAGA |
| 22539 | SCN10AInt5Int7 T17 | CTTGGTATCATATAGGGACA |
| 36712 | SCN10AInt4Int5 T19 | TCTCTGCAAGCAAGGGTC T |
| 22814 | SCN10A_Int4_Int5 T5 | ATAGATCTCCGTGGGATCTC |
| 36673 | SCN10A_Int4_Int5 T22 | GTTTATGTTTCCTATACTCC |
| 40030 | SCN10A_Up Intl T 1 | GACGGAAGTTGTTAGTTTCG |
| 35660 | SCN10A_Int7_Int9 T7 | CTCCTTCCGGAGCATCTCGA |
| 39770 | SCN10AIntlint2 T18 | CTAACCTCTAAAGAAGGTAC |
| 23812 | SCN10A Int3 Int4 T5 | AACCCCCTGAGTACACTCCA |
| 22575 | SCN10AInt5Int7 T26 | TCATCTTCCCGCAGGCCTGA |
| 22791 | SCN10A_Int4_Int5 T24 | TGTCCCCACTTACAAGACAA |
| 22547 | SCN10A_Int5_Int7 T10 | CTTCCATAGGGACCAAGGTC |
| 22820 | SCN10A_Int4_Int5 T27 | TTCTGGTCCTACAGATATGT |
| 39763 | SCN10AIntlint2 T25 | TTGTACTTTTGGGATTCAAT |
| 22796 | SCN10A_Int4_Int5 T8 | CAAGAACCCTGTAAGGTTCC |
| 26118 | SCN 10A_Up lntl T30 | GAAGCAAATTGCTGCCAAGC |
| 36205 | SCN10A Int5 Intl T33 | TTTGGCTACATGTACTCAGT |
| 26167 | SCN10A_Up Intl T54 | AGGAGCCAAGTGTGAGTTCA |
| 39781 | SCN10AIntlint2 T7 | TGGAAGAGGCAATCGTGCAA |
| 23796 | SCN10A_Int3_Int4 T1 | GGATTTTAGCGTCATTACCC |
| 22574 | SCN10A_Int5_Int7 T11 | CGCAGGCCTGAAGGTCATTG |
| 37533 | SCN10A Int3 Int4 T2 | CATAGAGATATACTCACGCC |
| 36697 | SCN10A_Int4_Int5 T3 | TAAGAACTCTGAATGTCCGC |
| 25876 | SCN10AIntlint2 T5 | TTTCCCGGTTTAGTGCCACT |
| 39813 | SCN10A_Intl_int2 T26 | TCTCAGGCTTATGAGCAAGA |
| 21841 | SCN10A Intl Int9 T16 | CTCAGGGACCATATTAGATC |
| 40001 | SCN10A_Up Intl T9 | GGCTCCCCGATCAGTTCTGC |
| 26176 | SCN10A_Up Intl T27 | CTTGCAGGGGAATGGGTTCC |
| 26175 | SCN10A_Up Intl T41 | TTGCAGGGGAATGGGTTCCT |
| 39779 | SCN10AInt Intl int2 T8 | CTAATTGTAACACGTGGAAG |
| 39815 | SCN10AIntl_int2 T17 | CTTATGAGCAAGAAGGGCTC |
| 36177 | SCN10A_Int5_Int7 T14 | ACTCGTGCTTTGTCATAAGT |
| 23807 | SCN10A_Int3_Int4 T12 | TGAAGCCTTGATAAAGATAC |
| 36670 | SCN10A Int4 Int5 T20 | TCTTACTAGTGAAGAGGCCT |
| 39814 | SCN10AInt1int2 T31 | CTCAGGCTTATGAGCAAGAA |
| 21852 | SCN10A_Int7_Int9 T3 | TTCAATTAGGGCACCGTTTA |
| 40008 | SCN10A_Up Intl T23 | CACCATAGAACTTGGGCAGC |
| 36178 | SCN10A_Int5_Int7 T3 | CTCGTGCTTTGTCATAAGTT |
| 40017 | SCN10A_Up Intl T48 | TTCAAGTCCAGCTGGGGCCG |
| 39765 | SCN10AInt 1 int2 T28 | TTTTGGGATTCAATTGGATA |
| 40062 | SCN 10A_Up lntl T31 | TGTTTATTCAACCCTCCTCC |

[0463] Note that the SEQ TD NOs represent the DNA sequence of the genomic target, while the gRNA or sgRNA spacer sequence will be the RNA version of the DNA sequence.

### Example 8—Testing of Preferred Guides in In Vitro Transcribed (IVT) gRNA Screen

[0464] To identify a large spectrum of pairs of gRNAs able to edit the cognate DNA target region, an in vitro transcribed (WI⁻) gRNA screen was conducted. The relevant genomic sequence was submitted for analysis using a gRNA. design software. The resulting list of gRNAs were narrowed to a select list of gRNAs as described above based on uniqueness of sequence (only gRNAs without a perfect match somewhere else in the genoine were screened) and minimal predicted off targets. This set of gRNAs was in vitro transcribed, and transfected using Lipofectamine MessengerMAX into HEK293T cells that constitutively express Cas9. Cells were harvested 48 hours post transfection, the genomic DNA was isola A, and cutting efficiency was evaluated using TIDE analysis. (FIGS. 2A-H; FIGS. 3A-C).

[0465] The gRNA or pairs of gRNA with significant activity can then be followed up in cultured cells to measure SCN10A protein expression. Off-target events can be followed again. A variety of cells can be transfected and the level of gene correction and possible off-target events measured. These experiments allow optimization of nuclease and donor design and delivery.

### Example 9—Testing of Preferred Guides in Cells for Off-Target Activity

[0466] The gRNAs having the best on-target activity from the IVT screen in the above example are tested for off-target activity using Hybrid capture assays, GUIDE Seq. and whole genome sequencing in addition to other methods.

### Example 10—In Vivo Testing in Relevant Animal Model

[0467] After the CRISPR-Cas9/guide combinations have been assessed, the lead formulations will be tested in vivo in an animal model.

[0468] Culture in human cells allows direct testing on the human target and the background human genome, as described above.

[0469] Preclinical efficacy and safety evaluations can be observed through engraftment of modified mouse or human neurons of the peripheral nervous system in a mouse model. The modified cells can be observed in the months after engraftment.

### XI. Equivalents and Scope

[0470] Those skilled in the art will recognize, or be able to ascertain using no more than routine experimentation, many equivalents to the specific examples in accordance with the invention described herein. The scope of the present disclosure is not intended to be limited to the above Description, but rather is as set forth in the appended claims.

[0471] Claims or descriptions that include “or” between one or more members of a group are considered satisfied if one, more than one, or all of the group members are present in, employed in, or otherwise relevant to a given product or process unless indicated to the contrary or otherwise evident from the context. The present disclosure includes examples in which exactly one member of the group is present in, employed in, or otherwise relevant to a given product or process. The present disclosure includes examples in which more than one, or the entire group members are present in, employed in, or otherwise relevant to a given product or process.

[0472] In addition, it is to be understood that any particular example of the present disclosure that falls within the prior art may be explicitly excluded from any one or more of the claims. Since such examples are deemed to be known to one of ordinary skill in the art, they may be excluded even if the exclusion is not set forth explicitly herein. Any particular example of the compositions of the present disclosure (e.g., any antibiotic, therapeutic or active ingredient; any method of production; any method of use; etc.) can be excluded from any one or more claims, for any reason, whether or not related to the existence of prior art.

[0473] It is to be understood that the words which have been used are words of description rather than limitation, and that changes may be made within the purview of the appended claims without departing from the true scope and spirit of the present disclosure in its broader aspects.

[0474] While the present invention has been described at some length and with some particularity with respect to the several described examples, it is not intended that it should be limited to any such particulars or examples or any particular example, but it is to be construed with references to the appended claims so as to provide the broadest possible interpretation of such claims in view of the prior art and, therefore, to effectively encompass the intended scope of the invention.

### Note Regarding Illustrative Examples

[0475] While the present disclosure provides descriptions of various specific aspects for the purpose of illustrating various aspects of the present disclosure and/or its potential applications, it is understood that variations and modifications will occur to those skilled in the art.

[0476] Accordingly, the invention or inventions described herein should be understood to be at least as broad as they are claimed, and not as more narrowly defined by particular illustrative aspects provided herein.

[0477] Any patent, publication, or other disclosure material identified herein is incorporated by reference into this specification in its entirety unless otherwise indicated, but only to the extent that the incorporated material does not conflict with existing descriptions, definitions, statements, or other disclosure material expressly set forth in this specification. As such, and to the extent necessary, the express disclosure as set forth in this specification supersedes any conflicting material incorporated by reference. Any material, or portion thereof, that is said to be incorporated by reference into this specification, but which conflicts with existing definitions, statements, or other disclosure material set forth herein, is only incorporated to the extent that no conflict arises between that incorporated material and the existing disclosure material. Applicants reserve the right to amend this specification to expressly recite any subject matter, or portion thereof, incorporated by reference herein.

1. A single-molecule guide RNA comprising a spacer sequence that is an RNA sequence corresponding to any one of SEQ ID NOs: 39402, 40002, 36723, 26074, 26190, 26150, 36719, 39795, 26087, 36293, 40057, 40058, 39998, 26180, 39415, 25533, 39994, 36253, 40026, 26063, 40023, 39809, 40006, 39379, 26089, 25882, 36249, 39755, 25878, 36716, 26189, 39797, 39973, 22560, 21875, 25520, 36713, 26080, 39822, 22561, 26079, 26128, 26187, 22817, 39997, 26093, 23800, 22542, 25874, 22816, 40034, 26129, 39992, 22551, 21893, 39972, 36289, 37540, 22778, 36693, 22834, 22806, 36718, 22825, 36717, 39399, 22827, 35706, 40033, 39789, 36710, 35714, 39381, 22579, 39776, 26085, 40056, 22512, 22543, 40046, 22485, 23772, 25864, 39792, 39404, 22521, 25535, 25875, 36291, 39787, 21849, or 23799.

2. The single-molecule guide RNA of claim 1, wherein the RNA sequence corresponds to any one of SEQ ID NO: 21893, 22485, 26128, 39994, 26087, 26093, 40033, or 39795.

3. The single-molecule guide RNA of claim 1, wherein the RNA sequence corresponds to any one of SEQ ID NO: 21893, 22485, 26128.

4. The single molecule guide RNA of claim 1, wherein the RNA sequence corresponds to SEQ ID NO: 21893.

5. The single-molecule guide RNA of claim 1, wherein the single-molecule guide RNA further comprises a spacer extension region.

6. The single-molecule guide RNA of claim 1, wherein the single-molecule guide RNA further comprises a tracrRNA extension region.

7. The single-molecule guide RNA of claim 1, wherein the single-molecule guide RNA is chemically modified.

8. The single-molecule guide RNA of claim 1 pre-complexed with a DNA endonuclease.

9. The single-molecule guide RNA of claim 8, wherein the DNA endonuclease is a Cas9 or Cpf1 endonuclease.

10. The single-molecule guide RNA of claim 9, wherein Cas9 or Cpf1 endonuclease is selected from the group consisting of: S. pyogenes Cas9, S. aureus Cas9, N. meningitides Cas9, S. thermophilus CRISPR1 Cas9, S. thermophilus CRISPR 3 Cas9, T. denticola Cas9, L. bacterium ND2006 Cpf1 and Acidaminococcus sp. BV3L6 Cpf1, and variants having at least 90% homology to said endonucleases.

11. The single-molecule guide RNA of claim 9, wherein the Cas9 or Cpf1 endonuclease comprises one or more nuclear localization signals (NLSs).

12. The single-molecule guide RNA of claim 11, wherein at least one NLS is at or within 50 amino acids of the amino-terminus of the Cas9 or Cpf1 endonuclease and/or at least one NLS is at or within 50 amino acids of the carboxy-terminus of the Cas9 or Cpf1.

13. A DNA encoding the single-molecule guide RNA of claim 1.

14. A method for editing the Sodium Channel, Voltage Gated, Type X Alpha Subunit (SCN10A) gene in a cell by genome editing comprising: introducing into the cell an S. pyogenes Cas9 endonuclease or one or more polynucleotide encoding the S. pyogenes Cas9 endonuclease and one or more gRNA or sgRNA or one or more nucleic acid encoding the one or more gRNA or sgRNA, wherein the one or more gRNA or sgRNA comprises a spacer sequence that targets a sequence within or near the SCN10A gene to effect one or more single-strand breaks (SSBs) or double-strand breaks (DSBs) within or near the SCN10A gene or SCN10A regulatory elements that results in one or more permanent insertions, deletions or mutations of at least one nucleotide within or near the SCN10A gene, thereby reducing or eliminating the expression or function of SCN10A gene products, wherein the sequence within or near the SCN10A gene that is targeted by the spacer sequence of the one or more gRNA or sgRNA is selected from any one of SEQ ID NO: 39402, 40002, 36723, 26074, 26190, 26150, 36719, 39795, 26087, 36293, 40057, 40058, 39998, 26180, 39415, 25533, 39994, 36253, 40026, 26063, 40023, 39809, 40006, 39379, 26089, 25882, 36249, 39755, 25878, 36716, 26189, 39797, 39973, 22560, 21875, 25520, 36713, 26080, 39822, 22561, 26079, 26128, 26187, 22817, 39997, 26093, 23800, 22542, 25874, 22816, 40034, 26129, 39992, 22551, 39972, 36289, 37540, 22778, 36693, 22834, 22806, 36718, 22825, 36717, 39399, 22827, 35706, 40033, 39789, 36710, 35714, 39381, 22579, 39776, 26085, 40056, 22512, 22543, 40046, 22485, 23772, 25864, 39792, 39404, 22521, 25535, 25875, 36291, 39787, 21849, or 23799.

15. The method of claim 14, wherein the sequence within or near the SCN10A gene that is targeted by the spacer sequence of the one or more gRNA or sgRNA is selected from any one of 22485, 26128, 39994, 26087, 26093, 40033, 39795.

16. The method of claim 15, wherein the sequence within or near the SCN10A gene that is targeted by the spacer sequence of the one or more gRNA or sgRNA is selected from 22485 or 26128.

17. An ex vivo method for treating a patient having an SCN10A related condition or disorder comprising:
(a) editing a patient specific induced pluripotent stem cell (iPSC) or a mesenchymal stem cell by: introducing into the iPSC or mesenchymal stem cell an S. pyogenes Cas9 endonuclease or one or more polynucleotide encoding the S. pyogenes Cas9 endonuclease and one or more gRNA or sgRNA or one or more nucleic acid encoding the one or more gRNA or sgRNA, wherein the one or more gRNA or sgRNA comprises a spacer sequence that targets a sequence within or near the SCN10A gene to effect one or more single-strand breaks (SSBs) or double-strand breaks (DSBs) within or near the SCN10A gene or SCN10A regulatory elements that results in one or more permanent insertions, deletions or mutations of at least one nucleotide within or near the SCN10A gene, thereby reducing or eliminating the expression or function of SCN10A gene products, wherein the sequence within or near the SCN10A gene that is targeted by the spacer sequence of the one or more gRNA or sgRNA is selected from any one of SEQ ID NOs: 39402, 40002, 36723, 26074, 26190, 26150, 36719, 39795, 26087, 36293, 40057, 40058, 39998, 26180, 39415, 25533, 39994, 36253, 40026, 26063, 40023, 39809, 40006, 39379, 26089, 25882, 36249, 39755, 25878, 36716, 26189, 39797, 39973, 22560, 21875, 25520, 36713, 26080, 39822, 22561, 26079, 26128, 26187, 22817, 39997, 26093, 23800, 22542, 25874, 22816, 40034, 26129, 39992, 22551, 21893, 39972, 36289, 37540, 22778, 36693, 22834, 22806, 36718, 22825, 36717, 39399, 22827, 35706, 40033, 39789, 36710, 35714, 39381, 22579, 39776, 26085, 40056, 22512, 22543, 40046, 22485, 23772, 25864, 39792, 39404, 22521, 25535, 25875, 36291, 39787, 21849, or 23799;
(b) differentiating the edited cell of (a) into a neuron of the peripheral nervous system; and
(c) administering said neuron of the peripheral nervous system to the patient.

18. The method of claim 17, wherein the sequence within or near the SCN10A gene that is targeted by the spacer sequence of the one or more gRNA or sgRNA is selected from any one of SEQ ID NOs: 21893, 22485, 26128, 39994, 26087, 26093, 40033, 39795.

19. The method of claim 18, wherein the sequence within or near the SCN10A gene that is targeted by the spacer sequence of the one or more gRNA or sgRNA is selected from any one of SEQ ID NOs: 21893, 22485, 26128.

20. The method of claim 19, wherein the sequence within or near the SCN10A gene that is targeted by the spacer sequence of the one or more gRNA or sgRNA is SEQ ID NO: 21893.

The application's sequence listing, which the Patent Office published only in electronic form, follows.

SEQUENCE LISTING (76046 sequences)

SEQ ID NO: 1 - protein, 1368 aa, Streptococcus pyogenes [sequence omitted]

SEQ ID NO: 2 - DNA, 4107 bp, Streptococcus pyogenes
  source 1..4107: mol_type = unassigned DNA
atggataagaaatactcaataggcttagatatcggcacaaatagcgtcggatgggcggtgatcactgatgaatataaggttccgtctaaaaagttcaaggttctgggaaatacagaccgccacagtatcaaaaaaaatcttataggggctcttttatttgacagtggagagacagcggaagcgactcgtctcaaacggacagctcgtagaaggtatacacgtcggaagaatcgtatttgttatctacaggagattttttcaaatgagatggcgaaagtagatgatagtttctttcatcgacttgaagagtcttttttggtggaagaagacaagaagcatgaacgtcatcctatttttggaaatatagtagatgaagttgcttatcatgagaaatatccaactatctatcatctgcgaaaaaaattggtagattctactgataaagcggatttgcgcttaatctatttggccttagcgcatatgattaagtttcgtggtcattttttgattgagggagatttaaatcctgataatagtgatgtggacaaactatttatccagttggtacaaacctacaatcaattatttgaagaaaaccctattaacgcaagtggagtagatgctaaagcgattctttctgcacgattgagtaaatcaagacgattagaaaatctcattgctcagctccccggtgagaagaaaaatggcttatttgggaatctcattgctttgtcattgggtttgacccctaattttaaatcaaattttgatttggcagaagatgctaaattacagctttcaaaagatacttacgatgatgatttagataatttattggcgcaaattggagatcaatatgctgatttgtttttggcagctaagaatttatcagatgctattttactttcagatatcctaagagtaaatactgaaataactaaggctcccctatcagcttcaatgattaaacgctacgatgaacatcatcaagacttgactcttttaaaagctttagttcgacaacaacttccagaaaagtataaagaaatcttttttgatcaatcaaaaaacggatatgcaggttatattgatgggggagctagccaagaagaattttataaatttatcaaaccaattttagaaaaaatggatggtactgaggaattattggtgaaactaaatcgtgaagatttgctgcgcaagcaacggacctttgacaacggctctattccccatcaaattcacttgggtgagctgcatgctattttgagaagacaagaagacttttatccatttttaaaagacaatcgtgagaagattgaaaaaatcttgacttttcgaattccttattatgttggtccattggcgcgtggcaatagtcgttttgcatggatgactcggaagtctgaagaaacaattaccccatggaattttgaagaagttgtcgataaaggtgcttcagctcaatcatttattgaacgcatgacaaactttgataaaaatcttccaaatgaaaaagtactaccaaaacatagtttgctttatgagtattttacggtttataacgaattgacaaaggtcaaatatgttactgaaggaatgcgaaaaccagcatttctttcaggtgaacagaagaaagccattgttgatttactcttcaaaacaaatcgaaaagtaaccgttaagcaattaaaagaagattatttcaaaaaaatagaatgttttgatagtgttgaaatttcaggagttgaagatagatttaatgcttcattaggtacctaccatgatttgctaaaaattattaaagataaagattttttggataatgaagaaaatgaagatatcttagaggatattgttttaacattgaccttatttgaagatagggagatgattgaggaaagacttaaaacatatgctcacctctttgatgataaggtgatgaaacagcttaaacgtcgccgttatactggttggggacgtttgtctcgaaaattgattaatggtattagggataagcaatctggcaaaacaatattagattttttgaaatcagatggttttgccaatcgcaattttatgcagctgatccatgatgatagtttgacatttaaagaagacattcaaaaagcacaagtgtctggacaaggcgatagtttacatgaacatattgcaaatttagctggtagccctgctattaaaaaaggtattttacagactgtaaaagttgttgatgaattggtcaaagtaatggggcggcataagccagaaaatatcgttattgaaatggcacgtgaaaatcagacaactcaaaagggccagaaaaattcgcgagagcgtatgaaacgaatcgaagaaggtatcaaagaattaggaagtcagattcttaaagagcatcctgttgaaaatactcaattgcaaaatgaaaagctctatctctattatctccaaaatggaagagacatgtatgtggaccaagaattagatattaatcgtttaagtgattatgatgtcgatcacattgttccacaaagtttccttaaagacgattcaatagacaataaggtcttaacgcgttctgataaaaatcgtggtaaatcggataacgttccaagtgaagaagtagtcaaaaagatgaaaaactattggagacaacttctaaacgccaagttaatcactcaacgtaagtttgataatttaacgaaagctgaacgtggaggtttgagtgaacttgataaagctggttttatcaaacgccaattggttgaaactcgccaaatcactaagcatgtggcacaaattttggatagtcgcatgaatactaaatacgatgaaaatgataaacttattcgagaggttaaagtgattaccttaaaatctaaattagtttctgacttccgaaaagatttccaattctataaagtacgtgagattaacaattaccatcatgcccatgatgcgtatctaaatgccgtcgttggaactgctttgattaagaaatatccaaaacttgaatcggagtttgtctatggtgattataaagtttatgatgttcgtaaaatgattgctaagtctgagcaagaaataggcaaagcaaccgcaaaatatttcttttactctaatatcatgaacttcttcaaaacagaaattacacttgcaaatggagagattcgcaaacgccctctaatcgaaactaatggggaaactggagaaattgtctgggataaagggcgagattttgccacagtgcgcaaagtattgtccatgccccaagtcaatattgtcaagaaaacagaagtacagacaggcggattctccaaggagtcaattttaccaaaaagaaattcggacaagcttattgctcgtaaaaaagactgggatccaaaaaaatatggtggttttgatagtccaacggtagcttattcagtcctagtggttgctaaggtggaaaaagggaaatcgaagaagttaaaatccgttaaagagttactagggatcacaattatggaaagaagttcctttgaaaaaaatccgattgactttttagaagctaaaggatataaggaagttaaaaaagacttaatcattaaactacctaaatatagtctttttgagttagaaaacggtcgtaaacggatgctggctagtgccggagaattacaaaaaggaaatgagctggctctgccaagcaaatatgtgaattttttatatttagctagtcattatgaaaagttgaagggtagtccagaagataacgaacaaaaacaattgtttgtggagcagcataagcattatttagatgagattattgagcaaatcagtgaattttctaagcgtgttattttagcagatgccaatttagataaagttcttagtgcatataacaaacatagagacaaaccaatacgtgaacaagcagaaaatattattcatttatttacgttgacgaatcttggagctcccgctgcttttaaatattttgatacaacaattgatcgtaaacgatatacgtctacaaaagaagttttagatgccactcttatccatcaatccatcactggtctttatgaaacacgcattgatttgagtcagctaggaggtgactga

SEQ ID NO: 3 - DNA, 4107 bp, Streptococcus pyogenes
  source 1..4107: mol_type = unassigned DNA
atggacaagaagtactccattgggctcgctatcggcacaaacagcgtcggctgggccgtcattacggacgagtacaaggtgccgagcaaaaaattcaaagttctgggcaataccgatcgccacagcataaagaagaacctcattggcgccctcctgttcgactccggggagacggccgaagccacgcggctcaaaagaacagcacggcgcagatatacccgcagaaagaatcggatctgctacctgcaggagatctttagtaatgagatggctaaggtggatgactctttcttccataggctggaggagtcctttttggtggaggaggataaaaagcacgagcgccacccaatctttggcaatatcgtggacgaggtggcgtaccatgaaaagtacccaaccatatatcatctgaggaagaagcttgtagacagtactgataaggctgacttgcggttgatctatctcgcgctggcgcatatgatcaaatttcggggacacttcctcatcgagggggacctgaacccagacaacagcgatgtcgacaaactctttatccaactggttcagacttacaatcagcttttcgaagagaacccgatcaacgcatccggagttgacgccaaagcaatcctgagcgctaggctgtccaaatcccggcggctcgaaaacctcatcgcacagctccctggggagaagaagaacggcctgtttggtaatcttatcgccctgtcactcgggctgacccccaactttaaatctaacttcgacctggccgaagatgccaagcttcaactgagcaaagacacctacgatgatgatctcgacaatctgctggcccagatcggcgaccagtacgcagacctttttttggcggcaaagaacctgtcagacgccattctgctgagtgatattctgcgagtgaacacggagatcaccaaagctccgctgagcgctagtatgatcaagcgctatgatgagcaccaccaagacttgactttgctgaaggcccttgtcagacagcaactgcctgagaagtacaaggaaattttcttcgatcagtctaaaaatggctacgccggatacattgacggcggagcaagccaggaggaattttacaaatttattaagcccatcttggaaaaaatggacggcaccgaggagctgctggtaaagcttaacagagaagatctgttgcgcaaacagcgcactttcgacaatggaagcatcccccaccagattcacctgggcgaactgcacgctatcctcaggcggcaagaggatttctacccctttttgaaagataacagggaaaagattgagaaaatcctcacatttcggataccctactatgtaggccccctcgcccggggaaattccagattcgcgtggatgactcgcaaatcagaagagaccatcactccctggaacttcgaggaagtcgtggataagggggcctctgcccagtccttcatcgaaaggatgactaactttgataaaaatctgcctaacgaaaaggtgcttcctaaacactctctgctgtacgagtacttcacagtttataacgagctcaccaaggtcaaatacgtcacagaagggatgagaaagccagcattcctgtctggagagcagaagaaagctatcgtggacctcctcttcaagacgaaccggaaagttaccgtgaaacagctcaaagaagactatttcaaaaagattgaatgtttcgactctgttgaaatcagcggagtggaggatcgcttcaacgcatccctgggaacgtatcacgatctcctgaaaatcattaaagacaaggacttcctggacaatgaggagaacgaggacattcttgaggacattgtcctcacccttacgttgtttgaagatagggagatgattgaagaacgcttgaaaacttacgctcatctcttcgacgacaaagtcatgaaacagctcaagaggcgccgatatacaggatgggggcggctgtcaagaaaactgatcaatgggatccgagacaagcagagtggaaagacaatcctggattttcttaagtccgatggatttgccaaccggaacttcatgcagttgatccatgatgactctctcacctttaaggaggacatccagaaagcacaagtttctggccagggggacagtcttcacgagcacatcgctaatcttgcaggtagcccagctatcaaaaagggaatactgcagaccgttaaggtcgtggatgaactcgtcaaagtaatgggaaggcataagcccgagaatatcgttatcgagatggcccgagagaaccaaactacccagaagggacagaagaacagtagggaaaggatgaagaggattgaagagggtataaaagaactggggtcccaaatccttaaggaacacccagttgaaaacacccagcttcagaatgagaagctctacctgtactacctgcagaacggcagggacatgtacgtggatcaggaactggacatcaatcggctctccgactacgacgtggctgctatcgtgccccagtcttttctcaaagatgattctattgataataaagtgttgacaagatccgataaagctagagggaagagtgataacgtcccctcagaagaagttgtcaagaaaatgaaaaattattggcggcagctgctgaacgccaaactgatcacacaacggaagttcgataatctgactaaggctgaacgaggtggcctgtctgagttggataaagccggcttcatcaaaaggcagcttgttgagacacgccagatcaccaagcacgtggcccaaattctcgattcacgcatgaacaccaagtacgatgaaaatgacaaactgattcgagaggtgaaagttattactctgaagtctaagctggtctcagatttcagaaaggactttcagttttataaggtgagagagatcaacaattaccaccatgcgcatgatgcctacctgaatgcagtggtaggcactgcacttatcaaaaaatatcccaagcttgaatctgaatttgtttacggagactataaagtgtacgatgttaggaaaatgatcgcaaagtctgagcaggaaataggcaaggccaccgctaagtacttcttttacagcaatattatgaattttttcaagaccgagattacactggccaatggagagattcggaagcgaccacttatcgaaacaaacggagaaacaggagaaatcgtgtgggacaagggtagggatttcgcgacagtccggaaggtcctgtccatgccgcaggtgaacatcgttaaaaagaccgaagtacagaccggaggcttctccaaggaaagtatcctcccgaaaaggaacagcgacaagctgatcgcacgcaaaaaagattgggaccccaagaaatacggcggattcgattctcctacagtcgcttacagtgtactggttgtggccaaagtggagaaagggaagtctaaaaaactcaaaagcgtcaaggaactgctgggcatcacaatcatggagcgatcaagcttcgaaaaaaaccccatcgactttctcgaggcgaaaggatataaagaggtcaaaaaagacctcatcattaagcttcccaagtactctctctttgagcttgaaaacggccggaaacgaatgctcgctagtgcgggcgagctgcagaaaggtaacgagctggcactgccctctaaatacgttaatttcttgtatctggccagccactatgaaaagctcaaagggtctcccgaagataatgagcagaagcagctgttcgtggaacaacacaaacactaccttgatgagatcatcgagcaaataagcgaattctccaaaagagtgatcctcgccgacgctaacctcgataaggtgctttctgcttacaataagcacagggataagcccatcagggagcaggcagaaaacattatccacttgtttactctgaccaacttgggcgcgcctgcagccttcaagtacttcgacaccaccatagacagaaagcggtacacctctacaaaggaggtcctggacgccacactgattcatcagtcaattacggggctctatgaaacaagaatcgacctctctcagctcggtggagactaa

SEQ ID NO: 4 - DNA, 4140 bp, Streptococcus pyogenes
  source 1..4140: mol_type = unassigned DNA
atggacaagaagtactccattgggctcgatatcggcacaaacagcgtcggctgggccgtcattacggacgagtacaaggtgccgagcaaaaaattcaaagttctgggcaataccgatcgccacagcataaagaagaacctcattggcgccctcctgttcgactccggggagacggccgaagccacgcggctcaaaagaacagcacggcgcagatatacccgcagaaagaatcggatctgctacctgcaggagatctttagtaatgagatggctaaggtggatgactctttcttccataggctggaggagtcctttttggtggaggaggataaaaagcacgagcgccacccaatctttggcaatatcgtggacgaggtggcgtaccatgaaaagtacccaaccatatatcatctgaggaagaagcttgtagacagtactgataaggctgacttgcggttgatctatctcgcgctggcgcatatgatcaaatttcggggacacttcctcatcgagggggacctgaacccagacaacagcgatgtcgacaaactctttatccaactggttcagacttacaatcagcttttcgaagagaacccgatcaacgcatccggagttgacgccaaagcaatcctgagcgctaggctgtccaaatcccggcggctcgaaaacctcatcgcacagctccctggggagaagaagaacggcctgtttggtaatcttatcgccctgtcactcgggctgacccccaactttaaatctaacttcgacctggccgaagatgccaagcttcaactgagcaaagacacctacgatgatgatctcgacaatctgctggcccagatcggcgaccagtacgcagacctttttttggcggcaaagaacctgtcagacgccattctgctgagtgatattctgcgagtgaacacggagatcaccaaagctccgctgagcgctagtatgatcaagcgctatgatgagcaccaccaagacttgactttgctgaaggcccttgtcagacagcaactgcctgagaagtacaaggaaattttcttcgatcagtctaaaaatggctacgccggatacattgacggcggagcaagccaggaggaattttacaaatttattaagcccatcttggaaaaaatggacggcaccgaggagctgctggtaaagcttaacagagaagatctgttgcgcaaacagcgcactttcgacaatggaagcatcccccaccagattcacctgggcgaactgcacgctatcctcaggcggcaagaggatttctacccctttttgaaagataacagggaaaagattgagaaaatcctcacatttcggataccctactatgtaggccccctcgcccggggaaattccagattcgcgtggatgactcgcaaatcagaagagaccatcactccctggaacttcgaggaagtcgtggataagggggcctctgcccagtccttcatcgaaaggatgactaactttgataaaaatctgcctaacgaaaaggtgcttcctaaacactctctgctgtacgagtacttcacagtttataacgagctcaccaaggtcaaatacgtcacagaagggatgagaaagccagcattcctgtctggagagcagaagaaagctatcgtggacctcctcttcaagacgaaccggaaagttaccgtgaaacagctcaaagaagactatttcaaaaagattgaatgtttcgactctgttgaaatcagcggagtggaggatcgcttcaacgcatccctgggaacgtatcacgatctcctgaaaatcattaaagacaaggacttcctggacaatgaggagaacgaggacattcttgaggacattgtcctcacccttacgttgtttgaagatagggagatgattgaagaacgcttgaaaacttacgctcatctcttcgacgacaaagtcatgaaacagctcaagaggcgccgatatacaggatgggggcggctgtcaagaaaactgatcaatgggatccgagacaagcagagtggaaagacaatcctggattttcttaagtccgatggatttgccaaccggaacttcatgcagttgatccatgatgactctctcacctttaaggaggacatccagaaagcacaagtttctggccagggggacagtcttcacgagcacatcgctaatcttgcaggtagcccagctatcaaaaagggaatactgcagaccgttaaggtcgtggatgaactcgtcaaagtaatgggaaggcataagcccgagaatatcgttatcgagatggcccgagagaaccaaactacccagaagggacagaagaacagtagggaaaggatgaagaggattgaagagggtataaaagaactggggtcccaaatccttaaggaacacccagttgaaaacacccagcttcagaatgagaagctctacctgtactacctgcagaacggcagggacatgtacgtggatcaggaactggacatcaatcggctctccgactacgacgtggatcatatcgtgccccagtcttttctcaaagatgattctattgataataaagtgttgacaagatccgataaaaatagagggaagagtgataacgtcccctcagaagaagttgtcaagaaaatgaaaaattattggcggcagctgctgaacgccaaactgatcacacaacggaagttcgataatctgactaaggctgaacgaggtggcctgtctgagttggataaagccggcttcatcaaaaggcagcttgttgagacacgccagatcaccaagcacgtggcccaaattctcgattcacgcatgaacaccaagtacgatgaaaatgacaaactgattcgagaggtgaaagttattactctgaagtctaagctggtctcagatttcagaaaggactttcagttttataaggtgagagagatcaacaattaccaccatgcgcatgatgcctacctgaatgcagtggtaggcactgcacttatcaaaaaatatcccaagcttgaatctgaatttgtttacggagactataaagtgtacgatgttaggaaaatgatcgcaaagtctgagcaggaaataggcaaggccaccgctaagtacttcttttacagcaatattatgaattttttcaagaccgagattacactggccaatggagagattcggaagcgaccacttatcgaaacaaacggagaaacaggagaaatcgtgtgggacaagggtagggatttcgcgacagtccggaaggtcctgtccatgccgcaggtgaacatcgttaaaaagaccgaagtacagaccggaggcttctccaaggaaagtatcctcccgaaaaggaacagcgacaagctgatcgcacgcaaaaaagattgggaccccaagaaatacggcggattcgattctcctacagtcgcttacagtgtactggttgtggccaaagtggagaaagggaagtctaaaaaactcaaaagcgtcaaggaactgctgggcatcacaatcatggagcgatcaagcttcgaaaaaaaccccatcgactttctcgaggcgaaaggatataaagaggtcaaaaaagacctcatcattaagcttcccaagtactctctctttgagcttgaaaacggccggaaacgaatgctcgctagtgcgggcgagctgcagaaaggtaacgagctggcactgccctctaaatacgttaatttcttgtatctggccagccactatgaaaagctcaaagggtctcccgaagataatgagcagaagcagctgttcgtggaacaacacaaacactaccttgatgagatcatcgagcaaataagcgaattctccaaaagagtgatcctcgccgacgctaacctcgataaggtgctttctgcttacaataagcacagggataagcccatcagggagcaggcagaaaacattatccacttgtttactctgaccaacttgggcgcgcctgcagccttcaagtacttcgacaccaccatagacagaaagcggtacacctctacaaaggaggtcctggacgccacactgattcatcagtcaattacggggctctatgaaacaagaatcgacctctctcagctcggtggagacagcagggctgaccccaagaagaagaggaaggtgtga

SEQ ID NO: 5 - DNA, 4200 bp, Streptococcus pyogenes
  source 1..4200: mol_type = unassigned DNA
atggacaagaagtactccattgggctcgatatcggcacaaacagcgtcggctgggccgtcattacggacgagtacaaggtgccgagcaaaaaattcaaagttctgggcaataccgatcgccacagcataaagaagaacctcattggcgccctcctgttcgactccggggagacggccgaagccacgcggctcaaaagaacagcacggcgcagatatacccgcagaaagaatcggatctgctacctgcaggagatctttagtaatgagatggctaaggtggatgactctttcttccataggctggaggagtcctttttggtggaggaggataaaaagcacgagcgccacccaatctttggcaatatcgtggacgaggtggcgtaccatgaaaagtacccaaccatatatcatctgaggaagaagcttgtagacagtactgataaggctgacttgcggttgatctatctcgcgctggcgcatatgatcaaatttcggggacacttcctcatcgagggggacctgaacccagacaacagcgatgtcgacaaactctttatccaactggttcagacttacaatcagcttttcgaagagaacccgatcaacgcatccggagttgacgccaaagcaatcctgagcgctaggctgtccaaatcccggcggctcgaaaacctcatcgcacagctccctggggagaagaagaacggcctgtttggtaatcttatcgccctgtcactcgggctgacccccaactttaaatctaacttcgacctggccgaagatgccaagcttcaactgagcaaagacacctacgatgatgatctcgacaatctgctggcccagatcggcgaccagtacgcagacctttttttggcggcaaagaacctgtcagacgccattctgctgagtgatattctgcgagtgaacacggagatcaccaaagctccgctgagcgctagtatgatcaagcgctatgatgagcaccaccaagacttgactttgctgaaggcccttgtcagacagcaactgcctgagaagtacaaggaaattttcttcgatcagtctaaaaatggctacgccggatacattgacggcggagcaagccaggaggaattttacaaatttattaagcccatcttggaaaaaatggacggcaccgaggagctgctggtaaagcttaacagagaagatctgttgcgcaaacagcgcactttcgacaatggaagcatcccccaccagattcacctgggcgaactgcacgctatcctcaggcggcaagaggatttctacccctttttgaaagataacagggaaaagattgagaaaatcctcacatttcggataccctactatgtaggccccctcgcccggggaaattccagattcgcgtggatgactcgcaaatcagaagagaccatcactccctggaacttcgaggaagtcgtggataagggggcctctgcccagtccttcatcgaaaggatgactaactttgataaaaatctgcctaacgaaaaggtgcttcctaaacactctctgctgtacgagtacttcacagtttataacgagctcaccaaggtcaaatacgtcacagaagggatgagaaagccagcattcctgtctggagagcagaagaaagctatcgtggacctcctcttcaagacgaaccggaaagttaccgtgaaacagctcaaagaagactatttcaaaaagattgaatgtttcgactctgttgaaatcagcggagtggaggatcgcttcaacgcatccctgggaacgtatcacgatctcctgaaaatcattaaagacaaggacttcctggacaatgaggagaacgaggacattcttgaggacattgtcctcacccttacgttgtttgaagatagggagatgattgaagaacgcttgaaaacttacgctcatctcttcgacgacaaagtcatgaaacagctcaagaggcgccgatatacaggatgggggcggctgtcaagaaaactgatcaatgggatccgagacaagcagagtggaaagacaatcctggattttcttaagtccgatggatttgccaaccggaacttcatgcagttgatccatgatgactctctcacctttaaggaggacatccagaaagcacaagtttctggccagggggacagtcttcacgagcacatcgctaatcttgcaggtagcccagctatcaaaaagggaatactgcagaccgttaaggtcgtggatgaactcgtcaaagtaatgggaaggcataagcccgagaatatcgttatcgagatggcccgagagaaccaaactacccagaagggacagaagaacagtagggaaaggatgaagaggattgaagagggtataaaagaactggggtcccaaatccttaaggaacacccagttgaaaacacccagcttcagaatgagaagctctacctgtactacctgcagaacggcagggacatgtacgtggatcaggaactggacatcaatcggctctccgactacgacgtggatcatatcgtgccccagtcttttctcaaagatgattctattgataataaagtgttgacaagatccgataaaaatagagggaagagtgataacgtcccctcagaagaagttgtcaagaaaatgaaaaattattggcggcagctgctgaacgccaaactgatcacacaacggaagttcgataatctgactaaggctgaacgaggtggcctgtctgagttggataaagccggcttcatcaaaaggcagcttgttgagacacgccagatcaccaagcacgtggcccaaattctcgattcacgcatgaacaccaagtacgatgaaaatgacaaactgattcgagaggtgaaagttattactctgaagtctaagctggtctcagatttcagaaaggactttcagttttataaggtgagagagatcaacaattaccaccatgcgcatgatgcctacctgaatgcagtggtaggcactgcacttatcaaaaaatatcccaagcttgaatctgaatttgtttacggagactataaagtgtacgatgttaggaaaatgatcgcaaagtctgagcaggaaataggcaaggccaccgctaagtacttcttttacagcaatattatgaattttttcaagaccgagattacactggccaatggagagattcggaagcgaccacttatcgaaacaaacggagaaacaggagaaatcgtgtgggacaagggtagggatttcgcgacagtccggaaggtcctgtccatgccgcaggtgaacatcgttaaaaagaccgaagtacagaccggaggcttctccaaggaaagtatcctcccgaaaaggaacagcgacaagctgatcgcacgcaaaaaagattgggaccccaagaaatacggcggattcgattctcctacagtcgcttacagtgtactggttgtggccaaagtggagaaagggaagtctaaaaaactcaaaagcgtcaaggaactgctgggcatcacaatcatggagcgatcaagcttcgaaaaaaaccccatcgactttctcgaggcgaaaggatataaagaggtcaaaaaagacctcatcattaagcttcccaagtactctctctttgagcttgaaaacggccggaaacgaatgctcgctagtgcgggcgagctgcagaaaggtaacgagctggcactgccctctaaatacgttaatttcttgtatctggccagccactatgaaaagctcaaagggtctcccgaagataatgagcagaagcagctgttcgtggaacaacacaaacactaccttgatgagatcatcgagcaaataagcgaattctccaaaagagtgatcctcgccgacgctaacctcgataaggtgctttctgcttacaataagcacagggataagcccatcagggagcaggcagaaaacattatccacttgtttactctgaccaacttgggcgcgcctgcagccttcaagtacttcgacaccaccatagacagaaagcggtacacctctacaaaggaggtcctggacgccacactgattcatcagtcaattacggggctctatgaaacaagaatcgacctctctcagctcggtggagacgcggccgcagatccaaaaaagaagagaaaggtagatccaaaaaagaagagaaaggtagatccaaaaaagaagagaaaggtagatacggccgcatag

SEQ ID NO: 6 - DNA, 4326 bp, Streptococcus pyogenes
  source 1..4326: mol_type = unassigned DNA
atggacaagaagtactccattgggctcgctatcggcacaaacagcgtcggctgggccgtcattacggacgagtacaaggtgccgagcaaaaaattcaaagttctgggcaataccgatcgccacagcataaagaagaacctcattggcgccctcctgttcgactccggggagacggccgaagccacgcggctcaaaagaacagcacggcgcagatatacccgcagaaagaatcggatctgctacctgcaggagatctttagtaatgagatggctaaggtggatgactctttcttccataggctggaggagtcctttttggtggaggaggataaaaagcacgagcgccacccaatctttggcaatatcgtggacgaggtggcgtaccatgaaaagtacccaaccatatatcatctgaggaagaagcttgtagacagtactgataaggctgacttgcggttgatctatctcgcgctggcgcatatgatcaaatttcggggacacttcctcatcgagggggacctgaacccagacaacagcgatgtcgacaaactctttatccaactggttcagacttacaatcagcttttcgaagagaacccgatcaacgcatccggagttgacgccaaagcaatcctgagcgctaggctgtccaaatcccggcggctcgaaaacctcatcgcacagctccctggggagaagaagaacggcctgtttggtaatcttatcgccctgtcactcgggctgacccccaactttaaatctaacttcgacctggccgaagatgccaagcttcaactgagcaaagacacctacgatgatgatctcgacaatctgctggcccagatcggcgaccagtacgcagacctttttttggcggcaaagaacctgtcagacgccattctgctgagtgatattctgcgagtgaacacggagatcaccaaagctccgctgagcgctagtatgatcaagcgctatgatgagcaccaccaagacttgactttgctgaaggcccttgtcagacagcaactgcctgagaagtacaaggaaattttcttcgatcagtctaaaaatggctacgccggatacattgacggcggagcaagccaggaggaattttacaaatttattaagcccatcttggaaaaaatggacggcaccgaggagctgctggtaaagcttaacagagaagatctgttgcgcaaacagcgcactttcgacaatggaagcatcccccaccagattcacctgggcgaactgcacgctatcctcaggcggcaagaggatttctacccctttttgaaagataacagggaaaagattgagaaaatcctcacatttcggataccctactatgtaggccccctcgcccggggaaattccagattcgcgtggatgactcgcaaatcagaagagaccatcactccctggaacttcgaggaagtcgtggataagggggcctctgcccagtccttcatcgaaaggatgactaactttgataaaaatctgcctaacgaaaaggtgcttcctaaacactctctgctgtacgagtacttcacagtttataacgagctcaccaaggtcaaatacgtcacagaagggatgagaaagccagcattcctgtctggagagcagaagaaagctatcgtggacctcctcttcaagacgaaccggaaagttaccgtgaaacagctcaaagaagactatttcaaaaagattgaatgtttcgactctgttgaaatcagcggagtggaggatcgcttcaacgcatccctgggaacgtatcacgatctcctgaaaatcattaaagacaaggacttcctggacaatgaggagaacgaggacattcttgaggacattgtcctcacccttacgttgtttgaagatagggagatgattgaagaacgcttgaaaacttacgctcatctcttcgacgacaaagtcatgaaacagctcaagaggcgccgatatacaggatgggggcggctgtcaagaaaactgatcaatgggatccgagacaagcagagtggaaagacaatcctggattttcttaagtccgatggatttgccaaccggaacttcatgcagttgatccatgatgactctctcacctttaaggaggacatccagaaagcacaagtttctggccagggggacagtcttcacgagcacatcgctaatcttgcaggtagcccagctatcaaaaagggaatactgcagaccgttaaggtcgtggatgaactcgtcaaagtaatgggaaggcataagcccgagaatatcgttatcgagatggcccgagagaaccaaactacccagaagggacagaagaacagtagggaaaggatgaagaggattgaagagggtataaaagaactggggtcccaaatccttaaggaacacccagttgaaaacacccagcttcagaatgagaagctctacctgtactacctgcagaacggcagggacatgtacgtggatcaggaactggacatcaatcggctctccgactacgacgtggctgctatcgtgccccagtcttttctcaaagatgattctattgataataaagtgttgacaagatccgataaagctagagggaagagtgataacgtcccctcagaagaagttgtcaagaaaatgaaaaattattggcggcagctgctgaacgccaaactgatcacacaacggaagttcgataatctgactaaggctgaacgaggtggcctgtctgagttggataaagccggcttcatcaaaaggcagcttgttgagacacgccagatcaccaagcacgtggcccaaattctcgattcacgcatgaacaccaagtacgatgaaaatgacaaactgattcgagaggtgaaagttattactctgaagtctaagctggtctcagatttcagaaaggactttcagttttataaggtgagagagatcaacaattaccaccatgcgcatgatgcctacctgaatgcagtggtaggcactgcacttatcaaaaaatatcccaagcttgaatctgaatttgtttacggagactataaagtgtacgatgttaggaaaatgatcgcaaagtctgagcaggaaataggcaaggccaccgctaagtacttcttttacagcaatattatgaattttttcaagaccgagattacactggccaatggagagattcggaagcgaccacttatcgaaacaaacggagaaacaggagaaatcgtgtgggacaagggtagggatttcgcgacagtccggaaggtcctgtccatgccgcaggtgaacatcgttaaaaagaccgaagtacagaccggaggcttctccaaggaaagtatcctcccgaaaaggaacagcgacaagctgatcgcacgcaaaaaagattgggaccccaagaaatacggcggattcgattctcctacagtcgcttacagtgtactggttgtggccaaagtggagaaagggaagtctaaaaaactcaaaagcgtcaaggaactgctgggcatcacaatcatggagcgatcaagcttcgaaaaaaaccccatcgactttctcgaggcgaaaggatataaagaggtcaaaaaagacctcatcattaagcttcccaagtactctctctttgagcttgaaaacggccggaaacgaatgctcgctagtgcgggcgagctgcagaaaggtaacgagctggcactgccctctaaatacgttaatttcttgtatctggccagccactatgaaaagctcaaagggtctcccgaagataatgagcagaagcagctgttcgtggaacaacacaaacactaccttgatgagatcatcgagcaaataagcgaattctccaaaagagtgatcctcgccgacgctaacctcgataaggtgctttctgcttacaataagcacagggataagcccatcagggagcaggcagaaaacattatccacttgtttactctgaccaacttgggcgcgcctgcagccttcaagtacttcgacaccaccatagacagaaagcggtacacctctacaaaggaggtcctggacgccacactgattcatcagtcaattacggggctctatgaaacaagaatcgacctctctcagctcggtggagacagcagggctgaccccaagaagaagaggaaggtggaggccagcggttccggacgggctgacgcattggacgattttgatctggatatgctgggaagtgacgccctcgatgattttgaccttgacatgcttggttcggatgcccttgatgactttgacctcgacatgctcggcagtgacgcccttgatgatttcgacctggacatgctgattaactctagatga

SEQ ID NO: 7 - DNA, 4359 bp, Streptococcus pyogenes
  source 1..4359: mol_type = unassigned DNA
atgcccaagaagaagaggaaggtgggaagggggatggacaagaagtactccattgggctcgctatcggcacaaacagcgtcggctgggccgtcattacggacgagtacaaggtgccgagcaaaaaattcaaagttctgggcaataccgatcgccacagcataaagaagaacctcattggcgccctcctgttcgactccggggagacggccgaagccacgcggctcaaaagaacagcacggcgcagatatacccgcagaaagaatcggatctgctacctgcaggagatctttagtaatgagatggctaaggtggatgactctttcttccataggctggaggagtcctttttggtggaggaggataaaaagcacgagcgccacccaatctttggcaatatcgtggacgaggtggcgtaccatgaaaagtacccaaccatatatcatctgaggaagaagcttgtagacagtactgataaggctgacttgcggttgatctatctcgcgctggcgcatatgatcaaatttcggggacacttcctcatcgagggggacctgaacccagacaacagcgatgtcgacaaactctttatccaactggttcagacttacaatcagcttttcgaagagaacccgatcaacgcatccggagttgacgccaaagcaatcctgagcgctaggctgtccaaatcccggcggctcgaaaacctcatcgcacagctccctggggagaagaagaacggcctgtttggtaatcttatcgccctgtcactcgggctgacccccaactttaaatctaacttcgacctggccgaagatgccaagcttcaactgagcaaagacacctacgatgatgatctcgacaatctgctggcccagatcggcgaccagtacgcagacctttttttggcggcaaagaacctgtcagacgccattctgctgagtgatattctgcgagtgaacacggagatcaccaaagctccgctgagcgctagtatgatcaagcgctatgatgagcaccaccaagacttgactttgctgaaggcccttgtcagacagcaactgcctgagaagtacaaggaaattttcttcgatcagtctaaaaatggctacgccggatacattgacggcggagcaagccaggaggaattttacaaatttattaagcccatcttggaaaaaatggacggcaccgaggagctgctggtaaagcttaacagagaagatctgttgcgcaaacagcgcactttcgacaatggaagcatcccccaccagattcacctgggcgaactgcacgctatcctcaggcggcaagaggatttctacccctttttgaaagataacagggaaaagattgagaaaatcctcacatttcggataccctactatgtaggccccctcgcccggggaaattccagattcgcgtggatgactcgcaaatcagaagagaccatcactccctggaacttcgaggaagtcgtggataagggggcctctgcccagtccttcatcgaaaggatgactaactttgataaaaatctgcctaacgaaaaggtgcttcctaaacactctctgctgtacgagtacttcacagtttataacgagctcaccaaggtcaaatacgtcacagaagggatgagaaagccagcattcctgtctggagagcagaagaaagctatcgtggacctcctcttcaagacgaaccggaaagttaccgtgaaacagctcaaagaagactatttcaaaaagattgaatgtttcgactctgttgaaatcagcggagtggaggatcgcttcaacgcatccctgggaacgtatcacgatctcctgaaaatcattaaagacaaggacttcctggacaatgaggagaacgaggacattcttgaggacattgtcctcacccttacgttgtttgaagatagggagatgattgaagaacgcttgaaaacttacgctcatctcttcgacgacaaagtcatgaaacagctcaagaggcgccgatatacaggatgggggcggctgtcaagaaaactgatcaatgggatccgagacaagcagagtggaaagacaatcctggattttcttaagtccgatggatttgccaaccggaacttcatgcagttgatccatgatgactctctcacctttaaggaggacatccagaaagcacaagtttctggccagggggacagtcttcacgagcacatcgctaatcttgcaggtagcccagctatcaaaaagggaatactgcagaccgttaaggtcgtggatgaactcgtcaaagtaatgggaaggcataagcccgagaatatcgttatcgagatggcccgagagaaccaaactacccagaagggacagaagaacagtagggaaaggatgaagaggattgaagagggtataaaagaactggggtcccaaatccttaaggaacacccagttgaaaacacccagcttcagaatgagaagctctacctgtactacctgcagaacggcagggacatgtacgtggatcaggaactggacatcaatcggctctccgactacgacgtggctgctatcgtgccccagtcttttctcaaagatgattctattgataataaagtgttgacaagatccgataaagctagagggaagagtgataacgtcccctcagaagaagttgtcaagaaaatgaaaaattattggcggcagctgctgaacgccaaactgatcacacaacggaagttcgataatctgactaaggctgaacgaggtggcctgtctgagttggataaagccggcttcatcaaaaggcagcttgttgagacacgccagatcaccaagcacgtggcccaaattctcgattcacgcatgaacaccaagtacgatgaaaatgacaaactgattcgagaggtgaaagttattactctgaagtctaagctggtctcagatttcagaaaggactttcagttttataaggtgagagagatcaacaattaccaccatgcgcatgatgcctacctgaatgcagtggtaggcactgcacttatcaaaaaatatcccaagcttgaatctgaatttgtttacggagactataaagtgtacgatgttaggaaaatgatcgcaaagtctgagcaggaaataggcaaggccaccgctaagtacttcttttacagcaatattatgaattttttcaagaccgagattacactggccaatggagagattcggaagcgaccacttatcgaaacaaacggagaaacaggagaaatcgtgtgggacaagggtagggatttcgcgacagtccggaaggtcctgtccatgccgcaggtgaacatcgttaaaaagaccgaagtacagaccggaggcttctccaaggaaagtatcctcccgaaaaggaacagcgacaagctgatcgcacgcaaaaaagattgggaccccaagaaatacggcggattcgattctcctacagtcgcttacagtgtactggttgtggccaaagtggagaaagggaagtctaaaaaactcaaaagcgtcaaggaactgctgggcatcacaatcatggagcgatcaagcttcgaaaaaaaccccatcgactttctcgaggcgaaaggatataaagaggtcaaaaaagacctcatcattaagcttcccaagtactctctctttgagcttgaaaacggccggaaacgaatgctcgctagtgcgggcgagctgcagaaaggtaacgagctggcactgccctctaaatacgttaatttcttgtatctggccagccactatgaaaagctcaaagggtctcccgaagataatgagcagaagcagctgttcgtggaacaacacaaacactaccttgatgagatcatcgagcaaataagcgaattctccaaaagagtgatcctcgccgacgctaacctcgataaggtgctttctgcttacaataagcacagggataagcccatcagggagcaggcagaaaacattatccacttgtttactctgaccaacttgggcgcgcctgcagccttcaagtacttcgacaccaccatagacagaaagcggtacacctctacaaaggaggtcctggacgccacactgattcatcagtcaattacggggctctatgaaacaagaatcgacctctctcagctcggtggagacagcagggctgaccccaagaagaagaggaaggtggaggccagcggttccggacgggctgacgcattggacgattttgatctggatatgctgggaagtgacgccctcgatgattttgaccttgacatgcttggttcggatgcccttgatgactttgacctcgacatgctcggcagtgacgcccttgatgatttcgacctggacatgctgattaactctagatga

SEQ ID NO: 8 - protein, 1409 aa, Streptococcus sp.
  source 1..1409: note = Streptococcus thermophiles
MLFNKCIIISINLDFSNKEKCMTKPYSIGLDIGTNSVGWAVITDNYKVPSKKMKVLGNTSKKYIKKNLLGVLLFDSGITAEGRRLKRTARRRYTRRRNRILYLQEIFSTEMATLDDAFFQRLDDSFLVPDDKRDSKYPIFGNLVEEKVYHDEFPTIYHLRKYLADSTKKADLRLVYLALAHMIKYRGHFLIEGEFNSKNNDIQKNFQDFLDTYNAIFESDLSLENSKQLEEIVKDKISKLEKKDRILKLFPGEKNSGIFSEFLKLIVGNQADFRKCFNLDEKASLHFSKESYDEDLETLLGYIGDDYSDVFLKAKKLYDAILLSGFLTVTDNETEAPLSSAMIKRYNEHKEDLALLKEYIRNISLKTYNEVFKDDTKNGYAGYIDGKTNQEDFYVYLKNLLAEFEGADYFLEKIDREDFLRKQRTFDNGSIPYQIHLQEMRAILDKQAKFYPFLAKNKERIEKILTFRIPYYVGPLARGNSDFAWSIRKRNEKITPWNFEDVIDKESSAEAFINRMTSFDLYLPEEKVLPKHSLLYETFNVYNELTKVRFIAESMRDYQFLDSKQKKDIVRLYFKDKRKVTDKDIIEYLHAIYGYDGIELKGIEKQFNSSLSTYHDLLNIINDKEFLDDSSNEAIIEEIIHTLTIFEDREMIKQRLSKFENIFDKSVLKKLSRRHYTGWGKLSAKLINGIRDEKSGNTILDYLIDDGISNRNFMQLIHDDALSFKKKIQKAQIIGDEDKGNIKEVVKSLPGSPAIKKGILQSIKIVDELVKVMGGRKPESIVVEMARENQYTNQGKSNSQQRLKRLEKSLKELGSKILKENIPAKLSKIDNNALQNDRLYLYYLQNGKDMYTGDDLDIDRLSNYDIDHIIPQAFLKDNSIDNKVLVSSASNRGKSDDFPSLEVVKKRKTFWYQLLKSKLISQRKFDNLTKAERGGLLPEDKAGFIQRQLVETRQITKHVARLLDEKFNNKKDENNRAVRTVKIITLKSTLVSQFRKDFELYKVREINDFHHAHDAYLNAVIASALLKKYPKLEPEFVYGDYPKYNSFRERKSATEKVYFYSNIMNIFKKSISLADGRVIERPLIEVNEETGESVWNKESDLATVRRVLSYPQVNVVKKVEEQNHGLDRGKPKGLFNANLSSKPKPNSNENLVGAKEYLDPKKYGGYAGISNSFAVLVKGTIEKGAKKKITNVLEFQGISILDRINYRKDKLNFLLEKGYKDIELIIELPKYSLFELSDGSRRMLASILSTNNKRGEIHKGNQIFLSQKFVKLLYHAKRISNTINENHRKYVENHKKEFEELFYYILEFNENYVGAKKNGKLLNSAFQSWQNHSIDELCSSFIGPTGSERKGLFELTSRGSAADFEFLGVKIPRYRDYTPSSLLKDATLIHQSVTGLYETRIDLAKLGEG

SEQ ID NO: 9 - DNA, 4167 bp, Streptococcus sp.
  source 1..4167: mol_type = unassigned DNA; note = Streptococcus thermophiles
atgactaagccatactcaattggacttgatattggaacgaatagtgttggatgggctgtaataactgataattacaaggttccgtctaaaaaaatgaaagtcttaggaaatacgagtaaaaagtatatcaaaaagaacctgttaggtgtattactctttgactctggaatcacagcagaaggaagaagattgaagcgtactgcaagaagacgttatactagacgccgtaatcgtatcctttatttgcaggaaatttttagcacggagatggctacattagatgatgctttctttcaaagacttgacgattcgtttttagttcctgatgataaacgtgatagtaagtatccgatatttggaaacttagtagaagaaaaagtctatcatgatgaatttccaactatctatcatttaaggaaatatttagcagatagtactaaaaaagcagatttgcgtctagtttatcttgcattggctcatatgattaaatatagaggtcacttcttaattgaaggagagtttaattcaaaaaataatgatattcagaagaattttcaagactttttggacacttataatgctatttttgaatcggatttatcacttgagaatagtaaacaacttgaggaaattgttaaagataagattagtaaattagaaaagaaagatcgtattttaaaactcttccctggggagaagaattcggggattttttcagagtttctaaagttgattgtaggaaatcaagctgattttaggaaatgttttaatttagacgaaaaagcctccttacatttttccaaagaaagctatgatgaagatttagagactttgttaggttatattggagatgattacagtgatgtctttctcaaagcaaagaaactttatgatgctattcttttatcgggttttctgactgtaactgataatgagacagaagcacctctctcttctgctatgataaagcgatataatgaacacaaagaagatttagcgttactaaaggaatatataagaaatatttcactaaaaacgtataatgaagtatttaaagatgacaccaaaaatggttatgctggttatattgatggaaaaacaaatcaggaagatttctacgtatatctaaaaaacctattggctgaatttgaaggtgcggattattttcttgaaaaaattgatcgagaagattttttgagaaagcaacgtacatttgacaatggttcgataccatatcagattcatcttcaagaaatgagagcaattcttgataagcaagctaaattttatcctttcttggctaaaaataaagaaagaatcgagaagattttaaccttccgaattccttattatgtaggtccacttgcgagagggaatagtgattttgcctggtcaataagaaaacgaaatgaaaaaattacaccttggaattttgaggacgttattgacaaagaatcttcggcagaggctttcattaatcgaatgactagttttgatttgtatttgccagaagagaaggtacttccaaagcatagtctcttatacgaaacttttaatgtatataatgaattaacaaaagttagatttattgccgaaagtatgagagattatcaatttttagatagtaagcagaagaaagatattgttagactttattttaaagataaaaggaaagttactgataaggatattattgaatatttacatgcaatttatgggtatgatggaattgaattaaaaggcatagagaaacagtttaattctagtttatctacttatcacgatcttttaaatattattaatgataaagagtttttggatgatagttcaaatgaagcgattatcgaagaaattatccatactttgacaatttttgaagatagagagatgataaaacaacgtctttcaaaatttgagaatatattcgataaatccgttttgaaaaagttatctcgtagacattacactggctggggtaagttatctgctaagcttattaatggtattcgagatgaaaaatctggtaatactattcttgattacttaattgatgatggtatttctaaccgtaatttcatgcaacttattcacgatgatgctctttcttttaaaaagaagatacagaaagcacaaattattggtgacgaagataaaggtaatattaaagaggtcgttaagtctttgccaggtagtcctgcgattaaaaaaggtattttacaaagcataaaaattgtagatgaattggtcaaagtaatgggaggaagaaaacccgagtcaattgttgttgagatggctcgtgaaaatcaatataccaatcaaggtaagtctaattcccaacaacgcttgaaacgtttagaaaaatctctcaaagagttaggtagtaagatacttaaggaaaatattcctgcaaaactttctaaaatagacaataacgcacttcaaaatgatcgactttacttatactatcttcaaaatggaaaagatatgtataccggagatgatttagatattgatagattaagtaattatgatattgatcatattattcctcaagcttttttgaaagataattctattgacaataaagtacttgtttcatctgctagtaaccgtggtaaatcagatgattttccaagtttagaggttgtcaaaaaaagaaagacattttggtatcaattattgaaatcaaaattaatttctcaacgaaaatttgataatctgacaaaagctgaacggggaggattgttacctgaggacaaagctggttttattcaacgccagttggttgaaacacgtcaaataacaaaacatgtagctcgtttacttgatgagaaatttaataataaaaaagatgaaaataatagagcggtacgaacagtaaaaattattaccttgaaatctaccttagtttctcaatttcgtaaggattttgaactttataaagttcgtgaaatcaatgattttcatcatgctcatgatgcttacttgaatgccgttatagcaagtgctttacttaagaaataccctaaactagagccagaatttgtgtacggtgattatccaaaatacaatagttttagagaaagaaagtccgctacagaaaaggtatatttctattcaaatatcatgaatatctttaaaaaatctatttctttagctgatggtagagttattgaaagaccacttattgaggtaaatgaggagaccggcgaatccgtttggaataaagaatctgatttagcaactgtaaggagagtactctcttatccgcaagtaaatgttgtgaaaaaagttgaggaacagaatcacggattggatagaggaaaaccaaagggattgtttaatgcaaatctttcctcaaagccaaaaccaaatagtaatgaaaatttagtaggtgctaaagagtatcttgaccccaaaaagtatggggggtatgctggaatttctaattcttttgctgttcttgttaaagggacaattgaaaaaggtgctaagaaaaaaataacaaatgtactagaatttcaaggtatttctattttagataggattaattatagaaaagataaacttaattttttacttgaaaaaggttataaagatattgagttaattattgaactacctaaatatagtttatttgaactttcagatggttcacgtcgtatgttggctagtattttgtcaacgaataataagaggggagagattcacaaaggaaatcagatttttctttcacagaagtttgtgaaattactttatcatgctaagagaataagtaacacaattaatgagaatcatagaaaatatgttgagaaccataaaaaagagtttgaagaattattttactacattcttgagtttaatgagaattatgttggagctaaaaagaatggtaaacttttaaactctgcctttcaatcttggcaaaatcatagtatagatgaactctgtagtagttttataggacctaccggaagtgaaagaaaggggctatttgaattaacctctcgtggaagtgctgctgattttgaatttttaggtgttaaaattccaaggtatagagactataccccatcatccctattaaaagatgccacacttattcatcaatctgttacaggcctctatgaaacacgaatagaccttgccaaactaggagagggttaa

SEQ ID NO: 10 - DNA, 3366 bp, Streptococcus thermophilus
  source 1..3366: mol_type = unassigned DNA
atgagcgacctggtgctgggcctggacatcggcatcggcagcgtgggcgtgggcatcctgaacaaggtgaccggcgagatcatccacaagaacagtcgcatcttccctgctgctcaggctgagaacaacctggtgcgccgcaccaaccgccagggtcgccggcttgctcgccgcaagaagcaccggcgcgtgcgcctgaaccgcctgttcgaggagagcggcctgatcaccgacttcaccaagatcagcatcaacctgaacccctaccagctgcgcgtgaagggcctgaccgacgagctgagcaacgaggagctgttcatcgccctgaagaacatggtgaagcaccgcggcatcagctacctggacgacgccagcgacgacggcaacagcagcgtgggcgactacgcccagatcgtgaaggagaacagcaagcagctggagaccaagacccccggccagatccagctggagcgctaccagacctacggccagctgcgcggcgacttcaccgtggagaaggacggcaagaagcaccgcctgatcaacgtgttccccaccagcgcctaccgcagcgaggccctgcgcatcctgcagacccagcaggagttcaacccccagatcaccgacgagttcatcaaccgctacctggagatcctgaccggcaagcgcaagtactaccacggccccggcaacgagaagagccgcaccgactacggccgctaccgcaccagcggcgagaccctggacaacatcttcggcatcctgatcggcaagtgcaccttctaccccgacgagttccgcgccgccaaggccagctacaccgcccaggagttcaacctgctgaacgacctgaacaacctgaccgtgcccaccgagaccaagaagctgagcaaggagcagaagaaccagatcatcaactacgtgaagaacgagaaggccatgggccccgccaagctgttcaagtacatcgccaagctgctgagctgcgacgtggccgacatcaagggctaccgcatcgacaagagcggcaaggccgagatccacaccttcgaggcctaccgcaagatgaagaccctggagaccctggacatcgagcagatggaccgcgagaccctggacaagctggcctacgtgctgaccctgaacaccgagcgcgagggcatccaggaggccctggagcacgagttcgccgacggcagcttcagccagaagcaggtggacgagctggtgcagttccgcaaggccaacagcagcatcttcggcaagggctggcacaacttcagcgtgaagctgatgatggagctgatccccgagctgtacgagaccagcgaggagcagatgaccatcctgacccgcctgggcaagcagaagaccaccagcagcagcaacaagaccaagtacatcgacgagaagctgctgaccgaggagatctacaaccccgtggtggccaagagcgtgcgccaggccatcaagatcgtgaacgccgccatcaaggagtacggcgacttcgacaacatcgtgatcgagatggcccgcgagaccaacgaggacgacgagaagaaggccatccagaagatccagaaggccaacaaggacgagaaggacgccgccatgctgaaggccgccaaccagtacaacggcaaggccgagctgccccacagcgtgttccacggccacaagcagctggccaccaagatccgcctgtggcaccagcagggcgagcgctgcctgtacaccggcaagaccatcagcatccacgacctgatcaacaacagcaaccagttcgaggtggaccacatcctgcccctgagcatcaccttcgacgacagcctggccaacaaggtgctggtgtacgccaccgccaaccaggagaagggccagcgcaccccctaccaggccctggacagcatggacgacgcctggagcttccgcgagctgaaggccttcgtgcgcgagagcaagaccctgagcaacaagaagaaggagtacctgctgaccgaggaggacatcagcaagttcgacgtgcgcaagaagttcatcgagcgcaacctggtggacacccgctacgccagccgcgtggtgctgaacgccctgcaggagcacttccgcgcccacaagatcgacaccaaggtgagcgtggtgcgcggccagttcaccagccagctgcgccgccactggggcatcgagaagacccgcgacacctaccaccaccacgccgtggacgccctgatcattgcggcttctagccagctgaacctgtggaagaagcagaagaacaccctggtgagctacagcgaggaccagctgctggacatcgagaccggcgagctgatcagcgacgacgagtacaaggagagcgtgttcaaggccccctaccagcacttcgtggacaccctgaagagcaaggagttcgaggacagcatcctgttcagctaccaggtggacagcaagttcaaccgcaagatcagcgacgccaccatctacgccacccgccaggccaaggtgggcaaggacaaggccgacgagacctacgtgctgggcaagatcaaggacatctacacccaggacggctacgacgccttcatgaagatctacaagaaggacaagagcaagttcctgatgtaccgccacgacccccagaccttcgagaaggtgatcgagcccatcctggagaactaccccaacaagcagatcaacgataaaggcaaggaggtgccctgcaaccccttcctgaagtacaaggaggagcacggctacatccgcaagtacagcaagaagggcaacggccccgagatcaagagcctgaagtactacgacagcaagctgggcaaccacatcgacatcacccccaaggacagcaacaacaaggtggtgctgcagagcgtgagcccctggcgcgccgacgtgtacttcaacaagaccaccggcaagtacgagatcctgggcctgaagtacgccgacctgcagtttgataagggcaccggcacctacaagatcagccaggagaagtacaacgacatcaagaagaaggagggcgtggacagcgacagcgagttcaagttcaccctgtacaagaacgaccttctgctggtgaaggacaccgagaccaaggagcaacagctgttccgcttcctgagccgcaccatgcccaagcagaagcactacgtggagctgaagccctacgacaagcagaagttcgagggcggcgaggccctgatcaaggtgctgggcaacgtggccaacagcggccagtgcaagaagggcctgggcaagagcaacatcagcatctacaaggtgcgcaccgacgtgctgggcaaccagcacatcatcaagaacgagggcgacaagcccaagctggacttctaa

SEQ ID NO: 11 - DNA, 3366 bp, Streptococcus thermophilus
  source 1..3366: mol_type = unassigned DNA
atgagcgacctggtgctgggcctggccatcggcatcggcagcgtgggcgtgggcatcctgaacaaggtgaccggcgagatcatccacaagaacagtcgcatcttccctgctgctcaggctgagaacaacctggtgcgccgcaccaaccgccagggtcgccggcttgctcgccgcaagaagcaccggcgcgtgcgcctgaaccgcctgttcgaggagagcggcctgatcaccgacttcaccaagatcagcatcaacctgaacccctaccagctgcgcgtgaagggcctgaccgacgagctgagcaacgaggagctgttcatcgccctgaagaacatggtgaagcaccgcggcatcagctacctggacgacgccagcgacgacggcaacagcagcgtgggcgactacgcccagatcgtgaaggagaacagcaagcagctggagaccaagacccccggccagatccagctggagcgctaccagacctacggccagctgcgcggcgacttcaccgtggagaaggacggcaagaagcaccgcctgatcaacgtgttccccaccagcgcctaccgcagcgaggccctgcgcatcctgcagacccagcaggagttcaacccccagatcaccgacgagttcatcaaccgctacctggagatcctgaccggcaagcgcaagtactaccacggccccggcaacgagaagagccgcaccgactacggccgctaccgcaccagcggcgagaccctggacaacatcttcggcatcctgatcggcaagtgcaccttctaccccgacgagttccgcgccgccaaggccagctacaccgcccaggagttcaacctgctgaacgacctgaacaacctgaccgtgcccaccgagaccaagaagctgagcaaggagcagaagaaccagatcatcaactacgtgaagaacgagaaggccatgggccccgccaagctgttcaagtacatcgccaagctgctgagctgcgacgtggccgacatcaagggctaccgcatcgacaagagcggcaaggccgagatccacaccttcgaggcctaccgcaagatgaagaccctggagaccctggacatcgagcagatggaccgcgagaccctggacaagctggcctacgtgctgaccctgaacaccgagcgcgagggcatccaggaggccctggagcacgagttcgccgacggcagcttcagccagaagcaggtggacgagctggtgcagttccgcaaggccaacagcagcatcttcggcaagggctggcacaacttcagcgtgaagctgatgatggagctgatccccgagctgtacgagaccagcgaggagcagatgaccatcctgacccgcctgggcaagcagaagaccaccagcagcagcaacaagaccaagtacatcgacgagaagctgctgaccgaggagatctacaaccccgtggtggccaagagcgtgcgccaggccatcaagatcgtgaacgccgccatcaaggagtacggcgacttcgacaacatcgtgatcgagatggcccgcgagaccaacgaggacgacgagaagaaggccatccagaagatccagaaggccaacaaggacgagaaggacgccgccatgctgaaggccgccaaccagtacaacggcaaggccgagctgccccacagcgtgttccacggccacaagcagctggccaccaagatccgcctgtggcaccagcagggcgagcgctgcctgtacaccggcaagaccatcagcatccacgacctgatcaacaacagcaaccagttcgaggtggctgccatcctgcccctgagcatcaccttcgacgacagcctggccaacaaggtgctggtgtacgccaccgccgctcaggagaagggccagcgcaccccctaccaggccctggacagcatggacgacgcctggagcttccgcgagctgaaggccttcgtgcgcgagagcaagaccctgagcaacaagaagaaggagtacctgctgaccgaggaggacatcagcaagttcgacgtgcgcaagaagttcatcgagcgcaacctggtggacacccgctacgccagccgcgtggtgctgaacgccctgcaggagcacttccgcgcccacaagatcgacaccaaggtgagcgtggtgcgcggccagttcaccagccagctgcgccgccactggggcatcgagaagacccgcgacacctaccaccaccacgccgtggacgccctgatcattgcggcttctagccagctgaacctgtggaagaagcagaagaacaccctggtgagctacagcgaggaccagctgctggacatcgagaccggcgagctgatcagcgacgacgagtacaaggagagcgtgttcaaggccccctaccagcacttcgtggacaccctgaagagcaaggagttcgaggacagcatcctgttcagctaccaggtggacagcaagttcaaccgcaagatcagcgacgccaccatctacgccacccgccaggccaaggtgggcaaggacaaggccgacgagacctacgtgctgggcaagatcaaggacatctacacccaggacggctacgacgccttcatgaagatctacaagaaggacaagagcaagttcctgatgtaccgccacgacccccagaccttcgagaaggtgatcgagcccatcctggagaactaccccaacaagcagatcaacgataaaggcaaggaggtgccctgcaaccccttcctgaagtacaaggaggagcacggctacatccgcaagtacagcaagaagggcaacggccccgagatcaagagcctgaagtactacgacagcaagctgggcaaccacatcgacatcacccccaaggacagcaacaacaaggtggtgctgcagagcgtgagcccctggcgcgccgacgtgtacttcaacaagaccaccggcaagtacgagatcctgggcctgaagtacgccgacctgcagtttgataagggcaccggcacctacaagatcagccaggagaagtacaacgacatcaagaagaaggagggcgtggacagcgacagcgagttcaagttcaccctgtacaagaacgaccttctgctggtgaaggacaccgagaccaaggagcaacagctgttccgcttcctgagccgcaccatgcccaagcagaagcactacgtggagctgaagccctacgacaagcagaagttcgagggcggcgaggccctgatcaaggtgctgggcaacgtggccaacagcggccagtgcaagaagggcctgggcaagagcaacatcagcatctacaaggtgcgcaccgacgtgctgggcaaccagcacatcatcaagaacgagggcgacaagcccaagctggacttctaa

SEQ ID NO: 12 - DNA, 3399 bp, Streptococcus thermophilus
  source 1..3399: mol_type = unassigned DNA
atgagcgacctggtgctgggcctggacatcggcatcggcagcgtgggcgtgggcatcctgaacaaggtgaccggcgagatcatccacaagaacagtcgcatcttccctgctgctcaggctgagaacaacctggtgcgccgcaccaaccgccagggtcgccggcttgctcgccgcaagaagcaccggcgcgtgcgcctgaaccgcctgttcgaggagagcggcctgatcaccgacttcaccaagatcagcatcaacctgaacccctaccagctgcgcgtgaagggcctgaccgacgagctgagcaacgaggagctgttcatcgccctgaagaacatggtgaagcaccgcggcatcagctacctggacgacgccagcgacgacggcaacagcagcgtgggcgactacgcccagatcgtgaaggagaacagcaagcagctggagaccaagacccccggccagatccagctggagcgctaccagacctacggccagctgcgcggcgacttcaccgtggagaaggacggcaagaagcaccgcctgatcaacgtgttccccaccagcgcctaccgcagcgaggccctgcgcatcctgcagacccagcaggagttcaacccccagatcaccgacgagttcatcaaccgctacctggagatcctgaccggcaagcgcaagtactaccacggccccggcaacgagaagagccgcaccgactacggccgctaccgcaccagcggcgagaccctggacaacatcttcggcatcctgatcggcaagtgcaccttctaccccgacgagttccgcgccgccaaggccagctacaccgcccaggagttcaacctgctgaacgacctgaacaacctgaccgtgcccaccgagaccaagaagctgagcaaggagcagaagaaccagatcatcaactacgtgaagaacgagaaggccatgggccccgccaagctgttcaagtacatcgccaagctgctgagctgcgacgtggccgacatcaagggctaccgcatcgacaagagcggcaaggccgagatccacaccttcgaggcctaccgcaagatgaagaccctggagaccctggacatcgagcagatggaccgcgagaccctggacaagctggcctacgtgctgaccctgaacaccgagcgcgagggcatccaggaggccctggagcacgagttcgccgacggcagcttcagccagaagcaggtggacgagctggtgcagttccgcaaggccaacagcagcatcttcggcaagggctggcacaacttcagcgtgaagctgatgatggagctgatccccgagctgtacgagaccagcgaggagcagatgaccatcctgacccgcctgggcaagcagaagaccaccagcagcagcaacaagaccaagtacatcgacgagaagctgctgaccgaggagatctacaaccccgtggtggccaagagcgtgcgccaggccatcaagatcgtgaacgccgccatcaaggagtacggcgacttcgacaacatcgtgatcgagatggcccgcgagaccaacgaggacgacgagaagaaggccatccagaagatccagaaggccaacaaggacgagaaggacgccgccatgctgaaggccgccaaccagtacaacggcaaggccgagctgccccacagcgtgttccacggccacaagcagctggccaccaagatccgcctgtggcaccagcagggcgagcgctgcctgtacaccggcaagaccatcagcatccacgacctgatcaacaacagcaaccagttcgaggtggaccacatcctgcccctgagcatcaccttcgacgacagcctggccaacaaggtgctggtgtacgccaccgccaaccaggagaagggccagcgcaccccctaccaggccctggacagcatggacgacgcctggagcttccgcgagctgaaggccttcgtgcgcgagagcaagaccctgagcaacaagaagaaggagtacctgctgaccgaggaggacatcagcaagttcgacgtgcgcaagaagttcatcgagcgcaacctggtggacacccgctacgccagccgcgtggtgctgaacgccctgcaggagcacttccgcgcccacaagatcgacaccaaggtgagcgtggtgcgcggccagttcaccagccagctgcgccgccactggggcatcgagaagacccgcgacacctaccaccaccacgccgtggacgccctgatcattgcggcttctagccagctgaacctgtggaagaagcagaagaacaccctggtgagctacagcgaggaccagctgctggacatcgagaccggcgagctgatcagcgacgacgagtacaaggagagcgtgttcaaggccccctaccagcacttcgtggacaccctgaagagcaaggagttcgaggacagcatcctgttcagctaccaggtggacagcaagttcaaccgcaagatcagcgacgccaccatctacgccacccgccaggccaaggtgggcaaggacaaggccgacgagacctacgtgctgggcaagatcaaggacatctacacccaggacggctacgacgccttcatgaagatctacaagaaggacaagagcaagttcctgatgtaccgccacgacccccagaccttcgagaaggtgatcgagcccatcctggagaactaccccaacaagcagatcaacgataaaggcaaggaggtgccctgcaaccccttcctgaagtacaaggaggagcacggctacatccgcaagtacagcaagaagggcaacggccccgagatcaagagcctgaagtactacgacagcaagctgggcaaccacatcgacatcacccccaaggacagcaacaacaaggtggtgctgcagagcgtgagcccctggcgcgccgacgtgtacttcaacaagaccaccggcaagtacgagatcctgggcctgaagtacgccgacctgcagtttgataagggcaccggcacctacaagatcagccaggagaagtacaacgacatcaagaagaaggagggcgtggacagcgacagcgagttcaagttcaccctgtacaagaacgaccttctgctggtgaaggacaccgagaccaaggagcaacagctgttccgcttcctgagccgcaccatgcccaagcagaagcactacgtggagctgaagccctacgacaagcagaagttcgagggcggcgaggccctgatcaaggtgctgggcaacgtggccaacagcggccagtgcaagaagggcctgggcaagagcaacatcagcatctacaaggtgcgcaccgacgtgctgggcaaccagcacatcatcaagaacgagggcgacaagcccaagctggacttcagcagggctgaccccaagaagaagaggaaggtgtga

SEQ ID NO: 13 - DNA, 3459 bp, Streptococcus thermophilus
  source 1..3459: mol_type = unassigned DNA
atgagcgacctggtgctgggcctggacatcggcatcggcagcgtgggcgtgggcatcctgaacaaggtgaccggcgagatcatccacaagaacagtcgcatcttccctgctgctcaggctgagaacaacctggtgcgccgcaccaaccgccagggtcgccggcttgctcgccgcaagaagcaccggcgcgtgcgcctgaaccgcctgttcgaggagagcggcctgatcaccgacttcaccaagatcagcatcaacctgaacccctaccagctgcgcgtgaagggcctgaccgacgagctgagcaacgaggagctgttcatcgccctgaagaacatggtgaagcaccgcggcatcagctacctggacgacgccagcgacgacggcaacagcagcgtgggcgactacgcccagatcgtgaaggagaacagcaagcagctggagaccaagacccccggccagatccagctggagcgctaccagacctacggccagctgcgcggcgacttcaccgtggagaaggacggcaagaagcaccgcctgatcaacgtgttccccaccagcgcctaccgcagcgaggccctgcgcatcctgcagacccagcaggagttcaacccccagatcaccgacgagttcatcaaccgctacctggagatcctgaccggcaagcgcaagtactaccacggccccggcaacgagaagagccgcaccgactacggccgctaccgcaccagcggcgagaccctggacaacatcttcggcatcctgatcggcaagtgcaccttctaccccgacgagttccgcgccgccaaggccagctacaccgcccaggagttcaacctgctgaacgacctgaacaacctgaccgtgcccaccgagaccaagaagctgagcaaggagcagaagaaccagatcatcaactacgtgaagaacgagaaggccatgggccccgccaagctgttcaagtacatcgccaagctgctgagctgcgacgtggccgacatcaagggctaccgcatcgacaagagcggcaaggccgagatccacaccttcgaggcctaccgcaagatgaagaccctggagaccctggacatcgagcagatggaccgcgagaccctggacaagctggcctacgtgctgaccctgaacaccgagcgcgagggcatccaggaggccctggagcacgagttcgccgacggcagcttcagccagaagcaggtggacgagctggtgcagttccgcaaggccaacagcagcatcttcggcaagggctggcacaacttcagcgtgaagctgatgatggagctgatccccgagctgtacgagaccagcgaggagcagatgaccatcctgacccgcctgggcaagcagaagaccaccagcagcagcaacaagaccaagtacatcgacgagaagctgctgaccgaggagatctacaaccccgtggtggccaagagcgtgcgccaggccatcaagatcgtgaacgccgccatcaaggagtacggcgacttcgacaacatcgtgatcgagatggcccgcgagaccaacgaggacgacgagaagaaggccatccagaagatccagaaggccaacaaggacgagaaggacgccgccatgctgaaggccgccaaccagtacaacggcaaggccgagctgccccacagcgtgttccacggccacaagcagctggccaccaagatccgcctgtggcaccagcagggcgagcgctgcctgtacaccggcaagaccatcagcatccacgacctgatcaacaacagcaaccagttcgaggtggaccacatcctgcccctgagcatcaccttcgacgacagcctggccaacaaggtgctggtgtacgccaccgccaaccaggagaagggccagcgcaccccctaccaggccctggacagcatggacgacgcctggagcttccgcgagctgaaggccttcgtgcgcgagagcaagaccctgagcaacaagaagaaggagtacctgctgaccgaggaggacatcagcaagttcgacgtgcgcaagaagttcatcgagcgcaacctggtggacacccgctacgccagccgcgtggtgctgaacgccctgcaggagcacttccgcgcccacaagatcgacaccaaggtgagcgtggtgcgcggccagttcaccagccagctgcgccgccactggggcatcgagaagacccgcgacacctaccaccaccacgccgtggacgccctgatcattgcggcttctagccagctgaacctgtggaagaagcagaagaacaccctggtgagctacagcgaggaccagctgctggacatcgagaccggcgagctgatcagcgacgacgagtacaaggagagcgtgttcaaggccccctaccagcacttcgtggacaccctgaagagcaaggagttcgaggacagcatcctgttcagctaccaggtggacagcaagttcaaccgcaagatcagcgacgccaccatctacgccacccgccaggccaaggtgggcaaggacaaggccgacgagacctacgtgctgggcaagatcaaggacatctacacccaggacggctacgacgccttcatgaagatctacaagaaggacaagagcaagttcctgatgtaccgccacgacccccagaccttcgagaaggtgatcgagcccatcctggagaactaccccaacaagcagatcaacgataaaggcaaggaggtgccctgcaaccccttcctgaagtacaaggaggagcacggctacatccgcaagtacagcaagaagggcaacggccccgagatcaagagcctgaagtactacgacagcaagctgggcaaccacatcgacatcacccccaaggacagcaacaacaaggtggtgctgcagagcgtgagcccctggcgcgccgacgtgtacttcaacaagaccaccggcaagtacgagatcctgggcctgaagtacgccgacctgcagtttgataagggcaccggcacctacaagatcagccaggagaagtacaacgacatcaagaagaaggagggcgtggacagcgacagcgagttcaagttcaccctgtacaagaacgaccttctgctggtgaaggacaccgagaccaaggagcaacagctgttccgcttcctgagccgcaccatgcccaagcagaagcactacgtggagctgaagccctacgacaagcagaagttcgagggcggcgaggccctgatcaaggtgctgggcaacgtggccaacagcggccagtgcaagaagggcctgggcaagagcaacatcagcatctacaaggtgcgcaccgacgtgctgggcaaccagcacatcatcaagaacgagggcgacaagcccaagctggacttcgcggccgcagatccaaaaaagaagagaaaggtagatccaaaaaagaagagaaaggtagatccaaaaaagaagagaaaggtagatacggccgcatag

SEQ ID NO: 14 - DNA, 3585 bp, Streptococcus thermophilus
  source 1..3585: mol_type = unassigned DNA
atgagcgacctggtgctgggcctggccatcggcatcggcagcgtgggcgtgggcatcctgaacaaggtgaccggcgagatcatccacaagaacagtcgcatcttccctgctgctcaggctgagaacaacctggtgcgccgcaccaaccgccagggtcgccggcttgctcgccgcaagaagcaccggcgcgtgcgcctgaaccgcctgttcgaggagagcggcctgatcaccgacttcaccaagatcagcatcaacctgaacccctaccagctgcgcgtgaagggcctgaccgacgagctgagcaacgaggagctgttcatcgccctgaagaacatggtgaagcaccgcggcatcagctacctggacgacgccagcgacgacggcaacagcagcgtgggcgactacgcccagatcgtgaaggagaacagcaagcagctggagaccaagacccccggccagatccagctggagcgctaccagacctacggccagctgcgcggcgacttcaccgtggagaaggacggcaagaagcaccgcctgatcaacgtgttccccaccagcgcctaccgcagcgaggccctgcgcatcctgcagacccagcaggagttcaacccccagatcaccgacgagttcatcaaccgctacctggagatcctgaccggcaagcgcaagtactaccacggccccggcaacgagaagagccgcaccgactacggccgctaccgcaccagcggcgagaccctggacaacatcttcggcatcctgatcggcaagtgcaccttctaccccgacgagttccgcgccgccaaggccagctacaccgcccaggagttcaacctgctgaacgacctgaacaacctgaccgtgcccaccgagaccaagaagctgagcaaggagcagaagaaccagatcatcaactacgtgaagaacgagaaggccatgggccccgccaagctgttcaagtacatcgccaagctgctgagctgcgacgtggccgacatcaagggctaccgcatcgacaagagcggcaaggccgagatccacaccttcgaggcctaccgcaagatgaagaccctggagaccctggacatcgagcagatggaccgcgagaccctggacaagctggcctacgtgctgaccctgaacaccgagcgcgagggcatccaggaggccctggagcacgagttcgccgacggcagcttcagccagaagcaggtggacgagctggtgcagttccgcaaggccaacagcagcatcttcggcaagggctggcacaacttcagcgtgaagctgatgatggagctgatccccgagctgtacgagaccagcgaggagcagatgaccatcctgacccgcctgggcaagcagaagaccaccagcagcagcaacaagaccaagtacatcgacgagaagctgctgaccgaggagatctacaaccccgtggtggccaagagcgtgcgccaggccatcaagatcgtgaacgccgccatcaaggagtacggcgacttcgacaacatcgtgatcgagatggcccgcgagaccaacgaggacgacgagaagaaggccatccagaagatccagaaggccaacaaggacgagaaggacgccgccatgctgaaggccgccaaccagtacaacggcaaggccgagctgccccacagcgtgttccacggccacaagcagctggccaccaagatccgcctgtggcaccagcagggcgagcgctgcctgtacaccggcaagaccatcagcatccacgacctgatcaacaacagcaaccagttcgaggtggctgccatcctgcccctgagcatcaccttcgacgacagcctggccaacaaggtgctggtgtacgccaccgccgctcaggagaagggccagcgcaccccctaccaggccctggacagcatggacgacgcctggagcttccgcgagctgaaggccttcgtgcgcgagagcaagaccctgagcaacaagaagaaggagtacctgctgaccgaggaggacatcagcaagttcgacgtgcgcaagaagttcatcgagcgcaacctggtggacacccgctacgccagccgcgtggtgctgaacgccctgcaggagcacttccgcgcccacaagatcgacaccaaggtgagcgtggtgcgcggccagttcaccagccagctgcgccgccactggggcatcgagaagacccgcgacacctaccaccaccacgccgtggacgccctgatcattgcggcttctagccagctgaacctgtggaagaagcagaagaacaccctggtgagctacagcgaggaccagctgctggacatcgagaccggcgagctgatcagcgacgacgagtacaaggagagcgtgttcaaggccccctaccagcacttcgtggacaccctgaagagcaaggagttcgaggacagcatcctgttcagctaccaggtggacagcaagttcaaccgcaagatcagcgacgccaccatctacgccacccgccaggccaaggtgggcaaggacaaggccgacgagacctacgtgctgggcaagatcaaggacatctacacccaggacggctacgacgccttcatgaagatctacaagaaggacaagagcaagttcctgatgtaccgccacgacccccagaccttcgagaaggtgatcgagcccatcctggagaactaccccaacaagcagatcaacgataaaggcaaggaggtgccctgcaaccccttcctgaagtacaaggaggagcacggctacatccgcaagtacagcaagaagggcaacggccccgagatcaagagcctgaagtactacgacagcaagctgggcaaccacatcgacatcacccccaaggacagcaacaacaaggtggtgctgcagagcgtgagcccctggcgcgccgacgtgtacttcaacaagaccaccggcaagtacgagatcctgggcctgaagtacgccgacctgcagtttgataagggcaccggcacctacaagatcagccaggagaagtacaacgacatcaagaagaaggagggcgtggacagcgacagcgagttcaagttcaccctgtacaagaacgaccttctgctggtgaaggacaccgagaccaaggagcaacagctgttccgcttcctgagccgcaccatgcccaagcagaagcactacgtggagctgaagccctacgacaagcagaagttcgagggcggcgaggccctgatcaaggtgctgggcaacgtggccaacagcggccagtgcaagaagggcctgggcaagagcaacatcagcatctacaaggtgcgcaccgacgtgctgggcaaccagcacatcatcaagaacgagggcgacaagcccaagctggacttcagcagggctgaccccaagaagaagaggaaggtggaggccagcggttccggacgggctgacgcattggacgattttgatctggatatgctgggaagtgacgccctcgatgattttgaccttgacatgcttggttcggatgcccttgatgactttgacctcgacatgctcggcagtgacgcccttgatgatttcgacctggacatgctgattaactctagatga

SEQ ID NO: 15 - DNA, 3606 bp, Streptococcus thermophilus
  source 1..3606: mol_type = unassigned DNA
atgcccaagaagaagaggaaggtgagcgacctggtgctgggcctggccatcggcatcggcagcgtgggcgtgggcatcctgaacaaggtgaccggcgagatcatccacaagaacagtcgcatcttccctgctgctcaggctgagaacaacctggtgcgccgcaccaaccgccagggtcgccggcttgctcgccgcaagaagcaccggcgcgtgcgcctgaaccgcctgttcgaggagagcggcctgatcaccgacttcaccaagatcagcatcaacctgaacccctaccagctgcgcgtgaagggcctgaccgacgagctgagcaacgaggagctgttcatcgccctgaagaacatggtgaagcaccgcggcatcagctacctggacgacgccagcgacgacggcaacagcagcgtgggcgactacgcccagatcgtgaaggagaacagcaagcagctggagaccaagacccccggccagatccagctggagcgctaccagacctacggccagctgcgcggcgacttcaccgtggagaaggacggcaagaagcaccgcctgatcaacgtgttccccaccagcgcctaccgcagcgaggccctgcgcatcctgcagacccagcaggagttcaacccccagatcaccgacgagttcatcaaccgctacctggagatcctgaccggcaagcgcaagtactaccacggccccggcaacgagaagagccgcaccgactacggccgctaccgcaccagcggcgagaccctggacaacatcttcggcatcctgatcggcaagtgcaccttctaccccgacgagttccgcgccgccaaggccagctacaccgcccaggagttcaacctgctgaacgacctgaacaacctgaccgtgcccaccgagaccaagaagctgagcaaggagcagaagaaccagatcatcaactacgtgaagaacgagaaggccatgggccccgccaagctgttcaagtacatcgccaagctgctgagctgcgacgtggccgacatcaagggctaccgcatcgacaagagcggcaaggccgagatccacaccttcgaggcctaccgcaagatgaagaccctggagaccctggacatcgagcagatggaccgcgagaccctggacaagctggcctacgtgctgaccctgaacaccgagcgcgagggcatccaggaggccctggagcacgagttcgccgacggcagcttcagccagaagcaggtggacgagctggtgcagttccgcaaggccaacagcagcatcttcggcaagggctggcacaacttcagcgtgaagctgatgatggagctgatccccgagctgtacgagaccagcgaggagcagatgaccatcctgacccgcctgggcaagcagaagaccaccagcagcagcaacaagaccaagtacatcgacgagaagctgctgaccgaggagatctacaaccccgtggtggccaagagcgtgcgccaggccatcaagatcgtgaacgccgccatcaaggagtacggcgacttcgacaacatcgtgatcgagatggcccgcgagaccaacgaggacgacgagaagaaggccatccagaagatccagaaggccaacaaggacgagaaggacgccgccatgctgaaggccgccaaccagtacaacggcaaggccgagctgccccacagcgtgttccacggccacaagcagctggccaccaagatccgcctgtggcaccagcagggcgagcgctgcctgtacaccggcaagaccatcagcatccacgacctgatcaacaacagcaaccagttcgaggtggctgccatcctgcccctgagcatcaccttcgacgacagcctggccaacaaggtgctggtgtacgccaccgccgctcaggagaagggccagcgcaccccctaccaggccctggacagcatggacgacgcctggagcttccgcgagctgaaggccttcgtgcgcgagagcaagaccctgagcaacaagaagaaggagtacctgctgaccgaggaggacatcagcaagttcgacgtgcgcaagaagttcatcgagcgcaacctggtggacacccgctacgccagccgcgtggtgctgaacgccctgcaggagcacttccgcgcccacaagatcgacaccaaggtgagcgtggtgcgcggccagttcaccagccagctgcgccgccactggggcatcgagaagacccgcgacacctaccaccaccacgccgtggacgccctgatcattgcggcttctagccagctgaacctgtggaagaagcagaagaacaccctggtgagctacagcgaggaccagctgctggacatcgagaccggcgagctgatcagcgacgacgagtacaaggagagcgtgttcaaggccccctaccagcacttcgtggacaccctgaagagcaaggagttcgaggacagcatcctgttcagctaccaggtggacagcaagttcaaccgcaagatcagcgacgccaccatctacgccacccgccaggccaaggtgggcaaggacaaggccgacgagacctacgtgctgggcaagatcaaggacatctacacccaggacggctacgacgccttcatgaagatctacaagaaggacaagagcaagttcctgatgtaccgccacgacccccagaccttcgagaaggtgatcgagcccatcctggagaactaccccaacaagcagatcaacgataaaggcaaggaggtgccctgcaaccccttcctgaagtacaaggaggagcacggctacatccgcaagtacagcaagaagggcaacggccccgagatcaagagcctgaagtactacgacagcaagctgggcaaccacatcgacatcacccccaaggacagcaacaacaaggtggtgctgcagagcgtgagcccctggcgcgccgacgtgtacttcaacaagaccaccggcaagtacgagatcctgggcctgaagtacgccgacctgcagtttgataagggcaccggcacctacaagatcagccaggagaagtacaacgacatcaagaagaaggagggcgtggacagcgacagcgagttcaagttcaccctgtacaagaacgaccttctgctggtgaaggacaccgagaccaaggagcaacagctgttccgcttcctgagccgcaccatgcccaagcagaagcactacgtggagctgaagccctacgacaagcagaagttcgagggcggcgaggccctgatcaaggtgctgggcaacgtggccaacagcggccagtgcaagaagggcctgggcaagagcaacatcagcatctacaaggtgcgcaccgacgtgctgggcaaccagcacatcatcaagaacgagggcgacaagcccaagctggacttcagcagggctgaccccaagaagaagaggaaggtggaggccagcggttccggacgggctgacgcattggacgattttgatctggatatgctgggaagtgacgccctcgatgattttgaccttgacatgcttggttcggatgcccttgatgactttgacctcgacatgctcggcagtgacgcccttgatgatttcgacctggacatgctgattaactctagatga

SEQ ID NO: 16 - DNA, 3366 bp, Streptococcus thermophilus
  source 1..3366: mol_type = unassigned DNA
atgagtgacttagttttaggacttgatatcggtataggttctgttggtgtaggtatccttaacaaagtgacaggagaaattatccataaaaactcacgcatcttcccagcagctcaagcggaaaataacctagtacgtagaacgaatcgtcaaggaagacgcttgacacgacgtaaaaaacatcgtagagttcgtttaaatcgtctatttgaggaaagtggattaatcaccgattttacgaagatttcaattaatcttaacccatatcaattacgagttaagggcttgaccgatgaattgtctaatgaagaactgtttatcgctcttaaaaatatggtgaaacaccgtgggattagttacctcgatgatgctagtgatgacggaaattcatcaataggagactatgcacaaattgttaaggaaaatagtaaacaattagaaactaagacaccgggacagatacagttggaacgctaccaaacatatggtcaattacgtggtgattttactgttgagaaagatggcaaaaaacatcgcttgattaatgtctttccaacatcagcttatcgttcagaagccttaaggatactgcaaactcaacaagaatttaatccacagattacagatgaatttattaatcgttatctcgaaattttaactggaaaacggaaatattatcatggacccggaaatgaaaagtcacggactgattatggtcgttacagaacgagtggagaaactttagacaatatttttggaattctaattgggaaatgtacattttatccagacgagtttagagcagcaaaagcttcctacacggctcaagaattcaatttgctaaatgatttgaacaatctaacagttcctactgaaaccaaaaagttgagcaaagaacagaagaatcaaatcattaattatgtcaaaaatgaaaaggcaatggggccagcgaaactttttaaatatatcgctaagttactttcttgtgatgttgcagatatcaagggataccgtatcgacaaatcaggtaaggctgagattcatactttcgaagcctatcgaaaaatgaaaacgcttgaaaccttagatattgagcaaatggatagagaaacgcttgataaattagcctatgtcttaacattaaacactgagagggaaggtattcaagaagccttagaacatgaatttgctgatggtagctttagccagaagcaagttgacgaattggttcaattccgcaaagcaaatagttccatttttggaaaaggatggcataatttttctgtcaaactgatgatggagttaattccagaattgtatgagacgtcagaagagcaaatgactatcctaacacgacttggaaaacaaaaaacgacttcgtcttcaaataaaacaaaatatatagatgaaaaactattaactgaagaaatctataatcctgttgttgctaagtctgttcgccaggctataaaaatcgtaaatgcggcgattaaagaatacggagactttgacaatattgtcatcgaaatggctcgtgaaacaaatgaagatgatgaaaagaaagctattcaaaagattcaaaaagccaacaaagatgaaaaagatgcagcaatgcttaaggctgctaaccaatataatggaaaggctgaattaccacatagtgttttccacggtcataagcaattagcgactaaaatccgcctttggcatcagcaaggagaacgttgcctttatactggtaagacaatctcaatccatgatttgataaataattctaatcagtttgaagtagatcatattttacctctttctatcacattcgatgatagccttgcaaataaggttttggtttatgcaactgctaaccaagaaaaaggacaacgaacaccttatcaggctttagatagtatggatgatgcgtggtctttccgtgaattaaaagcttttgtacgtgagtcaaaaacactttcgaacaagaaaaaagaatacctccttacagaagaagatatttcaaagtttgatgttcgaaagaaatttattgaacgaaatcttgtagatacaagatacgcttcaagagttgtcctcaatgcccttcaagaacactttagagctcacaagattgatacaaaagtttccgtggttcgtggccaatttacatctcaattgagacgccattggggaattgagaagactcgtgatacttatcatcaccatgctgtcgatgcattgattattgccgcctcaagtcagttgaatttgtggaaaaaacaaaagaatacccttgtaagttattcagaagaccaactccttgatattgaaacaggtgaacttattagtgatgatgagtacaaggaatctgtgttcaaagccccttatcaacattttgttgatacattgaagagtaaagaatttgaagacagtatcttattctcttatcaagtggattctaagtttaatcgtaaaatatcagatgccactatttatgcgacaagacaggctaaagtaggaaaagataaggcggatgaaacttatgtcttagggaaaatcaaagatatttatactcaggatggttatgatgcctttatgaagatttataagaaggataagtcaaaattcctcatgtatcgtcacgacccacaaacctttgagaaagttatcgagccaattttagagaactatcctaataagcaaataaatgaaaaagggaaagaggtaccatgtaatcctttcctaaaatataaagaagaacatggctatattcgtaaatatagtaaaaaaggcaatggtcctgaaatcaagagtcttaaatactatgatagtaagctaggcaatcatattgatattactccgaaggatagtaacaataaagttgtcttacagtcagtttctccatggagagcggatgtctatttcaataagactactggaaaatacgaaatcctcggattgaaatatgctgatttacaatttgaaaaagggacaggaacatataagatttcccaggaaaaatacaatgacattaagaaaaaagagggtgtagattctgattcagaattcaagtttacactttataaaaatgatttgttactcgttaaagatacagaaacaaaagaacaacagcttttccgttttctttctcgaactatgcctaaacaaaagcattatgttgaattaaaaccttatgataaacagaaatttgaaggaggtgaggcgttaattaaagtgttgggtaacgttgctaatagtggtcaatgcaaaaaagggctaggaaaatcaaatatttctatttataaggtaagaacagatgtcctaggaaatcagcatatcatcaaaaatgagggtgataagcctaagctagatttttaa

SEQ ID NO: 17 - DNA, 4167 bp, Streptococcus thermophilus; identical to SEQ ID NO: 9
  source 1..4167: mol_type = unassigned DNA

SEQ ID NO: 18 - DNA, 3249 bp, Neisseria meningitidis
  source 1..3249: mol_type = unassigned DNA
atggccgccttcaagcccaaccccatcaactacatcctgggcctggacatcggcatcgccagcgtgggctgggccatggtggagatcgacgaggacgagaaccccatctgcctgatcgacctgggtgtgcgcgtgttcgagcgcgctgaggtgcccaagactggtgacagtctggctatggctcgccggcttgctcgctctgttcggcgccttactcgccggcgcgctcaccgccttctgcgcgctcgccgcctgctgaagcgcgagggtgtgctgcaggctgccgacttcgacgagaacggcctgatcaagagcctgcccaacactccttggcagctgcgcgctgccgctctggaccgcaagctgactcctctggagtggagcgccgtgctgctgcacctgatcaagcaccgcggctacctgagccagcgcaagaacgagggcgagaccgccgacaaggagctgggtgctctgctgaagggcgtggccgacaacgcccacgccctgcagactggtgacttccgcactcctgctgagctggccctgaacaagttcgagaaggagagcggccacatccgcaaccagcgcggcgactacagccacaccttcagccgcaaggacctgcaggccgagctgatcctgctgttcgagaagcagaaggagttcggcaacccccacgtgagcggcggcctgaaggagggcatcgagaccctgctgatgacccagcgccccgccctgagcggcgacgccgtgcagaagatgctgggccactgcaccttcgagccagccgagcccaaggccgccaagaacacctacaccgccgagcgcttcatctggctgaccaagctgaacaacctgcgcatcctggagcagggcagcgagcgccccctgaccgacaccgagcgcgccaccctgatggacgagccctaccgcaagagcaagctgacctacgcccaggcccgcaagctgctgggtctggaggacaccgccttcttcaagggcctgcgctacggcaaggacaacgccgaggccagcaccctgatggagatgaaggcctaccacgccatcagccgcgccctggagaaggagggcctgaaggacaagaagagtcctctgaacctgagccccgagctgcaggacgagatcggcaccgccttcagcctgttcaagaccgacgaggacatcaccggccgcctgaaggaccgcatccagcccgagatcctggaggccctgctgaagcacatcagcttcgacaagttcgtgcagatcagcctgaaggccctgcgccgcatcgtgcccctgatggagcagggcaagcgctacgacgaggcctgcgccgagatctacggcgaccactacggcaagaagaacaccgaggagaagatctacctgcctcctatccccgccgacgagatccgcaaccccgtggtgctgcgcgccctgagccaggcccgcaaggtgatcaacggcgtggtgcgccgctacggcagccccgcccgcatccacatcgagaccgcccgcgaggtgggcaagagcttcaaggaccgcaaggagatcgagaagcgccaggaggagaaccgcaaggaccgcgagaaggccgccgccaagttccgcgagtacttccccaacttcgtgggcgagcccaagagcaaggacatcctgaagctgcgcctgtacgagcagcagcacggcaagtgcctgtacagcggcaaggagatcaacctgggccgcctgaacgagaagggctacgtggagatcgaccacgccctgcccttcagccgcacctgggacgacagcttcaacaacaaggtgctggtgctgggcagcgagaaccagaacaagggcaaccagaccccctacgagtacttcaacggcaaggacaacagccgcgagtggcaggagttcaaggcccgcgtggagaccagccgcttcccccgcagcaagaagcagcgcatcctgctgcagaagttcgacgaggacggcttcaaggagcgcaacctgaacgacacccgctacgtgaaccgcttcctgtgccagttcgtggccgaccgcatgcgcctgaccggcaagggcaagaagcgcgtgttcgccagcaacggccagatcaccaacctgctgcgcggcttctggggcctgcgcaaggtgcgcgccgagaacgaccgccaccacgccctggacgccgtggtggtggcctgcagcaccgtggccatgcagcagaagatcacccgcttcgtgcgctacaaggagatgaacgccttcgacggtaaaaccatcgacaaggagaccggcgaggtgctgcaccagaagacccacttcccccagccctgggagttcttcgcccaggaggtgatgatccgcgtgttcggcaagcccgacggcaagcccgagttcgaggaggccgacacccccgagaagctgcgcaccctgctggccgagaagctgagcagccgccctgaggccgtgcacgagtacgtgactcctctgttcgtgagccgcgcccccaaccgcaagatgagcggtcagggtcacatggagaccgtgaagagcgccaagcgcctggacgagggcgtgagcgtgctgcgcgtgcccctgacccagctgaagctgaaggacctggagaagatggtgaaccgcgagcgcgagcccaagctgtacgaggccctgaaggcccgcctggaggcccacaaggacgaccccgccaaggccttcgccgagcccttctacaagtacgacaaggccggcaaccgcacccagcaggtgaaggccgtgcgcgtggagcaggtgcagaagaccggcgtgtgggtgcgcaaccacaacggcatcgccgacaacgccaccatggtgcgcgtggacgtgttcgagaagggcgacaagtactacctggtgcccatctacagctggcaggtggccaagggcatcctgcccgaccgcgccgtggtgcagggcaaggacgaggaggactggcagctgatcgacgacagcttcaacttcaagttcagcctgcaccccaacgacctggtggaggtgatcaccaagaaggcccgcatgttcggctacttcgccagctgccaccgcggcaccggcaacatcaacatccgcatccacgacctggaccacaagatcggcaagaacggcatcctggagggcatcggcgtgaagaccgccctgagcttccagaagtaccagatcgacgagctgggcaaggagatccgcccctgccgcctgaagaagcgccctcctgtgcgctaa

SEQ ID NO: 19 - DNA, 3249 bp, Neisseria meningitidis
  source 1..3249: mol_type = unassigned DNA
atggccgccttcaagcccaaccccatcaactacatcctgggcctggccatcggcatcgccagcgtgggctgggccatggtggagatcgacgaggacgagaaccccatctgcctgatcgacctgggtgtgcgcgtgttcgagcgcgctgaggtgcccaagactggtgacagtctggctatggctcgccggcttgctcgctctgttcggcgccttactcgccggcgcgctcaccgccttctgcgcgctcgccgcctgctgaagcgcgagggtgtgctgcaggctgccgacttcgacgagaacggcctgatcaagagcctgcccaacactccttggcagctgcgcgctgccgctctggaccgcaagctgactcctctggagtggagcgccgtgctgctgcacctgatcaagcaccgcggctacctgagccagcgcaagaacgagggcgagaccgccgacaaggagctgggtgctctgctgaagggcgtggccgacaacgcccacgccctgcagactggtgacttccgcactcctgctgagctggccctgaacaagttcgagaaggagagcggccacatccgcaaccagcgcggcgactacagccacaccttcagccgcaaggacctgcaggccgagctgatcctgctgttcgagaagcagaaggagttcggcaacccccacgtgagcggcggcctgaaggagggcatcgagaccctgctgatgacccagcgccccgccctgagcggcgacgccgtgcagaagatgctgggccactgcaccttcgagccagccgagcccaaggccgccaagaacacctacaccgccgagcgcttcatctggctgaccaagctgaacaacctgcgcatcctggagcagggcagcgagcgccccctgaccgacaccgagcgcgccaccctgatggacgagccctaccgcaagagcaagctgacctacgcccaggcccgcaagctgctgggtctggaggacaccgccttcttcaagggcctgcgctacggcaaggacaacgccgaggccagcaccctgatggagatgaaggcctaccacgccatcagccgcgccctggagaaggagggcctgaaggacaagaagagtcctctgaacctgagccccgagctgcaggacgagatcggcaccgccttcagcctgttcaagaccgacgaggacatcaccggccgcctgaaggaccgcatccagcccgagatcctggaggccctgctgaagcacatcagcttcgacaagttcgtgcagatcagcctgaaggccctgcgccgcatcgtgcccctgatggagcagggcaagcgctacgacgaggcctgcgccgagatctacggcgaccactacggcaagaagaacaccgaggagaagatctacctgcctcctatccccgccgacgagatccgcaaccccgtggtgctgcgcgccctgagccaggcccgcaaggtgatcaacggcgtggtgcgccgctacggcagccccgcccgcatccacatcgagaccgcccgcgaggtgggcaagagcttcaaggaccgcaaggagatcgagaagcgccaggaggagaaccgcaaggaccgcgagaaggccgccgccaagttccgcgagtacttccccaacttcgtgggcgagcccaagagcaaggacatcctgaagctgcgcctgtacgagcagcagcacggcaagtgcctgtacagcggcaaggagatcaacctgggccgcctgaacgagaagggctacgtggagatcgccgctgccctgcccttcagccgcacctgggacgacagcttcaacaacaaggtgctggtgctgggcagcgaggctcagaacaagggcaaccagaccccctacgagtacttcaacggcaaggacaacagccgcgagtggcaggagttcaaggcccgcgtggagaccagccgcttcccccgcagcaagaagcagcgcatcctgctgcagaagttcgacgaggacggcttcaaggagcgcaacctgaacgacacccgctacgtgaaccgcttcctgtgccagttcgtggccgaccgcatgcgcctgaccggcaagggcaagaagcgcgtgttcgccagcaacggccagatcaccaacctgctgcgcggcttctggggcctgcgcaaggtgcgcgccgagaacgaccgccaccacgccctggacgccgtggtggtggcctgcagcaccgtggccatgcagcagaagatcacccgcttcgtgcgctacaaggagatgaacgccttcgacggtaaaaccatcgacaaggagaccggcgaggtgctgcaccagaagacccacttcccccagccctgggagttcttcgcccaggaggtgatgatccgcgtgttcggcaagcccgacggcaagcccgagttcgaggaggccgacacccccgagaagctgcgcaccctgctggccgagaagctgagcagccgccctgaggccgtgcacgagtacgtgactcctctgttcgtgagccgcgcccccaaccgcaagatgagcggtcagggtcacatggagaccgtgaagagcgccaagcgcctggacgagggcgtgagcgtgctgcgcgtgcccctgacccagctgaagctgaaggacctggagaagatggtgaaccgcgagcgcgagcccaagctgtacgaggccctgaaggcccgcctggaggcccacaaggacgaccccgccaaggccttcgccgagcccttctacaagtacgacaaggccggcaaccgcacccagcaggtgaaggccgtgcgcgtggagcaggtgcagaagaccggcgtgtgggtgcgcaaccacaacggcatcgccgacaacgccaccatggtgcgcgtggacgtgttcgagaagggcgacaagtactacctggtgcccatctacagctggcaggtggccaagggcatcctgcccgaccgcgccgtggtgcagggcaaggacgaggaggactggcagctgatcgacgacagcttcaacttcaagttcagcctgcaccccaacgacctggtggaggtgatcaccaagaaggcccgcatgttcggctacttcgccagctgccaccgcggcaccggcaacatcaacatccgcatccacgacctggaccacaagatcggcaagaacggcatcctggagggcatcggcgtgaagaccgccctgagcttccagaagtaccagatcgacgagctgggcaaggagatccgcccctgccgcctgaagaagcgccctcctgtgcgctaa

SEQ ID NO: 20 - DNA, 3282 bp, Neisseria meningitidis
  source 1..3282: mol_type = unassigned DNA
atggccgccttcaagcccaaccccatcaactacatcctgggcctggacatcggcatcgccagcgtgggctgggccatggtggagatcgacgaggacgagaaccccatctgcctgatcgacctgggtgtgcgcgtgttcgagcgcgctgaggtgcccaagactggtgacagtctggctatggctcgccggcttgctcgctctgttcggcgccttactcgccggcgcgctcaccgccttctgcgcgctcgccgcctgctgaagcgcgagggtgtgctgcaggctgccgacttcgacgagaacggcctgatcaagagcctgcccaacactccttggcagctgcgcgctgccgctctggaccgcaagctgactcctctggagtggagcgccgtgctgctgcacctgatcaagcaccgcggctacctgagccagcgcaagaacgagggcgagaccgccgacaaggagctgggtgctctgctgaagggcgtggccgacaacgcccacgccctgcagactggtgacttccgcactcctgctgagctggccctgaacaagttcgagaaggagagcggccacatccgcaaccagcgcggcgactacagccacaccttcagccgcaaggacctgcaggccgagctgatcctgctgttcgagaagcagaaggagttcggcaacccccacgtgagcggcggcctgaaggagggcatcgagaccctgctgatgacccagcgccccgccctgagcggcgacgccgtgcagaagatgctgggccactgcaccttcgagccagccgagcccaaggccgccaagaacacctacaccgccgagcgcttcatctggctgaccaagctgaacaacctgcgcatcctggagcagggcagcgagcgccccctgaccgacaccgagcgcgccaccctgatggacgagccctaccgcaagagcaagctgacctacgcccaggcccgcaagctgctgggtctggaggacaccgccttcttcaagggcctgcgctacggcaaggacaacgccgaggccagcaccctgatggagatgaaggcctaccacgccatcagccgcgccctggagaaggagggcctgaaggacaagaagagtcctctgaacctgagccccgagctgcaggacgagatcggcaccgccttcagcctgttcaagaccgacgaggacatcaccggccgcctgaaggaccgcatccagcccgagatcctggaggccctgctgaagcacatcagcttcgacaagttcgtgcagatcagcctgaaggccctgcgccgcatcgtgcccctgatggagcagggcaagcgctacgacgaggcctgcgccgagatctacggcgaccactacggcaagaagaacaccgaggagaagatctacctgcctcctatccccgccgacgagatccgcaaccccgtggtgctgcgcgccctgagccaggcccgcaaggtgatcaacggcgtggtgcgccgctacggcagccccgcccgcatccacatcgagaccgcccgcgaggtgggcaagagcttcaaggaccgcaaggagatcgagaagcgccaggaggagaaccgcaaggaccgcgagaaggccgccgccaagttccgcgagtacttccccaacttcgtgggcgagcccaagagcaaggacatcctgaagctgcgcctgtacgagcagcagcacggcaagtgcctgtacagcggcaaggagatcaacctgggccgcctgaacgagaagggctacgtggagatcgaccacgccctgcccttcagccgcacctgggacgacagcttcaacaacaaggtgctggtgctgggcagcgagaaccagaacaagggcaaccagaccccctacgagtacttcaacggcaaggacaacagccgcgagtggcaggagttcaaggcccgcgtggagaccagccgcttcccccgcagcaagaagcagcgcatcctgctgcagaagttcgacgaggacggcttcaaggagcgcaacctgaacgacacccgctacgtgaaccgcttcctgtgccagttcgtggccgaccgcatgcgcctgaccggcaagggcaagaagcgcgtgttcgccagcaacggccagatcaccaacctgctgcgcggcttctggggcctgcgcaaggtgcgcgccgagaacgaccgccaccacgccctggacgccgtggtggtggcctgcagcaccgtggccatgcagcagaagatcacccgcttcgtgcgctacaaggagatgaacgccttcgacggtaaaaccatcgacaaggagaccggcgaggtgctgcaccagaagacccacttcccccagccctgggagttcttcgcccaggaggtgatgatccgcgtgttcggcaagcccgacggcaagcccgagttcgaggaggccgacacccccgagaagctgcgcaccctgctggccgagaagctgagcagccgccctgaggccgtgcacgagtacgtgactcctctgttcgtgagccgcgcccccaaccgcaagatgagcggtcagggtcacatggagaccgtgaagagcgccaagcgcctggacgagggcgtgagcgtgctgcgcgtgcccctgacccagctgaagctgaaggacctggagaagatggtgaaccgcgagcgcgagcccaagctgtacgaggccctgaaggcccgcctggaggcccacaaggacgaccccgccaaggccttcgccgagcccttctacaagtacgacaaggccggcaaccgcacccagcaggtgaaggccgtgcgcgtggagcaggtgcagaagaccggcgtgtgggtgcgcaaccacaacggcatcgccgacaacgccaccatggtgcgcgtggacgtgttcgagaagggcgacaagtactacctggtgcccatctacagctggcaggtggccaagggcatcctgcccgaccgcgccgtggtgcagggcaaggacgaggaggactggcagctgatcgacgacagcttcaacttcaagttcagcctgcaccccaacgacctggtggaggtgatcaccaagaaggcccgcatgttcggctacttcgccagctgccaccgcggcaccggcaacatcaacatccgcatccacgacctggaccacaagatcggcaagaacggcatcctggagggcatcggcgtgaagaccgccctgagcttccagaagtaccagatcgacgagctgggcaaggagatccgcccctgccgcctgaagaagcgccctcctgtgcgcagcagggctgaccccaagaagaagaggaaggtgtga

SEQ ID NO: 21 - DNA, 3342 bp, Neisseria meningitidis
  source 1..3342: mol_type = unassigned DNA
atggccgccttcaagcccaaccccatcaactacatcctgggcctggacatcggcatcgccagcgtgggctgggccatggtggagatcgacgaggacgagaaccccatctgcctgatcgacctgggtgtgcgcgtgttcgagcgcgctgaggtgcccaagactggtgacagtctggctatggctcgccggcttgctcgctctgttcggcgccttactcgccggcgcgctcaccgccttctgcgcgctcgccgcctgctgaagcgcgagggtgtgctgcaggctgccgacttcgacgagaacggcctgatcaagagcctgcccaacactccttggcagctgcgcgctgccgctctggaccgcaagctgactcctctggagtggagcgccgtgctgctgcacctgatcaagcaccgcggctacctgagccagcgcaagaacgagggcgagaccgccgacaaggagctgggtgctctgctgaagggcgtggccgacaacgcccacgccctgcagactggtgacttccgcactcctgctgagctggccctgaacaagttcgagaaggagagcggccacatccgcaaccagcgcggcgactacagccacaccttcagccgcaaggacctgcaggccgagctgatcctgctgttcgagaagcagaaggagttcggcaacccccacgtgagcggcggcctgaaggagggcatcgagaccctgctgatgacccagcgccccgccctgagcggcgacgccgtgcagaagatgctgggccactgcaccttcgagccagccgagcccaaggccgccaagaacacctacaccgccgagcgcttcatctggctgaccaagctgaacaacctgcgcatcctggagcagggcagcgagcgccccctgaccgacaccgagcgcgccaccctgatggacgagccctaccgcaagagcaagctgacctacgcccaggcccgcaagctgctgggtctggaggacaccgccttcttcaagggcctgcgctacggcaaggacaacgccgaggccagcaccctgatggagatgaaggcctaccacgccatcagccgcgccctggagaaggagggcctgaaggacaagaagagtcctctgaacctgagccccgagctgcaggacgagatcggcaccgccttcagcctgttcaagaccgacgaggacatcaccggccgcctgaaggaccgcatccagcccgagatcctggaggccctgctgaagcacatcagcttcgacaagttcgtgcagatcagcctgaaggccctgcgccgcatcgtgcccctgatggagcagggcaagcgctacgacgaggcctgcgccgagatctacggcgaccactacggcaagaagaacaccgaggagaagatctacctgcctcctatccccgccgacgagatccgcaaccccgtggtgctgcgcgccctgagccaggcccgcaaggtgatcaacggcgtggtgcgccgctacggcagccccgcccgcatccacatcgagaccgcccgcgaggtgggcaagagcttcaaggaccgcaaggagatcgagaagcgccaggaggagaaccgcaaggaccgcgagaaggccgccgccaagttccgcgagtacttccccaacttcgtgggcgagcccaagagcaaggacatcctgaagctgcgcctgtacgagcagcagcacggcaagtgcctgtacagcggcaaggagatcaacctgggccgcctgaacgagaagggctacgtggagatcgaccacgccctgcccttcagccgcacctgggacgacagcttcaacaacaaggtgctggtgctgggcagcgagaaccagaacaagggcaaccagaccccctacgagtacttcaacggcaaggacaacagccgcgagtggcaggagttcaaggcccgcgtggagaccagccgcttcccccgcagcaagaagcagcgcatcctgctgcagaagttcgacgaggacggcttcaaggagcgcaacctgaacgacacccgctacgtgaaccgcttcctgtgccagttcgtggccgaccgcatgcgcctgaccggcaagggcaagaagcgcgtgttcgccagcaacggccagatcaccaacctgctgcgcggcttctggggcctgcgcaaggtgcgcgccgagaacgaccgccaccacgccctggacgccgtggtggtggcctgcagcaccgtggccatgcagcagaagatcacccgcttcgtgcgctacaaggagatgaacgccttcgacggtaaaaccatcgacaaggagaccggcgaggtgctgcaccagaagacccacttcccccagccctgggagttcttcgcccaggaggtgatgatccgcgtgttcggcaagcccgacggcaagcccgagttcgaggaggccgacacccccgagaagctgcgcaccctgctggccgagaagctgagcagccgccctgaggccgtgcacgagtacgtgactcctctgttcgtgagccgcgcccccaaccgcaagatgagcggtcagggtcacatggagaccgtgaagagcgccaagcgcctggacgagggcgtgagcgtgctgcgcgtgcccctgacccagctgaagctgaaggacctggagaagatggtgaaccgcgagcgcgagcccaagctgtacgaggccctgaaggcccgcctggaggcccacaaggacgaccccgccaaggccttcgccgagcccttctacaagtacgacaaggccggcaaccgcacccagcaggtgaaggccgtgcgcgtggagcaggtgcagaagaccggcgtgtgggtgcgcaaccacaacggcatcgccgacaacgccaccatggtgcgcgtggacgtgttcgagaagggcgacaagtactacctggtgcccatctacagctggcaggtggccaagggcatcctgcccgaccgcgccgtggtgcagggcaaggacgaggaggactggcagctgatcgacgacagcttcaacttcaagttcagcctgcaccccaacgacctggtggaggtgatcaccaagaaggcccgcatgttcggctacttcgccagctgccaccgcggcaccggcaacatcaacatccgcatccacgacctggaccacaagatcggcaagaacggcatcctggagggcatcggcgtgaagaccgccctgagcttccagaagtaccagatcgacgagctgggcaaggagatccgcccctgccgcctgaagaagcgccctcctgtgcgcgcggccgcagatccaaaaaagaagagaaaggtagatccaaaaaagaagagaaaggtagatccaaaaaagaagagaaaggtagatacggccgcatag

SEQ ID NO: 22 - DNA, 3468 bp, Neisseria meningitidis
  source 1..3468: mol_type = unassigned DNA
atggccgccttcaagcccaaccccatcaactacatcctgggcctggccatcggcatcgccagcgtgggctgggccatggtggagatcgacgaggacgagaaccccatctgcctgatcgacctgggtgtgcgcgtgttcgagcgcgctgaggtgcccaagactggtgacagtctggctatggctcgccggcttgctcgctctgttcggcgccttactcgccggcgcgctcaccgccttctgcgcgctcgccgcctgctgaagcgcgagggtgtgctgcaggctgccgacttcgacgagaacggcctgatcaagagcctgcccaacactccttggcagctgcgcgctgccgctctggaccgcaagctgactcctctggagtggagcgccgtgctgctgcacctgatcaagcaccgcggctacctgagccagcgcaagaacgagggcgagaccgccgacaaggagctgggtgctctgctgaagggcgtggccgacaacgcccacgccctgcagactggtgacttccgcactcctgctgagctggccctgaacaagttcgagaaggagagcggccacatccgcaaccagcgcggcgactacagccacaccttcagccgcaaggacctgcaggccgagctgatcctgctgttcgagaagcagaaggagttcggcaacccccacgtgagcggcggcctgaaggagggcatcgagaccctgctgatgacccagcgccccgccctgagcggcgacgccgtgcagaagatgctgggccactgcaccttcgagccagccgagcccaaggccgccaagaacacctacaccgccgagcgcttcatctggctgaccaagctgaacaacctgcgcatcctggagcagggcagcgagcgccccctgaccgacaccgagcgcgccaccctgatggacgagccctaccgcaagagcaagctgacctacgcccaggcccgcaagctgctgggtctggaggacaccgccttcttcaagggcctgcgctacggcaaggacaacgccgaggccagcaccctgatggagatgaaggcctaccacgccatcagccgcgccctggagaaggagggcctgaaggacaagaagagtcctctgaacctgagccccgagctgcaggacgagatcggcaccgccttcagcctgttcaagaccgacgaggacatcaccggccgcctgaaggaccgcatccagcccgagatcctggaggccctgctgaagcacatcagcttcgacaagttcgtgcagatcagcctgaaggccctgcgccgcatcgtgcccctgatggagcagggcaagcgctacgacgaggcctgcgccgagatctacggcgaccactacggcaagaagaacaccgaggagaagatctacctgcctcctatccccgccgacgagatccgcaaccccgtggtgctgcgcgccctgagccaggcccgcaaggtgatcaacggcgtggtgcgccgctacggcagccccgcccgcatccacatcgagaccgcccgcgaggtgggcaagagcttcaaggaccgcaaggagatcgagaagcgccaggaggagaaccgcaaggaccgcgagaaggccgccgccaagttccgcgagtacttccccaacttcgtgggcgagcccaagagcaaggacatcctgaagctgcgcctgtacgagcagcagcacggcaagtgcctgtacagcggcaaggagatcaacctgggccgcctgaacgagaagggctacgtggagatcgccgctgccctgcccttcagccgcacctgggacgacagcttcaacaacaaggtgctggtgctgggcagcgaggctcagaacaagggcaaccagaccccctacgagtacttcaacggcaaggacaacagccgcgagtggcaggagttcaaggcccgcgtggagaccagccgcttcccccgcagcaagaagcagcgcatcctgctgcagaagttcgacgaggacggcttcaaggagcgcaacctgaacgacacccgctacgtgaaccgcttcctgtgccagttcgtggccgaccgcatgcgcctgaccggcaagggcaagaagcgcgtgttcgccagcaacggccagatcaccaacctgctgcgcggcttctggggcctgcgcaaggtgcgcgccgagaacgaccgccaccacgccctggacgccgtggtggtggcctgcagcaccgtggccatgcagcagaagatcacccgcttcgtgcgctacaaggagatgaacgccttcgacggtaaaaccatcgacaaggagaccggcgaggtgctgcaccagaagacccacttcccccagccctgggagttcttcgcccaggaggtgatgatccgcgtgttcggcaagcccgacggcaagcccgagttcgaggaggccgacacccccgagaagctgcgcaccctgctggccgagaagctgagcagccgccctgaggccgtgcacgagtacgtgactcctctgttcgtgagccgcgcccccaaccgcaagatgagcggtcagggtcacatggagaccgtgaagagcgccaagcgcctggacgagggcgtgagcgtgctgcgcgtgcccctgacccagctgaagctgaaggacctggagaagatggtgaaccgcgagcgcgagcccaagctgtacgaggccctgaaggcccgcctggaggcccacaaggacgaccccgccaaggccttcgccgagcccttctacaagtacgacaaggccggcaaccgcacccagcaggtgaaggccgtgcgcgtggagcaggtgcagaagaccggcgtgtgggtgcgcaaccacaacggcatcgccgacaacgccaccatggtgcgcgtggacgtgttcgagaagggcgacaagtactacctggtgcccatctacagctggcaggtggccaagggcatcctgcccgaccgcgccgtggtgcagggcaaggacgaggaggactggcagctgatcgacgacagcttcaacttcaagttcagcctgcaccccaacgacctggtggaggtgatcaccaagaaggcccgcatgttcggctacttcgccagctgccaccgcggcaccggcaacatcaacatccgcatccacgacctggaccacaagatcggcaagaacggcatcctggagggcatcggcgtgaagaccgccctgagcttccagaagtaccagatcgacgagctgggcaaggagatccgcccctgccgcctgaagaagcgccctcctgtgcgcagcagggctgaccccaagaagaagaggaaggtggaggccagcggttccggacgggctgacgcattggacgattttgatctggatatgctgggaagtgacgccctcgatgattttgaccttgacatgcttggttcggatgcccttgatgactttgacctcgacatgctcggcagtgacgcccttgatgatttcgacctggacatgctgattaactctagatga

SEQ ID NO: 23 - DNA, 3489 bp, Neisseria meningitidis
  source 1..3489: mol_type = unassigned DNA
atgcccaagaagaagaggaaggtggccgccttcaagcccaaccccatcaactacatcctgggcctggccatcggcatcgccagcgtgggctgggccatggtggagatcgacgaggacgagaaccccatctgcctgatcgacctgggtgtgcgcgtgttcgagcgcgctgaggtgcccaagactggtgacagtctggctatggctcgccggcttgctcgctctgttcggcgccttactcgccggcgcgctcaccgccttctgcgcgctcgccgcctgctgaagcgcgagggtgtgctgcaggctgccgacttcgacgagaacggcctgatcaagagcctgcccaacactccttggcagctgcgcgctgccgctctggaccgcaagctgactcctctggagtggagcgccgtgctgctgcacctgatcaagcaccgcggctacctgagccagcgcaagaacgagggcgagaccgccgacaaggagctgggtgctctgctgaagggcgtggccgacaacgcccacgccctgcagactggtgacttccgcactcctgctgagctggccctgaacaagttcgagaaggagagcggccacatccgcaaccagcgcggcgactacagccacaccttcagccgcaaggacctgcaggccgagctgatcctgctgttcgagaagcagaaggagttcggcaacccccacgtgagcggcggcctgaaggagggcatcgagaccctgctgatgacccagcgccccgccctgagcggcgacgccgtgcagaagatgctgggccactgcaccttcgagccagccgagcccaaggccgccaagaacacctacaccgccgagcgcttcatctggctgaccaagctgaacaacctgcgcatcctggagcagggcagcgagcgccccctgaccgacaccgagcgcgccaccctgatggacgagccctaccgcaagagcaagctgacctacgcccaggcccgcaagctgctgggtctggaggacaccgccttcttcaagggcctgcgctacggcaaggacaacgccgaggccagcaccctgatggagatgaaggcctaccacgccatcagccgcgccctggagaaggagggcctgaaggacaagaagagtcctctgaacctgagccccgagctgcaggacgagatcggcaccgccttcagcctgttcaagaccgacgaggacatcaccggccgcctgaaggaccgcatccagcccgagatcctggaggccctgctgaagcacatcagcttcgacaagttcgtgcagatcagcctgaaggccctgcgccgcatcgtgcccctgatggagcagggcaagcgctacgacgaggcctgcgccgagatctacggcgaccactacggcaagaagaacaccgaggagaagatctacctgcctcctatccccgccgacgagatccgcaaccccgtggtgctgcgcgccctgagccaggcccgcaaggtgatcaacggcgtggtgcgccgctacggcagccccgcccgcatccacatcgagaccgcccgcgaggtgggcaagagcttcaaggaccgcaaggagatcgagaagcgccaggaggagaaccgcaaggaccgcgagaaggccgccgccaagttccgcgagtacttccccaacttcgtgggcgagcccaagagcaaggacatcctgaagctgcgcctgtacgagcagcagcacggcaagtgcctgtacagcggcaaggagatcaacctgggccgcctgaacgagaagggctacgtggagatcgccgctgccctgcccttcagccgcacctgggacgacagcttcaacaacaaggtgctggtgctgggcagcgaggctcagaacaagggcaaccagaccccctacgagtacttcaacggcaaggacaacagccgcgagtggcaggagttcaaggcccgcgtggagaccagccgcttcccccgcagcaagaagcagcgcatcctgctgcagaagttcgacgaggacggcttcaaggagcgcaacctgaacgacacccgctacgtgaaccgcttcctgtgccagttcgtggccgaccgcatgcgcctgaccggcaagggcaagaagcgcgtgttcgccagcaacggccagatcaccaacctgctgcgcggcttctggggcctgcgcaaggtgcgcgccgagaacgaccgccaccacgccctggacgccgtggtggtggcctgcagcaccgtggccatgcagcagaagatcacccgcttcgtgcgctacaaggagatgaacgccttcgacggtaaaaccatcgacaaggagaccggcgaggtgctgcaccagaagacccacttcccccagccctgggagttcttcgcccaggaggtgatgatccgcgtgttcggcaagcccgacggcaagcccgagttcgaggaggccgacacccccgagaagctgcgcaccctgctggccgagaagctgagcagccgccctgaggccgtgcacgagtacgtgactcctctgttcgtgagccgcgcccccaaccgcaagatgagcggtcagggtcacatggagaccgtgaagagcgccaagcgcctggacgagggcgtgagcgtgctgcgcgtgcccctgacccagctgaagctgaaggacctggagaagatggtgaaccgcgagcgcgagcccaagctgtacgaggccctgaaggcccgcctggaggcccacaaggacgaccccgccaaggccttcgccgagcccttctacaagtacgacaaggccggcaaccgcacccagcaggtgaaggccgtgcgcgtggagcaggtgcagaagaccggcgtgtgggtgcgcaaccacaacggcatcgccgacaacgccaccatggtgcgcgtggacgtgttcgagaagggcgacaagtactacctggtgcccatctacagctggcaggtggccaagggcatcctgcccgaccgcgccgtggtgcagggcaaggacgaggaggactggcagctgatcgacgacagcttcaacttcaagttcagcctgcaccccaacgacctggtggaggtgatcaccaagaaggcccgcatgttcggctacttcgccagctgccaccgcggcaccggcaacatcaacatccgcatccacgacctggaccacaagatcggcaagaacggcatcctggagggcatcggcgtgaagaccgccctgagcttccagaagtaccagatcgacgagctgggcaaggagatccgcccctgccgcctgaagaagcgccctcctgtgcgcagcagggctgaccccaagaagaagaggaaggtggaggccagcggttccggacgggctgacgcattggacgattttgatctggatatgctgggaagtgacgccctcgatgattttgaccttgacatgcttggttcggatgcccttgatgactttgacctcgacatgctcggcagtgacgcccttgatgatttcgacctggacatgctgattaactctagatga

SEQ ID NO: 24 - DNA, 3249 bp, Neisseria meningitidis
  source 1..3249: mol_type = unassigned DNA
atggctgccttcaaacctaattcaatcaactacatcctcggcctcgatatcggcatcgcatccgtcggctgggcgatggtagaaattgacgaagaagaaaaccccatccgcctgattgatttgggcgtgcgcgtatttgagcgtgccgaagtaccgaaaacaggcgactcccttgccatggcaaggcgtttggcgcgcagtgttcgccgcctgacccgccgtcgcgcccaccgcctgcttcggacccgccgcctattgaaacgcgaaggcgtattacaagccgccaattttgacgaaaacggcttgattaaatccttaccgaatacaccatggcaacttcgcgcagccgcattagaccgcaaactgacgcctttagagtggtcggcagtcttgttgcatttaatcaaacatcgcggctatttatcgcaacggaaaaacgagggcgaaactgccgataaggagcttggcgctttgcttaaaggcgtagccggcaatgcccatgccttacagacaggcgatttccgcacaccggccgaattggctttaaataaatttgagaaagaaagcggccatatccgcaatcagcgcagcgattattcgcatacgttcagccgcaaagatttacaggcggagctgattttgctgtttgaaaaacaaaaagaatttggcaatccgcatgtttcaggcggccttaaagaaggtattgaaaccctactgatgacgcaacgccctgccctgtccggcgatgccgttcaaaaaatgttggggcattgcaccttcgaaccggcagagccgaaagccgctaaaaacacctacacagccgaacgtttcatctggctgaccaagctgaacaacctgcgtattttagagcaaggcagcgagcggccattgaccgataccgaacgcgccacgcttatggacgagccatacagaaaatccaaactgacttacgcacaagcccgtaagctgctgggtttagaagataccgcctttttcaaaggcttgcgctatggtaaagacaatgccgaagcctcaacattgatggaaatgaaggcctaccatgccatcagccgtgcactggaaaaagaaggattgaaagacaaaaaatccccattaaacctttctcccgaattacaagacgaaatcggcacggcattctccctgttcaaaaccgatgaagacattacaggccgtctgaaagaccgtatacagcccgaaatcttagaagcgctgttgaaacacatcagcttcgataagttcgtccaaatttccttgaaagcattgcgccgaattgtgcctctaatggaacaaggcaaacgttacgatgaagcctgcgccgaaatctacggagaccattacggcaagaagaatacggaagaaaagatttatctgccgccgattcccgccgacgaaatccgcaaccccgtcgtcttgcgcgccttatctcaagcacgtaaggtcattaacggcgtggtacgccgttacggctccccagctcgtatccatattgaaactgcaagggaagtaggtaaatcgtttaaagaccgcaaagaaattgagaaacgccaagaagaaaaccgcaaagaccgggaaaaagccgccgccaaattccgagagtatttccccaattttgtcggagaacccaaatccaaagatattctgaaactgcgcctgtacgagcaacaacacggcaaatgcctgtattcgggcaaagaaatcaacttaggccgtctgaacgaaaaaggctatgtcgaaatcgaccatgccctgccgttctcgcgcacatgggacgacagtttcaacaataaagtactggtattgggcagcgaaaaccaaaacaaaggcaatcaaaccccttacgaatacttcaacggcaaagacaacagccgcgaatggcaggaatttaaagcgcgtgtcgaaaccagccgtttcccgcgcagtaaaaaacaacggattctgctgcaaaaattcgatgaagacggctttaaagaacgcaatctgaacgacacgcgctacgtcaaccgtttcctgtgtcaatttgttgccgaccgtatgcggctgacaggtaaaggcaagaaacgtgtctttgcatccaacggacaaattaccaatctgttgcgcggcttttggggattgcgcaaagtgcgtgcggaaaacgaccgccatcacgccttggacgccgtcgtcgttgcctgctcgaccgttgccatgcagcagaaaattacccgttttgtacgctataaagagatgaacgcgtttgacggtaaaaccatagacaaagaaacaggagaagtgctgcatcaaaaaacacacttcccacaaccttgggaatttttcgcacaagaagtcatgattcgcgtcttcggcaaaccggacggcaaacccgaattcgaagaagccgataccctagaaaaactgcgcacgttgcttgccgaaaaattatcatctcgccccgaagccgtacacgaatacgttacgccactgtttgtttcacgcgcgcccaatcggaagatgagcgggcaagggcatatggagaccgtcaaatccgccaaacgactggacgaaggcgtcagcgtgttgcgcgtaccgctgacacagttaaaactgaaagacttggaaaaaatggtcaatcgggagcgcgaacctaagctatacgaagcactgaaagcacggctggaagcacataaagacgatcctgccaaagcctttgccgagccgttttacaaatacgataaagcaggcaaccgcacccaacaggtaaaagccgtacgcgtagagcaagtacagaaaaccggcgtatgggtgcgcaaccataacggtattgccgacaacgcaaccatggtgcgcgtagatgtgtttgagaaaggcgacaagtattatctggtaccgatttacagttggcaggtagcgaaagggattttgccggatagggctgttgtacaaggaaaagatgaagaagattggcaacttattgatgatagtttcaactttaaattctcattacaccctaatgatttagtcgaggttataacaaaaaaagctagaatgtttggttactttgccagctgccatcgaggcacaggtaatatcaatatacgcattcatgatcttgatcataaaattggcaaaaatggaatactggaaggtatcggcgtcaaaaccgccctttcattccaaaaataccaaattgacgaactgggcaaagaaatcagaccatgccgtctgaaaaaacgcccgcctgtccgttaa

SEQ ID NO: 25 - DNA, 4188 bp, Treponema denticola
  source 1..4188: mol_type = unassigned DNA
atgaaaaaggaaattaaggattattttctcggattggatgtaggaaccggatcggttggttgggcagttactgatactgactataaactcttaaaggctaatcgtaaagacctttggggaatgaggtgttttgagacggcggaaactgcggaagtgagaaggcttcacaggggggctaggcgccgtattgagagaagaaaaaaaagaataaagctgcttcaagagcttttttcccaagaaattgcaaaaacagatgagggatttttccaaagaatgaaggaaagccctttctatgcagaagacaagactatattacaggaaaacactctttttaatgataaagattttgccgataagacctaccataaagcctatcctaccataaaccatctgataaaggcttggattgaaaacaaggtaaagccggatccaaggttattatacttagcctgtcataatattataaaaaaaagaggtcattttttattcgagggcgatttcgattcagaaaatcagtttgatacttctatacaagccctttttgaatatctgcgtgaagatatggaagtcgatattgatgccgatagccaaaaagtaaaagagattttaaaggatagctctttaaaaaattccgaaaaacaaagccgcctaaataagattttaggactgaaaccctccgacaaacaaaaaaaagctattactaatttaatatcaggcaacaaaataaactttgccgatctttatgataatccggatttaaaggatgcggagaaaaatagtatatctttttcgaaagatgattttgatgctttgagtgatgatcttgcttccattctaggagattcttttgagcttttattaaaagcaaaggctgtatataactgctcggttctttccaaggtaataggcgatgaacagtatctttcttttgcaaaggtaaaaatatatgaaaagcataaaaccgatttgactaaattaaaaaatgttataaaaaagcatttcccaaaagattataaaaaagtattcggatacaataaaaacgaaaaaaataacaacaattactccggatatgtaggcgtatgtaaaaccaagagtaaaaaactaattataaacaattctgtaaatcaagaagatttttacaaatttttaaaaactatcctttcagcaaaatccgagataaaggaagtaaatgatatattgaccgaaattgaaacagggacttttttacctaaacagatatctaaaagcaatgcggagattccttatcaattacgcaagatggagctggaaaaaatattatcaaacgcagaaaaacatttttcctttttaaaacaaaaagatgaaaaaggtttatctcacagtgaaaagattataatgcttttaacatttaagattccttattatattggacctataaacgataaccataaaaaattttttcccgatagatgctgggtagtaaaaaaagaaaaatcgccttccggtaaaactactccatggaacttttttgatcatatcgataaagaaaaaacagctgaagcatttattacaagcagaaccaatttttgcacatatttagtaggggaatccgttttaccaaaaagttctcttttatattccgagtataccgttttaaatgaaatcaacaatttacagattatcattgacggaaaaaatatctgcgatattaaactaaaacaaaaaatatacgaagatttatttaaaaaatataaaaagattacacaaaaacaaatttcaacttttatcaaacacgaaggtatttgcaataaaactgatgaagtaattattctaggtatcgataaagaatgtacatcttcgttaaaatcatatatagaacttaaaaacatattcggaaagcaagtagatgaaatttctacaaagaatatgcttgaagaaattatacgatgggctactatctatgatgaaggagaaggcaaaacaatacttaaaacaaaaataaaagccgaatatggaaaatattgttctgatgaacagatcaaaaaaattctaaatcttaaattttcaggttggggccgcttgtcacgcaaattccttgaaaccgtcacatcagaaatgccgggttttagcgaaccggtaaatataataactgcaatgcgggaaactcaaaataatttaatggagttgcttagcagtgaatttacatttactgaaaatattaaaaagataaattcgggatttgaagatgctgaaaagcaattttcatatgacggtttggttaagcctctgtttttatcaccatcggtaaaaaaaatgttgtggcagactctaaagcttgtaaaagaaatatcgcatattacccaagcccctcctaaaaaaatatttatagaaatggcaaagggtgcagagcttgaacctgcgaggactaagacaagattaaaaattttacaagacttatacaataactgtaaaaatgatgcggatgcttttagttccgagataaaagacctttcaggtaaaatagaaaatgaagataatttaaggcttcgaagcgacaaactttatctttattacacgcagcttggaaagtgcatgtattgcggtaaaccgattgaaataggccatgtatttgatacaagcaactatgatatagatcatatttatccccaatccaagattaaagatgacagtataagtaatcgggttttagtatgcagcagctgcaataaaaataaggaagataaatatcctttgaagtctgaaattcaatcaaagcaaaggggcttttggaattttttacaacgaaataactttataagccttgaaaaattgaataggttaacaagggccactccaatctcggatgacgaaacggcaaaattcattgccagacagcttgtagaaacaagacaggcgacaaaagtagctgcaaaagtattagaaaaaatgtttcccgaaactaagattgtttattctaaagctgaaaccgtatcaatgtttagaaataaattcgatattgtaaaatgcagagaaataaacgattttcatcatgctcatgatgcatatttaaatattgttgtcggaaatgtatataatacaaaatttacaaataatccttggaactttataaaggagaaacgggataatccaaagattgccgatacttacaattattataaagtttttgattatgatgtaaaaagaaataatattacggcatgggaaaaaggaaaaacaattatcactgtgaaggatatgcttaaaagaaatacccctatttatacacgccaagccgcctgcaaaaaaggagaactctttaaccaaaccattatgaaaaaaggattgggccagcatcctctaaaaaaagaaggtcctttttctaatatttcaaaatatgggggctataataaagtctctgctgcatattatactcttatagaatacgaagaaaaagggaataaaatacgaagcttagaaaccatccctctatatttggtaaaagacattcaaaaagatcaagatgtattaaagagttacttaacagatctgctagggaaaaaagaatttaagattttggttcctaaaataaaaatcaactccctcttaaaaattaacggtttcccttgtcatataacagggaaaaccaatgattctttcttactgcgtccggctgttcagttttgctgttcaaataatgaagttctttattttaaaaaaattataagattcagtgaaataagaagtcaaagagaaaagataggaaaaacaatttctccttatgaagacttatcctttagatcttatatcaaagaaaatttatggaaaaagacaaaaaatgatgaaataggagaaaaggagttttatgaccttcttcaaaagaagaatttggaaatctatgatatgcttttaacaaaacataaggatactatttataaaaaaagacctaactctgcaactattgatatcttagtcaaaggaaaagaaaagtttaaatctttaataatcgaaaatcagtttgaagttattttagagattttaaaactgttttctgccactagaaatgtatcagacttacaacatataggcggaagcaaatattcaggagttgcaaagataggaaataaaatatctagtcttgataactgtattttaatttaccaatcaataacaggtatttttgaaaaaaggattgatttgttaaaggtatga

SEQ ID NO: 26 - DNA, 4188 bp, Treponema denticola
  source 1..4188: mol_type = unassigned DNA
atgaagaaggagatcaaggactacttcctgggcctggacgtgggcaccggcagcgtgggctgggccgtgaccgacaccgactacaagctgctgaaggccaaccgcaaggacctgtggggcatgcgctgcttcgagactgctgagaccgccgaggtgcgccggctgcaccgcggtgctcgccggcgcatcgagcgccgcaagaagcgcatcaagctgctgcaggagctgttcagccaggagatcgccaagaccgacgagggcttcttccagcgcatgaaggagagccccttctacgccgaggacaagaccatcctgcaggagaacaccctgttcaacgacaaggacttcgccgacaagacctaccacaaggcctaccccaccatcaaccacctgatcaaggcctggatcgagaacaaggtgaagcccgaccctcgcctgctgtacctggcctgccacaacatcatcaagaagcgcggccacttcctgttcgagggcgacttcgacagcgagaaccagttcgacaccagcatccaggccctgttcgagtacctgcgcgaggacatggaggtggacatcgacgccgacagccagaaggtgaaggagatcctgaaggacagcagcctgaagaacagcgagaagcagagccgcctgaacaagatcctgggcctgaagcccagcgacaagcagaagaaggccatcaccaacctgatcagcggcaacaagatcaacttcgccgacctgtacgacaaccccgacctgaaggacgccgagaagaacagcatcagcttcagcaaggacgacttcgacgccctgagcgacgacctggccagcatcctgggcgacagcttcgagctgctgctgaaggccaaggccgtgtacaactgcagcgtgctgagcaaggtgatcggcgacgagcagtacctgagcttcgccaaggtgaagatctacgagaagcacaagaccgaccttaccaagctgaagaacgtgatcaagaagcacttccccaaggactacaagaaggtgttcggctacaacaagaacgagaagaacaacaacaactacagcggctacgtgggcgtgtgcaagaccaagagcaagaagctgatcatcaacaacagcgtgaaccaggaggacttctacaagttcctgaagaccatcctgagcgccaagagcgagatcaaggaggtgaacgacatcctgaccgagatcgagaccggcaccttcctgcccaagcagatcagcaagagcaacgccgagatcccctaccagctgcgcaagatggagctggagaagatcctgagcaacgccgagaagcacttcagcttcctgaagcagaaggacgagaagggcctgagccacagcgagaagatcatcatgctgctgaccttcaagatcccctactacatcggccccatcaacgacaaccacaagaagttcttccccgaccgctgctgggtggtgaagaaggagaagagccccagcggcaagaccaccccctggaacttcttcgaccacatcgacaaggagaagaccgccgaggccttcatcaccagccgcaccaacttctgcacatacctggtgggcgagagcgtgctgcccaagagcagcctgctgtacagcgagtacaccgtgctgaacgagatcaacaacctgcagatcatcatcgacggcaagaacatctgcgacatcaagctgaagcagaagatctacgaggacctgttcaagaagtacaagaagatcacccagaagcagatcagcaccttcatcaagcacgagggcatctgcaacaagaccgacgaggtgatcatcctgggcatcgacaaggagtgcaccagcagcctgaagagctacatcgagctgaagaacatcttcggcaagcaggtggacgagatcagcaccaagaacatgctggaggagatcatccgctgggccaccatctacgacgagggcgagggcaagaccatcctgaagaccaagatcaaggccgagtacggcaagtactgcagcgacgagcagatcaagaagatcctgaacctgaagttcagcggctggggccgcctgagccgcaagttcctggagaccgtgaccagcgagatgcccggcttcagcgagcccgtgaacatcatcaccgccatgcgcgagacccagaacaacctgatggagctgctgagcagcgagttcaccttcaccgagaacatcaagaagatcaacagcggcttcgaggacgccgagaagcagttcagctacgacggcctggtgaagcccctgttcctgagccccagcgtgaagaagatgctgtggcagaccctgaagctggtgaaggagatcagccacatcacccaggctcctcctaagaagatcttcatcgagatggccaagggcgccgagctggagcctgctcgcaccaagacccgcctgaagatcctgcaggacctgtacaacaactgcaagaacgacgccgacgcattcagcagcgagatcaaggacctgagcggcaagatcgagaacgaggacaacctgcgcctgcgcagcgacaagctgtacctgtactacacccagctgggcaagtgcatgtactgcggcaagcccatcgagatcggccacgtgttcgacaccagcaactacgacatcgaccacatctacccccagagcaagatcaaggacgacagcatcagcaaccgcgtgctggtgtgcagcagctgcaacaagaacaaggaggacaagtaccctctgaagagcgagatccagagcaagcagcgcggcttctggaacttcctgcagcgcaacaacttcatcagcctggagaagctgaaccgcctgacccgcgccacccccatcagcgacgacgagaccgccaagttcatcgcccgccagctggtggagactcgccaagctaccaaggtggccgccaaggtgctggagaagatgttccccgagaccaagatcgtgtacagcaaggccgagaccgtgagcatgttccgcaacaagttcgacatcgtgaagtgccgcgagatcaacgacttccaccacgcccacgacgcctacctgaacatcgtggtgggcaacgtgtacaacaccaagttcaccaacaacccctggaatttcattaaggagaagcgcgacaaccccaagatcgccgacacctacaactactacaaggtgttcgactacgacgtgaagcgcaacaacatcaccgcctgggagaagggcaagaccatcatcaccgtgaaggacatgctgaagcgcaacacccccatctacacccgccaggccgcctgcaagaagggcgagctgttcaaccagaccatcatgaagaagggcctgggccagcaccccctgaagaaggagggccccttcagcaacatcagcaagtacggcggctacaacaaggtgagcgccgcctactacaccctgatcgagtacgaggagaagggcaacaagatccgcagcctggagaccatccccctgtacctggtgaaggacatccagaaggaccaggacgtgctgaagagctacctgaccgacctgctgggcaagaaggagttcaagatcctggtgcccaagatcaagatcaacagcctgctgaagatcaacggcttcccctgccacatcaccggcaagaccaacgacagcttcctgctgcgccccgccgtgcagttctgctgcagcaacaacgaggtgctgtacttcaagaagatcatccgcttcagcgagatccgcagccagcgcgagaagatcggcaagaccatcagcccctacgaggacctgagcttccgcagctacatcaaggagaacctgtggaagaagaccaagaacgacgagatcggcgagaaggagttctacgacctgctgcagaagaagaacctggagatctacgacatgctgctgaccaagcacaaggacaccatctacaagaagcgccccaacagcgccaccatcgacatcctggtgaagggcaaggagaagttcaagagcctgatcatcgagaaccagttcgaggtgatcctggagatcctgaagctgttcagcgccacccgcaacgtgagcgacctgcagcacatcggcggcagcaagtacagcggcgtggccaagatcggcaacaagatcagcagcctggacaactgcatcctgatctaccagagcatcaccggcatcttcgagaagcgcatcgacctgctgaaggtgtaa

SEQ ID NO: 27 - DNA, 4188 bp, Treponema denticola
  source 1..4188: mol_type = unassigned DNA
atgaagaaggagatcaaggactacttcctgggcctggccgtgggcaccggcagcgtgggctgggccgtgaccgacaccgactacaagctgctgaaggccaaccgcaaggacctgtggggcatgcgctgcttcgagactgctgagaccgccgaggtgcgccggctgcaccgcggtgctcgccggcgcatcgagcgccgcaagaagcgcatcaagctgctgcaggagctgttcagccaggagatcgccaagaccgacgagggcttcttccagcgcatgaaggagagccccttctacgccgaggacaagaccatcctgcaggagaacaccctgttcaacgacaaggacttcgccgacaagacctaccacaaggcctaccccaccatcaaccacctgatcaaggcctggatcgagaacaaggtgaagcccgaccctcgcctgctgtacctggcctgccacaacatcatcaagaagcgcggccacttcctgttcgagggcgacttcgacagcgagaaccagttcgacaccagcatccaggccctgttcgagtacctgcgcgaggacatggaggtggacatcgacgccgacagccagaaggtgaaggagatcctgaaggacagcagcctgaagaacagcgagaagcagagccgcctgaacaagatcctgggcctgaagcccagcgacaagcagaagaaggccatcaccaacctgatcagcggcaacaagatcaacttcgccgacctgtacgacaaccccgacctgaaggacgccgagaagaacagcatcagcttcagcaaggacgacttcgacgccctgagcgacgacctggccagcatcctgggcgacagcttcgagctgctgctgaaggccaaggccgtgtacaactgcagcgtgctgagcaaggtgatcggcgacgagcagtacctgagcttcgccaaggtgaagatctacgagaagcacaagaccgaccttaccaagctgaagaacgtgatcaagaagcacttccccaaggactacaagaaggtgttcggctacaacaagaacgagaagaacaacaacaactacagcggctacgtgggcgtgtgcaagaccaagagcaagaagctgatcatcaacaacagcgtgaaccaggaggacttctacaagttcctgaagaccatcctgagcgccaagagcgagatcaaggaggtgaacgacatcctgaccgagatcgagaccggcaccttcctgcccaagcagatcagcaagagcaacgccgagatcccctaccagctgcgcaagatggagctggagaagatcctgagcaacgccgagaagcacttcagcttcctgaagcagaaggacgagaagggcctgagccacagcgagaagatcatcatgctgctgaccttcaagatcccctactacatcggccccatcaacgacaaccacaagaagttcttccccgaccgctgctgggtggtgaagaaggagaagagccccagcggcaagaccaccccctggaacttcttcgaccacatcgacaaggagaagaccgccgaggccttcatcaccagccgcaccaacttctgcacatacctggtgggcgagagcgtgctgcccaagagcagcctgctgtacagcgagtacaccgtgctgaacgagatcaacaacctgcagatcatcatcgacggcaagaacatctgcgacatcaagctgaagcagaagatctacgaggacctgttcaagaagtacaagaagatcacccagaagcagatcagcaccttcatcaagcacgagggcatctgcaacaagaccgacgaggtgatcatcctgggcatcgacaaggagtgcaccagcagcctgaagagctacatcgagctgaagaacatcttcggcaagcaggtggacgagatcagcaccaagaacatgctggaggagatcatccgctgggccaccatctacgacgagggcgagggcaagaccatcctgaagaccaagatcaaggccgagtacggcaagtactgcagcgacgagcagatcaagaagatcctgaacctgaagttcagcggctggggccgcctgagccgcaagttcctggagaccgtgaccagcgagatgcccggcttcagcgagcccgtgaacatcatcaccgccatgcgcgagacccagaacaacctgatggagctgctgagcagcgagttcaccttcaccgagaacatcaagaagatcaacagcggcttcgaggacgccgagaagcagttcagctacgacggcctggtgaagcccctgttcctgagccccagcgtgaagaagatgctgtggcagaccctgaagctggtgaaggagatcagccacatcacccaggctcctcctaagaagatcttcatcgagatggccaagggcgccgagctggagcctgctcgcaccaagacccgcctgaagatcctgcaggacctgtacaacaactgcaagaacgacgccgacgcattcagcagcgagatcaaggacctgagcggcaagatcgagaacgaggacaacctgcgcctgcgcagcgacaagctgtacctgtactacacccagctgggcaagtgcatgtactgcggcaagcccatcgagatcggccacgtgttcgacaccagcaactacgacatcgctgctatctacccccagagcaagatcaaggacgacagcatcagcaaccgcgtgctggtgtgcagcagctgcgccaagaacaaggaggacaagtaccctctgaagagcgagatccagagcaagcagcgcggcttctggaacttcctgcagcgcaacaacttcatcagcctggagaagctgaaccgcctgacccgcgccacccccatcagcgacgacgagaccgccaagttcatcgcccgccagctggtggagactcgccaagctaccaaggtggccgccaaggtgctggagaagatgttccccgagaccaagatcgtgtacagcaaggccgagaccgtgagcatgttccgcaacaagttcgacatcgtgaagtgccgcgagatcaacgacttccaccacgcccacgacgcctacctgaacatcgtggtgggcaacgtgtacaacaccaagttcaccaacaacccctggaatttcattaaggagaagcgcgacaaccccaagatcgccgacacctacaactactacaaggtgttcgactacgacgtgaagcgcaacaacatcaccgcctgggagaagggcaagaccatcatcaccgtgaaggacatgctgaagcgcaacacccccatctacacccgccaggccgcctgcaagaagggcgagctgttcaaccagaccatcatgaagaagggcctgggccagcaccccctgaagaaggagggccccttcagcaacatcagcaagtacggcggctacaacaaggtgagcgccgcctactacaccctgatcgagtacgaggagaagggcaacaagatccgcagcctggagaccatccccctgtacctggtgaaggacatccagaaggaccaggacgtgctgaagagctacctgaccgacctgctgggcaagaaggagttcaagatcctggtgcccaagatcaagatcaacagcctgctgaagatcaacggcttcccctgccacatcaccggcaagaccaacgacagcttcctgctgcgccccgccgtgcagttctgctgcagcaacaacgaggtgctgtacttcaagaagatcatccgcttcagcgagatccgcagccagcgcgagaagatcggcaagaccatcagcccctacgaggacctgagcttccgcagctacatcaaggagaacctgtggaagaagaccaagaacgacgagatcggcgagaaggagttctacgacctgctgcagaagaagaacctggagatctacgacatgctgctgaccaagcacaaggacaccatctacaagaagcgccccaacagcgccaccatcgacatcctggtgaagggcaaggagaagttcaagagcctgatcatcgagaaccagttcgaggtgatcctggagatcctgaagctgttcagcgccacccgcaacgtgagcgacctgcagcacatcggcggcagcaagtacagcggcgtggccaagatcggcaacaagatcagcagcctggacaactgcatcctgatctaccagagcatcaccggcatcttcgagaagcgcatcgacctgctgaaggtgtaa

SEQ ID NO: 28 - protein, 1053 aa, Streptococcus sp.
  source 1..1053: note = Streptococcus aureas
MKRNYILGLDIGITSVGYGIIDYETRDVIDAGVRLFKEANVENNEGRRSKRGARRLKRRRRHRIQRVKKLLFDYNLLTDHSELSGINPYEARVKGLSQKLSEEEFSAALLHLAKRRGVHNVNEVEEDTGNELSTKEQISRNSKALEEKYVAELQLERLKKDGEVRGSINRFKTSDYVKEAKQLLKVQKAYHQLDQSFIDTYIDLLETRRTYYEGPGEGSPFGWKDIKEWYEMLMGHCTYFPEELRSVKYAYNADLYNALNDLNNLVITRDENEKLEYYEKFQIIENVFKQKKKPTLKQIAKEILVNEEDIKGYRVTSTGKPEFTNLKVYHDIKDITARKEIIENAELLDQIAKILTIYQSSEDIQEELTNLNSELTQEEIEQISNLKGYTGTHNLSLKAINLILDELWHTNDNQIAIFNRLKLVPKKVDLSQQKEIPTTLVDDFILSPVVKRSFIQSIKVINAIIKKYGLPNDIIIELAREKNSKDAQKMINEMQKRNRQTNERIEEIIRTTGKENAKYLIEKIKLHDMQEGKCLYSLEAIPLEDLLNNPFNYEVDHIIPRSVSFDNSFNNKVLVKQEENSKKGNRTPFQYLSSSDSKISYETFKKHILNLAKGKGRISKTKKEYLLEERDINRFSVQKDFINRNLVDTRYATRGLMNLLRSYFRVNNLDVKVKSINGGFTSFLRRKWKFKKERNKGYKHHAEDALIIANADFIFKEWKKLDKAKKVMENQMFEEKQAESMPEIETEQEYKEIFITPHQIKHIKDFKDYKYSHRVDKKPNRELINDTLYSTRKDDKGNTLIVNNLNGLYDKDNDKLKKLINKSPEKLLMYHHDPQTYQKLKLIMEQYGDEKNPLYKYYEETGNYLTKYSKKDNGPVIKKIKYYGNKLNAHLDITDDYPNSRNKVVKLSLKPYRFDVYLDNGVYKFVTVKNLDVIKKENYYEVNSKCYEEAKKLKKISNQAEFIASFYNNDLIKINGELYRVIGVNNDLLNRIEVNMIDITYREYLENMNDKRPPRIIKTIASKTQSIKKYSTDILGNLYEVKSKKHPQIIKKG

SEQ ID NO: 29 - DNA, 3162 bp, Streptococcus sp.
  source 1..3162: mol_type = unassigned DNA; note = Streptococcus aureas
atgaaaaggaattatatcttaggattagatatcggaattacatcagtgggttatggaattattgattatgaaactagagatgtcatagatgcgggcgtacgtttatttaaagaggctaatgttgaaaataatgaaggacgacgatcaaaaagaggtgccagaaggcttaagaggcgtcgtagacatagaatacaaagagtaaagaaacttttatttgattacaatttgttgacagatcatagtgagctaagtggaatcaatccttacgaggcgcgcgtaaagggattaagtcaaaaattaagtgaagaggaattttctgcggcattgctacatttagcaaagcgtagaggtgtacataatgttaatgaagtggaagaagatacaggtaatgaattatccactaaagaacaaatttcaagaaatagtaaagcgttagaagagaagtatgttgcagaattacagttggaacgtttgaaaaaagacggtgaagtgagaggttcgattaaccgtttcaaaacatctgactatgtaaaagaagcaaagcagttattaaaagtacaaaaagcatatcatcaacttgatcaatcatttatagacacttatattgatttattggaaacaagaagaacatattatgagggaccaggtgaaggtagcccatttggatggaaagatattaaagaatggtatgaaatgttaatgggacattgtacgtatttcccagaagaattacgtagtgtgaaatatgcctataatgctgatttatataatgcgctgaatgatttgaacaacttggttattacacgagatgagaatgagaagctagagtattatgaaaaattccaaattatcgagaatgtctttaaacaaaagaaaaagccgacgcttaaacaaattgcgaaggaaatcttggtgaatgaagaagacatcaaaggctatcgtgtcacaagtacaggtaaaccagaatttacaaacttgaaagtttatcacgatatcaaagatattacagcaagaaaagaaattatcgagaatgcagagctactcgatcaaatagctaaaatattaactatttaccagtcatcagaagatatacaagaagaattaacaaacctaaattcagaattgacacaagaagagattgaacaaatttcaaacttgaaaggttatacaggaactcataacctttcactaaaggcaataaatttaatattagacgaattgtggcatacgaacgataatcaaatagctattttcaatcgtttgaaacttgtacctaaaaaggtagatttaagccaacaaaaagaaattcctactactttagttgatgattttatactgtctccagtagtgaaacgttcatttatacaatctattaaagttattaacgctattattaaaaaatacggtttgccaaatgatattattattgaacttgcgagagaaaagaattctaaagatgcacaaaaaatgattaatgaaatgcagaagagaaatcgtcaaacgaatgaacgtattgaggaaattataagaacgacaggtaaagaaaatgctaaatatttaattgaaaaaattaagctgcacgatatgcaagaagggaaatgtttatactcgttagaagcaatccctctagaagatttacttaataatccattcaattacgaagtagaccatatcattccacgttctgtttctttcgataactctttcaataataaagtgttggtgaaacaagaagaaaatagtaaaaaaggtaatagaacgccatttcaatatttaagttcttcagattctaaaataagttatgagacattcaaaaagcatattttaaatcttgctaaaggcaaaggtagaatctctaagacgaaaaaagaatatttgttagaagaacgagatatcaatcgcttcagtgtccaaaaagattttattaaccgtaacttagtagatacacgctatgcgacaagagggttaatgaacttattaagatcttattttagagtgaataacttagatgtcaaagtgaaatcgattaatggcggattcacaagtttcttaagaaggaaatggaagttcaaaaaagaaagaaataagggctacaaacaccatgctgaagatgcactgattattgcgaacgctgattttattttcaaagaatggaaaaaactagataaagctaaaaaagtgatggaaaatcaaatgtttgaagaaaagcaagctgaaagtatgcctgaaattgagactgagcaagagtataaagaaatttttataacgcctcatcaaattaaacatattaaggattttaaagattataaatattcacatagagttgataaaaagccgaatagagagttaataaatgatacattatattctacgagaaaagatgacaagggtaatacattaatcgttaataacttaaatggtttatacgataaagataatgataaattgaaaaaattaattaataaatcacctgaaaaattattgatgtatcatcatgatccacaaacatatcaaaaattaaaattgatcatggaacaatatggcgatgagaaaaatccgctttataaatattatgaagaaacaggcaattacttaacaaaatatagtaaaaaagataacggaccagtcatcaaaaaaattaaatattatggtaacaagctaaatgcgcatttagatattacggatgattatccaaatagcagaaataaagtagtaaaactttcattaaaaccatatcgctttgatgtttatttagataatggggtatataaatttgtgacagttaaaaatttagatgttatcaaaaaagaaaactactatgaagttaattcaaagtgttatgaagaagcaaaaaaactgaagaaaattagtaatcaagcagaatttatcgcaagtttttacaataatgacttgattaagattaacggagaattatatagagtcataggtgtaaataatgatctacttaacagaattgaagtaaatatgatagacatcacatatagagaatatttagagaacatgaatgataaaagaccacctagaataattaaaacaatagcaagcaaaacacaatctattaaaaagtattctacagatattctaggcaatctttatgaagtgaagagtaaaaagcatcctcaaatcataaagaaaggatga

SEQ ID NO: 30 - protein, 1629 aa, Francisella tularensis
MNFKILPIAIDLGVKNTGVFSAFYQKGTSLERLDNKNGKVYELSKDSYTLLMNNRTARRHQRRGIDRKQLVKRLFKLIWTEQLNLEWDKDTQQAISFLFNRRGFSFITDGYSPEYLNIVPEQVKAILMDIFDDYNGEDDLDSYLKLATEQESKISEIYNKLMQKILEFKLMKLCTDIKDDKVSTKTLKEITSYEFELLADYLANYSESLKTQKFSYTDKQGNLKELSYYHHDKYNIQEFLKRHATINDRILDTLLTDDLDIWNFNFEKFDFDKNEEKLQNQEDKDHIQAHLHHFVFAVNKIKSEMASGGRHRSQYFQEITNVLDENNHQEGYLKNFCENLHNKKYSNLSVKNLVNLIGNLSNLELKPLRKYFNDKIHAKADHWDEQKFTETYCHWILGEWRVGVKDQDKKDGAKYSYKDLCNELKQKVTKAGLVDFLLELDPCRTIPPYLDNNNRKPPKCQSLILNPKFLDNQYPNWQQYLQELKKLQSIQNYLDSFETDLKVLKSSKDQPYFVEYKSSNQQIASGQRDYKDLDARILQFIFDRVKASDELLLNEIYFQAKKLKQKASSELEKLESSKKLDEVIANSQLSQILKSQHTNGIFEQGTFLHLVCKYYKQRQRARDSRLYIMPEYRYDKKLHKYNNTGRFDDDNQLLTYCNHKPRQKRYQLLNDLAGVLQVSPNFLKDKIGSDDDLFISKWLVEHIRGFKKACEDSLKIQKDNRGLLNHKINIARNTKGKCEKEIFNLICKIEGSEDKKGNYKHGLAYELGVLLFGEPNEASKPEFDRKIKKFNSIYSFAQIQQIAFAERKGNANTCAVCSADNAHRMQQIKITEPVEDNKDKIILSAKAQRLPAIPTRIVDGAVKKMATILAKNIVDDNWQNIKQVLSAKHQLHIPIITESNAFEFEPALADVKGKSLKDRRKKALERISPENIFKDKNNRIKEFAKGISAYSGANLTDGDFDGAKEELDHIIPRSHKKYGTLNDEANLICVTRGDNKNKGNRIFCLRDLADNYKLKQFETTDDLEIEKKIADTIWDANKKDFKFGNYRSFINLTPQEQKAFRHALFLADENPIKQAVIRAINNRNRTFVNGTQRYFAEVLANNIYLRAKKENLNTDKISFDYFGIPTIGNGRGIAEIRQLYEKVDSDIQAYAKGDKPQASYSHLIDAMLAFCIAADEHRNDGSIGLEIDKNYSLYPLDKNTGEVFTKDIFSQIKITDNEFSDKKLVRKKAIEGFNTHRQMTRDGIYAENYLPILIHKELNEVRKGYTWKNSEEIKIFKGKKYDIQQLNNLVYCLKFVDKPISIDIQISTLEELRNILTTNNIAATAEYYYINLKTQKLHEYYIENYNTALGYKKYSKEMEFLRSLAYRSERVKIKSIDDVKQVLDKDSNFIIGKITLPFKKEWQRLYREWQNTTIKDDYEFLKSFFNVKSITKLHKKVRKDFSLPISTNEGKFLVKRKTWDNNFIYQILNDSDSRADGTKPFIPAFDISKNEIVEAIIDSFTSKNIFWLPKNIELQKVDNKNIFAIDTSKWFEVETPSDLRDIGIATIQYKIDNNSRPKVRVKLDYVIDDDSKINYFMNHSLLKSRYPDKVLEILKQSTIIEFESSGFNKTIKEMLGMKLAGIYNETSNN

SEQ ID NO: 31 - DNA, 4890 bp, Francisella tularensis
  source 1..4890: mol_type = unassigned DNA
atgaatttcaaaatattgccaatagcaatagatttaggtgttaaaaatactggtgtctttagcgcattttatcaaaaaggaacttctcttgagagattggataataaaaatggcaaagtatatgaactatcaaaagattcttatactttattgatgaataatagaacagcaagaagacatcaaagaagagggatagatagaaagcagctagtcaaaaggctctttaagcttatttggacagagcagctaaatttagagtgggataaagacactcaacaagcaattagctttttatttaatcgtagaggttttagttttattactgatggttattcgcctgaatatttaaatattgttccagagcaagtaaaagcgatacttatggatatatttgatgattacaacggtgaagatgatttagacagttatttaaaattagctactgagcaagaaagcaaaatttctgaaatttataacaagctaatgcaaaaaatattagagtttaaattaatgaaattatgtactgatattaaggatgataaagtaagtactaaaacgcttaaagaaatcacaagctatgaatttgagttattagctgattatttagcaaactatagcgagagtttaaaaacacaaaaatttagttatacagataaacaaggtaatttaaaagagctaagctactatcatcatgataaatataatattcaagaatttctaaagcgacatgctactataaatgatcgaattttagatactcttttaactgatgatttagatatttggaattttaattttgagaaatttgattttgataagaatgaagaaaagcttcagaatcaggaagataaagatcatatacaagcgcatttacatcattttgtttttgcagtaaataaaataaaaagtgaaatggcaagtggtggtcgtcatcgtagccaatattttcaagagataacaaatgtgctagatgaaaataatcatcaagagggatatctcaagaatttctgtgaaaatttgcataataaaaaatattcaaatttaagtgttaaaaatttagttaatctaattggtaacctaagtaatttagagctaaaaccgctaagaaaatattttaatgacaaaattcacgcaaaagctgatcattgggatgagcaaaagtttacagaaacttattgccactggatattaggagagtggcgagtaggtgtcaaagatcaagataagaaagatggcgctaaatatagttataaagatctgtgtaatgaattaaaacaaaaagttactaaggctggtttggtagattttttattagagttagatccatgtagaactataccaccatatctggataacaataaccgtaaaccaccaaaatgtcaaagtttgattttaaatccgaagtttttagataatcaatatccaaactggcaacaatatttacaagaattaaagaaactacaaagtattcaaaattatttagacagttttgaaactgatttaaaagtcttaaagtcaagtaaagatcaaccatattttgttgaatacaagagttcaaatcagcaaatagcaagtggtcaaagagattataaagatttagatgctcgaatattacagtttatatttgatagggtaaaagctagtgatgagttgcttttgaatgagatttattttcaggctaaaaaacttaaacaaaaagctagctctgagttagaaaaactcgagtcgagcaaaaagctagatgaagttatagcaaatagtcaactatcacagatactaaagtctcaacatacaaatggtatttttgaacagggtacttttttgcatttggtttgtaaatattataaacaaagacaaagagcgagagactctaggctatatattatgcctgaatatcgttatgataaaaaactacataaatataacaatacaggcaggtttgatgatgataatcagctgctaacatattgtaatcataagccaagacaaaaaagataccaattgttaaatgatttagctggggtgttgcaggtatcacctaattttttgaaagataaaattggttctgatgatgatctatttattagcaaatggttggtagagcatattagaggatttaaaaaagcttgtgaagatagtttaaaaatacaaaaagacaatagaggattattaaatcataaaataaatatagctaggaatacaaaaggcaaatgtgaaaaagaaatatttaatttaatatgtaaaatagaaggttcagaagataaaaaaggtaattacaagcatggtttagcttacgaattaggagtacttttatttggtgaacctaatgaagctagtaaacctgagttcgatagaaaaattaaaaaatttaactcaatatacagttttgcacagattcaacaaattgcttttgcagagcgtaaaggcaatgctaacacttgtgcagtttgtagtgctgataatgctcatagaatgcaacaaattaagatcactgagcctgtagaggacaataaagataagataatcttaagtgccaaagctcagagactaccagcgattccaactagaatagttgacggtgcggttaagaaaatggcaactatattagctaaaaatatagttgatgataattggcagaatatcaaacaagttttatcagcaaaacatcagttacatatacctattatcacagaatcaaatgcttttgagtttgaaccagcattagctgatgtaaaaggtaagagcctaaaagataggagaaaaaaagcattagagagaataagtcctgaaaatatattcaaggataaaaacaatagaataaaagaatttgctaaaggtatatcagcatatagtggtgctaatttaactgatggcgattttgatggtgcaaaagaagaattagatcatataatacctcgttcacataaaaaatacggtactctaaatgatgaagcaaatctaatttgtgtaactcgtggtgataataaaaataaaggtaatagaattttctgcctacgtgatcttgcagataactataaactaaaacagtttgagacaactgatgatttagaaattgaaaagaagatagctgatacaatctgggatgctaacaagaaagattttaaatttggtaattatcgtagttttattaacctaacaccacaagagcagaaagcatttcgtcacgcgctatttctggctgatgaaaatcctatcaaacaagcagtcataagagcgataaataatcgtaatcgtacatttgtaaatggcactcaacgctattttgcagaagtactggcaaacaatatctatctaagggctaaaaaagaaaatctaaatacagataaaatttcatttgattattttggtattccaactataggtaatggtagaggtattgctgaaatccgtcaactttatgaaaaagttgatagtgatatacaagcttatgcaaaaggtgataaacctcaagctagctactctcacctaatagatgcgatgctggctttttgtattgctgctgatgaacacagaaatgatggaagtataggtctagaaatcgataaaaattatagtttatatccattagataaaaatacaggagaagtctttaccaaagatatttttagtcaaattaaaattactgataatgagtttagcgataaaaaattagtaagaaaaaaagctatagagggctttaacacgcatagacaaatgactagagatggcatttatgcagaaaattacctaccaatactaatccataaagaactaaatgaagttagaaaaggctatacttggaaaaatagtgaagaaataaaaatattcaaaggtaaaaagtacgatatacaacaattgaataaccttgtgtattgtctaaaatttgtagataaacctatatctatagatatacaaattagtaccttagaagagttaagaaatatattaacaacaaataatatagctgctacagcagaatactattatataaatctaaaaacccaaaaattacatgagtattatatcgaaaactataatactgccttaggttataaaaaatacagtaaagaaatggagtttttgagaagcttagcttatcgtagcgaaagggtaaaaattaaatcaatagatgatgtaaagcaggttttggataaggatagtaactttatcatcggtaagattactttaccatttaaaaaagagtggcaaagactatatcgtgagtggcaaaatacaactatcaaagatgattatgagtttttaaaatcattctttaatgttaaaagtattactaagttgcataaaaaagttagaaaagatttctctttacctatttctacaaatgaaggtaaattcctggtcaaaagaaaaacatgggataacaattttatctatcagatattaaatgattctgattctagagcagacggaacaaagccatttattccagcttttgacatttctaaaaatgaaatagtcgaagccataattgattcatttacatcaaaaaatattttttggctgcctaaaaatatagaattacaaaaggtggataataaaaacatttttgctatagatactagtaaatggttcgaagtagaaacacctagtgatcttagagacattggaatagcaacaattcaatacaagatagataataattctcgccctaaagtcagagttaaacttgattatgttatcgatgatgatagtaagataaattattttatgaatcattctttattaaaatcaagatatcctgacaaagttttagaaattttaaaacaatcaactattatagaatttgaaagttcaggttttaataaaactatcaaagaaatgcttggtatgaaattagcaggtatttataatgaaacatctaataattag

SEQ ID NO: 32 - DNA, 3903 bp, Francisella tularensis
  misc_feature 1..3903: note = Francisella tularensis subsp. novicida (strain U112)
  source 1..3903: mol_type = unassigned DNA
atgtcaatttatcaagaatttgttaataaatatagtttaagtaaaactctaagatttgagttaatcccacagggtaaaacacttgaaaacataaaagcaagaggtttgattttagatgatgagaaaagagctaaagactacaaaaaggctaaacaaataattgataaatatcatcagttttttatagaggagatattaagttcggtttgtattagcgaagatttattacaaaactattctgatgtttattttaaacttaaaaagagtgatgatgataatctacaaaaagattttaaaagtgcaaaagatacgataaagaaacaaatatctgaatatataaaggactcagagaaatttaagaatttgtttaatcaaaaccttatcgatgctaaaaaagggcaagagtcagatttaattctatggctaaagcaatctaaggataatggtatagaactatttaaagccaatagtgatatcacagatatagatgaggcgttagaaataatcaaatcttttaaaggttggacaacttattttaagggttttcatgaaaatagaaaaaatgtttatagtagcaatgatattcctacatctattatttataggatagtagatgataatttgcctaaatttctagaaaataaagctaagtatgagagtttaaaagacaaagctccagaagctataaactatgaacaaattaaaaaagatttggcagaagagctaacctttgatattgactacaaaacatctgaagttaatcaaagagttttttcacttgatgaagtttttgagatagcaaactttaataattatctaaatcaaagtggtattactaaatttaatactattattggtggtaaatttgtaaatggtgaaaatacaaagagaaaaggtataaatgaatatataaatctatactcacagcaaataaatgataaaacactcaaaaaatataaaatgagtgttttatttaagcaaattttaagtgatacagaatctaaatcttttgtaattgataagttagaagatgatagtgatgtagttacaacgatgcaaagtttttatgagcaaatagcagcttttaaaacagtagaagaaaaatctattaaagaaacactatctttattatttgatgatttaaaagctcaaaaacttgatttgagtaaaatttattttaaaaatgataaatctcttactgatctatcacaacaagtttttgatgattatagtgttattggtacagcggtactagaatatataactcaacaaatagcacctaaaaatcttgataaccctagtaagaaagagcaagaattaatagccaaaaaaactgaaaaagcaaaatacttatctctagaaactataaagcttgccttagaagaatttaataagcatagagatatagataaacagtgtaggtttgaagaaatacttgcaaactttgcggctattccgatgatatttgatgaaatagctcaaaacaaagacaatttggcacagatatctatcaaatatcaaaatcaaggtaaaaaagacctacttcaagctagtgcggaagatgatgttaaagctatcaaggatcttttagatcaaactaataatctcttacataaactaaaaatatttcatattagtcagtcagaagataaggcaaatattttagacaaggatgagcatttttatctagtatttgaggagtgctactttgagctagcgaatatagtgcctctttataacaaaattagaaactatataactcaaaagccatatagtgatgagaaatttaagctcaattttgagaactcgactttggctaatggttgggataaaaataaagagcctgacaatacggcaattttatttatcaaagatgataaatattatctgggtgtgatgaataagaaaaataacaaaatatttgatgataaagctatcaaagaaaataaaggcgagggttataaaaaaattgtttataaacttttacctggcgcaaataaaatgttacctaaggttttcttttctgctaaatctataaaattttataatcctagtgaagatatacttagaataagaaatcattccacacatacaaaaaatggtagtcctcaaaaaggatatgaaaaatttgagtttaatattgaagattgccgaaaatttatagatttttataaacagtctataagtaagcatccggagtggaaagattttggatttagattttctgatactcaaagatataattctatagatgaattttatagagaagttgaaaatcaaggctacaaactaacttttgaaaatatatcagagagctatattgatagcgtagttaatcagggtaaattgtacctattccaaatctataataaagatttttcagcttatagcaaagggcgaccaaatctacatactttatattggaaagcgctgtttgatgagagaaatcttcaagatgtggtttataagctaaatggtgaggcagagcttttttatcgtaaacaatcaatacctaaaaaaatcactcacccagctaaagaggcaatagctaataaaaacaaagataatcctaaaaaagagagtgtttttgaatatgatttaatcaaagataaacgctttactgaagataagtttttctttcactgtcctattacaatcaattttaaatctagtggagctaataagtttaatgatgaaatcaatttattgctaaaagaaaaagcaaatgatgttcatatattaagtatagatagaggtgaaagacatttagcttactatactttggtagatggtaaaggcaatatcatcaaacaagatactttcaacatcattggtaatgatagaatgaaaacaaactaccatgataagcttgctgcaatagagaaagatagggattcagctaggaaagactggaaaaagataaataacatcaaagagatgaaagagggctatctatctcaggtagttcatgaaatagctaagctagttatagagtataatgctattgtggtttttgaggatttaaattttggatttaaaagagggcgtttcaaggtagagaagcaggtctatcaaaagttagaaaaaatgctaattgagaaactaaactatctagttttcaaagataatgagtttgataaaactgggggagtgcttagagcttatcagctaacagcaccttttgagacttttaaaaagatgggtaaacaaacaggtattatctactatgtaccagctggttttacttcaaaaatttgtcctgtaactggttttgtaaatcagttatatcctaagtatgaaagtgtcagcaaatctcaagagttctttagtaagtttgacaagatttgttataaccttgataagggctattttgagtttagttttgattataaaaactttggtgacaaggctgccaaaggcaagtggactatagctagctttgggagtagattgattaactttagaaattcagataaaaatcataattgggatactcgagaagtttatccaactaaagagttggagaaattgctaaaagattattctatcgaatatgggcatggcgaatgtatcaaagcagctatttgcggtgagagcgacaaaaagttttttgctaagctaactagtgtcctaaatactatcttacaaatgcgtaactcaaaaacaggtactgagttagattatctaatttcaccagtagcagatgtaaatggcaatttctttgattcgcgacaggcgccaaaaaatatgcctcaagatgctgatgccaatggtgcttatcatattgggctaaaaggtctgatgctactaggtaggatcaaaaataatcaagagggcaaaaaactcaatttggttatcaaaaatgaagagtattttgagttcgtgcagaataggaataactaa

SEQ ID NO: 33 - protein, 1300 aa, Francisella tularensis
  REGION 1..1300: note = Francisella tularensis subsp. novicida (strain U112)
MSIYQEFVNKYSLSKTLRFELIPQGKTLENIKARGLILDDEKRAKDYKKAKQIIDKYHQFFIEEILSSVCISEDLLQNYSDVYFKLKKSDDDNLQKDFKSAKDTIKKQISEYIKDSEKFKNLFNQNLIDAKKGQESDLILWLKQSKDNGIELFKANSDITDIDEALEIIKSFKGWTTYFKGFHENRKNVYSSNDIPTSIIYRIVDDNLPKFLENKAKYESLKDKAPEAINYEQIKKDLAEELTFDIDYKTSEVNQRVFSLDEVFEIANFNNYLNQSGITKFNTIIGGKFVNGENTKRKGINEYINLYSQQINDKTLKKYKMSVLFKQILSDTESKSFVIDKLEDDSDVVTTMQSFYEQIAAFKTVEEKSIKETLSLLFDDLKAQKLDLSKIYFKNDKSLTDLSQQVFDDYSVIGTAVLEYITQQIAPKNLDNPSKKEQELIAKKTEKAKYLSLETIKLALEEFNKHRDIDKQCRFEEILANFAAIPMIFDEIAQNKDNLAQISIKYQNQGKKDLLQASAEDDVKAIKDLLDQTNNLLHKLKIFHISQSEDKANILDKDEHFYLVFEECYFELANIVPLYNKIRNYITQKPYSDEKFKLNFENSTLANGWDKNKEPDNTAILFIKDDKYYLGVMNKKNNKIFDDKAIKENKGEGYKKIVYKLLPGANKMLPKVFFSAKSIKFYNPSEDILRIRNHSTHTKNGSPQKGYEKFEFNIEDCRKFIDFYKQSISKHPEWKDFGFRFSDTQRYNSIDEFYREVENQGYKLTFENISESYIDSVVNQGKLYLFQIYNKDFSAYSKGRPNLHTLYWKALFDERNLQDVVYKLNGEAELFYRKQSIPKKITHPAKEAIANKNKDNPKKESVFEYDLIKDKRFTEDKFFFHCPITINFKSSGANKFNDEINLLLKEKANDVHILSIDRGERHLAYYTLVDGKGNIIKQDTFNIIGNDRMKTNYHDKLAAIEKDRDSARKDWKKINNIKEMKEGYLSQVVHEIAKLVIEYNAIVVFEDLNFGFKRGRFKVEKQVYQKLEKMLIEKLNYLVFKDNEFDKTGGVLRAYQLTAPFETFKKMGKQTGIIYYVPAGFTSKICPVTGFVNQLYPKYESVSKSQEFFSKFDKICYNLDKGYFEFSFDYKNFGDKAAKGKWTIASFGSRLINFRNSDKNHNWDTREVYPTKELEKLLKDYSIEYGHGECIKAAICGESDKKFFAKLTSVLNTILQMRNSKTGTELDYLISPVADVNGNFFDSRQAPKNMPQDADANGAYHIGLKGLMLLGRIKNNQEGKKLNLVIKNEEYFEFVQNRNN

SEQ ID NO: 34 - DNA, 3924 bp, Acidaminococcus sp.
  misc_feature 1..3924: note = Acidaminococcus sp. (strain BV3L6)
  source 1..3924: mol_type = unassigned DNA
atgacccaatttgaaggttttaccaatttataccaagtttcgaagacccttcgttttgaactgattccccaaggaaaaacactcaaacatatccaggagcaagggttcattgaggaggataaagctcgcaatgaccattacaaagagttaaaaccaatcattgaccgcatctataagacttatgctgatcaatgtctccaactggtacagcttgactgggagaatctatctgcagccatagactcctatcgtaaggaaaaaaccgaagaaacacgaaatgcgctgattgaggagcaagcaacatatagaaatgcgattcatgactactttataggtcggacggataatctgacagatgccataaataagcgccatgctgaaatctataaaggactttttaaagctgaacttttcaatggaaaagttttaaagcaattagggaccgtaaccacgacagaacatgaaaatgctctactccgttcgtttgacaaatttacgacctatttttccggcttttatgaaaaccgaaaaaatgtctttagcgctgaagatatcagcacggcaattccccatcgaatcgtccaggacaatttccctaaatttaaggaaaactgccatatttttacaagattgataaccgcagttccttctttgcgggagcattttgaaaatgtcaaaaaggccattggaatctttgttagtacgtctattgaagaagtcttttcctttcccttttataatcaacttctaacccaaacgcaaattgatctttataatcaacttctcggcggcatatctagggaagcaggcacagaaaaaatcaagggacttaatgaagttctcaatctggctatccaaaaaaatgatgaaacagcccatataatcgcgtccctgccgcatcgttttattcctctttttaaacaaattctttccgatcgaaatacgttatcctttattttggaagaattcaaaagcgatgaggaagtcatccaatccttctgcaaatataaaaccctcttgagaaacgaaaatgtactggagactgcagaagcccttttcaatgaattaaattccattgatttgactcatatctttatttcccataaaaagttagaaaccatctcttcagcgctttgtgaccattgggataccttgcgcaatgcactttacgaaagacggatttctgaactcactggcaaaataacaaaaagtgccaaagaaaaagttcaaaggtcattaaaacatgaggatataaatctccaagaaattatttctgctgcaggaaaagaactatcagaagcattcaaacaaaaaacaagtgaaattctttcccatgcccatgctgcacttgaccagcctcttcccacaacattaaaaaaacaggaagaaaaagaaatcctcaaatcacagctcgattcgcttttaggcctttatcatcttcttgattggtttgctgtcgatgaaagcaatgaagtcgacccagaattctcagcacggctgacaggcattaaactagaaatggaaccaagcctttcgttttataataaagcaagaaattatgcgacaaaaaagccctattcggtggaaaaatttaaattgaattttcaaatgccaacccttgcctctggttgggatgtcaataaagaaaaaaataatggagctattttattcgtaaaaaatggtctctattaccttggtatcatgcctaaacagaaggggcgctataaagccctgtcttttgagccgacagaaaaaacatcagaaggattcgataagatgtactatgactacttcccagatgccgcaaaaatgattcctaagtgttccactcagctaaaggctgtaaccgctcattttcaaactcataccacccccattcttctctcaaataatttcattgaacctcttgaaatcacaaaagaaatttatgacctgaacaatcctgaaaaggagcctaaaaagtttcaaacggcttatgcaaagaagacaggcgatcaaaaaggctatagagaagcgctttgcaaatggattgactttacgcgggattttctctctaaatatacgaaaacaacttcaatcgatttatcttcactccgcccttcttcgcaatataaagatttaggggaatattacgccgaactgaatccgcttctctatcatatctccttccaacgaattgctgaaaaggaaatcatggatgctgtagaaacgggaaaattgtatctgttccaaatctacaataaggattttgcgaagggccatcacgggaaaccaaatctccacaccctgtattggacaggtctcttcagtcctgaaaaccttgcgaaaaccagcatcaaacttaatggtcaagcagaattgttctatcgacctaaaagccgcatgaagcggatggcccatcgtcttggggaaaaaatgctgaacaaaaaactaaaggaccagaagacaccgattccagataccctctaccaagaactgtacgattatgtcaaccaccggctaagccatgatctttccgatgaagcaagggccctgcttccaaatgttatcaccaaagaagtctcccatgaaattataaaggatcggcggtttacttccgataaatttttcttccatgttcccattacactgaattatcaagcagccaatagtcccagtaaattcaaccagcgtgtcaatgcctaccttaaggagcatccggaaacgcccatcattggtatcgatcgtggagaacgcaatctaatctatattaccgtcattgacagtactgggaaaattttggagcagcgttccctgaataccatccagcaatttgactaccaaaaaaaattggacaacagggaaaaagagcgtgttgccgcccgtcaagcctggtccgtcgtcggaacgatcaaagaccttaaacaaggctacttgtcacaggtcatccatgaaattgtagacctgatgattcattaccaagctgttgtcgtccttgaaaacctcaacttcggatttaaatcaaaacggacaggcattgccgaaaaagcagtctaccaacaatttgaaaagatgctaatagataaactcaactgtttggttctcaaagattatcctgctgagaaagtgggaggcgtcttaaacccgtatcaacttacagatcagttcacgagctttgcaaaaatgggcacgcaaagcggcttccttttctatgtaccggccccttatacctcaaagattgatcccctgactggttttgtcgatccctttgtatggaagaccattaaaaatcatgaaagtcggaagcatttcctagaaggatttgatttcctgcattatgatgtcaaaacaggtgattttatcctccattttaaaatgaatcggaatctctctttccagagagggcttcctggcttcatgccagcttgggatattgttttcgaaaagaatgaaacccaatttgatgcaaaagggacgcccttcattgcaggaaaacgaattgttcctgtaatcgaaaatcatcgttttacgggtcgttacagagacctctatcccgctaatgaactcattgcccttctggaagaaaaaggcattgtctttagagacggaagtaatatattacccaaacttttagaaaatgatgattctcatgcaattgatacgatggtcgccttgattcgcagtgtactccaaatgagaaacagcaatgccgcaacgggggaagactacatcaactctcccgttagggatctgaacggggtgtgtttcgacagtcgattccaaaatccagaatggccaatggatgcggatgccaacggagcttatcatattgccttaaaagggcagcttcttctgaaccacctcaaagaaagcaaagatctgaaattacaaaacggcatcagcaaccaagattggctggcctacattcaggaactgagaaactga

SEQ ID NO: 35 - protein, 1307 aa, Acidaminococcus sp.
  REGION 1..1307: note = Acidaminococcus sp. (strain BV3L6)
MTQFEGFTNLYQVSKTLRFELIPQGKTLKHIQEQGFIEEDKARNDHYKELKPIIDRIYKTYADQCLQLVQLDWENLSAAIDSYRKEKTEETRNALIEEQATYRNAIHDYFIGRTDNLTDAINKRHAEIYKGLFKAELFNGKVLKQLGTVTTTEHENALLRSFDKFTTYFSGFYENRKNVFSAEDISTAIPHRIVQDNFPKFKENCHIFTRLITAVPSLREHFENVKKAIGIFVSTSIEEVFSFPFYNQLLTQTQIDLYNQLLGGISREAGTEKIKGLNEVLNLAIQKNDETAHIIASLPHRFIPLFKQILSDRNTLSFILEEFKSDEEVIQSFCKYKTLLRNENVLETAEALFNELNSIDLTHIFISHKKLETISSALCDHWDTLRNALYERRISELTGKITKSAKEKVQRSLKHEDINLQEIISAAGKELSEAFKQKTSEILSHAHAALDQPLPTTLKKQEEKEILKSQLDSLLGLYHLLDWFAVDESNEVDPEFSARLTGIKLEMEPSLSFYNKARNYATKKPYSVEKFKLNFQMPTLASGWDVNKEKNNGAILFVKNGLYYLGIMPKQKGRYKALSFEPTEKTSEGFDKMYYDYFPDAAKMIPKCSTQLKAVTAHFQTHTTPILLSNNFIEPLEITKEIYDLNNPEKEPKKFQTAYAKKTGDQKGYREALCKWIDFTRDFLSKYTKTTSIDLSSLRPSSQYKDLGEYYAELNPLLYHISFQRIAEKEIMDAVETGKLYLFQIYNKDFAKGHHGKPNLHTLYWTGLFSPENLAKTSIKLNGQAELFYRPKSRMKRMAHRLGEKMLNKKLKDQKTPIPDTLYQELYDYVNHRLSHDLSDEARALLPNVITKEVSHEIIKDRRFTSDKFFFHVPITLNYQAANSPSKFNQRVNAYLKEHPETPIIGIDRGERNLIYITVIDSTGKILEQRSLNTIQQFDYQKKLDNREKERVAARQAWSVVGTIKDLKQGYLSQVIHEIVDLMIHYQAVVVLENLNFGFKSKRTGIAEKAVYQQFEKMLIDKLNCLVLKDYPAEKVGGVLNPYQLTDQFTSFAKMGTQSGFLFYVPAPYTSKIDPLTGFVDPFVWKTIKNHESRKHFLEGFDFLHYDVKTGDFILHFKMNRNLSFQRGLPGFMPAWDIVFEKNETQFDAKGTPFIAGKRIVPVIENHRFTGRYRDLYPANELIALLEEKGIVFRDGSNILPKLLENDDSHAIDTMVALIRSVLQMRNSNAATGEDYINSPVRDLNGVCFDSRFQNPEWPMDADANGAYHIALKGQLLLNHLKESKDLKLQNGISNQDWLAYIQELRN

SEQ ID NO: 36 - DNA, 3741 bp, unidentified
  misc_feature 1..3741: note = Lachnospiraceae bacterium (strain ND2006)
  source 1..3741: mol_type = unassigned DNA; note = Lachnospiraceae bacterium
atgcttaagaatgttggaattgataggttagatgttgaaaaagggagaaaaaatatgtctaaattagagaagtttacaaattgttactctttgtcaaaaacacttcgttttaaggcgattcctgttggaaaaacccaagaaaatattgataataaaagattgcttgtcgaggatgaaaaacgtgcagaagattataagggggttaaaaaattacttgataggtattatttatcatttattaatgatgttcttcattccattaaactaaagaatttaaataattatatttcgttgtttagaaagaaaactcggacggaaaaagaaaacaaagaattagaaaatttagagataaatttacgtaaagaaatcgctaaggcttttaagggtaatgaaggttataaatctttatttaagaaggatattatcgagacgatattgcctgaatttcttgatgataaagatgaaattgctttggttaattcatttaatggatttacaacggcatttaccggtttttttgataatagggaaaatatgttttcggaagaagctaaatcaacctcaattgcttttcgttgtattaatgagaatttaacaagatatatatcaaatatggatatatttgaaaaagttgatgcaattttcgataagcatgaagtacaggaaataaaagaaaaaattctaaacagtgattatgatgttgaagatttcttcgaaggagaattttttaattttgttcttacgcaagaaggtatcgatgtttataacgctataattggtggctttgtgacagaatccggagaaaaaataaaaggattaaatgaatatattaatttatataatcagaaaactaagcaaaaattaccgaagtttaagcctttatataaacaggttttatcagatagagagtcactttctttttatggcgaaggttatacatctgatgaggaagttttagaagtatttagaaatactcttaataagaattcagaaatattttcttcaattaagaaattggaaaagttatttaaaaacttcgatgaatattcaagtgcaggaattttcgtaaaaaatggaccggctatttctacaatttctaaggatatatttggagagtggaatgtaattagagacaaatggaatgcggagtacgatgatatacatttaaaaaagaaggctgtagtaacagaaaaatatgaagatgacaggcgtaaatcattcaaaaaaataggaagtttttcattggagcagttgcaagaatacgctgatgctgatctatctgtggtagagaagttaaaagaaatcattatccaaaaagtggatgagatatataaagtttatggctcgtcagaaaaattgttcgatgctgattttgtactagaaaaatcgttaaaaaagaatgatgcagttgtagcaataatgaaagatttactagattctgtgaagtcttttgaaaattatataaaagccttttttggagagggaaaagaaacaaatcgagatgaatcattttatggtgattttgttttggcatatgacattcttttgaaagtggatcatatttatgatgcaatacgaaattatgtgacacaaaaaccgtattcgaaagataagtttaaattatattttcaaaacccgcaatttatggggggctgggataaggataaagagacagactatagggcaactatacttagatatggctcaaagtattacttggcgattatggataaaaaatatgctaagtgcttgcaaaaaatagataaggatgatgtaaatggaaactatgaaaaaataaattataagttgcttccaggacctaataagatgcttccaaaggtgttttttagtaagaagtggatggcttattataatccgtcggaagatattcaaaaaatatataaaaatggaacatttaaaaaaggagatatgtttaatttaaatgattgtcataaattaattgatttctttaaggattcaatcagtcggtatccgaaatggagtaacgcatatgattttaacttttctgagaccgagaaatataaggatatagcaggtttttacagagaggttgaagaacaaggatataaagtatcatttgaaagtgcgtctaaaaaagaagttgataaattggtagaagaaggaaaattatacatgttccaaatttataataaagacttttcggataaaagtcatggaacgccaaatcttcatacaatgtattttaagttgctgtttgatgaaaataatcatggtcaaattaggctttctggtggtgctgagctattcatgcgacgtgcaagtttgaaaaaggaagaattagttgtgcatcctgccaatagcccgatagcgaataaaaacccggataatccaaagaaaacgactacgttgtcatatgatgtatacaaggacaaaagattttcggaagatcagtatgagttgcatatacctattgcaataaataaatgccctaaaaatatatttaagataaatacagaggttagagtgctgctgaagcatgatgataatccttatgttataggaattgataggggggagagaaatttactttacattgtggtggttgatggtaagggtaatattgtggagcaatattcgctgaatgaaataattaataattttaatggaattagaattaagacggattaccattcacttttggataaaaaggagaaggaaagatttgaagctcgtcaaaattggacgtctatagaaaacattaaagaactaaaagccggatatattagtcaggttgttcataagatatgtgagttggtagaaaaatatgatgcggtaattgcacttgaagatttgaattctggttttaagaatagtcgagttaaagttgaaaagcaagtatatcagaaatttgaaaaaatgctgattgataaacttaactatatggtagataagaaatctaatccttgcgctacgggtggtgctctgaaaggctatcaaattactaacaagtttgagagttttaagtcgatgagtacacaaaatggttttattttttatattccggcgtggttgactagcaaaattgatccgtcaacaggatttgtaaatttgttgaaaacaaagtatacgagcattgcagattcaaagaaatttataagttcttttgacagaattatgtatgtacctgaagaagatttattcgagtttgcattagattataagaatttttctcggacagacgcggattatataaaaaaatggaaactctatagctatggtaacaggattagaatatttagaaatcctaaaaaaaataatgtatttgattgggaagaggtatgtcttacatcagcctataaggaactttttaataaatatgggattaattatcagcaaggagatatacgagctctcttatgtgaacagagtgataaggcattctatagctcttttatggcattaatgtcactcatgctgcaaatgagaaatagtataacaggtaggacggatgtagattttttgatttcaccagtaaaaaattctgacggtattttttatgattccagaaattatgaagctcaggaaaatgcaatattaccgaaaaatgcagatgctaatggggcttataatatcgcaagaaaagttttgtgggctataggtcagtttaaaaaggctgaagatgaaaaacttgataaggttaaaattgcaatatcaaataaggaatggctcgaatatgcgcaaacaagtgttaagcattga

SEQ ID NO: 37 - protein, 1228 aa, unidentified
  REGION 1..1228: note = Lachnospiraceae bacterium (strain ND2006)
  source 1..1228: note = Lachnospiraceae bacterium
MSKLEKFTNCYSLSKTLRFKAIPVGKTQENIDNKRLLVEDEKRAEDYKGVKKLLDRYYLSFINDVLHSIKLKNLNNYISLFRKKTRTEKENKELENLEINLRKEIAKAFKGNEGYKSLFKKDIIETILPEFLDDKDEIALVNSFNGFTTAFTGFFDNRENMFSEEAKSTSIAFRCINENLTRYISNMDIFEKVDAIFDKHEVQEIKEKILNSDYDVEDFFEGEFFNFVLTQEGIDVYNAIIGGFVTESGEKIKGLNEYINLYNQKTKQKLPKFKPLYKQVLSDRESLSFYGEGYTSDEEVLEVFRNTLNKNSEIFSSIKKLEKLFKNFDEYSSAGIFVKNGPAISTISKDIFGEWNVIRDKWNAEYDDIHLKKKAVVTEKYEDDRRKSFKKIGSFSLEQLQEYADADLSVVEKLKEIIIQKVDEIYKVYGSSEKLFDADFVLEKSLKKNDAVVAIMKDLLDSVKSFENYIKAFFGEGKETNRDESFYGDFVLAYDILLKVDHIYDAIRNYVTQKPYSKDKFKLYFQNPQFMGGWDKDKETDYRATILRYGSKYYLAIMDKKYAKCLQKIDKDDVNGNYEKINYKLLPGPNKMLPKVFFSKKWMAYYNPSEDIQKIYKNGTFKKGDMFNLNDCHKLIDFFKDSISRYPKWSNAYDFNFSETEKYKDIAGFYREVEEQGYKVSFESASKKEVDKLVEEGKLYMFQIYNKDFSDKSHGTPNLHTMYFKLLFDENNHGQIRLSGGAELFMRRASLKKEELVVHPANSPIANKNPDNPKKTTTLSYDVYKDKRFSEDQYELHIPIAINKCPKNIFKINTEVRVLLKHDDNPYVIGIDRGERNLLYIVVVDGKGNIVEQYSLNEIINNFNGIRIKTDYHSLLDKKEKERFEARQNWTSIENIKELKAGYISQVVHKICELVEKYDAVIALEDLNSGFKNSRVKVEKQVYQKFEKMLIDKLNYMVDKKSNPCATGGALKGYQITNKFESFKSMSTQNGFIFYIPAWLTSKIDPSTGFVNLLKTKYTSIADSKKFISSFDRIMYVPEEDLFEFALDYKNFSRTDADYIKKWKLYSYGNRIRIFRNPKKNNVFDWEEVCLTSAYKELFNKYGINYQQGDIRALLCEQSDKAFYSSFMALMSLMLQMRNSITGRTDVDFLISPVKNSDGIFYDSRNYEAQENAILPKNADANGAYNIARKVLWAIGQFKKAEDEKLDKVKIAISNKEWLEYAQTSVKH

SEQ ID NO: 38 - protein, 1064 aa, Bradyrhizobium sp.
  REGION 1..1064: note = Bradyrhizobium sp. BTAi1
MKRTSLRAYRLGVDLGANSLGWFVVWLDDHGQPEGLGPGGVRIFPDGRNPQSKQSNAAGRRLARSARRRRDRYLQRRGKLMGLLVKHGLMPADEPARKRLECLDPYGLRAKALDEVLPLHHVGRALFHLNQRRGLFANRAIEQGDKDASAIKAAAGRLQTSMQACGARTLGEFLNRRHQLRATVRARSPVGGDVQARYEFYPTRAMVDAEFEAIWAAQAPHHPTMTAEAHDTIREAIFSQRAMKRPSIGKCSLDPATSQDDVDGFRCAWSHPLAQRFRIWQDVRNLAVVETGPTSSRLGKEDQDKVARALLQTDQLSFDEIRGLLGLPSDARFNLESDRRDHLKGDATGAILSARRHFGPAWHDRSLDRQIDIVALLESALDEAAIIASLGTTHSLDEAAAQRALSALLPDGYCRLGLRAIKRVLPLMEAGRTYAEAASAAGYDHALLPGGKLSPTGYLPYYGQWLQNDVVGSDDERDTNERRWGRLPNPTVHIGIGQLRRVVNELIRWHGPPAEITVELTRDLKLSPRRLAELEREQAENQRKNDKRTSLLRKLGLPASTHNLLKLRLWDEQGDVASECPYTGEAIGLERLVSDDVDIDHLIPFSISWDDSAANKVVCMRYANREKGNRTPFEAFGHRQGRPYDWADIAERAARLPRGKRWRFGPGARAQFEELGDFQARLLNETSWLARVAKQYLAAVTHPHRIHVLPGRLTALLRATWELNDLLPGSDDRAAKSRKDHRHHAIDALVAALTDQALLRRMANAHDDTRRKIEVLLPWPTFRIDLETRLKAMLVSHKPDHGLQARLHEDTAYGTVEHPETEDGANLVYRKTFVDISEKEIDRIRDRRLRDLVRAHVAGERQQGKTLKAAVLSFAQRRDIAGHPNGIRHVRLTKSIKPDYLVPIRDKAGRIYKSYNAGENAFVDILQAESGRWIARATTVFQANQANESHDAPAAQPIMRVFKGDMLRIDHAGAEKFVKIVRLSPSNNLLYLVEHHQAGVFQTRHDDPEDSFRWLFASFDKLREWNAELVRIDTLGQPWRRKRGLETGSEDATRIGWTRPKKWP

SEQ ID NO: 39 - protein, 1035 aa, unidentified
  source 1..1035: note = Candidatus Puniceispirillum marinum
MRRLGLDLGTNSIGWCLLDLGDDGEPVSIFRTGARIFSDGRDPKSLGSLKATRREARLTRRRRDRFIQRQKNLINALVKYGLMPADEIQRQALAYKDPYPIRKKALDEAIDPYEMGRAIFHINQRRGFKSNRKSADNEAGVVKQSIADLEMKLGEAGARTIGEFLADRQATNDTVRARRLSGTNALYEFYPDRYMLEQEFDTLWAKQAAFNPSLYIEAARERLKEIVFFQRKLKPQEVGRCIFLSDEDRISKALPSFQRFRIYQELSNLAWIDHDGVAHRITASLALRDHLFDELEHKKKLTFKAMRAILRKQGVVDYPVGFNLESDNRDHLIGNLTSCIMRDAKKMIGSAWDRLDEEEQDSFILMLQDDQKGDDEVRSILTQQYGLSDDVAEDCLDVRLPDGHGSLSKKAIDRILPVLRDQGLIYYDAVKEAGLGEANLYDPYAALSDKLDYYGKALAGHVMGASGKFEDSDEKRYGTISNPTVHIALNQVRAVVNELIRLHGKPDEVVIEIGRDLPMGADGKRELERFQKEGRAKNERARDELKKLGHIDSRESRQKFQLWEQLAKEPVDRCCPFTGKMMSISDLFSDKVEIEHLLPFSLTLDDSMANKTVCFRQANRDKGNRAPFDAFGNSPAGYDWQEILGRSQNLPYAKRWRFLPDAMKRFEADGGFLERQLNDTRYISRYTTEYISTIIPKNKIWVVTGRLTSLLRGFWGLNSILRGHNTDDGTPAKKSRDDHRHHAIDAIVVGMTSRGLLQKVSKAARRSEDLDLTRLFEGRIDPWDGFRDEVKKHIDAIIVSHRPRKKSQGALHNDTAYGIVEHAENGASTVVHRVPITSLGKQSDIEKVRDPLIKSALLNETAGLSGKSFENAVQKWCADNSIKSLRIVETVSIIPITDKEGVAYKGYKGDGNAYMDIYQDPTSSKWKGEIVSRFDANQKGFIPSWQSQFPTARLIMRLRINDLLKLQDGEIEEIYRVQRLSGSKILMAPHTEANVDARDRDKNDTFKLTSKSPGKLQSASARKVHISPTGLIREG

SEQ ID NO: 40 - protein, 1358 aa, Acidaminococcus sp.
MGKMYYLGLDIGTNSVGYAVTDPSYHLLKFKGEPMWGAHVFAAGNQSAERRSFRTSRRRLDRRQQRVKLVQEIFAPVISPIDPRFFIRLHESALWRDDVAETDKHIFFNDPTYTDKEYYSDYPTIHHLIVDLMESSEKHDPRLVYLAVAWLVAHRGHFLNEVDKDNIGDVLSFDAFYPEFLAFLSDNGVSPWVCESKALQATLLSRNSVNDKYKALKSLIFGSQKPEDNFDANISEDGLIQLLAGKKVKVNKLFPQESNDASFTLNDKEDAIEEILGTLTPDECEWIAHIRRLFDWAIMKHALKDGRTISESKVKLYEQHHHDLTQLKYFVKTYLAKEYDDIFRNVDSETTKNYVAYSYHVKEVKGTLPKNKATQEEFCKYVLGKVKNIECSEADKVDFDEMIQRLTDNSFMPKQVSGENRVIPYQLYYYELKTILNKAASYLPFLTQCGKDAISNQDKLLSIMTFRIPYFVGPLRKDNSEHAWLERKAGKIYPWNFNDKVDLDKSEEAFIRRMTNTCTYYPGEDVLPLDSLIYEKFMILNEINNIRIDGYPISVDVKQQVFGLFEKKRRVTVKDIQNLLLSLGALDKHGKLTGIDTTIHSNYNTYHHFKSLMERGVLTRDDVERIVERMTYSDDTKRVRLWLNNNYGTLTADDVKHISRLRKHDFGRLSKMFLTGLKGVHKETGERASILDFMWNTNDNLMQLLSECYTFSDEITKLQEAYYAKAQLSLNDFLDSMYISNAVKRPIYRTLAVVNDIRKACGTAPKRIFIEMARDGESKKKRSVTRREQIKNLYRSIRKDFQQEVDFLEKILENKSDGQLQSDALYLYFAQLGRDMYTGDPIKLEHIKDQSFYNIDHIYPQSMVKDDSLDNKVLVQSEINGEKSSRYPLDAAIRNKMKPLWDAYYNHGLISLKKYQRLTRSTPFTDDEKWDFINRQLVETRQSTKALAILLKRKFPDTEIVYSKAGLSSDFRHEFGLVKSRNINDLHHAKDAFLAIVTGNVYHERFNRRWFMVNQPYSVKTKTLFTHSIKNGNFVAWNGEEDLGRIVKMLKQNKNTIHFTRFSFDRKEGLFDIQPLKASTGLVPRKAGLDVVKYGGYDKSTAAYYLLVRFTLEDKKTQHKLMMIPVEGLYKARIDHDKEFLTDYAQTTISEILQKDKQKVINIMFPMGTRHIKLNSMISIDGFYLSIGGKSSKGKSVLCHAMVPLIVPHKIECYIKAMESFARKFKENNKLRIVEKFDKITVEDNLNLYELFLQKLQHNPYNKFFSTQFDVLTNGRSTFTKLSPEEQVQTLLNILSIFKTCRSSGCDLKSINGSAQAARIMISADLTGLSKKYSDIRLVEQSASGLFVSKSQNLLEYL

SEQ ID NO: 41 - protein, 1358 aa, Acidaminococcus sp.; identical to SEQ ID NO: 40
  REGION 1..1358: note = Acidaminococcus sp. D21

SEQ ID NO: 42 - protein, 1138 aa, Acidothermus cellulolyticus
MGGSEVGTVPVTWRLGVDVGERSIGLAAVSYEEDKPKEILAAVSWIHDGGVGDERSGASRLALRGMARRARRLRRFRRARLRDLDMLLSELGWTPLPDKNVSPVDAWLARKRLAEEYVVDETERRRLLGYAVSHMARHRGWRNPWTTIKDLKNLPQPSDSWERTRESLEARYSVSLEPGTVGQWAGYLLQRAPGIRLNPTQQSAGRRAELSNATAFETRLRQEDVLWELRCIADVQGLPEDVVSNVIDAVFCQKRPSVPAERIGRDPLDPSQLRASRACLEFQEYRIVAAVANLRIRDGSGSRPLSLEERNAVIEALLAQTERSLTWSDIALEILKLPNESDLTSVPEEDGPSSLAYSQFAPFDETSARIAEFIAKNRRKIPTFAQWWQEQDRTSRSDLVAALADNSIAGEEEQELLVHLPDAELEALEGLALPSGRVAYSRLTLSGLTRVMRDDGVDVHNARKTCFGVDDNWRPPLPALHEATGHPVVDRNLAILRKFLSSATMRWGPPQSIVVELARGASESRERQAEEEAARRAHRKANDRIRAELRASGLSDPSPADLVRARLLELYDCHCMYCGAPISWENSELDHIVPRTDGGSNRHENLAITCGACNKEKGRRPFASWAETSNRVQLRDVIDRVQKLKYSGNMYWTRDEFSRYKKSVVARLKRRTSDPEVIQSIESTGYAAVALRDRLLSYGEKNGVAQVAVFRGGVTAEARRWLDISIERLFSRVAIFAQSTSTKRLDRRHHAVDAVVLTTLTPGVAKTLADARSRRVSAEFWRRPSDVNRHSTEEPQSPAYRQWKESCSGLGDLLISTAARDSIAVAAPLRLRPTGALHEETLRAFSEHTVGAAWKGAELRRIVEPEVYAAFLALTDPGGRFLKVSPSEDVLPADENRHIVLSDRVLGPRDRVKLFPDDRGSIRVRGGAAYIASFHHARVFRWGSSHSPSFALLRVSLADLAVAGLLRDGVDVFTAELPPWTPAWRYASIALVKAVESGDAKQVGWLVPGDELDFGPEGVTTAAGDLSMFLKYFPERHWVVTGFEDDKRINLKPAFLSAEQAEVLRTERSDRPDTLTEAGEILAQFFPRCWRATVAKVLCHPGLTVIRRTALGQPRWRRGHLPYSWRPWSADPWSGGTP

SEQ ID NO: 43 - protein, 1045 aa, Acidovorax avenae
MQKEKPLAYRLALDLGSTSLGWAVLRLSAPGEPSAVIRAGSRIFSDGRNPKDGSSLAVTRRAARAMRRRRDRLLKRKARMLAALERHGFFPQDEAARKALEKLNPYGLRARGLESALKPEEFGRALFHLNQRRGFQSNRKTDRKDSDSGALKQAIGTLRAQMHESGCRTVGEWFWKVRMERKPEGVKGQGVRARYRETPFTTDEGKKRIDKRYDLYVDRAMVAQEFDALWAAQATFAPALFNEAARAELRDILLHQRKLRPVQPGRCTLVPEEPRALLALPSTQRFRIYQEVNHLRVLHDELREEALTLAQRDQIVALLERQAKVTFTAMRKALGFSALFNLEDAKRDGLKGNATTAALGKKDLFGPLWAGFDTALQDEIVTQLMTEESEPRLIAWLQEHTGVDEARAQAIANAGLPEGYGSLGRTALARIVPELQRDVITYDKAVQAAGFAHHSDLGFSFEHDADEVERIGERTIASTGEIKPVFAFKQLPYYGRALQRHVAFAKENPRNDEERYGKIANPTVHIGLNQVRVVVNALMCRYGRPTEVVIELARDLKQSREQKLEAQQRQADNQKRNARIRRSIAEVLGISEERVRTLDIQKWILWEELSHDAADRRCPYSGVQISASMLLGERVEIEHILPFSMTLDDSLNNRTVALREANRIKRNRTPWDARTDFEAHGWSYDGILQRAERMPQRKRHRFAPDGYERWLGEDKDFLARALNDTRYLSRVAAEYLRLVCPGSATRVIPGQMTALLRGKFGLNDVLGLDGEKNRNDHRHHAVDACVIGVTDQRMMQRFAQANAQAREDGLTRLVEDMPLPWPTYRAHVERAVRHIWVSHKPDHGFEGAMMEETSYGILRDGTIKQRRKADGSAGREISRLIRITEPSQPQRHGVDAEGRPLPYKGYVGGSNYCLEITVNDKGKWEGQVISTFDAYRIVREGGLRQLRHSTQGQNGQALAMRLVIGDSVRLEVDEQERVMRIVKINGNNGQVFMAPVHEANVDARNSDKNEAFAYTSKIAGSFQKTKARQVTISPIGELRDPGFKG

SEQ ID NO: 44 - protein, 1131 aa, Acidovorax sp.
  source 1..1131: note = Acidovorax ebreus
MAQHVFGLDIGIASVGWAILGEQRIIDLGVRCFDKAETAKEGDPLNLTRRQARLLRRRLYRRAWRLTQLSRLLKRKGLIADAKLFAKAPSYGDSAWELRRQGLDRLLTPLEWARVIYHQCKHRGFHWTSKAEEAKADSDAEGGRVKQGLAHTKALMQAKNYRSAAEMVLAEFPDAQRNKRGQYDKALSRVLLGEELALLFATQRRLGNPHASDFFEKLILGDGDRKSGLFWQQKPALSGADLLKMLGKCTFEKGEYRAPKASFSVERHVWLTRLNNLRIVVDGRSRPLNEAERQAALLLPYQTETSKYKTLKNAFIKAGLWGDGVRFGGLAYPSQAQIDAEKTKDPEDQFLVKLPAWHELRKAFKAAGHEALWQQISTPALDGDPTLLDQIATVLSVYKDGAEVVQQLRQLALPEPAASIAVLEKISFDKFSSLSLKALRRIVPLMQSGLRYDEAVAQIPEYGHHSQRIEPGAAKHLYLPPFYEAQRKYAGKGDHIGSMQFRDDADIPRNPVVLRALNQARKVVNALIREYGSPIAVNIEMARDLSRPLDERNKVKRAQEEFRDRNDRARSEFERDFGYKPKAAAFEKWMLYREQLGQCAYSQQPLDIQRVLDDHNYAQVDHALPYSRSYDDSKNNKVLVLTHENQNKGNRTAFEYLTSFPDGEDGERWRTFVAWVQGNKAYRMAKRNRLLRKNYGVDESKGFIDRNLNDTRYICKFFKNYVEEHLQLAARADGDTARRCVVVNGQLTAFLRARWGLTKVRGDSDRHHALDAAVVAACTHGMVKALADYSRRKEISFLQEGFPDPETGEILNPAAFDRARQHFPEPWTHFAHELKARLFTDDLAALREDMQRLGSYTTEDLGRLRTLFVSRAPQRRSGGAVHKETIYAQPESLKQQGGVIEKILLTSLKLQDFDKLLNPESNDHFVEPHRNERLYAAIRQRLEQFGGRADKAFGPDNLFHKPDKNNQPTGPVVRSIKLVRGKQTGIPIRGGLAKNDSMLRVDIFTKAGKFHLVPVYVHHRVTGLPNRAIVAFKDEDEWTLIDESFAFLFSVYPNDYVKVTLKKEQQSGYYSGADRSTGAMNLWAHDRAASVGKDGLIRGIGVKTALSVEKFNVDVLGRIYLAPPETRSGLA

SEQ ID NO: 45 - protein, 1056 aa, Actinobacillus minor
  REGION 1..1056: note = Actinobacillus minor NM305
MKALNYILGLDLGIASVGWAVVEIDQNELPIRLIDLGVRTFERAEVPKTGDSLALARRLARSSRRLVRRRAVRLLKAKRLLKQEGILQADDFHSSHLKPLPNNPWELRVKGLNHLLDRKEWAAVLLHLLKHRGYLSQRKNESKTDNKELGALLKGVSENRQLLQAQAFSTPAEIAIKKFQQEEGHIRNQRGAYSHTFDRNDLLAELRLLFQKQREFNNPYTSQSLEQAIAELLMWQKPALSGEAILKMLGKCTFEPSEYKAPKNSYSAEYFVWLTKLNNLRILENGADRGLTAEERQLLINQPFEKAKFTYAQARKLLELSDLAIFKGVRYGKDNAESATLMEMKAWHAIRKALESNGLKTEWNGLKTKPELLDKIGTAFSIYKTDEDISQYLNGELSPAVLNALLENLSFDKFIRLSLQSLAKILPLMEQGLRYDEACKQVYGDHYGKKEQLELRFLPKIPVEDIRNPVVLRTLSQARKVINGVVRLYGSPARIHIETGREVGKSFSERRDISKRQEENRNERQRAVEKFKEFFPHFVGEPKAKDILKMRLYEQQHGKCLYSGKELDLNRLLEKGYVEIDHALPFSRTWDDSFNNKVLVLASENQNKGNQTPYEWLNGKENAERWKLFQALVNGSRFPYSKKQRILTKYLDEDGFRERNLNDTRYVARFLCNFIEDNMQLVGQGKKRVFASNGQITALLRRSWGIQKVREDNDRHHAVDAVVVACSTRALQKKITDYVRYKEMNVFTGEKIDQETGEIIKFHFPEPWKFFRQEVEIRVFSETPAEDVVIALPDRPQANHEFIQPLFVSRAPTRKMTGQGHMETIKSAKRLAEGLSVSRVPLTQLKLKDLENMVNREREKALYEALKVRLEKFNNDPAKAFADPFYKKGGQQVKAVRVEQVQKSGVLVRQENGVADNASMVRVDVFIKGGKYFLVPIYTWQVAKGILPNRAATQGKEEEYWDIMDETAIFQFSLYQNDLIKLVTKKKTIFGYFNGLNRATSNINIKEHDLDKSKGKDGIYLEVGVKLALSLEKYQVDELGKNIQPCRSMKKRPPVR

SEQ ID NO: 46 - protein, 1054 aa, Actinobacillus pleuropneumoniae
  REGION 1..1054: note = Actinobacillus pleuropneumoniae serovar 10 str. D13039
MKLTPLNYILGLDLGIASVGWAVVEIDEQENPLGLIDVGVRTFDRAEVAKTGESLALARRLARSSRRLVKRRADRIKKVKRLLKSENILLSADEQLPNDVWQLRVKGLDQKLERQEWAAVLLHLLKHRGYLSQRKNESKSENKELGALRSGVAANHQILQSAEYRTPAEIAVKKFHVEEGHIRNQRGAYTHTFSRLDLLAEIELLFTRQTELGNPHTSAKLLENLTALLMWQKPALAGEAILKMLGKCTFEPTEYKAAKNSYSAERFVWLTKLNNLRILEQGAERALTDNERFALLDQPYEKAKFTYAQARTMLALPDEAIFKGVRYQGEDKKAVETKTILMEMKAYHQIRKALENADLKAEWNELKNNSELLDDIGTAFSLHKTDEDICRYLDGKLSESILNALLENLNFDKFIQLSLKALQQILPLMLQGQRYDEAVSAIYGDHYGKKSAEINRLLPTIPADEIRNPVVLRTLTQARKVINAVVRLYGSPARIHIETGREVGKSYQDRKKLEKQQEDNRKHRESAVQKFKEYFPNFVGEPKGKDILKMRLYELQQAKCLYSGKSLELHRLLEKGYVEVDHALPFSRTWDDSFNNKVLVLANENQNKGNLTPYEWLDGKNNSEPWQNFVARVQTSGFSHTKKQRILSHKLDEKGFIERNLNDTRYVVRFLCNFIADNMLLTGKGKRKVFASNGQITALLRGRWGLQKVRDDNDRHHALDAVVVACSTVAMQQKITRFVRYEEGNVFSGERIDRETGEIIPLHFPSPWAFFRENVEIRIFSENPKLELENRLPDYPQYNHEFVQPLFVSRMPTRKMTGQGHMETVKSAKRLDEGLSVLKVPLTQLKLNDLERMVNREREMALYESLKVRLEQFDNDPAKAFAEPFYKKGGALVKAVRVEQTQKSGVLVRDGNGVADNASMVRVDVFTKAGKYFLVPIYTWQVAKGILPNKAVTANVDEIDWLEMDESYQFIFTMYPNDLVKVKLKKEEFFGYYGGLDRATGAIVIKEHDLEKSKGRQGIYRIGVKLALSFEKYQVDELGKNIRPCRPTKRQHVR

SEQ ID NO: 47 - protein, 1062 aa, Actinobacillus succinogenes
MNLNYILGLDLGIASVGWAVVEIDEQENPQRLIDVGVRTFDRAEVLKTGESLALARRLARSSRRLVKRRAERIKKAKRLLKAENLLLSADEILPNEAWQLRVKGLDQKLERQEWAAVLLHLLKHRGYLSQRKNESKSENKELGALLSGVAINHQILQSAEYRTPAEIAVNKFQAEEGHIRNQRGAYTHTFSRLDLLAEMELLFQRQATLGNPHTSTKLLENLTALLMWQKPALAGEAILKMLGKCTFEPTEYKAAKNSYSAERFVWLTKLNNLRILEQGAERALTDNERFALLDQPYEKAKLTYAQVRTLLGLSDEAIFKGLRYQGEDKKAVETKTTLMEVKAYHQIRKALEGLDLKAEWNELKNNPALLDEIGTAFSLYKTDDDIHRYLDGKLSESVLNALLENLNFDKFIQLSLKALQQILPLMLQGQRYDEAVSAIYGDHYGKKSDEIDRLLPNIPTDEIRNPVVLRTLTQARKVINAVVRLYGSPARIHIETGREVGKSYQDRKKLEKQQEENRKQRENAVKKFKEYFPNFVGEPKGKDILKMRLYELQQAKCLYSGKSLELYRLLEKGYVEVDHALPFSRTWDDSFNNKVLVLANENQNKGNATPYEWLDGKNNSEGWQHFVARVQTSGFSYAKKQRVLIQELDEKSFIERNLNDTRYVARFLCNHIADNMLLTGKGKRKVFASNGQITALLRGCWGLQKVRENNDRHHALDAVVVACSTKSMQDKITKFVKYKEGRLFKDKKDGVYKGERINRETGEIISLHFPTPWKFFKENVEIRIFSENPKLELENRLPDYPQYNHEFVQPLFVSRMPTRKMTGQGHMETVKSAKRLDKGLSVLKVPLTQLKLSDLERMVNREREMALYEALKECLEQFGNDPAKAFAEPFYKKGGALVKAVRVEQTQKSGVLVRNGNGVADNATGSIVRVDVFTKGGKYFLVPIYTWQVAKGILPNKAVIQGKDESEWEEMDENAVFQFSMHKNDLIKVKTKKGEIFGYFNGLDRATGSIEIEEHDLEKSKGKNGSHRGLGVKTAFFLEKYQVDELGKNIRPCRPTKRQHVR

SEQ ID NO: 48 - protein, 1054 aa, Actinobacillus suis
MKLTPLNYILGLDLGIASVGWAVVEIDEQENPLGLIDVGVRTFDRAEVPKTGESLALARRLARSARRLVKRRADRIKKAKRLLKAENILLSADEHLPNDVWQLRVKGLDQKLERQEWAAVLLHLLKHRGYLSQRKNESKSENKELGALLSGVETNHQILQSAEYRTPAEIAVKKFHVEDGHIRNQRGAYTHTFSRLDLLAEMELLFQRQTDLGNPHTSAKLLENLTALLMWQKPALAGEAILKMLGKCTFEPTEYKAAKNSYSAERFVWLTKLNNLRILEQGAERALTDNERFALLDQPYEKAKFTYAQARTMLALPDEAIFKGVRYQGEDKKAVETKTILMEMKAYHQIRKALENADLKAEWNELKNNSELLDDIGTAFSLHKTDEDICRYLDGKLSESILNALLENLNFDKFIQLSLKALQQILPLMLQGQRYDEAVSAIYGDHYGKKSAEINRLLPTIPADEIRNPVVLRTLTQARKVINAVVRLYGSPARIHIETGREVGKSYQDRKKLEKQQEDNRKQRESAVKKFKEYFPNFVGEPKGKDILKMRLYELQQAKCLYSGKSLELHRLLEKGYVEVDHALPFSRTWDDSFNNKVLVLANENQNKGNLTPYEWLDGKNNSEHWQNFVARVQTSGFSHTKKQRILSHKLDEKGFIERNLNDTRYVARFLCNFIADNMLLTGKGKRKVFASNGQITALLRGRWGLQKVRDDNDRHHALDAVVVACSTVVMQQKITRFVRYEEGNVFSGERIDRETGEIIPLHFPSPWAFFRENVEIRIFSENPKLELENRLPDYPQYNHEFVQPLFVSRMPTRKMTGQGHMETVKSAKRLDEGLSVLKVPLTQLKLSDLERMVNREREVTLYESLKARLEQFGNDPAKAFAEPFHKKGGAVVKAVRVEQTQKSGVLVRDGNGVADNASMVRVDVFTKGGKYFLVPIYTWQVAKGILPNKAVTANVDEIDWLEMDESYQFIFTMYPNDLVKVKLKKEEFFGYYGGLDRATGAIVIKEHDLEKSKGKQGIYRIGVKLALSFEKYQVDELGKNIRPCRPTKRQHVR

SEQ ID NO: 49 - protein, 1105 aa, Actinomyces coleocanis
  REGION 1..1105: note = Actinomyces coleocanis DSM 15436
MDNKNYRIGIDVGLNSIGFCAVEVDQHDTPLGFLNLSVYRHDAGIDPNGKKTNTTRLAMSGVARRTRRLFRKRKRRLAALDRFIEAQGWTLPDHADYKDPYTPWLVRAELAQTPIRDENDLHEKLAIAVRHIARHRGWRSPWVPVRSLHVEQPPSDQYLALKERVEAKTLLQMPEGATPAEMVVALDLSVDVNLRPKNREKTDTRPENKKPGFLGGKLMQSDNANELRKIAKIQGLDDALLRELIELVFAADSPKGASGELVGYDVLPGQHGKRRAEKAHPAFQRYRIASIVSNLRIRHLGSGADERLDVETQKRVFEYLLNAKPTADITWSDVAEEIGVERNLLMGTATQTADGERASAKPPVDVTNVAFATCKIKPLKEWWLNADYEARCVMVSALSHAEKLTEGTAAEVEVAEFLQNLSDEDNEKLDSFSLPIGRAAYSVDSLERLTKRMIENGEDLFEARVNEFGVSEDWRPPAEPIGARVGNPAVDRVLKAVNRYLMAAEAEWGAPLSVNIEHVREGFISKRQAVEIDRENQKRYQRNQAVRSQIADHINATSGVRGSDVTRYLAIQRQNGECLYCGTAITFVNSEMDHIVPRAGLGSTNTRDNLVATCERCNKSKSNKPFAVWAAECGIPGVSVAEALKRVDFWIADGFASSKEHRELQKGVKDRLKRKVSDPEIDNRSMESVAWMARELAHRVQYYFDEKHTGTKVRVFRGSLTSAARKASGFESRVNFIGGNGKTRLDRRHHAMDAATVAMLRNSVAKTLVLRGNIRASERAIGAAETWKSFRGENVADRQIFESWSENMRVLVEKFNLALYNDEVSIFSSLRLQLGNGKAHDDTITKLQMHKVGDAWSLTEIDRASTPALWCALTRQPDFTWKDGLPANEDRTIIVNGTHYGPLDKVGIFGKAAASLLVRGGSVDIGSAIHHARIYRIAGKKPTYGMVRVFAPDLLRYRNEDLFNVELPPQSVSMRYAEPKVREAIREGKAEYLGWLVVGDELLLDLSSETSGQIAELQQDFPGTTHWTVAGFFSPSRLRLRPVYLAQEGLGEDVSEGSKSIIAGQGWRPAVNKVFGSAMPEVIRRDGLGRKRRFSYSGLPVSWQG

SEQ ID NO: 50 - protein, 1113 aa, Actinomyces georgiae
  REGION 1..1113: note = Actinomyces georgiae F0490
MSASSQNVERIRYKVGIDVGLRSIGFCAVQVDADDRPVKLLNTVVHVHDAGVSPADAKKADTRKLVSGVARRTRRLYRTRKRRLVDLDRQLDGLGWPLVDPARFADPREPWFAREKLVSGRVDDADERKELLSVALRHIAHHRGWRNPYSTVESLQADAPPSEFLQGLNQRVSEKLGTELDPGLTQGQLVAKLLHRFPNAKIRGPEGILRGKLHQSDNAGELRLICRTQGLDCHITEELVRLVFQAKSPKANKEMRKRIGRDQLPGQGAHIRAEKAHPVFQRFRIVAVLANLRIREAHVDRRLTAEEMRTLTDFLLGLAGSEQPTWEELADNLNIERHQLRGTAKASVDGAPALRFPPIDATTDRIYASKLKWLAEWWRQADEERRGYMVDALSNSGGSEDEPYLDDEIAEMLEQASEEDQAKLDSLHLPGGRASYCLDTLRRLTDAMLGGGLDLFEARKAVFHVDDDWAPPTDPIGAPVGNPPVDRVLKHVARWLEAATGRWGAPQTINIEHVREGLGSEKAARELTRMNDRRRRNNQKLVEEMGEKLGMSGRIRRSDRMRYEAIRRQNCECLYCGQPITYQTMEMDHIVPRAGAASTNSRSNLAAVCRRCNHQKGKLPFAVWAESQDSPAEVRLQDAVQRVRHWLRDAGMGQKELQALRVQVIARLKSKRPDEEFDGRSMESIAWMANELRARVEAQYRGSGTTVRVYRGALTAEARKASGFEGRVNLIGGRGKDRFDRRHHAMDALVIALMNQSVAQTLALRLNMRDSQWLTQSEQTWRQFHGAPGEAARKWEAWDRDMRDASDLFNLALDGGRIPITENVRLRVGNGRVHEDGVIRFKPEYEVKGKTIKGGEARLLGDSLPSEQIDRAETPALWTALTRLPEYDRKSGLPENPDRVIRVNGAVVQATDRIRFFGTPASVAVRGGYAKLGESIHHARIYRINGKTPKYAMIRVYTIDLMRLNHEDIFTAVLKPSTISMRCAEKKLKYAIAEGNAEQIGWLVEGDQLELDAAAYAKGVGADLMREYPMATCWRVAGFPDEAKLRLRPVLLAAEGMGEDAPKFMREVLENQGWRPAVNALLSPGSVRVVRRNVLGEPRFKSSGHLPTTVDLV

SEQ ID NO: 51 - protein, 1101 aa, Actinomyces naeslundii
  REGION 1..1101: note = Actinomyces naeslundii str. Howell 279
MWYASLMSAHHLRVGIDVGTHSVGLATLRVDDHGTPIELLSALSHIHDSGVGKEGKKDHDTRKKLSGIARRARRLLHHRRTQLQQLDEVLRDLGFPIPTPGEFLDLNEQTDPYRVWRVRARLVEEKLPEELRGPAISMAVRHIARHRGWRNPYSKVESLLSPAEESPFMKALRERILATTGEVLDDGITPGQAMAQVALTHNISMRGPEGILGKLHQSDNANEIRKICARQGVSPDVCKQLLRAVFKADSPRGSAVSRVAPDPLPGQGSFRRAPKCDPEFQRFRIISIVANLRISETKGENRPLTADERRHVVTFLTEDSQADLTWVDVAEKLGVHRRDLRGTAVHTDDGERSAARPPIDATDRIMRQTKISSLKTWWEEADSEQRGAMIRYLYEDPTDSECAEIIAELPEEDQAKLDSLHLPAGRAAYSRESLTALSDHMLATTDDLHEARKRLFGVDDSWAPPAEAINAPVGNPSVDRTLKIVGRYLSAVESMWGTPEVIHVEHVRDGFTSERMADERDKANRRRYNDNQEAMKKIQRDYGKEGYISRGDIVRLDALELQGCACLYCGTTIGYHTCQLDHIVPQAGPGSNNRRGNLVAVCERCNRSKSNTPFAVWAQKCGIPHVGVKEAIGRVRGWRKQTPNTSSEDLTRLKKEVIARLRRTQEDPEIDERSMESVAWMANELHHRIAAAYPETTVMVYRGSITAAARKAAGIDSRINLIGEKGRKDRIDRRHHAVDASVVALMEASVAKTLAERSSLRGEQRLTGKEQTWKQYTGSTVGAREHFEMWRGHMLHLTELFNERLAEDKVYVTQNIRLRLSDGNAHTVNPSKLVSHRLGDGLTVQQIDRACTPALWCALTREKDFDEKNGLPAREDRAIRVHGHEIKSSDYIQVFSKRKKTDSDRDETPFGAIAVRGGFVEIGPSIHHARIYRVEGKKPVYAMLRVFTHDLLSQRHGDLFSAVIPPQSISMRCAEPKLRKAITTGNATYLGWVVVGDELEINVDSFTKYAIGRFLEDFPNTTRWRICGYDTNSKLTLKPIVLAAEGLENPSSAVNEIVELKGWRVAINVLTKVHPTVVRRDALGRPRYSSRSNLPTSWTIE

SEQ ID NO: 52 - protein, 1144 aa, Actinomyces sp.
  REGION 1..1144: note = Actinomyces sp. ICM47
MSMIDSSENVPGIRYRVGIDVGLKSIGFCAVEVDRNDQPVRMLNSMVFIHDAGVDPNENKAAKSRKLTAGVARRTRRLYRTRHQRLVNLDRVLSKEFGWPLPDLTSFKDPREPWHVRAGLLEGYIADDEKRKEALSIALRHIARHRGWRNPYAKVETLLQPSEPSDFLKGLNDRISEELGRAFPADATPGQLVDTYLAHPDYVGRAGTPKLRGPQGILAGKLHQSDNAQEIRGICDVQRIEPAERDRLIRVVFEAKSPKGSAKERGLVGYDELPGQGRHVRAEKAHPAFQLFRMVSVLANLRIREGREERPLTPDELEDLVDFINQVSLKQEVTWQDLADKLRIERADLRGTAKASFDGSPVLRNPPTDVTTEKIMACKVKWLKEWWKEADDEQRGYMVDAFSNSGGSEDGTDVNDEVAELLEQATEDDQLEFEKISLPQGRAAYSLDSLRRLTDRMLRDGVDLHTARRLEFNVGDDWKPAVEPIGAPTGNPAVDRVLKQVSRWLHAATERWGEPTVINIEHARDGLGSERVARELMRENEKRRKANASAVAEMAAKLKLSGKVHRSDQIRYFALQRQNCQCLYCGAPITYTTAEMDHIVPRADGSSTNDRSNLAAVCRTCNHMKGKIPFAVWASSDKANQGVSLTGALERVNMWQRDSGMSPRQLKQLQREVCARLKSKKPDQEFDGRSMESVAWMAVELRTRIEGFYRSRDEESVPSVGVYRGQLTAEARRASGFESRVNLIGGRGKTRFDRRHHAMDALVIALMNPSVSRTLALRLNMRDAQRLTGVEETWKHFYGKPGEASKRFESWRESMLRGVELFNIALSDNAIPFVENIRLRVGSSVIHDATVHSFCPPKTPDGKQIITKGYGEQHSLGSAMPVELIDRAETPALWTALTRCPDFDPKKGLPENPQRTISVNGTRVGPTELVNFFEFSKSGPKACLKVRGGYVDLSGAIHHARIYRIAGKKTAYAMIRVFQVDLLRLKDHDVFTTPLKPSTISMRTAEPKIREALANGTATQIGWLVEGDELVIDTSKYSGGFIGEVLARYPEATSWRVAGFMTPAKLRIKPILLSKEGFVDETQAALLGVEVTSEAIQKTVDRPGWLPAVNVLFGAGGVRVIRRNCLGEERYHSSASLPVSMTLE

SEQ ID NO: 53 - protein, 1095 aa, Actinomyces sp.
  REGION 1..1095: note = Actinomyces sp. oral taxon 175 str. F0384
MPAHHLRVGIDVGTHSVGLATLRVDDQGTPIELLSALSHIHDSGIGKEGQKDHDTRKKLSGVARRTRHLLRNRRERLQQLDKVLVDLGFPIPKPEEYPDLSERTDPYRVWRVRARLVEETLPEELRGPAISMAVRHIARHRGWRNPYSKVESLLSPAEESSFMKALRKRIMTKTGEVLDDDITPGQAMAQVALTHKIYMRGPEGILGKLHQSDNANEIRKICARQGISSDVCKQLLRAVFKAESPRGSAVSRVAPDPLPGQGSFRRAPKCDPEFQRFRIISIVANLRISETKGENRPLTVDERRQVVAFLMEDSQADLTWVDVAEKLRVSRQALRGTAMLTADGERSAAQPPIDVTDQIMRKTKISALKTWWDKADAERRGAMVRYLYEGLEDSECAEVIAKLPEKDHAKLDSLHLPAGRAAYSRESLTALSDHMLETTNDLHEARKRLFGVDDSWAPPAEPVGAPVGNPSVDRTLKIVARYLSAVESIWGTPEVIHVEHVRDGFTSERTAEERDKANRSRHNDNQKAIEKIQHDYGKEGYISRGDIVRFHALKLQGSACLYCGTTIGYHTCQLDHIVPQAGPGSNNRRGNLVAVCERCNHSKSNTPFAVWAQKCGIPHVGVKEAISRVNGWVEHNHSTSSGDLTRLKKEVIARLRRTQKDPEIDERSMESVAWMANELHHRIAAAYPETTVMVYRGSITAAARKAASIESRINLIGEKGRKDRLDRRHHAVDASVVALMEPSVAKTLAERSSLRGEQRLTGQEQTWKQYTGLTVGARERFEAWRGHMHRLTELFNESLAADEVYVTQNIRLRLSDGSAHTVKASKLVSHRLGDGLTVQQIDRACTPALWCALTREIDFDEKNGLPAREDRVIRVHGQEISSADCIQVFSKRKKTKSDRDEAPFGAIAVRGGFVEIGSSIHHARIYRIEGEKPAYAMLRVFTHDLLSQRHGDLFSAVIPPQSISMRCAATELRQAISEGRATYLGWIVSGDELHIPVETFTTHKIGSFLKDYPNTTRWRICGYDSETMLILKPRILSAEGLNNSSDIAEYVIKNKGWRVAINKLAKVHPTVVRRDALGRPRHSSRSNLPVTWSIE

SEQ ID NO: 54 - protein, 1181 aa, Actinomyces sp.
  REGION 1..1181: note = Actinomyces sp. oral taxon 180 str. F0310
MLHCIAVIRVPPSEEPGFFETHADSCALCHHGCMTYAANDKAIRYRVGIDVGLRSIGFCAVEVDDEDHPIRILNSVVHVHDAGTGGPGETESLRKRSGVAARARRRGRAEKQRLKKLDVLLEELGWGVSSNELLDSHAPWHIRKRLVSEYIEDETERRQCLSVAMAHIARHRGWRNSFSKVDTLLLEQAPSDRMQGLKERVEDRTGLQFSEEVTQGELVATLLEHDGDVTIRGFVRKGGKATKVHGVLEGKYMQSDLVAELRQICRTQRVSETTFEKLVLSIFHSKEPAPSAARQRERVGLDELQLALDPAAKQPRAERAHPAFQKFKVVATLANMRIREQSAGERSLTSEELNRVARYLLNHTESESPTWDDVARKLEVPRHRLRGSSRASLETGGGLTYPPVDDTTVRVMSAEVDWLADWWDCANDESRGHMIDAISNGCGSEPDDVEDEEVNELISSATAEDMLKLELLAKKLPSGRVAYSLKTLREVTAAILETGDDLSQAITRLYGVDPGWVPTPAPIEAPVGNPSVDRVLKQVARWLKFASKRWGVPQTVNIEHTREGLKSASLLEEERERWERFEARREIRQKEMYKRLGISGPFRRSDQVRYEILDLQDCACLYCGNEINFQTFEVDHIIPRVDASSDSRRTNLAAVCHSCNSAKGGLAFGQWVKRGDCPSGVSLENAIKRVRSWSKDRLGLTEKAMGKRKSEVISRLKTEMPYEEFDGRSMESVAWMAIELKKRIEGYFNSDRPEGCAAVQVNAYSGRLTACARRAAHVDKRVRLIRLKGDDGHHKNRFDRRNHAMDALVIALMTPAIARTIAVREDRREAQQLTRAFESWKNFLGSEERMQDRWESWIGDVEYACDRLNELIDADKIPVTENLRLRNSGKLHADQPESLKKARRGSKRPRPQRYVLGDALPADVINRVTDPGLWTALVRAPGFDSQLGLPADLNRGLKLRGKRISADFPIDYFPTDSPALAVQGGYVGLEFHHARLYRIIGPKEKVKYALLRVCAIDLCGIDCDDLFEVELKPSSISMRTADAKLKEAMGNGSAKQIGWLVLGDEIQIDPTKFPKQSIGKFLKECGPVSSWRVSALDTPSKITLKPRLLSNEPLLKTSRVGGHESDLVVAECVEKIMKKTGWVVEINALCQSGLIRVIRRNALGEVRTSPKSGLPISLNLR

SEQ ID NO: 55 - protein, 1103 aa, Actinomyces sp.
  REGION 1..1103: note = Actinomyces sp. oral taxon 181 str. F0379
MTKINDDLRYRVGIDVGLKSIGFCAVEVDENDQPLRLLNSMVFVHDAGVDPNENKAAKSRKLTAGVARRTQRGTAQNRRRLAELDRALSEELNWPLPNLEDFEDSYEPWHTRAELVEHYIKDDAERAEALAIAIRHIARHRGWRNPYLSVDSLLTPQEPSKFLRGLNERVTQALGREFPADATPGQLICAYIDSPKYAETQGIRGDSGILSGKLHQFDNVGEIRKICEVQRLDHDVFKLLVRKVFFAKSPRGSAAGLVGHDQIPGQGKYIRAEKAHPDFQLFRIVAVLTNLRIREGKAERCLTPDELRGLVDYILEVQLKQQVTWADLADNLGIERTDLRGTARASFDGSPALRFPPTDVTAEKIMASKVKWLKDWWDKADSERRGFMVDALSNSGGSTGDNDIDDEVAALLEAATEDEQAELEKIQLPQGRAAYSLDSLRRLTKRMLEEGVDLHTARKEEFNVDDDWRPEPEPIEAPVGNPAVDRVLKQVARWLNMATDRWGVPDVINIEHTRDGLGSEKVARELLRESQKRQDLNQKDMDKMIRELGISGKARRSSLIKYQAIQRQNSMCLYCGTEIGFETAEMDHIVPRALSGSTNDRSNLAAVCRACNHQKGAVPFAVWATSGEAHAGVSLEDAIKRVRLWQKGPGMSPKQHKAFQNEVISRLKSRKPDEEFDGRSMESVAWMAVELRTRIDGYYRKVNSDSVPKVGIYRGQLTAEARKASGFENRVNLIGGKGKTRFDRRHHAMDALVIAMMNQSVSQTLALRVNMRESQRITGQEETWKNFYGKPGQASERFEKWREGMLRAVELFNIELAKNAIPFHENVRLRVGSSKVHDDTVRKFIHAKLGEALSVAMIDCAETPALWTALTRLPDFDPKDGLPEDLSREIYIHSRKITADEQLNFFNSPSACLKVRGGYVEIGSSIHHARVYRIDGKKTTYSMVRVFATDLVKMTHEDVFTTPLKPSTISMRTADPKIRKALADGTATQIGWLVEGDELQLETDKYSGGLIGEVLAEYPQLTSWRVAGFYGVTQLRLRPYMLAAEGIPSDASESLRKVIEGKGWLPAINALLSSGCVKVVRRNCLGEPRFNAKSSLPVSQLLR

SEQ ID NO: 56 - protein, 1120 aa, Actinomyces sp.
  REGION 1..1120: note = Actinomyces sp. oral taxon 848 str. F0332
MNAMKQYNAGIDVGINSVGFAAIEVDSKGLPLNILNNMVVLHDSGVDPGTAKTGATRLANSGTARRTRKLIARRRKRLQKLDRYIEVQGWPLVDFSSLPDPYTPWKIRAKLTQDRLEGEEQGRGLSIALRHMARHRGWRNPYEGVESLHSPKEASKQFKDLKDRVTKVSGVIFDEDATPAEVVCDIGLSPKQRLRSAPSAKYKEGATLADEPVGGKSKEGLLGGKLMQSDNANELRKIGIVQGLSNEKVNEIIDQVFASESPKGQAGKRAKKDELPGQEQYVRALRAHLAFQRFRIVAAVANLRILEAEPKHERLLSQSEKDKVIEFLMSADGDDGVTWSDVAEELGIERECLSGTAKRGADGERPSSFPPTNSTNISIVRSKVKPLIEWWRKASDDEQATLVTALSNADELTDDQPSAETVRQFLSSPDEQSQEKIDKISLPKGRAAYSVNSLERLTRRMLKDSVDLFEARKREFGVDNNWTPTPDSIGEPVGNPAVDRVLKIVNRWLLAVTRKWGPPKVVNIEHVRVGFTSAAQTRKYEEENKTNRERNLAILEELRDKFGTSGKIRREDITRFAALRRQNCQCAYCGEAITFFDCEMDHIVPRKGPGSTNTRNNLVAICERCNKSKSNMPFSLWAQNCDIPGVSVEAVIDRVRTWIKDPELNPKQYNNFKKDVIERLRKTVDDDAIDNRSIESVAWMATELADRIGSHFRTAGANTKVRVYRGWLTSEARKASGFEGKINLIGGRGKTRLDRRHHAMDAATIALMRQSVAQTLVERASIRESDRLRRVVSSSWKDYRGADRDKQFSYGSWLNSMNALAELFNRAIDADGIPVTQNLRLRLGNGEAHDATIRSLEKKRVGASWTIGEIDRASTPQLWLALTRQEDFDQNDGLPANASRELRVKNHWFHAEENVTLFPTKSAAIAVRGGYAEIGNTIHHARLYKLPGKKLTYGMIRVFAIDLLCAWHTDLFSSPLLPESISLRTAETKVRRAVEDGAAMYIGWLVDGDEIVLDPETKAFKSNKIGEYLCEFPGTKRWKVDGFPDKEKLRLRPLQLAGEGLPEDVSAGTEEILGPKGNGWRVAINALFKSSQLVVVRRTALGMVRKLSRRHLPLTTRLRG

SEQ ID NO: 57 - protein, 1114 aa, Actinomyces turicensis
  REGION 1..1114: note = Actinomyces turicensis ACS-279-V-Col4
MQFHFYMVYVTMKGMNDKDASQQLRYRVGIDVGTHSIGFCAVEVDESGMPIQLLNSMVHKHDSGIDPGGNDTATTRLAEAGVARRTRRLIRRRKKRLQELDAFIEECGWPLVDLATITDARSPWRIRAHLATEHIDDEAEQGKLLSIALRHMARHRGWRSPYARISSLHIQADPSEQLKALAQRVSEKTGISLTADQTPAQLISVYLDVFETGKLRGPEGILGGKLMQSDNANELRRIATVQGLDNDLLKKIIGFVFAAESPKGSAAKRVGKDVLPGAHGLRAEKAHPAFQQFRIVSIVQNLRIKEGTGLRALTSEETEIVVDFLNQAGLTEAPTWEEVADNLEIPRSHLKGTATEGFDGIAPSTRPPFDVTSQKILNGKLKKLSAWWKDADYDHRCAMVNALSNVGSDDEGSLADDDVREFLSDFTDEELEALDKVELPGGRAAYSVDSLEKLTNTMLSEGCDLHSARKIAFGVDDSWTPPAEPIGQPVGNPAVDRVLKQVARWISAATNQWGTPESVNIEHVRDALGSEKASREYQRSLQTRRIRNEKLFAEMRERLDIGGKPRRSELTRYLALQRQNCQCLYCGMPITYTDAEMDHIVPRKGAASTNTRENFAAVCRACNHQKSNLPFAVWAEKTERPGVSVKEAYKRVSDMRIEPGMNGRQMNEFRKAIRLRLTTKHADAEIDGRSLESVAWMANELRHRIEGFYRSAENDVTVRVFRGAVTAEGRRASGFESRVNLIGGKGKTRLDRRHHAMDALTIALMEPGIAQTIALRMNMRESQRVLGEQETWKSFTGGSDTARKRWEHWCEEMLRASELFNVFLAEDRIPICQNKRLRLGSSAVHKAIVQPFEASDKRIVSDAMPVELIDRASTPALWTALTRDPDFDPKEGLPANPSRTIRLHDKRLGPNETVEFFPTAAACLAIRGGYCEIGAGIHHARIFRISGKKTTYAMLRVYQCDLVRFQKENLLTVELPANTISVRTAVPKLREALAHGTAEQIGWLVVGDELKIDLSGFTTGQIETFNETYPQATRWEVTGFPTKTQLRLKPLLIASEGLADDVPDDIVKIVKGPGWWPAIDKLLKIGNVVLYRRDTHGKPRVVSHRSLPLSSKLQ

SEQ ID NO: 58 - protein, 1101 aa, Akkermansia muciniphila
MSRSLTFSFDIGYASIGWAVIASASHDDADPSVCGCGTVLFPKDDCQAFKRREYRRLRRNIRSRRVRIERIGRLLVQAQIITPEMKETSGHPAPFYLASEALKGHRTLAPIELWHVLRWYAHNRGYDNNASWSNSLSEDGGNGEDTERVKHAQDLMDKHGTATMAETICRELKLEEGKADAPMEVSTPAYKNLNTAFPRLIVEKEVRRILELSAPLIPGLTAEIIELIAQHHPLTTEQRGVLLQHGIKLARRYRGSLLFGQLIPRFDNRIISRCPVTWAQVYEAELKKGNSEQSARERAEKLSKVPTANCPEFYEYRMARILCNIRADGEPLSAEIRRELMNQARQEGKLTKASLEKAISSRLGKETETNVSNYFTLHPDSEEALYLNPAVEVLQRSGIGQILSPSVYRIAANRLRRGKSVTPNYLLNLLKSRGESGEALEKKIEKESKKKEADYADTPLKPKYATGRAPYARTVLKKVVEEILDGEDPTRPARGEAHPDGELKAHDGCLYCLLDTDSSVNQHQKERRLDTMTNNHLVRHRMLILDRLLKDLIQDFADGQKDRISRVCVEVGKELTTFSAMDSKKIQRELTLRQKSHTDAVNRLKRKLPGKALSANLIRKCRIAMDMNWTCPFTGATYGDHELENLELEHIVPHSFRQSNALSSLVLTWPGVNRMKGQRTGYDFVEQEQENPVPDKPNLHICSLNNYRELVEKLDDKKGHEDDRRRKKKRKALLMVRGLSHKHQSQNHEAMKEIGMTEGMMTQSSHLMKLACKSIKTSLPDAHIDMIPGAVTAEVRKAWDVFGVFKELCPEAADPDSGKILKENLRSLTHLHHALDACVLGLIPYIIPAHHNGLLRRVLAMRRIPEKLIPQVRPVANQRHYVLNDDGRMMLRDLSASLKENIREQLMEQRVIQHVPADMGGALLKETMQRVLSVDGSGEDAMVSLSKKKDGKKEKNQVKASKLVGVFPEGPSKLKALKAAIEIDGNYGVALDPKPVVIRHIKVFKRIMALKEQNGGKPVRILKKGMLIHLTSSKDPKHAGVWRIESIQDSKGGVKLDLQRAHCAVPKNKTHECNWREVDLISLLKKYQMKRYPTSYTGTPR

SEQ ID NO: 59 - protein, 1113 aa, Alcanivorax pacificus
  REGION 1..1113: note = Alcanivorax pacificus W11-5
MRYRVGLDLGTASVGAAVFSMDEQGNPMELIWHYERLFSEPLVPDMGQLKPKKAARRLARQQRRQIDRRASRLRRIAIVSRRLGIAPGRNDSGVHGNDVPTLRAMAVNERIELGQLRAVLLRMGKKRGYGGTFKAVRKVGEAGEVASGASRLEEEMVALASVQNKDSVTVGEYLAARVEHGLPSKLKVAANNEYYAPEYALFRQYLGLPAIKGRPDCLPNMYALRHQIEHEFERIWATQSQFHDVMKDHGVKEEIRNAIFFQRPLKSPADKVGRCSLQTNLPRAPRAQIAAQNFRIEKQMADLRWGMGRRAEMLNDHQKAVIRELLNQQKELSFRKIYKELERAGCPGPEGKGLNMDRAALGGRDDLSGNTTLAAWRKLGLEDRWQELDEVTQIQVINFLADLGSPEQLDTDDWSCRFMGKNGRPRNFSDEFVAFMNELRMTDGFDRLSKMGFEGGRSSYSIKALKALTEWMIAPHWRETPETHRVDEEAAIRECYPESLATPAQGGRQSKLEPPPLTGNEVVDVALRQVRHTINMMIDDLGSVPAQIVVEMAREMKGGVTRRNDIEKQNKRFASERKKAAQSIEENGKTPTPARILRYQLWIEQGHQCPYCESNISLEQALSGAYTNFEHILPRTLTQIGRKRSELVLAHRECNDEKGNRTPYQAFGHDDRRWRIVEQRANALPKKSSRKTRLLLLKDFEGEALTDESIDEFADRQLHESSWLAKVTTQWLSSLGSDVYVSRGSLTAELRRRWGLDTVIPQVRFESGMPVVDEEGAEITPEEFEKFRLQWEGHRVTREMRTDRRPDKRIDHRHHLVDAIVTALTSRSLYQQYAKAWKVADEKQRHGRVDVKVELPMPILTIRDIALEAVRSVRISHKPDRYPDGRFFEATAYGIAQRLDERSGEKVDWLVSRKSLTDLAPEKKSIDVDKVRANISRIVGEAIRLHISNIFEKRVSKGMTPQQALREPIEFQGNILRKVRCFYSKADDCVRIEHSSRRGHHYKMLLNDGFAYMEVPCKEGILYGVPNLVRPSEAVGIKRAPESGDFIRFYKGDTVKNIKTGRVYTIKQILGDGGGKLILTPVTETKPADLLSAKWGRLKVGGRNIHLLRLCAE

SEQ ID NO: 60 - protein, 1029 aa, Alicycliphilus denitrificans
  REGION 1..1029: note = Alicycliphilus denitrificans BC
MRSLRYRLALDLGSTSLGWALFRLDACNRPTAVIKAGVRIFSDGRNPKDGSSLAVTRRAARAMRRRRDRLLKRKTRMQAKLVEHGFFPADAGKRKALEQLNPYALRAKGLQEALLPGEFARALFHINQRRGFKSNRKTDKKDNDSGVLKKAIGQLRQQMAEQGSRTVGEYLWTRLQQGQGVRARYREKPYTTEEGKKRIDKSYDLYIDRAMIEQEFDALWAAQAAFNPTLFHEAARADLKDTLLHQRPLRPVKPGRCTLLPEEERAPLALPSTQRFRIHQEVNHLRLLDENLREVALTLAQRDAVVTALETKAKLSFEQIRKLLKLSGSVQFNLEDAKRTELKGNATSAALARKELFGAAWSGFDEALQDEIVWQLVTEEGEGALIAWLQTHTGVDEARAQAIVDVSLPEGYGNLSRKALARIVPALRAAVITYDKAVQAAGFDHHSQLGFEYDASEVEDLVHPETGEIRSVFKQLPYYGKALQRHVAFGSGKPEDPDEKRYGKIANPTVHIGLNQVRMVVNALIRRYGRPTEVVIELARDLKQSREQKVEAQRRQADNQRRNARIRRSIAEVLGIGEERVRGSDIQKWICWEELSFDAADRRCPYSGVQISAAMLLSDEVEVEHILPFSKTLDDSLNNRTVAMRQANRIKRNRTPWDARAEFEAQGWSYEDILQRAERMPLRKRYRFAPDGYERWLGDDKDFLARALNDTRYLSRVAAEYLRLVCPGTRVIPGQLTALLRGKFGLNDVLGLDGEKNRNDHRHHAVDACVIGVTDQGLMQRFATASAQARGDGLTRLVDGMPMPWPTYRDHVERAVRHIWVSHRPDHGFEGAMMEETSYGIRKDGSIKQRRKADGSAGREISNLIRIHEATQPLRHGVSADGQPLAYKGYVGGSNYCIEITVNDKGKWEGEVISTFRAYGVVRAGGMGRLRNPHEGQNGRKLIMRLVIGDSVRLEVDGAERTMRIVKISGSNGQIFMAPIHEANVDARNTDKQDAFTYTSKYAGSLQKAKTRRVTISPIGEVRDPGFKG

SEQ ID NO: 61 - protein, 1029 aa, Alicycliphilus sp.; identical to SEQ ID NO: 60

SEQ ID NO: 62 - protein, 1146 aa, Alicyclobacillus hesperidum
  REGION 1..1146: note = Alicyclobacillus hesperidum URH17-3-68
MAYRLGLDIGITSVGWAVVALEKDESGLKPVRIQDLGVRIFDKAEDSKTGASLALPRREARSARRRTRRRRHRLWRVKRLLEQHGILSMEQIEALYAQRTSSPDVYALRVAGLDRCLIAEEIARVLIHIAHRRGFQSNRKSEIKDSDAGKLLKAVQENENLMQSKGYRTVAEMLVSEATKTDAEGKLVHGKKHGYVSNVRNKAGEYRHTVSRQAIVDEVRKIFAAQRALGNDVMSEELEDSYLKILCSQRNFDDGPGGDSPYGHGSVSPDGVRQSIYERMVGSCTFETGEKRAPRSSYSFERFQLLTKVVNLRIYRQQEDGGRYPCELTQTERARVIDCAYEQTKITYGKLRKLLDMKDTESFAGLTYGLNRSRNKTEDTVFVEMKFYHEVRKALQRAGVFIQDLSIETLDQIGWILSVWKSDDNRRKKLSTLGLSDNVIEELLPLNGSKFGHLSLKAIRKILPFLEDGYSYDVACELAGYQFQGKTEYVKQRLLPPLGEGEVTNPVVRRALSQAIKVVNAVIRKHGSPESIHIELARELSKNLDERRKIEKAQKENQKNNEQIKDEIREILGSAHVTGRDIVKYKLFKQQQEFCMYSGEKLDVTRLFEPGYAEVDHIIPYGISFDDSYDNKVLVKTEQNRQKGNRTPLEYLRDKPEQKAKFIALVESIPLSQKKKNHLLMDKRAIDLEQEGFRERNLSDTRYITRALMNHIQAWLLFDETASTRSKRVVCVNGAVTAYMRARWGLTKDRDAGDKHHAADAVVVACIGDSLIQRVTKYDKFKRNALADRNRYVQQVSKSEGITQYVDKETGEVFTWESFDERKFLPNEPLEPWPFFRDELLARLSDDPSKNIRAIGLLTYSETEQIDPIFVSRMPTRKVTGAAHKETIRSPRIVKVDDNKGTEIQVVVSKVALTELKLTKDGEIKDYFRPEDDPRLYNTLRERLVQFGGDAKAAFKEPVYKISKDGSVRTPVRKVKIQEKLTLGVPVHGGRGIAENGGMVRIDVFAKGGKYYFVPIYVADVLKRELPNRLATAHKPYSEWRVVDDSYQFKFSLYPNDAVMIKPSREVDITYKDRKEPVGCRIMYFVSANIASASISLRTHDNSGELEGLGIQGLEVFEKYVVGPLGDTHPVYKERRMPFRVERKMN

SEQ ID NO: 63 - protein, 1052 aa, Aminomonas paucivorans
  REGION 1..1052: note = Aminomonas paucivorans DSM 12260
MIGEHVRGGCLFDDHWTPNWGAFRLPNTVRTFTKAENPKDGSSLAEPRRQARGLRRRLRRKTQRLEDLRRLLAKEGVLSLSDLETLFRETPAKDPYQLRAEGLDRPLSFPEWVRVLYHITKHRGFQSNRRNPVEDGQERSRQEEEGKLLSGVGENERLLREGGYRTAGEMLARDPKFQDHRRNRAGDYSHTLSRSLLLEEARRLFQSQRTLGNPHASSNLEEAFLHLVAFQNPFASGEDIRNKAGHCSLEPDQIRAPRRSASAETFMLLQKTGNLRLIHRRTGEERPLTDKEREQIHLLAWKQEKVTHKTLRRHLEIPEEWLFTGLPYHRSGDKAEEKLFVHLAGIHEIRKALDKGPDPAVWDTLRSRRDLLDSIADTLTFYKNEDEILPRLESLGLSPENARALAPLSFSGTAHLSLSALGKLLPHLEEGKSYTQARADAGYAAPPPDRHPKLPPLEEADWRNPVVFRALTQTRKVVNALVRRYGPPWCIHLETARELSQPAKVRRRIETEQQANEKKKQQAEREFLDIVGTAPGPGDLLKMRLWREQGGFCPYCEEYLNPTRLAEPGYAEMDHILPYSRSLDNGWHNRVLVHGKDNRDKGNRTPFEAFGGDTARWDRLVAWVQASHLSAPKKRNLLREDFGEEAERELKDRNLTDTRFITKTAATLLRDRLTFHPEAPKDPVMTLNGRLTAFLRKQWGLHKNRKNGDLHHALDAAVLAVASRSFVYRLSSHNAAWGELPRGREAENGFSLPYPAFRSEVLARLCPTREEILLRLDQGGVGYDEAFRNGLRPVFVSRAPSRRLRGKAHMETLRSPKWKDHPEGPRTASRIPLKDLNLEKLERMVGKDRDRKLYEALRERLAAFGGNGKKAFVAPFRKPCRSGEGPLVRSLRIFDSGYSGVELRDGGEVYAVADHESMVRVDVYAKKNRFYLVPVYVADVARGIVKNRAIVAHKSEEEWDLVDGSFDFRFSLFPGDLVEIEKKDGAYLGYYKSCHRGDGRLLLDRHDRMPRESDCGTFYVSTRKDVLSMSKYQVDPLGEIRLVGSEKPPFVL

SEQ ID NO: 64 - protein, 1361 aa, Anaerococcus tetradius
  REGION 1..1361: note = Anaerococcus tetradius ATCC 35098
MGNYYLGLDIGTNSVGWAVTDENYNIERFKKKNMWGIRLFDEAKTAESRRIHRQARRMRQRKIQRLNLLMELFDVEISKVDESFFIRKKESDLHYEDKSQDSRYALFNDKEFNDKDYHNKYPTIFHLIMDLIENDEKKDIRLLYLACHYLIKNRGHFIFEGQKFDVNSSLNNNINKLKSHLDQFYNICLDFDNDKLIEILVNQNLNISEKSKKIKELLRKTNLEVGIANLIAGGSIKLSNMFDDDELKNLDYNSLSFKNSNFDEGRELFEEVLEDRFELVEILKDIHDASVLETMLSSASISPDGGKYISSSMINSYNKHKRDLKLLKKIIKKYKKSEYDNIFRDENIKNNYLSYTRTGINKNKKVQAEDNTDSDGFYKYIVKILKDIKENDSDEDIKYILSEIDKKNFVPKQRTKENSVIPYQLREIELRKIIDNQSKYHKFLNEVDEKGISVKEKIISLLTFRIPYYIGPLNPSYNEEKNFTTSWVKRLAKGKVTPWNFEDMVDIDASREAFIENKLNKCSFLLDETVLPKDSLLYQEYMVLNELNNLKINGQSINTDLKKSIYEELFKKYKKVTRKRLISYIKEKENMSGDIVITGIDGDFKQGLKSYIAFKDIIGEKIDDDIYRKEVEKIIRDISLYGDDKSFIQKKIKNENKLDLSDDQISKIAKLKFKDWGRFSKKLLVGIKASDKNTGEIDNIIGFMRNYNYNIMQLMANVFTFKDEIEKLNSKYYTDEKINIDYLDDLYLSSPAKRMLWQSFQIVDEIKNIKNSDPKKIFIEMARSKEDKPTRKMSRKSRLEKLYTDSKKQFIKLFGPDEYDKLNNEIKNKSESDFRWDNLYLYYTQFGRCMYSLDPIDLEELSNKNLYDQDHIYPKSKIYDDSIENRVLVKKQLNLDKSNEYPIPDRVLNKDKNKLLAFWKMLNEKELIGDKKYARLIRKSPFTDEELGDFIARQLVETRQATKETANMLKRLCPDSKIVYVKAKNVSDFRRKFDILKCRSINDLHHAHDAYLNIVVGNVFDTKFTSNPLNFIKNNSKNRSYNLEKIYDYDVIRNEKIAWLAERKEENQDGSIATVLKNLSKNDIRVTRRTYIKCEDLFDENIVRKGNGKFPIKENNNKSDTNKYGGYSGIKNAYFVLLEDEKHNRILEAIPSFIYKKEKNGEKGSVINYLQNILGIKSAKILRDKIKIGSLLKIDKFPYNLAGKSGNGILISGGVQLILDKNTSKYIKKIENYKYKLDENKDYQINIFDKLSKEENIKLFDLFVDKFENSIYKNRVNIKLKEIKLARPKFEHLSIEEQIKTLTQMLILFGRENNAVNLEYIGLPKNTGKTKINKKINNKDIKIINQSITGLYETEEDLANI

SEQ ID NO: 65 - protein, 1552 aa, Anaerophaga sp.
  REGION 1..1552: note = Anaerophaga sp. HS1
MFSQRNNPYCELLQNVKQLYKEKFGKTNQVDNSIIYGFMKRILGLDLGTNSIGWALVENDENDRKGKIIGMGSRIIPMDMSELDNFNKGASISKTAERTRLRMTRRLRERHLLRRARLHRILNIMGFLPEHYRNSIDFIDKKGCFFEGQEPKIAYKPDKNSEQFCFLFTSSFHEMLEDFRKFQPELIQNRKKVPYDWTIYYLRKKALTQKISKEELAWIILNFNTKRGYYHLRGEDEDNQDNKKIKEFRALKVVNVTEREGANSSGKKWYDMELENGWVYSRQSNLPPNLEGKTIELIVSYTLDNNGNIKKDKNGKEKYSLSMPGEEDWNLVKIKTENDLKTSKKSVGEYIYDHLLKNPDQKIRGKLISTIERKFYKEELSRILKTQMNFYEELKNRELYQKCVEELYPNNKSHQQTLLQKDFIHLIVEDIIFYQRPLKSKRAFVNNCPLEYRVYVDKKSGELIKSGVKCIPKSHPLFQEFRLWQYVRNLRIYERERMVNGRLMVNVDVTNELLPDEEHIVRLFDLLNDRKSFKQDDVLRFVGIKSPKDRKRYSWNYPEDKELPGNETRHLILAWLKKVDGVPEDWLDPEKLKALWHLLYSVTDREEIIKGLHSFAKKYELPDTFVEHFKKIPRLEREYGSFSEKAIKKLLPLMRMGKYWKAEEIPADLLEKAQKIIDAEADDRISDEVREKLLHLKDISQLKGLPLWQASYLVYGRHSETGEVVKWRTSEDLEKYILQFKQHSLRNPVVEQVILEALRVVKDIWEHYGEGKEGFFNEIHVEIGRELKNPADKRKKITSQIQENENTNLRIKALLEELFNDPSVKNVRPYSPAQQEILRIYEDGVLNGQKEIPDDILKISKMARPSKSQLVKYKLWLEQKYRSPYTGEIIPLSQLFTSAYEIEHIIPQARYFDDSFSNKVICEAEVNREKGHQLAFEFITKRGGDEIELNFGKKVTILNVEEYQKFVKDHYGRSLRSLSKMRKLLMEDIPDDFIDRQLNDSRYISKVVRNLLSNIVRAEDENSLVSKHLITCTGGVTTRLKHEWGLNDVWNELITPRFVRLNKMGKEKFGEWINKKGKQVFQIQMPLELQKGFNKKRIDHRHHALDALVVACASRSHVNYLNNDSARANASETRYDLRNKLCYKDKTDSNGNYRWKFYKPWESFTEEAKNRLAGTVVSFKSNRRIMTRSSNRYFKWVDTSEGKKKKLVRQIKGDNQAIRKPLHKDTVLGKVSLRKEKKVSLSKAIDLWESIVDKPLKKRIQSLREQGYDKKLLLKYFKDRNNQFNGQDISRVNIYFFDNNLAARRVTLDASFNSEKRIDGITDSGIKKILYAHLQNEKYHGKKDEKGNEISPYELAFSPEGLEEMNANIKKLNGGKPHCPIYKVRLAETIGEKFKLGEKGNKNKKYVEAAKGTNLFFAVYVDEKGVRSFETIPFSVALERRKQKLAVVPEENENKEKLLFYLSPNDLVYVPDEDEKLIDYRQLSINPTRIYKMVSSSGTQCFFIPHFVASPIVQTMELGPNNKSERAWDGQMIKNVCYKLSVDRLGNVKIEK

SEQ ID NO: 66 - protein, 1515 aa, Anaerophaga thermohalophila
  REGION 1..1515: note = Anaerophaga thermohalophila DSM 12881
MKRILGLDLGTNSIGWALVESDEEQKSGKIQGIGSRIIPMDQNELDNFNKGNTVSQTAERTRLRMVRRLRERHLLRRERLHRVLKEIGFLPEHYLEQIDFTEKPGGFLPGKEPKIAYKPDNFKDKYDFLFQDSYHEMLSDFQDKNPEFIQKRKKVPQDWTIYYLRKKALTAKITKEELAWIILNFNQKRGYYQLRGEDEDVAKNTKKEEFHALKVVKVKEREDSEGASGKWYDIELENGWVYPRQSNIRPDWEGKILELIVTYNLDKDGNIKTDKEGNEKRSFRMPNKDDWTLRKKRTENEIEKSGKTVGEYIYDNLLDAPDLKIRGKLVSTIERKYYRSELEQILTAQKKYHPELSNSELFNKCISNLYPNNDIHRKALLSKDFVHLIINDIIFYQRPLKSKRSTVSNCPLEYRVYVDKVTGEKKKVPLKCIPKSHPLYQEFRLWQYVKNLRLFEKERFENGRLLTNVDVTEQFLPDEDKYVELFEFLNGRKTFKQDDILKFAGIKSAKDRVKYYWNYPQEKEYPGNETRYLIESRLKKIENVPDEWLNYEKIEELWHLLYSVTDKVEIEKGLQSFAAKYQLPDLFVEVFKGFPRMEREYGAFSKKAIKKLLPLMRMGKYWKLENINPDLIEKVQKIIDGEADDNINDGIRERFSEINEMSDLRGMPLWKASYLVYGRHSEAAEVIRWRTSADLDQYIKDFKQHALRNPIVEQVVLEALRVVKDVWNYFGEGREKFFDEIHVEIGRDLKNPADKRQKIANQIQENENTNLRIKALLVELFNDPEVQNVRPYSPVQQQLLKIYEDGVLNAERDIPDDIQKISRMANPTRNQLIRYKLWLEQKYRSPYTGEIIPLNKLFTSEYEVEHIIPRARYFDDSFSNKIISEAEVNRKKDRMLAFEFIKKLGGSTIDLNYGKKVSVLTVEEYQQFVKDHYGINPHSRLKMQKLLMDEIPESFIERQLNDSRYISKMVRNLLSNIVREENENSPVAKQLITCSGSITNTLKQEWGLNDVWNTIITPRFERLNKMGEQKYGEWVNKEGKPVFQIQMPLELQKGFNKKRIDHRHHALDALIVASATRSHVNYLSNEAAKTNAKDTRFDLRNRLCYKEKRGQNRNFTWRFYKPWNTFTEDAKNALNDIVVSFKSNHRVINKSTNRYFKWENLPGGMKKKRLVRQEKGDNWAIRQSLHKDTVLGKVSLRKVKPVSLSVALDSWNNIVDKALKKKIRSLKDQGYDKKLMLKYFKDRRNEYNGENISRVNVYYFDEEMAARRVDLDTSFNSEKRIEGITDSGIKKIIYAHLKNEKYHGQKDDKGKDISPYELAFSPEGIAEMNANIKQLNGGKPHCPIYKVRLAEPVGEKFQLGETGNKTEKLVEVAKGTNLFFGVYANDEGVRSFATVPFYLAVEREKQGLPAVPQENENGDQLLFWLSPNDLVYVPSEEDAHFANPKQIELDNSRIYKMVSSTGTQCFFIPHFVATPIVQTIELGPNNKSERAWDGQMIKKVCYKLSVDRLGNVEIE

SEQ ID NO: 67 - protein, 1168 aa, Azospirillum lipoferum
MARPAFRAPRREHVNGWTPDPHRISKPFFILVSWHLLSRVVIDSSSGCFPGTSRDHTDKFAEWECAVQPYRLSFDLGTNSIGWGLLNLDRQGKPREIRALGSRIFSDGRDPQDKASLAVARRLARQMRRRRDRYLTRRTRLMGALVRFGLMPADPAARKRLEVAVDPYLARERATRERLEPFEIGRALFHLNQRRGYKPVRTATKPDEEAGKVKEAVERLEAAIAAAGAPTLGAWFAWRKTRGETLRARLAGKGKEAAYPFYPARRMLEAEFDTLWAEQARHHPDLLTAEAREILRHRIFHQRPLKPPPVGRCTLYPDDGRAPRALPSAQRLRLFQELASLRVIHLDLSERPLTPAERDRIVAFVQGRPPKAGRKPGKVQKSVPFEKLRGLLELPPGTGFSLESDKRPELLGDETGARIAPAFGPGWTALPLEEQDALVELLLTEAEPERAIAALTARWALDEATAAKLAGATLPDFHGRYGRRAVAELLPVLERETRGDPDGRVRPIRLDEAVKLLRGGKDHSDFSREGALLDALPYYGAVLERHVAFGTGNPADPEEKRVGRVANPTVHIALNQLRHLVNAILARHGRPEEIVIELARDLKRSAEDRRREDKRQADNQKRNEERKRLILSLGERPTPRNLLKLRLWEEQGPVENRRCPYSGETISMRMLLSEQVDIDHILPFSVSLDDSAANKVVCLREANRIKRNRSPWEAFGHDSERWAGILARAEALPKNKRWRFAPDALEKLEGEGGLRARHLNDTRHLSRLAVEYLRCVCPKVRVSPGRLTALLRRRWGIDAILAEADGPPPEVPAETLDPSPAEKNRADHRHHALDAVVIGCIDRSMVQRVQLAAASAEREAAAREDNIRRVLEGFKEEPWDGFRAELERRARTIVVSHRPEHGIGGALHKETAYGPVDPPEEGFNLVVRKPIDGLSKDEINSVRDPRLRRALIDRLAIRRRDANDPATALAKAAEDLAAQPASRGIRRVRVLKKESNPIRVEHGGNPSGPRSGGPFHKLLLAGEVHHVDVALRADGRRWVGHWVTLFEAHGGRGADGAAAPPRLGDGERFLMRLHKGDCLKLEHKGRVRVMQVVKLEPSSNSVVVVEPHQVKTDRSKHVKISCDQLRARGARRVTVDPLGRVRVHAPGARVGIGGDAGRTAMEPAEDIS

SEQ ID NO: 68 - protein, 1068 aa, Bacillus cereus
  REGION 1..1068: note = Bacillus cereus BAG4X12-1
MRYVLGLDIGIASCGWAVINQEKERIEDLGVRIFDKAENPKDGKSLAAPRRDARSTRRTLRRKKHRMQRIKILLVKQGLLFKTELNHLYESATEFDVWNLRLDALERKLHPKEFARVLIHLAKRRGFKSNRKETTLSENGQILESISENQQIMEQQNYRTVGEMILKDKKFENHKRNKDGTYIGTVTRQQLQDEIQMIFHTQRLYKNDYATEEFESSYLEIWASQRPYASKDQIEKMIGYCTLEPKEKRTPKASWSFQYFVALQTINNLRLISKDKIEELSFEEKKQIMNLALEKPIVKYIDIRKLLSIPNDFQFNSLSYSADTVDTTLENKRCIELKEYHSINKVYKQVYGKNTPNLLPIDYDTIAYGLTIFKDDKDILEYLQNKYVNAKGKPIKNLAKKTYDDTFIQALLNLNFTKMGHLSFKALKNIIPFLEEGLSYDKACEKAGYNFKGTSYTERTKYLPVIPQNTNPVVHRALSQTRKVINAIIKKYGSPNAIHIETARELSKTFQERKEIDSRYQDNSKKNEHAIHKLKELGNINPSGINIVKFKLWSEQDGRCMYSGKYIEPHRLFEEGYTEVDHILPYSRSLDDSYNNKILTLGTENQRKGNKTPYEYMGNTSIWDEFETRVQSNKKINFKKQQKLLLQNFSYAREQEFIERNLNDTRYATIYLTSLIQQHLIFSESSSKKKVRTVSGIITSHLRSRWGFNKDRKEGHIHHALDAVIVAVTSNHMIQRVTKYYKLKELNKNLQAKQLPFPEPWEGFRLELEARISPNTQQYLKGIHFKNYADVNLSDIKPIFVSRMPKRSITGELHQETIRKFLGYNEKGKVLTAIKTKLEDIPFDANGDFPMYGKETDLYTYNAIKERYLSHEKDKRKSFQEPLYKPTKSGEIGPLIKSIKIMDTRTIVNPVNQGKGVVYNSKIARTDVFKKEDKYYLIPIYTIDLLKNILPHKAITAGKGYEDWTTIDSSFTFLFSLFPNDLIQIVPSKNKTIKARTTVSKKEILLPSLTGYFKGVHSGTAGITVETHDGSVIANVGSKQLLLFEKYQVDVLGHYTKIKEEKRMGMAI

SEQ ID NO: 69 - protein, 1078 aa, Bacillus cereus
  REGION 1..1078: note = Bacillus cereus BAG4X2-1
MRYVLGLDIGIASCGWAVINQEKERIEDLGVRIFDKAENPKDGKSLAAPRRDARSTRRTLRRKKHRMQRIKVLLVKHGLLSKTELDHLYESATEVDVWNLRLDALERKLYPKEFARILIHLAKRRGFKSNRKETTLSENGQILESISENQQIMEKQNYRTVGEMILKDKKFENHKRNKNGTYVGTVTRQQLQDEIQMIFHAQRLYKNDYATEEFESSYLEIWASQRPYASKDQIEKMIGYCTLEPKEKRAPKASWSFQYFVALQTINNLRLISKDRIEELSFEEKKQIMNLALEKSIVKYIDIRKLLSVPNEFQFNSLSYSADTVDTAVESRKCIELKEYHSINKVYKQIYGENALNLLPKYYDTIAYGLTIFKDDKDILEYLQNKYVNAKGKPISNFANKTYDDTFIQALLNLNFTKMGHLSFKALKNIIPFLEEGLSYDKACEKAGYNFKGTSYTEQTKYLPVIPQNTNPVVHRALSQTRKVINAIIKKYGSPNAIHIETARELSKTFQERKEIDSMYQDNSKKNEHAIHKLKELGNINPSGINIVKFKLWNEQDGRCMYSGKYIEPHRLFEEGYTEVDHILPYSRSLDDSYNNKTLTLGTENQRKGNKIPYEYMGNTSIWNDFETRVQSNKKINKKKQQKLLLQHFSYAREQEFIERNLNDTRYATIYLSSLIQQHLIFSESSRKKKVHTVSGIITSHLRSRWGFNKDRKEGHIHHALDAVIVAVTSDHMIQRVTKYYKLKELNRNLQAKRMPFPEPWEGFRLELEARISPNTQQYLKGLRFKNYADVNLSEIKSIFVSRMPKHSITGELHQETIRKFIGYNEKGKVLTAIKTKLEDIPFDANGDFPMYGKESDLYTYNAIKERYLSHKKDKRKSFQEPLYKPTKSGGIGPLIKSIKIMDTRTIVNPVNQGKGVVYNSKIARTDVFKKEEKYYLIPIYTIDLMKNILPQKAITAGKGYEDWTTIDPSFTFLFSLFPNDLIQIVPSKNKTIKARTTVSKKEVLLPSLTGYFKGVHSGTAGITVETHDGSVIANVGSKQLLLIEKYQVDVLGNYTKIKEEKRIGLTTYNDNKKIAAC

SEQ ID NO: 70 - protein, 1069 aa, Bacillus cereus
  REGION 1..1069: note = Bacillus cereus Rock1-15
MNYDIGLRIGITSCGWSIINKDLERIEDLGVRVFEKAENPDGTASAAPRREARKSRRKHRRKKHRIERIKRLIVQHDLLSKKELDSLYLSPFNIDVWNLQVEALERKLDNREFARVLIHLVQRRGFQTIRKSVEIQEEGKLLENVSENERIMKVNGYKTVGEMFSKHEKFTHHKRNKDGSYTSVVTRSLLLKEIKTIFNSQRILGNVFSTQKLESDYLYIWGSQRPTLTYEQLMSMVGNCIYEKKEKRAPKTSWAFQYFSLLQKINKLKVSDDNTLRKLSKEERDIVIELAFKKKNVSFVDIRKALKLNDNTKFNHLTYSHVVETKKVEKATFIELKGYHLIKKQLKDRNVELTQELQPKDYDAIAAASTFFKNDIEFRDYLRNQYLDSNGKRKSNIANKVFEDKVIAAVFELNFSKVCHLSFKSLYKLIPHLEKGLDYKEAILCAGYNFRDENKRDKKLFLPVIQQETNPVVHRALTQARKVINAIIREYGSPNTIRFVVANDLAKTYKQRKELESTLKKNRAENEKIKTKLLSMGIINPTGMDIVKYKLWYEQSGICLYTGRQMELSSLFKPGYSIVNHIIPYNRSFDDTYHNRVLTLTETKYEKGNKIPFEYFGAEETCWNEYEKRVSTSKKIHDKKREKLLIRNFDIEYENEMISNNVFDTHYIGSYFEKYIDEHLQFKKSTKKQKVFSIHGNMVAHLHSRWGFNKNSREIYLNHAVDAAIVAVLTDQLIRNIADYYRRDNILEQKGSLKFPEPWKSFSIELEARISPQVRDLIKKLNLDSYLDVDILHIKPVFISKKPRRKVNGEAHKSTIRSLIGINEIGKTVTCIKTRLEDIPFDENGDFPMYGKDTDKYTYTAIKERYLEFNKDKEKAFSTPLYKLKRNGEPGNQIKSVKIIDTRNIVNKVNQGKGIAYNSNIIRVDVFSRDQKYYVVPIYLRDFIKGSLPNKIITAAKGFMQWPETDNSYTFLFSIFPNDLIKVVPKEGKFIKAKNENKENINLTEILGYFKGLDSSTGAFTLESHDGSLLARGIGTKNLLLIEKYQVDVLGRYNKVGNEERQDIKIQQN

SEQ ID NO: 71 - protein, 1088 aa, Bacillus smithii
  REGION 1..1088: note = Bacillus smithii 7_3_47FAA
MNYKMGLDIGIASVGWAVINLDLKRIEDLGVRIFDKAEHPQNGESLALPRRIARSARRRLRRRKHRLERIRRLLVSENVLTKEEMNLLFKQKKQIDVWQLRVDALERKLNNDELARVLLHLAKRRGFKSNRKSERNSKESSEFLKNIEENQSILAQYRSVGEMIVKDSKFAYHKRNKLDSYSNMIARDDLEREIKLIFEKQREFNNPVCTERLEEKYLNIWSSQRPFASKEDIEKKVGFCTFEPKEKRAPKATYTFQSFIVWEHINKLRLVSPDETRALTEIERNLLYKQAFSKNKMTYYDIRKLLNLSDDIHFKGLLYDPKSSLKQIENIRFLELDSYHKIRKCIENVYGKDGIRMFNETDIDTFGYALTIFKDDEDIVAYLQNEYITKNGKRVSNLANKVYDKSLIDELLNLSFSKFAHLSMKAIRNILPYMEQGEIYSKACELAGYNFTGPKKKEKALLLPVIPNIANPVVMRALTQSRKVVNAIIKKYGSPVSIHIELARDLSHSFDERKKIQKDQTENRKKNETAIKQLIEYELTKNPTGLDIVKFKLWSEQQGRCMYSLKPIELERLLEPGYVEVDHILPYSRSLDDSYANKVLVLTKENREKGNHTPVEYLGLGSERWKKFEKFVLANKQFSKKKKQNLLRLRYEETEEKEFKERNLNDTRYISKFFANFIKEHLKFADGDGGQKVYTINGKITAHLRSRWDFNKNREESDLHHAVDAVIVACATQGMIKKITEFYKAREQNKESAKKKEPIFPQPWPHFADELKARLSKFPQESIEAFALGNYDRKKLESLRPVFVSRMPKRSVTGAAHQETLRRCVGIDEQSGKIQTAVKTKLSDIKLDKDGHFPMYQKESDPRTYEAIRQRLLEHNNDPKKAFQEPLYKPKKNGEPGPVIRTVKIIDTKNKVVHLDGSKTVAYNSNIVRTDVFEKDGKYYCVPVYTMDIMKGTLPNKAIEANKPYSEWKEMTEEYTFQFSLFPNDLVRIVLPREKTIKTSTNEEIIIKDIFAYYKTIDSATGGLELISHDRNFSLRGVGSKTLKRFEKYQVDVLGNIHKVKGEKRVGLAAPTNQKKGKTVDSLQSVSD

SEQ ID NO: 72 - protein, 1069 aa, Bacillus thuringiensis
MNYDIGLRIGITSCGWSIINKDLERIEDLGVRVFEKAENPDGTASAAPRREARKSRRKHRRKKHRIERIKRLIVQHDLLSKKELDSLYLSPFNIDVWNLRVEALERKLDNREFARVLIHLVQRRGFQTIRKSVEIQEEGKLLENVSENERIMKVNGYKTVGEMFSKHEKFTHHKRNKDGSYTSVVTRSLLLKEIKTIFNSQRILGNVFSTQKLESDYLYIWGSQRPTLTYEQLMSMVGNCIYEKKEKRAPKTSWAFQYFSLLQKINKLKVSDDNTLRKLSKEERDIVIELAFKKKNVSFVDIRKALKLNDNTKFNHLTYSHVVETKKVEKATFIELKGYHLIKKQLKDRNVELTQELQPKDYDAIAAASTFFKNDIEFRDYLRNQYLDSNGKRKSNIANKVFEDKVIAAVFELNFSKVCHLSFKSLYKLIPHLEKGLDYKEAILCAGYNFRDENKRDKKLFLPVIQQETNPVVHRALTQARKVINAIIREYGSPNTIRFVVANDLAKTYKQRKELESTLKKNRAENEKIKTKLLSMGIINPTGMDIVKYKLWYEQSGICLYTGRQMELSSLFKPGYSIVNHIIPYNRSFDDTYHNRVLTLTETKYEKGNKIPFEYFGAEETCWNEYEKRVSTSKKIHDKKREKLLIRNFDIEYENEMISNNVFDTHYIGSYFEKYIDEHLQFKKSTKKQKVFSIHGNMVAHLHSRWGFNKNSREIYLNHAVDAAIVAVLTDQLIRNIADYYRRDNILEQKGSLKFPEPWKSFSIELEARISPQVRDLIKKLNLDSYLDVDILHIKPVFISKKPRRKVNGEAHKSTIRSLIGINEIGKTVTCIKTRLEDIPFDENGDFPMYGKDTDKYTYTAIKERYLEFNKDKEKAFSTPLYKLKRNGEPGNQIKSVKIIDTRNIVNKVNQGKGIAYNSNIIRVDVFSRDQKYYVVPIYLRDFIKGSLPNKIITAAKGFMQWPETDNSYTFLFSIFPNDLIKVVPKEGKFIKAKNENKENINLTEILGYFKGLDSSTGAFTLESHDGSLLARGIGTKNLLLIEKYQVDVLGRYNKVGNEERQDIKIQQN

SEQ ID NO: 73 - protein, 1509 aa, Bacteroides coprophilus
  REGION 1..1509: note = Bacteroides coprophilus DSM 18228
MKKTLGLDLGTNSIGWAVINSNIDSEGKEKLVGISSCGSRIIPMDATTLGDFGKGNTKSPVAERTRLRGIRRLLERSLLRRERLHRVLSVMGFLPEHYASQLDRYGKFLPETEPKLAWYKDDSGRYQFLFQKSFHEMLEDFRQHQPELVAGEKKIPYDWTIYYLRKKALSQEITKEELAWILLNFNQKRGYYQLRGEEEQEENNKSVEYHALKVVSVEDSGERKGKDIWYNVTLENGWVYRRASNIPLDWTGKVKEFVVTTELDDAGNPKKDKEGNVKRSFRAPKEDDWGLLKTRTQAQIDESGKTVGTYIYESLLCMPNQKIRGKLVRTIERKYYKDELRQILVKQSEFHAALQDHNLLLSCIEELYPNNEAHRRLLSASSFIYFLIEDILFYQRPLKSQKGLIDNCPYESHIYKDKKDGSLHHVPLKCVSKSHPLFQEFRLWQFLSNLRIYQRERMMDGSLKLDVDVTREFLPSEEDYVKLFDWLNERKEISQKFLLAYKPFGLKKNEQANYRWNYVEDKSYPCNETRAEIKSRLSKAGVPEEFLTEEKEEALWHILYSISDKKELTKALGTFAAKNCLNESFVEVFAKIPPFESNYAAYSLKAIRKLLALMRMGKYWNEQAIDRQTRDRIEKILTGEYDETIRSRVREKAMLLTDISSFRGLPLWLACYIVYDRHSESKELVKWETPADIDHFLSKFKQNSLRNPIVEQVITESLRTVRDIWKQEGKIDEIHVELGREMKNPAKERARITAQVQENENTNLRIKALLAEFMNPEFEIENVHPYSPGQQEILRIYEDGVLSGIAEKDLPDDITAILKKFRENDVKKRPTTSEVLRYKLWLEQRYRSPYTGRVIPLGKLFTPAYEIEHVIPQSRYFDDSISNKVICESAVNKLKDNCLGYEFIKKHSGEMVELGNGETVPVFSVEEYERFVKESYFGNSKKMKKLLLEDIPDSFIERQLNDSRYISRVVTSLLSNLVCEEGEQDGLSKNVIVCTGGITDRLKKDWGVQEVWNRIILPRFLRLNEITGRTDFTSTSVNGHLLPALPLYLQKGFNKKRIDHRHHAMDAIVIACANRNIVNYLNNSSARKNSEISRYDLQRLLCEKVKTDANGNYKWILRKPWETFTQDVYAALTNIVVSFKQNLRVINRTTNYYQHYNEAGEKRMIPQTKGDRWAIRKPMHKDTVYGEVNLRKEKTLPLRDVVKNPSIVVDKSLKNKLYELLKSQYDLKAIAKYFETHQDVWADVNLKKIKVYYFTKETNERFFATRKSLDPSFDQKKIEEEVTDTGVQKILLHHLQQNNNDPDMAFSPDGIDRMNQNMTILNDGKWHQPIYKVRTYEKADKFAVGESGNKAKKFVEAAKGTNLFFAVYESVQEDEAIGKQVCKRTFATIPLNEVIKRKKQGLPAAPEDLNGNLPKFVLSPNDLVYLPTEEERNSSRIIQPLDRERIYKMVSSSGSQCFFIKVFVANSIWDKNEYSSLNKMERAITNEMIKEICVPIKIDRLGNVSLIQI

SEQ ID NO: 74 - protein, 1504 aa, Bacteroides coprosuis
  REGION 1..1504: note = Bacteroides coprosuis DSM 18011
MKKVLGLDIGTNSVGWAVVNQNDKGEFLSIEKIGSRIIPMSQDVMDKFGAGQTESSTAQRTQYRGVRRLRERSLLRRERLHRVLHILHFLPQHYDAAIGWNKKENKTYGKFLPGVEVNIPWVATDQGHQFIFMDSYAEMLKDLKQHQPHLFEKSSTPVPLDWTIYYLRKKALTQAISKEELAWILLNFNQKRGYYQLRGEEVEDNTKREEFYALKVVKVELDKDNTSAKTWYKVHLENGFIYPCPSDTPIDSWVGMVKDFIVTTTLEKDGSEKRTADGEIKRSFRAPKEDDWTLLKKKTESELEKSGKQVGAFIYDTLLSNPDQKIIGGLIKTIERKYYKKELEQILETQQKFIAELSDKKLFQACAEELYPLNDSHRENLLERDFKHLFVQDIIFYHRPLKTKKSLISNCTYEYRTFYKNGEKQISPIKCIAKSNPLFQEFRVWQFVQNLRILQRQRSEGDSIKYNVDVTAEFLKDENDIANLFTWLNERKVIKQDQLLKSYFKLKVNKETKELDYRWNYVDDKNKEYPCNATRTHILSFLEKCKEEKRIEDDRFVYSLWHLLYSVVEPIELRGALAKFAEREHLHPSFVDVFAQFPPLEKEYGSYSEKAIKRLLPLMRMGDYWHEDKIDVKTKQRIQRIIDGEADDDITHRSREKVENLRSITDFKGLPLWKAGYVVYNRHSESGELTKWKTPHELSNYIQNEFKQYSLRNPIVEQIVLETLRVVHDLWVKHGDFSEIHLELGRDIKNSSDKRKRMAERQQENENSRQRVLEMLIDLKKEAAFADLNPYSPSQQEKLRIVEDGVLRSNIEIPKDIEKITKSAKPTSRELTKYRLWLDQKYRSPYTGQPISLAQLFTSKYEIEHVIPQAKYFDDSFTNKVICESEVNKEKGSMLAHEFILKNGGSTVNVGGRQVQVLKNDAYVELINRLYGKNNPVKAKKLLAEDIDEVVGDFSERQLNDTRYISRVVQKLLSNIVREEDEQESTSKHVIGCSGQVTTALKKDWGLNDIWNKIIQPRFERLNEMTATEDYGVWQSPNHFQIRVPEEIQKGFTKKRIDHRHHAMDALVIACATRSHINYISNRSGQDRNAKFETTRTDLRSKLCYKENSSGNNYNYIFNKPWDTFTQDAHRALENIVVSHKQNLRVLTKTNNYTQFINKDGKKDLQKQVKGDHFAVRKPMHQETIYGRVSIRSIKEVALKKALENWKQIVDRTLKDKIRELIGAYGKYDAQTILKYFKDRDYKFNNLKINRVEVYEYDHNCAAVRKSIGDDLTIKQIERITDESIRKILMNHLSNYDDNLKEAFSPEGLMEMNKNIKELNGGKNHQPIYKVRLFEDLGSKFPLGVSHNNPDKYAIAAKGTNLFFGIYEDQEGKRMFDSIPLNIVIDRLKEKKSPVPETYNESKLKFHLSPNDLVYVPTDEEQKQPELVDVDHLSDEQKGRVYKAVSFTGNRAFFVNHRVSKVIHDYVEFGTKNKIENDDDKRSLKHICWKLKVNRLGEITDVKR

SEQ ID NO: 75 - protein, 1504 aa, Bacteroides dorei
  REGION 1..1504: note = Bacteroides dorei DSM 17855
MKNIVGLDLGTNSIGWAVVNGSVNDDGSEQLVKIQASGSRIIPMDAAMIGDFNKGNSISQTAERTRLRGVRRLSERYLLRRERLHRILDILGFLPFHFAQDLDRHGKIVKGKEPKLAWRKNEAGQFEFIFQDSFKEMLEDFKLNYPNLITDDKKVPYDWTIYYLRKKGLTSKISKEELAWILLNFNQKRGYYQLRGEEEEENKDKLVEFYALKVVAVEDSGEKKGKDIWYNVHLENGWVYRRTSNMSLDWVGKTKEFIVTTDLEKDGTPKKDKEGNVKRSFRAPKEDDWSLVKKKTEADIDQTHKTVGAYIYDTLLGNPSQKIRGRLVRTIERKYYKEELKLILEKQKEFHLELQDRALYAACIEELYPINEAHRNNVGNRDFTYLFLEDILFYQRPLKSKKSLIDNCPYEENQGLDKETGEIKSFPVKCIAKSHPLFQEFRLWQFIINLRIYRKDLAQDVDVTNELLKTEEDYVALFDWLNGKKEIDQKAFLKYPVFGLKKEIENYRWNYVQDKPYPCNETRSLMLARLEKCDISIEFLTKENEEALWHILYSVEDKNEIVKALQKFADKHDLNASFVDVFQKFPPFKKEYGSYSAKAIKKLLPLMRMGKYWSENSIDKGTRERIDKIITGEYDEKIENRVREKAIHLADVSDFKGLPLWLVCYIVYGRHSEAKEIIQWKSPADIDSYLRSFKQHSLRNPIVEQIIIETLRVVRDIWKQVGNIDEIHVELGREMKNPADKRKKMTQQMSENENTNLRIKYLLTEFLNPEYEVENVRPYSPSQQDILRIYEEGVLNSVSDLPEEISDILKKFTETDLKKRPSRSEVLRYKLWLEQKYRSPYTGEVIPLGKLFTPAYEIEHVIPQSYYFDDSFSNKVICEAEVNKLKSNLLGHEFIVKHHGEIVELPFGKKVRIFTVDEYEQFVKDNYSRTRSKMKKLLMDDIPEEFVTRQLNDSRYISKVVKSLLSNIVREKGEEEAISKNVIPCTGGVTDRLKKDWGINEVWNKIILPRFQRLNELTGTNKFTTKNVGIQEIPTMPLELQKGFNKKRIDHRHHAMDAIIIACANRNIINYLNNKSATAKAELSRYDLQKMLCDKAKTDNNGNYKWVIRKPWASFTQDTYLALENIIVSFKQNLRVINKATNRFLHYNEEGKKIFVKQGKGDNWAIRKSMHKDTVFGEVNLRRIKTVALNEAMKNPQSIVVKDFKRKLLELWNLGFDAKRIKKYFEDNRETWSDINLSKIEVYYFSKDTKDRFFATRKPLDTSFDRKKIENNITDTGIQKILLRHLELKDNNPDIAFSPDGIDEMNRNIIQLNNGKYHQPIIKIRWYEQADKFAVGQTGNKSSKFVEAAKGTNLFFAVYESNILDKKTNTIIKKRNYATIPLNVAIERQKQGLPVAPEDENGNDPIFVLSPNDLVYLPTDDELANGIIAQPLDRGRIYKMVSSSGEQCFFIKHIVANVLVDKFEFSPLNKMERALTGEMIKMICIPIKVDRLGNVLESSSSYKK

SEQ ID NO: 76 - protein, 1509 aa, Bacteroides eggerthii
  REGION 1..1509: note = Bacteroides eggerthii 1_2_48FAA
MKTILGLDLGTNSVGWAVINSVIKEQAERIWIEMAGSRIIPMDAAVLGDFDKGNSISQTSERTRLRGARRLRERQLLRRERLHKVLNILGFLPNHYLEYIDFEKHPGKFLADAEPKLAWVKDEQGKYTFLFQAAFDEMLADFAIHQPSLVSGDKKIPYDWTIYYLRKKALTEMISKEELAWILLNFNQKRGYYQLRGEEEEDNAGKSVEFYALKVLTVEATDEKKGRDVWYNVHLENGWIYRRSSSVPLDWEGQVKEFIVTTDLNPDGTPKLDKYGEVKRSFRAPKEDDWMLIKKRTEADIANTHKTVGAYIYDTLLQKPQQKIIGKLVKTVERKLYRDELSLILQKQCAFHAELQDRALYARCVEALYPSNEVRRKNIANRDFVYLLMDDILFYQRPLKTKKSLIANCPYEENEYVDRETGEIKKTPLKCIAKSHPLFQEFRLWNFLSNIRIYQKEKEINGTLHLDVDVTAEFLKTEDDYVALFDWLNSRKEIEQKTFLKYPKFGLKKEISNYRWNYVEDKQYPCNETRHAILSSLEKANVCIDFLSNEKEVALWHILYSVSDKQEIEKALRTFAAKNGLDESFVEAFKKFPPFKSEYGAYSAKAIKKMLPLMRCGKYWDVSSIDDTTKERIKKIVTGEYDERISVKVRDKVMNLSDISCFRRLPLWLACYIVYNRHSEDKEAVKWESPADIDAYLASFKQHSLRNPIVEQVITETLRVVRDIWKQVGRIDEIHIELGREMKNPADKRKRMTAQILENENANLRIKALLAEFMNPEYEIENVRPYSPSQQEILRIYEDTVLHAEDQLPEEIDAILKKFNSSKVPTKSEFLRYKLWLEQKYRSPYTGELIPLGKLFTAAYEIEHVIPQSRYFDDSFSNKVICESAVNKLKDNQLGYEFIKNHHGQKVEVGFGKSVEIFSVDSYERFVKEQYAKSAVKMKKLLMDDIPEQFIERQLNDSRYISKVIKGLLSNIVREKNDSGEYEPEAVSKNIVVCTGSVTDRLKRDWGMNDVWNSIVYPRFERLNSLTDTQSFGHWENKSGKKVFQTELPLEYQKGFSKKRIDHRHHAMDAIVIACATRNHVNYLSNESASRNAKISRYDLQRLLCDKNRTDDNGNYKWVIKKPWDTFTQDAREVLSKIVVSLKQNLRIINKTTNVYRHLDATGNRVYEKQKTGDSWAIRKPMHKDTVFGAVNLRKVKVVRLSVALDTPAMIVDKRVKNKVFELLSYKYDKKRIEKYFKENAFLWKELDLAKVAVYYFTEATTEPLVAVRKPLDSTFNEKKIKESVTDTGIQKILLNHLCTKEGKPDLAFSAEGIEEMNRNLLQLNNGKSHQPIYKVRVYEPRGNKFSVGVLGNKGTKWVEAAKGTNLFFAIYITEDGKRTYETIPLNVVIEREKQGLVPVPDRNKKGDKLLFWLSPNDLVYLPTEEEREFGRINEPIDRGRIYKMVSCTGNEGHFIPANVANPIVPVIELGSNNKAQRAWTNEMIKDICIPIKVDRLGHIIEVKYRIDE

SEQ ID NO: 77 - protein, 1526 aa, Bacteroides faecis
  REGION 1..1526: note = Bacteroides faecis MAJ27
MKKILGLDLGTNSIGWAVLNAADDNSLKYIEAAGSRIIPMDAAILGDFDRGNSISQTAERTRIRGMRHLRERYLLRRARLHRILNLLGFLPFHYAQDIDRYGNFSADMEPKIAWCKNLEGELEFIFIESFNEMLEDFRKNQPELVADNKKVPYDWVIYYLRKKALEKKISKEELAWILLNFNQKRGYYQLRGEDDDESMKTAKTRQYFDKQIIKNIIDTNQTYKGQRILIVELQNGDKGKIFKKEIPDWIGQEKNIIVTVDIDKDGNDKYEESGSLSCRFKIPTDAEWESEWKLIKMKTQKDLDESNKTVGTYIYDSILQNPTQKVRGKLVRTIERKYYKAELKQILEKQTEFHSELQDKDLYIECLNELYSNNDTHRNAITDRDFVYLFMNDILFYQRPLKSKKSLIDNCPYERNIYIDKETGEIKYSPIKCIAKSHPLFQEFRLWKFISSIRIYQRESVVEVVDKQLDLFSSQSTSVQKLVTDVDVTDKFLTCENDYVALFEWLNKKKIIDQKEFLKYRPFGLKGDIDNYRWNYVEDKSYPCNETHAMILTYFAKAGISEDILTKEMEEALWHILYSVEDRQEITKALRTFASKYHLSDSFVKVFSNIPPFKKEYGSYSAKAIKKLLSLMRMGKYWSEDAIDVNTRERIDKIVTGEYDEKIRDRVREKTIRLNDIRHFRALPDWLACYVVYDRHSETREITEWKSPEEIDEYIRNFKQHSLRNPIVEQVITETLRTVRDIWKQVGCIDEIHVELGREMKNPADKRKRITSQIIENENANLRVKALLTEFVNSEFEIENVRPYSLSQQDILRIYEDGVLNSVAEVPGDIAGILKKFNENDAKKRPTTSEILRYKLWLEQKYRSPYTGEMIPLSKLFTSAYEIEHVIPQSRYFDDSFSNKVICEAEVNKLKDNALGYEFIKKHHGEKVELGFGKIVEIFSVSVYEQFVKDNYSRNRGKMKKLLMDEIPEQFIERQLNDSRYISKVVKTLLSNVVREKAEQEAVSKNVIVCTGGVTDRLKKDWGINDVWNKIVLPRFLRLNELTNSTNFTAKNAAGNEIPAMPLELQKGFNKKRIDHRHHAMDAIVIACANRNIVNYLNNESASRKAKISRHDLQAILCDKVRTDDKGNYQWRVKKPWDTFTQDVYVALENIIVSFKQNLRVINKTSNYYWHYENGKKVLVKQVKGDSWAIRKPMHKDTVFGEVNLRKVKSVSLNEALKNPQFIVEKDLKRQLLSLLQQNFDIKKIKKYFEEHKDIWSDISLSKMNIYYFTKETKDRYFATRKPLDASFDKKKIESCITDTGIQQILLRHLELKENDPERAFSPDGIDEMNRNIIQLNKGKGHHPIAKVRVYEKADKFEVGQRGNKSSKFVEAAKGTNLFFAVYETEYPDEKTNSIVRKRNYATIPLNIAIERQKRGLSTAPEDEKGNVPSFVLSPNDLVYLPTSEDIVNGHITQPIDKSRIYKMVSSSGSQCFFIKHNIANIIVDKYEFSPLNKMERAISNEMIKEICIPVKVDRLGNIVKLGKSE

SEQ ID NO: 78 - protein, 1509 aa, Bacteroides fluxus
  REGION 1..1509: note = Bacteroides fluxus YIT 12057
MKTILGLDLGTNSVGWAVINSVIKEQAERIWIEMAGSRIIPMDAAVLGDFDKGNSISQTSERTRLRGVRRLRERQLLRRERLHKVLNILGFLPNHYLEYIDFEKHPGKFLSDAEPKLPWVKDEQGKYTFLFQAAFDEMLADFAIHQPSLVSGDKKIPYDWTIYYLRKKALTEMISKEELAWILLNFNQKRGYYQLRGEEEEDNAGKSVEFYALKVLTVEATDEKKGRDVWYNVHLENGWIYRRSSSVPLDWEGQIKEFIVTTDLNPDSTPKLDKYGEVKRSFRAPKEDDWMLIKKRTEADIANTHKTVGAYIYDTLLQKPQQKIIGKLVKTVERKLYRDELSLILQKQCAFHAELQDRTLYARCVEALYPNNEVQRRNIANRDFVYLLMDDVLFYQRPLKTKKSLIANCPYEENEYVDRETGEIKKAPLKCIAKSHPLFQEFRLWNFLSNIRIYQKEKEINGTLHLDVDVTAEFLKTEDDYVALFDWLNSRKEIEQKTFLKYPKFGLKKEISNYRWNYVEDKQYPCNETRHAILSRLEKANVCIDFLSNEKEVALWHILYSVSDKQEIEKALRTFAAKNGLDESFVEAFKKFPPFKSEYGAYSAKAIKKLLPLMRCGKYWDVSSIDDTTKERIKKIVAGEYDERIAVKVRDKVMNLSDISCFKRLPLWLACYIVYNRHSEDKEAVKWESPADIDAYLASFKQHSLRNPIVEQVITETLRVVRDIWKQVGRIDEIHIELGREMKNPADKRKRMTAQILENENANLRIKALLAEFMNPEYEIENVRPYSPSQQEILRIYEDMVLHAEDQLPEEIDAILKKFNSSKVPTKSEFLRYKLWLEQKYRSPYTGELIPLGKLFTAAYEIEHVIPQSRYFDDSFSNKVICESAVNKLKDNQLGYEFIKNHHGQKVEVGFGKSVEIFSVDSYERFVKEQYAKSAVKMKKMLMDDIPEQFIERQLNDSRYISKVIKGLLSNIVREKNDSGEYEPEAVSKNIVVCTGSVTDRLKRDWGMNDVWNSIVYPRFERLNSLTDTQSFGHWENKSGKKVFQTELPLEYQKGFSKKRIDHRHHAMDAIVIACATRNHVNYLSNESASRNAKISRYDLQRLLCDKSRTDDNGNYKWVIKKPWDTFTQDAREVLSKIVVSLKQNLRIINKTTNVYRHLDATGNRVYEKQKTGDSWAIRKPMHKDTVFGAVNLRKVKVVRLSVALDAPTMIVDKRVKNKVFELLSYKYDKKRIEKYFKENAVLWKELDLARVAVYYFTEATTEPLVAVRKPLDSTFNEKKIKESVTDTGIQKILLNHLCTKEGKPDLAFSAEGIEEMNRNLLQLNNGKRHQPIYKVRVYEPRGNKFSVGVLGNKGTKWVEAAKGTNLFFAIYITEDGKRTYETIPLNMVIEREKQGLAPVPDKNEKGDKLLFWLSPNDLVYLPTEEELEFGRINEPIDRGRIYKMVSSSGNQCFFIPQSISNAIIPTKELGANNKAERSWDGAMIKNICIPVKVDRLGRIIEVKYRINE

SEQ ID NO: 79 - protein, 1436 aa, Bacteroides fragilis
MKRILGLDLGTNSIGWALVNEAENKDERSSIVKLGVRVNPLTVDELTNFEKGKSITTNADRTLKRGMRRNLQRYKLRRETLTEVLKEHKLITEDTILSENGNRTTFETYRLRAKAVTEEISLEEFARVLLMINKKRGYKSSRKAKGVEEGTLIDGMDIARELYNNNLTPGELCLQLLDAGKKFLPDFYRSDLQNELDRIWEKQKEYYPEILTDVLKEELRGKKRDAVWAICAKYFVWKENYTEWNKEKGKTEQQEREHKLEGIYSKRKRDEAKRENLQWRVNGLKEKLSLEQLVIVFQEMNTQINNSSGYLGAISDRSKELYFNKQTVGQYQMEMLDKNPNASLRNMVFYRQDYLDEFNMLWEKQAVYHKELTEELKKEIRDIIIFYQRRLKSQKGLIGFCEFESRQIEVDIDGKKKIKTVGNRVISRSSPLFQEFKIWQILNNIEVTVVGKKRKRRKLKENYSALFEELNDAEQLELNGSRRLCQEEKELLAQELFIRDKMTKSEVLKLLFDNPQELDLNFKTIDGNKTGYALFQAYSKMIEMSGHEPVDFKKPVEKVVEYIKAVFDLLNWNTDILGFNSNEELDNQSYYKLWHLLYSFEGDNTPTGNGRLIQKMTELYGFEKEYATILANVSFQDDYGSLSAKAIHKILPHLKEGNRYDVACVYAGYRHSESSLTREEIANKVLKDRLMLLPKNSLHNPVVEKILNQMVNVINVIIDIYGKPDEIRVELARELKKNAKEREELTKSIAQTTKAHEEYKTLLQTEFGLTNVSRTDILRYKLYKELESCGYKTLYSNTYISREKLFSKEFDIEHIIPQARLFDDSFSNKTLEARSVNIEKGNKTAYDFVKEKFGESGADNSLEHYLNNIEDLFKSGKISKTKYNKLKMAEQDIPDGFIERDLRNTQYIAKKALSMLNEISHRVVATSGSVTDKLREDWQLIDVMKELNWEKYKALGLVEYFEDRDGRQIGRIKDWTKRNDHRHHAMDALTVAFTKDVFIQYFNNKNASLDPNANEHAIKNKYFQNGRAIAPMPLREFRAEAKKHLENTLISIKAKNKVITGNINKTRKKGGVNKNMQQTPRGQLHLETIYGSGKQYLTKEEKVNASFDMRKIGTVSKLAYRDALLKRLYENDNDPKKAFAGKNSLDKQPIWLDKEQMRKVPEKVKIVTLEAIYTIRKEISPDLKVDKVIDVGVRKILIDRLNEYGNDAKKAFSNLDENPIWLNKEKGISIKRVTISGISNAQSLHVKKDKDGKPILDENGRNIPVDFVNTGNNHHVAVYYRPVIDKRGQLVVDEAGNPKYELEEVVVSFFEAVTRANLGQPIIDKDYKTTEGWQFLFSMKQNEYFVFPNEKTGFNPKEIDLLDVENYGLISPNLFRVQKFSLKNYVFRHHLETTIKDTSSILRGITWIDFRSSKGLDTIVKVRVNHIGQIVSVGEY

SEQ ID NO: 80 - protein, 1436 aa, Bacteroides sp.
MKRILGLDLGTNSIGWALVNEAENKDERSSIVKLGVRVNPLTVDELTNFEKGKSITTNADRTLKRGMRRNLQRYKLRRETLTEVLKEHKLITEDTILSENGNRTTFETYRLRAKAVTEEISLEEFARVLLMINKKRGYKSSRKAKGVEEGTLIDGMDIARELYNNNLTPGELCLQLLDAGKKFLPDFYRSDLQNELDRIWEKQKEYYPEILTDVLKEELRGKKRDAVWAICAKYFVWKENYTEWNKEKGKTEQQEREHKLEGIYSKRKRDEAKRENLQWRVNGLKEKLSLEQLVIVFQEMNTQINNSSGYLGAISDRSKELYFNKQTVGQYQMEMLDKNPNASLRNMVFYRQDYLDEFNMLWEKQAVYHKELTEELKKEIRDIIIFYQRRLKSQKGLIGFCEFESRQIEVDIDGKKKIKTVGNRVISRSSPLFQEFKIWQILNNIEVTVVGKKRKRRKLKENYSALFEELNDAEQLELNGSRRLCQEEKELLAQELFIRDKMTKSEVLKLLFDNPQELDLNFKTIDGNKTGYALFQAYSKMIEMSGHEPVDFKKPVEKVVEYIKAVFDLLNWNTDILGFNSNEELDNQPYYKLWHLLYSFEGDNTPTGNGRLIQKMTELYGFEKEYATILANVSFQDDYGSLSAKAIHKILPHLKEGNRYDVACVYAGYRHSESSLTREEIANKVLKDRLMLLPKNSLHNPVVEKILNQMVNVINVIIDIYGKPDEIRVELARELKKNAKEREELTKSIAQTTKAHEEYKTLLQTEFGLTNVSRTDILRYKLYKELESCGYKTLYSNTYISREKLFSKEFDIEHIIPQARLFDDSFSNKTLEARSVNIEKGNKTAYDFVKEKFGESGADNSLEHYLNNIEDLFKSGKISKTKYNKLKMAEQDIPDGFIERDLRNTQYIAKKALSMLNEISHRVVATSGSVTDKLREDWQLIDVMKELNWEKYKALGLVEYFEDRDGRQIGRIKDWTKRNDHRHHAMDALTVAFTKDVFIQYFNNKNASLDPNANEHAIKNKYFQNGRAIAPMPLREFRAEAKKHLENTLISIKAKNKVITGNINKTRKKGGVNKNMQQTPRGQLHLETIYGSGKQYLTKEEKVNASFDMRKIGTVSKSAYRDALLKRLYENDNDPKKAFAGKNSLDKQPIWLDKEQMRKVPEKVKIVTLEAIYTIRKEISPDLKVDKVIDVGVRKILIDRLNEYGNDAKKAFSNLDKNPIWLNKEKGISIKRVTISGISNAQSLHVKKDKDGKPILDENGRNIPVDFVNTGNNHHVAVYYRPVIDKRGQLVVDEAGNPKYELEEVVVSFFEAVTRANLGLPIIDKDYKTTEGWQFLFSMKQNEYFVFPNEKTGFNPKEIDLLDVENYGLISPNLFRVQKFSLKNYVFRHHLETTIKDTSSILRGITWIDFRSSKGLDTIVKVRVNHIGQIVSVGEY

SEQ ID NO: 81 - protein, 1512 aa, Bacteroides nordii
  REGION 1..1512: note = Bacteroides nordii CL02T12C05
MKNILGLDLGTNSIGWAVINSEEDGPIVKKRIELAGSRIIPMDAAVLGNFDSGVTKSQTAERTSFRSIRRLRERQLLRRERLHKVLQILGFLPEHYVNDIDFENHPGKIKRNTEPKLPWRKNSMGQFEFIFQDSFEAMLTDFATHQPVFVSEGKKVPYDWTLYYLRKKALTEGISKEELAWLILNFNQKRGYYQLRGEEEEEQSNKLVEFYALRVVKVEATDDKKGKDTWYNVHLENGWIYRRTSNIPLDWEGKVKEFIVTTDLNEDGTPKLDKYGEVKRSFRAPKEDDWTLIKKKTESDIANSHKTVGCYIYDALLQNPHQKIKGRLVRTVERKFYKEELRLILEKQLSFHPELQDRDLYRACIDALYVSNEAHKNNISGRDFVYLFIDDIIFYQRPLKTKKSLIDNCPYEENQYMDRETGEVKQAPIKCIAKSHPLFQEFRLWQFISNIRIYQRERVLDDGKLETDVDVTPDFLKTEDDYTTLFEWFNDRKEVDQKAFLKNPQFGLKKTFTEYRWNYVEDKSYPCNETRNAILNGLQKAGVSADFLSREVEEALWHILYSVEDKIEIESALRKFASKHDLDDRFADVFKKLPPFKKEYGAYSAKAIKKLLPLMRIGKYWELSNIDDKTKERIDKIITGEWDENIHDRVREKAIKLSDITDFKGLPLWLSCYVVYNRHSEARAIAKWESPEDIDSYLRLFRQHSLRNPIVEQVITETLRTVRDIWKRVGQIDEIHVELGREIKNPADKRAKMTAQIVENENTNLRIKALLAEFINSEYEIENVRPYSSNQQEKLKIYEDTVLNGVKEIPEDINTILKKFRESDLKKRPTKSDFLHYKLWLEQKYCSPYTGRIIPLGKLFTSAYEIEHIIPQAHYFDDSFSNKVICEAEVNGLKDKKLGYEFIKHNPGKMVEIGFGKPPVRIFSVEEYERFVKENYSGIKNKMNKLLMDDIPETFIERQLNDSRYISKVVKSLLSNIVREKDSNGEYEPEAISKNVIVCTGSVTDRLKRDWGVNDVWNSIIYPRFERLNELTGSQQFGCWENKEGKRVFQTAVPLEMQKGFSKKRIDHRHHAMDAIVIACATRNHINYLSNESASKKAKISRTDLQRLLCTKCRTDDNGNYKWIVKKPWPAFTQDIRKALENITVSFKQNLRVINKTTNYYVHFDESGKKVLEKQINGDSWAIRKPMHKDTVFGKVNLQKVKEVRLSLALDTPKMIVDKKLKEKVLQLYSYKYDKKRIDKYFKENASLWKDLNLSKVAVYYFTNDSTEPLVAVRKPLDTSFNAKKIKESVTDTGIQKILLNHLSNNQDDPNLAFSPDGIDKMNKNLTALNDGKYHQPIYKVRVCEPQGNKFSVGTSGNKTSKYVEAAKGTNLFFAVYQTEDGKRSYETIPLNVVIEREKLGWTPVPENNNNGDKLLFWLSPNDLVYVPTADELNNGMRLDNMDKGRIYKMISCSGPQCFFIPQNVSNAIIPVIELGANNKAEKSWNNEMIKVVCVPIRVDRLGCITQINNQK

SEQ ID NO: 82 - protein, 1436 aa, Bacteroides sp.
  REGION 1..1436: note = Bacteroides sp. 2_1_16
MKRILGLDLGTNSIGWALVNEAENKDERSSIVKLGVRVNPLTVDELTNFEKGKSITTNADRTLKRGMRRNLQRYKLRRETLTEVLKEHKLITEDTILSENGNRTTFETYRLRAKAVTEEISLEEFARVLLMINKKRGYKSSRKAKGVEEGTLIDGMDIARELYNNNLTPGELCLQLLDAGKKFLPDFYRSDLQNELDRIWEKQKEYYPEILTDVLKEELRGKKRDAVWAICAKYFVWKETYTEWNKEKGKTEQQEREHKLEGIYSKRKRDEAKRENLQWRVNGLKEKLSLEQLVIVFQEMNTQINNSSGYLGAISDRSKELYFNKQTVGQYQMEMLDKNPNASLRNMVFYRQDYLDEFNMLWEKQAVYHKELTEELKKEIRDIIIFYQRRLKSQKGLIGFCEFESRQIEVDIDGKKKIKTVGNRVISRSSPLFQEFKIWQILNNIEVTVVGKKRKRRKLKENYSAIFEELNDAEQLELNGSRRLCQEEKELLAQELFVRDKMTKSEVLKLLFDNPQELDLNFKTIDGNKTGYALFQAYSKMIEMSGHEPVDFKKPVEKVVEYIKAVFDLLNWNTDILGFNSNEELDNQSYYKLWHLLYSFEGDNTPTGNGRLIQKMTELYGFEKEYATILANVSFQDDYGSLSAKAIHKILPHLKEGNRYDVACVYAGYRHSESSLTREEIANKVLKDRLMLLPKNSLHNPVVEKILNQMVNVINVIIDIYGKPDEIRVELARELKKNAKEREELTKSIAQTTKANEEYKTLLQTEFGLTNVSRTDILRYKLYKELESCGYKTLYSNTYISREKLFSKEFDIEHIIPQARLFDDSFSNKTLEARSVNIEKGNKTAYDFVKEKFGESGADNSLEHYLNNIEDLFKSGKISKTKYNKLKMAEQDIPDGFIERDLRNTQYIAKKALSMLNEISHRVVATSGSVTDKLREDWQLIDVMKELNWEKYKALGLVEYFEDRDGRQIGRIKDWTKRNDHRHHAMDALTVAFTKDVFIQYFNNKNASLDPNANEHAIKNKYFQNGRAIAPMPLREFRAEAKKHLENTLISIKAKNKVITGNINKTRKKGGVNKNMQQTPRGQLHLETIYGSGKQYLTKEEKVNASFDMRKIETVSKSAYRDALLKRLYENDNDPKKAFAGKNSLDKQPIWLDKEQMRKVPEKVKIVTLEAIYTIRKEISPDLKVDKVIDVGVRKILIDRLNEYGNDAKKAFSNLDKNPIWLNKEKGISIKRVTISGISNAQSLHVKKDKDGKPILDENGRNIPVDFVNTGNNHHVAVYYRPVIDKRGQLVVDEAGNPKYELEEVVVSFFEAVTRANLGLPIIDKDYKTTEGWQFLFSMKQNEYFVFPNEKIGFNPKEIDLLDVENYGLISPNLFRVQKFSLKNYVFRHHLETTIKDTSSILRGITWIDFRSSKGLDTIVKVRVNHIGQIVSVGEY

SEQ ID NO: 83 - protein, 1517 aa, Bacteroides sp.
  REGION 1..1517: note = Bacteroides sp. 20_3
MKKIVGLDLGTNSIGWALINAYINKEHLYGIEACGSRIIPMDAAILGNFDKGNSISQTADRTSYRGIRRLRERHLLRRERLHRILDLLGFLPKHYSDSLNRYGKFLNDIECKLPWVKDETGSYKFIFQESFKEMLANFTEHHPILIANNKKVPYDWTIYYLRKKALTQKISKEELAWILLNFNQKRGYYQLRGEEEETPNKLVEYYSLKVEKVEDSGERKGKDTWYNVHLENGMIYRRTSNIPLDWEGKTKEFIVTTDLEADGSPKKDKEGNIKRSFRAPKDDDWTLIKKKTEADIDKIKMTVGAYIYDTLLQKPDQKIRGKLVRTIERKYYKNELYQILKTQSEFHEELRDKQLYIACLNELYPNNEPRRNSISTRDFCHLFIEDIIFYQRPLKSKKSLIDNCPYEENRYIDKESGEIKHASIKCIAKSHPLYQEFRLWQFIVNLRIYRKETDVDVTQELLPTEADYVTLFEWLNEKKEIDQKAFFKYPPFGFKKTTSNYRWNYVEDKPYPCNETHAQIIARLGKAHIPKAFLSKEKEETLWHILYSIEDKQEIEKALHSFANKNNLSEEFIEQFKNFPPFKKEYGSYSAKAIKKLLPLMRMGKYWSIENIDNGTRIRINKIIDGEYDENIRERVRQKAINLTDITHFRALPLWLACYLVYDRHSEVKDIVKWKTPKDIDLYLKSFKQHSLRNPIVEQVITETLRTVRDIWQQVGHIDEIHIELGREMKNPADKRARMSQQMIKNENTNLRIKALLTEFLNPEFGIENVRPYSPSQQDLLRIYEEGVLNSILELPEDIGIILGKFNQTDTLKRPTRSEILRYKLWLEQKYRSPYTGEMIPLSKLFTPAYEIEHIIPQSRYFDDSLSNKVICESEINKLKDRSLGYEFIKNHHGEKVELAFDKPVEVLSVEAYEKLVHESYSHNRSKMKKLLMEDIPDQFIERQLNDSRYISKVVKSLLSNIVREENEQEAISKNVIPCTGGITDRLKKDWGINDVWNKIVLPRFIRLNELTESTRFTSINTNNTMIPSMPLELQKGFNKKRIDHRHHAMDAIIIACANRNIVNYLNNVSASKNTKITRRDLQTLLCHKDKTDNNGNYKWVIDKPWETFTQDTLTALQKITVSFKQNLRVINKTTNHYQHYENGKKIVSNQSKGDSWAIRKSMHKETVHGEVNLRMIKTVSFNEALKKPQAIVEMDLKKKILAMLELGYDTKRIKNYFEENKDTWQDINPSKIKVYYFTKETKDRYFAVRKPIDTSFDKKKIKESITDTGIQQIMLRHLETKDNDPTLAFSPDGIDEMNRNILILNKGKKHQPIYKVRVYEKAEKFTVGQKGNKRTKFVEAAKGTNLFFAIYETEEIDKDTKKVIRKRSYSTIPLNVVIERQKQGLSSAPEDENGNLPKYILSPNDLVYVPTQEEINKGEVVMPIDRDRIYKMVDSSGITANFIPASTANLIFALPKATAEIYCNGENCIQNEYGIGSPQSKNQKAITGEMVKEICFPIKVDRLGNIIQVGSCILTN

SEQ ID NO: 84 - protein, 1424 aa, Bacteroides sp.
  REGION 1..1424: note = Bacteroides sp. 3_1_19
MKRILGLDLGTNSIGWALVNEAETDEEVSSIIRLGVRVNPLTVDETQNFEKGKSITTNAERTLKRSMRRNLQRYKLRRDALVEFLKELGFITDETILSEQGNRTTFETCRLRAKAAEEEISLEELSRVLLMINKKRGYKSSRKVKKEEDGVLIDGMEIAKKLYEEDLTPGQLCSQLLESGKKVLPDFYHSDLQEELDRIWSVQKQFHPDVFCDAAKEEIKGKNRSQTWAILANYFVWKEEVVGWNDREAKNETIEKECKLVGLKRTTKGYELKKENYRWRAQALTEQLGLEEIAVVLQEINGQINASSGYLGAISDRSKVLYFNHQTVGQYQMAELDKNPHASLRNMVFYRQDYLDEFDRIWEKQAEFHKELTAELKKEIRDMIIFYQRRLKSQKGLISFCEFERLEIVVEKDGKKQTKVIGCKVIPRSHPLFQEFKVWQTLNDIKVLGREKKRNALSASESRALYPEEKEILARELAIKENMKKADVLKLLFENPQELDLNFKQIDGNRTGFSLFSAYSKMIEKYGYEPLDFKKPADEIIGQLRTIFTDLGWNTNLFTIDLTKEGKELEMQPYFRLWHLLYSFEGDNTSTGNGKLIEKIMQLCGVEKEYAVELASLSFQDDYGSLSAKAIKRILPYLKEGNLYDVACEYAGYRHSKSSLTKEEIENKVLKGKLEVLPKNSLRNPVVEKILSQMVNVINTIIDTYGKPDEIRVELARELKKSAKEREELTKAIAKSTREHEEIRKLLQDEFGMMNVSRNDIIRYKLYEELKDNGYKTLYSNQYIPKEKIFSKEIDIEHIIPQSRLFDDSLSNKTLEYKAINIEKGNKTAYDFVKEKYGEEGLQQYINRCESLFNDKKAKLRKLKMEQKDIPDGFIDRDLRNTQYIAKKALAMLNEICRRVVATTGSITDQLREDWQLVDVMKELNLPKYEALGFVETYEDKDGRKIKRIKDWTKRNDHRHHAMDALTVAFTKDAFIQYFNNKNAAQDSGNRNHTNIIGIKTRYFDKGRALPPIPLEQFRIEAKQHLEKLLVSIKAKNKVVTVNVNRTKKRKGENTKIQQTPRGQLHLETVYGSHKQYVTKIEKVNASFDAAKIATVSKRAYRNALLKRLETFGNDPKKAFTGKNALEKNPLYADKYQTIRVPEKVQTVEFETIYTIRKPVDPALNVDKVVDVKVRAILERRLKEYGGDPKKAFVNFWENPIWLNKEKGISIKRVSIRGINNAQSIHVKKDKNGNPIWDENGKQIPVDFVNTGNNHHVAIYRKPVLDKKGQVTFDEDGNLMYELDEVVVPFFEAVTRANLGLPIIDKDYRKSEGWQFLFSMKQNEYFVFPNEKTGFNPKEVDLLNPDNYAMISPNLFRVQTMSKVMYGNNVVRDYKFRHHLETTVKDMKELKDIAYKQYKTLSFGNSVVKIRINHIGQIVSVGEY

SEQ ID NO: 85 - protein, 1510 aa, Bacteroides sp.
  REGION 1..1510: note = Bacteroides sp. D2
MKRILGLDLGTNSIGWALVDSEEQRILGMGSRIIPMDQGVLDTFSGGNPVETQTAARTAYRGTRRLRERALLRRERLIRVLNMMKFLPEHYASQIDFEKRLGQFFDEKEPKLAWKQNDEGRFEFIFQQSFNEMIEEFKNKGVVREDKKIPYDWTIYYLRKKALSQEIEKEELAWILLNFNQKRGYYQLRGEEEEENPNKLVEYYSLKIVDVIADEKPNSKGDIWYSLHLENGWIYRRSSKIPLFGWKDKTRDFIVTTDLNDDGTVKKDKEGIEKRSFRAPSENDWVLLKKKTESDIEKSHKTVGAYVYETLLQNPMQKVRGKLVRTIERKFYKDELKQILEKQREFHPELRDEDLYNDCVRELYRSNETYQFILSKRDFVHLFLDDILFYQRPLRSQKSAIGDCILEFKTYKDKDGNNIKEYLKVISKSNPLYQEFRIWQWLYNLKIYRKEDDEDVTLQFIANIEDKEQLFDFLSNRKSIEQKPLLEYLIKAKGLKKQVKTEAYRWNYVEDKIYPCSETKTMISTRLAKVENIPDNFFTKEIEQKLWHIIYSVTDKNEFEKALRTFAKKYDLDIASFVDNFKKIPPFKNEYGSFSEKAIKKLLPLMRLGKYWKWNDIDNNTQNRISKIITGEYDEEIKDIVREKSIALTNENDFQGLQLWLAQYLVYGRHSEADIAGKWHSVADLEKYLNEFKQHSLRNPIVEQIITETLRVVRDIWRKYGQGAENFFSEIHVELGRDMKNTADERKKIVNVVTENENTNLRIKALLMELKNNSDGKLEVENVRPYSPTQQDILKIYEEYAISTGLDNEKDEKVKEDIKKISRVAQPTTTELQRYKLWLEQKYCSPYTGKVIPLGKLFTEEYQIEHIIPKSRYYDDSFSNKVICEAAVNKLKDKCLGLEFIKNYHGQIVETGFGQKVTIFDEEAYQNFVKQHYAYNRSKRTKLLLEEIPEKMIERQMNDTRYISKFVLPLLSNLVRAEENDNGVNSKNVLPVNGKITTMLKQDWGLNDVWNDLILPRFVRMNELAKTIAFTSWNEQHQKYLPTVPLELSKGFQKKRIDHRHHAMDALVIACATRDHVNLLNNKHANTDTIRYDLQRKLRLFERVTYIDPQTKNNVTKDIPKEFKKPWDNFTVDARNELEKIIVSFKQNLRIINKATNIYTKYENGKKIKVGQKGLNWAIRKPLHKETVFAKVSLRKRKTVRLSEALKDWKKIVDKKLKQEIKRLTCQYGKFDVDTILRYFKDRKYQFGEVDVSKVKMYYFDEENAAVRKNVDTSFTEKFIQGSVTDTGIQKILLNHLEAKGNKVEIAFSPEGIEEMNKNIIQLNEGKLHLPIFKVRVYETIGNKFSVGVKGNKKDKYVEAAKGTNLFFAIYVDENGIRSYETIPLNIVIERLKQGLSVVPEKNRKEHSLLFYLSPNDLVYVPIEDERENIHAVNLDQLNNEQRKRIYKMVSCTGSECHFVPYYVASPIVNKVEYSSLNKIGRSLTGEMIKDVCIKLKVDRLGNVKGISGL

SEQ ID NO: 86 - protein, 1436 aa, Bacteroides sp.
  REGION 1..1436: note = Bacteroides sp. D2
MKRILGLDLGTNSIGWALVDEAENKDERSSIVKLGVRVNPLTVDELTNFEKGKSITTNADRTLKRGMRRNLQRYKLRRETLMEVLKEHKLITEDTILSENGNRTTFETYRLRAKAATEKISLEEFARVLLMINKKRGYKSCRKAKGAEEGTLIDGMDIARELYNNNLTPGELCLQLLDAGKKYLPDFYRSDLQNELDRIWEKQKEYYPEILTEVLKEELRGKKRDAVWAICAKSFVWEEYYTEWNKEKGKTEQQEREHKLEGIYSKRKRDEAKRENLQWRVNGLKEKLSLEQLVIVLQEMNIQINNSSGYLGAISDRSKELYFNKQTVGQYQMEMLDKNPNASLRNMVFYRQDYLDEFNTLWEKQAEYHKELTGELKKEIRDIVIFYQRRLKSQKGLVGFCEFESRQIEVEIDGKKKIKTVGNRVIPRSSPLFQEFKIWQILNNIEVTVVGKKGKRRKQKDNSPTLFDGLDDTEQLELNGSRYLYQEEKELLAQELFVRDKMTKSDVLKLLFDNPQELDLNFKTIDGNKTGYTLFQAYSKMIEMSGHEPVDFKKTVEKVVEHVKAVFDLLNWNTDILGFNSNEELDNQSYYKLWHLLYSFEGDNTPTGNARLVQKITELYGFEKEYAIILANVTFQDDYGSLSAKAIHKILPHLKEGNRYDVACAYAGYKHSESSLTKEEIANKALKDRLTLLPKNNLRNPVVEKILNQMVNVINAIIDTYGKPDEIRVELARELKKNAKEREELTKFIAETTRKHEEFKILLQSEFGLTNVSRTDILRYKLYKELESCGYKTLYSNTYIPREKLFSKEFDIEHIIPQARLFDDSFSNKTLEARSINLEKGNKTAYDFVKEKFGESGADNSLDHYLNNIEDLFKSGKISKTKYNKLKMAEQDIPDGFINRDLRNTQYIAKKALSMLNEISRRVVATSGTITDKLRQDWQLVDVMKELNWEKYKALGLVEYFEDKDGRQIGRIKDWTKRNDHRHHAMDALTVAFTKDIFIQYFNNKNASLNSNTNEYAIKNKYFQNGRAIAPIPLREFRVEAKKHLENTLISIKAKNKVVTGNINKTKKRGGVNKYLQQTPRGQLHLETIYGSGKQYLTKEEKVNASFDMKKIATVSKSAYRDVLLKRLHENDNDPKKAFTGKNSLDKQPIWLDKEQTRKVPEKVKTVTLETIYTVRKEISPDLKVDKVIDAGVRKILTGRLNEYGNDAKKAFSNLDENPIWLNKEKGISIKRVTISGISNAQSLHVKKDKDGKPILDEDSRNIPVDFVNTGNNHHVAVYRRPVIDKRGQLVIDEAGNPKYELEEVVVSFFEAVTRANLGQPIIDKDYKTSEGWQFLFSMKQNEYFVFPNEKTGFNPKEIDLLDAENYGVISPNLFRVQKFAHKNYVFRHHLETTIKDTSSILKGITWIDFRSSKGLDAIVKVRVNHIGQIVSVGEY

SEQ ID NO: 87 - protein, 1508 aa, Bacteroides uniformis
  REGION 1..1508: note = Bacteroides uniformis CL03T00C23
MRTILGLDLGTNSIGWAVINSVIKEQTERIWIEMAGSRIIPMDAAILGDFDKGNSISQTAERTRFRGVRRLRERQLLRRERLHKVLKILGFLPEHYLKGIDFEKHTGKFLSGSEPKLPWVKDRWGKYSFLFQTAFNEMLADFAKHQPSLVFDGKKIPYDWTVYYLRKKALTEMISKEELAWILLNFNQKRGYYQLRGEEEEDNAGKSVEFYALKVLSVEATDEKKGRDIWYNVHLENGWVYRRSSNVPLDWEGRVKEFIVTTDLNPDGTPKLDKYGEVKRSFRAPKEDDWMLIKKRTEADITGTHKTIGSYIYDALLQEPQQKIIGKLVKTVERKFYKEELNFILQKQCAFHAELQDRDLYMRCIEALYPGNEVQRRNIANRDFIYLLIDDVLFYQRPLKTKKSLIANCPYEENEYVNRKTGEIKTAPLKCIAKSHPLFQEFRLWYFLSNIRVYQKEREVNGTLHLDVDVTTEFLKTEDDYVALFDWLNSRKEIDQKAFLRYPAFGLKKEINNYRWNYVEDKFYPCNETRHAILSRLEKAGIGIDFLSDEKETALWHILYSVSDKQEIEKALATFAVKNGLNESFVEVFKKFPPFKSEYGAYSAKAIKKLLPLMRCGKYWDMSLIDGTTKERIERIIAGECDESIGAKVREKAMNLSDISCFKRLPLWLACYVVYNRHSEDKEITKWETPADIDAYLAAFKQHSLRNPIVEQVITETLRVVRDIWKQVGKIDEIRIELGREMKNPADKRKRMTTQILENENANLRIKALLAEFVNPEYGVENVRPYSPSQQEILRIYEDAVLKGEEQIPEDIDVILKKFNTSKLPTKSEFLRYKLWLEQKYRSPYTGELIPLAKLFTAAYEIEHVIPQSRYFDDSFSNKVICESAVNKLKDNQLGYEFIKNHHGQKVEVGFGKTVEIFSVDSYERFVKEQYAKSGIKMKKLLMDDIPEQFIERQLNDSRYISKVVKGLLSNIVREKNDSGEYEPEAVSKNILVCTGSVTDRLKKDWGMNDVWNSIVSPRFERLNALTETQCFGHWENKDGKKVFQTAVPLEYQKGFSKKRIDHRHHAMDAIVIACATRNHVNYLNNESASRNAKISRYDLQRLLCDKSRGDGNGNYRWIIKKPWTTFTQDAREALSGIIVSLKQNLRIINKTTNIYQHFDANGTRVYEKQKIGDSWAIRKPMHKDTVFGAVNLRKVKVVRLSVALDTPSMIVNKRVKNKVLELLSYKYDKKKIEKYFKENAFLWKELDIAKVAVYYFTENTTEPLVAVRKSLDSTFNEKKIASVTDTGIQKILLNHLKSKEGKAELAFSAEGIEEMNRNLLQLNDGKGHQPIYKVRVYEPRGNKFKVGVLGNKGAKWVEAAKGTNLFFAIYITEDGNRTYETIPLNWVIEREKQGLVPVPDRNEKGDKLLFWLSPNDLVYLPTEEERDFGRINEPIDRGRIYKMVSSSGNQCFFIPQSISNAIISTKELGSNNKAEKSWDGEMIKNICIPVKVDRLGRIIEVKYRVNE

SEQ ID NO: 88 - protein, 1504 aa, Bacteroides vulgatus
  REGION 1..1504: note = Bacteroides vulgatus CL09T03C04
MKNIVGLDLGTNSIGWAVVNGSVNDDGSEQLVKIQASGSRIIPMDAAMIGDFNKGNSISQTAERTRLRGVRRLSERYLLRRERLHRILDILGFLPFHFAQDLDRHGKIVKGKEPKLAWRKNEAGQFEFIFQDSFKEMLEDFKLNHPNLITDDKKVPYDWTIYYLRKKGLTSKISKEELAWILLNFNQKRGYYQLRGEEEEENKNKLVEFYALKVVAVEDSGEKKGKDIWYNVHLENGWVYRRTSNMPLDWVGKTKEFIVTTDLEKDGTPKKDKEGNVKRSFRAPKEDDWSLLKKKTEADIDQTHKTVGVYIYDTLLGNPSQKIRGRLVRTIERKYYKEELKQILEKQKEFHLELQDRALYAACIEELYPINEAHRNNVGNRDFTYLFLEDILFYQRPLKSKKSLIDNCPYEENQGLDKETGEIKSFPVKCIAKSHPLFQEFRLWQFIVNLRIYRKDLAQDVDVTNELLKTEEDYVALFDWLNGKKEIDQKAFLKYPVFGLKKEIENYRWNYVQDKPYPCNETRSLMLARLEKCDISIEFLTKENEEALWHILYSVEDKNEIVKALQKFADKHDLNASFVDVFQKFPPFKKEYGSYSAKAIKKLLPLMRMGKYWSENSIDKGTRERIDKIITGEYDEKIENRVREKAIHLADVSDFKGLPLWLVCYIVYGRHSEAKEITQWKSPADIDSYLRSFKQHSLRNPIVEQIIIETLRVVRDIWKQVGNIDEIHVELGREMKNPADKRKKMTQQMSENENTNLRIKYLLTEFLNPEYEVENVRPYSPSQQDILRIYEEGVLNSVSDLPEEISDILKKFTETDLKKRPSRSEILRYKLWLEQKYRSPYTGEVIPLGKLFTPAYEIEHVIPQSCYFDDSFSNKVICEAEVNKLKSNLLGHEFIVKHHGEIVELPFGKKVRIFTVDEYEQFVKDNYSRTRSKMKKLLMDDIPEEFVTRQLNDSRYISKVVKSLLSNIVREKGEEEAISKNVIPCTGGVTDRLKKDWGINEVWNKIILPRFQRLNELTGTNKFTTKNVGIQEIPTMPLELQKGFNKKRIDHRHHAMDAIIIACANRNIINYLNNESATAKAELSRYDLQKMLCDKAKTDNNGNYKWVIRKPWASFTQDTYLALENIIVSFKQNLRVINKATNRFLHYNEEGKKIFVKQGKGDNWAIRKSMHKDTVFGEVNLRRIKTVALNEAMKNPQSIVVKDFKRKLLELWNLGFDAKRIKKYFEDNRETWSDINLSKIEVYYFSKDTKDRFFATRKPLDTSFDRKKIENNITDTGIQKILLRHLELKDNNPDIAFSPDGIDEMNRNIIQLNNGKYHQPIIKIRWYEQADKFAVGQTGNKFSKFVEAAKGTNLFFAVYESNILDKKTNTIIKKRNYATIPLNVAIERQKQGLPVAPEDENGNDPIFVLSPNDLVYLPTDDELANGIIAQPLDRGRIYKMVSCTGNEGHFIPARIANPILQTIELGSNNKAQKAWTDEMIKEICMPIKVDRLGNVLESSSSYKK

SEQ ID NO: 89 - protein, 1434 aa, unidentified
  REGION 1..1434: note = Description of Unknown: Bacteroidetes oral taxon 274 str. F0058 polypeptide
MKNILGLDLGTNSIGWAYVKQAQNDSEKSEIAELGVRVNPLTVDEKTNFEKGKPISTNADRTLKRGARRNLQRYKLRRQELIELLKDYQVISDKTILAEDGKETTFETLRLRVKSAKEQVSLEELARILLMINKKRGYKSSRKAKNEDEGQLIDGMEIARRLYDENLTTGQLSLQLLKEGKKSLPDYYRSDLQHELDKVWNFQKQFHPDILTDEFYTSIQGKGQKATRESFSSKYGIDTAENKGSREEKKLQAYQWRADATHKELTKEELAFVITEINNNINNSSGYLGAISDRSKELIFANETVGEYLWKQIQNDPHTSLKNQVFYRQDYFDEFERIWETQSGFYPQILTESLKNELRDILIFYQRKLKSQKALVSICEFESKEIPLKDKQGNPISKNGIPVTKLVGPKVAPKSSPLFQEFKIWQNLNNVLVRPKGSRKRKVTTNQQSTLLEGQEPVFELNLEQKELLFEELNLKGNLKTDYCLELIGYSAKEWEMNYPTLEGNKTNKALYEAYLKIIDSEGYDAKKLLKVKTDKDDINLDDIKVSASEIKTMISDIFNELGINTKILDFDAELERKQFEAQASYRLWHLLYSYEGDDSKSGNELLYRLLEDKFGFKREHSKTLANVSLLSDYGNLSTKAIRTIYPYIKENKFSTACELAGYRHSKLSISKEENENRTLKDTLDVLKKNSLRQPVVEKILNQMINLINELIEKHSEKDEKGNIVKYFKFDEIHIELARELKKNAEERRELDSKVREGKDRNEKIITILKSEFGLPYPTKNDITRYRLYEELKDNGYKDLYTNTYIPREKLFSKEIDIEHIIPKSRLFNDSFSNKTICYRQDNLNKGERTAYDYIEGLGKTQLDEYLNRVENLYTNKFITKAKYRNLLKKESEIGDGFIERDLRETQYIAKKAKEMLLQITRHVVSTTGSITDRLRDDWELVNVMRELNLPKYKVLGLTEIQERKNGQTVEVITDWTKRNDHRHHAMDALTVAFTKHSHIQYLNFLNARKDEKHKEYSNIMGIQQLETEKTTDKDGKDRRVFKTPIPNFRQVAKEHLESILISHKTKNKVVTRATNKIAGSKKQQETLSPRGQLHKETVYGKYRRYVQKEEKIGSKFDLQTIERVANPLYKRLLTKRLEENGGDPKKAFTGKNALAKSPIYLDETQTQQLPEKVKLVWLETDFSIRKDITPDNFKDEKSIDKVLDEGIKRILKDRLKSFDGDAKRAFTDLEQNPIWLNKEKGIAIKRVTISGVSNAEPLHTKKDHLGNEIFDDTGKPIPVDYVSTGNNHHIAIYRDENGNLQEKAVSFFEAVTRANQGLPTVDKTYNQHLGWQFLFTMKQNEMFVFPNKETGFDPQEIDLLDPKNKKLISPNLFRVQKISTKNYFFRHHLETSVETHNALNGVTYKSQLGLNGITDIIKVRINHLGDIVHIGEY

SEQ ID NO: 90 - protein, 1153 aa, Barnesiella intestinihominis
  REGION 1..1153: note = Barnesiella intestinihominis YIT 11860
MKNILGLDLGLSSIGWSVIRENSEEQELVAMGSRVVSLTAAELSSFTQGNGVSINSQRTQKRTQRKGYDRYQLRRTLLRNKLDTLGMLPDDSLSYLPKLQLWGLRAKAVTQRIELNELGRVLLHLNQKRGYKSIKSDFSGDKKITDYVKTVKTRYDELKEMRLTIGELFFRRLTENAFFRCKEQVYPRQAYVEEFDCIMNCQRKFYPDILTDETIRCIRDEIIYYQRPLKSCKYLVSRCEFEKRFYLNAAGKKTEAGPKVSPRTSPLFQVCRLWESINNIVVKDRRNEIVFISAEQRAALFDFLNTHEKLKGSDLLKLLGLSKTYGYRLGEQFKTGIQGNKTRVEIERALGNYPDKKRLLQFNLQEESSSMVNTETGEIIPMISLSFEQEPLYRLWHVLYSIDDREQLQSVLRQKFGIDDDEVLERLSAIDLVKAGFGNKSSKAIRRILPFLQLGMNYAEACEAAGYNHSNNYTKAENEARALLDRLPAIKKNELRQPVVEKILNQMVNVVNALMEKYGRFDEIRVELARELKQSKEERSNTYKSINKNQRENEQIAKRIVEYGVPTRSRIQKYKMWEESKHCCIYCGQPVDVGDFLRGFDVEVEHIIPKSLYFDDSFANKVCSCRSCNKEKNNRTAYDYMKSKGEKALSDYVERVNTMYTNNQISKTKWQNLLTPVDKISIDFIDRQLRESQYIARKAKEILTSICYNVTATSGSVTSFLRHVWGWDTVLHDLNFDRYKKVGLTEVIEVNHRGSVIRREQIKDWSKRFDHRHHAIDALTIACTKQAYIQRLNNLRAEEGPDFNKMSLERYIQSQPHFSVAQVREAVDRILVSFRAGKRAVTPGKRYIRKNRKRISVQSVLIPRGALSEESVYGVIHVWEKDEQGHVIQKQRAVMKYPITSINREMLDKEKVVDKRIHRILSGRLAQYNDNPKEAFAKPVYIDKECRIPIRTVRCFAKPAINTLVPLKKDDKGNPVAWVNPGNNHHVAIYRDEDGKYKERTVTFWEAVDRCRVGIPAIVTQPDTIWDNILQRNDISENVLESLPDVKWQFVLSLQQNEMFILGMNEEDYRYAMDQQDYALLNKYLYRVQKLSKSDYSFRYHTETSVEDKYDGKPNLKLSMQMGKLKRVSIKSLLGLNPHKVHISVLGEIKEIS

SEQ ID NO: 91 - protein, 1352 aa, Belliella baltica
MKKILGLDLGTTSIGWAFIKEPEKDVVGSEIVDMGVRIVPLSSDEENDFAKGNTISINADRTLKRGARRNLQRFKQRRNALLEIFKEKKLISTNFKYAEDGPSSTFSTLNLRAKAAKEKIELQDLVKVLLQINKKRGYKSSRKAKSEEDDGSAIDSMGIAKELYENDLTPGQWVYEALQKGRKNVPDFYRSDLQEEFKKIVNYQSEFFPDIFNASFVEDWMGKASTPTKQYFNKKGVQLAENKGKREERRLQEYKWRAEAVNFKIDLSEIALILSQINSQISNSSGYLGAISDRSKELYFKNLTVGQYLYQQIKKNPHTRLKGQVFYRQDYLDEFERIWSVQSSFYPQLNDALKREVRDITIFFQRRLKSQKHLISNCEFEDHHKVVPKSHPVFQEFRIWQNLNNLLLIKKDNLNEKFDLELESKIALANELAFKRELNVKDALKILGLKPNEWEFNFTKIEGNRTNQAFFDAFAKIIELEDGEPIDLGDLKADDILDQFSEAFLRIGIDTELLQVNSDIEGAEYEKQSYIQFWHLLYSSEDDQKLKLNLIRKFGFKPEHAKILASISLQDDHASLSSRAIKKILPHLQSGLIYDKACTYAGYNHSSSFTKDENEKRELRAELELLKKNSLRNPVVEKILNQMINVVNAILKDPELGRPDEIRVEMARELKANAEQRKNMTSNIASATRDHDKYREILKSEFGLKRVTKNDLLRYKLWLETDGISLYTGKPIEASKLFSKEYDIEHIIPKARLFDDSFSNKTICERQLNIDKANVTAFSFLQNKLSADEFEQYQSRVKSLYGKLSKAKIQKLLMANDKIPEDFIARQLQETRYISKKAKEILFEISRRVSVTTGTITDKLREDWGLVEIMKELNWEKYDKLGLTYTIEGKHGERLNKIKDWSKRNDHRHHAMDALTVALTKPAYIQYLNNLNAKGLNNKKGTEVFAIEQKYLKRENGKLCFIPPIENIRSEAKKHLSRILVSYKAKNKVVTINKNKTKSKAGLNEQIALTPRGQLHKETVYGKSFHYSTKFEKIGASFNVQKINTVAKKEEREALLKRLAENGNDPKKAFTGKNTLNKMPIYLDLGKNIKLSEKVKTVVLEQNYTIRKNIDPDLKVDKVIDVGIKRILESRLEEFGGNAKLAFSNLEENPIWLNKEKGISIKRVKISGVSNVESLHVKKDHFGEPILDQEGNEIPVDFVSTGNNHHVAIYEDENGNLQEEVVSFFEAVVRQNQGLPIIKKNHTLGWKFLFTLKQNEYFVFPSDDFVPADVDLMDEQNYHLISPNLFRVQKIARKNYVFNNHLETKAVDNDLLKSKKELSKITYHFYQTPEHLRGIIKIRINHLGKIIQIGEY

SEQ ID NO: 92 - protein, 1415 aa, Bergeyella zoohelcum
  REGION 1..1415: note = Bergeyella zoohelcum ATCC 43767
MKHILGLDLGTNSIGWALIERNIEEKYGKIIGMGSRIVPMGAELSKFEQGQAQTKNADRRTNRGARRLNKRYKQRRNKLIYILQKLDMLPSQIKLKEDFSDPNKIDKITILPISKKQEQLTAFDLVSLRVKALTEKVGLEDLGKIIYKYNQLRGYAGGSLEPEKEDIFDEEQSKDKKNKSFIAFSKIVFLGEPQEEIFKNKKLNRRAIIVETEEGNFEGSTFLENIKVGDSLELLINISASKSGDTITIKLPNKTNWRKKMENIENQLKEKSKEMGREFYISEFLLELLKENRWAKIRNNTILRARYESEFEAIWNEQVKHYPFLENLDKKTLIEIVSFIFPGEKESQKKYRELGLEKGLKYIIKNQVVFYQRELKDQSHLISDCRYEPNEKAIAKSHPVFQEYKVWEQINKLIVNTKIEAGTNRKGEKKYKYIDRPIPTALKEWIFEELQNKKEITFSAIFKKLKAEFDLREGIDFLNGMSPKDKLKGNETKLQLQKSLGELWDVLGLDSINRQIELWNILYNEKGNEYDLTSDRTSKVLEFINKYGNNIVDDNAEETAIRISKIKFARAYSSLSLKAVERILPLVRAGKYFNNDFSQQLQSKILKLLNENVEDPFAKAAQTYLDNNQSVLSEGGVGNSIATILVYDKHTAKEYSHDELYKSYKEINLLKQGDLRNPLVEQIINEALVLIRDIWKNYGIKPNEIRVELARDLKNSAKERATIHKRNKDNQTINNKIKETLVKNKKELSLANIEKVKLWEAQRHLSPYTGQPIPLSDLFDKEKYDVDHIIPISRYFDDSFTNKVISEKSVNQEKANRTAMEYFEVGSLKYSIFTKEQFIAHVNEYFSGVKRKNLLATSIPEDPVQRQIKDTQYIAIRVKEELNKIVGNENVKTTTGSITDYLRNHWGLTDKFKLLLKERYEALLESEKFLEAEYDNYKKDFDSRKKEYEEKEVLFEEQELTREEFIKEYKENYIRYKKNKLIIKGWSKRIDHRHHAIDALIVACTEPAHIKRLNDLNKVLQDWLVEHKSEFMPNFEGSNSELLEEILSLPENERTEIFTQIEKFRAIEMPWKGFPEQVEQKLKEIIISHKPKDKLLLQYNKAGDRQIKLRGQLHEGTLYGISQGKEAYRIPLTKFGGSKFATEKNIQKIVSPFLSGFIANHLKEYNNKKEEAFSAEGIMDLNNKLAQYRNEKGELKPHTPISTVKIYYKDPSKNKKKKDEEDLSLQKLDREKAFNEKLYVKTGDNYLFAVLEGEIKTKKTSQIKRLYDIISFFDATNFLKEEFRNAPDKKTFDKDLLFRQYFEERNKAKLLFTLKQGDFVYLPNENEEVILDKESPLYNQYWGDLKERGKNIYVVQKFSKKQIYFIKHTIADIIKKDVEFGSQNCYETVEGRSIKENCFKLEIDRLGNIVKVIKR

SEQ ID NO: 93 - protein, 1430 aa, Bergeyella zoohelcum
  REGION 1..1430: note = Bergeyella zoohelcum CCUG 30536
MKHILGLDLGTNSIGWAVVKEAQNDNEQSEIVDVGVRVNPLTTDEKTNFEKGKPISTNADRTLKRSARRNLQRYKLRRKELIELLKEHQLISTDTILTENGKGTTFQTLELRAKSAKEKISLEELARVFLTINKKRGYKSSRKAKNEDEGQLIDGMEIAKRLYEENLTTGQLSLQLLKEGKKSLPDYYRSDLQFELDKVWNFQKQFHSDILTDEFYAQLKGKGQRATSALFLAKYQIYTAENKGSREDKKLQAYQWRVDALSKELTREQLAFVITEINNNLNNSSGYLGAISDRSKELYFNNETVGEYLWKQIAANPHTSLKNQVFYRQDYLDEFEQIWKTQSAFYPEILTDELKKELRDVVIFYQRKLKSQKSLVSFCEFENKEIEIKKEDGTSTKKVIGLKVAPKSSPLFQEFKIWQNLNNVLIRKKGSKTKKVAKNQQAVLFEEEKTISELDLEAKQALFNELNLKGNLKADYCLEILGYSPKEWEMNYSVLEGNRTNKALYEAYLKITDLEGYDAKNHLKVKLNKDEVELDDLKVPASEIKDMVQAIFKEAGINTDILHFNAELDGKDFENQASYQLWHLLYSYEGDDSKSGNELLYKLLETKFGFKKEYAQILANVSLSDDYGSLSTKAMRKIHPYIKENKFSTACELAGYRHSKHSLTKEENDNRVLKDSLEVLKKNSLRQPVVEKILNQMINLVNALLKKYRTENPNFKFDEIRIELARELKKNAEERANMTANINKAKTEHEKIIKILKNEFGLPNPTRNDIIRYRLYEELKANGYKDLYTNIKIPQEKLFTKEIDIEHIIPKSRVFDDSFSNKTLSFRKTNLDKGERTAFDYMESKFGADKLEEYVARVEDLYKNNIISKAKYQKLLKKESEIGDGFVERDLRETQYIAKKAKEILLQITPNVLSTSGGITDRLREDWDLINVMKELNLPKYRALGLTQMEDRKYGQQVEVITDWTKRNDHRHHAMDALTVAFTKHNHIQYLNYLNARKNEKHKEHSNIMGIQQLETIKVTDKNGNEKRVFKAPMPNFRQVTKAFLENILISHKAKNKVVTKNKNKVAGSNKVQEVLTPRGQLHKETVYGKYQYYVQKEEKIGAKFDLETIKKVANPLYQSLLKKRLEENGGDPKKAFTGKNSLAKNPIYLDDTQTEQLPEKVKLVWLENSFSIRKDITPENFKDEKLIDKILDEGVKRILKERLQSFGNDAKKAFSDLDKNPIWLNKEKGITIKRVTISGVANAEPLHTKKDHLGKEILDKEGKPIPVDFISTGSNHHVAVYRDEKGNLQEKVVSVFEAVVRANQGLPIIDKTYNQHLGWEFLFTMKQNEMFVFPNESTGFNPNDIDLLDPKNKRIISPNLFRVQKFSKLQYGNSFVREFVFRHHLETTVEDRKELQGITYKQMKNSTFFNDIIKVRINHLGDIVSIGEY

SEQ ID NO: 94 - protein, 1420 aa, Bifidobacterium bifidum
MSRKNYVDDYAISLDIGNASVGWSAFTPNYRLVRAKGHELIGVRLFDPADTAESRRMARTTRRRYSRRRWRLRLLDALFDQALSEIDPSFLARRKYSWVHPDDENNADCWYGSVLFDSNEQDKRFYEKYPTIYHLRKALMEDDSQHDIREIYLAIHHMVKYRGNFLVEGTLESSNAFKEDELLKLLGRITRYEMSEGEQNSDIEQDDENKLVAPANGQLADALCATRGSRSMRVDNALEALSAVNDLSREQRAIVKAIFAGLEGNKLDLAKIFVSKEFSSENKKILGIYFNKSDYEEKCVQIVDSGLLDDEEREFLDRMQGQYNAIALKQLLGRSTSVSDSKCASYDAHRANWNLIKLQLRTKENEKDINENYGILVGWKIDSGQRKSVRGESAYENMRKKANVFFKKMIETSDLSETDKNRLIHDIEEDKLFPIQRDSDNGVIPHQLHQNELKQIIKKQGKYYPFLLDAFEKDGKQINKIEGLLTFRVPYFVGPLVVPEDLQKSDNSENHWMVRKKKGEITPWNFDEMVDKDASGRKFIERLVGTDSYLLGEPTLPKNSLLYQEYEVLNELNNVRLSVRTGNHWNDKRRMRLGREEKTLLCQRLFMKGQTVTKRTAENLLRKEYGRTYELSGLSDESKFTSSLSTYGKMCRIFGEKYVNEHRDLMEKIVELQTVFEDKETLLHQLRQLEGISEADCALLVNTHYTGWGRLSRKLLTTKAGECKISDDFAPRKHSIIEIMRAEDRNLMEIITDKQLGFSDWIEQENLGAENGSSLMEVVDDLRVSPKVKRGIIQSIRLIDDISKAVGKRPSRIFLELADDIQPSGRTISRKSRLQDLYRNANLGKEFKGIADELNACSDKDLQDDRLFLYYTQLGKDMYTGEELDLDRLSSAYDIDHIIPQAVTQNDSIDNRVLVARAENARKTDSFTYMPQIADRMRNFWQILLDNGLISRVKFERLTRQNEFSEREKERFVQRSLVETRQIMKNVATLMRQRYGNSAAVIGLNAELTKEMHRYLGFSHKNRDINDYHHAQDALCVGIAGQFAANRGFFADGEVSDGAQNSYNQYLRDYLRGYREKLSAEDRKQGRAFGFIVGSMRSQDEQKRVNPRTGEVVWSEEDKDYLRKVMNYRKMLVTQKVGDDFGALYDETRYAATDPKGIKGIPFDGAKQDTSLYGGFSSAKPAYAVLIESKGKTRLVNVTMQEYSLLGDRPSDDELRKVLAKKKSEYAKANILLRHVPKMQLIRYGGGLMVIKSAGELNNAQQLWLPYEEYCYFDDLSQGKGSLEKDDLKKLLDSILGSVQCLYPWHRFTEEELADLHVAFDKLPEDEKKNVITGIVSALHADAKTANLSIVGMTGSWRRMNNKSGYTFSDEDEFIFQSPSGLFEKRVTVGELKRKAKKEVNSKYRTNEKRLPTLSGASQP

SEQ ID NO: 95 - protein, 1138 aa, Bifidobacterium dentium
MLCRCHRRYRIGIDVGLMSVGLAAIEVDETGFPIRILNIQSVIHDGGIDPQLGKKKSISRKAISGVARRTRRMRRRKVVRLRQLDATLESLGFPIVEPDSLDTWEIWLTRAKLASSYIQDDETRKEDVSIALRHIARHRGWRNPYSNVESLFVDVAPSEQYEELRRKAEEKLGTSLSGNPTSAEIVECILKRQVGEVQLRTRSRKGVNGNAVEKEGLLPTKLMQSDNAAEIRRIFKVQRIDDETGRKLLRAVFKACSPKGSVERRVGRDALAPGLPRALKASLAFQEYRIANVLTNLVISEDGTKRKLTIAEKQRVFGFLSSNETDDITWIDVAEKLGLERRQIQGVGCLTADGEERISSTPPRNITALHIHSAKPVIREKLVAWWKAASPTVRETMVELLSNTVDIDRVREDMDYSSAVAFIDSLGDEELTALDSVDLLSGRAAYSRQTLKQLTERMLNTDDDLHEARKAVFGVDDNWKPPVDAISTSVGNPAVDRVLKIVNRYLLACQKRWRNPQSVQIEHVRESFSSVAKAKETERVQGERARYRNDLRRELCEQEGLNKIRESDIRRWESVQRQNGTCLYCGSPITFRTCEMDHIVPRKGVGSTNTRVNLAAACAACNKLKSNTAFSVWARTEGAANRKVSQRDAIERVKTFIFNKSVPPREQRAFKQAVISRLRQAESDPAIDNRSIESVAWMADELHRRIEAYFNQDADVSGNTPATQVWVFQGRVTALARKASGIEGRIHFAGEWKKTRLDRRHHAVDAAVIAMMNHSAAQTLVERDSLRLSQWITRKPETWKNYPFSEGQKKTRFKEWLDCMNALLDLLNDALDSDRVPVTRCQRMSLGNSQAHAATIRKMKRVELFSPMDADLIRRASTPALYCALTRLPEYSPEKGLPENRGREIVLNGRHIRSTETVDFFASGAAQLMVRNGSAEIGDSIHHMRIYRYRKTGAKSQEYVYGMIRVFQIDLLHASSENLFAVQLPSQSVSVRYGDKNVVQAIQEGRAEYLGHIVPNDEILISYEGVRMKDSEKIGAYANDFSGTASELAQRRHWVVVGSDVSKLALRPSYLSEEGLENSGSESERLSKQTRKVIEGKGWVVAVNILAKYHPVVIRRNALGEPRFRTNSGMPVSWRWDR

SEQ ID NO: 96 - protein, 1187 aa, Bifidobacterium longum
MLSRQLLGASHLARPVSYSYNVQDNDVHCSYGERCFMRGKRYRIGIDVGLNSVGLAAVEVSDENSPVRLLNAQSVIHDGGVDPQKNKEAITRKNMSGVARRTRRMRRRKRERLHKLDMLLGKFGYPVIEPESLDKPFEEWHVRAELATRYIEDDELRRESISIALRHMARHRGWRNPYRQVDSLISDNPYSKQYGELKEKAKAYNDDATAAEEESTPAQLVVAMLDAGYAEAPRLRWRTGSKKPDAEGYLPVRLMQEDNANELKQIFRVQRVPADEWKPLFRSVFYAVSPKGSAEQRVGQDPLAPEQARALKASLAFQEYRIANVITNLRIKDASAELRKLTVDEKQSIYDQLVSPSSEDITWSDLCDFLGFKRSQLKGVGSLTEDGEERISSRPPRLTSVQRIYESDNKIRKPLVAWWKSASDNEHEAMIRLLSNTVDIDKVREDVAYASAIEFIDGLDDDALTKLDSVDLPSGRAAYSVETLQKLTRQMLTTDDDLHEARKTLFNVTDSWRPPADPIGEPLGNPSVDRVLKNVNRYLMNCQQRWGNPVSVNIEHVRSSFSSVAFARKDKREYEKNNEKRSIFRSSLSEQLRADEQMEKVRESDLRRLEAIQRQNGQCLYCGRTITFRTCEMDHIVPRKGVGSTNTRTNFAAVCAECNRMKSNTPFAIWARSEDAQTRGVSLAEAKKRVTMFTFNPKSYAPREVKAFKQAVIARLQQTEDDAAIDNRSIESVAWMADELHRRIDWYFNAKQYVNSASIDDAEAETMKTTVSVFQGRVTASARRAAGIEGKIHFIGQQSKTRLDRRHHAVDASVIAMMNTAAAQTLMERESLRESQRLIGLMPGERSWKEYPYEGTSRYESFHLWLDNMDVLLELLNDALDNDRIAVMQSQRYVLGNSIAHDATIHPLEKVPLGSAMSADLIRRASTPALWCALTRLPDYDEKEGLPEDSHREIRVHDTRYSADDEMGFFASQAAQIAVQEGSADIGSAIHHARVYRCWKTNAKGVRKYFYGMIRVFQTDLLRACHDDLFTVPLPPQSISMRYGEPRVVQALQSGNAQYLGSLVVGDEIEMDFSSLDVDGQIGEYLQFFSQFSGGNLAWKHWVVDGFFNQTQLRIRPRYLAAEGLAKAFSDDVVPDGVQKIVTKQGWLPPVNTASKTAVRIVRRNAFGEPRLSSAHHMPCSWQWRHE

SEQ ID NO: 97 - protein, 1124 aa, Bifidobacterium longum
  REGION 1..1124: note = Bifidobacterium longum subsp. longum 2-2B
LTGHSGHTFWPTSSSPPIQLEQEKRPLPQRNTSQNGHTFWPITRERCFMRGKRYRIGIDVGLNSVGLAAVEVSDENSPVRLLNAQSVIHDGGVDPQKNKEAITRKNMSGVARRTRRMRRRKRERLHKLDMLLGKFGYPVIEPESLDKPFEEWHVRAELATRYIEDDELRRESISIALRHMARHRGWRNPYRQVDSLISDNPYSKQYGELKEKAKAYNDDATAAEEESTPAQLVVAMLDAGYAEAPRLRWRTGSKKPDAEGYLPVRLMQEDNANELKQIFRVQRVPADEWKPLFRSVFYAVSPKGSAEQRVGQDPLAPEQARALKASLAFQEYRIANVITNLRIKDASAELRKLTVDEKQSIYDQLVSPSSEDITWSDLCDFLGFKRSQLKGVGSLTEDGEERISSRPPRLTSVQRIYESDNKIRKPLVAWWKSASDNEHEAMIRLLSNTVDIDKVREDVAYASAIEFIDGLDDDALTKLDSVDLPSGRAAYSVETLQKLTRQMLTTDDDLHEARKTLFNVTDSWRPPADPIGEPLGNPSVDRVLKNVNRYLMNCQQRWGNPVSVNIEHVRSSFSSVAFARKDKREYEKNNEKRSIFRSSLSEQLRADEQMEKVRESDLRRLEAIQRQNGQCLYCGRTITFRTCEMDHIVPRKGVGSTNTRTNFAAVCAECNRMKSNTPFAIWARSEDAQTRGVSLAEAKKRVTMFTFNPKSYAPREVKAFKQAVIARLQQTEDDAAIDNRSIESVAWMADELHRRIDWYFNAKQYVNSASIDDAEAETMKTTVSVFQGRVTASARRAAGIEGKIHFIGQQSKTRLDRRHHAVDASVIAMMNTAAAQTLMERESLRESQRLIGLMPGERSWKEYPYEGTSRYESFHLWLDNMDVLLELLNDALDNDRIAVMQSQRYVLGNSIAHDATIHPLEKVPLGSAMSADLIRRASTPALWCALTRLPDYDEKEGLPEDSHREIRVHDTRYSADDEMGFFASQAAQIAVQEGSADIGSAIHHARVYRCWKTNAKGVRKYFYGMIRVFQTDLLRACHDDLFTVPLPPQSISMRYGEPRVVQALQSGNAQYLGSLVVGDEIEMDFPVSMLMVRLASIYNSSRSLVEGTLHGNIGLLMDSLTRRS

SEQ ID NO: 98 - protein, 1138 aa, Bifidobacterium sp.
MNSVGLAAVEVSDENSPVRLLNAQSVIHDGGVDPQKNKEAITRKNMSGVARRTRRMRRRKRERLHKLDMLLGKFGYPVIEPESLDKPFEEWHVRAELATRYIEDDELRRESISIALRHMARHRGWRNPYRQVDSLISDNPYSKQYGELKEKAKAYNDDATAAEEESTPAQLVVAMLDAGYAEAPRLRWRTGSKKPDAEGYLPVRLMQEDNANELKQIFRVQRVPADEWKPLFRSVFYAVSPKGSAEQRVGQDPLAPEQARALKASLAFQEYRIANVITNLRIKDASAELRKLTVDEKQSIYDQLVSPSSEDITWSDLCDFLGFKRSQLKGVGSLTEDGEERISSRPPRLTSVQRIYESDNKIRKPLVAWWKSASDNEHEAMIRLLSNTVDIDKVREDVAYASAIEFIDGLDDDALTKLDSVDLPSGRAAYSVETLQKLTRQMLTTDDDLHEARKTLFNVTDSWRPPADPIGEPLGNPSVDRVLKNVNRYLMNCQQRWGNPVSVNIEHVRSSFSSVAFARKDKREYEKNNEKRSIFRSSLSEQLRADEQMEKVRESDLRRLEAIQRQNGQCLYCGRTITFRTCEMDHIVPRKGVGSTNTRTNFAAVCAECNRMKSNTPFAIWARSEDAQTRGVSLAEAKKRVTMFTFNPKSYAPREVKAFKQAVIARLQQTEDDAAIDNRSIESVAWMADELHRRIDWYFNAKQYVNSASIDDAEAETMKTTVSVFQGRVTASARRAAGIEGKIHFIGQQSKTRLDRRHHAVDASVIAMMNTAAAQTLMERESLRESQRLIGLMPGERSWKEYPYEGTSRYESFHLWLDNMDVLLELLNDALDNDRIAVMQSQRYVLGNSIAHDATIHPLEKVPLGSAMSADLIRRASTPALWCALTRLPDYDEKEGLPEDSHREIRVHDTRYSADDEMGFFASQAAQIAVQEGSADIGSAIHHARVYRCWKTNAKGVRKYFYGMIRVFQTDLLRACHDDLFTVPLPPQSISMRYGEPRVVQALQSGNAQYLGSLVVGDEIEMDFSSLDVDGQIGEYLQFFSQFSGGNLAWKHWVVDGFFNQTQLRIRPRYLAAEGLAKAFSDDVVPDGVQKIVTKQGWLPPVNTASKTAVRIVRRNAFGEPRLSSAHHMPCSWQWRHE

SEQ ID NO: 99 - protein, 1151 aa, Bifidobacterium sp.
  REGION 1..1151: note = Bifidobacterium sp. 12_1_47BFAA
MRGKRYRIGIDVGLNSVGLAAVEVSDENSPVRLLNAQSVIHDGGVDPQKNKEAITRKNMSGVARRTRRMRRRKRERLHKLDMLLGKFGYPVIEPESLDKPFEEWHVRAELATRYIEDDELRRESISIALRHMARHRGWRNPYRQVDSLISDNPYSKQYGELKEKAKAYNDDATAAEEESTPAQLVVAMLDAGYAEAPRLRWRTGSKKPDAEGYLPVRLMQEDNANELKQIFRVQRVPADEWKPLFRSVFYAVSPKGSAEQRVGQDPLAPEQARALKASLAFQEYRIANVITNLRIKDASAELRKLTVDEKQSIYDQLVSPSSEDITWSDLCDFLGFKRSQLKGVGSLTEDGEERISSRPPRLTSVQRIYESDNKIRKPLVAWWKSASDNEHEAMIRLLSNTVDIDKVREDVAYASAIEFIDGLDDDALTKLDSVDLPSGRAAYSVETLQKLTRQMLTTDDDLHEARKTLFNVTDSWRPPADPIGEPLGNPSVDRVLKNVNRYLMNCQQRWGNPVSVNIEHVRSSFSSVAFARKDKREYEKNNEKRSIFRSSLSEQLRADEQMEKVRESDLRRLEAIQRQNGQCLYCGRTITFRTCEMDHIVPRKGVGSTNTRTNFAAVCAECNRMKSNTPFAIWARSEDAQTRGVSLAEAKKRVTMFTFNPKSYAPREVKAFKQAVIARLQQTEDDAAIDNRSIESVAWMADELHRRIDWYFNAKQYVNSASIDDAEAETMKTTVSVFQGRVTASARRAAGIEGKIHFIGQQSKTRLDRRHHAVDASVIAMMNTAAAQTLMERESLRESQRLIGLMPGERSWKEYPYEGTSRYESFHLWLDNMDVLLELLNDALDNDRIAVMQSQRYVLGNSIAHDATIHPLEKVPLGSAMSADLIRRASTPALWCALTRLPDYDEKEGLPEDSHREIRVHDTRYSADDEMGFFASQAAQIAVQEGSADIGSAIHHARVYRCWKTNAKGVRKYFYGMIRVFQTDLLRACHDDLFTVPLPPQSISMRYGEPRVVQALQSGNAQYLGSLVVGDEIEMDFSSLDVDGQIGEYLQFFSQFSGGNLAWKHWVVDGFFNQTQLRIRPRYLAAEGLAKAFSDDVVPDGVQKIVTKQGWLPPVNTASKTAVRIVRRNAFGEPRLSSAHHMPCSWQWRHE

SEQ ID NO: 100 - protein, 1092 aa, Brevibacillus laterosporus
  REGION 1..1092: note = Brevibacillus laterosporus GI-9
MAYTMGIDVGIASCGWAIVDLERQRIIDIGVRTFEKAENPKNGEALAVPRREARSSRRRLRRKKHRIERLKYMFVRNGLAVDIQHLEQTLRSQNEIDVWQLRVDGLDRMLTQKEWLRVLIHLAQRRGFQSNRKTDGSSEDGQVLVNVTENDRLMEEKDYRTVAEMMVKDEKFSDHKRNKNGNYHGVVSRASLLVEIHTLFESQRQHHNFLASKDFELEYINIWSSQRPVATKDQIEKMIGTCTFLPKEKRAPKASWHFQYFMLLQTINHIRITNAQGTRPLNKEEIEQVVNMALTKSKVSYHDIRKVLDLSEEYQFVGLDYGKEDEKKKVESKETIIKLDDYHKLNKIFNEVELAKGETWEAVDYDTVAYALTFFKDDEDIRDYLQNKYKDSKNRLVKNVANKEYTNELIEKVSTLSFRKVGHLSLKALRKIIPFLEQGMTYDKACQAAGFNFQGISKKKRSVVLPVIDQISNPVVNRALTQTRKVINALIKKYGSPETIHIETARELSKRFDERKNITKDYKENRDKNERAKKHLSELGIINPTGLDIVKYKLWCEQQGRCMYSNQPISFERLRESGYTEVDHIIPYSRSMNDSYNNRVLVMTRENREKSNQTPYEYMGNDTQRWDEFEQRVTTNPQIKKEKRQNLLLKGFTNRRELEMLERNLNDTRHITKYLSHFISTNLEFSPSDKKKKVVNTSGRITSHLRSRWGLEKNREQNDLHHAMDAVVIAVTSDSFIQQVTNYYKRKERRELNGDDKFPLPWKFFREEVIARLSPNPKEQIEALPNHFYSEDELADLQPIFVSRMPKRSITGEAHQAQFRRVVGKTKEGKNITAKKTALVDISYDKNGDFNMYGRETDPATYEAIKERYLEFGGNAKKAFSTDLHKPKKDGTKGPLIKSVRIMENKTLVHPVNKGKGVVYNSSIVRTDVFQRKEKYYLLPVYVTDVTKGKLPNKVIAAKKGYDDWIEVDDSFTFLYSLYPNDLIFIRQNPKKKISLKKRIESHSISDSKEVQEILTYYKGVDSSTAAIEFITHDGSYYAKGVGVQNLDCFEKYQVDILGNYSKVKGEKRLELETSDNNHKGKDVNSIKSTSR

SEQ ID NO: 101 - protein, 1428 aa, unidentified
  REGION 1..1428: note = Burkholderiales bacterium 1_1_47
  source 1..1428: note = Burkholderiales bacterium
MGKTHIIGVGLDLGGTYTGTFITSHPSDEAEHRDHSSAFTVVNSEKLSFSSKSRTAVRHRVRSYKGFDLRRRLLLLVAEYQLLQKKQTLAPEERENLRIALSGYLKRKGYARTEAETDTSVLESLDPSVFSSAPSFTNFFNDSEPLNIQWEAIANSPETTKALNKELSGQKEADFKKYIKTSFPEYSAKEILANYVEGRRAILDASKYIANLQSLGHKHRSKYLSDILQDMKRDSRITRLSEAFGSTDNLWRIIGNISNLQERAVRWYFNDAKFEQGQEQLDAVKLKNVLVRALKYLRSDDKEWSASQKQIIQSLEQSGDVLDVLAGLDPDRTIPPYEDQNNRRPPEDQTLYLNPKALSSEYGEKWKSWANKFAGAYPLLTEDLTEILKNTDRKSRIKIRSDVLPDSDYRLAYILQRAFDRSIALDECSIRRTAEDFENGVVIKNEKLEDVLSGHQLEEFLEFANRYYQETAKAKNGLWFPENALLERADLHPPMKNKILNVIVGQALGVSPAEGTDFIEEIWNSKVKGRSTVHSICNAIENERKTYGPYFSEDYKFVKTALKEGKTEKELSKKFAAVIKVLKMVSEVVPFIGKELRLSDEAQSKFDNPYSLAQLYNLIETERNGFSKVSLAAHLENAWRMTMTDGSAQCCRLPADCVRPFDGFIRKAIDRNSWEVAKRIAEEVKKSVDFTNGTVKIPVAIEANSFNFTASLTDLKYIQLKEQKLKKKLEDIQRNEENQEKRWLSKEERIRADSHGICAYTGRPLDDVGEIDHIIPRSLTLKKSESIYNSEVNLIFVSAQGNQEKKNNIYLLSNLAKNYLAAVFGASDLSQITNEIESTVLQLKAAGRLGYFDLLSEKERACARHALFLNSDSEARRAVIDVLGSRRKASVNGTQAWFVRSIFSKVRQALAAWTQETGNELIFDAISVPAADSSEMRKRFAEYRPEFRKPKVQPVASHSIDAMCIYLAACSDPFKTKRMGSQLAIYEPINFDNLFTGSCQVIQNTPRNFSDKTNIANSPIFKETIYAERFLDIIVSRGEIFIGYPSNMPFEEKPNRISIGGKDPFSILSVLGAYLDKAPSSEKEKLTIYRVVKNKAFELFSKVAGSKFTAEEDKAAKILEALHFVTVKQDVAATVSDLIKSKKELSKDSIENLAKQKGCLKKVEYSSKEFKFKGSLIIPAAVEWGKVLWNVFKENTAEELKDENALRKALEAAWPSSFGTRNLHSKAKRVFSLPVVATQSGAVRIRRKTAFGDFVYQSQDTNNLYSSFPVKNGKLDWSSPIIHPALQNRNLTAYGYRFVDHDRSISMSEFREVYNKDDLMRIELAQGTSSRRYLRVEMPGEKFLAWFGENSISLGSSFKFSVSEVFDNKIYTENAEFTKFLPKPREDNKHNGTIFFELVGPRVIFNYIVGGAASSLKEIFSEAGKERS

SEQ ID NO: 102 - protein, 1442 aa, Caenispirillum sp.
  REGION 1..1442: note = Caenispirillum salinarum AK4
  source 1..1442: note = Caenispirillum salinarum
MPVLSPLSPNAAQGRRRWSLALDIGEGSIGWAVAEVDAEGRVLQLTGTGVTLFPSAWSNENGTYVAHGAADRAVRGQQQRHDSRRRRLAGLARLCAPVLERSPEDLKDLTRTPPKADPRAIFFLRADAARRPLDGPELFRVLHHMAAHRGIRLAELQEVDPPPESDADDAAPAATEDEDGTRRAAADERAFRRLMAEHMHRHGTQPTCGEIMAGRLRETPAGAQPVTRARDGLRVGGGVAVPTRALIEQEFDAIRAIQAPRHPDLPWDSLRRLVLDQAPIAVPPATPCLFLEELRRRGETFQGRTITREAIDRGLTVDPLIQALRIRETVGNLRLHERITEPDGRQRYVPRAMPELGLSHGELTAPERDTLVRALMHDPDGLAAKDGRIPYTRLRKLIGYDNSPVCFAQERDTSGGGITVNPTDPLMARWIDGWVDLPLKARSLYVRDVVARGADSAALARLLAEGAHGVPPVAAAAVPAATAAILESDIMQPGRYSVCPWAAEAILDAWANAPTEGFYDVTRGLFGFAPGEIVLEDLRRARGALLAHLPRTMAAARTPNRAAQQRGPLPAYESVIPSQLITSLRRAHKGRAADWSAADPEERNPFLRTWTGNAATDHILNQVRKTANEVITKYGNRRGWDPLPSRITVELAREAKHGVIRRNEIAKENRENEGRRKKESAALDTFCQDNTVSWQAGGLPKERAALRLRLAQRQEFFCPYCAERPKLRATDLFSPAETEIDHVIERRMGGDGPDNLVLAHKDCNNAKGKKTPHEHAGDLLDSPALAALWQGWRKENADRLKGKGHKARTPREDKDFMDRVGWRFEEDARAKAEENQERRGRRMLHDTARATRLARLYLAAAVMPEDPAEIGAPPVETPPSPEDPTGYTAIYRTISRVQPVNGSVTHMLRQRLLQRDKNRDYQTHHAEDACLLLLAGPAVVQAFNTEAAQHGADAPDDRPVDLMPTSDAYHQQRRARALGRVPLATVDAALADIVMPESDRQDPETGRVHWRLTRAGRGLKRRIDDLTRNCVILSRPRRPSETGTPGALHNATHYGRREITVDGRTDTVVTQRMNARDLVALLDNAKIVPAARLDAAAPGDTILKEICTEIADRHDRVVDPEGTHARRWISARLAALVPAHAEAVARDIAELADLDALADADRTPEQEARRSALRQSPYLGRAISAKKADGRARAREQEILTRALLDPHWGPRGLRHLIMREARAPSLVRIRANKTDAFGRPVPDAAVWVKTDGNAVSQLWRLTSVVTDDGRRIPLPKPIEKRIEISNLEYARLNGLDEGAGVTGNNAPPRPLRQDIDRLTPLWRDHGTAPGGYLGTAVGELEDKARSALRGKAMRQTLTDAGITAEAGWRLDSEGAVCDLEVAKGDTVKKDGKTYKVGVITQGIFGMPVDAAGSAPRTPEDCEKFEEQYGIKPWKAKGIPLA

SEQ ID NO: 103 - protein, 984 aa, Campylobacter coli
  REGION 1..984: note = Campylobacter coli 1098
MARILAFDIGISSIGWAFSENDELKDCGVRIFTKAENPKTGESLALPRRLARSARKRLARRKARLNHLKHLIANEFKLNYEDYQSFDESLAKAYKGSLISPYELRFRALNELLSKQDFARVILHIAKRRGYDDIKNNGDEEKSEILKAIKQNEEKLVNYQSVGEYLYKEYFQKFKENSKEFINVRNKKESYERCIAQSFLKDELKLIFQKQREFGFSFSKKFEEEVLSVAFYKRALKDFSHLVGNCSFFTDEKRAPKNSPLAFMFVALTRIINLLNNLKNTEGILYTKDDLNALLNEVLKNGTLTYKQTKKLLGLSDDYEFKGEKGTYFIEFKKYKEFIKALGEHNLSQDDLNEIAKDITLIKDEIKLKKALAKYDLNQNQIDSLSKLEFKDHLNISFKALKLITPLMLEGKKYDEACNELNLKVAINEDKKDFLPAFNETYYKDEVTNPVVLRAIKEYRKVLNALLKKYGKVHKINIELAREVGKNYSQRAKIEKEQNENYKAKKDAELECEKLGLKINSKNILKLRLFKEQKEFCAYSGEKIKISDLQDEKMLEIDHIYPYSRSFDDSYMNKVLVFTKQNQEKLNQTPFEAFGNDSAKWQKIEVLAKNLPTKKQKRILDKNYKDKEQKNFKDRNLNDTRYIARLVLNYTKDYLDFLPLSDDENTKLNDTQKGSKVHVEAKSGMLTSALRHTWGFSAKDRNNHLHHAIDAVIIAYANNSIVKAFSDFKKEQESNSAELYAKKISELDYKNKRKFFEPFSGFRQKVLDKIDEIFVSKPERKKPSGALHEETFRKEEEFYQSYGGKEGVLKALELGKIRKVNGKIVKNGDMFRVDIFKHKKTNKFYAVPIYTMDFALKVLPNKAVARSKKGEIKDWILMDENYEFCFSLYKDSLILIQTKDMQEPEFVYYNAFTSSTVSLIVSKHDNKFETLSKNQKILFKNANEKEVIAKSIGIQNLKVFEKYIVSALGEVTKAEFRQREDFKK

SEQ ID NO: 104 - protein, 984 aa, Campylobacter coli
  REGION 1..984: note = Campylobacter coli 111-3
MARILAFDIGISSIGWAFSENDELKDCGVRIFTKAENPKTGESLALPRRLARSARKRLARRKARLNHLKHLIANEFKLNYEDYQSFDESLAKAYKGSLISPYELRFRALNELLSKQDFARVILHIAKRRGYDDIKNNGDEEKSEILKAIKQNEEKLVNYQSVGEYLYKEYFQKFKENSKEFINVRNKKESYERCIAQSFLKDELKLIFQKQREFGFSFSKKFEEEVLSVAFYKRALKDFSHLVGNCSFFTDEKRAPKNSPLAFMFVALTRIINLLNNLKNTEGILYTKDDLNTLLNEVLKNGTLTYKQTKKLLGLSDDYEFKGEKGTYFIEFKKYKEFIKALGEHNLSQDNLNEIAKDITLIKDEIKLKKALAKYDLNQNQIDSLSKLEFKDHLNISFKALKLITPLMLEGKKYDEAYNELNLKVAINEDKKDFLPAFNETYYKDEVTNPVVLRAIKEYRKVLNALLKKYGKVHKINIELAREVGKNHSQRAKIEKEQNENYKAKKDAELECEKLGLKINSKNILKLRLFKEQKEFCAYSGEKIKISDLQDEKMLEIDHIYPYSRSFDDSYMNKVLVFTKQNQEKLNQTPFEAFGNDSAKWQKIEVLAKNLPTKKQKRILDKNYKDKEQKDFKDRNLNDTRYIARLVLNYTKDYLDFLPLSDDENTKLNDTQKGSKVHVEAKSGMLTSALRHTWGFSAKDRNNHLHHAIDAVIIAYANNSIVKAFSDFKKEQESNSAELYAKKISELDYKNKRKFFEPFSGFRQKVLDKIDEIFVSKPERKKPSGALHEETFRKEEEFYQSYGGKEGVLKALELGKIRKVNGKIVKNGDMFRVDIFKHKKTNKFYAVPIYTMDFALKVLPNKAVARSKKGEIKDWILMDENYEFCFSLYKDSLILIQTKDMQEPELVYFNAFTSSTVSLIVSKHDNKFETLSKNQKILFKNANEKEVIAKSIGIQNLKVFEKYIVSALGEVTKAEFRQREDFKK

SEQ ID NO: 105 - protein, 987 aa, Campylobacter coli
  REGION 1..987: note = Campylobacter coli 132-6
MARILAFDIGISSIGWAFSENDELKDCGVRIFTKAENPKTGESLALPRRLARSARKRLARRKARLNHLKHLIANEFKLNYEDYQSFDESLAKAYKGSLISPYELRFRALNELLSKQDFARVILHIAKRRGYDDIKNNGDEEKSEILKAIKQNEEKLVNYQSVGEYLYKEYFQKFKENSKEFINVRNKKESYERCIAQSFLKDELKLIFQKQREFGFSFSKKFEEEVLSVAFYKRALKDFSHLVGNCSFFTDEKRAPKNSPLAFMFVALTRIINLLNNLKNTEGILYTKDDLNTLLNEVLKNGTLTYKQTKKLLGLSDDYEFKGEKGTYFIEFKKYKEFIKALGEHNLSQDNLNEIAKDITLIKDEIKLKKALAKYDLNQNQIDSLSKLEFKDHLNISFKALKLITPLMLEGKKYDEAYNELNLKVAINEDKKDFLPAFNETYYKDEVTNPVVLRAIKEYRKVLNALLKKYGKVHKINIELAREVGKNHSQRAKIEKEQNENYKAKKDAELECEKLGLKINSKNILKLRLFKEQKEFCAYSGEKIKISDLQDEKMLEIDHIYPYSRSFDDSYMNKVLVFTKQNQEKLNQTPFEAFGNDSAKWQKIEVLAKNLPTKKQKRILDKNYKDKEQKDFKDRNLNDTRYIARLVLNYTKDYLDFLPLSDDENTKLNDTQKGSKVHVEAKSGMLTSALRHTWGFSAKDRNNHLHHAIDAVIIAYANNSIVKAFSDFKKEQESNSAELYAKKISELDYKNKRKFFEPFSGFRQKVLDKIDEIFVSKPERKKPSGALHEETFRKEEEFYQSYGGKEGVLKALELGKIRKVNGKIVKNGDMFRVDIFKHKKTNKFYAVPIYTMDFALKVLPNKAVARSKKGEIKDWILMDENYEFCFSLYKDSLILIQTKDMQEPELVYFNAFTSSTVSLIVSKHDNKFETLSKNQKILFKNANEKEVIAKSIGIQNLKVFEKYIVSALGEVTKAEFRQREDFKNELR

SEQ ID NO: 106 - protein, 984 aa, Campylobacter coli
  REGION 1..984: note = Campylobacter coli 151-9
MARILAFDIGISSIGWAFSENDELKDCGVRIFTKAENPKTGESLALPRRLARSARKRLARRKARLNHLKHLIANEFKLNYEDYQSFDESLAKAYKGSLISPYELRFRALNELLSKQDFARVILHIAKRRGYDDIKNNGDEEKSEILKAIKQNEEKLVNYQSVGEYLYKEYFQKFKENSKEFINVRNKKESYERCIAQSFLKDELKLIFQKQREFGFSFSKKFEEEVLSVAFYKRALKDFSHLVGNCSFFTDEKRAPKNSPLAFMFVALTRIINLLNNLKNTEGILYTKDDLNTLLNEVLKNGTLTYKQTKKLLGLSDDYEFKGEKGTYFIEFKKYKEFIKALGEHNLSQDNLNEIAKDITLIKDEIKLKKALAKYDLNQNQIDSLSKLEFKDHLNISFKALKLITPLMLEGKKYDEAYNELNLKVAINEDKKDFLPAFNETYYKDEVTNPVVLRAIKEYRKVLNALLKKYGKVHKINIELAREVGKNHSQRAKIEKEQNENYKAKKDAELECEKLGLKINSKNILKLRLFKEQKEFCAYSGEKIKISDLQDEKMLEIDHIYPYSRSFDDSYMNKVLVFTKQNQEKLNQTPFEAFGNDSAKWQKIEVLAKNLPTKKQKRILDKNYKDKEQKDFKDRNLNDTRYIARLVLNYTKDYLDFLPLSNDENTKLNDTQKGSKVHVEAKSGMLTSALRHTWGFSAKDRNNHLHHAIDAVIIAYANNSIVKAFSDFKKEQESNSAELYAKKISELDYKNKRKFFEPFSGFRQKVLDKIDEIFVSKPERKKPSGALHEETFRKEEEFYQSYGGKEGVLKALELGKIRKVNGKIVKNGDMFRVDIFKHKKTNKFYAVPIYTMDFALKVLPNKAVARSKKGEIKDWILMDENYEFCFSLYKDSLILIQTKDMQEPELVYFNAFTSSTVSLIVSKHDNKFETLSKNQKILFKNANEKEVIAKSIGIQNLKVFEKYIVSALGEVTKAEFRQREDFKK

SEQ ID NO: 107 - protein, 984 aa, Campylobacter coli
  REGION 1..984: note = Campylobacter coli 1909
MARILAFDIGISSIGWAFSENDELKDCGVRIFTKAENPKTGESLALPRRLARSARKCLARRKARLNHLKHLIANEFKLNYEDYQSFDESLAKAYKGSLISPYELRFRALNELLSKQDFARVILHIAKRRGYDDIKNNGDEEKSEILKAIKQNEEKLVNYQSVGEYLYKEYFQKFKENSKEFINVRNKKESYERCIAQSFLKDELKLIFQKQREFGFSFSKKFEEEVLSVAFYKRALKDFSHLVGNCSFFTDEKRAPKNSPLAFMFVALTRIINLLNNLKNTEGILYTKDDLNALLNEVLKNGTLTYKQTKKLLGLSDDYEFKGEKGTYFIEFKKYKEFIKALGEHNLSQDDLNEIAKDITLIKDEIKLKKALAKYDLNQNQIDSLSKLEFKDHLNISFKALKLITPLMLEGKKYDEACNELNLKVAINEDKKDFLPAFNETYYKDEVTNPVVLRAIKEYRKVLNALLKKYGKVHKINIELAREVGKNHSQRAKIEKEQNENYKAKKDAELECEKLGLKINSKNILKLRLFKEQKEFCAYSGEKIKISDLQDEKMLEIDHIYPYSRSFDDSYMNKVLVFTKQNQEKLNQTPFEAFGNDSAKWQKIEVLAKNLPTKKQKRILDKNYKDKEQKNFKDRNLNDTRYIARLVLNYTKDYLDFLPLSDDENTKLNDTQKGSKVHVEAKSGMLTSALRHTWGFSAKDRNNHLHHAIDAVIIAYANNSIVKAFSDFKKEQESNSAELYAKKISELDYKNKRKFFEPFSGFRQKVLDKIDEIFVSKPERKKPSGALHEETFRKEEEFYQSYGGKEGVLKALELGKIRKVNGKIVKNGDMFRVDIFKHKKTNKFYAVPIYTMDFALKVLPNKAVARSKKGEIKDWILMDENYEFCFSLYKDSLILIQTKDMQEPEFVYYNAFTSSTVSLIVSKHDNKFETLSKNQKILFKNANEKEVIAKSIGIQNLKVFEKYIVSALGEVTKAEFRQREDFKK

SEQ ID NO: 108 - protein, 965 aa, Campylobacter coli
  REGION 1..965: note = Campylobacter coli 1957
MKIIGFNLGIANIGWALRENDEIIDCGVRVFDIPENPKNGNSLALERRENKARMKIVKRKKARMLATKTFLKKELNVDLSKLFLIGSTQSIYELRTKALSSLISKEELSAIILHIAKHRGYDDSALKNENGTIIEALNKNKEAMLKFKSVGEYFYKNFVQNKEVKKIRNTTEDYSNSVPRSLLKQELDLILDKQKELGLIKNADFKEKLFEIIFFKRPLKDFSNKIGNCIFFENEKRAAKNTISACEFVALGKVVNLLKSIEKDIGIVYEKDSINEIMSIILDKTSISYKKIRDILNLPQDINFKGLDYSKNNAENSKLVDLKKLNEFKKALGDGFANLDKDILDSIATDITLTKDTATLKEKLKNYNVLNAEQIEKLSELVFNDHINLSLKALKQIIPLMYEGKRYDEACELCNFTIAKNQEKNEYLPLFEKTRFAKDISSPVVIRAICEFRKLLNDIIRRYGSVHKIHLELTRDFGISFNDRKKIIKEIEQNEQSRIKALETIKELKLEETSKNIQIVRLFEDQKGICPYSGLKMDLKCLDELVIDYIRPYNRSLDDSYSNKILTFKKLNDLKQGKTPFEAFGEDEKLWAEINERIKEYNGKKRFKIFDKFFKDKKPFDFTEQTLQDTRWLTKLVASYLNEYLLFLPINEDENTALGYGEKGSKQHVVLSSGMITQMLRNFWYLGFKNHKDYKNNAMDAIIVAFTTNSIIFAFNNFKKELDLAKAEFYANKISESDYLLKRKFLPPFSGFKEQALEKVKNIFVSHSLKIKNKGTLHELTPLKIKELKNTYGDLDLAVKLGKIRKYNDKYYANAKGSLVRTDLFADKENKFHAVSIYKADFSTKKLPNKTPATTSNGETKEGIEMNENYNFCMSLYKNTPISVKIKGMKEPIICYYHGFNTSGSKITYKKHDNNYHNLSEDEMVVFRKNDKESIVVGKILEIKKYSISPSGELSLIENEERKWF

SEQ ID NO: 109 - protein, 984 aa, Campylobacter coli
  REGION 1..984: note = Campylobacter coli 2692
MARILAFDIGISSIGWAFSENDELKDCGVRIFTKAENPKTGESLALPRRLARSARKRLARRKARLNHLKHLIANEFKLNYEDYQSFDESLAKAYKGSLISPYELRFRALNELLSKQDFARVILHIAKRRGYDDIKNSDDKEKGAILKAIKQNEEKLTNYQSVGEYLYKEYFQKFKENSKEFTNVRNKKESYERCIAQSFLKDELKLIFKKQREFGFSFSKKFEEEVLSVAFYKRALKDFSHLVGNCSFFTDEKRAPKNSPLAFMFVALTRIINLLNNLKNTEGILYTKDDLNALLNEVLKNGTLTYKQTKKLLGLSDDYEFKGEKGTYFIEFKKYKEFIKALGDHSLSQDDLNEIAKDITLIKDEIKLKKALAKYDLNQNQIDSLSKLEFKDHLNISFKALKLITPLMLEGKKYDEACNELNLKVAINEDKKDFLPAFNETYYKDEVTNPVVLRAIKEYRKVLNALLKKYGKVHKINIELAREVGKNYSQRAKIEKEQNENYKAKKDAELECEKLGLKINSKNILKLRLFKEQKEFCAYSGEKIKISDLQDEKMLEIDHIYPYSRSFDDSYMNKVLVFTKQNQEKLNQTPFEAFGNDSAKWQKIEVLAKNLPTKKQKRILDKNYKDKEQKDFKDRNLNDTRYIARLVLNYTKDYLDFLPLSDDENTKLNDTQKGSKVHVEAKSGMLTSALRHTWGFSAKDRNNHLHHAIDAVIIAYANNSIVKAFSDFKKEQESNSAELYAKKISELDYKNKRKFFEPFSGFRQKVLDKIDEIFVSKPERKKPSGALHEETFRKEEEFYQSYGGKEGVLKALELGKIRKVNGKIVKNGDMFRVDIFKHKKTNKFYAVPIYTMDFALKVLPNKAVARSKKGEIKDWILMDENYEFCFSLYKDSLILIQTKDMQEPEFVYYNAFTSSTVSLIVSKHDNKFETLSKNQKILFKNANEKEVIAKSIGIQNLKVFEKYIVSALGEVTKAEFRQREDFKK

SEQ ID NO: 110 - protein, 984 aa, Campylobacter coli
  REGION 1..984: note = Campylobacter coli 59-2
MARILAFDIGISSIGWAFSENDELKDCGVRIFTKAENPKTGESLALPRRLARSARKRLARRKARLNHLKHLIANEFKLNYEDYQSFDESLAKAYKGSLISPYELRFRALNELLSKQDFARVILHIAKRRGYDDIKNNGDEEKGKILKAIKQNEEKLVNYQSVGEYLYKEYFQKFKENSKEFINVRNKKESYERCITQSFLKYELKLIFQKQREFGFSFSKKFEEEVLSVAFYKRALKDFSHLVGNCSFFSDEKRAPKNSPLAFMFVALTRIINLLNNLKNTEGILYTKDDLNALLNEVLKNGTLTYKQTKKLLGLSDDYEFKGEKGTYFIEFKKYKEFIKALGEHNLSQDDLNEIAKDITLIKDEIKLKKALAKYDLNQNQIDSLSKLEFKDHLNISFKALKLITPLMLEGKKYDEACNELNLKVAINEDKKDFLPAFNETYYKDEVTNPVVLRAIKEYRKVLNALLKKYGKVHKINIELAREVGKNYSQRAKIEKEQNENYKAKKDAELECEKLGLKINSKNILKLRLFKEQKEFCAYSGEKIKISDLQDEKMLEIDHIYPYSRSFDDSYMNKVLVFTKQNQEKLNQTPFEAFGNDSAKWQKIEVLAKNLPTKKQKRILDKNYKDKEQKNFKDRNLNDTRYIARLVLNYTKDYLDFLPLSDDENTKLNDTQKGSKVHVEAKSGMLTSALRHTWGFSAKDRNNHLHHAIDAVIIAYANNSIVKAFSDFKKEQESNSAELYAKKISELDYKNKRKFFEPFSGFRQKVLDKIDEIFVSKPERKKPSGALHEETFRKEEEFYQSYGGKEGVLKALELGKIRKVNGKIVKNGDMFRVDIFKHKKTNKFYAVPIYTMDFALKVLPNKAVARSKKGEIKDWILMDENYEFCFSLYKDSLILIQTKDMQEPEFVYYNAFTSSTVSLIVSKHDNKFETLSKNQKILFKNANEKEVIAKSIGIQNLKVFEKYIVSALGEVTKAEFRQREDFKK

SEQ ID NO: 111 - protein, 965 aa, Campylobacter coli
  REGION 1..965: note = Campylobacter coli 67-8
MKIIGFNLGIANIGWALRENDEIIDCGVRVFDIPENPKNGNSLALERRENKARMKIVKRKKARMLATKTFLKKELNVDLSKLFLIGSTQSIYELRTKALSSLISKEELSAIILHIAKHRGYDDSALKNENGTIIEALNKNKEAMLKFKSVGEYFYKNFVQNKEVKKIRNTTEDYSNSVPRSLLKQELDLILDKQKELGLIKNADFKAKLFEIIFFKRPLKDFSNKIGNCIFFENEKRAAKNTISACEFVALGKVVNLLKSIEKDIGIVYEKDSINEIMSIILDKTSISYKKIRDILNLPQDINFKGLDYSKNNAENSKLVDLKKLNEFKKALGDGFANLDKDILDSIATDITLTKDTATLKEKLKNYNVLNAEQIEKLSELVFNDHINLSLKALKQIIPLMYEGKRYDEACELCNFTIAKNQEKNEYLPLFEKTRFAKDISSPVVIRAICEFRKLLNDIIRRYGSVHKIHLELTRDFGISFNDRKKIIKEIEQNEQSRIKALETIKELKLEETSKNIQIVRLFEDQKGICPYSGLKMDLKCLDELVIDYIRPYNRSLDDSYSNKVLTFKKLNDLKQGKTPFEAFGEDEKLWAEINERIKEYNGKKRFKIFDKFFKDKKPFDFTEQTLQDTRWLTKLVASYLNEYLSFLPISEDENTALGYGEKGSKQHVVLSSGMITQMLRNFWYLGFKNHKNYKNNAMDAIIVAFTTNSIIFAFNNFKKELDLAKAEFYANKISESDYLLKRKFLPPFSGFKEQALEKVKNIFVSHSLKIKNKGTLHELTPLKIKELKNTYGDLDLAVKLGKIRKYNDKYYANTKGSLVRTDLFVDKENKFHAVSIYKADFSTKKLPNKTPATTSNGETKEGIEMNENYNFCMSLYKNTPVSVKIKGMKEPIICYYHGFNTSGSKITYKKHDNNYHNLSEDEMVVFRKNDKESIVVGKILEIKKYSISPSGELSLIENEKRKWF

SEQ ID NO: 112 - protein, 965 aa, Campylobacter coli
  REGION 1..965: note = Campylobacter coli 80352
MKIIGFNLGIANIGWALRENDEIIDCGVRVFDIPENPKNGNSLALERRENKARMKIVKRKKARMLATKTFLKKELNVDLSKLFLIGSTQSIYELRTKALSSLISKEELSAIILHIAKHRGYDDSALKNENGTIIEALNKNKEAMLKFKSVGEYFYKNFVQNKEVKKIRNTTEDYSNSVPRSLLKQELDLILDKQKELGLIKNADFKAKLFEIIFFKRPLKDFSNKIGNCIFFENEKRAAKNTISACEFVALGKVVNLLKSIEKDIGIVYEKDSINEIMSIILDKTSISYKKIRDILNLPQDINFKGLDYSKNNVENSKLVDLKKLNEFKKALGDGFTNLDKDILDSIATDITLTKDTATLKEKLKNYNVLNAEQIEKLSELVFNDHINLSLKALKQIIPLMYEGKRYDEACELCNFTIAKNQEKNEYLPLFEKTRFAKDISSPVVIRAICEFRKLLNDIIRRYGSVHKIHLELTRDFGISFNDRKKIIKEIEQNEQSRIKALETIKELKLEETSKNIQIVRLFEDQKGICPYSGLKMDLKCLDELVIDYIRPYNRSLDDSYSNKVLTFKKLNDLKQGKTPFEAFGEDEKLWAEINERIKEYNGKKRFKIFDKFFKDKKPFDFTEQTLQDTRWLTKLVASYLNEYLSFLPISEDENTALGYGEKGSKQHVILSSGMITQMLRNFWYLGFKNHKDYKNNAMDAIIVAFTTNSIIFTFNNFKKELDLAKAEFYANKISESDYLLKRKFLPPFSGFKEQALEKVKNIFVSHSLKIKNKGTLHELTPLKIKELKNTYGDLDLAVKLGKIRKYNDKYYANAKGSLVRTDLFADKENKFHAVSIYKADFSTKKLPNKTPATTSNGETKEGIEMNENYNFCMSLYKNTPISVKIKGMKEPIICYYHGFNTSGSKITYKKHDNNYHNLSEDEMVVFRKNDKESIVVGKILEIKKYSISPSGELSLIENEERKWF

SEQ ID NO: 113 - protein, 987 aa, Campylobacter coli
  REGION 1..987: note = Campylobacter coli 80352
MARILAFDIGISSIGWAFSENDELKDCGVRIFTKAENPKTGESLALPRRLARSARKRLARRKARLNHLKHLIANEFKLNYEDYQSFDESLAKAYKGSLISPYELRFRALNELLSKQDFARVILHIAKRRGYDDIKNSDDKEKGAILKAIKQNEEKLANYQSVGEYLYKEYFQKFKENSKEFTNVRNKKESYERCIAQSFLKDELKLIFKKQREFGFSFSKKFEEEVLSVAFYKRALKDFSHLVGNCSFFTDEKRAPKNSPLAFMFVALTRIINLLNNLKNTEGILYTKDDLNALLNEVLKNGTLTYKQTKKLLGLSDDYEFKGEKGTYFIEFKKYKEFIKALGDHSLSQDDLNEIAKDITLIKDEIKLKKALAKYDLNQNQIDSLSKLEFKDHLNISFKALKLITPLMLEGKKYDEACNELNLKVAINEDKKDFLPAFNETYYKDEVTNPVVLRAIKEYRKVLNALLKKYGKVHKINIELAREVGKNYSQRAKIEKEQNENYKAKKDAELECEKLGLKINSKNILKLRLFKEQKEFCAYSGEKIKISDLQDEKMLEIDHIYPYSRSFDDSYMNKVLVFTKQNQEKLNKTPFEAFGNDSTKWQKIEVLAKNLPEKKQKRILDKNYKDKEQKDFKDRNLNDTRYIARLVLNYTKDYLDFLPLSDDENTKLNDTQKGSKVHVEAKSGMLTSALRHTWGFSTKDRNNHLHHAIDAVIIAYANNSIVKAFSDFKKEQESNSAELYAKKISELDYKNKRKFFEPFSGFRQKVLDKIDEIFVSKPERKKPSGALHEETFRKEEEFYQSYGGKEGVLKALELGKIRKVNGKIVKNGDMFRVDIFKHKKTNKFYAVPIYTMDFALKVLPNKAVARSKKGEIKDWILMDENYEFCFSLYKDSLILIQTKDMQEPEFVYYNAFTSSTVSLIVSKHDNKFETLSKNQKILFKNANEKEVIAKSIGIQNLKVFEKYIVSALGEVTKAEFRQREDFKNELR

SEQ ID NO: 114 - protein, 984 aa, Campylobacter jejuni
MAKILAFDIGISSIGWAFSENDELKDCGVRIFTKAENPKTGESLALPRRIARSARKRLARRKARLNHLKHLIANEFKLNYEDYQSFDEILAKAYKGSLISPYELRFRALNELLSKQDFARVILHIAKRRGYDDIKNNGDEEKGKILKAIKQNEEKLANYQSVGEYLYKEYFQKFKENSKEFINVRNKKESYERCIAQSFLKDELKLIFKKQREFGFSFSKKFEEEVLSVAFYKRALKDFSHLVGNCSFFTDEKRAPKNSPLAFMFVALTRIINLLNNLKNTLYTKDDLNALLNEVLKNGTLTYKQTKKLLGLSDDYEFKGEKGNYFIEFKKYKEFIKALGEHSLSQDDLNEIAKDITLIKDEIKLKKALAKYDLNENQIDNLSKLEFKDHLNISFKALKLITPLMLEGKKYDEACNELTLKVAINEDKKDFLPAFNETYYKDEVTNPVVLRAIKEYRKVLNALLKKYGKVHKINIELAREVGKNHSQRAKIEKEQNENYKAKKDAELECEKLGLKINSKNILKLRLFKEQKEFCVYSGEKIKLSDLQDEKMLEIDHIYPYSRSFDDSYMNKVLVFTKQNQEKLNQTPFEAFGNDSAKWQKIEVLAKNLPTKKQKRILDKNYKDKEQKDFKDRNLNDTRYIARLVLNYTKDYLDFLPLSDDENTKLNDTQKGSKVHVEAKSGMLTSALRHTWGFSTKDRNNHLHHAIDAVIIAYANNSIVKAFSDFKKEQESNTAELYAKKISELDYKNKRKFFEPFSGFRQKVLDKIDEIFVSKPERKKPSGALHEETFRKEEEFYQSYGGKEGVLKALELGKIRKVNGKIVKNGDMFRVDIFKHKKTNKFYAVPIYTMDFALKVLPNKAVARSKKGEIKDWILMDENYEFCFSLYKDSLILIQTKDMQEPEFVYYNAFTSSTVSLIVSKHDNKFETLSKNQKILFKNANEKEVIAKSIGIQNLKVFEKYIVSALGEVTKAEFRQREEFKNELR

SEQ ID NO: 115 - protein, 987 aa, Campylobacter jejuni
  REGION 1..987: note = Campylobacter jejuni subsp. jejuni 110-21
MARILAFDIGISSIGWAFSENDELKDCGVRIFTKAENPKTGESLALPRRLARSARKRLARRKARLNHLKHLIANEFKLNYEDYQSFDESLAKAYKGSLISPYELRFRALNELLSKQDFARVILHIAKRRGYDNIKNSDNEEKSEILKAIKQNEEKLVNYQSVGEYLYKEYFQKFKENSKEFINVRNKKESYERCIAQSFLKDELKLIFQKQREFGLSFSKKFEEEVLSVAFYKRALKDFSHLVGNCSFFTDEKRAPKNSPLAFMFVALTRIINLLNNLKNTEGILYTKDDLNTLLNEVLKNGTLTYKQTKKLLGLSDDYEFKGEKGTYFIEFKKYKEFIKALGDHSLSQDDLNEIAKDITLIKDEIKLKKALAKYDLNQNQIDSLSKLEFKDHLNISFKALKLITPLMLEGKKYDEACNELNLKVVINEDKKDFLPAFNETYYKDEVTNPVVLRAIKEYRKVLNALLKKYGKVHKINIELAREVGKNHSQRAKIEKEQNENYKAKKDAELECEKLGLKINNKNILKLRLFKEQKEFCAYSGEKIKLSDLQDEKMLEIDHIYPYSRSFDDSYMNKVLVFTKQNQEKLNKTPFEAFGNDSTKWQKIEVLAKNLPTKKQKRILDKNYKDKEQKDFKDRNLNDTRYIARLVLNYTKDYLDFLPLSDDENTKLNDIQKGSKVHVEAKSGMLTSALRHTWGFSTKDRNNHLHHAIDAVIIAYANNSIVKAFSDFKKEQESNSAELYAKKISELDYKNKRKFFEPFSGFRQKVLDKIDEIFVSKPERKKPSGALHEETFRKEEEFYQSYGGKEGVLKALELGKIRKVNGKIVKNGDMFRVDIFKHKKTNKFYAVPIYTMDFALKVLPNKAVVQGKDKKSGLIKDWILMDENYEFCFSLYKDSLILIQTKDMQEPEFVYYNAFTSSTVSLIVSKHDNKFETLSKNQKILFKNANEKEVIAKSIGIQNLKVFEKYIVSALGEVTKAEFRQREDFKK

SEQ ID NO: 116 - protein, 987 aa, Campylobacter jejuni
  REGION 1..987: note = Campylobacter jejuni subsp. jejuni 129-258
MARILAFDIGISSIGWAFSENDELKDCGVRIFTKAENPKTGESLALPRRLARSARKRLARRKARLNHLKHLIANEFKLNYEDYQSFNESLAKAYKGSLISPYELRFRALNELLSKQDFARVILHIAKRRGYDDIKNSDDKEKGAILKVIKQNEEKLANYQSVGEYLYKEYFQKFKENSKEFTNVRNKKESYERCIAQSFLKDELKLIFQKQREFGFSFSKKFEEEVLSVAFYKRALKDFSHLVGNCSFFTDEKRAPKNSPLAFMFVALTRIINLLNNLKNTEGILYTKDDLNALLNEVLKNGTLTYKQTKKLLGLSDDYEFKGEKGTYFIEFKKYKEFIKALGDHSLSQDDLNEIAKDITLIKDEIKLKKALAKYDLNQNQIDSLSKLEFKDHLNISFKALKLITPLMLEGKKYDEACNELNLKVAINEDKKDFLPAFNETYYKDEVTNPVVLRAIKEYRKVLNALLKKYGKVHKINIELAREVGKNYSQRAKIEKEQNENYKAKKDAELECEKLGLKINSKNILKLRLFKEQKEFCAYSGEKIKISDLQDEKMLEIDHIYPYSRSFDDSYMNKVLVFTKQNQEKLNQTPFEAFGNDSAKWQKIEVLAKNLPTKKQKRILDKNYKDKEQKDFKDRNLNDTRYIARLVLNYTKDYLDFLPLSDDENTKLNDTQKGSKVHVEAKSGMLTSALRHTWGFSAKDRNNHLHHAIDAVIIAYANNSIVKAFSDFKKEQESNSAELYAKKISELDYKNKRKFFEPFSGFRQKVLDKIDEIFVSKPERKKPSGALHEETFRKEEEFYQSYGGKEGVLKALELGKIRKVNGKIVKNGDMFRVDIFKHKKTNKFYAVPIYTMDFALKVLPNKAVARSKKGEIKDWILMDENYEFCFSLYKDSLILIQTKDMQEPELVYFNAFTSSTVSLIVSKHDNKFETLSKNQKILFKNANEKEVIAKSIGIQNLKVFEKYIVSALGEVTKAEFRQREDFKNELR

SEQ ID NO: 117 - protein, 987 aa, Campylobacter jejuni
  REGION 1..987: note = Campylobacter jejuni subsp. jejuni 1336
MARILAFDIGISSIGWAFSENDELKDCGVRIFTKAENPKTGESLALPRRLARSARKRLARRKARLNHLKHLIANEFKLNYEDYQSFDESLAKAYKGSLISPYELRFRALNELLSKQDFARVILHIAKRRGYDDIKNNGDEEKGKILKAIKQNEEKLVSYQSVGEYLYKEYFQKFKENSKEFINVRNKKESYERCIAQSFLKDELKLIFQKQREFGFSFSKKFEEEVLSVAFYKRALKDFSHLVGNCSFLLMKKERQKNSPLAFMFVALTRIINLLNNLKNTEGILYTKDDLNTLLNEALKNGTLTYKQTKKLLGLSNDYEFKGEKGTYFIEFQKYKEFVKALGEHNLSQDDLNEIAKDITLIKDEIKLKKALAKYDLNQNQIDSLSKLEFKDHLNISFKALKLITPLMLEGKKYDEACNELNLKVAINEDKKDFLPAFNETYYKDEVTNPVVLRAIKEYRKVLNALLKKYGKVHKINIELAREVGKNHSQRAKIEKEQNENYKAKKDAELECEKLGLKINSKNILKLRLFKEQKEFCVYSGEKIKISDLQDEKMLEIDHIYPYSRSFDDSYMNKVLVFTKQNQEKLNKTPFETFGNDRVKWQKIEVLAKNLPTKKQKRILDKNYKDKEQKDFKDRNLNDTRYIARLVLNYTKDYLDFLPLSDDENTKLNDTQKGSKVHVEAKSGMLTSTLRHTWGFSTKDRNNHLHHAIDAAIIAYANNSIVKAFSDFKKEQESNTAELYAKKISELDYKNKRKFFEPFSGFRQKLLDKIDEIFVSKPERKKPSGALHEETFRKEEEFYQSYGGKEGVLKALELGKIRKVNGKMVKNGDMFRVDIFKHKKTNKFYAVPIYTMDFALKVLPNKAVVQGKDKKSGLIKDWILMDENYEFCFSLYKDSLILIQTKDMQEPELVYYERLDSSNASLTVSKHDNKFETLSKNQKILFKNANEKEVIAKSIGIQNLKVFEKYIVSALGEVTKAEFRQREDFKK

SEQ ID NO: 118 - protein, 984 aa, Campylobacter jejuni
  REGION 1..984: note = Campylobacter jejuni subsp. jejuni 140-16
MARILAFDIGISSIGWAFSENDELKDCGVRIFTKVENPKTGESLALPRRLARSARKRLARRKARLNHLKHLIANEFKLNYEDYQSFDESLAKAYKGSLISPYELRFRALNELLSKQDFARVILHIAKRRGYDDIKNSDDKEKGAILKAIKQNEEKLANYQSVGEYLYKEYFQKFKENSKEFTNVRNKKESYERCIAQSFLKDELKLIFKKQREFGFSFSKKFEEEVLSVAFYKRALKDFSHLVGNCSFFTDEKRAPKNSPLAFMFVALTRIINLLNNLKNTEGILYTKDDLNALLNEVLKNGTLTYKQTKKLLGLSDDYEFKGEKGTYFIEFKKYKEFIKALGEHNLSQDDLNEIAKDITLIKDEIKLKKALAKYDLNQNQIDSLSKLEFKDHLNISFKALKLITPLMLEGKKYDEACNELNLKVAINEDKKDFLPAFNETYYKDEVTNPVVLRAIKEYRKVLNALLKKYGKVHKINIELAREVGKNHSQRAKIEKEQNENYKAKKDAELECEKLGLKINSKNILKLRLFKEQKEFCAYSGEKIKISDLQDEKMLEIDHIYPYSRSFDDSYMNKVLVFTKQNQEKLNKTPFEAFGNDSAKWQKIEVLAKNLPTKKQKRILDKNYKDKEQKDFKDRNLNDTRYIARLVLNYTKDYLDFLPLSDDENTKLNDTQKGSKVHVEAKSGMLTSALRHTWGFSTKDRNNHLHHAIDAVIIAYANNSIVKAFSDFKKEQESNSAELYAKKISELDYKNKRKFFEPFSGFRQKVLDKIDEIFVSKPERKKPSGALHEETFRKEEEFYQSYGGKEGVLKALELGKIRKVNGKIVKNGDMFRVDIFKHKKTNKFYAVPIYTMDFALKVLPNKAVARSKKGEIKDWILMDENYEFCFSLYKDSLILIQTKDMQEPEFVYYNAFTSSTVSLIVSKHDNKFETLSKNQKILFKNANEKEVIAKSIGIQNLKVFEKYIVSALGEVTKAEFIQREDFKK

SEQ ID NO: 119 - protein, 984 aa, Campylobacter jejuni
  REGION 1..984: note = Campylobacter jejuni subsp. jejuni 1577
MARILAFDIGISSIGWAFSENDELKDCGVRIFTKVENPKTGESLALPRRLARSARKRLARRKVRLNHLKHLIANEFKLNYEDYQSFDESLAKAYKGSLISPYELRFRALNELLSKQDFARVILHIAKRRGYDDIKNSDDKEKGAILKAIKQNEEKLANYQSVGEYLYKEYFQKFKENSKEFTNVRNKKESYERCIAQSFLKDELKLIFKKQREFGFSFSKKFEEEVLSVAFYKRALKDFSHLVGNCSFFTDEKRAPKNSPLAFMFVALTRIINLLNNLKNTEGILYTKDDLNALLNEVLKNGTLTYKQTKKLLGLSDDYEFKGEKGTYFIEFKKYKEFIKALGEHNLSQDDLNEIAKDITLIKDEIKLKKALAKYDLNQNQIDSLSKLEFKDHLNISFKALKLITPLMLEGKKYDEACNELNLKVAINEDKKDFLPAFNETYYKDEVTNPVVLRAIKEYRKVLNALLKKYGKVHKINIELAREVGKNHSQRAKIEKEQNENYKAKKDAELECEKLGLKINSKNILKLRLFKEQKEFCAYSGEKIKISDLQDEKMLEIDHIYPYSRSFDDSYMNKVLVFTKQNQEKLNKTPFEAFGNDSAKWQKIEVLAKNLPTKKQKRILDKNYKDKEQKDFKDRNLNDTRYIARLVLNYTKDYLDFLPLSDDENTKLNDTQKGSKVHVEAKSGMLTSALRHTWGFSTKDRNNHLHHAIDAVIIAYANNSIVKAFSDFKKEQESNSAELYAKKISELDYKNKRKFFEPFSGFRQKVLDKIDEIFVSKPERKKPSGALHEETFRKEEEFYQSYGGKEGVLKALELGKIRKVNGKIVKNGDMFRVDIFKHKKTNKFYAVPIYTMDFALKVLPNKAVARSKKGEIKDWILMDENYEFCFSLYKDSLILIQTKDMQEPEFVYYNAFTSSTVSLIVSKHDNKFETLSKNQKILFKNANEKEVIAKSIGIQNLKVFEKYIVSALGEVTKAEFRQREDFKK

SEQ ID NO: 120 - protein, 987 aa, Campylobacter jejuni
  REGION 1..987: note = Campylobacter jejuni subsp. jejuni 1854
MARILAFDIGISSIGWAFSENDELKDCGVRIFTKAENPKTGESLALPRRLARSARKRLARRKARLNHLKHLIANEFKLNYEDYQSFDESLAKAYKGSLISPYELRFRALNELLSKQDFARVILHIAKRRGYDDIKNSDDKEKGAILKAIKQNEEKLANYQSVGEYLYKEYFQKFKENSKEFTNVRNKKESYERCIAQSFLKDELKLIFKKQREFGFSFSKKFEEEVLSVAFYKRALKDFSHLVGNCSFFTDEKRAPKNSPLAFMFVALTRIINLLNNLKNTEGILYTKDDLNTLLNEVLKNGTLTYKQTKKLLGLSDDYEFKGEKGTYFIEFKKYKEFIKSLGDHSLSQDDLNEIAKDITLIKDEIKLKKALAKYDLNQNQIDSLSKLEFKDHLNISFKALKLITPLMLEGKKYDEACNELNLKVAINEDKKDFLPAFNETYYKDEVTNPVVLRAIKEYRKVLNALLKKYGKVHKINIELAREVGKNHSQRAKIEKEQNENYKAKKDAELECEKLGLKINSKNILKLRLFKEQKEFCAYSGEKIKISDLQDEKMLEIDHIYPYSRSFDDSYMNKVLVFTKQNQEKLNQTPFEAFGNDSAKWQKIEVLAKNLPTKKQKRILDKNYKDKEQKNFKDRNLNDTRYIARLVLNYTKDYLDFLPLSDDENTKLNDTQKGSKVHVEAKSGMLTSALRHTWGFSAKDRNNHLHHAIDAVIIAYANNSIVKAFSDFKKEQESNSAELYAKKISELDYKNKRKFFEPFSGFRQKVLDKIDEIFVSKPERKKPSGALHEETFRKEEEFYQSYGGKEGVLKALELGKIRKVNGKIVKNGDMFRVDIFKHKKTNKFYAVPIYTMDFALKVLPNKAVARSKKGEIKDWILMDENYEFCFSLYKDSLILIQTKDMQEPEFVYYNAFTSSTVSLIVSKHDNKFETLSKNQKILFKNANEKEVIAKSIGIQNLKVFEKYIVSALGEVTKAEFRQREDFKNELR

SEQ ID NO: 121 - protein, 984 aa, Campylobacter jejuni
  REGION 1..984: note = Campylobacter jejuni subsp. jejuni 1997-10
MARILAFDIGISSIGWAFSENDELKDCGVRIFTKAENPKTGESLALPRRLARSARKRLARRKARLNRLKHLIANEFKLNYEDYQSFDESLAKAYKGSLISPYELRFRALNELLSKQDFARVILHIAKRRGYDDIKNSDDKEKGAILKAIKQNEEKLANYQSVGEYLYKEYFQKFKENSKEFTNVRNKKESYERCIAQSFLKDELKLIFKKQREFGFSFSKKFEEEVLSVAFYKRALKDFSHLVGNCSFFTDEKRAPKNSPLAFMFVALTRIINLLNNLKNTEGILYTKDDLNALLNEVLKNGTLTYKQTKKLLGLSDDYEFKGEKGTYFIEFKKYKEFIKALGDHSLNQDDLNEIAKDITLIKDEIKLKKALAKYDLNQNQIDSLSKLEFKDHLNISFKALKLITPLMLEGKKYDEACNELNLKVAINEDKKDFLPAFNETYYKDEVTNPVVLRAIKEYRKVLNALLKKYGKVHKINIELAREVGKNYSQRAKIEKEQNENYKAKKDAELECEKLGLKINSKNILKLRLFKEQKEFCVYSGEKIKISDLQDEKMLEIDHIYPYSRSFDDSYMNKVLVFTKQNQEKLNQTPFEAFGNDSAKWQKIEVLAKNLPTKKQKRILDKNYKDKEQKDFKDRNLNDTRYIARLVLNYTKDYLDFLPLSDDENTKLNDTQKGSKVYVEAKSGMLTSALRHTWGFSTKDRNNHLHHAIDAVIIAYANNSIVKAFSDFKKEQESNSAELYAKKISELDYKNKRKFFEPFSGFRQKVLDKIDEIFVSKPERKKPSGALHEETFRKEEEFYQSYGGKEGVLKALELGKIRKVNGKIVKNGDMFRVDIFKHKKTNKFYAVPIYTMDFALKVLPNKAVARSKKGEIKDWILMDENYEFCFSLYKDSLILIQTKDMQEPEFVYYNAFTSSTVSLIVSKHDNKFETLSKNQKILFKNANEKEVIAKSIGIQNLKVFEKYIVSALGEVTKAEFRQREDFKK

SEQ ID NO: 122 - protein, 987 aa, Campylobacter jejuni
  REGION 1..987: note = Campylobacter jejuni subsp. jejuni 2008-1025
MARILAFDIGISSIGWAFSENDELKDCGVRIFTKAENPKTGESLALPRRLARSARKRLARRKARLNHLKHLIANEFKLNYEDYQSFDESLAKAYKGSLISPYELRFRALNELLSKQDFARVILHIAKRRGYDDIKNNGDEEKSEILKAIKQNEEKLVNYQSVGEYLYKEYFQKFKENSKEFINVRNKKESYERCIAQSFLKDELKLIFQKQREFGFSFSKKFEEEVLSVAFYKRALKDFSHLVGNCSFFTDEKRAPKNSPLAFMFVALTRIINLLNNLKNTEGILYTKDDLNTLLNEVLKNGTLTYKQTKKLLGLSDDYEFKGEKGTYFIEFKKYKEFIKALGEHNLSQDNLNEIAKDITLIKDEIKLKKALAKYDLNQNQIDSLSKLEFKDHLNISFKALKLITPLMLEGKKYDEAYNELNLKVAINEDKKDFLPAFNETYYKDEVTNPVVLRAIKEYRKVLNALLKKYGKVHKINIELAREVGKNHSQRAKIEKEQNENYKAKKDAELECEKLGLKINSKNILKLRLFKEQKEFCAYSGEKIKISDLQDEKMLEIDHIYPYSRSFDDSYMNKVLVFTKQNQEKLNQTPFEAFGNDSAKWQKIEVLAKNLPTKKQKRILDKNYKDKEQKDFKDRNLNDTRYIARLVLNYTKDYLDFLPLSDDENTKLNDTQKGSKVHVEAKSGMLTSALRHTWGFSAKDRNNHLHHAIDAVIIAYANNSIVKAFSDFKKEQESNSAELYAKKISELDYKNKRKFFEPFSGFRQKVLDKIDEIFVSKPERKKPSGALHEETFRKEEEFYQSYGGKEGVLKALELGKIRKVNGKIVKNGDMFRVDIFKHKKTNKFYAVPIYTMDFALKVLPNKAVVQGKDKKSGLIKDWILMDENYEFCFSLYKDSLILIQTKDMQEPELVYFNAFTSSTVSLIVSKHDNKFETLSKNQKILFKNANEKEVIAKSIGIQNLKVFEKYIVSALGEVTKAEFRQREDFKK

SEQ ID NO: 123 - protein, 984 aa, Campylobacter jejuni
  REGION 1..984: note = Campylobacter jejuni subsp. jejuni 2008-872
MARILAFDIGISSIGWAFSENDELKDCGVRIFTKVENPKTGESLALPRRLARSARKRLARRKARLNHLKHLIANEFKLNYEDYQSFDESLAKAYKGSLISPYELRFRALNELLSKQDFARVILHIAKRRGYDDIKNSDDKEKGAILKAIKQNEEKLANYQSVGEYLYKEYFQKFKENSKEFTNVRNKKESYERCIAQSFLKDELKLIFKKQREFGFSFSKKFEEEVLSVAFYKRALKDFSHLVGNCSFFTDEKRAPKNSPLAFMFVALTRIINLLNNLKNTEGILYTKDDLNALLNEVLKNGTLTYKQTKKLLGLSDDYEFKGEKGTYFIEFKKYKEFIKALGEHNLSQDDLNEIAKDITLIKDEIKLKKALAKYDLNQNQIDSLSKLEFKDHLNISFKALKLITPLMLEGKKYDEACNELNLKVAINEDKKDFLPAFNETYYKDEVTNPVVLRAIKEYRKVLNALLKKYGKVHKINIELAREVGKNHSQRAKIEKEQNENYKAKKDAELECEKLGLKINSKNILKLRLFKEQKEFCAYSGEKIKISDLQDEKMLEIDHIYPYSRSFDDSYMNKVLVFTKQNQEKLNKTPFEAFGNDSAKWQKIEVLAKNLPTKKQKRILDKNYKDKEQKDFKDRNLNDTRYIARLVLNYTKDYLDFLPLSDDENTKLNDTQKGSKVHVEAKSGMLTSALRHTWGFSTKDRNNHLHHAIDAVIIAYANNSIVKAFSDFKKEQESNSAELYAKKISELDYKNKRKFFEPFSGFRQKVLDKIDEIFVSKPERKKPSGALHEETFRKEEEFYQSYGGKEGVLKALELGKIRKVNGKIVKNGDMFRVDIFKHKKTNKFYAVPIYTMDFALKVLPNKAVARSKKGEIKDWILMDENYEFCFSLYKDSLILIQTKDMQEPEFVYYNAFTSSTVSLIVSKHDNKFETLSKNQKILFKNANEKEVIAKSIGIQNLKVFEKYIVSALGEVTKAEFRQREDFKK

SEQ ID NO: 124 - protein, 987 aa, Campylobacter jejuni
  REGION 1..987: note = Campylobacter jejuni subsp. jejuni 2008-979
MARILAFDIGISSIGWAFSENDELKDCGVRIFTKAENPKTGESLALPRRLARSARKRLARRKARLNHLKHLIANEFKLNYEDYQSFDESLAKAYKGSLISPYELRFRALNELLSKQDFARVILHIAKRRGYDDIKNSDDKEKGAILKAIKQNEEKLVNYQSVGEYLYKEYFQKFKENSKEFTNVRNKKESYERCIAQSFLKDELKLIFKKQREFGFSFSKKFEEEVLSVAFYKRALKDFSHLVGNCSFFTDEKRAPKNSPLAFMFVALTRIINLLNNLKNTEGILYTKDDLNALLNEVLKNGTLTYKQTKKLLGLSDDYEFKGEKGTYFIEFKKYKEFIKALGDHSLSQDDLNEIAKDITLIKDEIKLKKALAKYDLNQNQIDSLSKLEFKDHLNISFKALKLITPLMLEGKKYDEACNELNLKVAINEDKKDFLPAFNETYYKDEVTNPVVLRAIKEYRKVLNALLKKYGKVHKINIELAREVGKNYSQRAKIEKEQNENYKAKKDAELECEKLGLKINSKNILKLRLFKEQKEFCAYSGEKIKISDLQDEKMLEIDHIYPYSRSFDDSYMNKVLVFTKQNQEKLNQTPFEAFGNDSAKWQKIEVLAKNLPTKKQKRILDKNYKDKEQKDFKDRNLNDTRYIARLVLNYTKDYLDFLPLSDDENTKLNDTQKGSKVHVEAKSGMLTSALRHTWGFSAKDRNNHLHHAIDAVIIAYANNSIVKAFSDFKKEQESNSAELYAKKISELDYKNKRKFFEPFSGFRQKVLDKIDEIFVSKPERKKPSGALHEETFRKEEEFYQSYGGKEGVLKALELGKIRKVNGKIVKNGDMFRVDIFKHKKTNKFYAVPIYTMDFALKVLPNKAVARSEKGEIKDWILMDENYEFCFSLYKDSLILIQTKDMQEPELVYFNAFTSSTVSLIVSKHDNKFETLSKNQKILFKNANEKEVIAKSIGIQNLKVFEKYIVSALGEVTKAEFRQREDFKNELR

SEQ ID NO: 125 - protein, 965 aa, Campylobacter jejuni
  REGION 1..965: note = Campylobacter jejuni subsp. jejuni 2008-988
MKIIGFNLGIANIGWALRENDEIIDCGVRVFDIPENPKNGNSLALERRENKARMKIVKRKKARMLATKTFLKKELNVDLSKLFLIGSTQSIYELRAKALSSLISKEELSAIILHIAKHRGYDDSALKNENGTIIEALNKNKETMLKFKSVGEYFYKNFVQNKEVKKIRNTTEDYSNSVPRSLLKQELDLILDKQKELGLIKNADFKEKLFEIIFFKRPLKDFSNKIGNCIFFENEKRAAKNTISACEFVALGKVVNLLKSIEKDIGIVYEKDSINEIMSIILDKTSISYKKIRDILNLPQEINFKGLDYSKNNVENSKLVDLKKLNEFKKALGDGFANLDKDILDSIATDITLTKDTATLKEKLKNYNVLNAEQIEKLSELVFNDHINLSLKALKQIIPLMYEGKRYDEACELCNFTIAKNQEKSEYLPLFEKTRFAKDISSPVVIRAICEFRKLLNDIIRRYGSVHKIHLELTRDFGISFSDRKKIIKEIEQNEQSRIKALETIKELKLEETSKNIQIVRLFEDQKGICPYSGLKMDLNRLDELVIDYIRPYNRSLDDSYSNKVLTFKKLSDLKQGKTPFEAFGEDEKLWAEINERIKEYNGKKRFKIFDKFFKDKKPFDFTEQTLQDTRWLTKLVASYLNEYLSFLPISEDENTALGYGEKGSKQHVILSSGMITQMLRNFWYLGFKNHKDYKNNAMDAIIVAFTTNSIIFAFNNFKKELDLAKAEFYANKISESDYLLKRKFLPPFSGFKEQALEKVKNIFVSHSLKIKNKGTLHDLTPLKIKELKNTYGDLDLAVKLGKIRKYNDKYYANANGSLVRADLFVDKKNKFHAVSIYKADFSTKKLPNKTPATTSNGETKEGIEMNENYNFCMSLYKNTPISVKIKGMKEPIICYYHGFNTSGSKITYKKHDNNYHNLSEDEMVVFRKNDKESIAVGKILEIKKYSISPSGELSLIENEERKWF

SEQ ID NO: 126 - protein, 984 aa, Campylobacter jejuni
  REGION 1..984: note = Campylobacter jejuni subsp. jejuni 2008-988
MARILAFDIGISSIGWAFSENDELKDCGVRIFTKVENPKTGESLALPRRLARSARKRLARRKARLNHLKHLIANEFKLNYEDYQSFDESLAKAYKGSLISPYELRFRALNELLSKQDFARVILHIAKRRGYDDIKNSDDKEKGAILKAIKQNEEKLANYQSVGEYLYKEYFQKFKENSKEFTNVRNKKESYERCIAQSFLKDELKLIFKKQREFGFSFSKKFEEEVLSVAFYKRALKDFSHLVGNCSFFTDEKRAPKNSPLAFMFVTLTRIINLLNNLKNTEGILYTKDDLNALLNEVLKNGTLTYKQTKKLLGLSDDYEFKGEKGTYFIEFKKYKEFIKALGEHNLSQDDLNEIAKDITLIKDEIKLKKALAKYDLNQNQIDSLSKLEFKDHLNISFKALKLITPLMLEGKKYDEACNELNLKVAINEDKKDFLPAFNETYYKDEVTNPVVLRAIKEYRKVLNALLKKYGKVHKINIELAREVGKNHSQRAKIEKEQNENYKAKKDAELECEKLGLKINSKNILKLRLFKEQKEFCAYSGEKIKISDLQDEKMLEIDHIYPYSRSFDDSYMNKVLVFTKQNQEKLNKTPFEAFGNDSAKWQKIEVLAKNLPTKKQKRILDKNYKDKEQKDFKDRNLNDTRYIARLVLNYTKDYLDFLPLSDDENTKLNDTQKGSKVHVEAKSGMLTSALRHTWGFSTKDRNNHLHHAIDAVIIAYANNSIVKAFSDFKKEQESNSAELYAKKISELDYKNKRKFFEPFSGFRQKVLDKIDEIFVSKPERKKPSGALHEETFRKEEEFYQSYGGKEGVLKALELGKIRKVNGKIVKNGDMFRVDIFKHKKTNKFYAVPIYTMDFALKVLPNKAVARSKKGEIKDWILMDENYEFCFSLYKDSLILIQTKDMQEPEFVYYNAFTSSTVSLIVSKHDNKFETLSKNQKILFKNANEKEVIAKSIGIQNLKVFEKYIVSALGEVTKAEFRQREDFKK

SEQ ID NO: 127 - protein, 961 aa, Campylobacter jejuni
  REGION 1..961: note = Campylobacter jejuni subsp. jejuni 260.94
MARILAFDIGISSIGWAFSENDELKDCGVRIFTKAENPKTGESLALPRRLARSARKRLARRKARLNHLKHLIANEFKLNYEDYQSFDESLAKAYKGSLISPYELRFRALNELLSKQDFARVILHIAKRRGYDDIKNNGDEEKGKILKAIKQNEEKLVNYQSVGEYLYKEYFQKFKENSKEFINVRNKKESYERCITQSFLKYELKLIFQKQREFGFSFSKKFEEEVLSVAFYKRALKDFSHLVGNCSFFSDEKRAPKNSPLAFMFVALTRIINLLNNLKNTEGILYTKDDLNALLNEVLKNGTLTYKQTKKLLGLSDDYEFKGEKGTYFIEFKKYKEFIKALGEHNLSQDDLNEIAKDITLIKDEIKLKKALAKYDLNQNQIDSLSKLEFKDHLNIGFKALKLITPLMLEGKKYDEACNELNLKVAINEDKKDFLPAFNETYYKDEVTNPVVLRAIKEYRKVLNALLKKYGKVHKINIELAREVGKNHSQRAKIEKEQNENYKAKKDAELECEKLGLKINSKNILKLRLFKEQKEFCAYSGEKIKLSDLQDEKMLEIDHIYPYSRSFDDSYMNKVLVFTKQNQEKLNKTPFEAFGNDNVKWQKIEVLAKNLPEKKQKRILDKNYKDKEQKDFKDRNLNDTRYIARLVLNYTKDYLDFLPLSDDENTKLKGSKVHVEAKSGMLTSALRHTWGFSTKDRNNHLHHAIDAAIIAYANNSIVKDFSDFKKEQESNSAELYAKKISELDYKNKRKFFEPFSGFRQKVLDKIDEIFVSKPERKKPSGALHEETFRKEEEFYQSYGGKEGVLKALELGKIRKVNGKIVKNGDMFRVDIFKHKKTNKFYAVPIYTMDFALKVLPNKAVARSKKGEIKDWILMDENYEFCFSLYKDSLILIQTKDMQEPELVYFNAFTSSTVSLIVSKHDNKFETLSKNLKVFEKYIVSALGEVTKAEFRQREDFKNELR

SEQ ID NO: 128 - protein, 985 aa, Campylobacter jejuni
  REGION 1..985: note = Campylobacter jejuni subsp. jejuni 414
MAKILAFDIGISSIGWAFVENDELKDCGVRIFTKAENPKTGESLALPRRLARSARKRLARRKARLNHLKHLIANEFKLNYEDYQSFDESLAKAYKGTLISPYELRFKALNELLSKQDLARVILHIAKRRGYDNIKNSDDKEKGAILKAVKENEEKLANYKSVGEYLYKEYFQKFKENSKEFINVRNKKESYERCIAQSFLKDELKLIFQKQREFGFNFSKKFEEEVLSVAFYKRALKDFSHLVGNCSFFVDEKRAPKNSPLAFEFVALTRIVNLLNNLNKNNSYIKDDLNALLSEVLKNGTLTYKQTKKILGLSDDYEFKGQKGNYFIEFKKYKEFIKALCEHNLNQDDLNEIAKDITLVKDETKLKKALAKYDLNQNQIENLSKIEFKDHLNISFKALKLIVPLMREGKKYDEVCNELNLKTAINEDKKEFLPAFNETYYKDEVNNPVVLRAIKEYRKVLNSLLKKYGKVHKINIELAREVGKNHRERSKIEKEQNENFKAKKDAELECEKLGLKINSKNILKLRLFKEQKEFCVYSGEKIKISDLQDEKMLEIDHIYPYSRSFDDSYMNKVLVFTKQNQEKLNKTPFEAFGKDDVKWQKIETLAKNLPAKKQKRILDKNYKDKEQKDFKDRNLNDTRYIARLVLNYTKDYLEFLPLSDDENIKLNDTQKGSKVHVEAKSGMLTSVLRHTWGFSTKDRNNHLHHAIDAVIIAYANASVVKAFSDFKKEQENYTAELYAKKINELDFKNKRKFFEPFSNFRQKVLEKIDEIFVSKPERKKPSGALHEETFYKEEEFYKEYGGKEGVLKALELGKIRKVNGKIVSNANMFRVDIFKYKKTNKFYAVPIYTMDFALGILPNKAVVGGKDKQGIIKDWLLMDENYEFCFSLYKDSLILLQTKDMQEPELVYFKSFKSSTAGLVVSKHDNKFENLNENQKKLFKSANEKKVVAEGIGIQNLKVFEKYIVSALGEITKAEIKERENFKKK

SEQ ID NO: 129 - protein, 984 aa, Campylobacter jejuni
  REGION 1..984: note = Campylobacter jejuni subsp. jejuni 51037
MARILAFDIGISSIGWAFSENDELKDCGVRIFTKAENPKTGESLALPRRLARSARKRLARRKARLNHLKHLIANEFKLNYEDYQSFDESLAKAYKGSLISPYELRFRALNELLSKQDFARVILHIVKRRGYDDIKNSDDKEKGTILKAIKQNEEKLANYQSVGEYLYKEYFQKFKENSKEFTNVRNKKESYERCIAQSFLKDELKLIFKKQREFGFSFSKKFEEEVLSVAFYKRALKDFSHLVGNCSFFTDEKRAPKNSPLAFMFVALTRIINLLNNLKNTEGILYTKDDLNTLLNEVLKNGTLTYKQTKKLLGLSDDYEFKGEKGTYFIEFKKYKEFIKALGEHNLSQDDLNEIAKDITLIKDEIKLKKALAKYDLNQNQIDSLSKLEFKDHLNISFKALKLITPLMLEGKKYDEACNELNLKVAINEDKKDFLPAFNETYYKDEVTNPVVLRAIKEYRKVLNALLKKYGKVHKINIELAREVGKNYSQRAKIEKEQNENYKAKKDAELECEKLGLKINSKNILKLRLFKEQKEFCAYSGEKIKISDLQDEKMLEIDHIYPYSRSFDDSYMNKVLVFTKQNQEKLNQTPFEAFGNDSAKWQKIEVLAKNLPTKKQKRILDKNYKDKEQKDFKDRNLNDTRYIARLVLNYTKDYLDFLPLSDDENTKLNDTQKGSKVHVEAKSGMLTSALRHTWGFSAKDRNNHLHHAIDAVIIAYANNSIVKAFSDFKKEQESNSAELYAKKISELDYKNKRKFFEPFSGFRQKVLDKIDEIFVSKPERKKPSGALHEETFRKEEEFYQSYGGKEGVLKALELGKIRKVNGKIVKNGDMFRVDIFKHKKTNKFYAVPIYTMDFALKVLPNKAVARSKKGEIKDWILMDENYEFCFSLYKDSLILIQTKDMQEPEFVYYNAFTSSTVSLIVSKHDNKFETLSKNQKILFKNANEKEVIAKSIGIQNLKVFEKYIVSALGEVTKAEFRQREDFKK

SEQ ID NO: 130 - protein, 984 aa, Campylobacter jejuni
  REGION 1..984: note = Campylobacter jejuni subsp. jejuni 51494
MARILAFDIGISSIGWAFSENDELKDCGVRIFTKAENPKTGESLALPRRLARSARKRLARRKARLNHLKHLIANEFKLNYEDYQSFDESLAKAYKGSLISPYELRFRALNELLSKQDFARVILHIAKRRGYDDIKNSDDKEKGAILKAIKQNEEKLANYQSVGEYLYKEYFQKFKENSKEFTNVRNKKESYERCIAQSFLKDELKLIFKKQREFGFSFSKKFEEEVLSVAFYKRALKDFSHLVGNCSFFTDEKRAPKNSPLAFMFVALTRIINLLNNLKNTEGILYTKDDLNTLLNEVLKNGTLTYKQTKKLLGLSDDYEFKGEKGTYFIEFKKYKEFIKALGEHNLSQDDLNEIAKDITLIKDEIKLKKALAKYDLNQNQIDSLSKLEFKDHLNISFKALKLITPLMLEGKKYDEACNELNLKVAINEDKKDFLPAFNETYYKDEVTNPVVLRAIKEYRKVLNALLKKYGKVHKINIELAREVGKNYSQRAKIEKEQNENYKAKKDAELECEKLGLKINSKNILKLRLFKEQKEFCAYSGEKIKISDLQDEKMLEIDHIYPYSRSFDDSYMNKVLVFTKQNQEKLNKTPFEAFGNDSTKWQKIEVLAKNLPEKKQKRILDKNYKDKEQKDFKDRNLNDTRYIARLVLNYTKDYLDFLPLSDDENTKLNDTQKGLKVHVEAKSGMLTSALRHTWGFSAKDRNNHLHHAIDAVIIAYANNSIVKAFSDFKKEQESNSAELYAKKISELDYKNKRKFFEPFSGFRQKVLDKIDEIFVSKPERKKPSGALHEETFRKEEEFYQSYGGKEGVLKALELGKIRKVNGKIVKNGDMFRVDIFKHKKTNKFYAVPIYTMDFALKVLPNKAVARSKKGEIKDWILMDENYEFCFSLYKDSLILIQTKDMQEPEFVYYNAFTSSTVSLIVSKHDNKFETLSKNQKILFKNANEKEVIAKSIGIQNLKVFEKYIVSALGEVTKAEFRQREDFKK

SEQ ID NO: 131 - protein, 987 aa, Campylobacter jejuni
  REGION 1..987: note = Campylobacter jejuni subsp. jejuni 53161
MARILAFDIGISSIGWAFSENDELKDCGVRIFTKAENPKTGESLALPRRLARSARKRLARRKARLNHLKHLIANEFKLNYEDYQSFDEGLAKAYKGSLISPYELRFRALNELLSKQDFARVILHIAKRRGYDDIKNNGDEEKSEILKAIKQNEEKLVNYQSVGEYLYKEYFQKFKENSKEFINVRNKKESYERCIAQSFLKDELKLIFQKQREFGFSFSKKFEEEVLSVAFYKRALKDFSHLVGNCSFFTDEKRAPKNSPLAFMFVALTRIINLLNNLKNTEGILYTKDDLNTLLNEVLKNGTLTYKQTKKLLGLSDDYEFKGEKGTYFIEFKKYKEFIKALGEHNLSQDNLNEIAKDITLIKDEIKLKKALAKYDLNQNQIDSLSKLEFKDHLNISFKALKLITPLMLEGKKYDEAYNELNLKVAINEDKKDFLPAFNETYYKDEVTNPVVLRAIKEYRKVLNALLKKYGKVHKINIELAREVGKNHSQRAKIEKEQNENYKAKKDAELECEKLGLKINSKNILKLRLFKEQKEFCAYSGEKIKISDLQDEKMLEIDHIYPYSRSFDDSYMNKVLVFTKQNQEKLNQTPFEAFGNDSAKWQKIEVLAKNLPTKKQKRILDKNYKDKEQKDFKDRNLNDTRYIARLVLNYTKDYLDFLPLSDDENTKLNDTQKGSKVHVEAKSGMLTSALRHTWGFSAKDRNNHLHHAIDAVIIAYANNSIVKAFSDFKKEQESNSAELYAKKISELDYKNKRKFFEPFSGFRQKVLDKIDEIFVSKPERKKPSGALHEETFRKEEEFYQSYGGKEGVLKALELGKIRKVNGKIVKNGDMFRVDIFKHKKTNKFYAVPIYTMDFALKVLPNKAVVQGKDKKSGLIKDWILMDENYEFCFSLYKDSLILIQTKDMQEPELVYFNAFTSSTVSLIVSKHDNKFETLSKNQKILFKNANEKEVIAKSIGIQNLKVFEKYIVSALGEVTKAEFRQREDFKK

SEQ ID NO: 132 - protein, 984 aa, Campylobacter jejuni
  REGION 1..984: note = Campylobacter jejuni subsp. jejuni 60004
MARILAFDIGISSIGWAFSENDELKDCGVRIFTKAENPKTGESLALPRRLARSARKRLARRKARLNHLKHLIANEFKLNYEDYQSFDESLAKAYKGSLISPYELRFRALNELLSKQDFARVILHIAKRRGYDDIKNNGDEEKGKILKAIKQNEEKLVNYQSVGEYLYKEYFQKFKENSKEFINVRNKKESYERCITQSFLKYELKLIFQKQREFGFSFSKKFEEEVLSVAFYKRALKDFSHLVGNCSFFTDEKRAPKNSPLAFMFVALTRIINILNNLKNTEGILYTKDDLNALLNEVLKNGTLTYKQTKKLLGLSDDYEFKGEKGTYFIEFKKYKEFIKALGEHNLSQDDLNEIAKDITLIKDEIKLKKALAKYDLNQNQIDSLSKLEFKDHLNISFKALKLITPLMLEGKKYDEACNELNLKVAINEDKKDFLPAFNETYYKDEVTNPVVLRAIKEYRKILNALLKKYGKVHKINIELAREVGKNHSQRAKIEKEQNENYKAKKDAEIECEKLGLKINSKNILKLRLFKEQKEFCAYSGEKIKISDLQDEKMLEIDHIYPYSRSFDDSYMNKVLVFTKQNQEKLNQTPFEAFGNDSAKWQKIEVLAKNLPTKKQKRILDKNYKDKEQKDFKDRNLNDTRYIARLVLNYTKDYLDFLPLSDDENTKLNDTQKGSKVHVEAKSGMLTSALRHTWGFSAKDRNNHLHHAIDAVIIAYANNSIVKAFSDFKKEQESNSAELYAKKISELDYKNKRKFFEPFSGFRQKVLDKIDEIFVSKPERKKPSGALHEETFRKEEEFYQSYGGKEGVLKALELGKIRKVNGKIVKNGDMFRVDIFKHKKTNKFYAVPIYTMDFALKVLPNKAVARSKKGEIKDWILMDENYEFCFSLYKDSLILIQTKDMQEPEFVYYNAFTSSTVSLIVSKHDNKFETLSKNQKILFKNANEKEVIAKSIGIQNLKVFEKYIVSALGEVTKAEFRQREDFKK

SEQ ID NO: 133 - protein, 984 aa, Campylobacter jejuni
MARILAFDIGISSIGWAFSENDELKDCGVRIFTKAENPKTGESLALPRRLARSARKRLARRKARLNHLKHLIANEFKLNYEDYQSFDESLAKAYKGSLISPYELRFRALNELLSKQDFARVILHIAKRRGYDDIKNNGDEEKSEILKAIKQNEEKLVNYQSVGEYLYKEYFQKFKENSKEFINVRNKKESYERCITQSFLKDELKLIFQKQREFGFSFSKKFEEEVLSVAFYKRALKDFSHLVGNCSFFTDEKRAPKNSPLAFMFVALTRIINILNNLKNTEGILYTKDDLNALLNEVLKNGTLTYKQTKKLLGLSDDYEFKGEKGTYFIEFKKYKEFIKALGEHNLSQDDLNEIAKDITLIKDEIKLKKALAKYDLNQNQIDSLSKLEFKDHLNISFKALKLITPLMLEGKKYDEACNELNLKVAINEDKKDFLPAFNETYYKDEVTNPVVLRAIKEYRKILNALLKKYGKVHKINIELAREVGKNHSQRAKIEKEQNENYKAKKDAEIECEKLGLKINSKNILKLRLFKEQKEFCAYSGEKIKLSDLQDEKMLEIDHIYPYSRSFDDSYMNKVLVFTKQNQEKLNKTPFEAFGNDSTKWQKIEVLAKNLPEKKQKRILDKNYKDKEQKDFKDRNLNDTRYIARLVLNYTKDYLDFLPLSDDENTKLNDTQKGSKVHVEAKSGMLTSALRHTWGFSAKDRNNHLHHAIDAAIIAYANNSIVKAFSDFKKEQESNSVELYAKKISELDYKNKRKFFEPFSGFRQKVLDKIDEIFVSKPERKKPSGALHEETFRKEEEFYQSYGGKEGVLKALELGKIRKVNGKIVKNGDMFRVDIFKHKKTNKFYAVPIYTMDFALKVLPNKAVARSKKGEIKDWILMDENYEFCFSLYKDSLILIQTKDMQEPELVYFNAFTSSTVSLIVSKHDNKFETLSKNQKILFKNANEKEVIAKSIGIQNLKVFEKYIVSALGEVTKAEFRQREDFKK

SEQ ID NO: 134 - protein, 984 aa, Campylobacter jejuni
  REGION 1..984: note = Campylobacter jejuni subsp. jejuni 84-25
MVRILAFDIGISSIGWAFSENDELKDCGVRIFTKVENPKTGESLALPRRLARSARKRLARRKARLNHLKHLIANEFKLNYEDYQSFDESLAKAYKGSLISPYELRFRALNELLSKQDFARVILHIAKRRGYDDIKNSDDKEKGAILKAIKQNEEKLANYQSVGEYLYKEYFQKFKENSKEFTNVRNKKESYERCIAQSFLKDELKLIFKKQREFGFSFSKKFEEEVLSVAFYKRALKDFSHLVGNCSFFTDEKRAPKNSPLAFMFVALTRIINLLNNLKNTEGILYTKDDLNALLNEVLKNGTLTYKQTKKLLGLSDDYEFKGEKGTYFIEFKKYKEFIKALGEHNLSQDDLNEIAKDITLIKDEIKLKKALAKYDLNQNQIDSLSKLEFKDHLNISFKALKLITPLMLEGKKYDEACNELNLKVAINEDKKDFLPAFNETYYKDEVTNPVVLRAIKEYRKVLNALLKKYGKVHKINIELAREVGKNHSQRAKIEKEQNENYKAKKDAELECEKLGLKINSKNILKLRLFKEQKEFCAYSGEKIKISDLQDEKMLEIDHIYPYSRSFDDSYMNKVLVFTKQNQEKLNKTPFEAFGNDSAKWQKIEVLAKNLPTKKQKRILDKNYKDKEQKDFKDRNLNDTRYIARLVLNYTKDYLDFLPLSDDENTKLNDTQKGSKVHVEAKSGMLTSALRHTWGFSTKDRNNHLHHAIDAVIIAYANNSIVKAFSDFKKEQESNSAELYAKKISELDYKNKRKFFEPFSGFRQKVLDKIDEIFVSKPERKKPSGALHEETFRKEEEFYQSYGGKEGVLKALELGKIRKVNGKIVKNGDMFRVDIFKHKKTNKFYAVPIYTMDFALKVLPNKAVARSKKGEIKDWILMDENYEFCFSLYKDSLILIQTKDMQEPEFVYYNAFTSSTVSLIVSKHDNKFETLSKNQKILFKNANEKEVIAKSIGIQNLKVFEKYIVSALGEVTKAEFRQREDFKK

SEQ ID NO: 135 - protein, 984 aa, Campylobacter jejuni
  REGION 1..984: note = Campylobacter jejuni subsp. jejuni 87459
MARILAFDIGISSIGWAFSENDELKDCGVRIFTKAENPKTGESLALPRRLARSARKRLARRKARLNHLKHLIANEFKLNYEDYQSFDESLAKAYKGSLISPYELRFRALNELLSKQDFARVILHIAKRRGYDDIKNSDDKEKGAILKAIKQNEEKLANYQSVGEYLYKEYFQKFKENSKEFTNVRNKKESYERCIAQSFLKDELKLIFKKQREFGFSFSKKFEEEVLSVAFYKRALKDFSHLVGNCSFFTDEKRAPKNSPLAFMFVALTRIINLLNNLKNTEGILYTKDDLNTFLNEVLKNGTLTYKQTKKLLGLSDDYEFKGEKGTYFIEFKKYKEFIKALGDHNLSQDDLNEIAKDITLIKDEIKLKKALAKYDLNQNQIDSLSKLEFKDHLNISFKALKLITPLMLEGKKYDEACNELNLKVAINEDKKDFLPAFNETYYKDEVTNPVVLRAIKEYRKVLNALLKKYGKVHKINIELAREVGKNHSQRAKIEKEQNENYKAKKDAELECEKLGLKINSKNILKLRLFKEQKEFCAYSGEKIKISDLQDEKMLEIDHIYPYSRSFDDSYMNKVLVFTKQNQEKLNKTPFEAFGNDSAKWQKIEVLAKNLPTKKQKRILDKNYKDKEQKDFKDRNLNDTRYIARLVLNYTKDYLDFLPLSDDENTKLNDTQKGSKVHVEAKSGMLTSALRHTWGFSTKDRNNHLHHAIDAVIIAYANNSIVKAFSDFKKEQESNSAELYAKKISELDYKNKRKFFEPFSGFRQKVLDKIDEIFVSKPERKKPSGALHEETFRKEEEFYQSYGGKEGVLKALELGKIRKVNGKIVKNGDMFRVDIFKHKKTNKFYAVPIYTMDFALKVLPNKAVARSKKGEIKDWILMDENYEFCFSLYKDSLILIQTKDMQEPEFVYYNAFTSSTVSLIVSKHDNKFETLSKNQKILFKNANEKEVIAKSIGIQNLKVFEKYIVSALGEVTKAEFRQREDFKK

SEQ ID NO: 136 - protein, 984 aa, Campylobacter jejuni
  REGION 1..984: note = Campylobacter jejuni subsp. jejuni ATCC 33560
MARILAFDIGISSIGWAFSENDELKDCGVRIFTKAENPKTGESLALPRRLARSARKRLARRKARLNHLKHLIANEFKLNYEDYQSFDESLAKAYKGSLISPYELRFRALNELLSKQDFARVILHIAKRRGYDDIKNSDDKEKGAILKAIKQNEEKLANYQSVGEYLYKEYFQKFKENSKEFTNVRNKKESYERCIAQSFLKDELKLIFKKQREFGFSFSKKFEEEVLSVAFYKRALKDFSHLVGNCSFFTDEKRAPKNSPLAFMFVALTRIINLLNNLKNTEGILYTKDDLNALLNEVLKNGTLTYKQTKKLLGLSDDYEFKGEKGTYFIEFKKYKEFIKALGDHSLSQDDLNEIAKDITLIKDEIKLKKALAKYDLNQNQIDSLSKLEFKDHLNISFKALKLITPLMLEGKKYDEACNELNLKVAINEDKKDFLPAFNETYYKDEVTNPVVLRAIKEYRKVLNALLKKYGKVHKINIELAREVGKNYSQRAKIEKEQNENYKAKKDAELECEKLGLKINSKNILKLRLFKEQKEFCAYSGEKIKISDLQDEKMLEIDHIYPYSRSFDDSYMNKVLVFTKQNQEKLNQTPFEAFGNDSAKWQKIEVLAKNLPTKKQKRILDKNYKDKEQKNFKDRNLNDTRYIARLVLNYTKDYLDFLPLSDDENTKLNDTQKGSKVHVEAKSGMLTSALRHTWGFSAKDRNNHLHHTIDAVIIAYANNSIVKAFSDFKKEQESNSAELYAKKISELDYKNKRKFFEPFSGFRQKVLDKIDEIFVSKPERKKPSGALHEETFRKEEEFYQSYGGKEGVLKALELGKIRKVNGKIVKNGDMFRVDIFKHKKTNKFYAVPIYTMDFALKVLPNKAVARSKKGEIKDWILMDENYEFCFSLYKDSLILIQTKDMQEPEFVYYNAFTSSTVSLIVSKHDNKFETLSKNQKILFKNANEKEVIAKSIGIQNLKVFEKYIVSALGEVTKAEFRQREDFKK

SEQ ID NO: 137 - protein, 987 aa, Campylobacter jejuni
  REGION 1..987: note = Campylobacter jejuni subsp. jejuni CF93-6
MARILAFDIGISSIGWAFSENDELKDCGVRIFTKVENPKTGESLALPRRLARSARKRLARRKARLNHLKHLIANEFKLNYEDYQSFDESLAKAYKGSLISPYELRFRALNELLSKQDFARVILHIAKRRGYDDIKNSDDKEKGAILKAIKQNEEKLANYQSVGEYLYKEYFQKFKENSKEFTNVRNKKESYERCIAQSFLKDELKLIFKKQREFGFSFSKKFEEEVLSVAFYKRALKDFSHLVGNCSFFTDEKRVPKNSPLAFMFVALTRIINLLNNLKNTEGILYTKDDLNALLNEVLKNGTLTYKQTKKLLGLSDDYEFKGEKGTYFIEFKKYKEFIKALGEHNLSQDDLNEIAKDITLIKDEIKLKKALAKYDLNQNQIDSLSKLEFKDHLNISFKALKLITPLMLEGKKYDEACNELNLKVAINEDKKDFLPAFNETYYKDEVTNPVVLRAIKEYRKVLNALLKKYGKVHKINIELAREVGKNHSQRAKIEKEQNENYKAKKDAELECEKLGLKINSKNILKLRLFKEQKEFCAYSGEKIKISDLQDEKMLEIDHIYPYSRSFDDSYMNKVLVFTKQNQEKLNQTPFEAFGNDSAKWQKIEVLAKNLPTKKQKRILDKNYKDKEQKNFKDRNLNDTRYIARLVLNYTKDYLDFLPLSDDENTKLNDTQKGSKVHVEAKSGMLTSALRHTWGFSAKDRNNHLHHAIDAVIIAYANNSIVKAFSDFKKEQESNSAELYAKKISELDYKNKRKFFEPFSGFRQKVLDKIDEIFVSKPERKKPSGALHEETFRKEEEFYQSYGGKEGVLKALELGKIRKVNGKIVKNGDMFRVDIFKHKKTNKFYGVPIYTMDFALKVLPNKAVARSKKGEIKDWILMDENYEFCFSLYKDSLILIQTKDMQEPEFVYYNAFTSSTVSLIVSKHDNKFETLSKNQKILFKNANEKEVIAKSIGIQNLKVFEKYIVSALGEVTKAEFRQREDFKNELR

SEQ ID NO: 138 - protein, 984 aa, Campylobacter jejuni
  REGION 1..984: note = Campylobacter jejuni subsp. jejuni CG8486
MARILAFDIGISSIGWAFSENDELKDCGVRIFTKAENPKTGESLALPRRLARSARKRLARRKARLNHLKHLIANEFKLNYEDYQSFDESLAKAYKGSLISPYELRFRALNELLSKQDFARVILHIAKRRGYDDIKNSDDKEKGAILKAIKQNEEKLANYQSVGEYLYKEYFQKFKENSKEFTNVRNKKESYERCIAQSFLKDELKLIFKKQREFGFSFSKKFEEEVLSVAFYKRALKDFSHLVGNCSFFTDEKRAPKNSPLAFMFVALTRIINLLNNLKNTEGILYTKDDLNALLNEVLKNGTLTYKQTKKLLGLSDDYEFKGEKGTYFIEFKKYKEFIKALGDHSLSQDDLNEIAKDITLIKDEIKLKKALAKYDLNQNQIDSLSKLEFKDHLNISFKALKLITPLMLEGKKYDEACNELNLKVAINEDKKDFLPAFNETYYKDEVTNPVVLRAIKEYRKVLNALLKKYGKVHKINIELAREVGKNYSQRAKIEKEQNENYKAKKDAELECEKLGLKINSKNILKLRLFKEQKEFCAYSGEKIKISDLQDEKMLEIDHIYPYSRSFDDSYMNKVLVFTKQNQEKLNQTPFEAFGNDSAKWQKIEVLAKNLPTKKQKRILDKNYKDKEQKDFKDRNLNDTRYIARLVLNYTKDYLDFLPLSDDENTKLNDTQKGSKVHVEAKSGMLTSALRHTWGFSAKDRNNHLHHAIDAVIIAYANNSIVKAFSDFKKEQESNSAELYAKKISELDYKNKRKFFEPFSGFRQKVLDKIDEIFVSKPERKKPSGALHEETFRKEEEFYQSYGGKEGVLKALELGKIRKVNGKIVKNGDMFRVDIFKHKKTNKFYAVPIYTMDFALKVLPNKAVARSKKGEIKDWILMDENYEFCFSLYKDSLILIQTKDMQEPEFVYYNAFTSSTVSLIVSKHDNKFETLSKNQKILFKNANEKEVIAKSIGIQNLKVFEKYIVSALGEVTKAEFRQREDFKK

SEQ ID NO: 139 - protein, 984 aa, Campylobacter jejuni
  REGION 1..984: note = Campylobacter jejuni subsp. jejuni HB93-13
MARILAFDIGISSIGWAFSENDELKDCGVRIFTKVENPKTGESLALPRRLARSARKRLARRKARLNHLKHLIANEFKLNYEDYQSFDESLAKAYKGSLISPYELRFRALNELLSKQDFARVILHIAKRRGYDDIKNSDDKEKGAILKAIKQNEEKLANYQSVGEYLYKEYFQKFKENSKEFTNVRNKKESYERCIAQSFLKDELKLIFKKQREFGFSFLKKFEEEVLSVAFYKRALKDFSHLVGNCSFFTDEKRAPKNSPLAFMFVALTRIINLLNNLKNTEGILYTKDDLNALLNEVLKNGTLTYKQTKKLLGLSDDYEFKGEKGTYFIEFKKYKEFIKALGEHNLSQDDLNEIAKDITLIKDEIKLKKALAKYDLNQNQIDSLSKLEFKDHLNISFKALKLITPLMLEGKKYDEAYNELNLKVAINEDKKDFLPAFNETYYKDEVTNPVVLRAIKEYRKVLNALLKKYGKVHKINIELAREVGKNHSQRAKIEKEQNENYKAKKDAELECEKLGLKINSKNILKLRLFKEQKEFCAYSGEKIKISDLQDEKMLEIDHIYPYSRSFDDSYMNKVLVFTKQNQEKLNQTPFEAFGNDSAKWQKIEVLAKNLPTKKQKRILDKNYKDKEQKDFKDRNLNDTRYIARLVLNYTKDYLDFLPLSDDENTKLNDTQKGSKVHVEAKSGMLTSALRHTWGFSAKDRNNHLHHAIDAVIIAYANNSIVKAFSDFKKEQESNSAELYAKKISELDYKNKRKFFEPFSGFRQKVLDKIDEIFVSKPERKKPSGALHEETFRKEEEFYQSYGGKEGVLKALELGKIRKVNGKIVKNGDMFRVDIFKHKKTNKFYAVPIYTMDFALKVLPNKAVARSKKGEIKDWILMDENYEFCFSLYKDSLILIQTKDMQEPELVYFNAFTSSTVSLIVSKHDNKFETLSKNQKILFKNANEKEVIAKSIGIQNLKVFEKYIVSALGEVTKAEFRQREDFKK

SEQ ID NO: 140 - protein, 987 aa, Campylobacter jejuni
  REGION 1..987: note = Campylobacter jejuni subsp. jejuni LMG 23210
MARILAFDIGISSIGWAFSENDELKDCGVRIFTKAENPKTGESLALPRRLARSARKRLARRKARLNHLKHLIANEFKLNYEDYQSFDESLAKAYKGSLISPYELRFRALNELLSKQDFARVILHIAKRRGYDDIKNSDDKEKGAILKAIKQNEEKLANYQSVGEYLYKEYFQKFKENSKEFTNVRNKKESYERCIAQSFLKDELKLIFKKQREFGFSFSKKFEEEVLSVAFYKRALKDFSHLVGNCSFFTDEKRAPKNSPLAFMFVALTRIINLLNNLKNTEGILYTKDDLNALLNEVLKNGTLTYKQTKKLLGLSDDYEFKGEKGTYFIEFKKYKEFIKALGDHSLSQDDLNEIAKDITLIKDEIKLKKALVKYDLNQNQIDSLSKLEFKDHLNISFKALKLITPLMLEGKKYDEACNELNLKVAINEDKKDFLPAFNETYYKDEVTNPVVLRAIKEYRKVLNALLKKYGKVHKINIELAREVGKNYSQRAKIEKEQNENYKAKKDAELECEKLGLKINSKNILKLRLFKEQKEFCAYSGEKIKISDLQDEKMLEIDHIYPYSRSFDDSYMNKVLVFTKQNQEKLNQTPFEAFGNDSAKWQKIEVLAKNLPTKKQKRILDKNYKDKEQKDFKDRNLNDTRYIARLVLNYTKDYLDFLPLSDDENTKLNDTQKGSKVHVEAKSGMLTSALRHTWGFSAKDRNNHLHHAIDAVIIAYANNSIVKAFSDFKKEQESNSAELYAKKISELDYKNKRKFFEPFSGFRQKVLDKIDEIFVSKPERKKPSGALHEETFRKEEEFYQSYGGKEGVLKALELGKIRKVNGKIVKNGDMFRVDIFKHKKTNKFYAVPIYTMDFALKVLPNKAVARSKKGEIKDWILMDENYEFCFSLYKDSLILIQTKDMQEPELVYFNAFTSSTVSLIVSKHDNKFETLSKNQKILFKNANEKEVIAKSIGIQNLKVFEKYIVSALGEVTKAEFRQREDFKNELR

SEQ ID NO: 141 - protein, 984 aa, Campylobacter jejuni
  REGION 1..984: note = Campylobacter jejuni subsp. jejuni LMG 23211
MARILAFDIGISSIGWAFSENDELKDCGVRIFTKAENPKTGESLALPRRLARSARKRLARRKARLNHLKHLIANEFKLNYEDYQSFDESLAKAYKGSLISPYELRFRALNELLSKQDFARVILHIAKRRGYDDIKNNGDEEKSEILKAIKQNEEKLVNYQSVGEYLYKEYFQKFKENSKEFINVRNKKESYERCITQSFLKDELKLIFQKQREFGFSFSKKFEEEVLSVAFYKRALKDFSHLVGNCSFFTDEKRAPKNSPLAFMFVALTRIINLLNNLKNTEGILYTKDDLNALLNEVLKNGTLTYKQTKKLLGLSDDYEFKGEKGTYFIEFKKYKEFIKALDEHSLSQDDLNEIAKDITLIKDEIKLKKALAKYDLNQNQIDSLSKLEFKDHLNISFKALKLITPLMLEGKKYDEACNELNLKVAINEDKKDFLPAFNETYYKDEVTNPVVLRAIKEYRKILNALLKKYGKVHKINIELAREVGKNHSQRAKIEKEQNENYKAKKDAEIECEKLGLKINSKNILKLRLFKEQKEFCAYSGEKIKISDLQDEKMLEIDHIYPYSRSFDDSYMNKVLVFTKQNQEKLNKTPFEAFGNDGVKWQKIEVLAKNLPEKKQKRILDKNYKDKEQKDFKDRNLNDTRYIARLVLNYTKDYLDFLPLSDDENTKLNDTQKGSKVHVEAKSGMLTSALRHTWGFSTKDRNNHLHHAIDAAIIAYANNSIVKAFSDFKKEQESNSAELYAKKISELDYKNKRKFFEPFSGFRQKVLDKIDEIFVSKPERKKPSGALHEETFRKEEEFYQSYGGKEGVLKALELGKIRKVNGKIVKNGDMFRVDIFKHKKTNKFYAVPIYTMDFALKVLPNKAVARSKKGEIKDWILMDENYEFCFSLYKDSLILIQTKDMQEPELVYFNAFTSSTVSLVVSKHDNKFETLSKNQKILFKNANEKEVIAKSIGIQNLKVFEKYIVSALGEVTKAEFRQREDFKK

SEQ ID NO: 142 - protein, 984 aa, Campylobacter jejuni
  REGION 1..984: note = Campylobacter jejuni subsp. jejuni LMG 23263
MARILAFDIGISSIGWAFSENDELKDCGVRIFTKAENPKTGESLALPRRLARSARKRLARRKARLNHLKHLIANEFKLNYEDYQSFDESLAKAYKGSLISPYELRFRALNELLSKQDFARVILHIVKRRGYDDIKNSDDKEKGAILKAIKQNEEKLANYQSVGEYLYKEYFQKFKENSKEFTNVRNKKESYERCIAQSFLKDELKLIFKKQREFGFSFSKKFEEEVLSVAFYKRALKDFSHLVGNCSFFTDEKRAPKNSPLAFMFVALTRIINLLNNLKNTEGILYTKDDLNTLLNEVLKNGTLTYKQTKKLLGLSDDYEFKGEKGTYFIEFKKYKEFIKALGDHSLSQDDLNEIAKDITLIKDEIKLKKALAKYDLNQNQIDSLSKLEFKDHLNISFKALKLITPLMLEGKKYDEACNELNLKVAINEDKKDFLPAFNETYYKDEVTNPVVLRAIKEYRKVLNALLKKYGKVHKINIELAREVGKNHSQRAKIEKEQNENYKAKKDAEFECEKLGLKINSKNILKLRLFKEQKEFCAYSGEKIKISDLQDEKMLEIDHIYPYSRSFDDSYMNKVLVFTKQNQEKLNKTPFEAFGNDSAKWQKIEVLAKNLPTKKQKRILDKNYKDKEQKDFKDRNLNDTRYIARLVLNYTKDYLDFLPLSDDENTKLNDTQKGSKVHVEAKSGMLTSALRHTWGFSTKDRNNHLHHAIDAVIIAYANNSIVKAFSDFKKEQESNSAELYAKKISELDYKNKRKFFEPFSGFRQKVLDKIDEIFVSKPERKKPSGALHEETFRKEEEFYQSYGGKEGVLKALELGKIRKVNGKIVKNGDMFRVDIFKHKKTNKFYAVPIYTMDFALKVLPNKAVARSKKGEIKDWILMDENYEFCFSLYKDSLILIQTKDMQEPEFVYYNAFTSSTVSLIVSKHDNKFETLSKNQKILFKNANEKEVIAKSIGIQNLKVFEKYIVSALGEVTKAEFRQREDFKK

SEQ ID NO: 143 - protein, 984 aa, Campylobacter jejuni
  REGION 1..984: note = Campylobacter jejuni subsp. jejuni LMG 23264
MARILAFDIGISSIGWAFSENDELKDCGVRIFTKVENPKTGESLALPRRLARSARKRLARRKARLNHLKHLIANEFKLNYEDYQSFDESLAKAYKGSLISPYELRFRALNELLSKQDFARVILHIAKRRGYDDIKNSDDKEKGAILKAIKQNEEKLANYQSVGEYLYKEYFQKFKENSKEFTNVRNKKESYERCIAQSFLKDELKLIFKKQREFGFSFSKKFEEEVLSVAFYKRALKDFSHLVGNCSFFTDEKRAPKNSPLAFMFVALTRIINLLNNLKNTEGILYTKDDLNALLNEVLKNGTLTYKQTKKLLGLSDDYEFKGEKGTYFIEFKKYKEFIKALGEHNLSQDDLNEIAKDITLIKDEIKLKKALAKYDLNQNQIDSLSKLEFKDHLNISFKALKLITPLMLEGKKYDEACNELNLKVAINEDKKDFLPAFNETYYKDEVTNPVVLRAIKEYRKVLNALLKKYGKVHKINIELAREVGKNHSQRAKIEKEQNENYKAKKDAELECEKLGLKINSKNILKLRLFKEQKEFCAYSGEKIKISDLQDEKMLEIDHIYPYSRSFDDSYMNKVLVFTKQNQEKLNKTPFEAFGNDSAKWQKIEVLAKNLPTKKQKRILDKNYKDKEQKDFKDRNLNDTRYIARLVLNYTKDYLDFLPLSNDENTKLNDTQKGSKVHVEAKSGMLTSALRHTWGFSTKDRNNHLHHAIDAVIIAYANNSIVKAFSDFKKEQESNSAELYAKKISELDYKNKRKFFEPFSGFRQKVLDKIDEIFVSKPERKKPSGALHEETFRKEEEFYQSYGGKEGVLKALELGKIRKVNGKIVKNGDMFRVDIFKHKKTNKFYAVPIYTMDFALKVLPNKAVARSKKGEIKDWILMDENYEFCFSLYKDSLILIQTKDMQEPEFVYYNAFTSSTVSLIVSKHDNKFETLSKNQKILFKNANEKEVIAKSIGIQNLKVFEKYIVSALGEVTKAEFRQREDFKK

SEQ ID NO: 144 - protein, 987 aa, Campylobacter jejuni
  REGION 1..987: note = Campylobacter jejuni subsp. jejuni LMG 23269
MARILAFDIGISSIGWAFSENDELKDCGVRIFTKAENPKTGESLALPRRLARSARKRLARRKARLNHLKHLIANEFKLNYEDYQSFDESLAKAYKGSLISPYELRFRALNELLSKQDFARVILHIAKRRGYDDIKNNGDEEKSEILKAIKQNEEKLVNYQSVGEYLYKEYFQKFKENSKEFINVRNKKESYERCIAQSFLKDELKLIFQKQREFGFSFSKKFEEEVLSVAFYKRALKDFSHLVGNCSFFTDEKRAPKNSPLAFMFVALTRIINLLNNLKNTEGILYTKDDLNTLLNEVLKNGTLTYKQTKKLLGLSDDYEFKGEKGTYFIEFKKYKEFIKALGEHNLSQDNLNEIAKDITLIKDEIKLKKALAKYDLNQNQIDSLSKLEFKDHLNISFKALKLITPLMLEGKKYDEAYNELNLKVAINEDKKDFLPAFNETYYKDEVTNPVVLRAIKEYRKVLNALLKKYGKVHKINIELAREVGKNHSQRAKIEKEQNENYKAKKDAELECEKLGLKINSKNILKLRLFKEQKEFCAYSGEKIKISDLQDEKMLEIDHIYPYSRSFDDSYMNKVLVFTKQNQEKLNQTPFEAFGNDSAKWQKIEVLAKNLPTKKQKRILDKNYKDKEQKDFKDRNLNDTRYIARLVLNYTKDYLDFLPLSDDENTKLNDTQKGSKVHVEAKSGMLTSALRHTWGFSAKDRNNHLHHAIDAVIIAYANNSIVKAFSDFKKEQESNSAELYAKKISELDYKNKRKFFEPFSGFRQKVLDKIDEIFVSKPERKKPSGALHEETFRKEEEFHQSYGGKEGVLKALELGKIRKVNGKIVKNGDMFRVDIFKHKKTNKFYAVPIYTMDFALKVLPNKAVVQGKDKKSGLIKDWILMDENYEFCFSLYKDSLILIQTKDMQEPELVYFNAFTSSTVSLIVSKHDNKFETLSKNQKILFKNANEKEVIAKSIGIQNLKVFEKYIVSALGEVTKAEFRQREDFKK

SEQ ID NO: 145 - protein, 987 aa, Campylobacter jejuni
  REGION 1..987: note = Campylobacter jejuni subsp. jejuni LMG 23357
MARILAFDIGISSIGWAFSENDELKDCGVRIFTKAENPKTGESLALPRCLARSARKRLARRKARLNHLKHLIANEFKLNYEDYQSFDESLAKAYKGSLISPYELRFRALNELLSKQDFARVILHIAKRRGYDDIKNNGDEEKGEILKAIKQNEEKLVSYQSVGEYLYKEYFQKFKENSKEFINVRNKKESYERCIAQSFLKDELKLIFQKQRKFGFSFSKKFEEEVLSVAFYKRALKDFSHLVGNCSFFTDEKRAPKNSPLAFMFVALTRIINLLNNLKNTEGILYTKDDLNTLLNEVLKNGTLTYKQTKKLLGLSNDYEFKGEKGTYFIEFQKYKEFVKALGEHNLSQDDLNEIAKDITLIKDEIKLKKALAKYDLNQNQIDSLSKLEFKDHLNISFKALKLITPLMLEGKKYDEACNELNLKVAINEDKKDFLPAFNETYYKDEVTNPVVLRAIKEYRKVLNALLKKYGKVHKINIELAREVGKNHSQRAKIEKEQNENYKAKKDAELECEKLGLKINSKNILKLRLFKEQKEFCVYSGEKIKISDLQDEKMLEIDHIYPYSRSFDDSYMNKVLVFTKQNQEKLNKTPFETFGNDRVKWQKIEVLAKNLPTKKQKRILDKNYKDKEQKDFKDRNLNDTRYIARLVLNYTKDYLDFLPLSDDENTKLNDTQKGSKVHVEAKSGMLTSTLRHTWGFSTKDRNNHLHHAIDAAIIAYANNSIVKAFSDFKKEQESNTAELYAKKISELDYKNKRKFFEPFSGFRQKLLDKIDEIFVSKPERKKPSGALHEETFRKEEEFYQSYGGKEGVLKALELGKIRKVNGKIVSNGDMFRVDIFKHKKTNKFYAVPIYTMDFALKVLPNKAVVQGKDKKSGLIKDWILMDENYEFCFSLYKDSLILIQTKDMQEPELVYYERLDSSNASLTVSKHDNKFETLSKNQKILFKNANEKEVIAKSIGIQNLKVFEKYIVSALGEVTKAEFRQREDFKK

SEQ ID NO: 146 - protein, 984 aa, Campylobacter jejuni
  REGION 1..984: note = Campylobacter jejuni subsp. jejuni NCTC 11168 = ATCC 700819
MARILAFDIGISSIGWAFSENDELKDCGVRIFTKVENPKTGESLALPRRLARSARKRLARRKARLNHLKHLIANEFKLNYEDYQSFDESLAKAYKGSLISPYELRFRALNELLSKQDFARVILHIAKRRGYDDIKNSDDKEKGAILKAIKQNEEKLANYQSVGEYLYKEYFQKFKENSKEFTNVRNKKESYERCIAQSFLKDELKLIFKKQREFGFSFSKKFEEEVLSVAFYKRALKDFSHLVGNCSFFTDEKRAPKNSPLAFMFVALTRIINLLNNLKNTEGILYTKDDLNALLNEVLKNGTLTYKQTKKLLGLSDDYEFKGEKGTYFIEFKKYKEFIKALGEHNLSQDDLNEIAKDITLIKDEIKLKKALAKYDLNQNQIDSLSKLEFKDHLNISFKALKLVTPLMLEGKKYDEACNELNLKVAINEDKKDFLPAFNETYYKDEVTNPVVLRAIKEYRKVLNALLKKYGKVHKINIELAREVGKNHSQRAKIEKEQNENYKAKKDAELECEKLGLKINSKNILKLRLFKEQKEFCAYSGEKIKISDLQDEKMLEIDHIYPYSRSFDDSYMNKVLVFTKQNQEKLNQTPFEAFGNDSAKWQKIEVLAKNLPTKKQKRILDKNYKDKEQKNFKDRNLNDTRYIARLVLNYTKDYLDFLPLSDDENTKLNDTQKGSKVHVEAKSGMLTSALRHTWGFSAKDRNNHLHHAIDAVIIAYANNSIVKAFSDFKKEQESNSAELYAKKISELDYKNKRKFFEPFSGFRQKVLDKIDEIFVSKPERKKPSGALHEETFRKEEEFYQSYGGKEGVLKALELGKIRKVNGKIVKNGDMFRVDIFKHKKTNKFYAVPIYTMDFALKVLPNKAVARSKKGEIKDWILMDENYEFCFSLYKDSLILIQTKDMQEPEFVYYNAFTSSTVSLIVSKHDNKFETLSKNQKILFKNANEKEVIAKSIGIQNLKVFEKYIVSALGEVTKAEFRQREDFKK

SEQ ID NO: 147 - protein, 983 aa, Campylobacter jejuni
  REGION 1..983: note = Campylobacter jejuni subsp. jejuni NW
MARILAFDIGISSIGWAFSENDELKDCGVRIFTKAENPKTGESLALPRRLARSARKRLARRKARLNHLKHLIANEFKLNYEDYQSFDESLAKAYKGSLISPYELRFRALNELLSKQDFARVILHIAKRRGYDDIKNSDDKEKGAILKAIKQNEEKLANYQSVGEYLYKEYFQKFKENSKEFTNVRNKKESYERCIAQSFLKDELKLIFKKQREFGFSFSKKFEEEVLSVAFYKRALKDFSHLVGNCSFFTDEKRAPKNSPLAFMFVALTRIINLLNNLKNTEGILYTKDDLNALLNEVLKNGTLTYKQTKKLLGLSDDYEFKGEKGTYFIEFKKYKEFIKALGEHNLSQDDLNEIAKDITLIKDEIKLKKALAKYDLNQNQIDSLSKLEFKDHLNISFKALKLVTPLMLEGKKYDEACNELNLKVAINEDKKDFLPAFNETYYKDEVTNPVVLRAIKEYRKVLNALLKKYGKVHKINIELAREVGKNHSQRAKIEKEQNENYKAKKDAELECEKLGLKINSKNILKLRLFKEQKEFCAYSGEKIKISDLQDEKMLEIDHIYPYSRSFDDSYMNKVLVFTKQNQEKLNQTPFEAFGNDSAKWQKIEVLAKNLPTKKQKRILDKNYKDKEQKNFKDRNLNDTRYIARLVLNYTKDYLDFLPLSDDENTKLNDTQKGSKVHVEAKSGMLTSALRHTWGFSAKDRNNHLHHAIDAVIIAYANNSIVKAFSDFKKEQESNSAELYAKKISELDYKNKRKFFEPFSGFRQKVLDKIDEIFVSKPERKKPSGALHEETFRKEEFYQSYGGKEGVLKALELGKIRKVNGKIVKNGDMFRVDIFKHKKTNKFYAVPIYTMDFALKVLPNKAVARSKKGEIKDWILMDENYEFCFSLYKDSLILIQTKDMQEPEFVYYNAFTSSTVSLIVSKHDNKFETLSKNQKILFKNANEKEVIAKSIGIQNLKVFEKYIVSALGEVTKAEFRQREDFKK

SEQ ID NO: 148 - protein, 987 aa, Campylobacter jejuni
MARILAFDIGISSIGWAFSENDELKDCGVRIFTKAENPKTGESLALPRRLARSARKRLARRKARLNHLKHLIANEFKLNYEDYQSFDESLAKAYKGSLISPYELRFRALNELLSKQDFARVILHIAKRRGYDDIKNNGDEEKSEILKAIKQNEEKLVNYQSVGEYLYKEYFQKFKENSKEFINVRNKKESYERCIAQSFLKDELKLIFQKQREFGFSFSKKFEEEVLSVAFYKRALKDFSHLVGNCSFFTDEKRAPKNSPLAFMFVALTRIINLLNNLKNTEGILYTKDDLNTLLNEVLKNGTLTYKQTKKLLGLSDDYEFKGEKGTYFIEFKKYKEFIKALGEHNLSQDNLNEIAKDITLIKDEIKLKKALAKYDLNQNQIDSLSKLEFKDHLNISFKALKLITPLMLEGKKYDEAYNELNLKVAINEDKKDFLPAFNETYYKDEVTNPVVLRAIKEYRKVLNALLKKYGKVHKINIELAREVGKNHSQRAKIEKEQNENYKAKKDAELECEKLGLKINSKNILKLRLFKEQKEFCAYSGEKIKISDLQDEKMLEIDHIYPYSRSFDDSYMNKVLVFTKQNQEKLNQTPFEAFGNDSAKWQKIEVLAKNLPTKKQKRILDKNYKDKEQKDFKDRNLNDTRYIARLVLNYTKDYLDFLPLSDDENTKLNDTQKGSKVHVEAKSGMLTSALRHTWGFSAKDRNNHLHHAIDAVIIAYANNSIVKAFSDFKKEQESNSAELYAKKISELDYKNKRKFFEPFSGFRQKVLDKIDEIFVSKPERKKPSGALHEETFRKEEEFYQSYGGKEGVLKALELGKIRKVNGKIVKNGDMFRVDIFKHKKTNKFYPVPIYTMDFALKVLPNKAVVQGKDKKSGLIKDWILMDENYEFCFSLYKDSLILIQTKDMQEPELVYFNAFTSSTVSLIVSKHDNKFETLSKNQKILFKNANEKEVIAKSIGIQNLKVFEKYIVSALGEVTKAEFRQREDFKK

SEQ ID NO: 149 - protein, 1003 aa, Campylobacter lari
MRILGFDIGINSIGWAFVENDELKDCGVRIFTKAENPKNKESLALPRRNARSSRRRLKRRKARLIAIKRILAKELKLNYKDYVAADGELPKAYEGSLASVYELRYKALTQNLETKDLARVILHIAKHRGYMNKNEKKSNDAKKGKILSALKNNALKLENYQSVGEYFYKEFFQKYKKNTKNFIKIRNTKDNYNNCVLSSDLEKELKLILEKQKEFGYNYSEDFINEILKVAFFQRPLKDFSHLVGACTFFEEEKRACKNSYSAWEFVALTKIINEIKSLEKISGEIVPTQTINEVLNLILDKGSITYKKFRSCINLHESISFKSLKYDKENAENAKLIDFRKLVEFKKALGVHSLSRQELDQISTHITLIKDNVKLKTVLEKYNLSNEQINNLLEIEFNDYINLSFKALGMILPLMREGKRYDEACEIANLKPKTVDEKKDFLPAFCDSIFAHELSNPVVNRAISEYRKVLNALLKKYGKVHKIHLELARDVGLSKKAREKIEKEQKENQAVNAWALKECENIGLKASAKNILKLKLWKEQKEICIYSGNKISIEHLKDEKALEVDHIYPYSRSFDDSFINKVLVFTKENQEKLNKTPFEAFGKNIEKWSKIQTLAQNLPYKKKNKILDENFKDKQQEDFISRNLNDTRYIATLIAKYTKEYLNFLLLSENENANLKSGEKGSKIHVQTISGMLTSVLRHTWGFDKKDRNNHLHHALDAIIVAYSTNSIIKAFSDFRKNQELLKARFYAKELTSDNYKHQVKFFEPFKSFREKILSKIDEIFVSKPPRKRARRALHKDTFHSENKIIDKCSYNSKEGLQIALSCGRVRKIGTKYVENDTIVRVDIFKKQNKFYAIPIYAMDFALGILPNKIVITGKDKNNNPKQWQTIDESYEFCFSLYKNDLILLQKKNMQEPEFAYYNDFSISTSSICVEKHDNKFENLTSNQKLLFSNAKEGSVKVESLGIQNLKVFEKYIITPLGDKIKADFQPRENISLKTSKKYGLR

SEQ ID NO: 150 - protein, 1430 aa, Capnocytophaga canimorsus
MKHILGLDLGTNSIGWAVVKEAQNDNEQSEIVDVGVRVNPLTTDEKTNFEKGKPISTNADRTLKRSARRNLQRYKLRRKELIELLKEHQLISTDTILTENGKGTTFQTLELRAKSAKEKISLEELARVFLTINKKRGYKSSRKAKNEDEGQLIDGMEIAKRLYEENLTTGQLSLQLLKEGKKSLPDYYRSDLQFELDKVWNFQKQFHSHILTDEFYAQLKGKGQRATSALFLAKYQIYTAENKGSREDKKLQAYQWRVDALSKELTREQLAFVITEINNNLNNSSGYLGAISDRSKELYFNNETVGEYLWKQIAANPHTSLKNQVFYRQDYLDEFEQIWKTQSAFYPEILTDELKKELRDVVIFYQRKLKSQKSLVSFCEFENKEIEIKKEDGTSTKKVIGLKVAPKSSPLFQEFKIWQNLNNVLIRKKGSKTKKVDKNQQAVLFEEEKTIFELDLEAKQALFNELNLKGNLKAYYCLEILGYSPKEWEMNYSVLEGNRTNKALYEAYLKITDLEGYDAKNHLKVKLNKDEVELDDLKVPASEIKDMVQAIFKEAGINTDILHFNAELDGKDFENQASYQLWHLLYSYEGDDSKSGNELLYKLLETKFGFKKEYAQILANVSLSDDYGSLSTKAMRKIHPYIKENKFSTACELAGYRHSKHSLTKEENDNRVLKDSLEVLKKNSLRQPVVEKILNQMINLVNALLKKYRTENPNFKFDEIRIELARELKKNAEERANMTVNINKAKTEHEKIIKILKNEFGLPNPTRNDIIRYRLYEELKANGYKDLYTNEYIEKQDLFTKNIDIEHIIPKSRVFDDSFSNKTLSFRKTNLDKGERTAFDYIESKFGADKLEEYVARVEDLYKNNIISKAKYQKLLKKESEIGDGFVERDLRETQYIAKKAKEILLQITPNVLSTSGGITDRLREDWDLINVMKELNLPKYRALGLTQMEDRKYGQQVEVIIDWTKRNDHRHHAMDALTVAFTKHNHIQYLNYLNARKNEKHREHSNIMGIQQLETIKVTDKNGNEKRVFKAPMPNFRQVTKAFLENVLISHKAKNKVVTKNKNKVAGSNKVQEVLTPRGQLHKETVYGKYQYYVQKEEKIGGKFDLETIKKVANPLYQSLLKKRLEENGGDPKKAFTGKNSLAKNPIYLDDAQTEQLPEKVKLVWLENSFSIRKDITPENFKDEKLIDKILDEGVKRILKERLQSFGNDAKKAFSDLDKNPIWLNKEKGIAIKRVAISGVANAEPLHTKKDHLGKEILDKEGKSIPVDFISTGNNHHVAVYRDEKGNLQEKVVSVFEAVVRANQGLPIIDKTYNQHLGWEFLFTMKQNEMFVFSNESTGFNPNDIDLLDPKNKKIISPNLFRVQKFSKLQYGNSFVREFVFRHHLETTVEDRKELQGITYKQMKNSAFFNDIIKVRINHLGGIVSVGEY

SEQ ID NO: 151 - protein, 1436 aa, Capnocytophaga gingivalis
  REGION 1..1436: note = Capnocytophaga gingivalis ATCC 33624
MKYIKYILGLDIGSNSIGWALIQLDLLQKTKRIIAAGSRIIPMDQKVLSDFGKGITISPTAQRTSYRNARHCRERHLLRRERLHRVLHILGFLPTHYDKQIDFSKRYGKFVDNTEPKIAYNEGKFLFMDSFQEMLSDFKSHQPDLFYTKKNGEESKIPYDWTIYYLRKKALSQKISKEELAWIILNFNQKRGYYQLREEEGNKENDFEIISSKIISVIKKDKDKKYNKYWYDIILENGLVYQAAFYNDFVYNWINQDREFIIERTSLKNGAEKVKLSYLPTFDEIDKMDKKEQDKYYKKIKIKTENSIGNKTVGCYIYDHILQNPNEKIKGKLVRTIERKYYKEELKAILEKQIALQPELFTDQLLADCIRELYSKNEAQQRNLAARDFVHLLVEDIIFYQRPLRRQKSTLANCSLESRSYIDKDSHTRKEAPLKVCPKSNPYYQEFRVLQWLQNLKIYEIDSDQEVTHQFIKTLEDKQQLFEFLMAQKEIDCEELLKYFLNQTYPNAKEKALKSELKKWKDTYRWNYVYDIGEKSSKKYPMNETRYELKRHLEKVANLPDDFLSSEVEYLLWHLIYSVKDKVAYEKGLKKFAQKHHLDKDSFVESFKKFNPYPSEYGSFSEKAIRKLLPLMRFGAHWDFNHIDKNTQKRIEDLITGVENEEIRTILREKAEKYQLEKETDFQDLPLWLAQYIVYNRHAEASSLEKWTSVNDLETYLNEFKQHSLRNPIVEQVVMETLRVVRDIWQQYGQGQASFFNEIHIELGRELKKTAKEREKLSKQNQKNEDINLSIKEKLKELEKYNTRAYSITHQEKYKLWLEQKHISPYTGQIISPENLFTDNYEIEHIIPQSRFFDDSLSNKVVCESIVNKAPYKDRQLGLEFIKNQGGRIVKELSKENKTIKIFTEEQYRTFIKEHYSNNPEKTKKLLLEEIPEKMVARQMNDTCYISKFISEILSKIVRSDEQDEGVHSKNVILCTGKITSILRQDWGLNDIWDNLILPRFERMNNLLQKEKFTIYSIEKQKKIPVVPINDQFKSFQKKRIDHRHHAMDAIIIACTTREHINYINNQHALEKEKDKKEKQEERDKLREKLCIKKYNNRSEGNYSWIFKKPWDTFTQEVRVALEDIVVSFKQNLRVINKATNYYERWVEENGKYIKKMVKQEGTNWAIRKPLHEETISGKIYLDREKITKNDILTATRKTVDSSFDDKRIKKITDTGIQKILLNYLKYKGSPEIAFSPEGLEELNKNLSIYNDGKPHKPIYKVRIYEKGSGRFALGEKGRKYKKYVQGASNLYFGIYQGAKRSFATIPLNEVIERQKQGLPSVPEYNEKGDLLLFSLSPNDLVYVPIEGEIIENIDFRNLSKEQKERIYNVNDFSSTCYFTPNRIAKAIFPKEVDLQRKGDKLSGSYDTKTASLEGIQIKEVCIKLKVDRLGNISKA

SEQ ID NO: 152 - protein, 1426 aa, Capnocytophaga ochracea
MKNILGLDLGTTSIGFAHIVEDENKEKSEIKELGVRIVSLTTDEQSDFEKGKSITTNANRTLKHGARLNLDRYQQRRKYLIDLLQKANLITPSSILAENGKNTTHSTWQLRAKAVTERIEKEEFARILLAINKKRGYKSSRKAKTEDEGQAIDGMAIAKRLYDENLTPGQLSLQLLQQNKKLLPDFYRSDLQKEFDLVWNFQKQFYPDILTDIFYKELQGKGKDATSKAFSKRYHFDTTENKGSKESVRLQAYQWRAEAISKQLSKEEVAYVLTEINNNLNNASGYLGAISDRSKELYFNRQTVGQYLYAKLQENRHNSLKNKVFYRQDYLDEFERIWETQASFHKELTDELKKQIRDVVIFYQRKPKSQKGLISFCEFESKEIEIEKDGKTITKNIGARVVPKSSPLFQEFKIWQILNNVICKRKGIRKKKISAKTTQLDLLNESSQTIFSLDMECKQLLFDELNLKGDLKSDKVLKLLGYSPQEWEINYNQLEGNRTQKALYEAYLKIVEMEAHDVKDILQIKSAKDDWSLDESPLSASEIREKVKAIFQTLGICTKILYFDPLLPVKEFEEQDSYQLWHLLYSYESDDSTSGNETLYRILEKKYAFKREHARILANVALQDDYGSLSTKAIRKIYPNIKENQYSTACEKAGYKHSKLSLTTEELEARELKNIIPLLKKNALRNPVVEKILNQMINVVNALIEKNSERDAEGKITKYFHFDEIRIELARELKKNAQKRYEMTQNINKAKLEHQKISEILQKEFGIKNPTKSDIIRYRLYQELEHNGYKELYTNAPIARDMLFSKNIEIEHIVPKARVFDDSFSNKTLTFHRINSDKGEYTAFDYITSLNSEEELNQYLTRVENAYKTKSISPTKYKNLLKKASEIGDDFINRDLRDTQYIAKKAKEILFQVTKNVLSTSGSITDRLREDWGLVDVMKELNMPKYQSLGLTEVEERKDGNKVTVIKNWTKRNDHRHHAMDALTVAFTKPSYIQYLNHLNARKDENNKNYSVILAIEEKETIKVPTNNGKNKRVFIEPIPNFRQVAKKHLEEIFISHKAKNKVVTKNTNKPAGTDKQQITLTPRGQLHKETIYGKYQYYINKEEKIGVKFDERTIAKVSNPVYREALLKRLQANDNDPKKAFAGKNALSKNPIYLDESKTKTLPEKVNLTYLEEDFSIRKDISPDNFKDLKSIEKVIDQGVKRILIKRLQAYDNDPKKAFVDLEKNPIWLNKEKGIAIKRVTISGVNNAQPLHIGKDHLGKTTLNKEGKEIPVDYVSTGNNHHVAIYRDKEGNLQEQIVSFFDAVVRAQQGIPIIDKTYKQAEGWQFLFTMKQNEMFVFPNATTGFNPAEIDLLDPKNKKLISPNLFRVQKIATKDYFFRHHLETNVETDNILKNVTWKREGLSGLKDIVKVRINHLGDIVSIGEY

SEQ ID NO: 153 - protein, 1437 aa, Capnocytophaga sp.
  REGION 1..1437: note = Capnocytophaga sp. CM59
MKYIKYILGLDIGSNSIGWALIQLDLLQKTKRIIATGSRIIPMDQKVLSDFGKGITISPTAQRTSYRNARHCRERHLLRRERLHRVLHILGFLPTHYDKQIDFSKRYGKFVDNTEPKIAYNERKFLFMDSFQEMLADFKIHQPDLFYTKKNGEESKIPYDWTIYYLRKKALSRKISKEELAWIILNFNQKRGYYQLREEEEENKENDFEIISSKIISVIKKDKDKKYNKYWYDIILENGLVYQAAFYNDFVYNWINQDREFIIERISLKNGTEKVKLSYLPTFDEIDKMDKKEQDKYYKKIKIKTENSIGNKTVGCYIYDHILQNPNEKIKGKLVRTIERKYYKEELKAILEKQVALQPELFTDQLFADCIRELYSKNEAQQRNLAARDFVHLFVEDIIFYQRSLRRQKSTLANCSLESRSYIDKDSHTRKEAPLKVCPKSNPYYQEFRVLQWLQNLKIYEIDTDQEVTHEFIKTLEDKQQFFDFLMNQKEIDCEELLKYFLNQTYPNAREKALKSELKKWKDTYRWNYVYDIGEKSSKKYPMNETRYELKRHLEKVANLPDDFLSSEVEYLLWHLIYSVKDKVAYEKGLKTFAQKHHLDKDSFVESFKKFKPYPSEYGSFSEKAIRKLLPLMRFGSYWDFNHIDKNTQKRIEDLITGVENEEIRTILREKAEKYQLEKETDFQDLPLWLAQYIVYNRHAEASSLEKWTSVNDLETYLNEFKQYSLRNPIVEQVVMETLRVVRDIWQQYGQGQASFFDEIHIELGRELKKTAKEREKLSKQNQKNEDINLSIKEKLKELEKYNTRAYSITHQEKYKLWLEQKHISPYTGQIISPENLFTDNYEIEHIIPQSRFFDDSLSNKVVCESIVNKAPYKDRQLGLEFIKNQGGRIVKELSTENKTIKIFTEEQYRTFIKEHYSNNPEKTKKLLLEEIPEKMVARQMNDTCYISKFISEILSKIVRSDEQDEGVHSKNVILCTGKITSALKQDWGVNDVWNDLILPRFERMNDLTQSTLFTTYNEKYQKYLPTVPMEYSNGFQKKRIDHRHHAMDAIIIACATREHINYINNQHALEKGKDKKEKQKEHDKLREKLCIKKDNKGSEENYSWIFKKPWDTFTQEVQAALEGIVVSFKQNLRVINKATNYYERWVEENGKYIKKMVKQEGTNWAIRKPLHEETISGKIYLDREEITKNDILTATRKTVDSSFDEKRIKKITDTGIQKILLNYLKYKGSPEIAFSPEGLEELNKNLSIYNDGKPHKPIYKVRIYEKGSGRFALGEKGRKYKKYVQGAPNLYFGIYQGANKRSFATIPLNEVIERQKQGRPSIPEYNEKGDPLLFSLSPNDLVYVPVEGEIIEDIDFQNLSKEQKERIYNVNDFSSTCYFTPNRIAKAIFPKEVDLQRKGDKLPGSYDTKTASLEGIQIKEVCIKLKIDRLGNISKA

SEQ ID NO: 154 - protein, 1471 aa, Capnocytophaga sp.
  REGION 1..1471: note = Capnocytophaga sp. oral taxon 324 str. F0483
MCKYFYIKNFITFVLSKSIIPMKHILGLDLGSNSIGWAFVQQDFENKQGKIIATGSRIIPMDQGILGDFERGNTVSQTAERTTYRSTRRLRERHLLRRERLHRVLHILGFLPPHYDAQIDFTKRYGKFIDNAEPKIAYNNGNFIFMNSFNEMIEDFKKHQPQLFYKKSNGEESKIPYDWTIYYLRKKALSQKITQQELAWLILHFNQKRGYYQLRGEEETENPNKEVAFHSLKVVDVEAEAPNKKGEIWYTIRLENGWIYRRTSKIPLDDWKGKTRDFIVTTDLNDDGTIKVDKEGKEKRSFRAPDENDWNLLKKKTEHDIDFSGKTVGAYIYDHLLQNPNQKIKGKLVRTIERKYYKDELKAILAKQIALQPELFTETLLADCIRELYRKNETQQQNLLSKDFLHLFVEDIIFYQRPLRSKKSTIANCTLEKRSYIDKETNERKDAPIKVCAKSNPYYQEFRVLQWLQNLRIYEIETDREVTAEFIETPQDCEALFNFLMSQKEIDNKGLLKYFLFAKNPQIKDKAAKSELKKWLTTYRWNYVYDAADNSSKKYPMNETGYELQRYLQKVEGLPANFLTFDITYQLWHLLYSVKDKVEFEKALKKFAKKKQLDKTSFVDSFKNFKPYPNEYGSFSEKAIKKLLPLMRFGNHWDFNRIDVSTQKRIDDLINGVANEDIRTIIREKAEKYQLNSETCFQDLPLWLAQYVVYNRHAEATDIEKWTSVSDLEAYLEDFKQHSLRNPIVEQVVTETLRVVRDIWQQYGGGQANFFDEIHIELGRELKKTAEERKQLSDKNQENESTNLRIKKLLAELKEDASIQNVRPYSLVQQELLKIYEEGVFSATDEVEEDIQKIRKKAEPSKADLQRYKLWLEQKYKSPYTGEVISLTKLFTEEYEIEHIIPQSRYYDDSLSNKVICESAVNKLKTNQLGLEFIQNHHGEKVRITANKEVTIFTEEQYKEFVKKHYANNSAKQQKLLLNEIPEKMVARQLNDTRYISKYISEILSKIVRSDEKDEGVNSKNIIPCTGKITTALKQDWGLNDVWNKLILPRFERMNQLTQTQLFTSYNDRLQKNLPTVPIEYSQGFQKKRIDHRHHAMDALVIACATREHINYMNNQHALDKSKDKKEKQQSRIDLRTILCEKKNNNWQFKKPWSTFTQEAKEALEHIVVSFKQNLRVINKATNYYEKWEEKNGVLVKKKVKQEGTNWAIRKPLHKETVSGKIVLDRKIGKDKILTATRKAVDITFTEKIISSITDTGIQKILLNYLKYKGSPEVAFSTEGLEELNKNIAQYNNGKKHQPIYKVRIFEEGSKFPLGETGAKATKYVEAAKGTNLFFGVYQGKGKRTYATIPLNEVIERQKQGLPSVPERNEKGEPLLFSLSPNDLVYVPMEGEIAETIDFNNLSKEQKERIYKTVSFTGNQCFFVQEAVATPIVNKMEYSPLNKMERDILGTMIKEVCIKLKVDRLGNITKA

SEQ ID NO: 155 - protein, 1450 aa, Capnocytophaga sp.
  REGION 1..1450: note = Capnocytophaga sp. oral taxon 326 str. F0382
MKRILGLDLGSNSIGWAFVEQDFENKQGKIIATGSRIIPMDQGILGDFEKGNTVSQTAERTTYRSMRRLRERHLLRRERLHRVLHILGFLPPHYDAQIDFTKRYGKFIDNAEPKIAYNNGNFIFMNSFNEMIEDFKKYQPQLFYKKSNGEESKIPYDWTIYYLRKKVLSQKITQQELAWLILHFNQKRGYYQLRGEEETENPNKEVAFHSLKVVDVEAEAPNKKGEIWYTIRLENGWIYRRTSKIPLDDWKGKTRDFIVTTDLNDDGTIKVDKEGKEKRSFRAPDENDWNLLKKKTEHDIDFSGKTVGAYIYDHLLQNPNQKIKGKLVRTIERKYYKDELKAILAKQIALQPELFTETLLADCIRELYRKNETQQQNLLSKDFLHLFVEDIIFYQRPLRSKKSTIANCTLEKRSYIDKETNERKDTFIKVCAKSNPYYQEFRVLQWLQNLRIYEIETDREVTAEFIETAEDYEALFNFLMSQKEIDNEGLLKYFLFAKNPQIKDKVAKSELKKWLTTYRWNYVYDAADNSSKKYPMNETGYDLQRYLQKVEGLPANFLTFDITYRLWHLLYSVKDKVEFEKALKKFAQEYQLDEASFVDSFKNFKPYPNEYGSFSEKAIKKLLPLMRFGNHWDFNRIDVSTQKRIDDLINGVANDEIRTIIREKAEKYQLNSESCFQGLPLWLAQYVVYNRHAEATDIEKWTSVSDLETYLEDFKQHSLRNPIVEQVVTETLRVVRDIWQQYGGGQANFFDEIHIELGRELKKTAEERKQLSNRNQENENTNLRIKKLLAELKEDASIQNVRPYSPVQQELLKIYEEGVFSSTDQVEEDIQKIRKKAEPTTPEIQRYKLWLEQKYKSPYTGEVISLTKLFTEEYEIEHIIPQSRYYDDSLSNKVICESAVNKLKTNQLGLEFIQNHHGEKVRITGNKEVTIFTEEQYKEFVKKHYANNSAKQQKLLLNEIPEKMVARQLNDTRYISKYISEILSKIVRSDEKDEGVNSKNVIPCTGKITTALKQDWGLNDVWNELILPRFERMNQLTQTQLFTSYNDRFQKNLPTVPIEYSQGFQKKRIDHRHHAMDALVIACATREHINYMNNQHALDKNKDKKEKQQSRIDLRTILCEKKNNNWQFKKPWSTFTQETKEALEHIVVSFKQNLRVINKATNYYEKWEEKNGVLVKKKVKQEGTNWAIRKPLHKETVSGKIVLDRKIGKDKILTATRKEVDITFTEKIISSITDTGIQKILLNYLNYKGSPEVAFSAEGLEELNKNIAQYNDGKKHQPIYKVRIFEEGSKFPLGETGAKATKFVEAAKGTNLFFGVYQGKEKRSYATIPLNEVIERQKQGLPSVPERNEKGEPLLFSLSPNDLVYVPMEGEIAETIDFNNLSKEQKERIYKTVSFTGNQCFFVQEAVATPIVNKMEYSPLNKMERDILGTMIKEVCIKLKVDRLGNITKA

SEQ ID NO: 156 - protein, 1435 aa, Capnocytophaga sp.
  REGION 1..1435: note = Capnocytophaga sp. oral taxon 329 str. F0087
MKNILGLDLGTTSIGFAHIVEDENKEKSEIKELGVRIVSLATDEQSDFEKGKSISTNANRTLKHGARLNLDRYQQRRKFLIDLLQKANLITSASILAENGKNTTHSTWQLRAKAVTERIEKEEFARVLLAINKKRGYKNSRKTKTEDEGQAIDGMAIAKCLYDENLTPGQLSLQLLQQNKKLLPDFYRSDLQKEFDLVWNLQKQFYPDILTDSFYKELQGKGKDATSKAFSKRYHFDTAENKGSKESVRLQAYQWRAEAISKQLSKEEVAYVLTEINNNLNNSSGYLGAISDRSKELYFNRQTVGQYLYAQLQENRHNSLKNKVFYRQDYLDEFERIWETQASFHKELTDELKKQIRDVVIFYQRKLKSQKGLVSFCEFESKEIEIEKDGKAITKSIGARVVPKSSPLFQEFKIWQILNNVTCKRKGIRKKKSSAKSTELDLFNEPSQSIFSLDMECKQLLFDELNLKGDLKSDKVLKLLGYSPQEWEINYNQLEGNRTQKSLYEAYLKIIEIEGYEVKDILQIKSTKDDWSLDESPLSASEIRERVKVIFQTLGICTKILYFDPLLPVKEFEQQYSYQLWHLLYSYESDDSTSGNETLYRILEKKYAFKREHATILANVALQDDYGSLSTKAIRKIYPYIKENQYSTACELAGYKHSKLSLTTEELEARELKNIIPLLKKNALRNPVVEKILNQMINVVNALIEKNSERDAEGKITKYFHFDEIRIELARELKKNAQERYEMTQNINKAKLEHQKISEKLQKQFGIKNPTKSDIIRYRLYQELEHNGYKELYTNTYIAPDVLFSKNIDIEHIVPKARVFDDSFSNKTLAFKEFNIKKGESTAFDYITSLNCEGELNQYLTRVENAYKTKSISLTKYKNLLKKASEIGDGFINRDLRDTQYIAKKAKEILFQVTKNVLSTSGSITDRLREDWGLVDVMKELNMPKYQSLGLTEVEERKDGNKVTVIKDWTKRNDHRHHAMDALTVAFTKPSYIQYLNHLNARKDENNKNYSVILAIEKKETIKVPINNGKNKRVFIEPILNFRQVAKKHLEEIFISHKAKNKVVTKNINKPAGTDKQQITLTPRGQLHKETIYGKYQYYVNKEEKVGVKFDERTITKVSNPLYREALLKRLQANDNDPKKAFAGKNALSKNPIYLDEAKTKTLPEKVNLTYLEEDFSIRKDISPDNFKDLKSIEKVIDQGVKRILIKRLQAYDNDPKKAFVDLEKNPIWLNKEKGIAIKRVTISGVSNAQPLHIGKDHLGKTTLNKEGKEVPVDYVSTGNNHHVAIYRDKEGNLQEQIVSFFEAVVRAQQGLPIIDKNYKQAEGWQFMFTMKQNEMFVFPNEATGFNPAEIDLLDPKNKKLISPNLFRVQTISIVKYGNSVVRDFKFRHHLETTLQDDKILQGITFQQIKSLEPLRNIVKVRINHLGDIVNIGEY

SEQ ID NO: 157 - protein, 1426 aa, Capnocytophaga sp.
  REGION 1..1426: note = Capnocytophaga sp. oral taxon 335 str. F0486
MKNILGLDLGTTSIGFTHIVEDENKEKSEIKELGVRIVSLTTDEQSDFEKGKSISTNANRTLKHGARLNLDRYQQRRKFLIDLLQKANLITSSSILAENGKNTTHSTWQLRAKAVTERIEKEEFARVLLAINKKRGYKSSRKAKTEDEGQAIDGMAIAKRLYDENLTPGQLSLQLLQQNKKLLPDFYRSDLQKEFDLVWNFQKQFYPDILTDSFYKELQGKGKDATSKAFSKRYHFDTAENKGSRESVRLQAYQWRAEAISKQLSKEEVAYVLTEINNNLNNASGYLGAISDRSKELYFNRQTVGQYLYAQLQENKHNSLKNKVFYRQDYLDEFERIWETQASFHKELTEELKKQIRDVVIFYQRKLKSQKGLISFCEFESKEIEIEKDGKTITKSIGARVVPKSSPLFQEFKIWQILNNVTCKRKGIRKKKSSAKSTELDLFNEPSQTIFSLDMECKQLLFEELNLKGDLKSDKVLKLLGYSPQEWEINYNQLEGNRTQKALYEAYLKIVEMEAHDVKDILQIKSTKDDWALEESPLSASEIRERVKAIFQTLGICTKILYFDPLLPVKEFEEQDSYQLWHLLYSYESDDSTSGNETLYRILEKKYAFKREHATILANVTLQDDYGSLSTKAIRKIYPYIKENQYSTACEKAGYKHSKLSLTTEELEARELKNIIPLLKKNALRNPVVEKILNQMINVVNALIEKNSERDAEGKITKYFHFDEIRIELARELKKNAQERYEMTQNINKAKLEHQKISGILQKEFGIKNPTKSDITRYRLYQELAHNGYNDLYTNTYIPKELLFSKNIDIEHIVSKARVFDDSFSNKTLAFREFNIKKGESTAFDYITSLNNEEELNQYLNRVENAYKTKNISPAKYKNLLKKASEIGDGFINRDLRDTQYIAKKAKEILFQVTKNVLSTSGSITDRLREDWGLVDVMKELNMPKYQSLGLTEVEERKEGNKVTVIKNWTKRNDHRHHAMDALTVAFTKPSYIQYLNHLNARKDKNNKNYSVILAIEEKETIKVPTNNGKNKRVFIEPIPNFRQVAKKHLEEIFISHKAKNKVVTKNTNKPAGTDKQQITLTPRGQLHKETVYGKYQYYVNKEEKIGVKFDKETIAKVSNPVYREALLKRLQANDNDPKKAFAGKNALSKNPIYLDEAKTKTLTEKVNLTYLEEDFSIRKDISPDNFKDLKSIEKVIDQGVKRILIKRLQDYDNDPKKAFVDLEKNPIWLNKEKGIAIKRVTISGVNNAQPLHIGKDHLGKTTLNKEGKEIPVDYVSTGNNHHVAIYRDKEGNLQEQIVSFFEAVVGAQQGLPIVDKTYKQAEGWQFLFTMKQNEMFVFPNEATGFNPAEIDLLDPKNKKQISPNLFRVQKIATKDYFFRHHLETNVDTDNVLKNTTWKREGLSGLKDIVKVRINHLGDIVSIGEY

SEQ ID NO: 158 - protein, 1432 aa, Capnocytophaga sp.
  REGION 1..1432: note = Capnocytophaga sp. oral taxon 380 str. F0488
MKNILGLDLGTTSIGFAHIVEDENKEKSEIKELGVRIVSLTTDEQSDFEKGKSITTNANRTLKHGARLNLDRYQQRRKYLIDLLHKANLITPSSILAENGKNTTHSTWQLRAKAVTERIEKEEFARILLAINKKRGYKSSRKAKTEDEGQAIDGMAIAKRLYDENLTPGQLSLQLLQQNKKLLPDFYRSDLQKEFDLVWNFQKQFYPDILTDIFYKELQGKGKDATSKAFSKRYHFDTAENKGSKESVRLQAYQWRAEAVSKQLSKEEVAYVLTEINNNLNNASGYLGAISDRSKELYFNRQTVGQYLYAQLQENRHNSLKNKVFYRQDYLDEFERIWETQALFHKELTDELKKQIRDVVIFYQRKPKSQKGLISFCEFESKEIEIEKDGKTITKNIGARVVPKSSPLFQEFKIWQILNNVICKRKGIRKKKISAKTTQLDLLNESSQTIFSLDMECKQLLFDELNLKGDLKSDKVLKLLGYSPQEWEINYNQLEGNRTQKALYEAYLKIVEMEAHDVKDILQIKSTKDDWSLDESPLSASEIRESVKAIFQALGICTKILYFDPLLPVKDFEEQDSYQLWHLLYSYESDDSTSGNETLYRILEKKYAFKREHARILANVALQDDYGSLSTKAIRKIYPNIKENQYSTACEMAGYKHSKLSLTTEELEARELKNIIPLLKKNALRNPVVEKILNQMINVVNALIEKNSERDAEGKITKYFHFDEIRIELARELKKNAQKRYEMTQNINKAKSEHQKISEILQKEFGIKNPTKSDIIRYRLYKELEHNGYKELYTNTYIAPDVLFSKNIDIEHIVPKARVFDDSFSNKTLAFKDFNIKKGESTAFDYITSLKNEEKLNQYLARVENAYKTKNISPAKYKNLLKKASEIGDGFINRDLRDTQYIAKKAKEILFQVTKNVLSTSGSITDRLREDWSLVDVMKELNMPKYQSLGLTEVEERKDGNKVTVIKDWTKRNDHRHHAMDALTVAFTKPSYIQYLNHLNARKDENNKNYSVILAIEKKETIKVPTNNGKNKRVFIEPIPNFRQVAKKHLEEIFISHKAKNKVVTKNTNKPAGTNKQQITLTPRGQLHKETIYGKYQYYVNKEEKVGVKFDKETIAKVSNPLYREALLKRLQANDNDPKKAFTGKNALSKNPIYLDEAKTKTLPEKVNLTYLEEDFSVRKKIVPKNPTSKEFVPNLKSIEKVVDEGVRNILIERLRVYNNDPEKAFVDLEKNPIWLNKEKGIAIKRVTISGVNNAQPLHIGKDHLGKTTLNKEGKEIPVDYVSTGNNHHVAIYRDKEGNLQEQIVSFFEAVVRTQQGLPIIDKTYKQEEGWQFLFTMKQNEMFVFPNEATGFNPAEIDLLDPKNKKQISPNLFRVQKIATKDYFFRHHLETNVETDNVLKNTTWKREGLSGLKDIVKVRINHLGDIVSIGEY

SEQ ID NO: 159 - protein, 1450 aa, Capnocytophaga sp.
  REGION 1..1450: note = Capnocytophaga sp. oral taxon 412 str. F0487
MKHILGLDLGSNSIGWAFVQQDFENKQGKIIATGSRIIPMDQGILGDFERGNTVSQTAERTTYRNTRRLRERHLLRRERLHRVLHILGFLPPHYDSQIDFTKRYGKFIDNAEPKIAYNNGNFIFMNSFNEMIEDFKKYQPQLFYKKSNGEESKIPYDWTIYYLRKKALSQKITQQELAWLILHFNQKRGYYQLRGEEETENPNKEVAFHSLEVVDVEAEAPNKKGEIWYTIRLENGWIYRRTSKIPLDDWKGKTRDFIVTTDLNDDGTIKLDKEGKEKRSFRAPDENDWNLLKKKTEHDIDFSGKTVGAYIYDHLLQNPNQKIKGKLVRTIERKYYKDELKAILAKQIALQPELFTETLLADCIRELYRKNETQQQNLLSKDFLHLFVEDIIFYQRPLRSKKSTIANCTLEKRSYIDKETNERKDTPIKVCAKSNPYYQEFRVLQWLQNLRIYEIETDREVTAEFIETAQDNEALFNFLMSQKEIDNESLLKYFLFAKNPQIKDKVAKSELKKWLTTYRWNYVYDAADNSSKKYPMNETGYELQQYLQKVEGLPANFLTFDITYRLWHLLYSVKDKVEFEKALKKFAQEYQLDEASFVDSFKNFKPYPNEYGSFSEKAIKKLLPLMRFGNHWDFNRIDVSTQKRIDDLINGVANDEIRTIIREKAEKYQLNSETCFQGLPLWLAQYVVYNRHAEAADIEKWTSVNDLEAYLEDFKQHSLRNPIVEQVITETLRVVRDIWQRYGGGQANFFDEIHIELGRELKKTAEERKQLSNRNQENENTNLRIKKLLAELKEDASIQNVRPYSPVQQELLKIYEEGVFSATDEVEEDIQKIRKKAEPTTPEIQRYKLWLEQKYKSPYTGEVISLTKLFTEEYEIEHIIPQSRYYDDSLSNKVICESAVNKLKTNQLGLEFIQNHHGEKVRITANKEVTIFTEEQYKEFVKKHYANNSAKQQKLLLNEIPEKMVARQLNDTRYISKYISEILSKIVRSDEKDEGVNSKNIIPCTGKITTALKQDWGLNDVWNELILPRFERMNQLTQTQLFTSYNDRFQKNLPTVPIEYSQGFQKKRIDHRHHAMDALVIACATREHINYMNNQHALDKSKDKKEKQQSRIDLRTILCEKKNNNWQFKKPWSTFTQEAQEALEHIVVSFKQNLRVINKATNYYEKWEEKNGVLVKKKVKQEGTNWAIRKPLHKETVSGKIVLDRKIGKDKILTATRKSVDITFTEKIISSITDTGIQKILLNYLKYKGSPEVAFSAEGLEELNKNIAQYNDGKKHQPIYKVRIFEEGSKFPLGETGAKATKYVEAAKGTNLFFGVYQGKGKRTYATIPLNEVIERQKQGLPSVPERNEKGEPLLFSLSPNDLVYVPMEGEIAETIDFNNLSKEQKERIYKTVSFTGNQCFFVQEAVATPIVNKIEYSPLNKMERDILGTMIKEVCIKLKVDRLGNITKA

SEQ ID NO: 160 - protein, 1426 aa, Capnocytophaga sputigena
  REGION 1..1426: note = Capnocytophaga sputigena ATCC 33612
MKNILGLDLGITSISFAHIVEDENKEKSEIKELGVRIVSLTTDEQSDFEKGKSITTNANRTLKHGARLNLDRYQQRRKYLIDLLQKANLITSSSILAENGKNTTHSTWQLRAKAVTERIEKEEFARVLLAINKKRGYKSSRKAKTEDEGQAIDGMAIAKRLYDENLTPGQLSLQLLQQNKKLLPDFYRSDLQREFDLVWNFQKQFYPDILTDSFYKELQGKGKDATSKAFSKRYHFDTAENKGSKESVRLQAYQWRAEAISKQLSKEEVAYVLTEINNNLNNASGYLGAISDRSKELYFNRQTVGQYLYAQLQENRHNSLKNKVFYRQDYLDEFERIWETQASFHKELTDELKKQIRDVVIFYQRKLKSQKGLISFCEFESKEIEIEKDGKTITKTIGARVVPKSSPLFQEFKIWQILNNVTCKRKGIRKKKSSAKSTELDLFNEPSQTIFSLDMECKQLLFDELNLKGDLKSDKVLKLLGYSPQEWEINYNQLEGNRTQKALYEAYLKIVEMEAHDVKDILQIKSAKDDWSLDESPLSASEIKEKVKDIFQALGICTKILYFDPLLPVKEFEKQDSYQLWHLLYSYESDDSTSGNETLYRILEKKYAFKREHARILANVALQDDYGSLSTKAIRKIYPNIKENQYSKACELAGYKHSKLSLTTEELEARELKNIIPLLKKNALRNPVVEKILNQMINVVNALIEKNSERDAEGKITKYFHFDEIRIELARELKKNAQKRYEMTQNINKAKLEHQKISEILQKKFGIKNPTKSDIIRYRLYQELEHNGYKELYTNAPIARDMLFSKNIEIEHIVPKARVFDDSFSNKTLTFHRINSNKGEYTAFDYITSLNSEEELNQYLTRVENAYKTKSISLTKYKNLLKKASEIGDGFINRDLRDTQYIAKKAKEILFQVTKNVLSTSGSITDRLREDWGLVDVMKELNMPKYQSLGLTEVEERKEGNKVTVIKNWTKRNDHRHHAMDALTVAFTKPSYIQYLNHLNARKDENNKNYSVILAIEEKETIKVPTNNGKNKRVFIEPIPNFRQVAKKHLEEIFISHKAKNKVVTKNVNKPAGTDKQQITLTPRGQLHKETIYGKYQYYVNKEEKVGVKFDERTITKVSNPLYREALLKRLQANDNDPKKAFTGKNALSKNPIYLDETKTKTLPEKVNLTYLEEDFSIRKDISPDNFKDLKSIEKVIDQGVKRILIKRLQDYDNDPKKAFVDLEKNPIWLNKEKGIAIKRVTISGVSNAQPLHIGKDHLGKTTLNKEGNEIPVDYVSTGNNHHVAIYRDKEGNLQEQIVSFFEAVVRTQQGLPIIDKTYKQEEGWQFLFTMKQNEMFVFPNATTGFNPAEIDLLDPKNKKLISPNLFRVQKIATKDYFFRHHLETNVETDNVLKNTTWKREGLSGLKDIVKVRINHLGDIVSIGEY

SEQ ID NO: 161 - protein, 1140 aa, Catellicoccus marimammalium
  REGION 1..1140: note = Catellicoccus marimammalium M35/04/3
MKNMTKVNVGLDVGISSAGWSVINAETNQILESGVRLFSGSDADENVNRRNQRQGRRLFRRRKLRIQEAKKYLENVFQLKDIEPKDEWNPYEIRVRALNEKVSKEELSIALLNIVKHRGISYELEDVTDEEGTNTQSFQSGLDYNRRLLKTKTVGEIQYDRLQKYGQVRGQIQTEDGLLINIFPTKNYVEEVERILETQKKYHPEIDDVFIEKIISFVTRKREYFVGPGNEKSRTDYGIYRENGETLDNLFEILIGKDKFYPEEYRAAGSSYTAQIFNLLNDLNNLRIPTTEDHHLTKAQKEEIITELKNTSRLSGGMLKLISKVTKAPKEEISGYRKDEKDKPDLHSLAYYRKQKNMLEKEGIQIADFSEELLDELATMMTLNTEPGEIRKQLNKITNQYDILTPEVIEVLVKNHTAFVATSNHKWHRFSLKLMKEFIPELLETSKEQSTILCERGFIQNRASYLDENHHFNYAELRENLYNPVVRKSTCEMLKVFTAIQEKYPNIQNVIVELPRETNEDEQKRKIKKINDNNAKRKKEILKEAQAQSGLSEEALEEKLLKTKGLYLKLMLWYEQEGKCVYSGQEIPLSDLLQNKGGYEVDHIIPISISFDDRLCNKVLVRQQLNSQKSNQTPFEYMTTHTDGHLSFHELKELVGKNKRFSKEKRELLLAEIYSNDIETRKRFINRNLVDTSYTARIVLNALQQYKKENQLSMNVSVVRGAMTNILRKKVKLDKTRETFHHHAIDASLMAVIPNIEFFKERKEWLPKSANEEVVEVEVSEEETMPEKEFKVKMRLPESFIQDVQILQRNSFAKEEVSGPQTRERNLKIKFSHQVDQKMNRKVADDTIYGTRQAQLGKDKKEETYVIGKIKDIYNYDEYVRFKKRYDKNKESFLMYHHDPQTFEKLEEILAQYPEYIEDEKGKKKKVSPFALYREENGPVTKYAKKNNGPVIKQLKYYDSKLNRKIDISHKYSTKNRQVVLQSLKPYRTDVYRNQDTGEYTLVGIDQNDGKFVNGHYGIPKSRYEEIKANNKLSEHDEFVFSLYKNSMVKVIDENGESIVVRYLSRSMPNRKNNAEIKPVEKYQFEDGEVVPVYGKCRKQMQTVFVKKGWTLLKGNTDILGNTYFVEKESENPKKMIDDK

SEQ ID NO: 162 - protein, 1329 aa, Catenibacterium mitsuokai
  REGION 1..1329: note = Catenibacterium mitsuokai DSM 15897
IVDYCIGLDLGTGSVGWAVVDMNHRLMKRNGKHLWGSRLFSNAETAANRRASRSIRRRYNKRRERIRLLRAILQDMVLEKDPTFFIRLEHTSFLDEEDKAKYLGTDYKDNYNLFIDEDFNDYTYYHKYPTIYHLRKALCESTEKADPRLIYLALHHIVKYRGNFLYEGQKFNMDASNIEDKLSDIFTQFTSFNNIPYEDDEKKNLEILEILKKPLSKKAKVDEVMTLIAPEKDYKSAFKELVTGIAGNKMNVTKMILCEPIKQGDSEIKLKFSDSNYDDQFSEVEKDLGEYVEFVDALHNVYSWVELQTIMGATHTDNASISEAMVSRYNKHHDDLKLLKDCIKNNVPNKYFDMFRNDSEKSKGYYNYINRPSKAPVDEFYKYVKKCIEKVDTPEAKQILNDIELENFLLKQNSRTNGSVPYQMQLDEMIKIIDNQAEYYPILKEKREQLLSILTFRIPYYFGPLNETSEHAWIKRLEGKENQRILPWNYQDIVDVDATAEGFIKRMRSYCTYFPDEEVLPKNSLIVSKYEVYNELNKIRVDDKLLEVDVKNDIYNELFMKNKTVTEKKLKNWLVNNQCCSKDAEIKGFQKENQFSTSLTPWIDFTNIFGKIDQSNFDLIENIIYDLTVFEDKKIMKRRLKKKYALPDDKVKQILKLKYKDWSRLSKKLLDGIVADNRFGSSVTVLDVLEMSRLNLMEIINDKDLGYAQMIEEATSCPEDGKFTYEEVERLAGSPALKRGIWQSLQIVEEITKVMKCRPKYIYIEFERSEEAKERTESKIKKLENVYKDLDEQTKKEYKSVLEELKGFDNTKKISSDSLFLYFTQLGKCMYSGKKLDIDSLDKYQIDHIVPQSLVKDDSFDNRVLVVPSENQRKLDDLVVPFDIRDKMYRFWKLLFDHELISPKKFYSLIKTEYTERDEERFINRQLVETRQITKNVTQIIEDHYSTTKVAAIRANLSHEFRVKNHIYKNRDINDYHHAHDAYIVALIGGFMRDRYPNMHDSKAVYSEYMKMFRKNKNDQKRWKDGFVINSMNYPYEVDGKLIWNPDLINEIKKCFYYKDCYCTTKLDQKSGQLFNLTVLSNDAHADKGVTKAVVPVNKNRSDVHKYGGFSGLQYTIVAIEGQKKKGKKTELVKKISGVPLHLKAASINEKINYIEEKEGLSDVRIIKDNIPVNQMIEMDGGEYLLTSPTEYVNARQLVLNEKQCALIADIYNAIYKQDYDNLDDILMIQLYIELTNKMKVLYPAYRGIAEKFESMNENYVVISKEEKANIIKQMLIVMHRGPQNGNIVYDDFKISDRIGRLKTKNHNLNNIVFISQSPTGIYTKKYKL

SEQ ID NO: 163 - protein, 1419 aa, Chryseobacterium sp.
  REGION 1..1419: note = Chryseobacterium sp. CF314
MMIKNILGLDLGTNSIGWALIKQNFENKYGEILGMGSRIIPMSQDVLGEFGKGNSVSQTAARTGYRGVRRLRERFLLRRERLHRVLNVLNFLPEHYASQIDFEKRFGKFKYETEPKLAYNNDGFFFKNSFDEMLGDFKDHQFHLLENGRKVPYDWTIYYLRKKALSQKIEKEELAWILLNFNQKRGYYQLRGEDFEEEKDRVFVRLKVDRVVDSGENIKGKILYDVYFENGWKYEKQIVKTEDWIGRTKEFIVTESILKNGDTKRTFKAVDSEKDWIAIKTKTEQEIDKSHKTVGAYIYEALLQNPKQKIKGKLVRTIERKFYREELKKILERQKEFHPELQSDDLYNDCIRELYRNNEAHQITLSKKDFVHLLLNDLIFYQRPLRSQKSSVSNCTLEFRKYKDENGVEHAQYLKTIPKSNPYYQEFRVWQWMFNLNIYRKDDDTNVTKEFLSSTEDYETLFEFLNNRKEVDQKALLRHFKLNEKTHRWNYVEDKKYPCNETKTMISTRLEKVENYPSDFLTREMEQNIWHIIYSVNDKIEYEKALKSFAHKNNLDENSFFEAFKKFPPFKSEYGSFSEKAIKKLLPLLRLGKYWNWESIDRKSQGRIEKIITGEFDGNIKDKVREKAIHLTAENDFQGLQLWLAQYIVYGRHSEASMIGKWNSADDLEEFLKGFKQHSLRNPIVEQVITETLRVVKDIWLKYGNGAKDFFSEIHIELGREMKQTKDERVDATKRITENENTNLRIKALLAEMMNDNSVENIRPYSPMQQEILKIYEDGILKSDIEIDDDILKISKTAQPSSSDLKRYKLWLEQRYKSPYTGQIIPLNKLFTSEYEIEHIIPQSRYFDDSFSNKIICESAVNKLKDNYIGLGFIKQFGGMIVECGFGKSVEIFKAEEYEDFVKKHYANNRSKRNKLLLEEIPEKMIDRQLNDTRHISKYISGVLSNIVRQEDGTDEGVNSKNIVPGNGKITTQLKQDWGLNDVWNELILPRFERMNQLTNSTDFTSWNKNHQKFLPTVPIEFSKGFSKKRIDHRHHAMDALVIACATKDHINLLNNQSAKSDTKRYDLKRKLMKFERVVYSHSKTGEKIEKEVPKQFLKPWDNFTVDAKNKMETIIVSFKQNLRVINKATNHYEKWIEKDGIKRKELIKQEGTNWAIRKPMHKETVSGKVDLPGIKIPKGKILTATRKSLDTSFDLKTINSITDTGIQKILKNYLEFKGSSELAFSPEGIEDMNKNIEKFNDGKPHQSINKVRIFELGSKFSVGQTGNKKDKYVEAAKGTNLFFAVYEDKNGKRSYETIPLNEVIERQKQGLDSVSFKNKEDFLLCPNDLVYVPSEDELENIYNIDFKNLTTEKTGNIYKVVSFSGNQIFFIRQDIAISIVNKAEFSTLNKMERAIDGSMIKENCIKLKIDRLGNIAKI

SEQ ID NO: 164 - protein, 1021 aa, Clostridium cellulolyticum
MKYTLGLDVGIASVGWAVIDKDNNKIIDLGVRCFDKAEESKTGESLATARRIARGMRRRISRRSQRLRLVKKLFVQYEIIKDSSEFNRIFDTSRDGWKDPWELRYNALSRILKPYELVQVLTHITKRRGFKSNRKEDLSTTKEGVVITSIKNNSEMLRTKNYRTIGEMIFMETPENSNKRNKVDEYIHTIAREDLLNEIKYIFSIQRKLGSPFVTEKLEHDFLNIWEFQRPFASGDSILSKVGKCTLLKEELRAPTSCYTSEYFGLLQSINNLVLVEDNNTLTLNNDQRAKIIEYAHFKNEIKYSEIRKLLDIEPEILFKAHNLTHKNPSGNNESKKFYEMKSYHKLKSTLPTDIWGKLHSNKESLDNLFYCLTVYKNDNEIKDYLQANNLDYLIEYIAKLPTFNKFKHLSLVAMKRIIPFMEKGYKYSDACNMAELDFTGSSKLEKCNKLTVEPIIENVTNPVVIRALTQARKVINAIIQKYGLPYMVNIELAREAGMTRQDRDNLKKEHENNRKAREKISDLIRQNGRVASGLDILKWRLWEDQGGRCAYSGKPIPVCDLLNDSLTQIDHIYPYSRSMDDSYMNKVLVLTDENQNKRSYTPYEVWGSTEKWEDFEARIYSMHLPQSKEKRLLNRNFITKDLDSFISRNLNDTRYISRFLKNYIESYLQFSNDSPKSCVVCVNGQCTAQLRSRWGLNKNREESDLHHALDAAVIACADRKIIKEITNYYNERENHNYKVKYPLPWHSFRQDLMETLAGVFISRAPRRKITGPAHDETIRSPKHFNKGLTSVKIPLTTVTLEKLETMVKNTKGGISDKAVYNVLKNRLIEHNNKPLKAFAEKIYKPLKNGTNGAIIRSIRVETPSYTGVFRNEGKGISDNSLMVRVDVFKKKDKYYLVPIYVAHMIKKELPSKAIVPLKPESQWELIDSTHEFLFSLYQNDYLVIKTKKGITEGYYRSCHRGTGSLSLMPHFANNKNVKIDIGVRTAISIEKYNVDILGNKSIVKGEPRRGMEKYNSFKSN

SEQ ID NO: 165 - protein, 1065 aa, Clostridium perfringens
  REGION 1..1065: note = Clostridium perfringens C str. JGS1495
MNKDINYALGLDIGITSVGWAVINLDLNRIEDLGVRIFNAAENPKDGSSLALPRRLARGRRRLLRRKAYRVERVRKLIVKNNILTKEELEGLFKNKEVIDVWEARVKGLDYKLSREEWAKILINFCKRRGFKSNRKNETKDKEAGQILSSISYNIEKMKETNSRTIGEYIYNEVKNSDDSYAPLRNKFGEYKMCVSRDVLREEIHTLFEKQRELGNNFASDEIEDKYFEIFNSQRPFSNFEDLEKLVGFCTFERKKHKRAPKHCISSEEFTLYEGINKLSIIKDGEKRKLSEEERTLVVNEAFNKKEIKYTTLRKLLGLSEDELFSTLTYSIDKDISKTENTKFVSLKGYHEIKRAIEKGVSKKAWQDIENNRNLLNDIAYVLTLGKTDDEIEKQLRLRNVPEELFESLLDMSFSKFNNLSIYALEKILPFMKEGYQYNEACEKAGYNFKAIYEGVRTKKLPVIEIDEIVNPVVNRALAQTRKVINSVIDKYGSPVRINIELARDLAKNFKDRKLIEKEQKENRANLDKIRENLRELMDKEPTAVEVLKYRLWEQQRGECAYTQSQIALERLFSPGYCEIDHIIPFSRSFDDSLSNKILVLGSENQRKGNKIPYEYFGEDSERWNSFEIWVKGSYLNYKKKANLLKKKFTEEEQRDWKARNLQDTKYICRYISNFVNNRLEFKESENKQKVITVNGRATAYLRSRWGLNKVREDGDKHHALDAAVVGVTTQGMVQKISKYSKAHELYTVRKNDEFVDVETGECVDVDEYKEIRKDILPRPWRGFSEELKLRLSDNPLEELKKLPIETYNEEFIKENVKPIFVSRVPFRKISGKLFKETIYSERAFKDGYFVSKKSLVDLKRGDLDNFYNYECDKKLYDAISERMKEFNYNGKKAFESPFRKPTKSGKEGPVVRSVKIKSAAPFKDGIPMNEGLVAKEGMVRIDIYEKEGKYFVVPVYRYQLAKGIVPKRAAIAGKSELKWPIMDQTYNFKFSIFKNDLIEIKYAKKDGYFGYYDGFDRHTASLVIENHDNSDRYRGIGVKTGVVEFNKYEVDVLGNYHKVNLGGN

SEQ ID NO: 166 - protein, 1065 aa, Clostridium perfringens
  REGION 1..1065: note = Clostridium perfringens D str. JGS1721
MNKDINYALGLDIGITSVGWAVINLDLNRIEDLGVRIFNAAENLKDGSSLALPRRLARGRRRLLRRKAYRVERVRKLILKNNILTKEELEGLFKNKEVIDVWEARVKGLDYKLSREEWAKILINFCKRRGFKSNRKNEAKDKEAGQILSSISYNIEKMKETNSRTIGEYIYNEVKNSEDSYAPLRNKFGEYKMCVSRDVIREEIHTLFEKQRELGNNFASDEIEDKYFEIFNSQRPFSNFEDLEKLVGFCTFERKKHKRAPKHCISSEEFTLYEGINKLSIIKDGEKRKLSEEERTLVVNEAFNKKEIKYTTLRKLLGLSEEELFSTLTYSIDKDISKTENTKFVSLKGYHEIKRAIEKGVSKKAWQDIENNRNLLNDIAYVLTLGKTDDEIEKQLRLRNVPEELFESLLDMSFNKFNNLSIYALEKILPFMKEGYQYNEACEKAGYNFKAIYEGVRTKKLPVIEIDEIVNPVVNRALAQTRKVINSVIDKYGSPVRINIELARDLAKNFKDRKLIEKEQKENRANLDKIRENLRELMDKEPTVVEVLKYRLWEQQRGECAYTQSQIPLERLFSPGYCEIDHIIPFSRSFDDSLSNKILVLGSENQRKGNRTPYEYFGEDSERWNSFEIWVKGSYLNYKKKANLLKKKFSEEEQRDWKARNLQDTKYICRYISNFVNNRLEFKESENKQKVITVNGRATAYLRSRWGLNKVREDGDKHHALDAAVVGVTTQGMVQKISKYSKAHELYTVRKNDEFVDVETGECVDVDEYKEIRKDILPRPWRGFSEELKLRLSDNPLEELKKSPIETYNEEFIKENVKPIFVSRVPFRKISGKLFKETIYSERAFKDGYFVSKKSLVDLKRGDLDNFYNYECDKKLYDAISERMKEFNYNGKKAFESPFRKPTKSGKEGPVVRSVKIKSAVPFKDGIPMNEGLVAKEGMVRIDIYEKEGKYFVVPVYRYQLAKGIVPKRAAIAKKDELKWPIMDQTYNFKFSIYKNDLIEVKYDKKGVYFGYYDGFDRNSASLTIEKHDNSERYRSIGLKVGVLEINKYEVDVLGNYHKVKLGGN

SEQ ID NO: 167 - protein, 1116 aa, Clostridium spiroforme
  REGION 1..1116: note = Clostridium spiroforme DSM 1552
MVEFLLKEMKIMGRLVLGLDIGITSVGYGVIDIDKNEFVDYGVRLFKEGTAINNEERRSKRGARRLKRRKTNRIADMKKLLERNGLIDEQYTALNNPYEIRKKGLKNKLSNYELATAILHITKNRGTCLESNADETQDEESTKNILSKNALELKDKYICEIQLARLEESGKIRGINNNFKTEDYLKELSKILENQDLEKETIDKIKEIVARRRRYDQGPGSEKSPTPYGSYRMENGELVHVNLIDMMRGKCSVFPDQLRAPQQSYSAELFNLLNDLNNLKINGEKLSSTEKQKIIDFVNEKGGITVKQLLKLIDVGITEISGFRIDKNEKPLITEFKGYKKVLKVFKNYNQESLLNDKSIVDTIMDINTKIKSIDERSDQLKQVLPSLDTSIINDLASIKGVSGYHSLSLKALNLINNEMLKTEMNQMQVLHQLDIFDKNRVSLKGQRQIYADDNAILSPVAKRAHRETFKVINKLRSIYGEFDSIVIETTRDKNTQDQKKRIKNNQKNYEERNTEVNNFLKEAGYNPENINAKTKMKIRLYIEQDAKSAYTLQDINLKELIEDEKAYEIDHIIPISISLDDSFNNKVLTTHDENQEKGNLTPISAFLKGKFHNGNLNTYKVFIQNNKNLNRKKKEYLLCEDDITRYEVVQNFINRNLVDTSYACRTVMNTLVHYFKDNEINTKVHTIKGQATSTFRKRIGLIKDREEDYFHHAIDALIVASLKKMNLINSYLMKVDFNEMYDEETGEIFNVLPDNSYLDEKYISFVSNLKNIYEESNKYIRGVMIKEKMTYPLIKVSHKIDTKPNRKISDDTIYSTRNVDNQDMLVERIKNIYDPKENAANTLINDIINDNTDKYIMYHKDPQTFDKIKAIVLNHFNEFKTDKNCYIVTKEGLYKLKGTSPLALYYEEFGPITKYAKKNNGPTIHSMKFYSEKLGNHLSITHKYSTVNKKVITKQISPYRTDFYQSPEGKYKFVTVRYKDVAYNAKKDKYIIDHSWYREQKKLKKIADEWIFVCSVHRDELIGIMKADGQKRIFDSSTESDGETLYHDAKTYEILKFTATNNDITGRFEVKPIYCYCKKQLMVSIGTCRKIQKFATDVLGNLYIVKDNVLKLEFK

SEQ ID NO: 168 - protein, 1338 aa, Coprococcus catus
  REGION 1..1338: note = Coprococcus catus GD/7
MKQEYFLGLDMGTGSLGWAVTDSTYQVMRKHGKALWGTRLFESASTAEERRMFRTARRRLDRRNWRIQVLQEIFSEEISKVDPGFFLRMKESKYYPEDKRDAEGNCPELPYALFVDDNYTDKNYHKDYPTIYHLRKMLMETTEIPDIRLVYLVLHHMMKHRGHFLLSGDISQIKEFKSTFEQLIQNIQDEELEWHISLDDAAIQFVEHVLKDRNLTRSTKKSRLIKQLNAKSACEKAILNLLSGGTVKLSDIFNNKELDESERPKVSFADSGYDDYIGIVEAELAEQYYIIASAKAVYDWSVLVEILGNSVSISEAKIKVYQKHQADLKTLKKIVRQYMTKEDYKRVFVDTEEKLNNYSAYIGMTKKNGKKVDLKSKQCTQADFYDFLKKNVIKVIDHKEITQEIESEIEKENFLPKQVTKDNGVIPYQVHDYELKKILDNLGTRMPFIKENAEKIQQLFEFRIPYYVGPLNRVDDGKDGKFTWSVRKSDARIYPWNFTEVIDVEASAEKFIRRMTNKCTYLVGEDVLPKDSLVYSKFMVLNELNNLRLNGEKISVELKQRIYEELFCKYRKVTRKKLERYLVIEGIAKKGVEITGIDGDFKASLTAYHDFKERLTDVQLSQRAKEAIVLNVVLFGDDKKLLKQRLSKMYPNLTTGQLKGICSLSYQGWGRLSKTFLEEITVPAPGTGEVWNIMTALWQTNDNLMQLLSRNYGFTNEVEEFNTLKKETDLSYKTVDELYVSPAVKRQIWQTLKVVKEIQKVMGNAPKRVFVEMAREKQEGKRSDSRKKQLVELYRACKNEERDWITELNAQSDQQLRSDKLFLYYIQKGRCMYSGETIQLDELWDNTKYDIDHIYPQSKTMDDSLNNRVLVKKNYNAIKSDTYPLSLDIQKKMMSFWKMLQQQGFITKEKYVRLVRSDELSADELAGFIERQIVETRQSTKAVATILKEALPDTEIVYVKAGNVSNFRQTYELLKVREMNDLHHAKDAYLNIVVGNAYFVKFTKNAAWFIRNNPGRSYNLKRMFEFDIERSGEIAWKAGNKGSIVTVKKVMQKNNILVTRKAYEVKGGLFDQQIMKKGKGQVPIKGNDERLADIEKYGGYNKAAGTYFMLVKSLDKKGKEIRTIEFVPLYLKNQIEINHESAIQYLAQERGLNSPEILLSKIKIDTLFKVDGFKMWLSGRTGNQLIFKGANQLILSHQEAAILKGVVKYVNRKNENKDAKLSERDGMTEEKLLQLYDTFLDKLSNTVYSIRLSAQIKTLTEKRAKFIGLSNEDQCIVLNEILHMFQCQSGSANLKLIGGPGSAGILVMNNNITACKQISVINQSPTGIYEKEIDLIKL

SEQ ID NO: 169 - protein, 1384 aa, Coriobacterium glomerans
MKLRGIEDDYSIGLDMGTSSVGWAVTDERGTLAHFKRKPTWGSRLFREAQTAAVARMPRGQRRRYVRRRWRLDLLQKLFEQQMEQADPDFFIRLRQSRLLRDDRAEEHADYRWPLFNDCKFTERDYYQRFPTIYHVRSWLMETDEQADIRLIYLALHNIVKHRGNFLREGQSLSAKSARPDEALNHLRETLRVWSSERGFECSIADNGSILAMLTHPDLSPSDRRKKIAPLFDVKSDDAAADKKLGIALAGAVIGLKTEFKNIFGDFPCEDSSIYLSNDEAVDAVRSACPDDCAELFDRLCEVYSAYVLQGLLSYAPGQTISANMVEKYRRYGEDLALLKKLVKIYAPDQYRMFFSGATYPGTGIYDAAQARGYTKYNLGPKKSEYKPSESMQYDDFRKAVEKLFAKTDARADERYRMMMDRFDKQQFLRRLKTSDNGSIYHQLHLEELKAIVENQGRFYPFLKRDADKLVSLVSFRIPYYVGPLSTRNARTDQHGENRFAWSERKPGMQDEPIFPWNWESIIDRSKSAEKFILRMTGMCTYLQQEPVLPKSSLLYEEFCVLNELNGAHWSIDGDDEHRFDAADREGIIEELFRRKRTVSYGDVAGWMERERNQIGAHVCGGQGEKGFESKLGSYIFFCKDVFKVERLEQSDYPMIERIILWNTLFEDRKILSQRLKEEYGSRLSAEQIKTICKKRFTGWGRLSEKFLTGITVQVDEDSVSIMDVLREGCPVSGKRGRAMVMMEILRDEELGFQKKVDDFNRAFFAENAQALGVNELPGSPAVRRSLNQSIRIVDEIASIAGKAPANIFIEVTRDEDPKKKGRRTKRRYNDLKDALEAFKKEDPELWRELCETAPNDMDERLSLYFMQRGKCLYSGRAIDIHQLSNAGIYEVDHIIPRTYVKDDSLENKALVYREENQRKTDMLLIDPEIRRRMSGYWRMLHEAKLIGDKKFRNLLRSRIDDKALKGFIARQLVETGQMVKLVRSLLEARYPETNIISVKASISHDLRTAAELVKCREANDFHHAHDAFLACRVGLFIQKRHPCVYENPIGLSQVVRNYVRQQADIFKRCRTIPGSSGFIVNSFMTSGFDKETGEIFKDDWDAEAEVEGIRRSLNFRQCFISRMPFEDHGVFWDATIYSPRAKKTAALPLKQGLNPSRYGSFSREQFAYFFIYKARNPRKEQTLFEFAQVPVRLSAQIRQDENALERYARELAKDQGLEFIRIERSKILKNQLIEIDGDRLCITGKEEVRNACELAFAQDEMRVIRMLVSEKPVSRECVISLFNRILLHGDQASRRLSKQLKLALLSEAFSEASDNVQRNVVLGLIAIFNGSTNMVNLSDIGGSKFAGNVRIKYKKELASPKVNVHLIDQSVTGMFERRTKIGL

SEQ ID NO: 170 - protein, 1099 aa, Corynebacterium accolens
  REGION 1..1099: note = Corynebacterium accolens ATCC 49725
MSLSYRVGIDVGTYSLGCTAIEVDDNDQPVNILSSVSLIHDSGLDPDQQKRAVTRLASSGVARRTRRLYRRRRRRMINLEKFLTSQGWETRPFEHYSDPYLPWNARVALVNGYISDDAQRGMYLSIAFRHIANHRGWRNPYWKVSSLYSPDKPSDAFEQIRKELEESTGHKIPETVTVGQLISFAQFGKDRLRGGGKKKDEKKPQEQVNQAVISARLHQIDHAREINEICRVQKIDDALRKQILDLVFAAESPKGAQIGRVGKDPLQPKLPRALKASDAFQQYRIVALAGNLRIYRDGVSTPLDRDEKLIVFNYLINLSHKEEPSWLKVAEVLNIDRGQLHGTATMTDDGERAGAAPPVHDTNRTILGCKIKPLVHWWEGANDDERAAMLKALSNSEVEDFDSPAGAQTQAFFANLDESEQEKLDSLHLPIGRAAYSEDTLMRLTSRMLDENLDLYEARLAEFDIPKDWAPPAPRIGEPVGNPAVDRVLKGVARWLEAAADEWGAPKSVVIEHVRDGFISKSKANEIDRANNARHKRNRELFKQMQENLGIDGKLRSSDLWRYQSVQRQNCQCAYCGSPITYTTCEMDHIVPRAGEGSTNTRDNLVATCHRCNLAKKNIPFAVWAAQTNIPGVSVKEALDRTRHWSEDSGMTSKDFKKFRKNVCDRLKRTVVDEPLDARSMESVAWMANELRGRVAQRFQEENTVVNVYRGELTAEARRAAGISDKLRFIDGTGKSRLDRRHHAVDAAVVAFTQNYVAETLAIRSNKKREAQLLQAAEQWKEFTGSDAEHRAAWNAWLPKMQKLAVLLQKALDEDRIAVTSNLRLRLGNGRAHEDSIGELKTIRVGDAISVTDIDRASSEALWCALTREPDFDENNGLPENPDRRIRIHGTWYDAEDDIEVFPVGAGAIKVRGGYAELSRFHHARIYKIPGKKAPVYCMLRVYNADLIRHRHEDLFSVEIKPQTMSVRQAEPKLRKALAENTAEYLGWLVTDDELVIDTSNFNTGQIAEMQSELGQVRRWRLDGFYSPSTLRLRPLQMSAEGLREDTSIGAKKIIDRPGWLPAINKLFGEGHVTVVRRDALGRARLTSNAHLPISWKAE

SEQ ID NO: 171 - protein, 1099 aa, Corynebacterium accolens
  REGION 1..1099: note = Corynebacterium accolens ATCC 49726
MSLLYRVGIDVGTYSLGCTAIEVDDNDQPVSILSSVSLIHDSGLDPDQQKRAVTRLASSGVARRTRRLYRRRRRRMVKLENFLTAQGWETLPFERYSDPYLPWHARVALVNGYISDDTQRGQYLSIAFRHIANHRGWRNPYWKVSSLYSPDKPSDAFEQIRKELEASTGRQIPETATVGQLISFAQFGKDRLRGGGKQKDKKKPQEQVNQAVISARLHQIDHAREINEICRVQKIDDTLRKQILDLVFAAESPKGAQKGRVGKDPLQPKLFRALKASDAFQQYRIAALTGNLRIYRNGVTVPLDRDEKLIVFNYLVNLPKKEEPSWLKIAEILNIDRGQLRGTATMTDDGERAGATPPVHDTNRTILDSKVKPLAHWWENASDDERAAMLKSLSNSEVEDFDSPAGAQVQAFFADLDETEQEKLDSLHLPMGRAAYSEDTLMRLTNRMLDENLDLYEARLAEFGIPKDWAPPAPRIGEPVGNPAVDRVLKGVARWLEAAADEWGAPKSVVIEHVRDGFVSKSKAIEIDRANNNRHKRNRELFQKMQENLGIEGKVRSSDLWRYQSVQRQNCQCAYCGSPITYTTCEMDHIVPRAGEGSTNTRDNLVATCHRCNLAKKNIPFAVWAEKSTIPGVSVKEALDRTRHWSEDSGMSKKDFQKFRKNVCERLNRTVVDEPLDARSMESVAWMANELRGRVAQRFQEENTTVNVYRGALTAEARRAAGITDKLRFIDGTGKSRLDRRHHAVDAAVVAFIHNYVAETLAIRSNKKREAQLLQGTSQWKEFTGSDDKHRAVWNAWIPKMQKLAVLLQIALDEDRIVVTSNLRLRLGNGRAHEDTISELKTIRVGDAISVTDIDRASSEALWCALTREPDFDEKDGLPENPNRRIRVHGTWYDAEDEIEVFPVGAGAIKVRGGYAKLSRFHHARVYKIPGKKAPIYCMLRVYNTDLVQHRHEDLFSVELKPQTMSVRQAEPKLRKALAENTAEYLGWLVTDDELIIDTSTFRTGLIEEMQSEFGLVRRWRLDGFDSPSLLTLRPLHMSAEGLPDDCALGSRKIIDTKGWRVSINKVFNAGNTTVVRRDALGRARLTSNAHLPISWKEE

SEQ ID NO: 172 - protein, 1084 aa, Corynebacterium diphtheriae
MKYHVGIDVGTFSVGLAAIEVDDAGMPIKTLSLVSHIHDSGLDPDKIKSAVTRLASSGIARRTRRLYRRKRRRLQQLDKFIQRQGWPVIELEDYSDPLYPWKVRAELAASYIADEKERGEKLSVALRHIARHRGWRNPYAKVSSLYLPDEPSDAFKAIREEIKRASGQPVPETATVGQMVTLCELGTLKLRGEGGVLSARLQQSDHAREIQEICRMQEIGQELYRKIIDVVFAAESPKGSASSRVGKDPLQPGKNRALKASDAFQRYRIAALIGNLRVRVDGEKRILSVEEKNLVFDHLVNLAPKKEPEWVTIAEILGIDRGQLIGTATMTDDGERAGARPPTHDTNRSIVNSRIAPLVDWWKTASALEQHAMVKALSNAEVDDFDSPEGAKVQAFFADLDDDVHAKLDSLHLPVGRAAYSEDTLVRLTRRMLADGVDLYTARLQEFGIEPSWTPPAPRIGEPVGNPAVDRVLKTVSRWLKSATKTWGAPERVIIEHVREGFVTEKRAREMDGDMRRRAARNAKLFQEMQEKLNVQGKPSRADLWRYQSVQRQNCQCAYCGSPITFSNSEMDHIVPRAGQGSTNTRENLVAVCHRCNQSKGNTPFAIWAKNTSIEGVSVKEAVERTRHWVTDTGMRSTDFKKFTKAVVERFQRATMDEEIDARSMESVAWMANELRSRVAQHFASHGTTVRVYRGSLTAEARRASGISGKLEFLDGVGKSRLDRRHHAIDAAVIAFTSDYVAETLAVRSNLKQSQAHRQEAPQWREFTGKDAEHRAAWRVWCQKMEKLSALLTEDLRDDRVVVMSNVRLRLGNGSAHEETIGKLSKVKLGSQLSVSDIDKASSEALWCALTREPDFDPKDGLPANPERHIRVNGTHVYAGDNIGLFPVSAGSIALRGGYAELGSSFHHARVYKITSGKKPAFAMLRVYTIDLLPYRNQDLFSVELKPQTMSMRQAEKKLRDALATGNAEYLGWLVVDDELVVDTSKIATDQVKAVEAELGTIRRWRVDGFFGDTRLRLRPLQMSKEGIKKESAPELSKIIDRPGWLPAVNKLFSEGNVTVVRRDSLGRVRLESTAHLPVTWKVQ

SEQ ID NO: 173 - protein, 1084 aa, Corynebacterium diphtheriae
MKYHVGIDVGTFSVGLAAIEVDDAGMPIKTLSLVSHIHDSGLDPDKMKSAVTRLASSGIARRTRRLYRRKRRRLQQLDKFIQRQGWPVIELEDYSDPLYPWKVRAELAASYIADEKERGEKLSVALRHIARHRGWRNPYAKVSSLYLPDEPSDAFKSIREEIKRASGQPVPETATVGQMVTLCELGTLKLRGEGGVLSARLQQSDHAREIQEICRMQEIGQELYRKIIDVVFAAESPKGSASSRVGKDPLQPGKNRALKASDAFQRYRIAALIGNLRVRVDGEKRILSVEEKNLVFDHLVNLAPKKEPEWVTIAEILGIDRGQLIGTATMTDDGERAGARPPTHDTNRSIVNSRIAPLVDWWKTASALEQHAMVKALSNAEVDDFDSPEGAKVQAFFADLDDDVHAKLDSLHLPVGRAAYSEDTLVRLTRRMLADGVDLYTARLQEFGIEPSWTPPAPRIGEPVGNPAVDRVLKTVSRWLESATKTWGAPERVIIEHVREGFVTEKRAREMDGDMRRRAARNAKLFQEMQEKLNVQGKPSRADLWRYQSVQRQNCQCAYCGSPITFSNSEMDHIVPRAGQGSTNTRENLVAVCHRCNQSKGNTPFAIWAKNTSIEGVSVKEAVERTRHWVTDTGMRSTDFKKFTKAVVERFQRATMDEEIDARSMESVAWMANELRSRVAQHFASHGTTVRVYRGSLTAEARRASGISGKLEFLDGVGKSRLDRRHHAIDAAVIAFTSDYVAETLAVRSNLKQSQAHRQEAPQWREFTGKDAEHRAAWRVWCQKMEKLSALLTEDLRDDRVVVMSNVRLRLGNGSAHEETIGKLSKVKLGSQLSVSDIDKASSEALWCALTREPDFDPKDGLPANPERHIRVNGTHVYAGDNIGLFPVSAGSIALRGGYAELGSSFHHARVYKITSGKKPAFAMLRVYTIDLLPYRNQDLFSVELKPQTMSMRQAEKKLRDALATGNAEYLGWLVVDDELVVDTSKIATDQVKAVEAELGTIRRWRVDGFFGDTRLRLRPLQMSKEGIKKESAPELSKIIDRPGWLPAVNKLFSEGNVTVVRRDSLGRVRLESTAHLPVTWKVQ

SEQ ID NO: 174 - protein, 1084 aa, Corynebacterium diphtheriae
MKYHVGIDVGTFSVGLAAIEVDDAGMPIKTLSLVSHIHDSRLDPDKIKSAVTRLASSGIARRTRRLYRRKRRRLQQLDKFIQRQGWPVIELEDYSDPLYPWKVRAELAASYIADEKERGEKLSVALRHIARHRGWRNPYAKVSSLYLPDEPSDAFKAIREEIKRASGQPVPETATVGQMVTLCELGTLKLRGEGGVLSARLQQSDHAREIQEICRMQEIGQELYRKIIDVVFAAESPKGSASSRVGKDPLQPGKNRALKASDAFQRYRIAALIGNLRVRVDGEKRILSVEEKNLVFDHLVNLAPKKEPEWVTIAEILGIDRGQLIGTATMTDDGERAGARPPTHDTNRSIVNSRIAPLVDWWKTASALEQHAMVKALSNAEVDDFDSPEGAKVQAFFADLDDDVHAKLDSLHLPVGRAAYSEDTLVRLTRRMLADGVDLYTARLQEFGIEPSWTPPAPRIGEPVGNPAVDRVLKTVSRWLESATKTWGAPERVIIEHVREGFVTEKRAREMDGDMRRRAARNAKLFQEMQEKLNIQGKPSRADLWRYQSVQRQNCQCAYCGSPITFSNSEMDHIVPRAGQGSTNTRENLVAVCHRCNQSKGNTPFAIWAKNTSIEGVSVKEAVERTRHWVTDTGMRSTDFKKFTKAVVERFQRVTMDEEIDARSMESVAWMANELRSRVAQHFASRGTTVRVYRGSLTAEARRASGISGKLEFLDGVGKSRLDRRHHAIDAAVIAFTSDYVAETLAVRSNLKQSQAHRQEAPQWREFTGKDAEHRAAWRVWCQKMEKLSALLTEDLRDDRVVVMSNVRLRLGNGSAHEETIGKLSKVKLGSQLSVSDIDKASSEALWCALTREPDFDPKDGLPANPERHIRVNGTHVYAGDNIGLFPVSAGSIALRGGYAELGSSFHHARVYKITSGKKPAFAMLRVYTIDLLPYRNQDLFSVELKPQTMSMRQAEKKLRDALATGNAEYLGWLVVDDELVVDTSKIATDQVKAVEAELGTIRRWRVDGFFGDTRLRLRPLQMSKEGIKKESAPELSKIIDRPGWLPAVNKLFSEGNVTVVRRDSLGRVRLESTAHLPVTWKVQ

SEQ ID NO: 175 - protein, 1084 aa, Corynebacterium diphtheriae
  REGION 1..1084: note = Corynebacterium diphtheriae bv. intermedius str. NCTC 5011
MKYHVGIDVGTFSVGLAAIEVDDAGMPIKTLSLVSHIHDSGLDPDEIKSAVTRLASSGIARRTRRLYRRKRRRLQQLDKFIQRQGWPVIELEDYSDPLYPWKVRAELAASYIADEKERGEKLSVALRHIARHRGWRNPYAKVSSLYLPDGPSDAFKAIREEIKRASGQPVPETATVGQMVTLCELGTLKLRGEGGVLSARLQQSDHAREIQEICRMQEIGQELYRKIIDVVFAAESPKGSASSRVGKDPLQPGKNRALKASDAFQRYRIAALIGNLRVRVDGEKRILSVEEKNLVFDHLVNLAPKKEPEWVTIAEILGIDRGQLIGTATMTDDGERAGARPPTHDTNRSIVNSRIAPLVDWWKTASALEQHAMVKALSNAEVDDFDSPEGAKVQAFFADLDDDVHAKLDSLHLPVGRAAYSEDTLVRLTRRMLADGVDLYTARLQEFGIEPSWTPPAPRIGEPVGNPAVDRVLKTVSRWLESATKTWGAPERVIIEHVREGFVTEKRAREMDGDMQRRAARNAKLFQEMQEKLNVQGKPSRADLWRYQSVQRQNCQCAYCGSPITFSNSEMDHIVPRAGQGSTNTRENLVAVCHRCNQSKGNTPFAIWAKNTSIEGVSVKEAVERTRHWVTDTGMRSPDFKKFTKAVVERFQRATMDEEIDARSMESVAWMANELRSRVAQHFASHGTTVRVYRGSLTAEARRASGISGKLKFFDGVGKSRLDRRHHAIDAAVIAFTSDYVAETLAVRSNLKQSQAHRQEAPQWREFTGKDAEHRAAWRVWCQKMEKLSALLTEDLRDDRVVVMSNVRLRLGNGSAHKETIGKLSKVKLGSQLSVSDIDKASSEALWCALTREPDFDPKEGLPANPERHIRVNGTHVYAGDNIGLFPVSAGSIALRGGYAELGSSFHHARVYKITSGKKPAFAMLRVYTIDLLPYRNQDLFSVELKPQTMSMRQAEKKLRDALATGNAEYLGWLVVDDELVVDTSKIATDQVKAVEAELGTIRRWRVDGFFSPSKLRLRPLQMSKEGIKKESAPELSKIIDRPGWLPAVNKLFSDGNVTVVRRDSLGRVRLESTAHLPVTWKVQ

SEQ ID NO: 176 - protein, 1084 aa, Corynebacterium diphtheriae
MKYHVGIDVGTFSVGLAAIEVDDAGMPIKTLSLVSHIHDSGLDPDKIKSAVTRLASSGIARRTRRLYRRKRRRLQQLDKFIQRQGWPVIELEDYSDPLYPWKVRAELAASYIADEKERGEKLSVALRHIARHRGWRNPYAKVSSLYLPDEPSDAFKAIREEIKRASGQPVPETATVGQMVTLCELGTLKLRGEGGVLSARLQQSDHAREIQEICRMQEIGQELYRKIIDVVFAAESPKGSASSRVGKDPLQPGKNRALKASDAFQRYRIAALIGNLRVRVDGEKRILSVEEKNLVFDHLVNLAPKKEPEWVTIAEILGIDRGQLIGTATMTDDGERAGARPPTHDTNRSIVNSRIAPLVDWWKTASALEQHAMVKALSNAEVDDFDSPEGAKVQAFFADLDDDVHAKLDSLHLPVGRAAYSEDTLVRLTRRMLADGVDLYTARLQEFGIEPSWTPPAPRIGEPVGNPAVDRVLKTVSRWLESATKTWGAPERVIIEHVREGFVTEKRAREMDGDMRRRAARNAKLFQEMQEKLNVQGKPSRADLWRYQSVQRQNCQCAYCGSPITFSNSEMDHIVPRAGQGSTNTRENLVAVCHRCNQSKGNTPFAIWAKNTSIEGVSVKEAVERTRHWVTDTGMRSTDFKKFTKAVVERFQRATMDEEIDARSMESVAWMANELRSRVAQHFASHGTTVRVYRGSLTAEARRASGISGKLEFLDGVGKSRLDRRHHAIDAAVIAFTSDYVAETLAVRSNLKQSQAHRQEAPQWREFTGKDAEHRAAWRVWCQKMEKLSALLTEDLRDDRVVVMSNVRLRLGNGSAHEETIGKLSKVKLGSQLSVSDIDKASSEALWCALTREPDFDPKDGLPANPERHIRVNGTHVYAGDNIGLFPVSAGSIALRGGYAELGSSFHHARVYKITSGKKPAFAMLRVYTIDLLPYRNQDLFSVELKPQTMSMRQAEKKLRDALATGNAEYLGWLVVDDELVVDTSKIATDQVKAVEAELGTIRRWRVDGFFGDTRLRLRPLQMSKEGIKKESAPELSKIIDRPGWLPAVNKLFSEGNVTVVRRDSLGRVRLESTAHLPVTWKVQ

SEQ ID NO: 177 - protein, 1084 aa, Corynebacterium diphtheriae
MKYHVGIDVGTFSVGLAAIEVDDAGMPIKTLSLVSHIHDSGLDPDEIKSAVTRLASSGIARRTRRLYRRKRRRLQQLDKFIQRQGWPVIELEDYSDPLYPWKVRAELAASYIADEKERGEKLSVALRHIARHRGWRNPYAKVSSLYLPDGPSDAFKAIREEIKRASGQPVPETATVGQMVTLCELGTLKLRGEGGVLSARLQQSDHAREIQEICRMQEIGQELYRKIIDVVFAAESPKGSASSRVGKDPLQPGKNRALKASDAFQRYRIAALIGNLRVWVDGEKRILSVEEKNLVFDHLVNLTPKKEPEWVTIAEILGIDRGQLIGTATMTDDGERAGARPPTHDTNRSIVNSRIAPLVDWWKTASALEQHAMVKALSNAEVDDFDSPERAKVQAFFADLDDDVHAKLDSLHLPVGRAAYSEDTLVRLTRRMLSDGVDLYTARLQEFGIEPSWTPPTPRIGEPVGNPAVDRVLKTVSRWLESATKTWGAPERVIIEHVREGFVTEKRAREMDGDMRRRAARNAKLFQEMQEKLNVQGKPSRADLWRYQSVQRQNCQCAYCGSPITFSNSEMDHIVPRAGQGSTNTRENLVAVCHRCNQSKGNTPFAIWAKNTSIEGVSVKEAVERTRHWVTDTGMRSTDFKKFTKAVVERFQRATMDEEIDARSMESVAWMANELRSRVAQHFASHGTTVRVYRGSLTAEARRASGISGKLEFLDGVGKSRLDRRHHAIDAAVIAFTSDYVAETLAVRSNLKQSQAHRQEAPQWREFTGKDAEHRATWRVWCQKMEKLSALLTEDLRDDRVVVMSNVRLRLGNGSAHEETIGKLSKVKLGSQLSVSDIDKASSEALWCALTREPDFDPKDGLPANPERHIRVNGTHVYAGDNIGLFPVSAGSIALRGGYAELGSSFHHARVYKITSGKKPAFAMLRVYTIDLLPYRNQDLFSVELKPQTMSMRQAEKKLRDALATGNAEYLGWLVVDDELVVDTSKIATDQVKAVEAELGTIRRWRVDGFFGDTRLRLRPLQMSKEGIKKESAPELSKIIDRPGWLPAVNKLFSEGNVTVVRRDSLGRVRLESTAHLPVTWKVQ

SEQ ID NO: 178 - protein, 1084 aa, Corynebacterium diphtheriae
MKYHVGIDVGTFSVGLAAIEVDDAGMPIKTLSLVSHIHDSGLDPDEIKSAVTRLASSGIARRTRRLYRRKRRRLQQLDKFIQRQGWPVIELEDYSDPLYPWKVRAELAASYIADEKERGEKLSVALRHIARHRGWRNPYAKVSSLYLPDGPSDAFKAIREEIKRASGQPVPETATVGQMVTLCELGTLKLRGEGGVLSARLQQSDYAREIQEICRMQEIGQELYRKIIDVVFAAESPKGSASSRVGKDPLQPGKNRALKASDAFQRYRIAALIGNLRVRVDGEKRILSVEEKNLVFDHLVNLTPKKEPEWVTIAEILGIDRGQLIGTATMTDDGERAGARPPTHDTNRSIVNSRIAPLVDWWKTASALEQHAMVKALSNAEVDDFDSPEGAKVQAFFADLDDDVHAKLDSLHLPVGRAAYSEDTLVRLTRRMLSDGVDLYTARLQEFGIEPSWTPPTPRIGEPVGNPAVDRVLKTVSRWLESATKTWGAPERVIIEHVREGFVTEKRAREMDGDMRRRAARNAKLFQEMQEKLNVQGKPSRADLWRYQSVQRQNCQCAYCGSPITFSNSEMDHIVPRAGQGSTNTRENLVAVCHRCNQSKGNTPFAIWAKNTSIEGVSVKEAVERTRHWVTDTGMRSTDFKKFTKAVVERFQRATMDEEIDARSMESVAWMANELRSRVAQHFASHGTTVRVYRGSLTAEARRASGISGKLKFFDGVGKSRLDRRHHAIDAAVIAFTSDYVAETLAVRSNLKQSQAHRQEAPQWREFTGKDAEHRAAWRVWCQKMEKLSALLTEDLRDDRVVVMSNVRLRLGNGSAHKETIGKLSKVKLSSQLSVSDIDKASSEALWCALTREPGFDPKEGLPANPERHIRVNGTHVYAGDNIGLFPVSAGSIALRGGYAELGSSFHHARVYKITSGKKPAFAMLRVYTIDLLPYRNQDLFSVELKPQTMSMRQAEKKLRDALATGNAEYLGWLVVDDELVVDTSKIATDQVKAVEAELGTIRRWRVDGFFSPSKLRLRPLQMSKEGIKKESAPELSKIIDRPGWLPAVNKLFSDGNVTVVRRDSLGRVRLESTAHLPVTWKVQ

SEQ ID NO: 179 - protein, 1084 aa, Corynebacterium diphtheriae
MKYHVGIDVGTFSVGLAAIEVDDAGMPIKTLSLVSHIHDSGLDPDKMKSAVTRLASSGIARRTRRLYRRKRRRLQQLDKFIQRQGWPVIELEDYSDPLYPWKVRAELAASYIADEKERGEKLSVALRHIARHRGWRNPYAKVSSLYLPDEPSDAFKSIREEIKRASGQPVPETATVGQMVTLCELGTLKLRGEGGVLSARLQQSDHAREIQEICRMQEIGQELYRKIIDVVFAAESPKGSASSRVGKDPLQPGKNRALKASDSFQRYRIAALISNLRVRVDGEKRILSVEEKNLVFDHLVNLAPKKEPEWVTIAEILGIDRGQLIGTATMTDDGERAGARPPTHDTNRSIVNSRIAPLVDWWKTASALEQHAMVKALSNAEVDDFDSPEGAKVQAFFADLDDDVHAKLDSLHLPVGRAAYSEDTLVRLTRRMLADGVDLYTARLQEFGIEPSWTPPAPRIGEPVGNPAVDRVLKTVSRWLESATKTWGAPERVIIEHVRDGFVTEKRAREMDGDMRRRAARNAKLFQEMQEKLNVQGKPSRADLWRYQSVQRQNCQCAYCGSPITFSNSEMDHIVPRAGQGSTNTRENLVAVCHRCNQSKGNTPFAIWAKNTSIEGVSVKEAVERTRHWVTDTGMRSTDFKKFTKAVVERFQRATMDEEIDARSMESVAWMANELRSRVAQHFASHGTTVRVYRGSLTAEARRASGISGKLEFLDGVGKSRLDRRHHAIDAAVIAFTSDYVAETLAVRSNLKQSQAHRQEAPQWREFTGKDAEHRAAWRVWCQKMEKLSALLTEDLRDDRVVVMSNVRLRLGNGSAHEETIGKLSKVKLGSQLSVSDIDKASSEALWCALTREPDFDPKDGLPANPERHIRVNGTHVYAGDNIGLFPVSAGSIALRGGYAELGSSFHHARVYKITSGKKPAFAMLRVYTIDLLPYRNQDLFSVELKPQTMSMRQAEKKLRDALATGNAEYLGWLVVDDELVVDTSKIATDQVKAVEAELGTIRRWRVDGFFGDTRLRLRPLQMSKEGIKKELAPELSKIIDRPGWLPAVNKLFSEGNVTVVRRDSLGRVRLESTAHLPVTWKVQ

SEQ ID NO: 180 - protein, 1089 aa, Corynebacterium matruchotii
  REGION 1..1089: note = Corynebacterium matruchotii ATCC 14266
MNSANVNYRVGIDVGSYSLGMAAIAIDDDGKPTEILSAISLIHDSGVDPDSAKSAATRLATSGIARRTRRLYRRKRKRLAKLDKFISSQGWPLKEFEKYEDPFYPWRVRAELATTAITDQQELGEKLSIALRHIARHRGWRNPYSKVTALYTVTEPSDAFLAMQEECAKQLGRTIPETITVGQLVTGMNLGKTRLRGENSLLAARPRQSDNANEIHTIAKVQGLSNELVRQIIDHVFAAESPKGSAAEQVGKDPLQPTKKRALKASDAFQQYRIAALIGNLRIRGGKGNRRLTTEETRLVFDYLRSLPAKQEPTWQLVAEQLKIDRGNLVGTAIMTDDGERAGAKPPVHDTNRIMENTKIKPLATWWKSADADARAAMVKALSNAEVDDFDSQAGAQVQEFFFGISDEDQEKLDGLHLPIGRAAYSEDTLDRLTKRMIGEGMDLYEARQAEFKISNDWAPPAPEIGERVGNPAVDRVLKATARWLNAAERQWGAPKSVNIEHVRAAFMSESSARELDRDNQQRAKRNVKVVAEMQEKLGIEGRPSRADVWRFQSIQRQNGKCAYCGAEISFKNSEMDHIIPQAGEGSTNTRDNLVAVCRECNSSKSNIAFAVWAENTSRPGVSVQKAIERTHHWVTDSGLRKPEFDKFRKQVCDRLRRKATDEPIDARSLESVAWMANELRSRIAQKFKDGDTKVRVYKGALTAEARRASGISGKLEFVDGKGKSRLDRRHHAVDAAVVAFTSNYVAETLALRSNMKFDQELRRKAPQWREFTGSDHVHQVEWTKWKYRMQALAELLNNALVQDRIVVMHNLRLRLGNGAAHEDTIGKLTRLKVGDAISTTDIDRASSEALWCALTRDPDYDPKTGLPENPNRTIRIHGTHLTASDEITVFPVAAASIPIRDGFAKLGSNYHHVRLFRVPSGKKYKYCLMQVYTVDLLKFRKEDLFTVELKPQTISVRTCEALLRKALANGTAEYLGWLVSDDELLIDTSSFDTPGIVKLREEYGPVNRWRLAGLTSVTRLNLRPLYLSKEGLKPNVNPEIKKIIDNRSWIITVNKLFSSGHVKIIRRDALGRPRLHSAAHLPICWEVK

SEQ ID NO: 181 - protein, 1069 aa, Corynebacterium matruchotii
  REGION 1..1069: note = Corynebacterium matruchotii ATCC 33806
MAAIAIDDDGKPTEILSAISLIHDSGVDPDSAKSAATRLATSGIARRTRRLYRRKRKRLAKLDKFISSQGWPLKEFEKYEDPFYPWRVRAELATTAITDQQELGEKLSIALRHIARHRGWRNPYSKVTALYTVTEPSDAFLAMQEECAKQLGRTIPETITVGQLVTGMNLGKTRLRGENSLLAARPRQSDNANEIHTIAKVQGLSNELVRQIIDHVFAAESPKGSAAEQVGKDPLQPTKKRALKASDAFQQYRIAALIGNLRIRGGKGNRRLTTEETRLVFDYLRSLPAKQEPTWQLVAEQLKIDRGNLVGTAIMTDDGERAGAKPPVHDTNRIMENTKIKPLATWWKSADADARAAMVKALSNAEVDDFDSQAGAQVQEFFFGISDEDQEKLDGLHLPIGRAAYSEDTLDRLTKRMIGEGMDLYEARQAEFKISNDWAPPAPEIGERVGNPAVDRVLKATARWLNAAERQWGAPKSVNIEHVRAAFMSESSARELDRDNQQRAKRNVKVVAEMQEKLGIEGRPSRADVWRFQSIQRQNGKCAYCGAEISFKNSEMDHIIPQVGEGSTNTRDNLVAVCRECNSSKSNIAFAVWAENTSRPGVSVQKAIERTHHWVTDSGLRKPEFDKFRKQVCDRLRRKATDEPIDARSLESVAWMANELRSRIAQKFKDGDTKVRVYKGALTAEARRASGISGKLEFVDGKGKSRLDRRHHAVDAAVVAFTSNYVAETLALRSNMKFDQELRRKAPQWREFTGSDHVHQVEWTKWKYRMQALAELLNNALVQDRIVVMHNLRLRLGNGAAHEDTIGKLTRLKVGDAISTTDIDRASSEALWCALTRDPDYDPKTGLPENPNRTIRIHGTHLTASDEITVFPVAAASIPIRDGFAKLGSNYHHVRLFRVPSGKKYKYCLMQVYTVDLLKFRKEDLFTVELKPQTISVRTCEALLRKALANGTAEYLGWLVSDDELLIDTSSFDTPGIVKLREEYGPVNRWRLAGLTSVTRLNLRPLYLSKEGLKPNVNPEIKKIIDNRSWIITVNKLFSSGHVKIIRRDALGRPRLHSAAHLPICWEVK

SEQ ID NO: 182 - protein, 1079 aa, Dinoroseobacter shibae
MRLGLDIGTSSIGWWLYETDGAGSDARITGVVDGGVRIFSDGRDPKSGASLAVDRRAARAMRRRRDRYLRRRATLMKVLAETGLMPADPAEAKALEALDPFALRAAGLDEPLPLPHLGRALFHLNQRRGFKSNRKTDRGDNESGKIKDATARLDMEMMANGARTYGEFLHKRRQKATDPRHVPSVRTRLSIANRGGPDGKEEAGYDFYPDRRHLEEEFHKLWAAQGAHHPELTETLRDLLFEKIFFQRPLKEPEVGLCLFSGHHGVPPKDPRLPKAHPLTQRRVLYETVNQLRVTADGREARPLTREERDQVIHALDNKKPTKSLSSMVLKLPALAKVLKLRDGERFTLETGVRDAIACDPLRASPAHPDRFGPRWSILDADAQWEVISRIRRVQSDAEHAALVDWLTEAHGLDRAHAEATAHAPLPDGYGRLGLTATTRILYQLTADVVTYADAVKACGWHHSDGRTGECFDRLPYYGEVLERHVIPGSYHPDDDDITRFGRITNPTVHIGLNQLRRLVNRIIETHGKPHQIVVELARDLKKSEEQKRADIKRIRDTTEAAKKRSEKLEELEIEDNGRNRMLLRLWEDLNPDDAMRRFCPYTGTRISAAMIFDGSCDVDHILPYSRTLDDSFPNRTLCLREANRQKRNQTPWQAWGDTPHWHAIAANLKNLPENKRWRFAPDAMTRFEGENGFLDRALKDTQYLARISRSYLDTLFTKGGHVWVVPGRFTEMLRRHWGLNSLLSDAGRGAVKAKNRTDHRHHAIDAAVIAATDPGLLNRISRAAGQGEAAGQSAELIARDTPPPWEGFRDDLRVRLDRIIVSHRADHGRIDHAARKQGRDSTAGQLHQETAYSIVDDIHVASRTDLLSLKPAQLLDEPGRSGQVRDPQLRKALRVATGGKTGKDFENALRYFASKPGPYQAIRRVRIIKPLQAQARVPVPAQDPIKAYQGGSNHLFEIWRLPDGEIEAQVITSFEAHTLEGEKRPHPAAKRLLRVHKGDMVALERDGRRVVGHVQKMDIANGLFIVPHNEANADTRNNDKSDPFKWIQIGARPAIASGIRRVSVDEIGRLRDGGTRPI

SEQ ID NO: 183 - protein, 1332 aa, Dolosigranulum pigrum
  REGION 1..1332: note = Dolosigranulum pigrum ATCC 51524
MQKNYTIGLDIGTNSVGWAVMKDDYTLIRKRMKVLGNTDIKKIKKNFWGVRLFDEGETAKETRLKRGTRRRYQRRRNRLIYLQDIFQQPMLAIDENFFHRLDDSFFVPDDKSYDRHPIFGSLEEEVAYHNTYPTIYHLRKHLADNPEKADLRLVYTALAHIVKYRGHFLIEGELNTENTSISETFEQFLDTYSDIFKEQLVGDISKVEEILSSKQSRSRKHEQIMALFPNENKLGNFGRFMMLIVGNTSNFKPVFDLDDEYKLKLSDETYEEDLDTLLGMTDDVFLDVFMAAKNVYDAVEMSAIISTDTGNSKAVLSNQMINFYDEHKVDLAQLKQFFKTHLPDKYYECFSDPSKNGYAGYIDGKTNQEDFYKYIEKVMKTIKSDKKDYFLDKIDREVFLRKQRSFYNSVIPHQIHLQEMQAILDRQSQYYPFLAENRDKIESLVTFRIPYYVGPLTVSDQSEFAWMERQSDEPIRPWNFDEIVNKERSAEKFIERMTNMDTYLLEEKVLPKRSLLYQTFEVYNELTKVRYTNEQGKTEKLNRQQKAEIIETLFKQKNRVREKDIANYLEQYGYVDGTDIKGVEDKFNASLSTYNDLAKIDGAKAYLDDPEYADVWEDIIKILTIFEDKAMRKKQLQTYSDTLSPEILKKLERKHYTGWGRFSKKLINGLRDEGSNKTILDYLKSDEGSSGPTNRNFMQLIRDNTLSFKKKIEDAQTIEDTTHIYDTVAELPGSPAIKKGIRQALKIVEEIIDIIGYEPENIVVEMARESQTTKKGKDLSKERLEKLTEAIKEFDGPSDVKVKDLKNENLRNDRLYLYYLQNGRDMYTNEPLDINNLSKYDIDHIIPQSFTTDNSIDNKVLVSRTKNQGNKSDDVPSINIVHKMKPFWRQLHKAGLISDRKFKNLTKAEHGGLTEADRAHFLNRQLVETRQITKHVANLLDSQYNTAEEQRINIVLLKSSMTSRFRKEFKLYKVREINDYHHGHDAYLNAVVATTIMKVYPNLKPQFVYGQYKKTSMFKEEKATARKHFYSNITKFFKKEKVVNEETGEILWDTERHLSTIKRVLSWKQMNIVKKVEKQKGQLWKETIYPKGDSSKLIPVKEGMDPQKYGGLSQVSEAFAVVITHEKGKKKQLKSDLISIPIVDQKAYEQHPTAYLEEAGYNNPTVLHELFKYQLFELEDGSRRMIASAKEFQKGNQMVLPLELVELLYHANRYDKVKFPDSIEYVHDNLAKFDDLLEYVIDFSNKYINADKNVQKIQKIYKEHGTEDVELTVESFVNLMTFTAMGAPATFKFYGESITRSRYTSITEFRGSTLIFQSITGLYETRYKLEDN

SEQ ID NO: 184 - protein, 1340 aa, Dorea longicatena
  REGION 1..1340: note = Dorea longicatena DSM 13814
MEQEYYLGLDMGTGSVGWAVTDSEYHVLRKHGKALWGVRLFESASTAEERRMFRTSRRRLDRRNWRIEILQEIFAEEISKKDPGFFLRMKESKYYPEDKRDINGNCPELPYALFVDDDFTDKDYHKKFPTIYHLRKMLMNTEETPDIRLVYLAIHHMMKHRGHFLLSGDINEIKEFGTTFSKLLENIKNEELDWNLELGKEEYAVVESILKDNMLNRSTKKTRLIKALKAKSICEKAVLNLLAGGTVKLSDIFGLEELNETERPKISFADNGYDDYIGEVENELGEQFYIIETAKAVYDWAVLVEILGKYTSISEAKVATYEKHKSDLQFLKKIVRKYLTKEEYKDIFVSTSDKLKNYSAYIGMTKINGKKVDLQSKRCSKEEFYDFIKKNVLKKLEGQPEYEYLKEELERETFLPKQVNRDNGVIPYQIHLYELKKILGNLRDKIDLIKENEDKLVQLFEFRIPYYVGPLNKIDDGKEGKFTWAVRKSNEKIYPWNFENVVDIEASAEKFIRRMTNKCTYLMGEDVLPKDSLLYSKYMVLNELNNVKLDGEKLSVELKQRLYTDVFCKYRKVTVKKIKNYLKCEGIISGNVEITGIDGDFKASLTAYHDFKEILTGTELAKKDKENIITNIVLFGDDKKLLKKRLNRLYPQITPNQLKKICALSYTGWGRFSKKFLEEITAPDPETGEVWNIITALWESNNNLMQLLSNEYRFMEEVETYNMGKQTKTLSYETVENMYVSPSVKRQIWQTLKIVKELEKVMKESPKRVFIEMAREKQESKRTESRKKQLIDLYKACKNEEKDWVKELGDQEEQKLRSDKLYLYYTQKGRCMYSGEVIELKDLWDNTKYDIDHIYPQSKTMDDSLNNRVLVKKKYNATKSDKYPLNENIRHERKGFWKSLLDGGFISKEKYERLIRNTELSPEELAGFIERQIVETRQSTKAVAEILKQVFPESEIVYVKAGTVSRFRKDFELLKVREVNDLHHAKDAYLNIVVGNSYYVKFTKNASWFIKENPGRTYNLKKMFTSGWNIERNGEVAWEVGKKGTIVTVKQIMNKNNILVTRQVHEAKGGLFDQQIMKKGKGQIAIKETDERLASIEKYGGYNKAAGAYFMLVESKDKKGKTIRTIEFIPLYLKNKIESDESIALNFLEKGRGLKEPKILLKKIKIDTLFDVDGFKMWLSGRTGDRLLFKCANQLILDEKIIVTMKKIVKFIQRRQENRELKLSDKDGIDNEVLMEIYNTFVDKLENTVYRIRLSEQAKTLIDKQKEFERLSLEDKSSTLFEILHIFQCQSSAANLKMIGGPGKAGILVMNNNISKCNKISIINQSPTGIFENEIDLLKI

SEQ ID NO: 185 - protein, 1380 aa, Eggerthella sp.
  REGION 1..1380: note = Eggerthella sp. YY7918
MNLRHVGNYNIGLDMGTASVGWAAIDEQGELLHFKGKPTWGSRLFDSANTAATARMPRGQRRRYIRRRWRLDLLQKFFSEEMAEKDPEFFIRLRQSSLWPEDREGGHTAYHWPLFNDSDFNEKEYYEKFPTIFHLRQWLMETDEKADIRLIYLAFHNIVKHRGNFLQENNDSLSAQNANMRESLESFCIALEEWCDEKELTCSCDPQKLEHLFKEVKYRSDIRDGFAALLGLACSGENEVDVKAMAKEMGKAIVGYKADFSKIFTECDKEGSSFRLSDDEGPEAFLDICPDDGIALFEAIQMVYSSFILTGMLTEKGLSLSKISAYNQYGQDLESLKALVKEYVPNEYSSFFRGPTYSGSTEYDPSKAQGYTRYNLGPSKKGSGAKPMAYEDFKKSVEQLFANTNAINDERYKEMMGRFAEEKFLRRLRTSDNGRIPFQLNLEEMTAIIINQGKYYPFLLEQQEKLESLVRFRIPYYVGPLTRINARLDSKGNACFAWSKRKDGMDSASIKPWNWDEVIDKHASAQAFIERMTGTCTYLRGEPVLPRCSLLYEEYCVLNELNGARWTQDGDKFIRFDYKDRSDIIEELFKKRRGRIQYAAVADWMKQERSHANVHVSGGQGENAFESRLSSYHFFCNDVFGVDELPGSYVDMVEEIILWSTLFEDRSILREEIQRKYGDVLNEEQIKTICKKRFSGWGRLSRKLLCSLKAQTDNGPKSIMDILQEGDQNNGRVGRAMVFQEILHDEQLGFEQKIEEENTQSMLEGENLLIEDLPGSPAIRRSINQAVRIVDEIVGIAGHAPDNIFIEVTREDDTKKKGKRTTTRYSNIQKALEALKEEGAEALRELKTYKHNELDKRLSLYFMQNGKSLYSGIPLDIRRLSEYQIDHIIPQSYIKDDSYENMALVLPGENQSKADNLLISQDIRIKMKATWTALHKAGLMGDKKYNNLMNSSISDAKMKGFINRQLVETSQSVKLTQMMLSQKYPGAKVRPIKASISSQLRDACDLVKCREANDYHHAHDAYLACQVGRFVLKRHSSMFDNPIGMTKVIRDFVKRQGQEFKRNGKLPAYASRSGFIVQSFMRSGFDAETGELLRDDWNAPFEIARIKRCLNYRDCYISRMPMEDSGAFWDATIYSPKAGKKGALPVKQGLPVEKYGSYSREQFAYFFVYKAYNPKKKAYRLEFEAVPVRVASAVETRENALEEYAKSVAKQAGLEFVEVARPKVYKYQLIELGEDRLYITGKREVRNASQLAFSLDEIDLLKRLAEGEETSSEERERLFDVLIEKYARYAPRLARQLSVDSMSATFETLNAEEQLGILLSLVEIANGKRNMIDLSSAGGSKNAGCMNPTFSSELSSPGSNFTFIDQSVTGMFERRQRLEL

SEQ ID NO: 186 - protein, 1195 aa, Elusimicrobium minutum
MQKNINTKQNHIYIKQAQKIKEKLGDKPYRIGLDLGVGSIGFAIVSMEENDGNVLLPKEIIMVGSRIFKASAGAADRKLSRGQRNNHRHTRERMRYLWKVLAEQKLALPVPADLDRKENSSEGETSAKRFLGDVLQKDIYELRVKSLDERLSLQELGYVLYHIAGHRGSSAIRTFENDSEEAQKENTENKKIAGNIKRLMAKKNYRTYGEYLYKEFFENKEKHKREKISNAANNHKFSPTRDLVIKEAEAILKKQAGKDGFHKELTEEYIEKLTKAIGYESEKLIPESGFCPYLKDEKRLPASHKLNEERRLWETLNNARYSDPIVDIVTGEITGYYEKQFTKEQKQKLFDYLLTGSELTPAQTKKLLGLKNTNFEDIILQGRDKKAQKIKGYKLIKLESMPFWARLSEAQQDSFLYDWNSCPDEKLLTEKLSNEYHLTEEEIDNAFNEIVLSSSYAPLGKSAMLIILEKIKNDLSYTEAVEEALKEGKLTKEKQAIKDRLPYYGAVLQESTQKIIAKGFSPQFKDKGYKTPHTNKYELEYGRIANPVVHQTLNELRKLVNEIIDILGKKPCEIGLETARELKKSAEDRSKLSREQNDNESNRNRIYEIYIRPQQQVIITRRENPRNYILKFELLEEQKSQCPFCGGQISPNDIINNQADIEHLFPIAESEDNGRNNLVISHSACNADKAKRSPWAAFASAAKDSKYDYNRILSNVKENIPHKAWRFNQGAFEKFIENKPMAARFKTDNSYISKVAHKYLACLFEKPNIICVKGSLTAQLRMAWGLQGLMIPFAKQLITEKESESFNKDVNSNKKIRLDNRHHALDAIVIAYASRGYGNLLNKMAGKDYKINYSERNWLSKILLPPNNIVWENIDADLESFESSVKTALKNAFISVKHDHSDNGELVKGTMYKIFYSERGYTLTTYKKLSALKLTDPQKKKTPKDFLETALLKFKGRESEMKNEKIKSAIENNKRLFDVIQDNLEKAKKLLEEENEKSKAEGKKEKNINDASIYQKAISLSGDKYVQLSKKEPGKFFAISKPTPTTTGYGYDTGDSLCVDLYYDNKGKLCGEIIRKIDAQQKNPLKYKEQGFTLFERIYGGDILEVDFDIHSDKNSFRNNTGSAPENRVFIKVGTFTEITNNNIQIWFGNIIKSTGGQDDSFTINSMQQYNPRKLILSSCGFIKYRSPILKNKEG

SEQ ID NO: 187 - protein, 1337 aa, Enterococcus faecalis
  REGION 1..1337: note = Enterococcus faecalis ATCC 29200
MKKDYVIGLDIGTNSVGWAVMTEDYQLVKKKMPIYGNTEKKKIKKNFWGVRLFEEGHTAEDRRLKRTARRRISRRRNRLRYLQAFFEEAMTDLDENFFARLQESFLVPEDKKWHRHPIFAKLEDEVAYHETYPTIYHLRKKLADSSEQADLRLIYLALAHIVKYRGHFLIEGKLSTENISVKEQFQQFMIIYNQTFVNGESRLVSAPLPESVLIEEELTEKASRTKKSEKVLQQFPQEKANGLFGQFLKLMVGNKADFKKVFGLEEEAKITYASESYEEDLEGILAKVGDEYSDVFLAAKNVYDAVELSTILADSDKKSHAKLSSSMIVRFTEHQEDLKKFKRFIRENCPDEYDNLFKNEQKDGYAGYIAHAGKVSQLKFYQYVKKIIQDIAGAEYFLEKIAQENFLRKQRTFDNGVIPHQIHLAELQAIIHRQAAYYPFLKENQEKIEQLVTFRIPYYVGPLSKGDASTFAWLKRQSEEPIRPWNLQETVDLDQSATAFIERMTNFDTYLPSEKVLPKHSLLYEKFMVFNELTKISYTDDRGIKANFSGKEKEKIFDYLFKTRRKVKKKDIIQFYRNEYNTEIVTLSGLEEDQFNASFSTYQDLLKCGLTRAELDHPDNAEKLEDIIKILTIFEDRQRIRTQLSTFKGQFSAEVLKKLERKHYTGWGRLSKKLINGIYDKESGKTILGYLIKDDGVSKHYNRNFMQLINDSQLSFKNAIQKAQSSEHEETLSETVNELAGSPAIKKGIYQSLKIVDELVAIMGYAPKRIVVEMARENQTTSTGKRRSIQRLKIVEKAMAEIGSNLLKEQPTTNEQLRDTRLFLYYMQNGKDMYTGDELSLHRLSHYDIDHIIPQSFMKDDSLDNLVLVGSTENRGKSDDVPSKEVVKDMKAYWEKLYAAGLISQRKFQRLTKGEQGGLTLEDKAHFIQRQLVETRQITKNVAGILDQRYNANSKEKKVQIITLKASLTSQFRSIFGLYKVREVNDYHHGQDAYLNCVVATTLLKVYPNLAPEFVYGEYPKFQTFKENKATAKAIIYTNLLRFFTEDEPRFTKDGEILWSNSYLKTIKKELNYHQMNIVKKVEVQKGGFSKESIKPKGPSNKLIPVKNGLDPQKYGGFDSPIVAYTVLFTHEKGKKPLIKQEILGITIMEKTRFEQNPILFLEEKGFLRPRVLMKLPKYTLYEFPEGRRRLLASAKEAQKGNQMVLPEHLLTLLYHAKQCLLPNQSESLAYVEQHQPEFQEILERVVDFAEVHTLAKSKVQQIVKLFEANQTADVKEIAASFIQLMQFNAMGAPSTFKFFQKDIERARYTSIKEIFDATIIYQSTTGLYETRRKVVD

SEQ ID NO: 188 - protein, 1337 aa, Enterococcus faecalis
  REGION 1..1337: note = Enterococcus faecalis ATCC 4200
MKKDYVIGLDIGTNSVGWAVMTEDYQLVKKKMPIYGNTEKKKIKKNFWGVRLFEEGHTAEDRRLKRTARRRISRRRNRLRYLQAFFEEAMTALDENFFARLQESFLVPEDKKWHRHPIFAKLEDEVAYHETYPTIYHLRKKLADSSEQADLRLIYLALAHIVKYRGHFLIEGKLSTENISVKEQFQQFMIIYNQTFVNGESRLVSAPLPESVLIEEELTEKASRTKKSEKVLQQFPQEKANGLFGQFLKLMVGNKADFKKVFGLEEEAKITYASESYEEDLEGILAKVGDEYSDVFLAAKNVYDAVELSTILADSDKKSHAKLSSSMIVRFTEHQEDLKKFKRFIRENCPDEYDNLFKNEQKDGYAGYIAHAGKVSQLKFYQYVKKIIQDIAGAEYFLEKIAQENFLRKQRTFDNGVIPHQIHLAELQAIIHRQAAYYPFLKENQEKIEQLVTFRIPYYIGPLSKGDASTFAWLKRQSEEPIRPWNLQETVDLDQSATAFIERMTNFDTYLSSEKVLPKHSLLYEKFMVFNELTKISYTDDRGIKANFSGKEKEKIFDYLFKTRRKVKKKDIIQFYRNEYNTEIVTLSGLEEDQFNASFSTYQDLLKCGLTRAELDHPDNAEKLEDIIKILTIFEDRQRIRTQLSTFKGQFSAEVLKKLERKHYTGWGRLSKKLINGIYDKESGKTILGYLIKDDGVSKHYNRNFMQLINDSQLSFKNAIQKAQSSEHEETLSETVNELAGSPAIKKGIYQSLKIVDELVAIMGYAPKRIVVEMARENQTTSTGKRRSIQRLKIVEKAMAEIGSNLLKEQPTTNEQLRDTRLFLYYMQNGKDMYTGDELSLHRLSHYDIDHIIPQSFMKDDSLDNLVLVGSTENRGKSDDVPSKEVVKDMKAYWEKLYAAGLISQRKFQRLTKGEQGGLTLEDKAHFIQRQLVETRQITKNVAGILDQRYNANSKEKKVQIITLKASLTSQFRSIFGLYKVREVNDYHHGQDAYLNCVVATTLLKVYPNLAPEFVYGEYPKFQAFKENKATAKAIIYTNLLRFFTEDEPRFTKDGEILWSNSYLKTIKKELNYHQMNIVKKVEVQKGGFSKESIKPKGPSNKLIPVKNGLDPQKYGGFDSPVVAYTVLFTHEKGKKPLIKQEILGITIMEKTRFEQNPILFLEEKGFLRPRVLMKLPKYTLYEFPEGRRRLLASAKEAQKGNQMVLPEHLLTLLYHAKQCLLPNQSESLAYVEQHQPEFQEILERVVDFAEVHTLAKSKVQQIVKLFEANQTADVKEIAASFIQLMQFNAMGAPSTFKFFQKDIERARYTSIKEIFDATIIYQSTTGLYETRRKVVD

SEQ ID NO: 189 - protein, 1337 aa, Enterococcus faecalis
  REGION 1..1337: note = Enterococcus faecalis D6
MKKDYVIGLDIGTNSVGWAVMTEDYQLVKKKMPIYGNTEKKKIKKNFWGVRLFEEGHTAEDRRLKRTARRRISRRRNRLRYLQAFFEEAMTALDENFFARLQESFLVPEDKKWHRHPIFAKLEDEVAYHETYPTIYHLRKKLADSSEQADLRLIYLALAHIVKYRGHFLIEGKLSTENISVKEQFQQFMIIYNQTFVNGESRLVSAPLPESVLIEEELTEKASRTKKSEKVLQQFPQEKANGLFGQFLKLMVGNKADFKKVFGLEEEAKITYASESYEEDLEGILAKVGDEYSDVFLAAKNVYDAVELSTILADSDKKSHAKLSSSMIVRFTEHQEDLKNFKRFIRENCPDEYDNLFKNEQKDGYAGYITHAGKVSQLKFYQYVKKIIQDIAGAEYFLEKIAQENFLRKQRTFDNGVIPHQIHLAELQAIIHRQAAYYPFLKENQEKIEQLVTFRIPYYVGPLSKGDANTFAWLKRQSEEPIRPWNLQETVDLDQSATAFIERMTNFDTYLPSEKVLPKHSLLYEKFMVFNELTKISYTDDRGIKANFSGKEKEKIFDYLFKTRRKVKKKDIIQFYRNEYNTEIVTLSGLEEDQFNASFSTYQDLLKCGLTRAELDHPDNAEKLEDIIKILTIFEDRQRIRTQLSTFKGQFSAEVLKKLERKHYTGWGRLSKKLINGIYDKESGKTILDYLIKDDGVSKHYNRNFMQLINDSQLSFKNAIQKAQSSEHEETLSETVNELAGSPAIKKGIYQSLKIVDELVAIMGYAPKRIVVEMARENQTTSTGKRRSIQRLKIVEKAMAEIGSNLLKEQPTTNEQLRDTRLFLYYMQNGKDMYTGDELSLHRLSHYDIDHIIPQSFMKDDSLDNLVLVGSTENRGKSDDVPSKEVVKDMKAYWEKLYAAGLISQRKFQRLTKGEQGGLTLEDKAHFIQRQLVETRQITKNVAGILDQRYNAKSKEKKVQIITLKASLTSQFRSIFGLYKVREVNDYHHGQDAYLNCVVATTLLKVYPNLAPEFVYGEYPKFQTFKENKATAKAIIYTNLLRFFTEDEPRFTKDGEILWSNSYLKTIKKELNYHQMNIVKKVEVQKGGFSKESIKPKGPSNKLIPVKNGLDPQKYGGFDSPIVAYTVLFTHEKGKKPLIKQEILGITIMEKTRFEQNPILFLEEKGFLRPRVLMKLPKYTLYQFPEGRRRLLASAKEAQKGNQMVLPEHLLTLLYHAKQCLLPNQSESLAYVEQHQPEFQEILERVVDFAEVHTLAKSKVQQIVKLFEANQTADVKEIAASFIQLMQFNAMGAPSTFKFFQKDIERARYTSIKEIFDATIIYQSTTGLYETRRKVVD

SEQ ID NO: 190 - protein, 1337 aa, Enterococcus faecalis
  REGION 1..1337: note = Enterococcus faecalis E1Sol
MKKDYVIGLDIGTNSVGWAVMTEDYQLVKKKMPIYGNTEKKKIKKNFWGVRLFEEGHTAEDRRLKRTARRRISRRRNRLRYLQAFFEEAMTDLDENFFARLQESFLVPEDKKWHRHPIFAKLEDEVAYHETYPTIYHLRKKLADSSEQADLRLIYLALAHIVKYRGHFLIEGKLSTENTSVKEQFQQFMVIYNQTFVNGESRLVSAPLPESVLIEEELTEKASRTKKSEKVLQQFPQEKANGLFGQFLKLMVGNKADFKKVFGLEEEAKITYASESYEEDLEGILAKVGDEYSDVFLAAKNVYDAVELSTILADSDKKSHAKLSSSMIVRFTEHQEDLKKFKRFIRENCPDEYDNLFKNEQKDGYAGYIAHAGKVSQLKFYQYVKKIIQDIAGAEYFLEKIAQENFLRKQRTFDNGVIPHQIHLAELQAIIHRQAAYYPFLKENQEKIEQLVTFRIPYYVGPLSKGDASTFAWLKRQSEEPIRPWNLQETVDLDQSATAFIERMTNFDTYLPSEKVLPKHSLLYEKFMVFNELTKISYTDDRGIKANFSGKEKEKIFDYLFKTRRKVKKKDIIQFYRNEYNTEIVTLSGLEEDQFNASFSTYQDLLKCGLTRAELDHPDNAEKLEDIIKILTIFEDRQRIRTQLSTFKGQFSAEVLKKLERKHYTGWGRLSKKLINGIYDKESGKTILDYLVKDDGVSKHYNRNFMQLINDSQLSFKNAIQKAQSSEHEETLSETVNELAGSPAIKKGIYQSLKIVDELVAIMGYAPKRIVVEMARENQTTSTGKRRSIQRLKIVEKAMAEIGSNLLKEQPTTNEQLRDTRLFLYYMQNGKDMYTGDELSLHRLSHYDIDHIIPQSFMKDDSLDNLVLVGSTENRGKSDDVPSKKVVKKMKAYWEKLYAAGLISQRKFQRLTKGEQGGLTLEDKAHFIQRQLVETRQITKNVAGILDQRYNAKSKEKKVQIITLKASLTSQFRSIFGLYKVREVNDYHHGQDAYLNCVVATTLLKVYPNLAPEFVYGEYPKFQAFKENKATAKTIIYTNLMRFFTEDEPRFTKDSEILWSNSYLKTIKKELNYHQMNIVKKVEVQKGGFSKESIKPKGPSNKLIPVKNGLDPQKYGGFDSPVVAYTVLFTHEKGKKPLIKQEILGITIMEKTRFEQNPILFLEEKGFLRPRVLMKLPKYTLYEFPEGRRRLLASAKEAQKGNQMVLPEHLLTLLYHAKQCLLPNQSESLAYVEQHQPEFQEILERVVDFAEVHTLAKSKVQQIVKLFEANQTADVKEIAASFIQLMQFNAMGAPSTFKFFQKDIERARYTSIKEIFDATIIYQSTTGLYETRRKVVD

SEQ ID NO: 191 - protein, 1150 aa, Enterococcus faecalis
  REGION 1..1150: note = Enterococcus faecalis Fly1
MYSIGLDLGISSVGWSVIDERTGNVIDLGVRLFSAKNSEKNLERRTNRGGRRLIRRKTNRLKDAKKILAAVGFYEDKSLKNSCPYQLRVKGLTEPLSKGEIYKVTLHILKKRGISYLDEDDTEAAKESQDYKEQVRKNAQLLTKYTPGQIQLQRLKENNRVKTGINAQGNYQLNVFKVSAYANELATILKTQQAFYPNELTDDWIALFVQPGIAEEAGLIYRKRPYYHGPGNEANNSPYGRWSDFKKTGQPATNIFDRLIGKDFQGELRASGLSLSAQQYNLLNDLTNLKIDGEIPLSPEQKEYILAELMTKEFTRFGVNDVAKLLGVKKERLSGWRLDKKGKPEIHTLKGYRNWRKIFAESGIDLATLPTETIDCLAKVLTLNTEHEGIENTLAFELPELAESVKLLVLDRYKELSQSVSTQAWHRFSLKTLHLLIPELMNATSEQNTLLEQFQLKSDVRKRYSEYKKLPTKDVLTEIYNPTVNKTVSQAFKVIDALLVKYGKEQIRYITIEMPRDDNEEDEKKRIKELHAKNSQRKNDSQSYFMQKSGWSQEKFQTTIQKNRRFLAKLLYYYEQDGICAYTGLSISPELLVSDSTEIDHIIPISISLDDSINNKVLVLSKANQVKGQQTPYDAWMDGSFKKINGKFSNWDDYQKWVESRHFSHKKENNLLETRNIFDSEQVEKFLARNLNDTRYASRLVLNTLQSFFANHETKVRVVNGSFTHTLRKKWGADLDKTRETHHHHAVDATLCAVTPFVKVSRYHYAVKEETGEKVMREIDFETGEIVDEMSYQEFKKSKKYERKTYQVKWPNFREQLKPVNLHPRIKFSHQVDRKANRKLSDATIYSVREKTEVKTLKSGKQKITTDEYTIGKIKDIYTVDGWEAFKKKQDKLLMKDLDEKTYERLLSIAETTPDFQEVEEKNGKVKRVKRSPFAVYCEENDIPAIQKYAKKNNGPLIRSLKYYDGKLNKHINITKDSQGRPVEKTKNGRKVTLQSLKPYRYDIYQDLETKAYYTVQLYYSDLRFVEGKYGITEKEYMKKVAEQTKGQVVRFCFSLQKNDGLEIEWKDSQRYDVRFYNFQSANSINFKGLEQEMMPAENQFKQKPYNNGAINLNIAKYGKEGKKLRKFNTDILGKKHYLYYEKEPKNIIK

SEQ ID NO: 192 - protein, 1337 aa, Enterococcus faecalis
MKKDYVIGLDIGTNSVGWAVMTEDYQLVKKKMPIYGNTEKKKIKKNFWGVRLFEEGHTAEDRRLKRTARRRISRRRNRLRYLQAFFEEAMTDLDENFFARLQESFLVPEDKKWHRHPIFAKLEDEVAYHETYPTIYHLRKKLADSSEQADLRLIYLALAHIVKYRGHFLIEGKLSTENISVKEQFQQFMIIYNQTFVNGESRLVSAPLPESVLIEEELTEKASRTKKSEKVLQQFPQEKANGLFGQFLKLMVGNKADFKKVFGLEEEAKITYASESYEEDLEGILAKVGDEYSDVFLAAKNVYDAVELSTILADSDKKSHAKLSSSMIVRFTEHQEDLKKFKRFIRENCPDEYDNLFKNEQKDGYAGYIAHAGKVSQLKFYQYVKKIIQDIAGAEYFLEKIAQENFLRKQRTFDNGVIPHQIHLAELQAIIHRQAAYYPFLKENQEKIEQLVTFRIPYYVGPLSKGDASTFAWLKRQSEEPIRPWNLQETVDLDQSATAFIERMTNFDTYLPSEKVLPKHSLLYEKFMVFNELTKISYTDDRGIKANFSGKEKEKIFDYLFKTRRKVKKKDIIQFYRNEYNTEIVTLSGLEEDQFNASFSTYQDLLKCGLTRAELDHPDNAEKLEDIIKILTIFEDRQRIRTQLSTFKGQFSAEVLKKLERKHYTGWGRLSKKLINGIYDKESGKTILDYLVKDDGVSKHYNRNFMQLINDSQLSFKNAIQKAQSSEHEETLSETVNELAGSPAIKKGIYQSLKIVDELVAIMGYAPKRIVVEMARENQTTSTGKRRSIQRLKIVEKAMAEIGSNLLKEQPTTNEQLRDTRLFLYYMQNGKDMYTGDELSLHRLSHYDIDHIIPQSFMKDDSLDNLVLVGSTENRGKSDDVPSKEVVKDMKAYWEKLYAAGLISQRKFQRLTKGEQGGLTLEDKAHFIQRQLVETRQITKNVAGILNQRYNANSKEKKVQIITLKASLTSQFRSIFGLYKVREVNDYHHGQDAYLNCVVATTLLKVYPNLAPEFVYGEYPKFQTFKENKATAKAIIYTNLLRFFTEDEPRFTKDGEILWSNSYLKTIKKELNYHQMNIVKKVEVQKGGFSKESIKPKGPSNKLIPVKNGLDPQKYGGFDSPVVAYTVLFTHEKGKKPLIKQEILGITIMEKTRFEQNPILFLEEKGFLRPRVLMKLPKYTLYEFPEGRRRLLASAKEAQKGNQMVLPEHLLTLLYHAKQCLLPNQSESLAYVEQHQPEFQEILERVVDFAEVHTLAKSKVQQIVKLFEANQTADVKEIAASFIQLMQFNAMGAPSTFKFFQKDIERARYTSIKEIFDATIIYQSTTGLYETRRKVVD

SEQ ID NO: 193 - protein, 1150 aa, Enterococcus faecalis
  REGION 1..1150: note = Enterococcus faecalis R508
MYSIGLDLGISSVGWSVIDERTGNVIDLGVRLFSAKNSEKNLERRTNRGGRRLIRRKTNRLKDAKKILAAVGFYEDKSLKNSCPYQLRVKGLTEPLSKGEIYKVTLHILKKRGISYLDEDDTEAAKESQDYKEQVRKNAQLLTKYTPGQIQLQRLKENNRVKTGINVQGNYQLNVFKVSAYANELATILKTQQAFYPNELTDDWIALFVQPGIAEEAGLIYRKRPYYHGPGNEANNSPYGRWSDFQKTGEPATNIFDKLIGKDFQGELRASGLSLSAQQYNLLNDLTNLKIDGEVPLSSEQKEYILTELMTKEFTRFGVNDVVKLLGVKKERLSGWRLDKKGKPEIHTLKGYRNWRKIFAEAGIDLATLPTETIDCLAKVLTLNTEREGIENTLAFELPELSESVKLLVLDRYKELSQSISTQSWHRFSLKTLHLLIPELMNATSEQNTLLEQFQLKSDVRKRYSEYKKLPTKDVLAEIYNPTVNKTVSQAFKVIDALLVKYGKEQIRYITIEMPRDDNEEDEKKRIKELHAKNSQRKNDSQSYFMQKSGWSQEKFQTTIQKNRRFLAKLLYYYEQDGICAYTGLPISPELLVSDSTEIDHIIPISISLDDSINNKVLVLSKANQVKGQQTPYDAWMDGSFKKINGKFSNWDDYQKWVESRHFSHKKENNLLETRNIFDSEQVEKFLARNLNDTRYASRLVLNTLQSFFTNQETKVRVVNGSFTHTLRKKWGADLDKTRETHHHHAVDATLCAVTPFVKVSRYHYAVKEETGEKVMREIDFETGEIVNEMSYREFKKSKKYERKTYQVKWPNFREQLKPVNLHPRIKFSHQVDRKANRKLSDATIYSVREKTEVKTLKSGKQKITTDEYTIGKIKDIYTLDGWEAFKKKQDKLLMKDLDEKTYERLLSIAETTPDFQEVEEKNGKVKRVKRSPFAVYCEENDIPAIQKYAKKNNGPLIRSLKYYDGKLNKHINITKDSQGRPVEKTKNGRKVTLQSLKPYRYDIYQDLETKAYYTVQLYYSDLRFVEGKYGITEKEYMKKVAEQTKGQVVRFCFSLQKNDGLEIEWKDSQRYDVRFYNFQSANSINFKGLEQEIMPAENQFKQKPYNNGAINLNIAKYGKEGKKLRKFNTDILGKKHYLFYEKEPKNIIK

SEQ ID NO: 194 - protein, 1150 aa, Enterococcus faecalis
  REGION 1..1150: note = Enterococcus faecalis T11
MYSIGLDLGISSVGWSVIDERTGNVIDLGVRLFSAKNSEKNLERRTNRGGRRLIRRKTNRLKDAKKILAAVGFYEDKSLKNSCPYQLRVKGLTEPLSKGEIYKVTLHILKKRGISYLDEDDTEAAKESQDYKEQVRENAQLLTKYTPGQIQLQRLKENNRVKTGINAQGNYQLNVFKVSAYANELATILKTQQAFYPNELTDDWIALFVQPGIAEEAGLIYRKRPYYHGPGNEANNSPYGRWSDFKKTGQPATNIFDKLIGKDFQGELRASGLSLSAQQYNLLNDLTNLKIDGEIPLSPEQKEYILAELMTKEFTRFGVNDVVKLLGVKKERLSGWRLDKKGKPEIHTLKGYRNWRKIFAESGIDLAMLPTETIDCLAKILTLNTEREGIENTLAFELPELAESVKLLVLDRYKELSQSVSTQAWHRFSLKTLHLLIPELMNATSEQNTLLEQFQLKSDVRKRYSEYKKLPTKDVLTEIYNPTVNKTVSQAFKVIDALLVKYGKEQIRYITIEMPRDDNEEDEKKRIKELHAKNSQRKNDSQSYFMQKSGWSQEKFQTTIQKNRRFLAKLLYYYEQDGICAYTGLSISPELLVSDSTEIDHIIPISISLDDSINNKVLVLSKANQVKGQQTPYDAWMDGSFKKINGKFSNWDDYQKWVESRHFSHKKENNLLETRNIFDSEQVEKFLARNLNDTRYASRLVLNTLQSFFANQETKVRVVNGSFTHTLRKKWGADLDKTRETHHHHAVDATLCAVTPFVKVSRYHYAVKEETGEKVMREIDFETGEIVDEMSYREFKKSKKYERKTYQVKWPNFREQLKPVNLHPRIKFSHQVDRKANRKLSDATIYSVREKTEVKTLKSGKQKITTDEYTIGKIKDIYTVDGWEAFKKKQDKLLMKDLDEKTYERLLSIAETTPDFQEVEEKNGKVKRVKRSPFAVYCEENDIPAIRKYAKKNNGPLIRSLKYYDGKLNKHINITKDSQGRPVEKTKNGRKVTLQSLKPYRYDIYQDLETKAYYTVQLYYSDLRFVEGKYGITEKEYMKKVAEQTKGQVVRFCFSLQKNDGLEIEWKDSQRYDVRFYNFQSANSINFKGLEQEMMPAENQFKQKPYNNGAINLNIAKYGKEGKKLRKFNTDILGKKHYLYYEKEPKNIIK

SEQ ID NO: 195 - protein, 1150 aa, Enterococcus faecalis
  REGION 1..1150: note = Enterococcus faecalis TX0012
MYSIGLDLGISSVGWSVIDERTGNVIDLGVRLFSAKNSEKNLERRTNRGGRRLIRRKTNRLKDAKKILAAVGFYEDKSLKNSCPYQLRVKGLTEPLSRGEIYKVTLHILKKRGISYLDEVDTEAAKESQDYKEQVRKNAQLLTKYTPGQIQLQRLKENNRVKTGINAQGNYQLNVFKVSAYANELATILKTQQAFYPNELTDDWIALFVQPGIAEEAGLIYRKRPYYHGPGNEANNSPYGRWSDFQKTGEPATNIFDKLIGKDFQGELRASGLSLSAQQYNLLNDLTNLKIDGEVPLSSEQKEYILTELMTKEFTRFGVNDVVKLLGVKKERLSGWRLDKKGKPEIHTLKGYRNWRKIFAEAGIDLATLPTETIDCLAKVLTLNTEREGIENTLAFELPELSESVKLLVLDRYKELSQSISTQSWHRFSLKTLHLLIPELMNATSEQNTLLEQFQLKSDVRKRYSEYKKLPTKDVLAEIYNPTVNKTVSQAFKVIDALLVKYGKEQIRYITIEMPRDDNEEDEKKRIKELHAKNSQRKNDSQSYFMQKSGWSQEKFQTTIQKNRRFLAKLLYYYEQDGICAYTGLPISPELLVSDSTEIDHIIPISISLDDSINNKVLVLSKANQVKGQQTPYDAWMDGSFKKINGKFSNWDDYQKWVESRHFSHKKENNLLETRNIFDSEQVEKFLARNLNDTRYASRLVLNTLQSFFTNQETKVRVVNGSFTHTLRKKWGADLDKTRETHHHHAVDATLCAVTSFVKVSRYHYAVKEETGEKVMREIDFETGEIVNEMSYWEFKKSKKYERKTYQVKWPNFREQLKPVNLHPRIKFSHQVDRKANRKLSDATIYSVREKTEVKTLKSGKQKITTDEYTIGKIKDIYTLDGWEAFKKKQDKLLMKDLDEKTYERLLSIAETTPDFQEVEEKNGKVKRVKRSPFAVYCEENDIPAIQKYAKKNNGPLIRSLKYYDGKLNKHINITKDSQGRPVEKTKNGRKVTLQSLKPYRYDIYQDLETKAYYTVQLYYSDLRFVEGKYGITEKEYMKKVAEQTKGQVVRFCFSLQKNDGLEIEWKDSQRYDVRFYNFQSANSINFKGLEQEMMPAENQFKQKPYNNGAINLNIAKYGKEGKKLRKFNTDILGKKHYLFYEKEPKNIIK

SEQ ID NO: 196 - protein, 1150 aa, Enterococcus faecalis; identical to SEQ ID NO: 195
  REGION 1..1150: note = Enterococcus faecalis TX0012

SEQ ID NO: 197 - protein, 1337 aa, Enterococcus faecalis
  REGION 1..1337: note = Enterococcus faecalis TX0470
MKKDYVIGLDIGTNSVGWAVMTEDYQLVKKKMPIYGNTEKKKIKKNFWGVRLFEEGHTAEDRRLKRTARRRISRRRNRLRYLQAFFEEAMTALDENFFARLQESFLVPEDKKWHRHPIFAKLEDEVAYHETYPTIYHLRKKLADSSEQADLRLIYLALAHIVKYRGHFLIEGKLSTENISVKEQFQQFMIIYNQTFVNGESRLVSTPLPESVLIEEELTEKASRTKKSEKVLQQFPQEKANGLFGQFLKLMVGNKADFKKVFGLEEEAKITYASESYEEDLEGILAKVGDEYSDVFLAAKNVYDAVELSTILADSDKKSHAKLSSSMIVRFTEHQEDLKNFKRFIRENCPDEYDNLFKNEQKDGYAGYITHAGKVSQLKFYQYVKKIIQDIAGAEYFLEKIAQENFLRKQRTFDNGVIPHQIHLAELQAIIHRQAAYYPFLKENQEKIEQLVTFRIPYYVGPLSKGDASTFAWLKRQSEEPIRPWNLQETVDLDQSATAFIERMTNFDTYLPSEKVLPKHSLLYEKFMVFNELTKISYTDDRGIKANFSGKEKEKIFDYLFKTRRKVKKKDIIQFYRNEYNTEIVTLSGLEEDQFNASFSTYQDLLKCGLTRAELDHPDNAEKLEDIIKILTIFEDRQRIRTQLSTFKGQFSAEVLKKLERKHYTGWGRLSKKLINGIYDKESGKTILDYLVKDDGVSKHYNRNFMQLINDSQLSFKNAIQKAQSSEHEETLSETVNELAGSPAIKKGIYQSLKIVDELVAIMGYAPKRIVVEMARENQTTSTGKRRSIQRLKIVEKAMAEIGSNLLKEQPTTNEQLRDTRLFLYYMQNGKDMYTGDELSLHRLSHYDIDHIIPQSFMKDDSLDNLVLVGSTENRGKSDDVPSKEVVKDMKAYWEKLYAAGLISQRKFQRLTKGEQGGLTLEDKAHFIQRQLVETRQITKNVAGILDQRYNAKSKEKKVQIITLKASLTSQFRSIFGLYKVREVNDYHHGQDAYLNCVVATTLLKVYPNLAPEFVYGEYPKFQTFKENKATAKAIIYTNLLRFFTEDEPRFTKDGEILWSNSYLKTIKKELNYHQMNIVKKVEVQKGGFSKESIKPKGPSNKLIPVKNGLDPQKYGGFDSPIVAYTVLFTHEKGKKPLIKQEILGITIMEKTRFEQNPILFLEEKGFLRPRVLMKLPKYTLYEFPEGRRRLLASAKEAQKGNQMVLPEHLLTLLYHAKQCLLPNQSESLAYVEQHQPEFQEILERVVDFAEVHTLAKSKVQQIVKLFEANQTADVKEIAASFIQLMQFNAMGAPSTFKFFQKDIERARYTSIKEIFDATIIYQSTTGLYETRRKVVD

SEQ ID NO: 198 - protein, 1150 aa, Enterococcus faecalis
  REGION 1..1150: note = Enterococcus faecalis TX1342
MYSIGLDLGVSSVGWSVIDERTGNVIDLGVRLFSAKNSEKNLERRTNRGGRRLIRRKTNRLKDAKKILAAVGFYEDKSLKNSCPYQLRVKGLTEPLSKGEIYKVTLHILKKRGISYLDEDDTEAAKESQDYKEQVRENAQLLTKYTPGQIQLQRLKENNRVKTGINAQGNYQLNVFKVSAYANELATILKTQQAFYPNELTDDWIALFVQPGIAEEAGLIYRKRPYYHGPGNEANNSPYGRWSDFKKTGQPATNIFDKLIGKDFQGELRASGLSLSAQQYNLLNDLTNLKIDGEIPLSPEQKEYILAELMTKEFTRFGINDVAKLLGVKKERLSGWRLDKKGKPEIHTLKGYRNWRKIFAESGIDLATLPTETIDCLAKVLTLNTEREGIENTLAFELPELAESVKLLVLDRYKELSQSVSTQAWHRFSLKTLHLLIPELMNATSEQNTLLEQFQLKSDVRKRYSEYKKLPTKDVLTEIYNPTVNKTVSQAFKVIDALLVKYGKEQIRYITIEMPRDDNEEDEKKRIKELHAKNSQRKNDSQSYFMQKSGWSQEKFQTTIQKNRRFLAKLLYYYEQDGICAYTGLSISPELLVSDSTEIDHIIPISISLDDSINNKVLVLSKANQVKGQQTPYDAWMDGSFKKINGKFSNWDDYQKWVESRHFSHKKENNLLETRNIFDSEQVEKFLARNLNDTRYASRLVLNTLQSFFANQETKVRVVNGSFTHTLRKKWGADLDKTRETHHHHAVDATLCAVTPFVKVSRYHYAVKEETGEKVMREIDFETGEIVDEMSYREFKKSKKYERKTYQVKWPNFREQLKPVNLHPRIKFSHQVDRKANRKLSDATIYSVREKTEVKTLKSGKQKITTDEYTIGKIKDIYTVDGWEAFKKKQDKLLMKDLDEKTYERLLSIAETTPDFQEVEEKNGKVKRVKRSPFAVYCEENDIPAIRKYAKNNNGPLIRSLKYYDGKLNKHINITKDSQGRPVEKTKNGRKVTLQSLKPYRYDIYQDLETKAYYTVQLYYSDLRFVEGKYGITEKEYMKKVAEQTKGQVVRFCFSLQKNDGLEIEWKDSQCYDVRFYNFQSANSINFKGLEQEMMPAENQFKQKPYNNGAINLNIAKYGKEGKKLRKFNTDILGKKHYLYYEKEPKNIIK

SEQ ID NO: 199 - protein, 1337 aa, Enterococcus faecalis
  REGION 1..1337: note = Enterococcus faecalis TX4244
MKKDYVIGLDIGTNSVGWAVMTEDYQLVKKKMPIYGNTEKKKIKKNFWGVRLFEEGHTAEDRRLKRTARRRISRRRNRLRYLQAFFEEAMTDLDENFFARLQESFLVPEDKKWHRHPIFAKLEDEVAYHETYPTIYHLRKKLADSSEQADLRLIYLALAHIVKYRGHFLIEGKLSTENISVKEQFQQFMIIYNQTFVNGESRLVSAPLPESVLIEEELTEKASRTKKSEKVLQQFPQEKANGLFGQFLKLMVGNKADFKKVFGLEEEAKITYASESYEEDLEGILAKVGDEYSDVFLAAKNVYDAVELSTILADSDKKSHAKLSSSMIVRFTEHQEDLKKFKRFIRENCPDEYDNLFKNEQKDGYAGYIAHAGKVSQLKFYQYVKKIIQDIAGAEYFLEKIAQENFLRKQRTFDNGVIPHQIHLAELQAIIHRQAAYYPFLKENQEKIEQLVTFRIPYYVGPLSKGDASTFAWLKRQSEEPIRPWNLQETVDLDQSATAFIERMTNFDTYLPSEKVLPKHSLLYEKFMVFNELTKISYTDDRGIKANFSGKEKEKIFDYLFKTRRKVKKKDIIQFYRNEYNTEIVTLSGLEEDQFNASFSTYQDLLKCGLTRAELDHPDNAEKLEDIIKILTIFEDRQRIRTQLSTFKGQFSAEVLKKLERKHYTGWGRLSKKLINGIYDKESGKTILGYLIKDDGVSKHYNRNFMQLINDSQLSFKNAIQKAQSSEHEETLSETVNELAGSPAIKKGIYQSLKIVDELVAIMGYAPKRIVVEMARENQTTSTGKRRSIQRLKIVEKAMAEIGSNLLKEQPTTNEQLRDTRLFLYYMQNGKDMYTGDELSLHRLSHYDIDHIIPQSFMKDDSLDNLVLVGSTENLGKSDDVPSKEVVKDMKAYWEKLYAAGLISQRKFQRLTKGEQGGLTLEDKAHFIQRQLVETRQITKNVAGILDQRYNANSKEKKVQIITLKASLTSQFRSIFGLYKVREVNDYHHGQDAYLNCVVATTLLKVYPNLAPEFVYGEYPKFQTFKENKATAKAIIYTNLLRFFTEDEPRFTKDGEILWSNSYLKTIKKELNYHQMNIVKKVEVQKGGFSKESIKPKGPSNKLIPVKNGLDPQKYGGFDSPIVAYTVLFTHEKGKKPLIKQEILGITIMEKTRFEQNPILFLEEKGFLRPRVLMKLPKYTLYEFPEGRRRLLASAKEAQKGNQMVLPEHLLTLLYHAKQCLLPNQSESLAYVEQHQPEFQEILERVVDFAEVHTLAKSKVQQIVKLFEANQTADVKEIAASFIQLMQFNAMGAPSTFKFFQKDIERARYTSIKEIFDATIIYQSTTGLYETRRKVVD

SEQ ID NO: 200 - protein, 1339 aa, Enterococcus faecium
  REGION 1..1339: note = Enterococcus faecium 1,141,733
MKKEYTIGLDIGTNSVGWSVLTDDYRLVSKKMKVAGNTEKSSTKKNFWGVRLFDEGQTAEARRSKRTARRRLARRRQRILELQKIFAPEILKIDEHFFARLNESFLVLDEKKQSRHPVFATIKQEKSYHQTYPTIYHLRQALADSSEKADIRLVYLAMAHLLKYRGHFLIEGELNTENSSVTETFRQFLSTYNQQFSEADDKQTEKLDEAVDCSFVFTEKMSKTKKAETLLKYFPHEKSNGYLSQFIKLMVGNQGNFKNVFGLEEAKLQFSKETYEEDLEELLEKIGDDYIDLFVQAKNVYDAVLLSEILSDSTKNTRAKLSAGMIRRYDAHKEDLVLLKRFVKENLPKKYRAFFGDNSVNGYAGYIEGHATQEDFYKFVKKELTGIRGSEVFLTKIEQENFLRKQRTFDNGVIPHQIHLTELRAIIANQKKHYPFLKEEQEKLESLLTFKIPYYVGPLAKKQENSPFAWLIRKSEEKIKPWNLPEIVDMEGSAVRFIERMINTDMYMPHNKVLPKNSLLYQKFSIYNELTKVRYQDERGQMNYFSSIEKKEIFHELFEKNRKVTKKDLQEFLYLKYDIKHAELSGIEKAFNASYTTYHDFLTMSENKREMKQWLEDPELASMFEEIIKTLTVFEDREMIKTRLSHHEATLGKHIIKKLTKKHYTGWGRLSKELIQGIRDKQSNKTILDYLINDDDFPHHRNRNFMQLINDDSLSFKKEIKKAQMITDTENLEEIVKELTGSPAIKKGILQSLKIVDEIVGIMGYEPANIVVEMARENQTTGRGLKSSRPRLKALEESLKDFGSQLLKEYPTDNSSLQKDRLYLYYLQNGRDMYTGAPLDIHRLSDYDIDHIIPRSFTTDNSIDNKVLVSSKENRLKKDDVPSEKVVKKMRSFWYDLYSSKLISKRKLDNLTKIKLTEEDKAGFIKRQLVETRQITKHVAGILHHRFNKAEDTNEPIRKVRIITLKSALVSQFRNRFGIYKVREINEYHHAHDAYLNGVVALALLKKYPQLAPEFVYGEYLKFNAHKANKATVKKEFYSNIMKFFESDTPVCDENGEIFWDKSKSIAQVKKVINHHHMNIVKKTEIQKGGFSKETVEPKKDSSKLLPRKNNWDPAKYGGLGSPNVAYTVAFTYEKGKARKRTNALEGITIMEREAFEQSPVLFLKNKGYEQAEIEMKLPKYALFELENGRKRMVASNKEAQKANSFLLPEHLVTLLYHAKQYDEISHKESFDYVNEHHKEFSEVFARVLEFAGKYTLAEKNIEKLEKIYKENQTDDLAKLASSFVNLMQFNAMGAPADFKFFDVTIPRKRYTSLTEIWQSTIIHQSITGLYETRIRMGK

SEQ ID NO: 201 - protein, 1340 aa, Enterococcus faecium
  REGION 1..1340: note = Enterococcus faecium 1,231,408
MKKEYTIGLDIGTNSVGWSVLTDDYRLVSKKMKVAGNTEKSSTKKNFWGVRLFDEGQTAEARRSKRTARRRLARRRQRILELQKIFAPEILKIDEHFFARLNESFLVPDEKKQSRHPVFATIKQEKSYHQTYPTIYHLRQALADSSEKADIRLVYLAMAHLLKYRGHFLIEGELNTENSSVTETFRQFLSTYNQQFSEAGDKQTEKLDEAVDCSFVFTEKMSKTKKAETLLKYFPHEKSNGYLSQFIKLMVGNQGNFKNVFGLEEEAKLQFSKETYEEDLEELLEKIGDDYIDLFVQAKNVYDAVLLSEILSDSTKNTRAKLSAGMIRRYDAHKEDLVLLKRFVKENLPKKYRAFFGDNSVNGYAGYIEGHATQEAFYKFVKKELTGIRGSEVFLTKIEQENFLRKQRTFDNGVIPHQIHLSELRAIIANQKKHYPFLKEEQEKLESLLTFKIPYYVGPLAKKQENSPFAWLIRKSEEKIKPWNLPEIVDMEGSAVRFIERMINTDMYMPHNKVLPKNSLLYQKFSIYNELTKVRYQDERGQMNYFSSIEKKEIFHELFEKNRKVTKKDLQEFLYLKYDIKHAELSGIEKAFNASYTTYHDFLTMSENKREMKQWLEDPELASMFEEIIKTLTVFEDREMIKTRLSHHEATLGKHIIKKLTKKHYTGWGRLSKELIQGIRDKQSNKTILDYLINDDDFPHHRNRNFMQLINDDSLSFKKEIKKAQMITDTENLEEIVKELTGSPAIKKGILQSLKIVDEIVGIMGYEPANIVVEMARENQTTGRGLKSSRPRLKALEESLKDFGSQLLKEYPTDNSSLQKDRLYLYYLQNGRDMYTGAPLDIHRLSDYDIDHIIPRSFTTDNSIDNKVLVSSKENRLKKDDVPSEKVVKKMRSFWYDLYSSKLISKRKLDNLTKIKLTEEDKAGFIKRQLVETRQITKHVAGILHHRFNKAEDTNDPIRKVRIITLKSALVSQFRNRFGIYKVREINEYHHAHDAYLNGVVALALLKKYPQLAPEFVYGEYLKFNAHKANKATVKKEFYSNIMKFFESDTPVCDENGEIFWDKSKSIAQVKKVINHHHMNIVKKTEIQKGGFSKETVEPKKDSSKLLPRKNNWDPAKYGGLGSPNVAYTVAFTYEKGKARKRTNALEGITIMEREAFEQSPVLFLKNKGYEQAEIEMKLPKYALFELENGRKRMVASNKEAQKANSFLLPEHLVTLLYHAKQYDEISHKESFDYVNEHHKEFSEVFARVLEFAGKYTLAEKNIEKLEKIYKENQTDDLAKLASSFVNLMQFNAMGAPADFKFFDVTIPRKRYTSLTEIWQSTIIHQSITGLYETRIRMGK

SEQ ID NO: 202 - protein, 1339 aa, Enterococcus faecium
  REGION 1..1339: note = Enterococcus faecium E1133
MKKEYTIGLDIGTNSVGWSVLTDDYRLVSKKMKVAGNTEKSSTKKNFWGVRLFDEGQTAEARRSKRTARRRLARRRQRILELQKIFAPEILKIDEHFFARLNESFLVLDEKKQSRHPVFATIKQEKSYHQTYPTIYHLRQALADSSEKADIRLVYLAMAHLLKYRGHFLIEGELNTENSSVTETFRQFLSTYNQQFSEADDKQTEKLDEAVDCSFVFTEKMSKTKKAETLLKYFPHEKSNGYLSQFIKLMVGNQGNFKNVFGLEEAKLQFSKETYEEDLEELLEKIGDDYIDLFVQAKNVYDAVLLSEILSDSTKNTRAKLSAGMIRRYDAHKEDLVLLKRFVKENLPKKYRAFFGDNSVNGYAGYIEGHATQEDFYKFVKKELTGIRGSEVFLTKIEQENFLRKQRTFDNGVIPHQIHLTELRAIIANQKKHYPFLKEEQEKLESLLTFKIPYYVGPLAKKQENSPFAWLIRKSEEKIKPWNLPEIVDMEGSAVRFIERMINTDMYIPHNKVLPKNSLLYQKFSIYNELTKVRYQDERGQMNYFSSIEKKEIFHELFEKNRKVTKKDLQEFLYLKYDIKHAELSGIEKAFNASYTTYHDFLTMSENKREMKQWLEDPELASMFEEIIKTLTVFEDREMIKTRLSHHEATLGKHIIKKLTKKHYTGWGRLSKELIQGIRDKQSNKTILDYLINDDDFPHHRNRNFMQLINDDSLSFKKEIKKAQMITDTENLEEIVKELTGSPAIKKGILQSLKIVDEIVGIMGYEPANIVVEMARENQTTGRGLKSSRPRLKALEESLKDFGSQLLKEYPTDNSSLQKDRLYLYYLQNGRDMYTGAPLDIHRLSDYDIDHIIPRSFTTDNSIDNKVLVSSKENRLKKDDVPSEKVVKKMRSFWYDLYSSKLISKRKLDNLTKIKLTEEDKAGFIKRQLVETRQITKHVAGILHHRFNKAEDTNEPIRKVRIITLKSALVSQFRNRFGIYKVREINEYHHAHDAYLNGVVALALLKKYPQLAPEFVYGEYLKFNAHKANKATVKKEFYSNIMKFFESDTPVCDENGEIFWDKSKSIAQVKKVINHHHMNIVKKTEIQKGGFSEETVEPKKDSSKLLPRKNNWDPAKYGGLGSPNVAYTVAFTYEKGKARKRTNALEGITIMEREAFEQSPVLFLKNKGYEQAEIEMKLPKYALFELENGRKRMVASNKEAQKANSFLLPEHLVTLLYHAKQYDEISHKESFDYVNEHHKEFSEVFARVLEFAGKYTLAEKNIEKLEKIYKENQTDDLAKLASSFVNLMQFNAMGAPADFKFFDVTIPRKRYTSLTEIWQSTIIHQSITGLYETRIRMGK

SEQ ID NO: 203 - protein, 1340 aa, Enterococcus faecium
  REGION 1..1340: note = Enterococcus faecium E3083
MKKEYTIGLDIGTNSVGWSVLTDDYRLVSKKMKVAGNTEKSSTKKNFWGVRLFDEGQTAEARRSKRTARRRLARRRQRILELQKIFAPEILKIDEHFFARLNESFLVLDEKKQSRHPVFATIKQEKSYHQTYPTIYHLRQALADSSEKADIRLVYLAMAHLLKYRGHFLIEGELNTENSSVTETFRQFLSTYNQQFSEADDKQTEKLDEAVDCSFVFTEKMSKTKKAETLLKYFPHEKSNGYLSQFIKLMVGNQGNFKNVFGLEEEAKLQFSKETYEEDLEELLEKIGDDYIDLFVQAKNVYDAVLLSEILSDSTKNTRAKLSAGMIRRYDAHKEDLVLLKRFVKENLPKKYRAFFGDNSVNGYAGYIEGHATQEDFYKFVKKELTGIRGSEVFLTKIEQENFLRKQRTFDNGVIPHQIHLTELRAIIANQKKHYPFLKEEQEKLESLLTFKIPYYVGPLAKKQENSPFAWLIRKSEEKIKPWNLPEIVDMEGSAVRFIERMINTDMYIPHNKVLPKNSLLYQKFSIYNELTKVRYQDERGQMNYFSSIEKKEIFHELFEKNRKVTKKDLQEFLYLKYDIKHAELSGIEKAFNASYTTYHDFLTMSENKREMKQWLEDPELASMFEEIIKTLTVFEDREMIKTRLSHHEATLGKHIIKKLTKKHYTGWGRLSKELIQGIRDKQSNKTILDYLINDDDFPHHRNRNCMQLINDDSLSFKKEIKKAQMITDTENLEEIVKELTGSPAIKKGILQSLKIVDEIVGIMGYEPANIVVEMARENQTTGRGLKSSRPRLKALEESLKDFGSQLLKEYPTDNSSLQKDRLYLYYLQNGRDMYTGAPLDIHRLSDYDIDHIIPRSFTTDNSIDNKVLVSSKENRLKKDDVPSEKVVKKMRSFWYDLYSSKLISKRKLDNLTKIKLTEEDKAGFIKRQLVETRQITKHVAGILHHRFNKAEDTNEPIRKVRIITLKSALVSQFRNRFGIYKVREINEYHHAHDAYLNGVVALALLKKYPQLAPEFVYGEYLKFNAHKANKATVKKEFYSNIMKFFESDTPVCDENGEIFWDKSKSIAQVKKVINHHHMNIVKKTEIQKGGFSKETVEPKKDSSKLLPRKNNWDPTKYGGLGSPNVAYTVAFTYEKGKARKRTNALEGITIMEREAFEQSPVLFLKNKGYEQAEIEMKLPKYALFELENGRKRMVASNKEAQKANSFLLPEHLVTLLYHAKQYDEISHKESFDYVNEHHKEFSEVFARVLEFAGKYTLAEKNIEKLEKIYKENQTDDLAKLASSFVNLMQFNAMGAPADFKFFDVTIPRKRYTSLTEIWQSTIIHQSITGLYETRIRMGK

SEQ ID NO: 204 - protein, 1340 aa, Enterococcus faecium
  REGION 1..1340: note = Enterococcus faecium PC4.1
MKKEYTIGLDIGTNSVGWSVLTDDYRLVSKKMKVAGNTEKSSTKKNFWGVRLFDEGQTAEARRSKRTARRRLARRRQRILELQKIFAPEILKIDEHFFARLNESFLVLDEKKQSRHPVFATIKQEKSYHQTYPTIYHLRQALADSSEKADIRLVYLAMAHLLKYRGHFLIEGELNTENSSVTETFRQFLSTYNQQFSEADDKQTEKLDEAVDCSFVFTEKMSKTKKAETLLKYFPHEKSNGYLSQFIKLMVGNQGNFKNVFGLEEEAKLQFSKETYEEDLEELLEKIGDDYIDLFVQAKNVYDAVLLSEILSDSTKNTRAKLSAGMIRRYDAHKEDLVLLKRFVKENLPKKYRAFFGDNSVNGYAGYIEGHATQEDFYKFVKKELTGIRGSEVFLTKIEQENFLRKQRTFDNGVIPHQIHLTELRAIIANQKKHYPFLKEEQEKLESLLTFKIPYYVGPLAKKQENSPFAWLIRKSEEKIKPWNLPEIVDMEGSAVRFIERMINTDMYIPHNKVLPKNSLLYQKFSIYNELTKVRYQDERGQMNYFSSIEKKEIFHELFEKNRKVTKKDLQEFLYLKYDIKHAELSGIEKAFNASYTTYHDFLTMSENKREMKQWLEDPELASMFEEIIKTLTVFEDREMIKTRLSHHEATLGKHIIKKLTKKHYTGWGRLSKELIQGIRDKQSNKTILDYLINDDDFPHHRNRNFMQLINDDSLSFKKEIKKAQMITDTENLEEIVKELTGSPAIKKGILQSLKIVDEIVGIMGYEPANIVVEMARENQTTGRGLKSSRPRLKALEESLKDFGSQLLKEYPTDNSSLQKDRLYLYYLQNGRDMYTGAPLDIHRLSDYDIDHIIPRSFTTDNSIDNKVLVSSKENRLKKDDVPSEKVVKKMRSFWYDLYSSKLISKRKLDNLTKIKLTEEDKAGFIKRQLVETRQITKHVAGILHHRFNKAEDTNEPIRKVRIITLKSALVSQFRNRFGIYKVREINEYHHAHDAYLNGVVALALLKKYPQLAPEFVYGEYLKFNAHKANKATVKKEFYSNIMKFFESDTPVCDENGEIFWDKSKSIAQVKKVINHHHMNIVKKTEIQKGGFSKETVEPKKDSSKLLPRKNNWDPAKYGGLGSPNVAYTVAFTYEKGKARKRTNALEGITIMEREAFEQSPVLFLKNKGYEQAEIEMKLPKYALFELENGRKRMVASNKEAQKANSFLLPEHLVTLLYHAKQYDEISHKESFDYVNEHHKEFSEVFARVLEFAGKYTLAEKNIEKLEKIYKENQTDDLAKLASSFVNLMQFNAMGAPADFKFFDVTIPRKRYTSLTEIWQSTIIHQSITGLYETRIRMGK

SEQ ID NO: 205 - protein, 1340 aa, Enterococcus faecium
  REGION 1..1340: note = Enterococcus faecium TX1330
MKKEYTIGLDIGTNSVGWSVLTDDYRLVSKKMKVAGNTEKSSTKKNFWGVRLFDEGQTAEARRSKRTARRRLARRRQRILELQKIFAPEILKIDEHFFARLNESFLVLDEKKQSRHPVFATIKQEKSYHQTYPTIYHLRQALADSSEKADIRLVYLAMAHLLKYRGHFLIEGELNTENSSVTETFRQFLSTYNQQFSEADDKQTEKLDEAVDCSFVFTEKMSKTKKAETLLKYFPHEKSNGYLSQFIKLMVGNQGNFKNVFGLEEEAKLQFSKETYEEDLEELLEKIGDDYIDLFVQAKNVYDAVLLSEILSDSTKNTRAKLSAGMIRRYDAHKEDLVLLKRFVKENLPKKYRAFFGDNSVNGYAGYIEGHATQEDFYKFVKKELTGIRGSEVFLTKIEQENFLRKQRTFDNGVIPHQIHLTELRAIIANQKKHYPFLKEEQEKLESLLTFKIPYYVGPLAKKQENSPFAWLIRKSEEKIKPWNLPEIVDMEGSAVRFIERMNNTDMYIPHNKVLPKNSLLYQKFSIYNELTKVRYQDERGQMNYFSSIEKKEIFHELFEKNRKVTKKDLQEFLYLKYDIKHAELSGIEKAFNASYTTYHDFLTMSENKREMKQWLEDPELASMFEEIIKTLTVFEDREMIKTRLSHHEATLGKHIIKKLTKKHYTGWGRLSKELIQGIRDKQSNKTILDYLINDDDFPHHRNRNFMQLINDDSLSFKKEIKKAQMITDTENLEEIVKELTGSPAIKKGILQSLKIVDEIVGIMGYEPANIVVEMARENQTTGRGLKSSRPRLKALEESLKDFGSQLLKEYPTDNSSLQKDRLYLYYLQNGRDMYTGAPLDIHRLSDYDIDHIIPRSFTTDNSIDNKVLVSSKENRLKKDDVPSEKVVKKMRSFWYDLYSSKLISKRKLDNLTKIKLTEEDKAGFIKRQLVETRQITKHVAGILHHRFNKAEDTNEPIRKVRIITLKSALVSQFRNRFGIYKVREINEYHHAHDAYLNGVVALALLKKYPQLAPEFVYGEYLKFNAHKANKATVKKEFYSNIMKFFESDTPVCDENGEIFWDKSKSIAQVKKVINHHHMNIVKKTEIQKGGFSKETVEPKKDSSKLLPRKNNWDPAKYGGLGSPNVAYTVAFTYEKGKARKRTNALEGITIMEREAFEQSPVLFLKNKGYEQAEIEMKLPKYALFELENGRKRMVASNKEAQKANSFLLPEHLVTLLYHAKQYDEISHKESFDYVNEHHKEFSEVFARVLEFAGKYTLAEKNIEKLEKIYKENQTDDLAKLASSFVNLMQFNAMGAPADFKFFDVTIPRKRYTSLTEIWQSTIIHQSITGLYETRIRMGK

SEQ ID NO: 206 - protein, 1340 aa, Enterococcus faecium
  REGION 1..1340: note = Enterococcus faecium TX1337RF
MKKEYTIGLDIGTNSVGWSVLTDDYRLVSKKMKVAGNTEKSSTKKNFWGVRLFDEGQTAEARRSKRTARRRLARRRQRILELQKIFAPEILKIDEHFFARLNESFLVLDEKKQSRHPVFATIKQEKSYHQTYPTIYHLRQALADSSEKADIRLVYLAMAHLLKYRGHFLIEGELNTENSSVTETFRQFLSTYNQQFSEADDKQTEKLDEAVDCSFVFTEKMSKTKKAETLLKYFPHEKSNGYLSQFIKLMVGNQGNFKNVFGLEEEAKLQFSKETYEEDLEELLEKIGDDYIDLFVQAKNVYDAVLLSEILSDSTKNTRAKLSAGMIRRYDAHKEDLVLLKRFVKENLPKKYRAFFGDNSVNGYAGYIEGHATQEDFYKFVKKELTGIRGSEVFLTKIEQENFLRKQRTFDNGVIPHQIHLTELRAIIANQKKHYPFLKEEQEKLESLLTFKIPYYVGPLAKKQENSPFAWLIRKSEEKIKPWNLPEIVDMEGSAVRFIERMINTDMYMPHNKVLPKNSLLYQKFSIYNELTKVRYQDERGQMNYFSSIEKKEIFHELFEKNRKVTKKDLQEFLYLKYDIKHAELSGIEKAFNASYTTYHDFLTMSENKREMKQWLEDPELASMFEEIIKTLTVFEDREMIKTRLSHHEATLGKHIIKKLTKKHYTGWGRLSKELIQGIRDKQSNKTILDYLINDDDFPHHRNRNFMQLINDDSLSFKKEIKKAQMITDTENLEEIVKELTGSPAIKKGILQSLKIVDEIVGIMGYEPANIVVEMARENQTTGRGLKSSRPRLKALEESLKDFGSQLLKEYPTDNSSLQKDRLYLYYLQNGRDMYTGAPLDIHRLSDYDIDHIIPRSFTTDNSIDNKVLVSSKENRLKKDDVPSEKVVKKMRSFWYDLYSSKLISKRKLDNLTKIKLTEEDKAGFIKRQLVETRQITKHVAGILHHRFNKAEDTNEPIRKVRIITLKSALVSQFRNRFGIYKVREINEYHHAHDAYLNGVVALALLKKYPQLAPEFVYGEYLKFNAHKANKATVKKEFYSNIMKFFESDTPVCDENGEIFWDKSKSIAQVKKVINHHHMNIVKKTEIQKGGFSKETVEPKKDSSKLLPRKNNWDPAKYGGLGSPNVAYTVAFTYEKGKARKRTNALEGITIMEREAFEQSPVLFLKNKGYEQAEIEMKLPKYALFELENGRKRMVASNKEAQKANSFLLPEHLVTLLYHAKQYDEISHKESFDYVNEHHKEFSEVFARVLEFAGKYTLAEKNIEKLEKIYKENQTDDLAKLASSFVNLMQFNAMGAPADFKFFDVTIPRKRYTSLTEIWQSTIIHQSITGLYETRIRMGK

SEQ ID NO: 207 - protein, 1336 aa, Enterococcus hirae
MTKDYTIGLDIGTNSVGWAVLTDDYQLMKRKMSVHGNTEKKKIKKNFWGARLFDEGQTAEFRRTKRTNRRRLARRKYRLSKLQDLFAEELCKQDDCFFVRLEESFLVPEEKQYKPASIFPTLEEEKEYYQKYPTIYHLRQKLVDSTEKEDLRLVYLALAHLLKYRGHFLFEGDLDTENTSIEESFRVFLEQYSKQSDQPLIVHQPVLTILTDKLSKTKKVEEILKYYPTEKINSFFAQCLKLIVGNQANFKRIFDLEAEVKLQFSKETYEEDLESLLEKIGDEYLDIFLQAKKVHDAILLSEIISSTVKHTKAKLSSGMVERYERHKADLAKFKQFVKENVPQKATVFFKDTTKNGYAGYIKGKTTQEEFYKFVKKELSGVVGSEPFLEKIDQETFLLKQRTYTNGVIPHQVHLIELKAIIDQQKQHYPFLEEAGPKIIALFKFRIPYYVGPLAKEQEASSFAWIERKTAEKINPWNFSEVVDIEKSAMRFIQRMTKQDTYLPTEKVLPKNSLLYQKYMIFNELTKVSYKDERGVKQYFSGDEKQQIFKQLFQKERGKITVKKLQNFLYTHYHIENAQIFGIEKAFNASYSTYHDFMKLAKTNQKAMQEWLEQPEMEPIFEDIVKILTIFEDRQMIKHQLSKYQEVFGEKLLKEFARKHYTGWGRFSAKLIHGIRDRKTNKTILDYLINDDDVPANRNRNLMQLINDEHLSFKEEIAKATVFSKHKSLVDVIQDLPGSPAIKKGIWQSLKIVEELIAIIGYKPKNIVIEMARENQKTHRTSPRLKALENGLKQIGSTLLKEQPTDNKALQKERLYLYYLQNGRDMYTGEPLEIENLHQYEVDHIIPRSFIVDNSIDNKVLVASKQNQKKRDDVPKKQIVNEQRIFWNQLKEAKLISPKKYAYLTKIELTPEDKARFIQRQLVETRQITKHVANILHQSFNQEEEGTDCDGVQIITLKATLTSQFRQTFGLYKVREINPHHHAHDAYLNGFIANVLLKRYPKLAPEFVYGKYVKYSLARENKATAKKEFYSNILKFLESDEPFCDENGEIYWEKSHHLPRIKKVLSSHQVNVVKKVEQQKGGFYKETVNSKEKPDKLIERKNNWDVTKYGGFGSPVIAYAIAFVYAKGKTQKKTRAIEGITIMEQAAFEKDPTTFLKEKGFPQVTEFIKLPKYTLFEFDNGRRRFLASHKESQKGNPFILSDQLVTLLYHAQHYDKITYQESFDYVNTHLSDFSAILTEVLAFAEKYTLADKNIERIQELYEENKYGETSMIAQSFLQLLQFNAIGAPADFKFFGVTIPRKRYTSLTEIWDATIIYQSVTGLYETRIRMGDLWAGEQ

SEQ ID NO: 208 - protein, 1330 aa, Enterococcus italicus
  REGION 1..1330: note = Enterococcus italicus DSM 15952
MKNDYTIGLDIGTNSVGYSVVTDDYKVISKKMNVFGNTEKKSIKKNFWGVRLFESGQTAQEARMKRTSRRRIARRKNRICYLQEIFQPEMNHLDNNFFYRLNESFLVADDAKYDKHPIFGTLDEEIHFHEQFPTIYHLRKYLADGDEKADLRLVYLAIAHIIKFRGNFLIEGELNTENNSVIELSKVFVQLYNQTLSELEGFQFIDESIDFSEVLTQQLSKSERADNVLKLFPDEKGTGIFAQFIKLIVGNQGNFKKVFQLEEDQKLQLSTDDYEENIENLLAIIGDEYGDIFVAAQNLYQAILLAGILTSTEKTRAKLSASMIQRYEEHAKDLKLLKRFVKEHIPDKYAEIFNDATKNGYAGYIDGKTKEEEFYKYLKTTLVQKSGYQYFIEKIEQENFLRKQRIYDNGVIPHQVHAEELRAILRKQEKYYSFLKENHEKIEQIFKVRIPYYVGPLAKHNEQSRFAWNIRKSDEPIRPWNMNDVVDENASAVAFIERMTIKDIYLNENVLPRHSLIYEKFTVFNELTKVLYADDRGVFQRFSAEEKEDIFEKLFKSERKVTKKKLENYLRIELSISSPSVKGIEEQFNANFGTYLDLKKFDELHPYLDDEKYQDTLEEVIKVLTVFEDRSMIQNQLEQLPLNLSTKTIKALSRRKYTGWGRLSARLIDGIHDKNSGKTILDYLIEDESDSYIVNRNFMQLINDDHLSFKKIIEDSQPYKEQQSAEEIVSELSGSPAIKKGILQSLKIVDELVAIMGYKPKNIVVEMARENQTTGRGKQNSKPRLKGIENGLKEFSDSVLKGSSIDNKQLQNDRLYLYYLQNGKDMYTGHELDIDHLSTYDIDHIIPQSFLTDNSIDNRVLTTSKSNRGKSDNVPSEEVVRKMDRFWRKLLNAKLISERKYTNLTKKELTESDKAGFLKRQLVETRQITKHVATILDSKFNEDSNNRDVQIITLKSALVSEFRKTFNLYKVREINDLHHAHDAYLNAVVALSLLRVYPQLKPEFVYGEYGKNSIHDQNKATIKKQFYSNITRYFASKDYIINDDGEILWNKQETIAQVIKTLGMHQVNVVKKVEIQKGGFSKESIQPKGESQKLIRRKQQWNTKKYGGFDSPVVAYAILLSFDKGKRKARSFKIVGITIQDRESFEGNPILYLSKKDYHNPKVEAILPKYSLFEFENGRRRMVASASETQKGNQLIIPGHLMELLYHSKKIINGKNSDSVSYIQNNKEKFREIFEYIVDFSSKYISADANLNKIEKIFENNFHKASEQEIAKSFINLLTFTAMGAPADFEFFGEKIPRKRYVSISEIIDAVFIHQSITGLYETRVRLTEV

SEQ ID NO: 209 - protein, 1096 aa, Eubacterium dolichum
  REGION 1..1096: note = Eubacterium dolichum DSM 3991
MMEVFMGRLVLGLDIGITSVGFGIIDLDESEIVDYGVRLFKEGTAAENETRRTKRGGRRLKRRRVTRREDMLHLLKQAGIISTSFHPLNNPYDVRVKGLNERLNGEELATALLHLCKHRGSSVETIEDDEAKAKEAGETKKVLSMNDQLLKSGKYVCEIQKERLRTNGHIRGHENNFKTRAYVDEAFQILSHQDLSNELKSAIITIISRKRMYYDGPGGPLSPTPYGRYTYFGQKEPIDLIEKMRGKCSLFPNEPRAPKLAYSAELFNLLNDLNNLSIEGEKLTSEQKAMILKIVHEKGKITPKQLAKEVGVSLEQIRGFRIDTKGSPLLSELTGYKMIREVLEKSNDEHLEDHVFYDEIAEILTKTKDIEGRKKQISELSSDLNEESVHQLAGLTKFTAYHSLSFKALRLINEEMLKTELNQMQSITLFGLKQNNELSVKGMKNIQADDTAILSPVAKRAQRETFKVVNRLREIYGEFDSIVVEMAREKNSEEQRKAIRERQKFFEMRNKQVADIIGDDRKINAKLREKLVLYQEQDGKTAYSLEPIDLKLLIDDPNAYEVDHIIPISISLDDSITNKVLVTHRENQEKGNLTPISAFVKGRFTKGSLAQYKAYCLKLKEKNIKTNKGYRKKVEQYLLNENDIYKYDIQKEFINRNLVDTSYASRVVLNTLTTYFKQNEIPTKVFTVKGSLTNAFRRKINLKKDRDEDYGHHAIDALIIASMPKMRLLSTIFSRYKIEDIYDESTGEVFSSGDDSMYYDDRYFAFIASLKAIKVRKFSHKIDTKPNRSVADETIYSTRVIDGKEKVVKKYKDIYDPKFTALAEDILNNAYQEKYLMALHDPQTFDQIVKVVNYYFEEMSKSEKYFTKDKKGRIKISGMNPLSLYRDEHGMLKKYSKKGDGPAITQMKYFDGVLGNHIDISAHYQVRDKKVVLQQISPYRTDFYYSKENGYKFVTIRYKDVRWSEKKKKYVIDQQDYAMKKAEKKIDDTYEFQFSMHRDELIGITKAEGEALIYPDETWHNFNFFFHAGETPEILKFTATNNDKSNKIEVKPIHCYCKMRLMPTISKKIVRIDKYATDVVGNLYKVKKNTLKFEFD

SEQ ID NO: 210 - protein, 1114 aa, Eubacterium rectale
MNYTEKEKLFMKYILALDIGIASVGWAILDKESETVIEAGSNIFPEASAADNQLRRDMRGAKRNNRRLKTRINDFIKLWENNNLSIPQFKSTEIVGLKVRAITEEITLDELYLILYSYLKHRGISYLEDALDDTVSGSSAYANGLKLNAKELETHYPCEIQQERLNTIGKYRGQSQIINENGEVLDLSNVFTIGAYRKEIQRVFEIQKKYHPELTDEFCDGYMLIFNRKRKYYEGPGNEKSRTDYGRFTTKLDANGNYITEDNIFEKLIGKCSVYPDELRAAAASYTAQEYNVLNDLNNLTINGRKLEENEKHEIVERIKSSNTINMRKIISDCMGENIDDFAGARIDKSGKEIFHKFEVYNKMRKALLEIGIDISNYSREELDEIGYIMTINTDKEAMMEAFQKSWIDLSDDVKQCLINMRKTNGALFNKWQSFSLKIMNELIPEMYAQPKEQMTLLTEMGVTKGTQEEFAGLKYIPVDVVSEDIFNPVVRRSVRISFKILNAVLKKYKALDTIVIEMPRDRNSEEQKKRINDSQKLNEKEMEYIEKKLAVTYGIKLSPSDFSSQKQLSLKLKLWNEQDGICLYSGKTIDPNDIINNPQLFEIDHIIPRSISFDDARSNKVLVYRSENQKKGNQTPYYYLTHSHSEWSFEQYKATVMNLSKKKEYAISRKKIQNLLYSEDITKMDVLKGFINRNINDTSYASRLVLNTIQNFFMANEADTKVKVIKGSYTHQMRCNLKLDKNRDESYSHHAVDAMLIGYSELGYEAYHKLQGEFIDFETGEILRKDMWDENMSDEVYADYLYGKKWANIRNEVVKAEKNVKYWHYVMRKSNRGLCNQTIRGTREYDGKQYKINKLDIRTKEGIKVFAKLAFSKKDSDRERLLVYLNDRRTFDDLCKIYEDYSDAANPFVQYEKETGDIIRKYSKKHNGPRIDKLKYKDGEVGACIDISHKYGFEKGSKKVILESLVPYRMDVYYKEENHSYYLVGVKQSDIKFEKGRNVIDEEAYARILVNEKMIQPGQSRADLENLGFKFKLSFYKNDIIEYEKDGKIYTERLVSRTMPKQRNYIETKPIDKAKFEKQNLVGLGKTKFIKKYRYDILGNKYSCSEEKFTSFC

SEQ ID NO: 211 - protein, 1391 aa, Eubacterium sp.
  REGION 1..1391: note = Eubacterium sp. AS15
MENKQYYIGLDVGTNSVGWAVTDTSYNLLRAKGKDMWGARLFDEAKTAVERRTKRTSRRRSEREKARKAMLKELFADEINKVDPNFFIRLEESKFFLDDRSENNRQRYTLFNDAKFTDKDYYEKYKTIFHLRSALINSDEKFDVRLVFLAILNLFSHRGHFLNASLKGDGEIQGVDIFYNDLYEVCEEFEIDLPQISNIDNFEKILSQKGKSRTKILEELSEELSISKKEKIKYSLLKLICGMKIKVVDIYADEDIQEDDKKKDLGFRESDYEKSSLEVKEIIGDDHFELIERAKAVHDIGLLANIIGNSKYLCEARVEAYDNHHKDLQKIKELLKKYDIKAYTDMFRKMTDKNYSAYVGSVNSNIAKERRSVDNRKIEDLYEYIKKIALKNISDDNEDKIEILKKIETGEFLKKQLTASNGVIPNQLQSRELRAILKKAENYLPFLKEKGEKNLTVSEMIIQLFEFQIPYYVGPLDKNPKKDKNANSWAVIPSGGRILPWNFEDKVDVKGSRKEFIEKMVRKCTYLSEEHTLPKQSLLYEKFMVLNEINNIKIDGEKISVEAKQKIYNDLFMKGKKVSQKAIKQELISLNIMSKDSVLSGIDTVCNAYLSSIAKFRGVFDENVNNQSTIDMIEDIIFLKTVYSDEKRFVKEEIVEKYGDEIDKDKIKRILGFKFSNWGNISKSFLELEGADVGTGEIRSIIQSLWETNFNLMELLSSRFTYMDELEKRVKKLEKPLSEWTIEDLDDMYLSSPVKRMIWQSMKIVDEIQTVIGYAPKRIFVEMTRSEGEKVRTKSRKDRLKELYSAIKEDSKQWVKELDAKDESYFRSKKMYLYYLQKGRCMYSGEVIELDKLMDDNLYDIDHIYPRSFVKDDSLDNLVLVKKEINNRKQNDPITPQIQASCQGFWKVLHEQGFISNEKYSRLTRKTQEFSDEEKLSFINRQIVETGQATKCMAQILQKSMGEDVDVVFSKARLVSEFRHKFELFKSRLINDFHHANDAYLNIVVGNSYFVKFTRNPANFIKDARKNPDNPAYKYHMDRFFERDVKSKSEVAWIGQSEGNAGTIAIVKKTMSKNSPLITKKVEEGHGSITKETIVGVKEIKFGRNKVEKADKTPKKANLQAYRPIKTSDERLCNILRYGGRTSISISGYCLVEYVKKRKTIRSLEAIPVYLGRKDSLSEEKLLNYFRYNLNDGGKDSVSDIRLCLPFISTNSLVKIDGYLYYLGGKNDDRIQLYNAYQLKMKKEEVEYIRKIEKAVSMSKFDEIDREKNPVLTEEKNIELYNKIQDKFENTVFSKRMSLVKYNKKDLSFGDFLKNKKSKFEEIDLEKQCKVLYNIIFNLSNLKEVDLSDIGGSKSTGKCRCKKNITNYKEFKLIQQSITGLYSCEKDLMTI

SEQ ID NO: 212 - protein, 1107 aa, Eubacterium ventriosum
  REGION 1..1107: note = Eubacterium ventriosum ATCC 27560
MGYTVGLDIGVASVGVAVLDENDNIVEAVSNIFDEADTSNNKVRRTLREGRRTKRRQKTRIEDFKQLWETSGYIIPHKLHLNIIELRNKGLTELLSLDELYCVLLSMLKHRGISYLEDADDGEKGNAYKKGLAFNEKQLKEKMPCEIQLERMKKYGKYHGEFIIEINDEKEYQSNVFTTKAYKKELEKIFETQRCNGNKINTKFIKKYMEIYERKREYYIGPGNEKSRTDYGIYTTRTDEEGNFIDEKNIFGKLIGKCSVYPEEYRASSASYTAQEFNLLNDLNNLKINNEKLTEFQKKEIVEIIKDASSVNMRKIIKKVIDEDIEQYSGARIDKKGKEIYHTFEIYRKLKKELKTINVDIDSFTREELDKTMDILTLNTERESIVKAFDEQKFVYEENLIKKLIEFRKNNQRLFSGWHSFSYKAMLQLIPVMYKEPKEQMQLLTEMNVFKSKKEKYVNYKYIPENEVVKEIYNPVVVKSIRTTVKILNALIKKYGYPESVVIEMPRDKNSDDEKEKIDMNQKKNQEEYEKILNKIYDEKGIEITNKDYKKQKKLVLKLKLWNEQEGLCLYSGKKIAIEDLLNHPEFFEIDHIIPKSISLDDSRSNKVLVYKTENSIKENDTPYHYLTRINGKWGFDEYKANVLELRRRGKIDDKKVNNLLCMEDITKIDVVKGFINRNLNDTRYASRVVLNEMQSFFESRKYCNTKVKVIRGSLTYQMRQDLHLKKNREESYSHHAVDAMLIAFSQKGYEAYRKIQKDCYDFETGEILDKEKWNKYIDDDEFDDILYKERMNEIRKKIIEAEEKVKYNYKIDKKCNRGLCNQTIYGTREKDGKIHKISSYNIYDDKECNSLKKMINSGKGSDLLMYNNDPKTYRDMLKILETYSSEKNPFVAYNKETGDYFRKYSKNHNGPKVEKVKYYSGQINSCIDISHKYGHAKNSKKVVLVSLNPYRTDVYYDNDTGKYYLVGVKYNHIKCVGNKYVIDSETYNELLRKEGVLNSDENLEDLNSKNITYKFSLYKNDIIQYEKGGEYYTERFLSRIKEQKNLIETKPINKPNFQRKNKKGEWENTRNQIALAKTKYVGKLVTDVLGNCYIVNMEKFSLVVDK

SEQ ID NO: 213 - protein, 1391 aa, Eubacterium yurii
  REGION 1..1391: note = Eubacterium yurii subsp. margaretiae ATCC 43715
MENKQYYIGLDVGTNSVGWAVTDTSYNLLRAKGKDMWGARLFEKANTAAERRTKRTSRRRSEREKARKAMLKELFADEINRVDPSFFIRLEESKFFLDDRSENNRQRYTLFNDATFTDKDYYEKYKTIFHLRSALINSDEKFDVRLVFLAILNLFSHRGHFLNASLKGDGDIQGMDVFYNDLVESCEYFEIELPRITNIDNFEKILSQKGKSRTKILEELSEELSISKKDKSKYNLIKLISGLEASVVELYNIEDIQDENKKIKIGFRESDYEESSLKVKEIIGDEYFDLVERAKSVHDMGLLSNIIGNSKYLCEARVEAYENHHKDLLKIKELLKKYDKKAYNDMFRKMTDKNYSAYVGSVNSNIAKERRSVDKRKIEDLYKYIEDTALKNIPDDNKDKIEILEKIKLGEFLKKQLTASNGVIPNQLQSRELRAILKKAENYLPFLKEKGEKNLTVSEMIIQLFEFQIPYYVGPLDKNPKKDNKANSWAKIKQGGRILPWNFEDKVDVKGSRKEFIEKMVRKCTYISDEHTLPKQSLLYEKFMVLNEINNIKIDGEKISVEAKQKIYNDLFVKGKKVSQKDIKKELISLNIMDKDSVLSGTDTVCNAYLSSIGKFTGVFKEEINKQSIVDMIEDIIFLKTVYGDEKRFVKEEIVEKYGDEIDKDKIKRILGFKFSNWGNLSKSFLELEGADVGTGEVRSIIQSLWETNFNLMELLSSRFTYMDELEKRVKKLEKPLSEWTIEDLDDMYLSSPVKRMIWQSMKIVDEIQTVIGYAPKRIFVEMTRSEGEKVRTKSRKDRLKELYNGIKEDSKQWVKELDSKDESYFRSKKMYLYYLQKGRCMYSGEVIELDKLMDDNLYDIDHIYPRSFVKDDSLDNLVLVKKEINNRKQNDPITPQIQASCQGFWKILHDQGFMSNEKYSRLTRKTQEFSDEEKLSFINRQIVETGQATKCMAQILQKSMGEDVDVVFSKARLVSEFRHKFELFKSRLINDFHHANDAYLNIVVGNSYFVKFTRNPANFIKDARKNPDNPVYKYHMDRFFERDVKSKSEVAWIGQSEGNSGTIVIVKKTMAKNSPLITKKVEEGHGSITKETIVGVKEIKFGRNKVEKADKTPKKPNLQAYRPIKTSDERLCNILRYGGRTSISISGYCLVEYVKKRKTIRSLEAIPVYLGRKDSLSEEKLLNYFRYNLNDGGKDSVSDIRLCLPFISTNSLVKIDGYLYYLGGKNDDRIQLYNAYQLKMKKEEVEYIRKIEKAVSMSKFDEIDREKNPVLTEEKNIELYNKIQDKFENTVFSKRMSLVKYNKKDLSFGDFLKNKKSKFEEIDLEKQCKVLYNIIFNLSNLKEVDLSDIGGSKSTGKCRCKKNITNYKEFKLIQQSITGLYSCEKDLMTI

SEQ ID NO: 214 - protein, 1142 aa, Facklamia hominis
  REGION 1..1142: note = Facklamia hominis CCUG 36813
MYSVGLDIGIASCGYSIINDVNGNIVELGTLLFKSRNSDNNEERRTNRGSRRLINRRRTRLDDGKKLLAEKGFKQDSKLKHVCPYELRVKGLHEKLTQGEIYKVVLHILKKRGISYLDESDENSSGIDGASYKDQVNLNLNLQKELTPGQIQLKRLKENGRIKSGVTFENGYQLNVFSVSAYANELNKILTKQSEYYSEIDQIWIDRFTKNGYRKEAGLVYRKRPYYDGPGNEKNNSIYGRWANFKEDGHPKENIFDQLIGLDSVDSTQVRASASTLTAQKYNLLNDLNNLTIIEDDRKFTTDEKVSIINYLMTQDITRFGPKELAKFYQLEVDQIRGWRIDNKGNPEIHSLKVYRDWKKIFNTSSIDLTSIQTWVVDELANVITLNTEIPSTLATLKIKIPDIDQQILNFVENNFYELKKKTSKNSWHSFSLKTLNILIPELLNTSEEQNTILERLNLKFDLKNKYAEKNQIPVKELLEQIYNPTVTKSVHQSIKLFNEIIEKYGKNNISYVTIEMPRDKNDQDQKDTIKRINKLNSERKNDSEKYFLERSGWDTIRFESALKKPRFAEKLLFYYEQKGKCAYSGQDILAESLLNESCEVDHIIPLSISFDDSIHNKVLVTASSNQEKGQRTPYMAFIDGAKLGQSWDDFVAWVNSCGFHRKKVQNLLYEENIFNPDVQRGFVSRNLNDTRYASRIVLNAIQSFFYKQKDLTKVKVVNGSFTHTLRKKWGSSLDKNRDTYHHHAVDATLCAVTPFINIVKYEFFEEDGIKYMVDLTTGEKVAYSDYKKMKFYDKRAYVPIWDGFIKQLTPANLYPKIKFSHQVDSKWNRKISDATIYSTRKIVETKINKKGVAKETVKDIVIDKIKDIYTPEGWRKFKEKQDKLLMKNFDEKTYNKLIKIAKEYPEKKEVQTSNGKVSLVEVSPFKMYCEEQNVPAIRKYSKKGNGPYIRSLKFYDKELGKHINITKDSYGNDIERTIRNKKIILKNQNSWRTDVYYNSVNNCYELLGIKYCHLKFYRGKYGIPKSIYDELKKEDEISSESVFKFSLYRHDRVRFEKDGEYIEALFGSKNESNKNYLELSPIDKNKWLSKENVKFFGEVAASGRFIKGLKPGIKVIKQSTDYMGHVYAIHQEKLKFVLSDA

SEQ ID NO: 215 - protein, 1512 aa, Fibrobacter succinogenes
MKKILGLDLGTNSIGWAVVNADEITRDDGSRYLKPNGISAAGSRIIPMSADILGDFEKGNSISQTAERTRMRMARRLHERALLRRERLLRVLNLLDFLPKHFADKIDRYGKFTDDSEPKLAWRKNTEGKYEFIFQDAFNEMLAEFKDKQPEIVEEGKKIPYDWTIYYLRKKALEKALSKEELSWILLQFNQKRGYYQLRGEEEEIPQDKKIEYLAQKVVKVEATDQKKGDDVWYNVYLENGMIYRRTSKAPLDWEGKVKEFIVTTEVENDGETPKKDKEGNIKRSFRAPKEDDWTLLKKKTEADIENSHKTVGCYIYDSLLNNPKQKIIGKLVRTVERKFYKEELTQILKKQVELIPELRDDNLYKQCIEELYPINEAHRNTIAKTDFANLFINDILFYQRPLKSKKSQIDNCPYEERIFIDSKTGEKKKVPVKCIAKSNPLFQEFRLWQFIQNLRIYQREKEIDGKLLTDIDITSECLKSEEDYVRLFDWLNDRETIEQEDLLKHLFNTKKSKNKENPYRWNYVEDKVYPCNETRATILKGFSKCGINASVLSPELEMALWHILYSVEDKKEIETALTHFAQKQGWNDDFAKVFSKAKPFKKDYGSYSEKAIKKLLSLMRMGKYWNQDNIDKNTLDRIDKIINGEYDEKISNRVRDNAINLKDISDFRGLPVWLACYIVYDRHSEAKDCTKWNSPEEIDSYLKKFKQHSLRNPIVEQVVTETLRTVRDIWIQEEQIDEIHLELGRDLKNPADKRKKMSENILKNENTNLRIKAMLMEFMNPSMGIENVRPYSPSQQDILRIYEENALDNLTKDDKDFDFISKISKQAQPSKTDIIRYKCWLEQKYRSPYTGKTISLSKLFTPAYEIEHVIPQSLYFDDSFSNKVICEAEVNKLKDRQLGYKFIAEHHGEKVQLSQGEVVEILSVDAYEKFVKENYANNRIKMKKLLMESIPDEFIERQLNDSRYISKVVKGLLSNIVREKIDDENYEPEAVSKNLISCNGAITDRLKKDWGMNDVWNSIILPRFIRMNQITGKDCFTTTNAEGHLIPQMPLELQKGFNKKRIDHRHHAMDAIVIACTTRDHVNLLNNEAAHSKFNATRYQLQRKLRRFEKAVIDGKEREVAKEFLKPWDSFSSDSKNILENIIVSFKQNQRVINKTTNAFLHFDENGKKTFIKQGKGDSWAIRKSMHKDTVFGEINLRKVRSVSLNEAIKVPERVLNKKIKEKILELKNNKIDAKNIKKYIEENHTGGYGIDSSKIDVFYFTKETKERFFATRKTLDTSFNQAKIKDSIADSGIQKILLAHLKSKNGDAEQAFSPDGIDEMNKNIVELNNGKFHQPILKVRVYEKADKFAVGQKGNKKVKFVEAAKGTNLFFAIFEKDGKRSYLTIPLNVMIDCQKQYGNQWKNNIEAYLKEKELVEKDVKLQFILSPNDLVYLPTEGSIDKKRIYKVVSFTNNRLYAIPYAIAKSIVDKNEFTQLNKIEFTDNKESIKDACVPVIIDRLGNVIEFNGKRL

SEQ ID NO: 216 - protein, 1365 aa, Filifactor alocis
MTKEYYLGLDVGTNSVGWAVTDSQYNLCKFKKKDMWGIRLFESANTAKDRRLQRGNRRRLERKKQRIDLLQEIFSPEICKIDPTFFIRLNESRLHLEDKSNDFKYPLFIEKDYSDIEYYKEFPTIFHLRKHLIESEEKQDIRLIYLALHNIIKTRGHFLIDGDLQSAKQLRPILDTFLLSLQEEQNLSVSLSENQKDEYEEILKNRSIAKSEKVKKLKNLFEISDELEKEEKKAQSAVIENFCKFIVGNKGDVCKFLRVSKEELEIDSFSFSEGKYEDDIVKNLEEKVPEKVYLFEQMKAMYDWNILVDILETEEYISFAKVKQYEKHKTNLRLLRDIILKYCTKDEYNRMFNDEKEAGSYTAYVGKLKKNNKKYWIEKKRNPEEFYKSLGKLLDKIEPLKEDLEVLTMMIEECKNHTLLPIQKNKDNGVIPHQVHEVELKKILENAKKYYSFLTETDKDGYSVVQKIESIFRFRIPYYVGPLSTRHQEKGSNVWMVRKPGREDRIYPWNMEEIIDFEKSNENFITRMTNKCTYLIGEDVLPKHSLLYSKYMVLNELNNVKVRGKKLPTSLKQKVFEDLFENKSKVTGKNLLEYLQIQDKDIQIDDLSGFDKDFKTSLKSYLDFKKQIFGEEIEKESIQNMIEDIIKWITIYGNDKEMLKRVIRANYSNQLTEEQMKKITGFQYSGWGNFSKMFLKGISGSDVSTGETFDIITAMWETDNNLMQILSKKFTFMDNVEDFNSGKVGKIDKITYDSTVKEMFLSPENKRAVWQTIQVAEEIKKVMGCEPKKIFIEMARGGEKVKKRTKSRKAQLLELYAACEEDCRELIKEIEDRDERDFNSMKLFLYYTQFGKCMYSGDDIDINELIRGNSKWDRDHIYPQSKIKDDSIDNLVLVNKTYNAKKSNELLSEDIQKKMHSFWLSLLNKKLITKSKYDRLTRKGDFTDEELSGFIARQLVETRQSTKAIADIFKQIYSSEVVYVKSSLVSDFRKKPLNYLKSRRVNDYHHAKDAYLNIVVGNVYNKKFTSNPIQWMKKNRDTNYSLNKVFEHDVVINGEVIWEKCTYHEDTNTYDGGTLDRIRKIVERDNILYTEYAYCEKGELFNATIQNKNGNSTVSLKKGLDVKKYGGYFSANTSYFSLIEFEDKKGDRARHIIGVPIYIANMLEHSPSAFLEYCEQKGYQNVRILVEKIKKNSLLIINGYPLRIRGENEVDTSFKRAIQLKLDQKNYELVRNIEKFLEKYVEKKGNYPIDENRDHITHEKMNQLYEVLLSKMKKFNKKGMADPSDRIEKSKPKFIKLEDLIDKINVINKMLNLLRCDNDTKADLSLIELPKNAGSFVVKKNTIGKSKIILVNQSVTGLYENRREL

SEQ ID NO: 217 - protein, 1347 aa, Finegoldia magna
  REGION 1..1347: note = Finegoldia magna ACS-171-V-Col3
MKSEKKYYIGLDVGTNSVGWAVTDEFYNILRAKGKDLWGVRLFEKAKTAADTRTFRSGRRRNDRKGMRLQILREIFEDEIKKVDKDFYDRLDESKFWAEDKKVSGKYSLFNDKNFSDKQYFEKFPTIFHLRKYLMEEHGKVDIRYYFLAINQMMKRRGHFLIDGQISHVTDDKPLKEQLILLINDLLKIELEEELMDSIFEILADVNEKRTDKKNNLKELIKGQDFNKQEGNILNSIFESIVTGKAKIKNIISDEDILEKIKEDNKEDFVLTGDSYEENLQYFEEVLQENITLFNTLKSTYDFVILQSILKGKSTLSDAQVERYDEHKKDLEILKKVIKKYDEDGKLFKQVFKEDNGNGYVSYIGYYLNKNKKITAKKKISNIEFTKYVKGILEKQCDCEDEAVKYLLGKIEQENFLLKQISSINSVIPHQIHLFELDKILENLAKNYPSFNNKKEEFTKIEKIRKTFTFRIPYYVGPLNDYHKNNGGNAWIFRNKGEKIRPWNFEKIVDLHKSEEEFIKRMLNQCTYLPEETVLPKSSILYSEYMVLNELNNLRIKGKPLDTDVKLKLIEELFKKKTKVTLKSIRDYMIRNNFADKEDFDNSEKNLEIVSNMKSYIDFNNILGDKFELEMVEDLIEKITIHTGNKTLLKKYIEETYPDLSSSQIQKIINLKYKDWGRLSRKLLDGIKGRNKTDDVNTVINFMRNSSDNLMQIIEGKNYSFNEYIDNLRKKYIPQEISYEVVENLYVSPSVKKMIWQVIRVTEEITKVMGYDPDKIFIEMAKSEEEKKTTISRKNKLLDLYKAIKKDERDSQYEKLLTGLNKLDESELRSKKLYLYYTQMGRDMYTGEKIDLDKLFDSTHYDKDHIIPQSMKKDDSIINNLVLVNKNANQTTKGNIYPVPSSIRNNPDIYNYWKYLMEKEFISKEKYNRLIRNTPLTNEELGVFINRQLVETRQSTKAIKELFEKFYQKSKIIPVKASLASDLRKDMNTLKSREVNDLHHAHDAFLNIVAGDVWNREFTSNPINYVNENREGDKVKYSLSKYFTRPRKSKGKVIWTPEKGRKLIVDTLNKPSVLISNESHVKKGELFNATISGKKDYKKGKIYLPLKKDDRLKDVSKYGGYKAINGAFFFLVEHTKSKKRIRSIELFPLHLLSKFYEDKNTVLDYAINVLQLQDPKIIIDKINYRTEIIIDNFSYLISTKSNDGSITVKPNEQMYWRVDEISNLKKIENKYKKDAILTEEDRKIMESYIDKIYQQFKAGKYKNRRTTDTIIEKYEIIDLDTLDNKQLYQLLVAFISLSYKTSNNAVDFTVIGLGTECGKPRITNLPDNTYLVYKSITGIYEKRIRIK

SEQ ID NO: 218 - protein, 1348 aa, Finegoldia magna
MKSEKKYYIGLDVGTNSVGWAVTDEFYNILRAKGKDLWGVRLFEKADTAANTRIFRSGRRRNDRKGMRLQILREIFEDEIKKVDKDFYDRLDESKFWAEDKKVSGKYSLFNDKNFSDKQYFEKFPTIFHLRKYLMEEHGKVDIRYYFLAINQMMKRRGHFLIDGQISHVTDDKPLKEQLILLINDLLKIELEEELMDSIFEILADVNEKRTDKKNNLKELIKGQDFNKQEGNILNSIFESIVTGKAKIKNIISDEDILEKIKEDNKEDFVLTGDSYEENLQYFEEVLQENITLFNTLKSTYDFLILQSILKGKSTLSDAQVERYDEHKKDLEILKKVIKKYDEDGKLFKQVFKEDNGNGYVSYIGYYLNKNKKITAKKKISNIEFTKYVKGILEKQCDCEDEDVKYLLGKIEQENFLLKQISSINSVIPHQIHLFELDKILENLAKNYPSFNNKKEEFTKIEKIRKTFTFRIPYYVGPLNDYHKNNGGNAWIFRNKGEKIRPWNFEKIVDLHKSEEEFIKRMLNQCTYLPEETVLPKSSILYSEYMVLNELNNLRINGKPLDTDVKLKLIEELFKKKTKVTLKSIRDYMVRNNFADKEDFDNSEKNLEIASNMKSYIDFNNILEDKFDVEMVEDLIEKITIHTGNKKLLKKYIEETYPDLSSSQIQKIINLKYKDWGRLSRKLLDGIKGTKKETEKTDTVINFLRNSSDNLMQIIGSQNYSFNEYIDKLRKKYIPQEISYEVVENLYVSPSVKKMIWQVIRVTEEITKVMGYDPDKIFIEMAKSEEEKKTTISRKNKLLDLYKAIKKDERDSQYEKLLTGLNKLDDSDLRSRKLYLYYTQMGRDMYTGEKIDLDKLFDSTHYDKDHIIPQSMKKDDSIINNLVLVNKNANQTTKGNIYPVPSSIRNNPKIYNYWKYLMEKEFISKEKYNRLIRNTPLTNEELGGFINRQLVETRQSTKAIKELFEKFYQKSKIIPVKASLASDLRKDMNTLKSREVNDLHHAHDAFLNIVAGDVWNREFTSNPINYVKENREGDKVKYSLSKDFTRPRKSKGKVIWTPEKGRKLIVDTLNKPSVLISNESHVKKGELFNATIAGKKDYKKGKIYLPLKKDDRLQDVSKYGGYKAINGAFFFLVEHTKSKKRIRSIELFPLHLLSKFYEDKNTVLDYAINVLQLQDPKIIIDKINYRTEIIIDNFSYLISTKSNDGSITVKPNEQMYWRVDEISNLKKIENKYKKDAILTEEDRKIMESYIDKIYQQFKAGKYKNRRTTDTIIEKYEIIDLDTLDNKQLYQLLVAFISLSYKTSNNAVDFTVIGLGTECGKPRITNLPDNTYLVYKSITGIYEKRIRIK

SEQ ID NO: 219 - protein, 1348 aa, Finegoldia magna
  REGION 1..1348: note = Finegoldia magna SY403409CC001050417
MKSEKKYYIGLDVGTNSVGWAVTDEFYNILRAKGKDLWGVRLFEKAKTAADTRTFRSGRRRNDRKGVRLQILREIFEDEIKKVDKDFYDRLDESKFWAEDKKVSGKYSLFNDKNFSDKQYFEKFPTIFHLRKYLMEEHGKVDIRYYFLAINQMMKRRGHFLIDGQISHVTDDKPLKQQLILLINDLLKIELEEEFMDSIFEILADVNEKKTEKKNILKELINAQDFNKQEGKILYSIFESIVTGKAKIKNIISDEDILEKIKEDNKEDFVLTGDSYEENLQYFEEVLQENITLFNTLKSAYDFVILQSILKGKSTLSDAQVERYDEHKKDLEILKKVIKKYDEDGKLFKQVFKEDNGNGYVSYIGYYLNKNKKITAKKKISNIEFTKYVKGILEKQCDCEDEDVKYLLGKIEQENFLLKQISSINSVIPHQIHLFELDKILENLAKYYPSFNNKKEEFTKIEKIRKTFTFRIPYYVGPLNDYHKNNGGNAWIFRNKGEKIRPWNFEKIVDLHKSEEEFIKRMLNQCTYLPEETVLPKSSILYSEYMVLNELNNLRINGKPIDTDVKLKLIEELFKKKTKVTLKSIRDYMIRNNFADKEDFDNSEKNLEIVSNMKSYIDFNNILGDKFELEMVEDLIEKITIHTGNKKLLKKYIEETYPDLSSSQIQKIINLKYKDWGRLSRKLLDGITGTNIETGEIDTVINFLRNSSDNLMQIIGSQNYSFNNDIDKLRKKYIPQEISYEVVENLYVSPSVKKMIWQVIRITEEITKVMGYDPDKIFIEMAKSEEGKKTTISRKNKLLALYKAIKKDERDSQYEKLLTGLNKLDDSDLRSRKLYLYYTQMGRDMYTGEKIDLDKLFDSTHYDKDHIIPQSMKKDDSIINNLVLVNKNANQTTKGNIYPVPSSIRNNPKIYNYWKYLMEKEFISKEKYNRLIRNTPLTNEELGGFINRQLVETRQSTKAIKELFEKFYKKSKIIPVKAILASDLRKDMNTLKSREVNDLHHAHDAFLNIVAGDVWNREFTSNPINYVKENREGDKVKYSLSKYFTRPRKSKGKVIWTPEKGRKLIVDTLNKPSVLISNESHVKKGELFNATIAGKKDYKKGKIYLPLKKDDRLQDVSKYGGYKAINGAFFFLVEHTKSKKRIRSIELFPLHLLSKFYEDKNTVLDYAINVLQLQDPKIIIDKINYRTEIIIDNFSYLISTKSNDGSITVKPNEQMYWRVDEISNLKKIENKYKKDAILTEEDRKIMESYIDKIYQQFKAGKYKNRRTTDTIIEKYEIIDLDTLDNKQLYQLLVAFISLSYKTSNNAVDFTVIGLGTECGKPRITNLPDNTYLVYKSITGIYEKRIRIK

SEQ ID NO: 220 - protein, 1516 aa, unidentified
  REGION 1..1516: note = Flavobacteriaceae bacterium S85
  source 1..1516: note = Flavobacteriaceae bacterium
MLKQQKDKIIGMNKKILGLDLGTNSIGWALVKQDLENKYGEIIGCGSRIIPMSQDVLGKFDAGISISQTAERTNYRSVRKLIQRNTLRRERLHRVLHQLDFLPKHYNDSIDFEKKLGQFKTDKETKLNYFVNQHGKHEFLFKDSFNEMVKEFKEEQPELFYIKNNGKETKIPYDWTIYYLRKKALSKKISKEELSWLVLNFNQKRGYYQLRGEIDEEKEKNKRYEKLYVSEVVKTNNTIKKTGEYLYDIYFDNGWKYEKQTTKPQDWLHKHKEFIITTTTLKNGETKRTFKTVDSEKDWIAIKSKTEQDIKESNKTVGAFIYDTLLKNPTQKIRGSLVKTIERKFYREEFEKILKEQIKHRPEINVNTAIGKENYTKCVTELYPRNEAHANNILTNDFNYLFTKDILFYQRPLKSKKSEIANCQYEYRTYIKKKEKTGKEERVKQPLKATPKSHPLFQEFRLWQFIHNLKIYIRETTVGNKPLFDVDITDTFFTSENDWATLFEYLNNKKEIEQKHVLEYLVSKKIISKSEKTDYRWNYVEDKKYPGNETRVDFINRLKKVENLNVDEFLTSELEFKLWHIIYSVTDKNEYEKALENFAIRQNIDKDSFVNSFKKFPPFKSDYGAYSTKAIKKLLPLMRLGKFWDGSEIPKVVVEKITDIKTRLTSVNYDESLFKKDEKKILETIVDDITPKQLLKSFVKLKGKNHLAGLNTYQACYLVYERHSESSDITQWENPDDIDSFLNHFKQHSLRNPIVEQVVTETLRTVRDIWKYYGNGSPNYFNEIHIELGREMKNPADKRKQMSAKINENENTNQRIKGILQELMNDGVQDIKPYSPSQQEILKIYEEGISQNPNVDYSKVSEDEITKIKKSNNPTLKEIQRYKLWLEQKYISPYTGKPIPLSELFTPAYQIEHIIPQSRYFDNSLSNKIICESEVNEDKSNKTAYEYLKTNGGSIVHGHHLLSLKEYEDHCQHYFKKNRTKLKNLLSEEIPEGFINRQLNDSRYISKLIKGLLSNIVREENEQEATSKNIVPVTGSITSKLKQDWGLNDKWNEIIAPRFKRLNKMTNSNDFGYFDEKINTFRIQVPDAISRGFNKKRIDHRHHTLDALVIACCTKKHIQYLNSLNNEIIKHELKPSILIKNAQGDYTKHFMLPWNNFPIDCKNAIENTIVSFKQNLRVINKTSNKYQSYKDENGNLRLGKDGKPKKGLTKQTKGNNWAVRKAMHEDTFYGEIVDGENKGKLKIKTLLDTSFDVKKIEDKVLDKSIRTILINYLKQDKYKNLSKPHEEAFSPNGIIEMNKNIISLNNNIPHKPIKRVTLKHEKGKKFSIKTLLDKKTKFAKSATGTNVFFCIYKNINGKIKYHTPSFEEIIEIQKQEFEIKYKSKLNVPETLFDKKESFELLFYLQPNDLVYLPNDEELKNRQLIDFNNLNKKQIKRIYKFTDGSGTTANFIPYQVAKVIFNLNKKEQAKSSFKYPIQNEFGVGSPQSKNQKSIEGILIKERCIKLKIDRLGNISKA

SEQ ID NO: 221 - protein, 1473 aa, Flavobacterium branchiophilum
MAKILGLDLGTNSIGWAVVERENIDFSLIDKGVRIFSEGVKSEKGIESSRAAERTGYRSARKIKYRRKLRKYETLKVLSLNRMCPLSIEEVEEWKKSGFKDYPLNPEFLKWLSTDEESNVNPYFFRDRASKHKVSLFELGRAFYHIAQRRGFLSNRLDQSAEGILEEHCPKIEAIVEDLISIDEISTNITDYFFETGILDSNEKNGYAKDLDEGDKKLVSLYKSLLAILKKNESDFENCKSEIIERLNKKDVLGKVKGKIKDISQAMLDGNYKTLGQYFYSLYSKEKIRNQYTSREEHYLSEFITICKVQGIDQINEEEKINEKKFDGLAKDLYKAIFFQRPLKSQKGLIGKCSFEKSKSRCAISHPDFEEYRMWTYLNTIKIGTQSDKKLRFLTQDEKLKLVPKFYRKNDFNFDVLAKELIEKGSSFGFYKSSKKNDFFYWFNYKPTDTVAACQVAASLKNAIGEDWKTKSFKYQTINSNKEQVSRTVDYKDLWHLLTVATSDVYLYEFAIDKLGLDEKNAKAFSKTKLKKDFASLSLSAINKILPYLKEGLLYSHAVFVANIENIVDENIWKDEKQRDYIKTQISEIIENYTLEKSRFEIINGLLKEYKSENEDGKRVYYSKEAEQSFENDLKKKLVLFYKSNEIENKEQQETIFNELLPIFIQQLKDYEFIKIQRLDQKVLIFLKGKNETGQIFCTEEKGTAEEKEKKIKNRLKKLYHPSDIEKFKKKIIKDEFGNEKIVLGSPLTPSIKNPMAMRALHQLRKVLNALILEGQIDEKTIIHIEMARELNDANKRKGIQDYQNDNKKFREDAIKEIKKLYFEDCKKEVEPTEDDILRYQLWMEQNRSEIYEEGKNISICDIIGSNPAYDIEHTIPRSRSQDNSQMNKTLCSQRFNREVKKQSMPIELNNHLEILPRIAHWKEEADNLTREIEIISRSIKAAATKEIKDKKIRRRHYLTLKRDYLQGKYDRFIWEEPKVGFKNSQIPDTGIITKYAQAYLKSYFKKVESVKGGMVAEFRKIWGIQESFIDENGMKHYKVKDRSKHTHHTIDAITIACMTKEKYDVLAHAWTLEDQQNKKEARSIIEASKPWKTFKEDLLKIEEEILVSHYTPDNVKKQAKKIVRVRGKKQFVAEVERDVNGKAVPKKAASGKTIYKLDGEGKKLPRLQQGDTIRGSLHQDSIYGAIKNPLNTDEIKYVIRKDLESIKGSDVESIVDEVVKEKIKEAIANKVLLLSSNAQQKNKLVGTVWMNEEKRIAINKVRIYANSVKNPLHIKEHSLLSKSKHVHKQKVYGQNDENYAMAIYELDGKRDFELINIFNLAKLIKQGQGFYPLHKKKEIKGKIVFVPIEKRNKRDVVLKRGQQVVFYDKEVENPKDISEIVDFKGRIYIIEGLSIQRIVRPSGKVDEYGVIMLRYFKEARKADDIKQDNFKPDGVFKLGENKPTRKMNHNQFTAFVEGIDFKVLPSGKFEKI

SEQ ID NO: 222 - protein, 1459 aa, Flavobacterium columnare
MKFNLGLDIGTNSIGWALVNEDYENKKGKIIAAGSRIIPMTQDILDKFGSGAITETQTALRTDYRSKRKLIQRFLLRRERLHRVLNVLDFLPKHYAESIDFEKYFGKFLPNTEPKLAYNQNQFIFQNSFLEMLKEFQEKHPELLTNNKKIPYDWTIYYLRKKALNQRIEKEELAWLLLQFNQKRGYNQLRDEEEESVPNKQVEFYSLKIIDVVADQPKEGRDKRWYSINLENGWTYRRESKTPLFNWEGKTKDFIVTTDLNQDGSIKKDKEGKEKRSFRAPSEGDWTLLKKKTEKEIYESGKTLGTYIYDALLNTPDLKIKGDFIRTIDRSIYKEELQQIINKQKEYHLELNSSKLYKACLEELYPKNEIYKSALKNKDIAYLFINDILYYQRPLKAPKYNIGKCTYESRTFKKEDKKIREYIPAVAKSHPLFQEFRLWQWIKNLKIYEKLSSDNCTDFFLTNEQDFENLFEFLWNKKEIDHKGILEYLVKTKFPDLKPKQVKTKVKEYRWNYVYDHEKDESKTYPCGETYFLLKNKLDKIYNAQDDFLDKERLYNLWHIIYSVTDKKQYEKALAKFALKNHLDTKSFVNTFKRIPPFKNDYAIYSLKAIKKLLPLMRVGKYWNYDDIDPITKQKIQCIITGEENDTISTLVREKTNHFSNENDFKNLPLWLAGYIVYNSHNESSEIEKWKSPQDIDTFLKKFKQHALRNPIVEQVVTETLRVVRDIWSKKGQGKKDFFNEIHIELGKDLKNPVDKRRKLSSTNTKNESTNTRIKALLIELFTQGVENVKPNSPKHQEILKIFEEGALNSGIEIEEDIIKISNTDQPTKKQLELYILWLEHKYKSPYTGQSIPLSKLFTPNYEIEHIIPRSKYYDDNLSNKVICETEINRLKNNQLGYEFINNHEIREVTLEEGKTIRLLSPEQYWNFVTTYYAKNKAKRENLLLKELPVQMVEKQLNDTRYVSKYVMQLLSKIVRKEDGTDNGINSTNILSISGKMTRALKNDWDLNDVWNDLLLYRFERLNTITKTNLFTTYSEQKQKRMPIVPDQYAKGFHKKRLDHRHHALDAIVIACITRNHINYMNNQNIQGEKLKKNAIEKENYREILQKSRLDIRAQLCEKKYNDNDPTKYNWVFIKPWADFTENTKDILESIIPSFKQNLRIINKTVNYYEKYNENGKKVKVRQIKGDNWAIRKPLHKETISGKVHLSYKTPAKGKILTATRKVLDSSMDFKSIEKITDTGIQKILKNYLEYKKSPELAFSPEGIEELNATITKYNNGFHHKPIYKVRIYEEGVKFPLGNKGNKKSKYVEAEKGTNLFFAIYKDQENNRYFETIPFNDVLETLKKGMSAVPEKNQEENTLVFALSPQDLVFVPTLDEIENPDIVDFKNLTKDQTNRIYKMVSSSGKQCFFIKAEVATSIVNKMEFSTSNKMENSIEGIQIKSNCWKLKLDRLGTITRVIK

SEQ ID NO: 223 - protein, 1535 aa, Flavobacterium columnare
MTKILGLDLGTNSIGWAIRDTENEGINQILDKGARIFSEGVKSENGKEISRAAERTAYRSARKIKYRRKLRKYETLKVLSINGMCPLSVEEVEQWKKSGFKEYPLNPEFLDWLRTNEDKNINPYLFRDKASKQKVTLFELGRALYHIAQRRGFLSNRLDQSAEGVFEEHNPQIQNLIEDLDSSNTILNELKEYYINLGIIDETEKSGFKKDLDEGEKKLKSLYNSLVAITKKNANDIETCKQELIARLNKKEDLGKVKGKIKDISQAMLDRNFKTLGQYFFSLYNKERIRNQYTSREEHYLEEFIIICQTQGIEGINTNEKLPEKKFTGLAKDLYRAIFFQRPLKSQKGLIGKCSFEKNKSRCAVSHPDYEEFRMWSYLNTIKIGTQSEKTLRFLTLEEKLKLVPKFYRKSDFNFEVLAKELVEKGASFGYYKSSKKNEFFYWFNYKPTDSVSACVVSASLENAIGKDWKIKTFEYQTRNTEKNEVTKSVDYKDLWHLLSVATSDTYLYDFAIEKLKLEPKNAKAFSKTKLKKDFASLSLAAIAKILPYLKQGLLYSHAVFMANIENIVDADIWKDEEQQKFIQSKIVELVDNYIVEKSKLELINGLLKIYNTEDKEGRKVYYSKEAESLFEADLRKKLVPFYKANIIIEEHEQEIIFQDLFPILMDQLKKQEFIKIGRLDKQIEAFLEGENEEGQIFCNHTDKLKKLYHPSDIEVFKKKTIKDEWGNEKVVLGSPLTTSIKNPMAMRALHQLRKVLNTLIANDQIDEDTRIHIEMARELNDANKRKGIQDFQNENKKFREEAIKEIKKLYLEECHKDVNPTEDDILRYQLWLEQGKCEIYEEGNNISICDIIGSNPSYDIEHTIPRSISQDNSQMNKTLCSLKFNRSIKKQKMPVELSNYNDILPRIAHWKKEAEELTRQIETISRSIKSAATKVAKDKNIRKRHYLTLKRDYILGKYERFTWEEPKVGFKNSQIPDTGIITKYAQAYLKSYFKRVESVKGGAVAEFRKLWGIQESFIDENWWKHYKDKDRDKHTHHTIDAITIACMPKDKYDLLAHAWRLEDEQDKKAAKVLIEQAKPWKTFKEDIEKIETEILVSHFTPDNVKKQSKSIIKNRGKKVYVLKNELPVNFKNKIEGKDYFKLKFDSKILYKIPKKKEKQTDTFYEELPKNYLNGVEGKDYFKINTTGKTFYKIPIFNQGDTIRGSLHQETTYGAIKLPDIDIETKKPLHTDKGGFILKKDIKGNEIVFFVVRKEISKISENDVQNIVDNVVRKKIENAIANSLITFKIVKKKKVAVIKEGVTIWMREPNIEKGIEGIPIKKVRIITNSVKNPIEIKVHSPLSKSRHKHKQKVYGQNDENYAMALYELDGKREFELINNFNLAKLLKQSQSYYPLHKEKEIKGKKILVPIEKRNNKDVILKRGQQVVFYDKTVENPKDISEIIDFRERIYIIEGLTIQRQKDKKTSKVNEYGIIQLRHFKEARKSEEISKDNFKPDGEFKINENKPTRKMNHNQFTAFVEGIDFKVLPSGKFQKI

SEQ ID NO: 224 - protein, 1354 aa, Flavobacterium psychrophilum
  REGION 1..1354: note = Flavobacterium psychrophilum JIP02/86
MKKILGLDLGTNSIGWAFINEAENEIEVSSIVNTGVRIVPLTTDEESDFKKGNTISINADRTLKRGARRGLQRFKQRREALLETFNRIKFIATDFVYAETGAATTFSSYQLRAKSAVEAVTKEELVKVLLMLNKKRGYKSSRKAKTAEEGDAIDGMKIAKEIFENNLTPGQWVYNSLSKGGKFIPDFYHSDLQKELEKIVRFQNQFHSEQINDKLLADIQGKSRTQTSQHFSKTLNIPLAENKGTREETKLQHYQWRNEALANELDMKILAFIITEINNQINQSSGYLGAISDRSKELYFNQETVGQYQYKQLQENVHAKLKNQVFYRQDYLDEFEKIWETQAKFHSELNEKLKAEIRDITIFYQRKLKSQKHLVSFCEFEKGHKAIPKSSPLFQEFRIWQNLNNVVVKNETTKEVFELSEELKQLIAEELQFKESMTDVQMLTFCELKKGTHTVNFKKIEGNRTNTSIYKAFEKILEVEGYEIDFSKMKPLEIKETVAPIFETLNINTVILDFDPTIQGNDFDKQPYYQLWHLLYSAEDDDKLKETLKTKFGFKENHLPFILNINLQADYGSLSAKAIKKILPHLMDGHIYDKACLMVGYNHSSSLTTAQNNDRVLKDTLELLKKNSLRNPVVEKILNQMINVINAIMKDPAMGKPDEIRVELARELKANNEQRKKATSDINTATTEHERIRKLLHSEFNIPRVTRNDIIRYKLWLETGGISLYTGNPIKASDLFSKNYDIEHIIPKSRLFDDSFSNKTLCERQLNIDKSNKTAYSFLQEKLSENDFAAYENRVKDLFKTGKIKSYTKYKKLLMADNEIPEGFIDRQLRETQYIAKKAKEILLEVSRNVTATIGSVTDKLRQDWELVDVMKELNWEKYDKLGLTHIEEGKNGERLSKIKDWTKRNDHRHHAMDAITVAFTKPAYIQYLNNLNAKTQGENKANSIIGIENKHLYRDKNNKLRFISPMKNFREEAKKQLESILISYKAKNKVVTKNKNTTKKSGGTNQKIQLTPRGRLHKETVYGKLQQYATKEEKVNASFTEDYIQKVAKKEYREALLKRLEENDNDPKKAFTGKNALNKTPIYISLKDNIIVPEKVKTVWLETDYTIRKDITPDLKIDKVIDVGIKRILQNRLNEFNGDPKKAFVNLGESPIWLNKEKGIAIKRVTISGVSNAQALHTKKDHLGNEILDKNGNPIPVDFISTGNNHHVAIYRDEKGNLQEEVVSFYDAVIRRNLGLSVINKNHEKGWEFLFSMKQNEFFIFPSDGFNPHEIDLLNPNNYHLISPNIFRVQKISTKNYMFNHHLETKAVDGEMLKSKKELSKTSYHFIQTPTNLNGIIKVRINHLGKIVHLGEY

SEQ ID NO: 225 - protein, 1458 aa, Fluviicola taffensis
MTKTILGLDLGTNSIGWALINQDFDNKKGEILGMGSRIIPMTQDIKDEFGKGNSISQTAERTRLRGVRRLIHRTLLRRERLHRVLNIIGFLPEHYANQIDFEKRFGKFKPESEPKISFDGNDVFLFEKSYQEMLVDFKIHQPQLVSNGKKIPHDWTIYYLRKKALSKKIEKEELAWILLNFNQKRGYYQLRGEEEEETPNKLVEFHSLKIVEVNADEPQKGKPEIWYSLVLENGWVYRRASKTPLFDWKDKIREFIVTTEINNDGTVKTDKEGTEKRSFRAPKPEDWTLQKKKTEFELSKSGNEVGAFIYESILQKPNQKIRGKLISTIERKFYKEELKTILKTQLFFHKELKDEKLYNACIEELYKNNEAHRSLLSNKGFEHLFINDILFYQRPLRSKKSQISNCPLEKRTYKKEGIEITEGIKVISKSNPIYQEFRLWQWISNLSLYCIEPTETNVTSTFLNSIEDYENLFEFLNNRKEIEQKHLLKYLLENQGFKGKLLTNELEKFRWNFVADKKYPCNETGSLLHTRLSKVKNISPDFLTKEIEHQLWHIIYSVTDKIEYEQALKTFARKNNLDVDSFFEHFKKIPPFESTYGAYSEKAIKKLLPLIRLGKYWNWEAIDSISKDRISKILSGEYDENIKNRVREKAVHLTSENNFQGLQEWLAKYIVYDRHSEGNDLGKWTSVSDLETYLKEFKQHSLRNPIVEQVITETLRVVKDIWIKHGKGTENFFDEIHVELGREMKNNSEDRKRLTNTITENENTNLRIKALLMEMMNDNDVENVRPYSPSQQEILKIYEDGALNSNIELDDEIVKISKKAEPTKSELQRYKLWLEQKYRSPYTGQVIPLNKLFTSEYEIEHVVPQSRFFDDSFSNKVICESAVNKRKDNQLGLQFIKNHSGEKVELGFGKVVQVFTEEQYLDFVKEHYSKNRSKHNKLLLEEIPEKMIERQLNDTRYISKFVSSILSNIVRSEKDDDGLNSKNILPGNGKITTELKRDWGLNDVWNDLILPRFERMNTITNSDLFTTYNDKYQKHLPTVPFEYSKGFQKKRIDHRHHAMDALVIACATRDHLNLMNNQSAKSELKRYDLQNKLRKKEPYFNQKENKQKEAFKDFIKPWGTFTEDSKNALEKIIISFKQNLRVINKATNSYESYKDEDGNLRIGKDGKPEKGLIKQKGLNWAIRKPLHKDTVSGQINLSRIKLPNGKILTATRKNLDTSFDLKTIENSITDTGIQKILKNYLLSKESPELAFSPEGLEEMNNEIEKYNNGKFHHPINKARIYELGSKFNVGQTGNRRDKFVEAAKGTNLFFAIYQDENKNRSYETIPLNEVIEHQKWRASLPKEEQEKIPLVPVNKLKGTFIFSLSPNDLVYVPSNDELERSASIDFSKLKKEQINRLYKMVSSSGSQCFFVKSEVATSVVNKMEYSSLNKMEKSIDNLMVKEICIKLKIDRLGNISKA

SEQ ID NO: 226 - protein, 1646 aa, Francisella tularensis
MNIKILPIAIDLGAKNTGVFSAFYQKGTSLESLDNKNGKVYELSKDSYTLLMNNRTARRHQRRGIDRKQLVKRLFKLIWTKQLNLEWNKDTQQTISFLLNRRGFSFITDGYSPEYLNIAPEAVKAILMSILDDYNGEDDLDSYLQSATENDSKIDELYNKLLQKALEFKLRKLCIDIKEDKVTTKTLKELSNTEFKLLANYLVDYDRILRTQKFSYTDKQGNLRELNYYHHDKYNIQEFLKRNIIINDVILEKLTDDLDIWNLNFDKFDFEKNLEKLENQEDKDYLQTHLHHFVFAVNKIKSEMASGGRHRSQYFQEITNVLVENNHQEGYLKNFCENLHNKKYSNLSVKNLVNLIGNLSNLELKPLRKYFNDKIHAKADYWDEQKFAETYSDWILGEWRVGAKDKDKKDGAKYSYKNLCDELKQKVGINQDGIINQTKSDFVDFLLELDPCRTIPPYLDNNNRKPPKCQSLILNPKFLDNKYPNWQQYLQELKKLQTVQNYLGNFEIDLKDLKSSKEQPYFVKYKSLNQQIASGQRDYKDLDARVLQFIFDRVKASDELLLNEIYSHAKKLKQNTSSELEKLELCKKLDEVIANSQLSQILKSQHVNGIFEQGTFLHLVCKYYKQRQRARDSRLYIMPEYRYDKKLDKYNNTGRFDDDNQLLTYCNHKPRQKRYQLLNDLAGVLQVSPNFLKDKIGSDDDLFISKWLVEHIRGFKKACEDSLKIQKDNRGLLNHKINIARNTKGKCEKEIFNLICKIEGSEDKKGNYKHGLAYELGVLLFGEPNQASKLEFDRKIKKFNSIYSFAQIQQIAFAERKGNANTCAVCSADNAHRMQQIKVAKPVEGNKDNIILSAKAQRLPAIPTRIVDGAVKKIATILARNIVDDNWDNIKQALSNNQQLHVPIITESNAFEFEPALADIKGKSLKDKRKKALERIDPENVFKDKNNRIKEFAKGISAYSDANLANGDFDGAKEELDHIIPRSHKKYGTLNDEANLICVTREDNQNRGNKAVFLYDLKPNYKLKQFNTTDDLEIEKKIADTIWDASKQDFKFGNYRSFINLTPQEQIAFRHALFLADKNPIKKAVIRAIDNRNRTFVNGTQRYFAEVLANNIYLRAKKENLATNRITFDYFGIETTNSNGRGIADVRKLYEKVDSDIQAYAKGDKPQDSYSHLIDAMIAFCVAADEHKNEGSIGLKMGNQYGLFPTPDKYDENTGEIISWHNDDIFRKIKVSDNQFSDKKLVRKKATEGFNTHRQMTRDGIYGESYLPILIHKNLNEVRKGYNWENSEEIKIFKGKKYDIQQLNNLVYCLKFVDKPISIDIQITTLEELRNILETNNISTTAEYYYINLKTQKLHEYYIENYNTALGYKKYTKEMEFLRSLAYRTERVKIKSIDDVSMILAKDSNFKAGKIELPFKTEWQRLYLEWQNTTIKDNHEFLKSYFSVKNATKQHKKVRKDFSLPISTNEGKLLVKRKTWDNNFIYQILNDSDSRADGTKPFIPAFDISKNEIVETIIKSFTSKNIFWLPKNIELQKVDNKSIFAIDTSRWFEVETPKDLIEIGVSTIQYKIDNNSRPKVRVKLDYVMDDDSKINYFMNHSLLKSRYPDKVLEILKQSTIIEFESSGFNKTIKEMLGMTLAGIYNETSNN

SEQ ID NO: 227 - protein, 1629 aa, Francisella tularensis
MNFKILPIAIDLGVKNTGVFSAFYQKGTSLERLDNKNGKVYELSKDSYTLLMNNRTARRHQRRGIDRKQLVKRLFKLIWTEQLNLEWDKDTQQAISFLFNRRGFSFITDGYSPEYLNIVPEQVKAILMDIFDDYNGEDDLDSYLKLATEQESKISEIYNKLMQKILEFKLRKLCTDIKDDKVSTKTLKEITSYEFELLADYLANYSEILKTQKFSYTDKQGNLKELSYYHHDKYNIQEFLKRHATINIQILDTLLTDDLDIWNFNFEKFDFDKNEEKLQNQEDKDHIQAHLHHFVFAVNKIKSEMASGGRHRSQYFQEITNVLDENNHQEGYLKNFCENLHNKKYSNLSVKNLVNLIGNLSNLELKPLRKYFNDKIHAKADHWDEQKFTETYCHWILGEWRVGVKDQDKKDGAKYSYKDLCNELKQKVTKAGLVDFLLELDPCRTIPPYLDNNNRKPPKCQSLILNPKFLDNQYPNWQQYLQELKKLQSIQNYLESFETDLKVLKSSKDQPYFVEYRSSNQQIASGQRDYKDLDARILQFIFDRVKASDELLLNEIYFQAKKLKQKASSELEKLESSKKLDEVIANSQLSQILKSQHTNGIFEQGTFLHLVCKYYKQRQRARDSRLYIMPEYRYDKKLHKYNNTGRFDDDNQLLTYCNHKPRQKRYQLLNDLAGVLQVSPNFLKDKIGSDDDLFISKWLVEHIRGFKKACEDSLKIQKDNRGLLNHKINIARNTKGKCEKEIFNLICKIEGSEDKKGNYKHGLAYELGVLLFGEPNEASKPEFDRKIKKFNSIYSFAQIQQIAFAERKGNANTCAVCSADNAHRMQQIKITEPVEDNKDKIILSAKAQRLPAITTRIVDGAVKKMATILAKNIVDDNWQNIKQVLSAKHQLHIPIITESNAFEFEPALADVKGKSLKDRRKKALERISPENIFKDKNNRIKEFAKGISAYSGANLTDGDFDGAKEELDHIIPRSHKKYGTLNDEANLICVTRGDNKNKGNRIFCLRDLANNYKLKQFETTDDLEIEKKIADTIWDANKKDFKFGNYRSFINLTPQEQKAFRHALFLADENPIKQAVIRAINNRNRTFVNGTQRYFAEVLANNIYLRAKKENLNTDKISFDYFGIPTIGNGRGIAEIRQLYEKVDSDIQAYAKGDKPQASYSHLIDAMLAFCIAADEHRNDGSIGLEIDKNYSLYPLDKNTGEVFTKDIFSQIKITDNEFSDKKLVRKKATEGFNTHRQMTRDGIYAENYLPILIHKELDEVRKGYTWKNSEEIKIFKGKKYDIQQLNNLLYCLKFVDKPISIDIQISTLEELRNILTTNNIAATAEYYYINLKTQKLHEYYIENYNTALGYKKYTKEMEFLRSLAYRSERVKIKSIDDVKQVLDKDSNFIIGKITLPFKKEWQRLYREWQNITIKDDYEFLKSFFNVKSITKLHKKVRKDFSLPISTNEGKFLVKRKTWDNNFIYQILNDSDSRVDGTKPFIPAFDISKNEIVEAIIDSFTSKNIFWLPKNIELQKVDNKNIFAIDTSKWFEVETPSDLRDIGVATIQYKIDNNSRPKVRVKLDYVIDDDSKINYFTNHSLLKSRYPDKVLEILKQSTIIEFESSGFNKTIKEMLGMTLAGIYNETSNN

SEQ ID NO: 228 - protein, 1629 aa, Francisella sp.
  REGION 1..1629: note = Francisella novicida FTG
  source 1..1629: note = Francisella novicida
MNFKILPIAIDLGVKNTGVFSAFYQKGTSLERLDNKNGKVYELSKDSYTLLMNNRTARRHQRRGIDRKQLVKRLFKLIWTEQLNLEWDKDTQQAISFLFNRRGFSFITDGYSPEYLNIVPEQVKAILMDIFDDYNGEDDLDSYLKLATEQESKISEIYNKLMQKILEFKLMKLCTDIKDDKVSTKTLKEITSYEFELLADYLANYSESLKTQKFSYTDKQGNLKELSYYHHDKYNIQEFLKRHATINDRILDTLLTDDLDIWNFNFEKFDFDKNEEKLQNQEDKDHIQAHLHHFVFAVNKIKSEMASGGRHRSQYFQEITNVLDENNHQEGYLKNFCENLHNKKYSNLSVKNLVNLIGNLSNLELKPLRKYFNDKIHAKADHWDEQKFTETYCHWILGEWRVGVKDQDKKDGAKYSYKDLCNELKQKVTKAGLVDFLLELDPCRTIPPYLDNNNRKPPKCQSLILNPKFLDNQYPNWQQYLQELKKLQSIQNYLDSFETDLKVLKSSKDQPYFVEYKSSNQQIASGQRDYKDLDARILQFIFDRVKASDELLLNEIYFQAKKLKQKASSELEKLESSKKLDEVIANSQLSQILKSQHTNGIFEQGTFLHLVCKYYKQRQRARDSRLYIMPEYRYDKKLHKYNNTGRFDDDNQLLTYCNHKPRQKRYQLLNDLAGVLQVSPNFLKDKIGSDDDLFISKWLVEHIRGFKKACEDSLKIQKDNRGLLNHKINIARNTKGKCEKEIFNLICKIEGSEDKKGNYKHGLAYELGVLLFGEPNEASKPEFDRKIKKFNSIYSFAQIQQIAFAERKGNANTCAVCSADNAHRMQQIKITEPVEDNKDKIILSAKAQRLPAIPTRIVDGAVKKMATILAKNIVDDNWQNIKQVLSAKHQLHIPIITESNAFEFEPALADVKGKSLKDRRKKALERISPENIFKDKNNRIKEFAKGISAYSGANLTDGDFDGAKEELDHIIPRSHKKYGTLNDEANLICVTRGDNKNKGNRIFCLRDLADNYKLKQFETTDDLEIEKKIADTIWDANKKDFKFGNYRSFINLTPQEQKAFRHALFLADENPIKQAVIRAINNRNRTFVNGTQRYFAEVLANNIYLRAKKENLNTDKISFDYFGIPTIGNGRGIAEIRQLYEKVDSDIQAYAKGDKPQASYSHLIDAMLAFCIAADEHRNDGSIGLEIDKNYSLYPLDKNTGEVFTKDIFSQIKITDNEFSDKKLVRKKAIEGFNTHRQMTRDGIYAENYLPILIHKELNEVRKGYTWKNSEEIKIFKGKKYDIQQLNNLVYCLKFVDKPISIDIQISTLEELRNILTTNNIAATAEYYYINLKTQKLHEYYIENYNTALGYKKYSKEMEFLRSLAYRSERVKIKSIDDVKQVLDKDSNFIIGKITLPFKKEWQRLYREWQNTTIKDDYEFLKSFFNVKSITKLHKKVRKDFSLPISTNEGKFLVKRKTWDNNFIYQILNDSDSRVDGTKPFIPAFDISKNEIVEAIIDSFTSKNIFWLPKNIELQKVDNKNIFAIDTSKWFEVETPSDLRDIGVATIQYKIDNNSRPKVRVKLDYVIDDDSKINYFTNHSLLKSRYPDKVLEILKQSTTIEFESSGFNKTIKEMLGMTLAGIYNETSNN

SEQ ID NO: 229 - protein, 1629 aa, Francisella sp.
  REGION 1..1629: note = Francisella novicida GA99-3548
  source 1..1629: note = Francisella novicida
MNFKILPIAIDLGVKNTGVFSAFYQKGTSLERLDNKNGKVYELSKDSYTLLMNNRTARRHQRRGIDRKQLVKKLFKLIWTEQLNLEWDKDTQQAISFLFNRRGFSFITDGYSPEYLNIVPEQVKAILMDIFDDYNGEDDLDSYLKLATEQESKISEIYNKLMQKILEFKLRKLCTDIKDDKVSTKTLKEITSYEFELLADYLANYSESLKTQKFSYTDKQGNLKELSYYHHDKYNIQEFLKRHATINDEILDTLLTDDLDIWNFNFEKFDFDKNEEKLQNQEDKDHTQAHLHHFVFAVNKIKSEMASGGRHRGQYFQEITNVLDENNHQEGYLKNFCENLHNKKYSNLSVKNLVNLIGNLSNLELKPLRKYFNDKIHAKADHWDEQKFTETYCHWILGEWRVGLKDQDKKEGAKYSYKDLCNELKQKVTNAGLIDFLLELDPCRTIPPYLDNNNRKPPKCQSLILNPKFLDNQYPNWQQYLQELKKLQIIQDYLESFETDLKVLKSSKDQPYFVEYKSSNQQIASGQRDYKDLDARILQFIFDRVKASDELLLNEIYFQAKKLKQKASSELEKLESSKKLDEVIANSQLSKILKSQHTNGIFEQGTFLHLVCKYYKQRQRARDSRLYIMPEYRYDKKLDKYNNTGRFDDDNQLLTYCNHKPRQKRYQLLNDLAGVLQVSPNFLKDKIGSDDDLFISKWLVEHIRGFKKACEDSLKIQKDNRGLLNHKINIARNTKGKCEKEIFNLICKIEGSEDKKGNYKHGLAYELGVLLFGEPNEASKPEFDRKIKKFNSIYSFAQIQQIAFAERKGNANTCAVCSADNAHRMQQIKITEPVEDNKDKIILSAKAQRLPAIPTRIVDGAVKKMATILAKNIVDDNWQNIKQVLSAKHQLHIPIITESNAFEFEPALADVKGKSLKDRRKKALERISPENIFKDKNNRIKEFAKGISAYSGANLTDGDFDGAKEELDHIIPRSHKKYGTLNDEANLICVTRDDNKNKGNRIFCLHDLANNYKLKQFETTDDLEIEKKIADTIWDASKKDFKFGNYRSFINLTPQEQKAFRHALFLADENPIKQAVIRAINNRNRTFVNGTQRYFAEVLANNIYLRAKKENLNTDKISFDYFGIPTIGNGRGIAEIRQLYEKVDSDIQVYAKGDKPQASYSHLIDAMLAFCIAADEHRNDGSIGLEIDKNYSLYPLDKNTGEVFTKDIFSQIKITDNEFSDKKLVRKKATEGFNTHRQMTRDGIYAENYLPILIHKELDEVRKGYTWKNSEEIKIFKGKKYDIQQLNNLLYCLKFVDKPISIDIQISTLEELRNILTTNNIAATAEYYYINLKTQKLHEYYIENYNTALGYKKYTKEMEFLRSLAYRSERVKIKSIDDVKQVLDKDSNFIIGKITLPFKKEWQRLYREWQNTTIKDDYEFLKSFFNVKSITKLHKKVRKDFSLPISTNEGKFLVKRKTWDNNFIYQILNDSDSRVDGTKPFIPAFDISKNEIVEAIIDSFTSKNIFWLPKNIELQKVDNKNIFAIDTSKWFEVETPSDLRDIGVATIQYKIDNNSRPKVRVKLDYVIDDDSKINYFTNHSLLKSRYPDKVLEILKQSTIIEFESSGFNKTIKEMLGMTLAGIYNETSNN

SEQ ID NO: 230 - protein, 1629 aa, Francisella tularensis; identical to SEQ ID NO: 30

SEQ ID NO: 231 - protein, 1629 aa, Francisella sp.
  REGION 1..1629: note = Francisella novicida GA99-3549
  source 1..1629: note = Francisella novicida
MNVKILPIAIDLGVKNTGVFSAFYQKGTSLERLDNKNGKVYELSKDSYTLLMNNRTARRHQRRGIDRKQLVKRLFKLIWTEQLNLEWDKDTQQAISFLFNRRGFSFITDGYSPEYLNIVPEQVKAILMDIFDDYNGEDDLDSYLKLATEQESKISEIYNKLMQKILEFKLRKLCTDIKDDKVSTKTLKEITSYEFELLADYLANYSEILKTQKFSYTDKQGNLKELSYYHHDKYNIQEFLKRHATINDEILDTLLTDDLDIWNFNFEKFDFDKNEEKLQNQEDKDHTQAHLHHFVFAVNKIKSEMASGGRHRGQYFQEITNVLDENNHQEGYLKNFCENLHNKKYSNLSVKNLVNLIGNLSNLELKPLRKYFNDKIHAKADHWDEQKFTETYCHWILGEWRVGVKDQDKKDGAKYSYKDLCNELKQKVTKAGLVDFLLELDPCRTIPPYLDNNNRKPPKCQSLILNPKFLDNQYPNWQQYLQELKKLQSIQNYLESFETDLKVLKSSKDQPYFVEYKSSNQQIASGQRDYKDLDARILQFIFDRVKASDELLLNEIYFQAKKLKQKASSELEKLESSKKLDEVIANSQLSQILKSQHTNGIFEQGTFLHLVCKYYKQRQRARDSRLYIMPEYRYDKKLDKYNNTGRFDDDNQLLTYCNHKPRQKRYQLLNDLAGVLQVSPNFLKDKIGSDDDLFISKWLVEHIRGFKKACEDSLKIQKDNRGLLNHKINIARNTKGKCEKEIFNLICKIEGSEDKKGNYKHGLAYELGVLLFGEPNEASKPEFDRKIKKFNSIYSFAQIQQIAFAERKGNANTCAVCSADNAHRMQQIKITEPVEDNKDKIILSAKAQRLPAIPTRIVDGAVKKMATILAKNIVDDNWQNIKQVLSAKHQLHIPIITESNAFEFEPALADVKGKSIKDRRKKALERISPENIFKDKNNRIKEFAKGISAYSGDNLASGDFDGAKEELDHIIPRSHKKYGTLNDEANLICVTRDDNKNKGNRIFCLHDLANNYKLKQFETTDDLEIEKKIADTIWDASKKDFKFGNYRSFINLTPQEQKAFRHALFLADENPIKQAVIRAINNRNRTFVNGTQRYFAEVLANNIYLRAKKENLNTDKISFDYFGIPTIGNGRGIVEIRQLYEKVDSDIQAYAKGDKPQASYSHLIDAMLAFCIAADEHRNDGSIGLEIDKNYSLYPLDKNTGEVFTKDIFSQIKITNNEFSDKKLVRKKATEGFNTHRQMTRDGIYAENYLPILIHKELDEVRKGYTWGNSEELKIHKGKKYDIQQLNNLVYCLKFIDKSISIDIQISTLEELRNILTTNNIATTAEYYYINLKTQKLHEYYIENYNTALGYKKYTKEMEFLRSLAYRSERVKIKSIDDVKQVLDKDSNFIIGKITLPFKKEWQRLYREWQNTTIKDDYEFLKSFFNVKSITKLHKKVRKDFSLPISTNEGKFLVKRKTWDNNFIYQILNDSDSRVDGTKPFIPAFDISKNEIVEAIIDSFTSKNIFWLPKNIELQKVDNKNIFAIDTSKWFEVETPSDLRDIGVATIQYKIDNNSRPKVRVKLDYVIDDDSKINYFTNHSLLKSRYPDKVLEILKQSTIIEFESSGFNKTIKEMLGMTLAGIYNETSNN

SEQ ID NO: 232 - protein, 1323 aa, Fructobacillus fructosus
  REGION 1..1323: note = Fructobacillus fructosus KCTC 3544
MVYDVGLDIGTGSVGWVALDENGKLARAKGKNLVGVRLFDTAQTAADRRGFRTTRRRLSRRKWRLRLLDELFSAEINEIDSSFFQRLKYSYVHPKDEENKAHYYGGYLFPTEEETKKFHRSYPTIYHLRQELMAQPNKRFDIREIYLAIHHLVKYRGHFLSSQEKITIGSTYNPEDLANAIEVYADEKGLSWELNNPEQLTEIISGEAGYGLNKSMKADEALKLFEFDNNQDKVAIKTLLAGLTGNQIDFAKLFGKDISDKDEAKLWKLKLDDEALEEKSQTILSQLTDEEIELFHAVVQAYDGFVLIGLLNGADSVSAAMVQLYDQHREDRKLLKSLAQKAGLKHKRFSEIYEQLALATDEATIKNGISTARELVEESNLSKEVKEDTLRRLDENEFLPKQRTKANSVIPHQLHLAELQKILQNQGQYYPFLLDTFEKEDGQDNKIEELLRFRIPYYVGPLVTKKDVEHAGGDADNHWVERNEGFEKSRVTPWNFDKVFNRDKAARDFIERLTGNDTYLIGEKTLPQNSLRYQLFTVLNELNNVRVNGKKFDSKTKADLINDLFKARKTVSLSALKDYLKAQGKGDVTITGLADESKFNSSLSSYNDLKKTFDAEYLENEDNQETLEKIIEIQTVFEDSKIASRELSKLPLDDDQVKKLSQTHYTGWGRLSEKLLDSKIIDERGQKVSILDKLKSTSQNFMSIINNDKYGVQAWITEQNTGSSKLTFDEKVNELTTSPANKRGIKQSFAVLNDIKKAMKEEPRRVYLEFAREDQTSVRSVPRYNQLKEKYQSKSLSEEAKVLKKTLDGNKNKMSDDRYFLYFQQQGKDMYTGRPINFERLSQDYDIDHIIPQAFTKDDSLDNRVLVSRPENARKSDSFAYTDEVQKQDGSLWTSLLKSGFINRKKYERLTKAGKYLDGQKTGFIARQLVETRQIIKNVASLIEGEYENSKAVAIRSEITADMRLLVGIKKHREINSFHHAFDALLITAAGQYMQNRYPDRDSTNVYNEFDRYTNDYLKNLRQLSSRDEVRRLKSFGFVVGTMRKGNEDWSEENTSYLRKVMMFKNILTTKKTEKDRGPLNKETIFSPKSGKKLIPLNSKRSDTALYGGYSNVYSAYMTLVRANGKNLLIKIPISIANQIEVGNLKINDYIVNNPAIKKFEKILISKLPLGQLVNEDGNLIYLASNEYRHNAKQLWLSTTDADKIASISENSSDEELLEAYDILTSENVKNRFPFFKKDIDKLSQVRDEFLDSDKRIAVIQTILRGLQIDAAYQAPVKIISKKVSDWHKLQQSGGIKLSDNSEMIYQSATGIFETRVKISDLL

SEQ ID NO: 233 - protein, 1374 aa, Fusobacterium nucleatum
  REGION 1..1374: note = Fusobacterium nucleatum subsp. vincentii ATCC 49256
MKKQKFSDYYLGFDIGTNSVGWCVTDLDYNVLRFNKKDMWGSRLFDEAKTAAERRVQRNSRRRLKRRKWRLNLLEEIFSDEIMKIDSNFFRRLKESSLWLEDKNSKEKFTLFNDDNYKDYDFYKQYPTIFHLRDELIKNPEKKDIRLIYLALHSIFKSRGHFLFEGQNLKEIKNFETLYNNLISFLEDNGINKSIDKDNIEKLEKIICDSGKGLKDKEKEFKGIFNSDKQLVAIFKLSVGSSVSLNDLFDTDEYKKEEVEKEKISFREQIYEDDKPIYYSILGEKIELLDIAKSFYDFMVLNNILSDSNYISEAKVKLYEEHKKDLKNLKYIIRKYNKENYDKLFKDKNENNYPAYIGLNKEKDKKEVVEKSRLKIDDLIKVIKGYLPKPERIEEKDKTIFNEILNKIELKTILPKQRISDNGTLPYQIHEVELEKILENQSKYYDFLNYEENGVSTKDKLLKTFKFRIPYYVGPLNSYHKDKGGNSWIVRKEEGKILPWNFEQKVDIEKSAEEFIKRMTNKCTYLNGEDVIPKDSFLYSEYIILNELNKVQVNDEFLNEENKRKIIDELFKENKKVSEKKFKEYLLVNQIANRTVELKGIKDSFNSNYVSYIKFKDIFGEKLNLDIYKEISEKSILWKCLYGDDKKIFEKKIKNEYGDILNKDEIKKINSFKFNTWGRLSEKLLTGIEFINLETGECYSSVMEALRRTNYNLMELLSSKFTLQESIDNENKEMNEVSYRDLIEESYVSPSLKRAILQTLKIYEEIKKITGRVPKKVFIEMARGGDESMKNKKIPARQEQLKKLYDSCGNDIANFSIDIKEMKNSLSSYDNNSLRQKKLYLYYLQFGKCMYTGREIDLDRLLQNNDTYDIDHIYPRSKVIKDDSFDNLVLVLKNENAEKSNEYPVKKEIQEKMKSFWRFLKEKNFISDEKYKRLTGKDDFELRGFMARQLVNVRQTTKEVGKILQQIEPEIKIVYSKAEIASSFREMFDFIKVRELNDTHHAKDAYLNIVAGNVYNTKFTEKPYRYLQEIKENYDVKKIYNYDIKNAWDKENSLEIVKKNMEKNTVNITRFIKEEKGELFNLNPIKKGETSNEIISIKPKLYDGKDNKLNEKYGYYTSLKAAYFIYVEHEKKNKKVKTFERITRIDSTLIKNEKNLIKYLVSQKKLLNPKIIKKIYKEQTLIIDSYPYTFTGVDSNKKVELKNKKQLYLEKKYEQILKNALKFVEDNQGETEENYKFIYLKKRNNNEKNETIDAVKERYNIEFNEMYDKFLEKLSSKDYKNYINNKLYTNFLNSKEKFKKLKLWEKSLILREFLKIFNKNTYGKYEIKDSQTKEKLFSFPEDTGRIRLGQSSLGNNKELLEESVTGLFVKKIKL

SEQ ID NO: 234 - protein, 1367 aa, Fusobacterium sp.
  REGION 1..1367: note = Fusobacterium sp. 1_1_41FAA
MKKQQFSDYYLGFDIGTNSVGWCVTDFNYNVLRFNKKDMWGSRLFDEAKTAAERRVQRNSRRRLKRRKWRLNLLEEIFSDEILKIDSNFFRRLKESSLWLEDKSSKEKFTLFNDDNYKDYDFYKQYPTIFHLRNELIKNPEKKDIRLVYLALHSIFKSRGHFLFEGQNLKDIKNFETLYNNLMAFLEDNDIYKNIDSSYIGNLENIICDSKKGLKDKEKEFKEIFNSDKQLVGFFKLSVGSSVSLNDLFDTDEYKKGEVEKEKISFREQIYEDDKPIYYSILGEKIEFLDIAKSFYDFMVLNNILADSQYISEAKVKLYDEHKRDLKNLKYIIRKYNKENYDKLFKDKNESNYSAYIGLNKEKGKKEVIEKSRLKIDDFAKIIKGYLPKAEKIDEKDRSIFNEILDKIELKTILPKQRISDNGTLPYQIHEAELEKILENQAKYYDFLNHEENGISTKDKLLMTFKFRIPYYVGPLNSYHKNKGGNSWIVRKEEGKILPWNFEQKVDIEKSAEEFIKRMTNKCTYLNGEDVIPKDSFLYSEYIILNELNKVQVNDEFLNKEIKKKIIEDLFKKSKKISEKNFREYLLVNQITNKTVELKGVKDAFNSNYVSYIKFKDIFGDKLNLDIYKEISEKSILWKCLYGDDKKIFEKKIKSVYGDILTKDEIKKINSFKFNTWGRLSEKLLTEIEFIDLETGECYSSVMDALRRTNYNLMELLSSKFTLQENIDNENKEVSEFSYRDLVEESYVSPSLKRAILQTLKIYEEIRKITGRIPKKVFIEMARGGDETMKNKKIPARQEQLKKLYDSCGKDISNFSIDIKEMKNSLNSYDNNSLRQKKLYLYYLQFGKCMYTGKEIDLNRLLQNNDTYDIDHIYPRSKVIKDDSFDNLVLVLKNENAEKSNEYPLKKEIQEKMKSFWKFLKEKNFISDEKYKRLTGKDEFELRGFMARQLVNVRQTTKEAGKILQQIEPEIKIVYSKAEIASSFREMFDFIKVRELNDTHHAKDAYLNIVAGNVYNTKFTEKPYRYLQEIKENYDVKKIYNYDIKNAWDKEKSLEIVKKNMEKNTVNITRFIKEEKGQLFDLNPIRKGETSNEIIAIKPKFYEGSTEKLNEKYGYYKSLNPAYFIYVEHKEKNKIIRSFERVNLVDVNKIKDEKSLIKYLIENKGLIEPKVIKKVYKRQVILINNFPYSIVALDSNKLMDFENLKPLFLERKYEKILKNAIKFLEDNQGKTEEYYKFLYLKKKDRNEKNETIDSVKERYNIEFNEMYDKFLEKLDSKDYKNYINNKKYSELVNVKEKFIKLNLFDKAFTLKSFLDLFNRKTMADFSKVGLTKYLGKIQKISSNVLSKNELHLLEESVTGLFVKKIKL

SEQ ID NO: 235 - protein, 1367 aa, Fusobacterium sp.
  REGION 1..1367: note = Fusobacterium sp. 3_1_27
MKKQKFSDYYLGFDIGTNSVGWCVTDLDYNVLRFNKKDMWGSRLFDEAKTAAERRVQRNSRRRLKRRKWRLNLLEEIFSDEIMKIDSNFFRRLKESSLWLEDKNSKEKFTLFNDDNYKDYDFYKQYPTIFHLRDELIKNPEKKDIRLIYLALHSIFKSRGHFLFEGQNLKEIKNFETLYNNLISFLEDNGINKSIDKDNIKKLEKIICDSGKGLKDKEKEFKEIFNSDKQLVAIFKLSVGSSVSLNDLFDTDEYKKEEVEKEKISFREQIYEDDKPIYYSILGEKIELLDIAKSFYDFMVLNNILSDSNYISEAKVKLYEEHKKDLKNLKYIIRKYNKENYDKLFKDKNENNYPAYIGLNKEKGKKEVVEKSGLKIDDLIKVIKGYLPKPERIEEKDKIIFNEILNKIELKTILPKQRISDNGTLPYQIHEVELEKILENQSKYYDFLNYEENGVSTKDKLLKTFKFRIPYYVGPLNSYHKDKGGNSWIVRKEEGKILPWNFEQKVDIEKSAEEFIKRMTNKCTYLNGEDVIPKDSFLYSEYIILNELNKVQVNDEFLNEENKRKIIDELFKENKKVSEKKFKEYLLVNQIANRTVELKGIKDSFNSNYVSYIKFKDIFGEKLNLDIYKEISEKSILWKCLYGDDKKIFEKKIKNEYGDILNKDEIKKINSFKFNTWGRLSEKLLTGIEFINLETGECYSSVMEALRRTNYNLMELLSSKFTLQESIDNGNKEMNEVSYRDLIEESYVSPSLKRAILQTLKIYEEIKKITGRVPKKVFIEMARGGDETMKNKKIPARQEQLKKLYDSCGNDIANFSIDIKKMKSSLSSYDNNSLRQKKLYLYYLQFGKCMYTGREIDLDRLLQNNDTYDIDHIYPRSKVIKDDSFDNLVLVLKNENAEKSNEYPVKKEIQEKMKSFWRFLKEKNFISDEKYKRLTGKDDFELRGFMARQLVNVRQTTKEVGKILQQIEPEIKIVYSKAEIASSFREMFDFIKVRELNDTHHAKDAYLNIVAGNVYNTKFTEKPYRYLQEIKENYDVKKIYNYDIKNAWDKENSLEIVKKNMKKNTVNITRFIKEEKGQLFDLNPIKKGETSNEIISIKPKLYNGKEEKLNEKYGYYKSLNPAYFLYVEHKEKNKRIKSFERVNLVDVNNIKDEKSLVKYLIENKKLVEPRLIKKVYKRQVILINDYPYSIVALDSNKLMDFENLKPLFLENKYEKILKNVIKFLEDNQGKSEENYKFIYLKKKDRYEKNETLESVKDRYNLEFNEMYDKFLEKLDSKDYKNYINNKKYKNLLDVKEKFIKLNLFDKAFTLKSFLDLFNRKTMADFSKVGLTKYLGKIQKISSNVLSKNELYLLEESVTGLFVKKIKL

SEQ ID NO: 236 - protein, 1367 aa, Fusobacterium sp.
  REGION 1..1367: note = Fusobacterium sp. 3_1_36A2
MKKQKFSDYYLGFDIGTNSVGWCVTDLDYNVLRFNKKDMWGSRLFDEAKTAAERRVQRNSRRRLKRRKWRLNLLEEIFSDEIMKIDSNFFRRLKESSLWLEDKNSKEKFTLFNDDNYKDYDFYKQYPTIFHLRDELIKNPEKKDIRLIYLALHSIFKSRGHFLFEGQNLKEIKNFETLYNNLISFLEDNGINKSIDKDNIKKLEKIICDSGKGLKDKEKEFKEIFNSDKQLVAIFKLSVGSSVSLNDLFDTDEYKKEEVEKEKISFREQIYEDDKPIYYSILGEKIELLDIAKSFYDFMVLNNILSDSNYISEAKVKLYEEHKKDLKNLKYIIRKYNKENYDKLFKDKNENNYPAYIGLNKEKGKKEVVEKSGLKIDDLIKVIKGYLPKPERIEEKDKTIFNEILNKIELKTILPKQRISDNGTLPYQIHEVELEKILENQSKYYDFLNYEENGVSTKDKLLKTFKFRIPYYVGPLNSYHKDKGGNSWIVRKEEGKILPWNFEQKVDIEKSAEEFIKRMTNKCTYLNGEDVIPKDSFLYSEYIILNELNKVQVNDEFLNEENKRKIIDELFKENKKVSEKKFKEYLLVNQIANRTVELKGIKDSFNSNYVSYIKFKDIFGEKLNLDIYKEISEKSILWKCLYGDDKKIFEKKIKNEYGDILNKDEIKKINSFKFNTWGRLSEKLLTGIEFINLETGECYSSVMEALRRTNYNLMELLSSKFTLQESIDNGNKEMNEVSYRDLIEESYVSPSLKRAILQTLKIYEEIKKITGRVPKKVFIEMARGGDETMKNKKIPARQEQLKKLYDSCGNDIANFSIDIKKMKSSLSSYDNNSLRQKKLYLYYLQFGKCMYTGREIDLDRLLQNNDTYDIDHIYPRSKVIKDDSFDNLVLVLKNENAEKSNEYPVKKEIQEKMKSFWRFLKEKNFISDEKYKRLTGKDDFELRGFMARQLVNVRQTTKEVGKILQQIEPEIKIVYSKAEIASSFREMFDFIKVRELNDTHHAKDAYLNIVAGNVYNTKFTEKPYRYLQEIKENYDVKKIYNYDIKNAWDKENSLEIVKKNMKKNTVNITRFIKEEKGQLFDLNPIKKGETSNEIISIKPKLYNGKEEKLNEKYGYYKSLNPAYFLYVEHKEKNKRIKSFERVNLVDVNNIKDEKSLVKYLIENKKLVEPRLIKKVYKRQVILINDYPYSIVALDSNKLMDFENLKPLFLENKYEKILKNVIKFLEDNQGKSEENYKFIYLKKKDRYEKNETLESVKDRYNLEFNEMYDKFLEKLDSKDYKNYINNKKYKNLLDVKEKFIKLNLFDKAFTLKSFLDLFNRKTMADFSKVGLTKYLGKIQKISSNVLSKNELYLLEESVTGLFVKKIKL

SEQ ID NO: 237 - protein, 1391 aa, Galbibacter sp.
  REGION 1..1391: note = Galbibacter sp. ck-I2-15
MKTILGLDLGTNSIGWALVKEAENENEVSDIIKLGVRVNPLTVDELTNFEGGKAYSNNAERTLKRGARRNLQRYKLRRENLIEILLKNGLINKDTALTEVGKETTHQTLKLRSKSANEKVSLEDLAKILLSINKKRGYKSSRKVNAEDDGVAIDGMEVAKLLYDENMTPGEYVLRLLESGKKHLPDFYRSDLQEEFNLVWKKQSEFYPLILTKELFFELHGKNKSQTWAICKEPLGIVGVKLKGSAKEQKFARYRLRKEALTQQIELEHLAIVLQDINNDSNKSSGYLGAISDRSKELFFNKETVGQYQYKQLQKDPNTSLKNQVFYRQDYLDEFEVIWRNQAKFYPQLTNELKQEIRDVVIFYQRKLKSQKNLISFCQFESTQQNYVEKETGKTKIRTIGRRVIPRSSPLFQEFKIWQSLNNLKFVNSESNQIIQFIELEDDVKKVVFDELNLRGDLKPNQVLKILSKYMKIGKLTQWKCNLEEIEGNRTNSALYNVFQMIAEEEGYGFNWGKKSALEIKSELKAIFSSIGINDSILDFDFSKKLDQQLSYQLWHLLYSAEEGNSKITEEDKFTYGNTGVALKKKLHLKFGFKPEYSTLISNLRFTSDYGNLSSKAISKILPFLRDGSDYSKACQYAGYNHSNSLSADELDNRELKPKLELLKKNSLRNPVVEKILNQMVNVVNQVIDNYGKPDEVRIELARELKKSAKERSQMTKNISDATRRNAEIKKYLSKEFGIPNPTKGDVIRYRLWEELASNGYKDLFRDKYIPKEKLFSNEIDIEHIIPKALLFDDSFSNKTLAFKVDNLKKADRTAFDFMSTDFSKDVDSYIGRIETLHKDGKISSSKYKKLMIPKSKLVDGFIERDLRNTQYIAKQARKMLLEVFKTVVPTTGKITDKLREDWDLINVMKELNFPKYKALGLTKKIERFDVGSEKIKSINVIEGWSKRNDHRHHAMDALAVAFTTHNHIQYLNYLNARKDIHHEMHGTIKSIENQIIGKDVMGKRRFIPPISDLRMKAKLQIESILISFKNKNKVVTWSVNKTKLKGKDNYNKRRQLTPRGQLHKETVYGKIKLIDPKPLKLNNKFTLVRASMIVDKVHREIVLQHLSKYDNNSEVAFDSKTIKIDPILIEGIGLKEVVCYEDVFKIRKKISGDNFKNEKHLEKVIDEKVKQILKDRVIKFQGNFKEAFSNLEENPIWLNKSKGIAVKSVAIKGVNNAESLHEGKDHFGDQILDKNKKQIPVDFVSTGNNHHVGIYEDKDGNLQERVVSFFEAVTRVNEGLPIIDKTYNSDIGWKFKFTMKQNEMFVFPSDDFDPNEFDLTDGKNAAKISPNLYRVQKIATKNYMFRHHLETVVTNDLEFTYKSIRSTGWLRNLVKVRINHLGEIVYVGEY

SEQ ID NO: 238 - protein, 1025 aa, unidentified
  REGION 1..1025: note = Description of Unknown: gamma proteobacterium HdN1 polypeptide
MGGYMPQLMRYRLALDIGSTSIGWAMIRLSMQNEPIAIIRMGVRIFSDGRNPKDGSSLAVTRRVARQMRRRRDRLLKRKTRLLNALVQKKFFPEDADARKALVVLNPYELRKEGLYRQLSGPEFGRALFHISQRRGFLSNRKTDKKDNDSSVLKKAIVDLRQQLEVENCQTIGEWLFKQQQSGKSVRARLRGKTQKDKAYDFYIDRAMIAHEFDTLWVSQAKYDPLLFNEDARAILRDILLYQRPLKPVKPGRCTLIPDESRAPLALPLTQQARIYQELNHLRITTPALGAQALTVAQRNTIAALLEKSDVTFVKIAKALGLTSTTEFNLQDIKRDRLKGNATAIILARNQYFGRRWHDFNADLQNLIVDKLVNEGSETALIEWLKANTDVDESAAERVSGVTLPEGYGSLSVAALRRLLPALKEDVVVYSEAVKRAGFDSHSALSLIEQTGELYQELPYYGEVLQRHVGFGSGDPNDSPERRFGKIANPTVHIGLNELRKIINALIKRYGNPAEVVVELARDLKLSREKRKEIQEEQKQRQDRNEKRIKDACEILGIDPLVIDRGKRREISQKMQLWDELNPKDAANRRCPYTGDQISIEKLLSAEVEIEHILPFSKTLDDSLNNKTVAMRRANRDKGNRTPYEAFGESLNPDYDYDAILQRASLMPREKRKRFASDGYQQWLRDDKDFLSRALNDTAYLSRIAKEYLTLICPPNSVRAIPGRMTAQLRAMFGLNRLLSEGGIKNREDHRHHAIDAAVIGVTDQGLLQKFSRASARTRELQLSRLVDDMPLPWDTYREHVTRALEHLVVSHKPDHGYQGKMHEDTAWGLRDNGQVTRRVRSEDGGPRQRLLENKNVVKINSTRDFSRHGIDEQGQVNAYKGYVGGSNYCIEIWIDEKGKWNSDVVSTFQAYQIVRELGEKAAWQKLRNPLLSLSAKPLVMRLIIDDVVKMQIAGQNKIMRVVKIAQNGQIFFAEHNEANVDARDKDKNNPFKYISKTAGSLQKAGGIHMAISPIGDARPVRYGR

SEQ ID NO: 239 - protein, 1397 aa, unidentified
  REGION 1..1397: note = Description of Unknown: gamma proteobacterium HTCC5015 polypeptide
MTKNYISPIAIDLGAKFTGVALYQYLEGADCTQEVAKGLLVDDRGNVTWSQEGRRGKRHQVRGYKRRKMAKRLLWLILDSEYGIKREEVTEPLLKFINGLLNRRGYTYISEEVDEESMNVSPLPFSEMMPDYFNSSAPLLEQLAKLLSDKNKLVRFRAEGKIPSNKNEFKKLLDTALDGKYKDEKKELSEAWGNILIASENVLKSTVDGHKSRSEYLANIKEDIKSNEELEKQISSKEIDGFYNLVGHLSNFQLRLLRKYFNDPNMSGVSYWDEKRLEKYFYQWVQGWHTKGGTDEAEKKNIILKTKGAPLLKTLKSLSADLTIPPYEDQNNRRPPKCQSVLLSDEKLTMHYPKWKEWVGQLVKQNDNAYLNENVTLANALHRIVERSRSIDPYQLRLLISITDAEKRNDLAGYKRLKLSLGSEVDEFLLLVKNIVDETKEAREGLWFETENKLFFKCGKTPPRKEKLKSTLLSAVLGKNLSDDEQSSFIEEFWKSGTPKIERRNVRGWCRLASQVQKTYGVYLKEYGLQQLHKLEAGKKLDDKPLALLYKNSGLIASKIGEALNIEPDEVSRFASPHSLAQIFNIIEGDVAGFNKTCRACTYENIWRMQEEKVESLLTNQLLSEIHGERKVPLKSAMCTRLSADSTRPFDGQMASIIEHIARKIAQHKIAQINDVPKEFSIDIPIIIESNQFSFTAELEEIKRGRGSAKAKKAKELGEKSKAGWVSKTERIKTSSEGICPYTGAPLGGSGEIDHIIPRSLTGRTKKTVFNSEANLIYCSSKGNHDKGNRVYVIEQLNDKYLKKQFSTSDVNLIKKKIKTTIQRFTEGGEKLRSFSELSREDQKAFRHALFVPELKSEVTSLLAVKNITRVNGTQAWLAKKIASLLAEHLDKQGRDYTLSAHQIDPWSVSKQRKMLASAEPIWAKKDPQPAASHVVDAVCTFLEALEQPHTASRLKTISSTSFEKTGWRSALIPDLIKVDALDRRPKYRRYNIGSTSLFKDGIYAERFLPILIDENGLMAGYDIDNSLKAKGADVVFESLSPFLLFKGEEVGAQSLSDWQERIDGRYLYMSIDKVKAFDYLQEKVGEKDIAAELLNSIHFTQRKTELRAKFSDDSGKKMKTLDAIRKSLKLTVTVNEIGKRKEKCGFSGTIGIPAKSAWENLLDEPLLETYWGTKMPPQEIWEKVYRKHFPRNIPNQAHRKVRKDFSLPVVDSVSGGFRVKRKTPNGYNYQLLAIDGYSAVGFKKEGDNVDFKSPALVPQIAESKSVTPISSELVHLDKNEIVYFDEWRKIDISDSDLKQFVSSLELAPGSQNRFYIRFTVDEDQFERHFKSALRVNGIQDLDTVNKTFDWNREIPSLLIPPRSNLFLLETGQKITFEYIANGANAEVKKAYSLRRA

SEQ ID NO: 240 - protein, 1186 aa, Gardnerella vaginalis
  REGION 1..1186: note = Gardnerella vaginalis 1500E
MEGNISYAIGIDVGLNSVGLAAIRLDNNGEPIRILKAMSVIHDAGIDPNGAKESDTRKAISGVARRVRRLYRQRRRRLQKLDFLLHSLGFPVVENKDLDFSDSFIPWIFRAKLADEYIADEKQRKQMLSVAIRHIARHRGWRNPYQSIKSMTQETEYSEFYNELLKNIEKFAPGVGCEGSTPAQLVRDYLLLQQGKASRRLRITTDEKRKNHPNSLNPILPRKLMQSDNMLEILNIFNVQHIDDKYVREQIINAVFYAKSPRGSAENRVGKDAITGKGKRALKASLAFQKYRIISTISNLRIRENSKERCLTIEEKQSVYKLLTTSTDESSKEKSAEAPLYTWIDVADCLGIERYKLRGVGSQIGDGESVGNRPPMLNSELAIIYANNKSLGKSLLTWWLDANRTQEDKEALIEILSNTVDIEAIHDNPEYQDKYGSAIAFIDSMDETEIAALENISLPDGRAAYSLETLDKLNKQMLETDDDLFEARKKLFNLPNNWRPSEAPIAEPTGNPSVDRVLKIVHRFLISAKNRWGNPERINIEHVRSGFKSKKMANSYKELLDKRTKGKENLKAMMRNSLHLGMSDSISDADIRRYEAVQRQNGQCLYCGSEITYHTCELDHIVPRKGPGSTNTRENLVATCSLCNAQKCNTPFSTWCEQSTYCKNHDISVDSAINRVRAFIFPPNSYDKRGANQFKKEVIARLKQKVGDEAFDNRSIESVAWMANELHRRIDWYYNSQNYQTNNGISDITNKAQTNVGVYAGSLTAIARRMSGIDGKLEFFDGRRKTRFDRRHHAVDASVIAMMTPGIAQILAIKCNLRETQLLQGNKVVPGGIDWKEYPTANDQGYQQYANWSVRMNALLKLLNEEMRADRIAVVNSIRLRYNNSSVHQYKVNALLKLHVGDEIDSGTIRRSSTPALYCALTRNPDYDVNNGLPENPNRAILLHDKKLNADDSITFFKAQAVQLFVREGSAEIGSSTHHLRIYEYFKKLKSGKIKKSYGMIRVFQNDLHRHIHEDLFSCDLPEQSISMRYADTEVAHAVQTGNSNYLGYLVPGDEIIVDFSHVKLSGNIGTFVEFLNKIGANCAAYNHWVVVGTDTEKVLILKPSMISSEGIDKLYSNCKRNNFDYSSYEKSINEILVGKGWRVSVNVLAKYNAETIRRNALGEVRWTSRSHLPISWSWNTGENRE

SEQ ID NO: 241 - protein, 1186 aa, Gardnerella vaginalis
  REGION 1..1186: note = Gardnerella vaginalis 284V
MEGNISYAIGIDVGLNSVGLAAIRLDDYGEPIRILKAMSVIHDAGIDPNGAKESDTRKAISGVARRVRRLYRQRRRRLQKLDFLLQSLGWPVVENKDLDFSDSFIPWIFRAKLADEYIADEEQRKQMLSVAIRHIARHRGWRNPYQSIKSMMQETEYSEFYNELLKNIEKLAPGVGCEGSTPAQLVRDYLLSQQGKASRRLRITTGGRRKNHPHSLDPVLPRKLMQSDNMLEILNIFNVQHIDDKYVREQIINAVFYAESPRGSAENRVGKDAITGKGKRALKASLAFQKYRIISTISNLRIRENSKERCLTIEEKQNVYKLLTTSIDKSSKRKSAEAPLYTWIDVADCLGIERYKLRGVGSQIGDGESVGNRPPMLNSELAILYANNKSLGQSLITWWLASNRTQEDKEALIEILSNTVDIEAIHDNPEYQDKYGSAIAFIDSMNETEIAALENISLPDGRAAYSLETLDELNKQMLETDDDLFEARKKLFNLPNNWRPAEAPIAEPTGNPSVDRVLKIVHRFLISAKNRWGNPERINIEHVRSGFQSKKMANSYKELLDKRTEGKENLKAMMRNSLHLGTSDSISDADIRRYEAVQRQNGQCLYCGSEITYHTCELDHIVPRKGPGSTNTRENLVATCSSCNAQKCNTPFATWCEQSTYCKNHDISADSAINRVRAFIFPPNSYDKRGANQFKKEVIARLKQKVGDEAFDNRSIESVAWMANELHRRIDWYYNSQNYQTNNGISDISNKAQTNVGVYAGSLTAIARRMSGIDGKLEFFDGRRKTRFDRRHHAVDASVIAMMTPGIAQILAIKCNLRETQLLQGNKVVPGGIDWKEYPTANDQGYQQYANWSVRMNALLKLLNEEMRADRIAVVNSIRLRYSNSSVHQYEVNALLKLHVGDEIDSETIRRSSTPALYCALTRNPDYDVNNGFPENPGRTILLHNKKLNADDSITFFKAQAVQLFVREGSAKIGNSIHHLRIYEYFEKLKSGKIKKSYGMIRVFQNDLHRHIHEDLFSCDLPEQSISMRYADTKVAHAVQTGNANYLGYLVPGDEIIVDFSHITLSENIGKFVEFLNKIGADCTAYRHWVVVGTDTEKVLILKPSMISSEGIDKLYSNCERNNFDYSSYEKSINEILAGKGWRVSVNVLAQYKAATIRRNALGEVRWASRSHLPISWSWDTGENRE

SEQ ID NO: 242 - protein, 1186 aa, Gardnerella vaginalis
  REGION 1..1186: note = Gardnerella vaginalis 5-1
MEGNISYAIGIDVGLNSVGLAAIRLDNNGEPIRILKAMSVIHDAGIDPNGAKESDTRKAISGVARRVRRLYRQRRRRLQKLDFLLHSLGFPVVENKDLDFSDSFTPWIFRAKLADEYIADEKQRKQMLSVAIRHIARHRGWRNPYQSIKSMTQETEYSEFYNELLKNIEKFAPGVSCEGSTPAQLVRDYLLSQQGKASRRLRITTDDRRKNHPNSLDPVLPRKLMQSDNMLEILNIFNVQHIDNKYVREQIINAVFYAKSPRGSAENRVGKDAITGKGKRALKASLAFQKYRIISTISNLRIRENSKERCLTIEEKQSVYKLLTTSTDEYSKEKSAEAPLYTWIDVADCLGIERYKLRGVGSQIEDGESVGNRPPMLNSELAILYANAKSLKQSLITWWLAANRTQEDKEAFIEILSNTVDIEAIHDNPEYQDKYGSVIAFIDSMDETEIAALENISLPNGRAAYSLETLDKLNKQMLETDDDLFEARKKLFNLPNNWRPSEAPIAEPTGNPSVDRVLKIVHRFLISAKNRWGNPERINIEHVRSGFQSKKMANSYKKLLDKRTEGKENLKAMMRNSLHLGTSDSISDADIRRYEAVQRQNGQCLYCGSEITYHTCELDHIVPRKGPGSTNTRENLVATCSSCNAQKCNTPFATWCEESTYCKNHDISVDSAINRVRAFIFPPNSYDKRGASQFKKEVIARLKQKVGDEAFDNRSIESVAWMANELHRRIDWYYNSQNYQTNNGISDITNKAQTNVGVYAGSLTAIARRMSGIDGKLEFFDGRRKTRFDRRHHAVDASVIAMMTPGIAQILAIKCNLRETQLLQGNKVVPGGIDWKEYPTANDQGYQQYANWSVRMNALLELLNEEMRADRIAVVNSIRLRYSNSSVHKDDVHALLKLHVGDEIDSETIRRASTPALYCALTRNPDYDVNNGLPENTDRTILLHDKKLNADDSITFFKSKAAQLFVREGSVEIGNSIHHLRIYEYFEKLKSGKVKKSYGMIRVFQDDLHRYIHEDLFSCDLPEQSISMRYADTKVAHAVQTGNANYLGYLVPGDEIIVDFSHVKLSGYIGEFVEFLNKIGANCAAYKHWVVAGTDDKTTLILKPSMISSEGIDKLYSNCERNNFDYASYEKSIDKILVDKGWRVSVNVLDQYKAATIRRNALGEPRWASRSHLPISWSWDTGENRE

SEQ ID NO: 243 - protein, 1392 aa, Gemella haemolysans
  REGION 1..1392: note = Gemella haemolysans ATCC 10379
MANKTWYLGLDIGSASVGWAATDTGYKIIRKNKKRLWGVRLFEEAKTAEDRRGYRSSRRRLARRKWRLNLLEELFTSEVKKVDENFFLRLKESQYHYEDKTHKVPYAIFNDKDYTDKDYYKDYPTIYHLRSKLMTEENPDIRKVFLAIHHIIKNRGHFLLQGQSFKDGNLNNLIKELLELDILHVGFEVTEEVVDKIADISLEKKTSKDKLNDIKELYPKEKQLLEVFRLIFGGKTSLDKLFAIDEYKELDAAIKSVSFKEKIYEEVRHDYEQVLSNYIELLDLAKLVYDSIILSDIKKEGKTLSESKVELFEKHRDDLLKLKNLVKNDSKLSEDKKVELYALIFKEDKDKGTNYVNYIRKSEEGKGCNYEDFKKFLVKELAKLEESSVKTEIIKDLELEQFLPLQRTKDNSVVPYQIHKEELVKILDNAARYHSFLNEKDESGYNVREKVIQLLEFRIPYYVGPLNSSKKAKEGGFAWSVRNTGYENTPVTPWNYSKVIDESASAEKFITNLTNKCTYLKGEDVLPKSSLLYSEFALLNELNALKYDGNRISLEARNTIIEKLFKQQGKKVTKTSIKNLLKAEGYIDGKGEITGIDITVKNDLKSYRDFKKILGNKFNSEHVENIILWITLYGESRKLIKAKIESVYGEVYSKDEITKMSRLVYKDWGRFSRKLLTELVSKKLYNEETGECLNIIGAMRQNNILFMELLADRFDYSKQIVEFNKELQEDVTEIAPEILDDLYVSPAVKRSIWQTVRIVEELKKIIGCAPAKIFVETTRSNQEKKKPTDSRKKQLELAYKAVKKDVKELEKEIGTINFDVLNDRLSSVEPSKLKAKKLYLYYTQLGRCMYSEEPINISELFDNNKYDIDHIYPQSKIKDDSFTNTVLVKRESNAAKTDRYPLGSDIQTPSNRRFWKFLKEKGLISDEKYNRLVRTEEFSDEELSGFIARQLVETSQSVKAVASILGELNPETSICYSKAENVSSFRQNFGKIKKGDRDSKNNDQLIKVREINDYHHAKDAYLNVVVGNVYDTKFTRNVFNFIKDKKDGRKYSLNKVFYENVSDSKTVAWEMDKTIHQVEKVMNNNNIMVTRRTSEQKGGLFDATVYKAKVAAKAKDGVYYPLKTSNSVVKDVAKYGGYTSIGIAYYSIFEYTIVNKKGEEKITRIIPIPIYISQNIKDSTALIEFGKSQIFCRAYEKIKDFKLLYRKLCIGSKININNYQYYIGGKSDERFYYDSAIQVTLDKKSEKYLKILSKYQNWKKENKDGELWENITKENNIELYNKLVEKMNSEIFTKKKSNKYNELNSEEIRNNFIKISVEEQAKVLLEILNLLTNKKSIFDLKSIDIKAARGKISFNLTSLIQFSIIEQSITGFYEKEITIIGDKGNDMENNNS

SEQ ID NO: 244 - protein, 1385 aa, Gemella morbillorum
  REGION 1..1385: note = Gemella morbillorum M424
MKNKTWYLGLGVGPTSIGWAATDSNYKLLRKNKKRLWGVRLFEEAKTAVDRRTFRAERRRLARRKWRISLLEELFAKEVSKNDPNFFLRLKESKYHFEDKSLMNEYILFNDKDYTDKDYYKEYPTIYHLRLSLTTEENPDIRKVYLAVHSMLKNRGHFLLQGQSFNDSNIDSVIKELLELETVKINFEVTDEVIHSLKKIALEKKNLSDKNNDVKKLYPKEKQLQEIFKLVFGGKTSLDKLYDIEEYKELDNSVKSISFKEKVYEEVRPDYEQILSNYIELLDLAKLVYDSIVLADIKKEGKTISESKVELYNKHKDDLANLKKLVKIDSKLSEDKKKEVYFTIFKEDKEKGTNYVNYTHRSQEGKSCSYEDFKKFLKKELEKLEDSPTKTTILEELDLETFLPLQRTKDNSVVPYQIHKEELVKILDNAAKYHSFLAEKDDSGYSTREKVVQLFEFRIPYYIGPLNAHHNTENGGYSWAIRKKGMESVPVTPWNFKDVIDESASAEAFVNNLKNKCAYLSGEDVLPKNSLLYSEYALLNELNALRYEGNRISVEARDVIVTKLFKEQGKKVTKKTIKELLKTEGFIDGKGEIVGIDNIVKNDLKSYRDFKKILADKFDKERVENIILWITLYGESRKLIKEKITKVYGDFYTVDEIEKMSRLTYKDWGILSRKLLTELVSEKLYNEETGECLNIIGAMRQGTILFMELLADKFDYMSQIKNHNKENKDDITEITPDILENLHASPAVKRSIWQTVRIVEELKTIIGCVPTKIFIETTKRNNAPYKVPTLNRNDLVTKYKTIREHEIFELEKELKNTLDFTLNKNRLINEEPSKLKATKLYLYYTQLGRCMYTGKKIDLGELFDNNNKYDIDHIYPQSKVKDGSFNNIVLVTKASNDMKADVFPLKSKFQTKENKIFWRFLKEKKLITEEKYNRLVRTEEFSNGELTGFITRQLVETSQAIKVISNVLRELNPETTICYSKAENVSSFRQSFGKIKEANRKAENNEKLIRVQEINDYYNAKDAYLSIVVGNVYDVKFTRNVHNFIKNNKDARRYSLNGLFYTDVKNANTIAWEMDKTVHVVEKTMNNNNILITRRTSEQKGALYDATLYKAKVAEKAKEGTYYPLKTTDSKIKDVGKYGGFTKIKIAYYSIFEYTLDGKKGKQKITRIVPIPIYISQNIKDDKALLEYAQTRLPGKDLKIKYRKLCIGSLVKINNFNYYIGGKTNNNFTFDSAVQVILDKDSESYIKELAKYLNWKKENKDGKLWESITEDKNIQLYDSLVKKMNTGIFIRKTPNKYTELLTLEVKNKFINIDIDEQVKLLLEILNLLTNKKFTSKLNEIGITASRGVCSFNLSNQSQFSIIEQSVTGVYEKEKLIIEKKKEGIL

SEQ ID NO: 245 - protein, 1003 aa, Gluconacetobacter diazotrophicus
MIDESLTFGIDLGIGSCGWAVLRRPSAFGRKGVIEGMGSWCFDVPETSKERTPTNQIRRSNRLLRRVIRRRRNRMAAIRRLLHAAGLLPSTDSDALKRPGHDPWELRARGLDKPLKPVEFAVVLGHIAKRRGFKSAAKRKATNISSDDKKMLTALEATRERLGRYRTVGEMFARDPDFASRRRNREGKYDRTTARDDLEHEVHALFAAQRRLGQGFASPELEEAFTASAFHQRPMQDSERLVGFCPFERTEKRAAKLTPSFERFRLLARLLNLRITTPDGERPLTVDEIALVTRDLGKTAKLSIKRVRTLIGLEDNQRFTTIRPEDEDRDIVARTGGAMTGTATLRKALGEALWTDMQERPEQLDAIVQVLSFFEANETITEKLREIGLTLAVLDVLLTALDAGVFAKFKGAAHISTKAARNLLPHLEQGRRYDEACTMAGYDHAASRLSHHGQIVAKTQFNALVTEIGESIANPIARKALIEGLKQIWAMRNHWGLPGSIHVELARDVGNSIEKRREIEKHIEKNTALRARERREVHDLLDLEDVNGDTLLRYRLWKEQGGKCLYTGKAIHIRQIAATDNSVQVDHILPWSRFGDDSFNNKTLCLASANQQKKRSTPYEWLSGQTGDAWNAFVQRIETNKELRGFKKRNYLLKNAKEAEEKFRSRNLNDTRYAARLFAEAVKLLYAFGERQEKGGNRRVFTRPGALTAALRQAWGVESLKKQDGKRINDDRHHALDALTVAAVDEAEIQRLTKSFHEWEQQGLGRPLRRVEPPWESFRADVEATYPEVFVARPERRRARGEGHAATIRQVKERECTPIVFERKAVSSLKEADLERIKDGERNEAIVEAIRSWIATGRPADAPPRSPRGDIITKIRLATTIKAAVPVRGGTAGRGEMVRADVFSKPNRRGKDEWYLVPVYPHQIMNRKAWPKPPMRSIVANKDEDEWTEVGPEHQFRFSLYPRSNIEIIRPSGEVIEGYFVGLHRNTGALIPTPVGPDSYVIA

SEQ ID NO: 246 - protein, 1050 aa, Gluconacetobacter diazotrophicus
MGENMIDESLTFGIDLGIGSCGWAVLRRPSAFGRKGVIEGMGSWCFDVPETSKERTPTNQIRRSNRLLRRVIRRRRNRMAAIRRLLHAAGLLPSTDSDALKRPGHDPWELRARGLDKPLKPVEFAVVLGHIAKRRGFKSAAKRKATNISSDDKKMLTALEATRERLGRYRTVGEMFARDPDFASRRRNREGKYDRTTARDDLEHEVHALFAAQRRLGQGFASPELEEAFTASAFHQRPMQDSERLVGFCPFERTEKRAAKLTPSFERFRLLARLLNLRITTPDGERPLTVDEIALVTRDLGKTAKLSIKRVRTLIGLEDNQRFTTIRPEDEDRDIVARTGGAMTGTATLRKALGEALWTDMQERPEQLDAIVQVLSFFEANETITEKLREIGLTLAVLDVLLTALDAGVFAKFKGAAHISTKAARNLLPHLEQGRRYDEACTMAGYDHAASRLSHHGQIVAKTQFNALVTEIGESIANPIARKALIEGLKQIWAMRNHWGLPGSIHVELARDVGNSIEKRREIEKHIEKNTALRARERREVHDLLDLEDVNGDTLLRYRLWKEQGGKCLYTGKAIHIRQIAATDNSVQVDHILPWSRFGDDSFNNKTLCLASANQQKKRSTPYEWLSGQTGDAWNAFVQRIETNKELRGFKKRNYLLKNAKEAEEKFRSRNLNDTRYAARLFAEAVKLLYAFGERQEKGGNRRVFTRPGALTAALRQAWGVESLKKQDGKRINDDRHHALDALTVAAVDEAEIQRLTKSFHEWEQQGLGRPLRRVEPPWESFRADVEATYPEVFVARPERRRARGEGHAATIRQVKERECTPIVFERKAVSSLKEADLERIKDGERNEAIVEAIRSWIATGRPADAPPRSPRGDIITKIRLATTIKAAVPVRGGTAGRGEMVRADVFSKPNRRGKDEWYLVPVYPHQIMNRKAWPKPPMRSIVANKDEDEWTEVGPEHQFRFSLYPRSNIEIIRPSGEVIEGYFVGLHRNTGALTISAHNDPKSIHSGIGTKTLLAISKYQVDRFGRKSPVRKEVRTWHGEACISPTPPG

SEQ ID NO: 247 - protein, 1371 aa, Gordonibacter pamelaeae
  REGION 1..1371: note = Gordonibacter pamelaeae 7-10-1-b
MNLRNVESYQVGLDIGTGSVGWAVLDDNGDLCRFKGKPTWGSRVFPTAETAAEARVHRGQRRRYDRRRQRIDLLQRFFADEVAKVDPEFFIRLNQARLHPENRDPAHADYRWPLFNGSNFTEKDYYRQFPTIYHLRAHLLKSDEPADIRLVYLALHNIVKHRGNFLHQDNPSLSARNANVGDAVEALCLALDEWCGAHDVECACDEAALAEALGDASLRPGEKRERAEAALGVEKAHKKLAKAVSSAVVGYAAEFGHVFFAESEGSKFALSNDEKVEAYVCPDEGRDLFDAMRAVHSSYVLMGILSEAQGELLSVCKVGEYERYKRDLETLKSLVRAYGPERYDEFFCGPFYEGTRDYDPGKAQGYTKYNLGASKLSHEDFLKEVQKLLKDIGAQADERYADIERAIEAGAFLRRLKTSDNGTIPYQLHLEEMDAIIERQAAFYPFLAQEKDKLKSLVSFRIPYYVGPLTQKNAARDGKGEARFAWSSRKPGMEDARVYPWNWEDVIDKDQSAEDFIRRMTGTCTYLKGEPVLARCSLDYELFCVLNELAGARWTQDGDKSYRFDAADRLGIVEDLFKKRKRVTYEAAEKWLARTHGPESGKSAGGAYHVSGGQGEDAFESQLSSHYDFCKILGVDELSDADEAMAEDIILWNTVFEDRSILKRKIKLAYGDRLGDAQVRKLCQKRYTGWGRLSGELLRGLRSATDNGPKTIMDILLEGDPNHARRMGAAMNLMEILHDDLLEFQAKIDEHNRERALAVGGMSVDEVTGSPALRRGINQALRVVDEIAGIAGKPPAHIYVEVTRDEGARNKGRRTTSRYRALEAALSSIKAQCADVYAELKERDPRALDDERLTLYFMQCGKCMYSGDALDINKLQTYQVDHILPQSYVKDDSFENKVLVRPDTNQRKGDTLLLDERLIARMRGFWRTLRDAELIGEKKFNNLTRTSVSDEQMKKFVSRQLVETGQMVKQVQQLLQARYPESEVQPVKAGVSHQLRVGCALAKSREINDFHHAHDAYLACQVGRFVQYRHSAVYSEPVKMAAVVKQFIKKQAEDYRRTRELPGSDGFIVSSFMTPGFDVKTGEVFRDAWDAGAEIDRIRRCFDYKDCFISRMPEETHGAFWDATIYSPRAAGKTLSLPLKRGLDPRKYGSYSREQFAYFFVYEAVKPKKKQRVLEFAPVPVRVASALANDPDALEDYARELAEAEGLVFERIRRRKVYKYQQIIVGDSRLYVTGREEVRNARQLAFSQDETKLICRIEQGEECEEGELLDLFRSMQRKYLACAPRLARLMKVAEMEEGFIAATASGKREVLLSLTSIAAAHRNSIDLKPIGRKGSSGQMKITFSKELSTNGILFVDSSVTGMFERRCRLGL

SEQ ID NO: 248 - protein, 1054 aa, Haemophilus parainfluenzae
  REGION 1..1054: note = Haemophilus parainfluenzae ATCC 33392
MENKNLNYILGLDLGIASVGWAVVEIDEKENPLRLIDVGVRTFERAEVPKTGESLALSRRLARSARRLTQRRVARLKKAKRLLKSENILLSTDERLPHQVWQLRVEGLDHKLERQEWAAVLLHLIKHRGYLSQRKNESKSENKELGALLSGVDNNHKLLQQATYRSPAELAVKKFEVEEGHIRNQQGAYTHTFSRLDLLAEMELLFSRQQHFGNPFASEKLLENLTALLMWQKPALSGEAILKMLGKCTFEDEYKAAKNTYSAERFVWITKLNNLRIQENGLERALNDNERLALMEQPYDKNRLFYSQVRSILKLSDEAIFKGLRYSGEDKKAIETKAVLMEMKAYHQIRKVLEGNNLKAEWAELKANPTLLDEIGTAFSLYKTDEDISAYLAGKLSQPVLNALLENLSFDKFIQLSLKALYKLLPLMQQGLRYDEACREIYGDHYGKKTEENHHFLPQIPADEIRNPVVLRTLTQARKVINGVVRLYGSPARIHIETGREVGKSYKDRRELEKRQEENRKQRENAIKEFKEYFPHFAGEPKAKDILKMRLYKQQNAKCLYSGKPIELHRLLEKGYVEVDHALPFSRTWDDSFNNKVLVLANENQNKGNLTPFEWLDGKHNSERWRAFKALVETSAFPYAKKQRILSQKLDEKGFIERNLNDTRYVARFLCNFIADNMHLTGEGKRKVFASNGQITALLRSRWGLAKSREDNDRHHALDAVVVACSTVAMQQKITRFVRFEAGDVFTGERIDRETGEIIPLHFPTPWQFFKQEVEIRIFSDNPKLELENRLPDRPQANHEFVQPLFVSRMPTRKMTGQGHMETVKSAKRLNEGISVIKMPLTKLKLKDLELMVNREREKDLYDTLKARLEAFNDDPAKAFAEPFIKKGGAIVKSVRVEQIQKSGVLVREGNGVADNASMVRVDVFTKGGKYFLVPIYTWQVAKGILPNKAATQYKDEEDWEVMDNSATFKFSLHPNDLVKLVTKKKTILGYFNGLNRATGNIDIKEHDLDKSKGKQGIFEGVGIKLALSFEKYQVDELGKNIRLCKPSKRQPVR

SEQ ID NO: 249 - protein, 1052 aa, Haemophilus sp.
  REGION 1..1052: note = Haemophilus sputorum CCUG 13788
  source 1..1052: note = Haemophilus sputorum
MKNTSLNYVLGLDLGISSVGWAVVEIDEKENPLSLIDVGVRTFERAETQKGESLALARRLARSARRLTQRRVARLKKAKRLLKSENILLSTDECLPHQVWQLRVEGLERKLERQEWAAVLLHLIKHRGYLSQRKNESKSENKELGALLSGVANNHKLLQQTTYRTPAELAVKKFEVEEGHIRNQQGSYTHTFSRLDLLSEMELLFSRQQHFGNPFTSEKLLENLTALLMWQKPALSGDAILKMLGKCTFENEYKAAKHTYSAERFIWITKLNNLRIQENGLERALNDNERLALMKQPYEKAKLTYAQVRSILNLSDEAIFKGLRYSGEDKKTSETKTVLMEMKAYHQIRLALEKNDLKTEWAELKVNSSLLDEIGTAFSLYKTDEDISTCLAGKLSQPVLNALLENLNFDKFIQLSLKALHKILPLMQQGLRYDEACAEIYGDHYGKKTEENHLLLPQIPADEIRNPVVLRTLTQARKVINGVVRLYSSPARIHIETGREVGKSYQDRRELEKRQEENRKQREKAISEIKTLFPNFSGEPKAKDILKMRLYYQQNAKCLYSGKPLELHRLLEQGYVEIDHALPFSRTWDDSFNNKVLVLANENQNKGNLTPFEWLDGKNNSERWKAFKALVETSAFPYTKKQRILSQKLDEKGFIERNLNDTRYVARFLCNFIADNMHLTGEGKRKVFASNGQITALLRGRWGLAKSREDNDRHHALDAVVVACSTVSMQQKITRFVRFEEGNVFTGERIDRETGEIIPLHFPAPWKFFREEVEIRIFSDNPKLELENRLIARPQANHEFVQPLFVSRMPTRKMIGQGHMETIKSAKRLNEGLSVIKMLLTKLRLKDLESMVNREREKELYEALKARLEAFNDEPAKAFAEPFMKKGGAIVKSVRVEQVQKSGVLVRDGNGVADNASMVRVDVFTKGGKYFLVPIYTWQVAKGILPNKAVIQGKNEEDWEVMDDATFRFSLHQNDLVKLVTKKKTIFGYFNGLNRATGNIDIKEHDLEKSKVKDGIHQSIGIKLALSFEKYQVDELGKNIRLCKSSKRQAVR

SEQ ID NO: 250 - protein, 1052 aa, Haemophilus parainfluenzae
MENKNLHYILGLDLGIASVGWAVVEIDEKENPLRLIDVGVRTFERAETQKGESLALSRRSARSARRLTQRRVARLKKAKRLLKSENILLSTDERLPHQVWQLRVEGLDRKLERQEWAAVLLHLIKHRGYLSQRKNESKSENKELGALLSGVASNHELLQQATYRTPAELAVKKFEVEEGHIRNQQGAYTHTFSRLDLLAEMELLFSRQQHFGNPFASEKLLENLTALLMWQKPALSGEDILKMLGKCTFEDEYKAAKNTYTAERFVWITKLNNLRIQENGLERALSDNERLMLIEQPYEKAKLTYAQVRSILNLSDDAIFKGVRYSGEDKKAIETKTTLMEMKAYHQIRKVLEGNNLKAEWVALKANPTLLDEIGTAFSLYKTDEDISAYLAGKLSQPVLNALLENLSFDKFIQLSLKALYKLLPLMQQGLRYDEACREIYGDHYGKKTEETHHFLPQIPADEIRNPVVLRTLTQARKVINGVVRLYGSPARIHIETGREVGKSYKDRHELKKRQEENRKQREKTISEIKTLFPNFSGEPKGKDILKMRLYYQQNAKCLYSGKPLELHRLFEQKYVEVDHALPLSRTWDDSFNNKVLVLANENQNKGNLTPFEWLDGKNNSERWRTFKALVETSAFPYAKKQRILSQKLDEKGFIERNLNDTRYVARFLCNFIADNMHLTGEGKRKVFASNGQITALLRRRWGLAKSREDNDRHHALDAVLVACSTVAMQQKITRFVRFKAGDVFTGERIDRETGEIIPLHFPTPWQFFKQEVEIRIFSDNPKLELENRLPDRPQANHEFVQPLFVSRMPTRKMTGQGHMETVKSAKRLNEGISMIKMPLTKLKLKDLELMVNREREKDLYDALKTRLEAFNDDPAKAFAEPFMKKGGAIVKSVRVEQVQKSGVLVRQGNGVADNASMVRVDVFTKDGKYFLVPIYTWQVAKGILPNKAVIQGKDEEDWEDIDDATFQFSLHPNDLISVKTKKDEFLGYFNGLNRHTGGINIRTHDLEKSKGKQGIFEGIGVKIALSFEKYQIDELGKNIRLCKPSKRQPVR

SEQ ID NO: 251 - protein, 1052 aa, Haemophilus sp.
  REGION 1..1052: note = Haemophilus sputorum HK 2154
  source 1..1052: note = Haemophilus sputorum
MKNTSLNYVLGLDLGISSVGWAVVEIDEKENPLSLIDVGVRTFERAETQKGESLALARRLARSARRLTQRRVARLKKAKRLLKSENILLSTDECLPHQVWQLRVEGLERKLERQEWAAVLLHLIKHRGYLSQRKNESKSENKELGALLSGVANNHKLLQQTTYRTPAELAVKKFEVEEGHIRNQQGSYTHTFSRLDLLSEMELLFSRQQHFGNPFTSEKLLENLTALLMWQKPALSGDAILKMLGKCTFENEYKAAKHTYSAERFIWITKLNNLRIQENGLERALNDNERLALMKQPYEKAKLTYAQVRSILNLSDEAIFKGLRYSGEDKKTSETKTVLMEMKAYHQIRLALEKNDLKTEWAELKVNSSLLDEIGTAFSLYKTDEDISTCLAGKLSQPVLNALLENLNFDKFIQLSLKALHKILPLMQQGLRYDEACAEIYGDHYGKKTEENHLLLPQIPADEIRNPVVLRTLTQARKVINGVVRLYSSPARIHIETGREVGKSYQDRRELEKRQEENRKQREKAISEIKTLFPNFSGEPKAKDILKMRLYYQQNAKCLYSGKPLELHRLLEQGYVEIDHALPFSRTWDDSFNNKVLVLANENQNKGNLTPFEWLDGKNNSERWKAFKALVETSAFPYTKKQRILSQKLDEKGFIERNLNDTRYVARFLCNFIADNMHLTGEGKRKVFASNGQITALLRGRWGLAKSREDNDRHHALDAVVVACSTVSMQQKITRFVRFEEGNVFTGERIDRETGEIIPLHFPAPWKFFREEVEIRIFSDNPKLELENRLIARPQANHEFVQPLFVSRMPTRKMTGQGHMETIKSAKRLNEGLSVIKMLLTKLRLKDLESMVNREREKELYEALKARLEAFNDEPAKAFAEPFMKKGGAIVKSVRVEQVQKSGVLVRDGNGVADNASMVRVDVFTKGGKYFLVPIYTWQVAKGILPNKAVIQGKNEEDWEVMDDATFRFSLHQNDLVKLVTKKKTIFGYFNGLNRATGNIDIKEHDLEKSKVKDGIHQSIGIKLALSFEKYQVDELGKNIRLCKSSKRQAVR

SEQ ID NO: 252 - protein, 1338 aa, Helcococcus kunzii
  REGION 1..1338: note = Helcococcus kunzii ATCC 51366
MQDYYLGLDIGTNSVGWAVTDENYNLLRKKGKDLWGVRLFKEAQPATERRGHRSSRRRTIRKSLRKQLLRELFEEEINAIDKDFFLRLDESKYWLEDKKIEGKYSLFNDENFTDKDYYEKFPTIFHLRKALIESDDKEDIRLYFLAINQMMKRRGHFLIDGKLSNVEDITPFKECIQNLINEELDTEIETEFYDKAIKIVSDYSLKKTEKKNLIKDLVKETDSIEDSKKIINIFNLLISGKSKVNGIFDDEEILEKIKEDNKEDFYLTSEKYEENLEYFSQLLDYRFELISSLKSIYDYIILQEVLKGKKYLSYAQVERYKNHKEDLRKLKQLIKKYDKNGKIYYQIFRDENFKKGYVAYLGYYKKNKKNVPVKKCDYDTFSKNIKSTLDKICDKEDPLYIELIDKIEKGGFLLKQIVSTNSVIPHQVHELELDKILENLEKNYPSFKEISDGVSKIDKIKMIFNFRIPYYVGPLNDYHKDKVNSNTWIVKNEGFENENIRPWNFSKIVDEHACEEEFIKRMINECSYIPGEKVLPKSSLLYSEYMVLNELNNLRVNGDKLNPKIKKEIVENIYKKERKVTLKKIRNFLIINNYVDSKVEFSGLSDGIKANMSSYIDFAEILDDNFDNNMVEDLIEQITIHVGNVKLLTEKISNKYPNLEKKQINKIVNLKFKDWARFSRKLLVGIEGTEKETGEINTIIGFLRETNENFMELMSNRYTFSEEISEIKKKYIPNKLSKQIVDDLYVSPAVKKMIWQVLNINDELIKVLGKQPKKIFIEMARGKEEKPEVKDSRKNKLIELYKNLGKEGKEWLNRIEDKTEADFRNRALYLYYTQMGRCMYTGEIIDIERLYDKELYDLDHIIPRKMKKDDSIHKNLVLVTRNSNQYEKKDNYPVPEVIKSRENVRHLWYALKKKGLITEEKYNRLTRINPLSDKELSEFIERQLVETRQTTKVVKDLFENYYTDSKIVTVKAGLVSELRRDFEVLKCREINDLNHAHDAFLNIIVGDVWSKKFTSNPYNFVKKNREKYTLNNIFTKNQKDLRGNEIWNCAEGKKRIIKTLNKPSVLFSVENFEQTGQLFDQNIIGKQDYKEKTSYVPIKGDERLQDISKYGGYRGISGAYFFIVEHTEKNKRVKTIESLPIYMKSYVEENGLLDFCTNEMKLVDPKIIVKKLNYKSEIIVDGFKYLISGKTENRLSLETNEYLYWNHTQTTDIKKILNINEKIELEKYNGDIESERENIIKYIQIILEKFKLKPFIKRRNLPNIEINFADYETEKLLQLLVNLIPLTTKYVSPVDLTVISGSKYAGKVLIPKKISNLNEVIFISKSITGIYESRRRII

SEQ ID NO: 253 - protein, 1007 aa, Helicobacter canadensis
  REGION 1..1007: note = Helicobacter canadensis MIT 98-5491
MKVLGFDIGINSIGWAFVENNELKDCGVRLFTKAENPKTKESLALPRRNARSSRVRLRRRRSRLLSLKHIISKEFGLHYEDYIALDGNLPKAYTGKIESIYKLRYEALSQAISKEDLARVILHIAKHRGYMNKNQKTSQDSEKGAILSAIKENSNKIKHYQTAGEYFYKELFENLRDGTKEFKNIRNKAMKNEKTGNMESTYYNTILASDLEKELKLILEKQQAYHNYSDTFIKEVLEIAFYQRPLKDFSHLVGSCTFYENEKRACKNSYSAWEFIALGKIINTLESIKKDTGEIFSNEIITQILKEVLDKGSLSYTKLRKMINLDEKVKFKGLKYDKEGVEKTNLIEFKKLKEFKKALGEHNLERKTLDEIATHITLTKDENQLKKQLEQYALSQNQIDALAELDFNDHINLSFKALYEILPLMEKGKRYDEACNELGLKAKTSNQKSEFLPAFCDSIFAQELTNPIVNRAISEYRKVLNRLLKKYGKMHKIHIELARDAGLSKEARNKIEKEQKENKDINDKAEKTCKEFGLKPNAKNILKIKLWREQGEICAYSGKKITIDDLKEDKALEVDHIYPYSRSYDDSYNNKVLVFIKENQLKLNQTPYEAFGSNQEKWSKIQVLAQKLPYKKKNRILDENFKNKDQIEFISRNLNDTRYATSLIAKYTKEYLEFLPLSDDEDISLKSGEKGSKTHVQTMNGMLTSVLRHAWGFSQKDRNNHLHHALDAIIIAYSTNSIIKAFSDFKKNQEILKAKLYAKKLTSEEYKNQSKFTGFEKYRSKILEKLDSIFVSKPPNKNTKGALHEQTFYSYQDILEEYKTQEGLKRALECGKVRKIGTKYVVNDRMVRLDIFKKDNKFYGIPIYTMDFALGVLPNKVVTIGTDKDKIKKEWKTIDETYEFCFSLYKGDLVLIQKKEMQESEFAYYNGFDISSASISLEKHDNKFENLTENQKLLFPKAKEGDVEVRGIGIQGLKVFKKYMVTPLGEIQETRTEARQNIQPRKKHGLR

SEQ ID NO: 254 - protein, 1023 aa, Helicobacter cinaedi
  REGION 1..1023: note = Helicobacter cinaedi CCUG 18818 = ATCC BAA-847
MKIYSFDIGVASIGWAFIENEVLQDCGIRIFTKAENPKNGASLALPRREARGVRKRLARRRGRLNTIKQLLCKEFGLQLEDYLSNDGELPKAYTASKANPLKSPYELRTLALSQKLDSKDLVRVILHIAKHRGYGNKHAKDSKDTESGKVKKAIEFNRKTLAEKGYRSVGEYLYREFFQQSRISQNNGATEFINVRNKAGNYEHCVAQDMLKEELESILNAQRQFGFSLKQDFESKLLTKIFEQRPLKSFADKVGNCCFIAGEKRAPKDSPSAIEFIALSRTINTLINLSKESGEIYNRAIILQIVESTLKKGEISYKELREIIRLDERLRFKDPRLDYSREIKEAEKVKFLEFKQLKGFKKALGESFTTLAISQLDEIAEHIALIKDRVKLNEKLESYALTKEQREALSNLSFSAHINLSLQALKQILPFMRGDNGEQCLDYDESVEKAGLKALSKDTLKGQMLPPLNEFEPYLSNPVVARALAEYRKVLNVLLKQYGSPHKIHIEYAREAKLSSTERQKYEKEQKDNYAANQAAHKKCQELGLEPSSTNLLKLKLWQEQGGLCLYSGAKITISYLQDPTALQVDHIYPYSRSFDDSYMNKCLVLTKANQEKGNRTPFEAFGTDSAKWGVITTLAQKLPHKKRRRILNTAFNDKEAGFKLRNLNDTSYIARLVADYTETYLEFLPLVESENTTLSKGQKGSKKHIAIVNGVLTSTMRYYLGFASKDRDNHLHHALDAVIIGFMNDSVIKAFSDFKKTQETSKAAYYAHTLSKQEYKKQRAFIQLPSGENFRVSVLEKVESVFVSKPPRKRVRGALHEATFYSPNDPKLLKNYGGTKGVERALALGKMRKVGAKIVSNGAMVRVDIFRHKSSGKFYGVPVYTMDFALGILPNKAVVVGKDQNGVIKDWLEMDSSYEFIFSLYKDDVILVQKKEMQRPELCYFVSFDTSGASIKVAKHDNNFSTLTENQKLLFSNATKEEVVGKSIGIQNLKVFEKWQVSVLGEVKRTQSYPRENISLASKAKK

SEQ ID NO: 255 - protein, 1023 aa, Helicobacter cinaedi
  REGION 1..1023: note = Helicobacter cinaedi CCUG 18818
MKIYSFDIGVASIGWAFIENEVLQDCGIRIFTKAENPKNGASLALPRREARGVRKRLARRRGRLNTIKQLLCKEFGLQLEDYLSNDGELPKAYTASKANPLKSPYELRTLALSQKLDSKDLVRVILHIAKHRGYGNKHAKDSKDTESGKVKKAIEFNRKTLAEKGYRSVGEYLYREFFQQSRISQNNGATEFINVRNKAGNYEHCVAQDMLKEELESILNAQRQFGFSLKQDFENKLLTKIFEQRPLKSFADKVGNCCFIAGEKRAPKDSPSAIEFIALSRTINTLINLSKESGEIYNRAIILQIVESTLKKGEISYKELREIIRLDERLRFKDPRLDYSREIKEAEKVKFLEFKQLKGFKKALGESFTTLAISQLDEIAEHIALIKDRVKLNEKLESYALTKEQREALSNLSFSAHINLSLQALKQILPFMRGDNGEQCLDYDESVEKAGLKALSKDTLKGQMLPPLNEFEPYLSNPVVARALAEYRKVLNVLLKQYGSPHKIHIEYAREAKLSSTERQKYEKEQKDNYAANQAAHKKCQELGLEPSSTNLLKLKLWQEQGGLCLYSGAKITISYLQDPTALQVDHIYPYSRSFDDSYMNKCLVLTKANQEKGNRTPFEAFGTDSAKWGVITTLAQKLPHKKRRRILNTAFNDKEAGFKLRNLNDTSYIARLVADYTETYLEFLPLVESENTTLSKGQKGSKKHIAIVNGVLTSTMRYYLGFASKDRDNHLHHALDAVIIGFMNDSVIKAFSDFKKTQETSKAAYYAHTLSKQEYKKQRAFIQLPSGENFRVSVLEKVESVFVSKPPRKRVRGALHEATFYSPNDPKLLKNYGGTKGVERALALGKMRKVGAKIVSNGAMVRVDIFRHKSSGKFYGVPVYTMDFALGILPNKAVVVGKDQNGVIKDWLEMDSSYEFIFSLYKDDVILVQKKEMQRPELCYFVSFDTSGASIKVAKHDNNFSTLTENQKLLFSNATKEEVVGKSIGIQNLKVFEKWQVSVLGEVKRTQSYPRENISLASKAKK

SEQ ID NO: 256 - protein, 1023 aa, Helicobacter cinaedi
MKIYSFDIGVASIGWAFIENEVLQDCGIRIFTKAENPKNGASLALPRREARGVRKRLARRRGRLNTIKQLLCKEFGLQLEDYLSNDGELPKAYTASKANPLKSPYELRTLALSQKLDSKDLVRVILHIAKHRGYGNKHAKDSKDTESGKVKKAIEFNRKTLAEKGYRSVGEYLYREFFQQSRISQNNGATEFINVRNKAGNYEHCVAQDMLKEELESILNAQRQFGFSLKQDFENKLLTKIFEQRPLKSFADKVGNCCFIAGEKRTPKDSLSAIEFIALSRTINTLINLSKESGEIYNRAIILQIVESTLKKGEISYKELREIIRLDERLRFKDPRLDYSREIKEAEKVKFLEFKQLKGFKKALGESFTTLARSQLDEIAEHIALIKDRVKLNEKLESYALTKEQREALSNLSFSAHINLSLQALKQILPFMRGDNGEQCLDYDESVEKAGLKALSKDTLKGQMLPPLNEFEPYLSNPVVARALAEYRKVLNALLKQYGSPHKIHIEYAREAKLSSTERQKYEKEQKDNYAANQAAHKKCQELGLEPSSTNLLKLKLWQEQGGLCLYSGAKITISYLQDPTALQVDHIYPYSRSFDDSYMNKCLVLTKANQEKGNRTPFEAFGTDSAKWGVITTLAQKLPHKKRRRILNTAFNDKEAGFKLRNLNDTSYIARLVADYTETYLEFLPLVESENTTLGKGQKGSKKHIAIVNGALTSTMRYYLGFASKDRDNHLHHALDAVIIGFMNDSVIKAFSDFKKTQETSKAAYYAHTLSKQEYKKQRAFIQLPSGENFRASVLEKVESVFVSKPPRKRVRGALHEATFYSPNDPKLLKNYGGTKGVERALALGKMRKVGAKIVSNGAMVRVDIFRHKSSGKFYGVPVYTMDFALGILPNKAVVVGKDKNGVIKDWLEMDSSYEFIFSLYKDDLLLVQKKEMAEPELCYFMSFNSSIAQISVAKHDNNFSTLTKNQKLLFSNATQEDVSGKSIGIQNLQVFEKWQVSVLGEVKRTQSYPRENISLASKAKK

SEQ ID NO: 257 - protein, 1024 aa, Helicobacter mustelae
MIRTLGIDIGIASIGWAVIEGEYTDKGLENKEIVASGVRVFTKAENPKNKESLALPRTLARSARRRNARKKGRIQQVKHYLSKALGLDLECFVQGEKLATLFQTSKDFLSPWELRERALYRVLDKEELARVILHIAKRRGYDDITYGVEDNDSGKIKKAIAENSKRIKEEQCKTIGEMMYKLYFQKSLNVRNKKESYNRCVGRSELREELKTIFQIQQELKSPWVNEELIYKLLGNPDAQSKQEREGLIFYQRPLKGFGDKIGKCSHIKKGENSPYRACKHAPSAEEFVALTKSINFLKNLTNRHGLCFSQEDMCVYLGKILQEAQKNEKGLTYSKLKLLLDLPSDFEFLGLDYSGKNPEKAVFLSLPSTFKLNKITQDRKTQDKIANILGANKDWEAILKELESLQLSKEQIQTIKDAKLNFSKHINLSLEALYHLLPLMREGKRYDEGVEILQERGIFSKPQPKNRQLLPPLSELAKEESYFDIPNPVLRRALSEFRKVVNALLEKYGGFHYFHIELTRDVCKAKSARMQLEKINKKNKSENDAASQLLEVLGLPNTYNNRLKCKLWKQQEEYCLYSGEKITIDHLKDQRALQIDHAFPLSRSLDDSQSNKVLCLTSSNQEKSNKTPYEWLGSDEKKWDMYVGRVYSSNFSPSKKRKLTQKNFKERNEEDFLARNLVDTGYIGRVTKEYIKHSLSFLPLPDGKKEHIRIISGSMTSTMRSFWGVQEKNRDHHLHHAQDAIIIACIEPSMIQKYTTYLKDKETHRLKSHQKAQILREGDHKLSLRWPMSNFKDKIQESIQNIIPSHHVSHKVTGELHQETVRTKEFYYQAFGGEEGVKKALKFGKIREINQGIVDNGAMVRVDIFKSKDKGKFYAVPIYTYDFAIGKLPNKAIVQGKKNGIIKDWLEMDENYEFCFSLFKNDCIKIQTKEMQEAVLAIYKSTNSAKATIELEHLSKYALKNEDEEKMFTDTDKEKNKTMTRESCGIQGLKVFQKVKLSVLGEVLEHKPRNRQNIALKTTPKHV

SEQ ID NO: 258 - protein, 1688 aa, Ignavibacterium album
MEFKKVLGLDIGTNSIGCALLSLPKSIQDYGKGGRLEWLTSRVIPLDADYMKAFIDGKNGLPQVITPAGKRRQKRGSRRLKHRYKLRRSRLIRVFKTLNWLPEDFPLDNPKRIKETISTEGKFSFRISDYVPISDESYREFYREFGYPENEIEQVIEEINFRRKTKGKNKNPMIKLLPEDWVVYYLRKKALIKPTTKEELIRIIYLFNQRRGFKSSRKDLTETAILDYDEFAKRLAEKEKYSAENYETKFVSITKVKEVVELKTDGRKGKKRFKVILEDSRIEPYEIERKEKPDWEGKEYTFLVTQKLEKGKFKQNKPDLPKEEDWALCTTALDNRMGSKHPGEFFFDELLKAFKEKRGYKIRQYPVNRWRYKKELEFIWTKQCQLNPELNNLNINKEILRKLATVLYPSQSKFFGPKIKEFENSDVLHIISEDIIYYQRDLKSQKSLISECRYEKRKGIDGEIYGLKCIPKSSPLYQEFRIWQDIHNIKVIRKESEVNGKKKINIDETQLYINENIKEKLFELFNSKDSLSEKDILELISLNIINSGIKISKKEEETTHRINLFANRKELKGNETKSRYRKVFKKLGFDGEYILNHPSKLNRLWHSDYSNDYADKEKTEKSILSSLGWKNRNGKWEKSKNYDVFNLPLEVAKAIANLPPLKKEYGSYSALAIRKMLVVMRDGKYWQHPDQIAKDQENTSLMLFDKNLIQLTNNQRKVLNKYLLTLAEVQKRSTLIKQKLNEIEHNPYKLELVSDQDLEKQVLKSFLEKKNESDYLKGLKTYQAGYLIYGKHSEKDVPIVNSPDELGEYIRKKLPNNSLRNPIVEQVIRETIFIVRDVWKSFGIIDEIHIELGRELKNNSEERKKTSESQEKNFQEKERARKLLKELLNSSNFEHYDENGNKIFSSFTVNPNPDSPLDIEKFRIWKNQSGLTDEELNKKLKDEKIPTEIEVKKYILWLTQKCRSPYTGKIIPLSKLFDSNVYEIEHIIPRSKMKNDSTNNLVICELGVNKAKGDRLAANFISESNGKCKFGEVEYTLLKYGDYLQYCKDTFKYQKAKYKNLLATEPPEDFIERQINDTRYIGRKLAELLTPVVKDSKNIIFTIGSITSELKITWGLNGVWKDILRPRFKRLESIINKKLIFQDEDDPNKYHFDLSINPQLDKEGLKRLDHRHHALDATIIAATTREHVRYLNSLNAADNDEEKREYFLSLCNHKIRDFKLPWENFTSEVKSKLLSCVVSYKESKPILSDPFNKYLKWEYKNGKWQKVFAIQIKNDRWKAVRRSMFKEPIGTVWIKKIKEVSLKEAIKIQAIWEEVKNDPVRKKKEKYIYDDYAQKVIAKIVQELGLSSSMRKQDDEKLNKFINEAKVSAGVNKNLNTTNKTIYNLEGRFYEKIKVAEYVLYKAKRMPLNKKEYIEKLSLQKMFNDLPNFILEKSILDNYPEILKELESDNKYIIEPHKKNNPVNRLLLEHILEYHNNPKEAFSTEGLEKLNKKAINKIGKPIKYITRLDGDINEEEIFRGAVFETDKGSNVYFVMYENNQTKDREFLKPNPSISVLKAIEHKNKIDFFAPNRLGFSRIILSPGDLVYVPTNDQYVLIKDNSSNETIINWDDNEFISNRIYQVKKFTGNSCYFLKNDIASLILSYSASNGVGEFGSQNISEYSVDDPPIRIKDVCIKIRVDRLGNVRPL

SEQ ID NO: 259 - protein, 1092 aa, Ilyobacter polytropus
MKYSIGLDIGIASVGWSVINKDKERIEDMGVRIFQKAENPKDGSSLASSRREKRGSRRRNRRKKHRLDRIKNILCESGLVKKNEIEKIYKNAYLKSPWELRAKSLEAKISNKEIAQILLHIAKRRGFKSFRKTDRNADDTGKLLSGIQENKKIMEEKGYLTIGDMVAKDPKFNTHVRNKAGSYLFSFSRKLLEDEVRKIQAKQKELGNTHFTDDVLEKYIEVFNSQRNFDEGPSKPSPYYSEIGQIAKMIGNCTFESSEKRTAKNTWSGERFVFLQKLNNFRIVGLSGKRPLTEEERDIVEKEVYLKKEVRYEKLRKILYLKEEERFGDLNYSKDEKQDKKTEKTKFISLIGNYTIKKLNLSEKLKSEIEEDKSKLDKIIEILTFNKSDKTIESNLKKLELSREDIEILLSEEFSGTLNLSLKAIKKILPYLEKGLSYNEACEKADYDYKNNGIKFKRGELLPVVDKDLIANPVVLRAISQTRKVVNAIIRKYGTPHTIHVEVARDLAKSYDDRQTIIKENKKRELENEKTKKFISEEFGIKNVKGKLLLKYRLYQEQEGRCAYSRKELSLSEVILDESMTDIDHIIPYSRSMDDSYSNKVLVLSGENRKKSNLLPKEYFDRQGRDWDTFVLNVKAMKIHPRKKSNLLKEKFTREDNKDWKSRALNDTRYISRFVANYLENALEYRDDSPKKRVFMIPGQLTAQLRARWRLNKVRENGDLHHALDAAVVAVTDQKAINNISNISRYKELKNCKDVIPSIEYHADEETGEVYFEEVKDTRFPMPWSGFDLELQKRLESENPREEFYNLLSDKRYLGWFNYEEGFIEKLRPVFVSRMPNRGVKGQAHQETIRSSKKISNQIAVSKKPLNSIKLKDLEKMQGRDTDRKLYEALKNRLEEYDDKPEKAFAEPFYKPTNSGKRGPLVRGIKVEEKQNVGVYVNGGQASNGSMVRIDVFRKNGKFYTVPIYVHQTLLKELPNRAINGKPYKDWDLIDGSFEFLYSFYPNDLIEIEFGKSKSIKNDNKLTKTEIPEVNLSEVLGYYRGMDTSTGAATIDTQDGKIQMRIGIKTVKNIKKYQVDVLGNVYKVKREKRQTF

SEQ ID NO: 260 - protein, 1354 aa, Indibacter alkaliphilus
  REGION 1..1354: note = Indibacter alkaliphilus LW1
MKKILGLDLGTTSIGWAFIKEPEKDVVGSEIVDMGVRIVPLSSDEENDFAKGNTISINADRTLKRGARRNLQRFKQRRNALLETFKEKNLIPSNFQYAEDGPSSTFSTLKLRDKAAKEKIELDDFVKVLLQINKKRGYKSSRKAMSEEDEGTAIDSMGIAKELYENDLTPGQWVYEALKNGRKNVPDFYRSDLQEEFKKIVNYQSEFYPDILNTSFVEDWMGKASTPTKQYFNKRGVQLAENKGKREERRLQEYKWRAEAVNFKIDLSEIALILSQINSQISNSSGYLGAISDRSKELYFKNLTVGQYLYQQVKKNPHTRLKGQVFYRQDYLDEFEKIWSVQSSFYPQLNDELKQEVRDVTIFFQRRLKSQKHLISNCEFEEHHKVVPKSHPIFQEFRIWQNLNNLTLIKKDNLNEKCELALEDKTALANELAFKKELSVKDALKVLGLKPSDWEFNFTKIEGNRTNHAFFEAFAKIIELEDGEPIDLGNLKADDILDQFSEAFLRIGIDTELLQVNSDIEGAEYEKQSYIQFWHLLYSSEDDQKLKQNLIRKFGFKPEHAKILASISLQDDHASLSSRAIKKILPHLQSGLIYDKACTYAGYNHSSSFTKDENEKRELRAELELLKKNSLRNPVVEKILNQMINVVNAILKDPNLGRPDEIRVEMARELKANAEQRKNMTSNIASATRDHEKYREILKKEFGLKRVTKNDLLRYKLWLETDGISLYTGKPIEASKLFSKEYDIEHIIPKARLFDDSFSNKTICERQLNIDKANVTAFSFLQNKLSADEFEQYQSRVKSLYGKLSKAKIQKLLMANDKIPEDFIARQLQETRYISKKAKEILFEITMRVSVTTGTITDKLREDWGLVEIMKELNWEKYDKLGLTYTIEGKHGERLNKIKDWNKRNDHRHHAMDALTVALTKPAYIQYLNNLNAKAIGNKKGTEIFAIEQKYLKRENGKLCFIPPIENIRAEAKKHLSKILVSYKAKNKVVTINKNKTKKKAGFNEQTALTPRGQLHKETVYGKSFHYSTKFEKIGASFDAQKINTVAKKEEREALLKRLAENGNDPKKAFTGKNSLNKMPIYLDLGKNIKLSEKVKTVVLEQNYTIRKNIDPDLKVDKVIDVGIKRILESRLEEFGGNAKLAFSNLEENPIWLNKEKGIPIKRVKISGVSNVESLHVKKDHFGEKILDEEGNEIPVDFVSTGNNHHVAIYEDEDGNLQDEVVNFYEAVIRRNQGESIIKYRHEEGWNFLYSIKQNEFFVFPSQDFNPNDFDLLDPKNYDLISPNLYRAQKFSKVMYGNSAVRDYVFRHHLETVLNDVKELKDVAYKQLKSLQYLNGIKKVRLNHLGQIIQVGEY

SEQ ID NO: 261 - protein, 1397 aa, Joostella marina
  REGION 1..1397: note = Joostella marina DSM 19592
MKKVLGLDLGTNSIGWALVNEATKEEKKEGKSSEIIKLGVRVNPLTVDEKTNFEKGRPLSTNADRTLKRSARRNLQRYKLRRRNLIEILIKNGFITKDTPLTETGKDTTHQTLKLRAKSAKEKVDLKDFAKILLTINKKRGYKSSRKVNSDEDGLAIDGMAVAKHLYEQNLTPGQYVLNLLQKNKKYVPDFYRSDLQEEFKNIWNNQKTYYFDILTDTLFEELKDKNKSQTWAICKKPFDIAGIKQIGKASDKRLERYKWRTEGLTQKLNLEYLAIALQEINNDINKSSGYLGAISDRSKELFFNKETVGENLYRQLVKTPHTSLRNQVFYRQDYLDEFETIWETQAKFYPQLTHTLKEEIRDVIIFYQRKLKSQKSLISFCQFESWEQTYIEKETGKSKTRTVGRKVIPKSSPLFQEFKIWQNLNSLEFRNSDEGEIIEFIKLDEDIRQTVFEELNLRGNLKPNDVLKILGNYISLGKVSQWKCNFEEIEGNRTNAALYNVYQIIAENEGYGFDWAKKTASEINKELKNIFPQLGIDASILDFDFTQANFDKQTSYQLWHLLYSAEEDFKISEEDKVLYGNSSVSLKKKLHQKYGFKPEYTKLLTNISLQPDYGNLSAKAICNILPYLKENNVYSEACDLTGYNHSNFLTAEEQAKRPLKPILELLKKNSLRNPVVEKILNQMVNVVNQVIETYGKPDEIRIELTRELKKSAKERANMTKSIADATRRNDDYRKTIIKEFGIPNPTKSDVVRYRLWQELASRGYKDIFTDTEIKPQELFSNKIDIEHIIPKALLFDDSFSNKTLAFKKDNLKKANRTAYDFIANDYAPNLENYIERVESLHKDRKITRAKRNKLLMLQSKLPDGFIERDLRNSQYITKEAKKMLYEVCRTVVSTSGSITDKLREDWDLINVMKELNFPKYKALGLTEKIERYDIGAEKMKEVEIIEDWNKRNDHRHHAIDALTVAFSTHSHIQYLNHLNARRDEGHKKHAAIIAIESTITEKEGNKKRRFIAPLPNFRLQAKEHIESILVSFKNKNKVVTNNINKTKRIKKDKFNTKVQLTPRGQLHKETIYGKIKQPLEKHIKLNKSFTLEQAKLIIDKRQREKVLNHLEKYAHNSDIAFNSKTLKKNPLLISDEPLKEVLCFEEVFTIRKDISYDNFKNEKQLDKVIDEKVKQALKERINQYNGDFREAFSDIERNPIWLNKAKGICVKRATIKGVSNAEPLHTAKNHLGEEVLTENKEQIPVDYVSTGNNHHVAIYEDEDGNLQEKVVSFYEAVIRVNEGLPIIDKEYNKSLGWTFKFTMKQNEMFVFPSEDFNPTEIDLLDQKNASLISPNLFRVQKFTIKDYFFRHHLETTVENNNTLKNTTWRREGLSGIYGIIKIRLNHLGEIVQVGEY

SEQ ID NO: 262 - protein, 1060 aa, Kingella kingae
  REGION 1..1060: note = Kingella kingae PYKK081
MAAKSLNYILGLDLGIASCGWAVVEMDEQENPLRLIDVGVRTFEEAENPKDGSSLAETRRLARAQRRLISRRANRMNKLCRLLKQENVLQANDYDEKGLIIGLPNQAWELRAQGLDRKLEPKEWAAVLIHLVKHRGYLSQRKNESQTADKELGALLSGMNHNHQLLQSQSNQYRTPAELAIKQFATQDGHIRNQRGAYTHTFNRLDLQNELNQLFDAQTRLGNPHVSGSLKTAINDLLMNQKAALSGDAILEMLGRCTFEPSEYKAAKNTYSAERFVWLGKLTNLRIQDNGLESALSREQRELLLNEPYNKTKLTYQQVRKLLRLPETAFFKGLRYGKDNAESATFMEMKSYHAIRKSLENKSLKSEWEKLKTQPKLLDLIGTAFSIYKTDDEIAGCLKNQLPENVIIALQGQLNFSNFMELSLKALEKLLPLMEQGLRYDEACTQIYGNRHEKIADKTEKFLPNIPADKLRNPVVLRTLTQARKVINAIIRRYGSPARVHIETGREVGKSFSDRDKLKKQQEENQEQRRRAIDEWKQFFPNAAHEPKAVDILKLRLYQLQQGKCLYSGLPIDVRRLPEKGYVEIDHALPFSRTWDDSFNNKILVLASENQNKGNQTPYEYLRGADNSESWRLFVENVQNCQFSPNKKQKIMAKQLDEKGFLERNLNDTRYVSRFLCQFISEHLHLTGKGKKRVFASNGQITALLRGRWGLSKNREENDRHHAVDAVVVACSTVAMQQKITQFVRYQKGNVFTGERIDKETGEVISIHFPTPWEHFREEVMIRVFDDNPLRTLPEKLPNRPEALHEYVMPLFVSRMPTRKMTGQGHKETIKSAKRLDEKISVLRVPLTQLKLNDLENMVNREREPALYEALKARLEQFKNDPAKAFAEPFFKQGGQQVKAVRVEIVQKSGMLLRKINGVADNGSMVRVDVFEKSGKFYLVPIYAWQVAEGILPNYAVVAHKDESDWILMDESYHFKFALYKNDLLEVQTKKGGIMGYFASLDRATGAITIREHDRDKKKCKDGEHRSIGVKMASSFKKLQVDELGKNIHETRSRKRPNIG

SEQ ID NO: 263 - protein, 1391 aa, Kordia algicida
  REGION 1..1391: note = Kordia algicida OT-1
MKKILGLDLGTNSIGWALVNEAEHEHEQSSIVKLGVRVNPLSVDEKTNFEKGRPLSINADRTSKRSARRNLQRFKLRRKNLINLLLKHHIISNETILTEVGKNTTHQTLKLRSKATQEKISLEEFARILLSINKKRGYKSSRKEKNEDEGFTIDGMAIAKELYDNQLTPGQYVYNILQDGKNYIPDFYRSDLQAEFDDVWQFQKKFYSSILTDEFYLKLKGQGKENTRKLFLAIHQVYTAENKGKRDAVKLQYYKWRSEAVKKQLSIEEVAYVLVEINNNINKSSGYLGAISDRSKALYFNNETVGEYLYGQLVKNRHNSLRNQVFYRQDYLDEFEKIWETQAKFYDELTNELKQEIRDVVIFYQRKLKSQKHLISDCLFEKHHKAIPKSSPLFQEFKIWQNLNYLEFVHTQSKEKIFFSELDDETRQFVFAELNIRGTLKIKEIKKLIGLETPVYWKSNFDEIEGNRTNQVLYNVYQNIADDLGYGFDWSKKHAFEINAELQAIFKDVGIDTAILNFDASIEENDFDKQKSYQLWHLLYSAEDTDKATEEDKLIYGNINTKLKKQLHQKYGFEAKYGNLLANISLQQDYGNLSAKAIKKILPYLESGNSFYEACTIVGYNPSNSLTKEQQQNRKLKDKLELLPKNSLRNPVVEKILNQKVNLINQLIDEYGKPDEVRIELARELKKSAKQRADLSKHINDATLKNQNIRKTLQKDFGIQNPSKNDVIRYKLYDELKDNGYKTLFTNKYIPKEQLFSKDVDIEHIIPKAILFDDSFSNKTLAYRNVNLAKADATAFDFISSKHLDDLDNYKARVETLFQSKRISKGKYKKLLMTRQNLPEDFIERDLRNSQYIAKKATAMLKEVFRSVVPTSGRITDKLREDWDLVNVMKELNLPKYRTLGLTEFIERKNGNKIEQIIDWTKRNDHRHHAMDALTVAFTTHNHIQYLNNLNVTHGLNGVDTDHEKSRLYAIKQAITKVYIVGKTKKRKFIPPMENFRSHAKNHLEGILISFKNKNKVVTKNKNRTKTKTKGVFNEKIQLTPRGQLHKETIYGHAKKVIVTKEKVSSKFTHEKILQVTKPAYREALLKRLASFKNDPKKAFSGKNALSKNPLYFDITSGKKVPDTVKLSYFENSYVIRKEVNSDNFKNEKSLQKVLDVGIRRILEKRLADYNGNAKEAFSNLEKNPIWKDKEKGVCIKKVRIEALKNAEPLHVKKDHLGKIILDDENKSTPVDFISTGNNHHVAIYEDKDGKLHDKVVSFYEVVSRVNLGLPIIDKSFNSHLDWKFLFSMKQNEMFVFPSEDFNPKEIDIGNPKNNELISKYLFRVQKFSKVTYGNSAVRDYVFRHHLETELIDKKELKGITYYQLKSIGMLEKLVKVRINHIGKIVHIGEY

SEQ ID NO: 264 - protein, 1314 aa, Lactobacillus animalis
  REGION 1..1314: note = Lactobacillus animalis KCTC 3501
MLKKDYSIGLDIGTNSVGHAVVTDDYKVPTKKMKVFGDTSKKTIKKNMLGVLLFNEGQTAADTRLKRGTRRRYTRRKNRLRYLQEIFAPELAKVDPNFLYRLEESSLVAEDKKYDVYPIFGKREEELLYHDTYKTIYHLRSALANNDQPADLRLVYLALAHIIKYRGNFLLEGEIDLRTTDINKVFAEFSETLNENSDENLGKLDVADIFKNNTFSKTKKSEELLKLSGAKKNQLAHQLFKMMVGNMGSFKKVLGTDEEHKLSFGKDTYEDDLNDLLAEAGDQYLDIFVAAKKVYDAAILASILDVKDTQTKTVFSQAMIERYEEHQKDLIELKRVFKKYLPEKCHDFFSEPKISGYAGYIDGKVSEEDFYKYTKKTLKGIPETEEILQKIDANNYLRKQRTFDNGAIPHQVHLKELVAIVENQGKYYPFLRENKDKFEKILNFRIPYYVGPLARGNSKFAWLTRAGEGKITPYNFDEMIDKETSAEDFIKHMTINDLYLPTEPVLPKHSLLYERYTIFNELAGVRYVTENGEAKYFDAQTKRSIFELFKLDRKVSEKMVIKHLKVVMPAIRIQALKGLDNGKFNASYGTYKDLVDMGVAPELLNDEVNSEKWEDIIKTLTIFEGRKLIKRRLENYRDFLGEDILRKLSRKKYTGWGRLSAKLLDGIYDKKTHKTILDCLMTEDYSQNFMQLINDDNYSFKETIKNAQVIEKEETLAKTVQELPGSPAIKKGILQSLEIVDEIIKVMGYKPKSIVVEMARETQKTHGTRKREDRVQQIVENLKDANELPEKLPSNAELSDERKYLYCLQNGRDMYTGAPLDYDHLQFYDVDHIIPQSFLKDDSIENKVLTIKKENVRKTNGLPSEAVIQKMGSFWKKLLDAGAMTNKKYDNLRRNLHGGLNEKLKERFIERQLVETRQITKYVAQLLDQRLNYDGNGVELDEKIAIVTLKAQLASQFRSEFKLRKVRALNNLHHAHDAYLNAIVANLIMAKYPELEPEFVYGKYRKAKFKGLGKATAKNTLYANVLYFLKENEVYPFWDKARDLPTIKRYLYRAQVNKVRKAERQIGGFSDEMLVPKSDSGKLLPRKEGLDPVKYGGYAKAVESYAVLITADEVKKGKTKKVKTLVNIPIIDSKKYEADPTAYLASRGYTNVTNSFILPKYSLLEDPEGRRRYLASFKEFQKANELILPQHLVELLYWVNAKDGEQKLEDHKAEFKELFDKIMEFADKYVVAPKNSEKIRRLYEENQDATPMELGKNFVELLRYTADGAASDFKFFGENIPRKRYNSAGSLLNGTLIYQSKTGLYETRIDLGKL

SEQ ID NO: 265 - protein, 1377 aa, Lactobacillus brevis
  REGION 1..1377: note = Lactobacillus brevis subsp. gravesensis ATCC 27305
MESNHDGEQVKYTLGLDIGTSSIGYAAIDKHQKPIRAKGKHVIGVRLFQEGQTAADRRAFRTTRRRLKRRKWRLNLLNRLFDPYLSEVDPNFLPRLRQSNLSPKDDNKHFNGSTLFPDKTDAAFYRQYPTMYHLRYALMTEKRKFDIREVYLAIHHIVKYRGNFLNSATVDSFKTSNIDFTSQFDRLNELYRQVILDEPFQINMDQVDEMTNKLLDNDALKLDTQKQVAKLLPVIYNDKPIDKQYTRIATEFSKAILGYKTKLDVILNLDTQNAKDWVIRLDDEDIDDKLPALVENLDESRQEIVTIIRDLYAQITLNAIVPKGKSLSESMVDKYNDHKDHLDLLMGLIHELGDDSAKGIKLREAYTQYVGKSDDKTLNQDDFYAAIKKNLDEDSKRSPKIQRLIEQASFMPKQRTSANGVIPHQLHQLELDRIIENQGRYYPFLKKPNPNTHKPNGGKYKLDELVAFRIPYYVGPLITKRDQEKTSGADFAWMIRKPGQEGEITPWNFDQKVDRMASANRFIRRMTTKDSYLVAEDVLPDASLIYEKFKALNELNMLKVNDSRLSPSQKQDLFNNLFKKQKTIRTKKLQTYIRTNWELPSVMISGLADPDKFNSSLSTYIDFRDIFGEKVDDPNRQADYEEIIEWSTVFEDRKIYQAKLNQLDWLTEPQRKALLTKRYTGWGRLSKKLLTGLKDQNGDSILDQLWKTNDNFMQIQSRDEFAKQIHDENAKQFHEANNVDDILDDAFTSPQNKKAIRQVDKVVQDVVKAVGYAPDKIAIEFTRSLENNPQRTVSRQRQLQAAYKNIPREIMKSGLMAELGSVADSKKVLSDKLYLYFTQMGKDMYEDKTINIDNLPNYDIDHILPQAFIKDDSIDNRVLISKEENARKSNRVPLKFFGAKRMGFWKDLLNNGLISNRKFQNLTTDPEKISKYSAKGFIHRQLVETSQVIRLVANILGNEYSQAGTTIIEVSAKMNRQLREDFHLIKNRNVNDYHHAMDAYLTAYVGDYLYLRYPKLRPYFVYGDFKKAEDQDLNIRNFNFLHDLKDNESLDKIVDSETGEIVWEKHGSVKQLKKVYHYKFMLVSQEVYTRQDALFNQTIYPASDADKRKLIPIKNSKPVDVYGGYSGNIDAYMAIVRVHGKKEDNYKVVGIPMRAVTKLKKAEKEGHDSYLNAVHEVLKPQFTKKKKNRKTGEITETVDEFDVLLGKVYYRQLIVDGNKKFMLGSSSYQYNAKQLVLSDKAMQVLSKNGKVKSQDENQNLIDVYDEILEKVDQYFELYDQRHYRESLHKGRGIFVNLPLSNQYDGSKLTSYGKYETIDAILNGLHANATMSNLRYLGISSPFGKMQASNGLTIDPDSIICYQSPTGLFERQIKLSDL

SEQ ID NO: 266 - protein, 1371 aa, Lactobacillus buchneri
MKVNNYHIGLDIGTSSIGWVAIGKDGKPLRVKGKTAIGARLFQEGNPAADRRMFRTTRRRLSRRKWRLKLLEEIFDPYITPVDSTFFARLKQSNLSPKDSRKEFKGSMLFPDLTDMQYHKNYPTIYHLRHALMTQDKKFDIRMVYLAIHHIVKYRGNFLNSTPVDSFKASKVDFVDQFKKLNELYAAINPEESFKINLANSEDIGHQFLDPSIRKFDKKKQIPKIVPVMMNDKVTDRLNGKIASEIIHAILGYKAKLDVVLQCTPVDSKPWALKFDDEDIDAKLEKILPEMDENQQSIVAILQNLYSQVTLNQIVPNGMSLSESMIEKYNDHHDHLKLYKKLIDQLADPKKKAVLKKAYSQYVGDDGKVIEQAEFWSSVKKNLDDSELSKQIMDLIDAEKFMPKQRTSQNGVIPHQLHQRELDEIIEHQSKYYPWLVEINPNKHDLHLAKYKIEQLVAFRVPYYVGPMITPKDQAESAETVFSWMERKGTETGQITPWNFDEKVDRKASANRFIKRMTTKDTYLIGEDVLPDESLLYEKFKVLNELNMVRVNGKLLKVADKQAIFQDLFENYKHVSVKKLQNYIKAKTGLPSDPEISGLSDPEHFNNSLGTYNDFKKLFGSKVDEPDLQDDFEKIVEWSTVFEDKKILREKLNEITWLSDQQKDVLESSRYQGWGRLSKKLLTGIVNDQGERIIDKLWNTNKNFMQIQSDDDFAKRIHEANADQMQAVDVEDVLADAYTSPQNKKAIRQVVKVVDDIQKAMGGVAPKYISIEFTRSEDRNPRRTISRQRQLENTLKDTAKSLAKSINPELLSELDNAAKSKKGLTDRLYLYFTQLGKDIYTGEPINIDELNKYDIDHILPQAFIKDNSLDNRVLVLTAVNNGKSDNVPLRMFGAKMGHFWKQLAEAGLISKRKLKNLQTDPDTISKYAMHGFIRRQLVETSQVIKLVANILGDKYRNDDTKIIEITARMNHQMRDEFGFIKNREINDYHHAFDAYLTAFLGRYLYHRYIKLRPYFVYGDFKKFREDKVTMRNFNFLHDLTDDTQEKIADAETGEVIWDRENSIQQLKDVYHYKFMLISHEVYTLRGAMFNQTVYPASDAGKRKLIPVKADRPVNVYGGYSGSADAYMAIVRIHNKKGDKYRVVGVPMRALDRLDAAKNVSDADFDRALKDVLAPQLTKTKKSRKTGEITQVIEDFEIVLGKVMYRQLMIDGDKKFMLGSSTYQYNAKQLVLSDQSVKTLASKGRLDPLQESMDYNNVYTEILDKVNQYFSLYDMNKFRHKLNLGFSKFISFPNHNVLDGNTKVSSGKREILQEILNGLHANPTFGNLKDVGITTPFGQLQQPNGILLSDETKIRYQSPTGLFERTVSLKDL

SEQ ID NO: 267 - protein, 1371 aa, Lactobacillus buchneri
MKVNNYHIGLDIGTSSIGWVAIGEDGKPLRIKGKTAIGARLFQEGNPAADRRMFRTTRRRLSRRKWRLKLLEEIFDPYITPVDSTFFARLKQSNLSPKDSRKEFKGSMLFPDLTDMQYHKDYPTIYHLRHALMTQDEKFDIRMVYLAIHHIVKYRGNFLNSTPVDSFKASKVNFVDQFKKLNELYTAINPEESFQINLANSEDIGHQFLDPSIRKFDKKKQIPKIVPVSVDDKATDKINGKIASEIINAILGYKSKLDVVVQCTPVDSKSWALKFDEEDIDAKLQKILPEMDENQQSIIAILQNLYSQVTLNQIVPNGMSLSESMIEKYNDHHDHLKLYKKIIDQLADPKKKAALKKAYSQYVGDDGKVIEQADFWSSVKKNLDDSDLSKQIMDLIDAEKFMPKQRTSQNGVIPHQLHQRELDEIIEHQSKYYPWLAEINPNKHDLHLAKYKIEELVAFRVPYYVGPMITPDDQAKSAETVFSWMERKGKEAGQITPWNFDEKVDRNASANRFIKRMTTKDTYLIGEDVLPDESLLYEKFKVLNELNMVRVNGKLLKVADKQAIFQDLFENYKHISVKKLQNYIKSKTGLPSDPEISGLSDPEYFNNSLGTYNDFKKLFGNKVDEPDLQDDFEKIVEWSTVFEDKRILREKLNEITWLSDQQKDVLESSRYQGWGRLSKKLLTGIVNDQGERIIDELWNTNKNFMQIQSDNDFAKRIHEANADQMKAVDVEDVLADAYTSPQNKKAIRQVVKVVDDIQKAMGGVAPKYISIEFTRSEDRNPRRTISRQRQLENTLKDTAKSLAKSINPELLSELDNAAKSKKGLTDRLYLYFTQLGKDIYTGKPINIDEISTYDIDHILPQAFVKDDSLNNRVLVSKAINNGKSDNVPVQLFGAKMGHFWKQLAEAGLISKRKLKNLQTDPDTISKYAMHGFIRRQLVETSQVIKLVANILGDKYRNDNTKIIEITARMNHQMRDEFGFIKNREINDYHHAFDAYLTAFLGRYLYHRYIKLRPYFVYGDFKKFKEDKVTMRNFNFLHDLTDDTQEKIADAETGEVIWDRENSIQQLKDVYHYKFMLISHEVYTLRGAMFNQTVYPASDAGKRKLIPIKADRPINVYGGYSGSADAYMAIVRIHNKKGDKYRVVGVPMRARDRLDAAKKVSDADCDRALKDVLTPQLTKTKKSRKTGEITQVVEDFEIVLGKVMYRQLMIDGDKKFMLGSSTYQYNAKQLVLSDQSVKTLASKGRLDPLQESMDYNNVYTEILDKVNQYFSLYDMNKFRHKLNLGFSKFISFPNHNVFDGNTKASSGKREILEEVLNGLHANPTFGNLKDIGITTPFGQLQQPNGILLSDEAKIRYQSPTGLFERTVSLKDL

SEQ ID NO: 268 - protein, 1361 aa, Lactobacillus casei
  REGION 1..1361: note = Lactobacillus casei BL23
MTKLGKPYGIGVDIGSNSIGFAAVDENSHLIRLKGKTVIGARLFEEGKAAADRRASRTTRRRLSRNRWRLSFLRDFFESHITPTGPNFFMRQKYSEISPKDKARYKYEKRLFNDRTDAEFYQQYPTMYHLRNRLLTDPSKADVREIYFAIHHILKSRGHFLTSGYAKDFNTNKVALNEIFPALQDAYAQVYPDLDITFDENKVNEFKTVLLNEKATPSDTQRALVNLLLAEDGDKDILKQQKQVLTEFAKAVVGLKTKLNVALGTEVDSSEATVWNFSLGQLDDKWAGIESAMTDEGTEILDQIRDLYRARLLNGIVPAGKTLSQAKVDDYAQHHEDLELFKDYLKQLEDDGTAKAIRQLYDRYIDGDDAKPFVREDFVKALTKEVTAHPNAKSPELLERLAQPDFMLKQRNKANGAIPVQMQQRELDQIIKNQSVYYDWLAAPNPVEKHRKSMPYQLDELLNFRIPYYVGPLVTAKEQKAAQGGVFAWMVRKDPDGNITPYNFDEKVDREASANTFIQRMKTTDTYLIGEDVLPKQSLLYQRYEVLNELNNVRVNNEKLSIEQKQQVIRELFERHNSVTIKQFAENLRAHGDYAHIPEIRGLADEKRFLSSLSTYRQLKSLLPDAIDDPAKQADIENIIAWSTVFEDAAIFKTKLKEINWLDSQTITKLSNIRYRGWGQFSHKFLNGLTLGNGHTIIQELFLSNNNLMQILTDETLQKKMTELNADKLKAANINDAIDDAYTSPSNKKALRQVLRVIEDIKRAADGQDPSWLYVETADGGGTPGKRTRARQHQLQEIYANAAHELIDSAVRGELEDKIADKADFNDRLVLYFMQGGRDIYTGTPLNIDQLSSYDIDHILPQSLIKDNSLDNRVLVHAIINREKNATFASTIYAQKMNATWRQWHEAGLISGRKLRNLQMRPDQIDKYASGFVARQLVETRQIIKLTEQIVAAQYPETKIIAVKAGLSHQLREELEFPKNRDVNHYHHAFDAFLAARIGTYLLKRFPNLQAFFTYGKFKKADVKKLRGFNFIRDITHAEDKIVVKDTGEVIWDKKRDVDELDRIYNFKRMLITHEVHFEKADLFKQTVYGAKDSKEAGGKKQLISKKKGYPVDIYGGYTQETGSYLSVVRLTKKAMYAVVKVSTRDAAKLAVAKSISEQKENETLNDIIDEKLSKISKNGKITHELFEVVLPRVGQKTLFKNSKYNLFLVNSDTYMHNYQELWMPREYQKMWKDISLSKYGDAQTEDQLDQIFGFIVSQVNSYFNLYDINQFRKKLNDAADKFATLPMRDTDDMQGKIATIGQLLIGLQANAARSDLRNLDIKTPLGLLQIPNGISLDSDTSVVYQSPTGLLEREVHLSDL

SEQ ID NO: 269 - protein, 1361 aa, Lactobacillus casei
  REGION 1..1361: note = Lactobacillus casei Lc-10
MTKLGKPYGIGVDIGSNSIGFAAVDENSHLIRLKGKTVIGARLFEEGKAAADRRASRTTRRRLSRNRWRLSFLRDFFESHITPTGPNFFMRQKYSEISPKDKARYKYEKRLFNDRTDAEFYQQYPTMYHLRNRLLTDPSKADVREIYFAIHHILKSRGHFLTSGYAKDFNTNKVALNEIFPALQDAYAQVYPDLDITFDENKVNEFKTVLLNEKATPSDTQRALVNLLLAEDGDKDILKQQKQVLTEFAKAVVGLKTKLNVALGTEVDSSEATVWNFSLGQLDDKWAGIESAMTDEGTEILDQIRDLYRARLLNGIVPAGNTLSQAKVDDYAQHHEDLELFKDYLKQLEDDGTAKAIRQLYDRYIDGDDAKPFVREDFVKALTKEVTAHPNAKSPELLERLAQPDFMLKQRNKANGAIPVQMQQRELDQIIKNQSVYYDWLAAPNPVEKHRKSMPYQLDELLNFRIPYYVGPLVTAKEQKAAQGGVFAWMVRKDPDGNITPYNFDEKVDREASANTFIQRMKTTDTYLIGEDVLPKQSLLYQRYEVLNELNNVRVNNEKLSIEQKQQVIRELFERHNSVTIKQFAENLRAHGDYAHIPEIRGLADEKRFLSSLSTYRQLKSLLPDAIDDPAKQADIENIIAWSTVFEDAAIFKTKLKEINWLDSQTITKLSNIRYRGWGQFSHKFLNGLTLGNGHTIIQELFLSNNNLMQILTDETLQKKMTELNADKLKAANINDAIDDAYTSPSNKKALRQVLRVIEDIKRAADGQDPSWLYVETADGGGTPGKRTRARQHQLQEIYANAAHELIDSAVRGELEDKIADKADFNDRLVLYFMQGGRDIYTGTPLNIDQLSSYDIDHILPQSLIKDNSLDNRVLVHAIINREKNATFASTIYAQKMNATWRQWHEAGLISGRKLRNLQMRPDQIDKYASGFVARQLVETRQIIKLTEQIVAAQYPETKIIAVKAGLSHQLREELEFPKNRDVNHYHHAFDAFLAARIGTYLLKRFPNLQAFFTYGKFKKADVKKLRGFNFIRDITHAEDKIVVKDTGEVIWDKKRDVDELDRIYNFKRMLITHEVHFEKADLFKQTVYGAKDSKEAGGKKQLISKKKGYPVDIYGGYTQETGSYLSVVRLTKKAMYAVVKVSTRDAAKLAVAKSISEQKENETLNDIIDEKLSKISKNGKITHELFEVVLPRVGQKTLFKNSKYNLFLVNSDTYMHNYQELWMPREYQKMWKDISLSKYGDAQTEDQLDQIFGFIVSQVNSYFNLYDINQFRKKLNDAADKFATLPMRDTDDMQGKIATIGQLLIGLQANAARSDLRNLDIKTPLGLLQIPNGISLDSDTSVVYQSPTGLLEREVHLSDL

SEQ ID NO: 270 - protein, 1363 aa, Lactobacillus casei
  REGION 1..1363: note = Lactobacillus casei M36
MTKLGKPYGIGVDIGSNSIGFAAVDENSHLIRLKGKTVIGARLFEEGKAAADRRASRTTRRRLSRNRWRLSFLRDFFESHITPTDPNFFMRQKYSEISPKDKARYKYEKRLFNDRTDAEFYQQYPTMYHLRNRLLTDPSKADVREIYFAIHHILKSRGHFLTSGYAKDFNTNKVALNEIFPALQDAYAQVYPDLDITFDENKVNEFKTVLLDEKATPSDTQRALVNLLLAEDGDKDILKQQKQVLTEFAKAVVGLKMKLNVALGTEVDSSEATAWNFSLGQLDDKWAGIESAMTDEGTEILDQIRDLYRARLLNGIVPAGKTLSQAKVDDYEQHHEDLELFKDYLKQLEDDGMAKVIRQLYDRYIDGDDAKPFVREDFVKALTKEVTAHPNAKSPELLERLVQPDFMLKQRNKANGAIPVQMQQRELDQIIKNQSVYYDWLAAPNPVEKHRQSMPYQLDELLNFRIPYYVGPLVTAKEQKAAQGGVFAWMVRKDPDGNITPYNFDEKVDREASANTFIQRMKTTDTYLIGEDVLPKQSLLYQSYEVLNELNNVRVNDNKLSFDQKQQVLGELFERHNTVTIKQFVDNLLAHGDYDRIPEVRGLADEKRFLSSLSTYNQLKGILHEAIDDSDKQTDIEKIIAWSTIFEDKAIFKTKLNEISWLTAGMINSLANIRYRGWGQFSHKLLNELTLSTGRTVFEELLISSHNLMQILTDEVLKQKIAELNAHELKASGIYAAIDDAYTSPSNKKALRQVLSVIDDITNAAGQAPNWLYIETADGDGVPGKRTNSRQRKIQEIYANAAQELITGSVRGELEDKIASRADFTDRLVLYFMQGGRDIYTGEPLNIDNLSSYDIDHILPQSLIKDNSLDNRVLVHPLVNREKDTIFASTRFAKQMNGMWRQWHAAGLISSRKLRNLQMRPDEIDKYASGFVARQLVETRQIIKLTEQIVADQYPDAKIIAVKAGLSSQLRKELDFPKNREVNHYHHAFDAFLAARIGTYLLKRYPNLEPFFTYGKFKKTEVKKLKSLKSFNFIRDMTHAKDKIVAKETGEIVWDNASDINELDRIYNFKRMLITHEVRFETASLFKQTLYAAKNSKNRGGSRQLIPKKKGYLVDIYGGYTQETGSYLSVVRLTKKAMYAVVKVSTRDAAKLAVAKSISEQKENETLKKIIDGKLSKTSKKGKTTHQLFEIVLPRVGQKTLFKNSKYNQFLVNSDTYMHNYQELWMPREYQRMWKDILLSNHGDAQLEGQLDQIFKFIVSQVNSYFNLYDINQFRKKIADATDKFAKLPTHDTDNARGKIATIGQLLIGLQANAMRSDLRNLDIKTPFGLLQIGTGITLDLDTSIIYQSPTGLFEREVPLTDL

SEQ ID NO: 271 - protein, 1361 aa, Lactobacillus casei; identical to SEQ ID NO: 268
  REGION 1..1361: note = Lactobacillus casei group

SEQ ID NO: 272 - protein, 1360 aa, Lactobacillus casei
  REGION 1..1360: note = Lactobacillus casei T71499
MTKLGKPYGIGVDIGSNSIGFAAVDENSHLIRLKGKTVIGARLFEEGKAAADRRASRTTRRRLSRNRWRLSFLRDFFESHITPTDPNFFMRQKYSEISPKDKARYKYEKRLFNDRTDAEFYQQYPTMYHLRTRLLTDPSKADVREIYFAIHHILKSRGHFLTPGYAKDFNTNKVALNEIFPALQDAYAQVYPDLDITFDENKVNEFKTVLLNEKATPSDTQRALVNLLLAEDGDKDILKQQKQVLTEFAKAVVGLKTKLNVALGTEVDSSEATVWNFSLGQLDDKWAGIESAMTDEGTEILDQIRDLYRARLLNGIVPAGKTLSQAKVDDYAQHHEDLELFKDYLKQLEDDGTAKAIRQLYDRYIDGDDAKPFVREDFVKALTKEVTAHPNAKSPELLERLAQPDFMLKQRNKANGAIPVQMQQRELDQIIKNQSVYYDWLAAPNPVEKHRKSMPYQLDELLNFRIPYYVGPLVTAKEQKAAQGGVFAWMVRKDPDGNITPYNFDEKVDREASANTFIQRMKTTDTYLIGEDVLPKQSLLYQSYEVLNELNNVRVNDNKLSFDQKQQVLGELFERHNTVTIKQFVDNLLAHGDYDRIPEVRGLADEKRFLSSLSTYNQLKGILHEAIDDADKQTDIENIIAWSTIFEDKAIFKTKLNEISWLNAGMINSLANIRYRGWGQFSHKLLNELTLSTGRTVFEELLISSRNLMQILTDEVLKQKIAELNAHELKASGIYAAIDDAYTSPSNKKALRQVLSVIDDITNAAGQAPNWLYIETADGDGVPGKRTNSRQRKIQEIYANAAQELITGSVRGELEDKIASRADFTDRLVLYFMQGGRDIYTGEPLNIDNLSSYDIDHILPQSLIKDNSLDNRVLVHPLVNREKDTIFASTRFAKQMNGMWRQWHAAGLISSRKLRNLQMRPDEIDKYASGFVARQLVETRQIIKLTEQIVADQYPDTKIIAVKAGLSSQLRKELDFPKNREVNHYHHAFDAFLAARIGTYLLKRYPNLEPFFTYGKFKKTEVKKLKSFNFIRDMTHAKDKIVAKETGEIVWDNASDINELDRIYNFKRMLITHEVRFETASLFKQTLYAAKNSKNRGGSRQLIPKKKGYLVDIYGGYTQETGSYLSVVRLTKKAMYAVVKVSTRDAAKLAVAKSISEQKENETLKKIIDGKLSKTSKKGKTTHQLFEIVLPRVGQKTLFKNSKYNQFLVNSDTYMHNYQELWMPREYQRMWKDILLSNHGDAQLEGQLDQIFKFIVSQVNSYFNLYDINQFRKKIADATDKFAKLPTHDTDNARGKIATIGQLLIGLQANAMRSDLRNLDIKTPFGLLQIGTGITLDLDTSIIYQSPTGLFEREVPLTDL

SEQ ID NO: 273 - protein, 1366 aa, Lactobacillus casei
  REGION 1..1366: note = Lactobacillus casei UCD174
MTKLGKPYGIGVDIGSNSIGFAAVDENSHLIRLKGKTVIGARLFEEGKAAAYRRASRTTRRRLSRNRWRLSFLRDFFESHITPTDPNFFMRQKYSEISPKDKARYKYEKRLFNDRTDAEFYQQYPTMYHLRTRLLTDPSKADVREIYFAIHHILKSRGHFLTPGYAKDFNTNKVALNEIFPALQDAYAQVYPDLDITFDENKVNEFKTVLLNEKATPSDTQRALVNLLLAKEGDRDILKQQKQVLTEFAKAVVGLKTKLNVALGTEVDSSEATAWNFSLGQLDDKWAGIESAMTDEGTEILDQIRDLYRARLLNGIVPAGKTLSQAKVDDYAQHHEDLELFKDYLKQLEDDGTAKAIRQLYDRYIDGDDAKPFVREDFVKALTKEVTAHPNAKSPELLERLAQPDFMLKQRNKANGAIPVQMQQRELDQIIKNQAVYYDWLAAPNPVEKHRQSMTYQLDELLNFRIPYYVGPLVTAKEQKAAQGGVFAWMVRKDPDGNITPYNFDEKVDREASANTFIQRMKTTDTYLIGEDVLPKQSLLYQSYEVLNELNNVRVNDNKLSFDQKQQVLGELFERHNTVTIKQFVDNLLAHGDYDRIPEVRGLADEKRFLSSLSTYNQLKGILHEAIDDADKQTDIENIIAWSTIFEDKAIFKTKLNEISWLNAGMINSLANIRYRGWGQFSHKLLNELTLSTGRTVFEELLISSRNLMQILTDEVLKQKIAELNAHELKASGIYAAIDDAYTSPSNKKALRQVLSVIDDITNAAGQAPNWLYIETADGDGVPGKRTNSRQRKIQEIYANAAQELITGSVRGEFEDKIASRADFTDRLVLYFMQGGRDIYTGEPLNIDNLSSYDIDHILPQSLIKDNSLDNRVLVHPLVNREKDTIFASTRFAKQMNGMWRQWHAAGLISSRKLRNLQMRPDEIDKYASGFVARQLVETRQIIKLTEQIVADQYPDTKIIAVKAGLSSQLRKELDFPKNREVNHYHHAFDAFLAARIGTYLLKRYPNLEPFFTYGKFKKTEVKKLKSLKSLKSFNFIRDMTHAKDKIVAKETGEIVWDNASDINELDRIYNFKRMLITHEVRFETASLFKQTLYAAKNSKNRGGSRQLIPKKKGYLVDIYGGYTQETGSYLSVVRLTKKAMYAVVKVSTRDAAKLAVAKSISEQKENETLKKIIDGKLSKTSKKGKTTHQLFEIVLPRVGQKTLFKNSKYNQFLVNSDTYMHNYQELWMPREYQRMWKDILLSNHGDAQIEGQLDQIFKFIVSQVNSYFNLYDINQFRKKIADATDKFAKLPTHDTDNARGKIATIGQLLIGLQANAMRSDLRNLDIKTPFGLLQIGTGITLDLDTSIIYQSPTGLFEREVPLTDL

SEQ ID NO: 274 - protein, 1389 aa, Lactobacillus casei
MIIRTYELKTITTIAILKMFQLLTGGLSMTKLGKPYGIGVDIGSNSIGFAAVDENSHLIRLKGKTVIGARLFEEGKAAADRRASRTTRRRLSRNRWRLSFLRDFFESHITPTGPNFFMRQKYSEISPKDKARYKYEKRLFNDRTDAEFYQQYPTMYHLRNRLLTDPSKADVREIYFAIHHILKSRGHFLTSGYAKDFNTNKVALNEIFPALQDAYAQVYPDLDITFDENKVNEFKTVLLNEKATPSDTQRALVNLLLAEDGDKDILKQQKQVLTEFAKAVVGLKTKLNVALGTEVDSSEATVWNFSLGQLDDKWAGIESAMTDEGTEILDQIRDLYRARLLNGIVPAGKTLSQAKVDDYAQHHEDLELFKDYLKQLEDDGTAKAIRQLYDRYIDGDDAKPFVREDFVKALTKEVTAHPNAKSPELLERLAQPDFMLKQRNKANGAIPVQMQQRELDQIIKNQSVYYDWLAAPNPVEKHRKSMPYQLDELLNFRIPYYVGPLVTAKEQKAAQGGVFAWMVRKDPDGNITPYNFDEKVDREASANTFIQRMKTTDTYLIGEDVLPKQSLLYQRYEVLNELNNVRVNNEKLSIEQKQQVIRELFERHNSVTIKQFAENLRAHGDYAHIPEIRGLADEKRFLSSLSTYRQLKSLLPDAIDDPAKQADIENIIAWSTVFEDAAIFKTKLKEINWLDSQTITKLSNIRYRGWGQFSHKFLNGLTLGNGHTIIQELFLSNNNLMQILTDETLQKKMTELNADKLKAANINDAIDDAYTSPSNKKALRQVLRVIEDIKRAADGQDPSWLYVETADGGGTPGKRTRARQHQLQEIYANAAHELIDSAVRGELEDKIADKADFNDRLVLYFMQGGRDIYTGTPLNIDQLSSYDIDHILPQSLIKDNSLDNRVLVHAIINREKNATFASTIYAQKMNATWRQWHEAGLISGRKLRNLQMRPDQIDKYASGFVARQLVETRQIIKLTEQIVAAQYPETKIIAVKAGLSHQLREELEFPKNRDVNHYHHAFDAFLAARIGTYLLKRFPNLQAFFTYGKFKKADVKKLRGFNFIRDITHAEDKIVVKDTGEVIWDKKRDVDELDRIYNFKRMLITHEVHFEKADLFKQTVYGAKDSKEAGGKKQLISKKKGYPVDIYGGYTQETGSYLSVVRLTKKAMYAVVKVSTRDAAKLAVAKSISEQKENETLNDIIDEKLSKISKNGKITHELFEVVLPRVGQKTLFKNSKYNLFLVNSDTYMHNYQELWMPREYQKMWKDISLSKYGDAQTEDQLDQIFGFIVSQVNSYFNLYDINQFRKKLNDAADKFATLPMRDTDDMQGKIATIGQLLIGLQANAARSDLRNLDIKTPLGLLQIPNGISLDSDTSVVYQSPTGLLEREVHLSDL

SEQ ID NO: 275 - protein, 1354 aa, Lactobacillus coryniformis
  REGION 1..1354: note = Lactobacillus coryniformis subsp. coryniformis KCTC 3167
MTLHYNVGLDIGTNSVGYTIVDDNGKILQVKGKNGYGVRVFKEGATAAERRIFRTTHRRLKRRKWRLRLLQDFFEPYILPQDDGFFIRRKESNLVLNDRDEDTASLFNDRSDRDFYQAYPTIYHLRQALMTEKRQFDVREIYLAMHHIIKYRGHFLLNGTVNNFTNNKIDLHSDFEELNALLLNVIPELKFQIDLDHSTMFQTTLLNTTISRSGRQRDLVKSFYNGSDDKQLAKQQKSVATELLKAILGLKAKFHKLFNLDLLETTEWEFSFDAEDIDDKLAKLEPLMTENQQQVMDILQRIFAAITLNGIVPEGKTLSASKVDSYQKHKQDLKLLKAIAQHSDKKTATVLQTAYNEYINGIASKPLKQEDFYKRLTNAVKKSSDPQVADMLALIDQEKFLPKQRTKENGAIPHQLHQLELERIIDNQKDYYPWLAELNPNQARQKVAKYKLSELVAFRVPYYVGPLIEPEVQQATSNAHFAWMARKEAGPITPWNFDQKVDRNVSAERFIKRMTTKDTYLLAEDVLPLHSLLYQRFIVLNELNNVRVNGQKLTKKQKQAVYQDLFKRQPHVTKKQFKSYLVQTGEFAESSKIEGLANETSFNSGLTTENELRKIFGAQLDEARYQVDFEQIIEWATLFEDAKILRTKLAEITWLTTEQIEKLAGIRYRGWGRFSRKLLAGLRDQNGQQIIDLLWDTPNNFMVIVSQAAFSEAITKENEKLIDRRGAQDVITDLYTSPQNKKALRQVLAIVADVQKAMGGVPPQRIFIEFAREDEKNPRRSVERSRQLEKLYQTISNEFLINSEVRQELKEAVDQKVNFKDRLFLYFLQGGVDLYSGKRINIDQLSHYDIDHILPQSFIKDDSLDNRVLVSQKLNRSKSDSVPLSEFANYKFGPAMQAKWLQLKEAGLLSKRKYDNLTLDPTKLSKFAPLGFVNRQLVETRQVIKLAANLLASEETKVVTIKANMTHQVRKELDFPKNRNVNNYHHAFDAYLTAFVGIFLSKRYPKLKPYFTYGDFQKGNKLPDLKNFNFLYELKNKDRSIDSNTGEIIWDKQRDLAYMNKIYNFKKVTVVHEVLTKSGALYNQTLYKASEDKASGRGTKQLIRKKDNMPTELYGGYTGSTSAFMSIVRLWKKDKPYYKVVGIPTRMAAKLANQAQLLDYLTKKFTTRKLVKKTGDYKTTVERFELVVPKVGFNQLVIDGGQPFMLGSATYQYNARELFISKEAVKALNKQLSTHVDLVQVFDEILVQVNRWFPLYDTNGFREKLSHGRDRFMKLNDSFEEKSDTQIDVLNRILIGFHANAARTNLKILGLGTDLGFMTQQAGIRLTEKAILVHQSPSGLFERKVALRDLKGLR

SEQ ID NO: 276 - protein, 1119 aa, Lactobacillus coryniformis
  REGION 1..1119: note = Lactobacillus coryniformis subsp. torquens KCTC 3535
MGYRIGLDVGITSTGYAVLKTDKNGLPYKILTLDSVIYPRAENPQTGASLAEPRRIKRGLRRRTRRTKFRKQRTQQLFIHSGLLSKPEIEQILATPQAKYSVYELRVAGLDRRLTNSELFRVLYFFIGHRGFKSNRKAELNPENEADKKQMGQLLNSIEEIRKAIAEKGYRTVGELYLKDPKYNDHKRNKGYIDGYLSTPNRQMLVDEIKQILDKQRELGNEKLTDEFYATYLLGDENRAGIFQAQRDFDEGPGAGPYAGDQIKKMVGKDIFEPTEDRAAKATYTFQYFNLLQKMTSLNYQNTTGDTWHTLNGLDRQAIIDAVFAKAEKPTKTYKPTDFGELRKLLKLPDDARFNLVNYGSLQTQKEIETVEKKTRFVDFKAYHDLVKVLPEEMWQSRQLLDHIGTALTLYSSDKRRRRYFAEELNLPAELIEKLLPLNFSKFGHLSIKSMQNIIPYLEMGQVYSEATTNTGYDFRKKQISKDTIREEITNPVVRRAVTKTIKIVEQIIRRYGKPDGINIELARELGRNFKERGDIQKRQDKNRQTNDKIAAELTELGIPVNGQNIIRYKLHKEQNGVDPYTGDQIPFERAFSEGYEVDHIIPYSISWDDSYTNKVLTSAKCNREKGNRIPMVYLANNEQRLNALTNIADNIIRNSRKRQKLLKQKLSDEELKDWKQRNINDTRFITRVLYNYFRQAIEFNPELEKKQRVLPLNGEVTSKIRSRWGFLKVREDGDLHHAIDATVIAAITPKFIQQVTKYSQHQEVKNNQALWHDAEIKDAEYAAEAQRMDADLFNKIFNGFPLPWPEFLDELLARISDNPVEMMKSRSWNTYTPIEIAKLKPVFVVRLANHKISGPAHLDTIRSAKLFDEKGIVLSRVSITKLKINKKGQVATGDGIYDPENSNNGDKVVYSAIRQALEAHNGSGELAFPDGYLEYVDHGTKKLVRKVRVAKKVSLPVRLKNKAAADNGSMVRIDVFNTGKKFVFVPIYIKDTVEQVLPNKAIARGKSLWYQITESDQFCFSLYPGDMVHIESKTGIKPKYSNKENNTSVVPIKNFYGYFDGADIATASILVRAHDSSYTARSIGIAGLLKFEKYQVDYFGRYHKVHEKKRQLFVKRDE

SEQ ID NO: 277 - protein, 1368 aa, Lactobacillus curvatus
  REGION 1..1368: note = Lactobacillus curvatus CRL 705
MSRPYNIGLDIGTSSIGWSVVDDQSKLVSVRGKYGYGVRLYDEGQTAAERRSFRTTRRRLKRRKWRLGLLREIFEPYITPIDDTFFLRQKQSNLSPKDQRKLYTQTSLFNDRTDRAFYDDYPTIYHLRYRLMTEKRQFDIREIYLAMHHIVKYRGHFLNEAPVSSFKSSEINLVAHFDRLNTIFADLFSESGFQLETDKLAEVKALLLDNQQSASNRQRQALSLIYTPSTNKAVEKQNKAIATELLKAILGLKAKFNVLTGIEAEDVKAWTLTFNAENFDEEMVKLESSLDDNAHQIIESLQELYSGVLLAGIVPENQSLSQAMITKYDDHQKHLKMLKAVREALAPGDRQRLKQAYDQYVDGQENTKAYSKEDFYGDITKALKNNPDHPIVSEIKKLIELDQFMPKQRTKDNGAIPHQLHQQELDRIIENQQQYYPWLAELNPNSKRQTVAKYKLDELVAFRVPYYVGPLITAEQQRQSSDAKFAWLIRKAEGRITPWNFDDKVDRQASANEFIKRMTTTDTYLLAEDVLPKQSLIYQRFEVLNELNGLKIDDQPITTELKQAIFTDLFMQKISVTVKNIQDYLVSEKRYASRPAITGLSDENKFNSRLSTYHDLKMIVGDAVDDVDKQADLEKCIEWSTIFEDGKIYSAKLNEIDWLTDQQRVQLAAKRYRGWGRLSAKLLTQIVNANGQRIMDLLWDTTDNFMRIVHSEDFDKLITEANQMMLAENDVQDVINDLYTSPQNKKALRQILLVVNDIQKAMKGQAPERILIEFAREDEVNSRLSVQRKRQVEQVYQNISNELLNNTEIRNELKDLSNSALSNTRLFLYFMQGGRDMYTGDSLNIDRLSTYDIDHILPQSFIKDNSLDNRVLVSQKMNRSKADQVPTDFTSVELGQKMQIQWEQMLRAGLITKKKYDNLTLNPDHISKYAMKGFINRQLVETRQVIKLATNLLMEQYGEDNIELITVKSGLTHQMRTEFDFPKNRNLNNHHHAFDAYLTAFVGLYLLKRYPKLKPYFVYGEYQKASQQDKWRNFNFLNGLKKDELVDENTEAVIWDKESGLAYLNKIYQFKKILVTRGVHENSGALFNQTLYAAKDDKASGQGGKQLIPAKQDRSTALYGGYSGKTVAYMCIVRIKNKKGDLYKVCGVETSWLAQLKQLTDEDSQKAFLEQKISPQFTKVKKQKGNIIEAVEEFEVIAPHILINQRFFDNGQELTLGSATYKHNEQELILDKTAVKLLNGALPLTQSEELAEQVYDEILDQVMHYFPLYDTNQFRAKLSTGKAAFMKLPWKSQWDGNKMVQVGQQVILDRILIGLHANAAMSDLKVLKMTTPFGMIQQSTGITLSADTQIIYQSPTGLFERRVALRDL

SEQ ID NO: 278 - protein, 1126 aa, Lactobacillus farciminis
  REGION 1..1126: note = Lactobacillus farciminis KCTC 3681
MADRISLGLDIGVASVGFSVLDIDKGKVIELGARLFSATVAAGNQDRRDMRGARRLLNRNKQRRQDTGKLFKKFGLIDDFDKGSFYDNFNQNLNPYELRVKGLTEQLTKEELAESLYQIVKHRGISYALKDADVDEGGTDYSVSLKINSQELAEKTPAQIQLQRLNDYGKVRGQVVIGDDPDNQKVLLNVFPTSAYEKEAKQIIATQQQFYPESLTDKFTEEYCQILTRKRDYFVGPGNEKSRTDYGIYKTDGRTLDNLFEELIGHDKIYPEELRASAASYTAQLFNVLNDLNNLRILNYEDGKLTKEDKEKIIAEIKNNTTTINMLNVIKKVAGCSKDDIKGFRVNEKDKPEISSMPVYRKIHKDLLKAGVDISDWPVEFIDELSFILTLNTENGEIRKQLNNRLAPKFDFLNADLIQLIIDNKDSFEIKTNNKWHRFSVKTMNKLIPEMMERPVEQMTLLNEMGLVKKDKKRFENNKYLPYKEIAKDIFNPVASKSVREALKIVNAVLKKYGHIDYLVVEMPRDKNLKEEQDNIKEFQNKNKKAKDAAFEAFVKSVGSEQRVKEALSKNRKLQMKMRLWYQQQEIDPYNGKTIDATDLINNPDKFEIDHIIPQSISFYDSINNKTLCFASMNQVKGQKTPYEFMLEGHGQSYDKFKATVMANKNFGKAKRANYLFEENVSDIETRKRFLSRNLVDTRYSSRVVLNSLQDFFREKSADTKVTVIRGKFTSNMRKHWHIDKTRETFHHHAIDASIIAATPFLRMWKKGGTIFPVKVGEESIDIETGEILDDKNFDKAMYEEPYSGFVSEIMNADDRIKFSHQVDKKMNRKVSDATIYSTRTGKLAKDKKDAEYIVAKVKDIYSVDGFKKFKKVYDKDKTKFLLYKYDPRTFSKLERIISDCPDKVEKVQTNGKVKAVDISPFEMYRRDHGMIKKYSKKGNGPAIKQLKYLDKKLGSHIDITPANANGKHVILQSLKPWRTDVYLNHETGEYEIMGIKYSDLKFNKNEGYGIKKDKYLEIKKVEEVSEKSEFMFSLYRKDRVKVQDMKTGESVELLFWSRNFSNKKYAELKPISQAENDKKLPVYGKGRLIKRLIPKNCKIWKVNTTILGDPYYLEKESDSPKDILD

SEQ ID NO: 279 - protein, 1356 aa, Lactobacillus farciminis
  REGION 1..1356: note = Lactobacillus farciminis KCTC 3681
MTKKEQPYNIGLDIGTSSVGWAVTNDNYDLLNIKKKNLWGVRLFEEAQTAKETRLNRSTRRRYRRRKNRINWLNEIFSEELAKTDPSFLIRLQNSWVSKKDPDRKRDKYNLFIDGPYTDKEYYREFPTIFHLRKELILNKDKADIRLIYLALHNILKYRGNFTYEHQKFNISNLNNNLSKELIELNQQLIKYDISFPDDCDWNHISDILIGRGNATQKSSNILKDFTLDKETKKLLKEVINLILGNVAHLNTIFKTSLTKDEEKLNFSGKDIESKLDDLDSILDDDQFTVLDAANRIYSTITLNEILNGESYFSMAKVNQYENHAIDLCKLRDMWHTTKNEEAVEQSRQAYDDYINKPKYGTKELYTSLKKFLKVALPTNLAKEAEEKISKGTYLVKPRNSENGVVPYQLNKIEMEKIIDNQSQYYPFLKENKEKLLSILSFRIPYYVGPLQSAEKNPFAWMERKSNGHARPWNFDEIVDREKSSNKFIRRMTVTDSYLVGEPVLPKNSLIYQRYEVLNELNNIRITENLKTNPIGSRLTVETKQRIYNELFKKYKKVTVKKLTKWLIAQGYYKNPILIGLSQKDEFNSTLTTYLDMKKIFGSSFMEDNKNYDQIEELIEWLTIFEDKQILNEKLHSSKYSYTPDQIKKISNMRYKGWGRLSKKILMDITTETNTPQLLQLSNYSILDLMWATNNNFISIMSNDKYDFKNYIENHNLNKNEDQNISDLVNDIHVSPALKRGITQSIKIVQEIVKFMGHAPKHIFIEVTRETKKSEITTSREKRIKRLQSKLLNKANDFKPQLREYLVPNKKIQEELKKHKNDLSSERIMLYFLQNGKSLYSEESLNINKLSDYQVDHILPRTYIPDDSLENKALVLAKENQRKADDLLLNSNVIDRNLERWTYMLNNNMIGLKKFKNLTRRVITDKDKLGFIHRQLVQTSQMVKGVANILDNMYKNQGTTCIQARANLSTAFRKALSGQDDTYHFKHPELVKNRNVNDFHHAQDAYLASFLGTYRLRRFPTNEMLLMNGEYNKFYGQVKELYSKKKKLPDSRKNGFIISPLVNGTTQYDRNTGEIIWNVGFRDKILKIFNYHQCNVTRKTEIKTGQFYDQTIYSPKNPKYKKLIAQKKDMDPNIYGGFSGDNKSSITIVKIDNNKIKPVAIPIRLINDLKDKKTLQNWLEENVKHKKSIQIIKNNVPIGQIIYSKKVGLLSLNSDREVANRQQLILPPEHSALLRLLQIPDEDLDQILAFYDKNILVEILQELITKMKKFYPFYKGEREFLIANIENFNQATTSEKVNSLEELITLLHANSTSAHLIFNNIEKKAFGRKTHGLTLNNTDFIYQSVTGLYETRIHIE

SEQ ID NO: 280 - protein, 1313 aa, Lactobacillus fermentum
  REGION 1..1313: note = Lactobacillus fermentum 28-3-CHN
MHYLDEIFAPHLQEVDENFLRRLKQSNIHPEDPAKNQAFIGKLLFPDLLKKNERGYPTLIKMRDELPVEQRAHYPVTNIYKLREAMINEDRQFDLREVYLAVHHIMKYRGHFLNNASVDKFKVGRIDFYKSFNVLNEAYEELQNGEGSFTIEPSKVEKIGQLLLDTKMRKLNRQKAVAKLLEVKVADKEETKRNKQIATAMSKLVLGYKADFATVAMANGNEWKIDLSSETSEDEIEKFREELSDAQNDILTEITSLFSQIMLNEIVPNGMSISESMMDRYWTHERQLAEVKEYLATQPASARKEFDQVYNKYIGQAPKERGFDLEKGLKKILSKKENWKEIDELLKAGDFLPKQRTSANGVIPHQMHQQELDRIIEKQAKYYPWLATENPATGERDRHQAKYELDQLVSFRIPYYVGPLVTPEVQKATSGAKFAWAKRKEDGEITPWNLWDKIDRAESAEAFIKRMTVKDTYLLNEDVLPANSLLYQKYNVLNELNNVRVNGRRLSVGIKQDIYTELFKKKKTVKVSDVASLVMAKTRGVNKPSVEGLSDPKKFNSNLATYLDLKSIVGDKVDDNRYQTDLENIIEWRSVFEDGEIFADKLTEVEWLTDQQRSALVKKRYKGWGRLSKKLLTGIVDENGQRIIDLMWNTDQNFMQIVNQPVFKEQIDQLNQKAITNDGMTLREWVESVLDGAYTSPQNKKAIWQVVRVVEDIVKAVGNAPKSISIEFARNEGNKGEITRSRRTQLQKLFEDQAHELVKDTSLTEELEKAPDLSDRYYLYFTQGGKDMYTGDPINFDEISTKYDIDHILPQSFVKDDSLDNRVLVSRAENNKKSDRVPAKLYAAKMKPYWNQLLKQGLITQRKFENLTMDVDQNIKYRSLGFVKRQLVETRQVIKLTANILGSMYQEAGTDIIETRAGLTKQLREEFDLPKVREVNDYHHAVDAYLTTFAGQYLNRRYPKLRSFFVYGEYMKFKHGSDLKLRNFNFFHELMEGDKSQGKVVDQQTGELITTRDEVAKSFDRLLNMKYMLVSKEVHDRSDQLYGATIVTAKESGKLTSPIEIKKKRPVDLYGAYTNGTSAFMTIIKFTGNKPKYKVIGVPTTSAVGLKRVGKPGSESYNQELHRIIKSNPKVKKDFEIVVPHVSYSQLIVDDDCKFTLASDTYQHPATQLVLSKESMEIIADDFKFVKENTATADEQLVRVFDEIVNQMNHYFTIFDQRSNRQKVTKARDKFVSLPTESEYEGAKKTQVGKTEVITNLLMGLHANSAQGDLKVLGLSTFGFFQSSGGLNLSEDAMIVYQSPTGLFERRICLKDI

SEQ ID NO: 281 - protein, 1381 aa, Lactobacillus fermentum
  REGION 1..1381: note = Lactobacillus fermentum ATCC 14931
MDYVKEYHIGLDIGTSSIGWAVTDSQFKLMRIKGKTAIGVRLFEEGKTAAERRTFRTTRRRLKRRKWRLHYLDKIFAPHLQEVDENFLRRLKQSNIHPEDPAKNQAFIGKLLFPDLLKKNERGYPTLIKMRDELPVEQRAHYPVTNIYKLREAMINEDRQFDLREVYLAVHHIVKYRGHFLNNASVDKFKVGRIDFDKSFNVLNEAYEELQNGEGSFTIEPSKVEKIGQLLLDTKMRKLDRQKAVAKLLEVKVADKEETKRNKQIATAMSKLVLGYKADFATVAMANGNEWKIDLSSETSEDEIEKFREELSDAQNDILTEITSLFSQIMLNAIVPNGMSISESMMDRYWTHERQLAEVKEYLATQPASARKEFDQVYNKYIGQVPKEKGFDLEKGLKKILSKKENWKEIDELLKAGDFLPKQRTSANGVIPHQMHQQELDRIIEKQAKYYPWLATENPATGERDRHQAKYELDQLVSFRIPYYVGPLVTPEVQKATSGAKFAWAKRKEDGEITPWNLWDKIDRAESAEAFIKRMTVKDTYLLNEDVLPANSLLYQKYNVLNELNNVRVNGRRLSVGIKQDIYTELFKKKKTVKAGDVASLVMAKTRGVNKPSVEGLSDPKKFNSNLATYLDLKSIMGDKVDDNRYQMDLENIIEWRSVFEDGEIFADKLTEVEWLTDEQRSALVKKRYKGWGRLSKKLLTGIVDENGQRIIDLMWNTDQNFMQIVNQPVFKEQIDQLNQKAITNDGMTLRERVESVLDDAYTSPQNKKAIWQVVRVVEDIVKAVGNAPKSISIEFARNEGNKGEITRSRRTQLQKLFEDQAHELVKDTSLTEELEKAPDLSDRYYFYFTQGGKDMYTGDPINFDEISTKYDIDHILPQSFVKDDSLDNRVLVSRAENNKKSDRVPAKLYAAKMKPYWNQLLKQGLITQRKFENLTMDVDQNIKYRSLGFVKRQLVETRQVIKLTANILGSMYQEAGTDIIETRAGLTKQLREEFDLPKVREVNDYHHAVDAYLTTFAGQYLNRRYPKLRSFFVYGEYMKFKHGSDLKLRNFNFFHELMEGDKSQGKVVDQQTGELITTRDEVAKSFDRLLNMKYMLVSKEVHDRSDQLYGATIVTAKESGKLTSPIEIKKNRPVDLYGAYTNGTSAFMTIIKFTGNKPKYKVIGVPTTSAVGLKRVGKPGSESYNQELHRIIKSNPKVKKDFEIVVPHVSYSQLIVDGDCKFTLASDTYQHPATQLVLSKESMEIIADDFKFVKENPATADEQLVRVFDEIVNQMNHYFTIFDQRSNRQKVTKARDKFVSLPTESEYEGAKKTQVGKTEVITNLLMGLHANAAQGDLKVLGLSTFGFFQSSGGLNLSEDAMIVYQSPTGLFERRICLKDI

SEQ ID NO: 282 - protein, 1327 aa, Lactobacillus florum
  REGION 1..1327: note = Lactobacillus florum 2F
MTEQQQPYNIGLDIGTSSIGWAVTDQNDKLLHIRGHNGIGVRLFKEGESAAERRGFRTTRRRLSRRRWRLRFLDRIFDAELAKVDPNFLARLKQSNISPLDPNKQMFGNILFDDPQFDDQKFHQQYPTIYHLRSALAQPDAPQADVRLIYLALHHMIKFRGHFLNGAAVEKFHGGQLHLESEFQELNQIFSNQQRDHVQLQTSSLDEVATILKDNQRTPSDRQRELSARLFVPVDKTIDKENKKLATELLKAVLGLKAKFDVILGVEATDPQAFKLQFSSDDFDDKIAELASELTDEANEILTVLQRLYFSLNLADILTNRQTKQVADSISTAMINRYDDHKHHLKMLKELEAQVTQEQRDGLKKAYDEYIDGDKPTIDTFYTNIKKNLDDSELANQIKSLIDLQAFMPKQRSKENGSIPHQLHQRELDQLIEVQGKYYPWLLAAKDKLDALIAFRVPYYVGPMIDPNQSDDPQNTKFAWMVRKEAGEITPWNFEEKVDKTSSATNFIKRMTTTDTYLLGEPVLPKNSLLYQQFTVLNELNKLKVNGKALTVDQKKYLYEHVCKKQRRVTLKKLSDCLMARGDFPMGAIFTGTTDQKNMNNTLKTYQDFQEIFGDEIDNPDRQVDFEKMIEWSAIFEDREIFKLKLAELNWLTSEQLERVSKKRYQGWGRLSQKLLTHIVNENGERIIDQLWNTNQNFMEIMGQDSVKQAIQEHNGANVAQTGINETIDELYTSPQNKKAIRQILLVVDDIKKAVGYAPANIMMEFAREDRDDHRLIASRARQLEKTYQEISKNWFDNESVTQELKDQIKNKTKFTDRLYLYFIQGGIDLYTGHPLNIDQLSSYDIDHILPQSFLLDNSLNNRVLTSQAENRVHKEDRLPGETVANKMRPTWKMMREQGLMTQRKYNNLTLKPDQISKFNNRGQFINRQLVETRQVIKLAADIMSQKYQADQTKVVTVKANLTHHMREKFNFYKSRNVNDYHHAFDAYLTLFVGNWLLKEYPKLQPYFVYGDFAKTGTNNLKSFNFLYRFERDHKLNDKGAIDTDKDQQLGYMKRIYRFKKMLVTKQLETNEGALYGQTLYPAPKNDKKTRNLINSKKNRPSDIYGGYSNENGSFLTLVKLKKGSKYDYRLVAVPVSKISEIKESELATIEKAIAPQFLKSSGKYRDFQVVLSKILINQKVIDDGMIFTIGSKSYKHNAKQVVLSDNSIQIVSTLSRISDKEKLITVFDEIVDITSKYLPWYKVNDVEKTKMLFRQMQDIDEMKKIIDNSLIGLHCNASITDLGKVGLSKYWGRFVLTAGISLTVDAQLIYQSPTGLFEHRVKVSDL

SEQ ID NO: 283 - protein, 1391 aa, Lactobacillus gasseri
  REGION 1..1391: note = Lactobacillus gasseri JV-V03
MTKIKNEYIVGLDVGTNSCGWVAMDFQNTILRMHGKTAIGSHLFDAGNSAADRRAFRTTRRRIKRRKWRLKLLEEIFDPYMTEVDPYFFARLKESGLSPLDKRKNVSSIVFPTALEDKKFYCNYPTIYHLRYDLMSEDKKFDLREIYLAIHHIVKYRGNFLYNTPVKDFEASKIDVKDSLEKLNELYERLDSEFTVELDSSNALEIEKIIRDKKVFKINKVKSIHQLLSLKTENKERTKLIKDVSKQIINAILGYKTKFETILLKNISKDEADDWEFKLTDVDADNKFENLIGDLNENEQEILLEIRNLANAITLSNIVEEGKTLSESMIDKYNKHSDDLELLKQVISDHPDRDKAKKLALAYDLYVNNRHGKLLQAKDVLGSKKTLSKEDFYKEVKKNLDDSKASQEILDTIALDSFMPKQRTNENGVIPYQLHQLELDRIIKNQGKYYPFLKEVNPVSSHLKEAPYKLDELIRFRVPYYVGPLISPNESTKNKQTKKNQNFAWMIRKEQGQITPWNFDQKVDRMASANKFIKRMTTKDTYLLGEDVLPANSLLYQKFTVLNELNNIKINGKRISVPLKEELYNNLFKKNSTVTTNKLKSYLKENYNLINVEIKGLADEKKFNSGLTTYNKLRNLKIFDQQLDDLNYDKDFERIIEWSTIFEDKAIYKDKLKTIKWLSDRQIDKLSKIRMQGWGQLSKKLLSQLTDNNGQTIIEQLWDSQNNFMQIVNQSDFKDAIAVANQNLLVNTSVEDILNEAYTSPANKKAIRQVVKVVDDIVKAASGKVPKQIAIEFTRDADDKAKISQTRANKLRKVYKELSNELASETIRNELERVAKDQKLLKDKYYLYFMQLGRDAYTGEPINIDDLGQYDIDHILPQSFIKDDSLENRVLVKKAVNNGKSDNVPVKLYGNRMAADLGMTIRHMWEKWKDQGLITKTKYNNLIIDPDKINKYESSGFIHRQLVETSQIIKLVSTILQSKYPDTEIIVVKARYNHYLRKHLNLYKSREVNDYHHAIDAYLSAICGNLLYQVYPYLRPFFVYGQYKKFSSDPKKEKIIYDKTRKYNFISQIFENKSNDIISLETKKKVFDKKDIIEKLKHAYNYKYMLVSRETETHDQEMFKMTVYPRLSRDTKKSRNLISKKKDMPTEIYGGYTNNSDAYMVIARINKKKGTEYRVFGVPMRELVNLRKAEKNGRYNAYLKQVLEPEIMYSKNGKKNKTISSFEIVKAKVPYKQVILDGDKKFMLASSTYVQNAKQLTLSQNSMQAITDNCENDTEEEKALEEKALIEAYDEILTNIDKYLPLFDINKFREKLHAGREKFINLSLDVKKDTILQVLNGLHDNAVMPKIKSLGLSTPLGFMQFSSGVPLSENAKLIYQSPTGLFEKRVKISDL

SEQ ID NO: 284 - protein, 1386 aa, Lactobacillus sp.
  REGION 1..1386: note = Lactobacillus hominis CRBIP 24.179
  source 1..1386: note = Lactobacillus hominis
MTKITEDYIVGLDIGTNSCGWVAMDSKNTILRMHGKTAIGSHLFDAGNSAADRRAFRTTRRRIKRRKWRLKLLEEIFDSHLAKVDPYFFARLKESGLSPLDTRKNVSSIIYPTSLEDKKFYVDNPTIYHLRYKLMTEDRKFDLREVYLAIHHIVKYRGNFLYNTPVKAFEASKIDVKGSLKKLNELYEGLDSEFNVELDSNNALEIENIIRDKKIFKINKVKEINQLLSLKTEDKERTKLMKDVSKQIVNAILGYKTKFETILLKDVSKDEADDWEFKLTDVDADNKFENLIGDLNENEQEILLVIRKLANAITLSNIVEEGKTLSESMKDKYKKHSDDLKLLKQVISDHPDRDKAKKLALAYDLYVNNRHGKILQAKDILEKKKTLSKEDFYKEIKKNLDDSKESQEILDAISLDSFMPKQRTNENGVIPYQLHQLELDKIIENQGKYYPFLKEVNPVSSHLKQAPYKLDELIRFRVPYYVGPLISPNESTKNKQTKKNQNFAWMIRKEQGQITPWNFDQKVDRMASANKFIKRMTTIDTYLLGEDVLPANSLLYQKFTVLNELNNVKINGKRISVPLKQELYNNLFKKNSTVTTNKLKSYLKENYKLIKVEIKGLSDEKKFNSGLTTYNKLKNLKIFDQQIDDPNYNKDFERIIEWSTIFEDKAIYKEKLKTIDWLSDRQIDKLSKIRMQGWGQLSKKLLSQLTDNNGQTIIEQLWDSQNNFMQIVNQADFKDAIAVANQNLLVDTSVEDILNEAYTSPANKKAIRQVVKVVDDIVKATSGKVPKQIAIEFTRDADDNAKISQSRANKLRKVYKEMSNELASETIRNELERVAKDQKLLKDKHYLYFMQLGRDAYTGELIDIDNLEQYDIDHVLPQSFIKDDSLENRVLVKKAVNNGKSDNVPVKLYGNRMATDLGMTIRHMWEKWKEQGLITKTKYNNLIIDPDKINKYESSGFIHRQLVETSQIIKLVSTILQSKYPDTEIIVVKARYNHYLRKRLNLYKSREVNDYHHAIDAYLSAICGNLLYQVYPYLRPFFVYGQYKKFSSEPEKEKIIYDKTRRYNFISQIFENKDNDIISRETKKKVFDKKDIIEKLKRAYNYKYMLVSRETETHDQEMFKMTVYPRLSRDTKKSRNLIPKKKDMPTEIYGGYTNNSDAYMIIARINKKKGPEYRVFGVPMRELVNLRKAEKNGHYKAYLKQVLEPEIMYSKNGKKNKTISSFEIVKAKVPYKQVILDGDKKFMLASSTYVQNAKQLTLSQYSMQAITDNCENDTEEEKALVEAYDEILTNIDKYLPLFDINKFREKLHAGREKFVDLPLAEKKETILQVLNGLHDNAVMPKIKSLGLSTPLGFMQFHTGVSLSENAKLIYQSPTGLFEKRLKISDL

SEQ ID NO: 285 - protein, 1369 aa, Lactobacillus iners
  REGION 1..1369: note = Lactobacillus iners LactinV 11V1-d
MNNNYYLGLDLGTNSVGWAVTDDHYNIIKFHGKHMWGMRLFEEAETAKDRRLHRQARRRRQRLVERINLLEELFDKEISKVDQGFFARKKESDLHFEDKTTKSEYALFNDKSYTDRDYYKQYPTIFHLIMDLIENDKKRDIRLVYLACHYLIKHRGHFIFDGKNFTVDNSFENLLDKLITYLKDNDDITLSFPKDQLINIFKNSNLNSTEKSDQLKPFFGRTNLEKGIIKLLSGGKQDLSNMFRDETLKNSNYKNLKFSDNRFDDERDGYAADLGDRIDLLILLKQIYDASILESMMSQARVSIDGHKYISSAKVCAYEKHKSDLKRLKSLIKKYLPSEYNNIFRKITEKDNYVAYSKSNITNNKREKALKYVKYVDFTKYLTKKLKTIKTQDAEDDQEIFEIKGELEKQSFLPKQRTLDNSIIPYQLHLMELKKILDNQSKYYDFLLAKDDQEGITVKDKIISLLTFRLPYYIGPVNPAVHGKFAWVKRLANGKVTPWNYKEKIDIDASHEEFIKTKLSKCSFLIGCDVLPKNSLLYQKYMVLSELNTIKFNGVNISEKLKDDIYQNLFKNIQKVTKKRLQNYIKEHENIIGDVIVTGIDNAFKQGLVSYLKFKKIIGDKVDDDRYQKVLEKIIRDITLYDECAGKKIKKEYKDSDLFTEDELNKIVKLTFNDWGRLSAELLDQLEGEDTVSGETGKIIEFMQKHNYNLMQLMSKKFTFKSKIDEINKSYYQHDKFNYKSMIDSLYVSPATKRILWQSLKVVHEISKIMKHDPEKIFIEMARSKEDHPKRKLSRKADLKQVYKDSKKQIISIIGKDKYQDLSNELDNKDDRDLRWDNLYLYYTQLGRSMYSLKPIDISELMNKNLYDQDHIFPKSKKYDDSIENRVLVEKELNVKKSDIYPISDANIIPQKIKGQVESFWKMLYDHKLIGDKKYARLIRSKAFTDDELAGFIARQLVETRQATKETADLLKRLCPKSRIVYAKAQNASIFRQKFDIPKSRTINDLHHAQDAYLNIVVGNIFDTKFTQDPRNFIKNTKDSRNYNLEKIYDYNVERNNYVAWIAPDGETNGTIANVKCNLSTKDFRVTRPSFYKKGALFNQNLSRKGSNLAPIKEHSPKSNPLKYGGYSGKNNSFFVVVAGKDNKGKDIVKLIPVNTLIYNKMLHCDYKAKQELLTSYVANNFAINNFRIVKDDIKMYSLVKIDGAYYYLVGGTDERIEVKNAMQLLLSKDSIKAVKILEKESKDQFANIKNYKDIDIKLGRTFNEVVSKYTNSVFGKSMLISDKYRKDIFKSVEKSILEFNHLDTIGKADNLLKFVTLMRPSGSAHSLKMVGLIERIRKSNVISNFNEFKLINQSVTGLFENEEDLLKL

SEQ ID NO: 286 - protein, 1391 aa, Lactobacillus jensenii
  REGION 1..1391: note = Lactobacillus jensenii 269-3
MKEIKDYIIGLDIGTNSCGYVVTDKQNNILKLKGKTAIGARLFKEGEAAADRRAFRTTRRRLARRRWRLSLLEEIFDEEMNKVDPSFFRRLKESDYSPKDRRKQFNSIVFESSEADKAFYEKYPTIYHLRNALMHDNQKHDLREIFLAVHHIVKYRGNFLREDSVKAFKAAKFTLQGEDGIGPVDKLNDLLKEIYIEAAPELATDNLSKIEDIIKDKKLYKQDKLKQIANLLPKAVDSKDKAKLNKDIAKQVANALMGYMFRLDTLFSFTDVDVKDYKLKFSDANIDESLDALTSLLTDAQIEFVLELQSIYNTIVLNEIVPDGMSLSESMVKKYDDHKKDLKLYKEYIDSLSDQKKAKQLEAAYALYVNYRKADLLAAKKLFEKKKIGDKKFVDVISNFEVFGKFVSDNLDDSELANKIKARLDLGEFLPKQRTNQNGVIPYQLHQVELTQILEKQGKYYPFLITPNPVESHRNNAPYEISELVSFRVPYYVGPLIDNQSIKDKQNKNKFAWMVRQKQGQITPWNFEEMVDTTESANQFIKRMTRKDTYLLAEDVLPKSSLIYQKFMILDELNRIKIDGKKLTSKLKHDIFEKLFKKQKSINLDNLKNYLLAEGNIPGLIEGLSDGINFNNSFSTYIDYRNIFGDEIDNPNKQADFEKMIEWSTVFEDRKIFKRKLKEITWLTPEQIKQVSSKRYSGWGRLSKKLLTQITDENGVNILQRLWNEPETLTEVLANPVIKRKISEANSLFVQINKVENILDDAYTSPQNKKAIRQVIRVVDDIIAAAHGKKPSQIAIEFARSSQNKAKVPDTRKKQLDKIYNKISSEILDSSIKNELKNLKSNKYLSKDKLFLYFKQMGRDAYTGDKLSLDQLQNYDIDHIFPRSFIKDDSLDNRVLTQKPINAKKSDYGIPALEFGNKYVPDLGITVKEMWKLWQENGLISKSKLINLCTNPKKIGSKRASGFINRQLVETSQVIKLVAIILQAEFPDTEIIEVKALQNTTLRESFHLYKNRSVNDYHHAIDAYLTTIVGNYLYQVYPKLRPYFVYGQFKKFNQEKNIDILKRLKNFNFLRQLIFNTDDNIYISGTKEIVFNKKDIIHKLETAYGYKYMNISRECYQETSSLFNQTLYAHNSSVKNSLIPKKKGLPTEIYGGYSGNKDSFFVLVKIVKKRTNLYRIVGIPTRELAKLNSSNNYNQALNKIVESKLCLKETESFKILIKRLLYGTLIVDNGQKFRIGSFKEKHNVQQLVLQLKSMKYIKFYIDGGQNYFTDVERKKLEKQDRDKCLLYVFDDIMNVVNKRFTLFDMSKYEKDGDSLREKFNCLDFNDKVSILSDLLKAFHANSDRTSITKLKITNLGRHQAGKNGITLTTNAQIIYQSPTGLFERRIKIKDL

SEQ ID NO: 287 - protein, 1395 aa, Lactobacillus jensenii
  REGION 1..1395: note = Lactobacillus jensenii 27-2-CHN
MKEIKDYIIGLDIGTNSCGYVVTDKQNNILKLKGKTAIGARLFKEGQAAADRRSFRTTRRRLARRHWRLGLLEEIFDPEMEKIDPNFFRRLKESDYSPKDSRKQFNAIVFKSIKADKRFYKKYPTIYHLRNALMHDNQKHDLREIFMAVHHIVKYRGNFLREDSVNAFKAAKFSLRGEDGIGPVDKLNDLLKEIYSEYSPELATNNLSKIEDIIKDKNLYKQDKLKQVATLLIKEADSKDKAKLNKDIAKQVANSFMGYMFRLDTLFSLTDVDVKDYKLKFSDANIDESLDDLTSLLTDAQIEFVLELQSIYNTIVLNEIVPDGMSLSESMIKKYDDHKEDLKIFKEYIDSLSDQKKAKKLLSAYNLYVNYRKSDLVEAKNLFKNKKVGDKNFADVISNFEVFGKFVSDNLDDSELANKIKARLDLGEFLPKQRTNQNGVIPYQLHQVELTQILEKQGKYYPFLITPNPVESHRNNAPYEISELVSFRVPYYVGPLIDNQSIKDKQNKNKFAWMVRQKQGQITPWNLEEMVDTTESANQFIKRMTRKDTYLLAEDVLPKSSLVYQKFMILDELNRIKIDGKKLTSELKHDIFEKLFKKQKSINLDNLKNYLLVEGNIPGLIEGLSDGINFNNSFSTYIDYRNIFGDEIDNPNKQADFEKMIEWSTVFEDRKIFKRKLKEITWLTSEQIKQVSSKRYSGWGRLSKKLLTQITDENGVNILQRLWNEPETLTEVLANPVIKRKIVEANSSFTKAKDMKDILVEAYTSPQNKKAIRQVMRVVDDIIAAAHGKKPSQIAIEFAREDQDNPQMTKSRKAQLDQIYAKISDEFLDDAVKNELKNMKDNKPLAKDKVFLYFKQMGRDAYSGEKLSLDNLQDYDIDHIYPQSFIKDDSFDNRVLVQRAYNNGKSDNVPVLLFGNKIAAGLGITIRQMWKKWLELGLISKRKFNNLITDPEKISRNMASGFVNRQLVETSQVIKLVANILQAKLPDTEIIEVKASYNSILRKEFNLYKSREVNDYHHAIDAYLTTIVGNYLYQVYPKLRPYFVYGQFKKFGKAENQEDDPVKKIKKFNFIYQLIWGKDDAICISHTNQQVFSKKDIIDKLTTAYNFKYMNISHAVYTRNNNMFKQTLFPIIERTTAKTKSLIPKKLDRPTDIYGGYSNNNDAYLALVKVDKKRGSEYRVVGIPMRAAAMLKASKNYDEDLRKVIEPMVMFDKNGKAKRGIEGFRVLVGKMPFKQAVLDGNKKFMLTGTVDTPNLKQLVLSQQNMKYILDYIEDVDCRKHKFGDKVQNPDKCLLEVFDEIIEIVDKYFELFDSRDFREKLRNSRNKFIKLEASKKADTILAILKGLQAKSTRATIKELNISDFGRIITSSISPEAQLIYQSPTGLFERRVKVKDL

SEQ ID NO: 288 - protein, 1375 aa, Lactobacillus johnsonii
MTKIKDDYIVGLDIGTDSCGWVAMNSNNDILKLQGKTAIGSRLFEGGKSAAERRLFRTTHRRIKRRRWRLKLLEEFFDPYMAEVDPYFFARLKESGLSPLDKRKTVSSIVFPTSAEDKKFYDDYPTIYHLRYKLMTEDEKFDLREVYLAIHHIIKYRGNFLYNTSVKDFKASKIDVKSSIEKLNELYENLGLDLNVEFNISNTAEIEKVLKDKQIFKRDKVKKIAELFAIKTDNKEQSKRIKDISKQVANAVLGYKTRFDTIALKEISKDELSDWNFKLSDIDADSKFEALMGNLDENEQAILLTIKELFNEVTLNGIVEDGNTLSESMINKYNDHRDDLKLLKEVIENHIDRKKAKELALAYDLYVNNRHGQLLQAKKKLGKIKPRSKEDFYKVVNKNLDDSRASKEIKKKIELDSFMPKQRTNANGVIPYQLQQLELDKIIENQSKYYPFLKEINPVSSHLKEAPYKLDELIRFRVPYYVGPLISPNESTKDIQTKKNQNFAWMIRKEEGRITPWNFDQKVDRIESANKFIKRMTTKDTYLFGEDVLPANSLLYQKFTVLNELNNIRINGKRISVDLKQEIYENLFKKHTTVTVKKLENYLKENHNLVKVEIKGLADEKKFNSGLTTYNRFKNLNIFDNQIDDLKYRNDFEKIIEWSTIFEDKSIYKEKLRSIDWLNEKQINALSNIRLQGWGRLSKKLLAQLHDHNGQTIIEQLWDSQNNFMQIVTQADFKDAIAKANQNLLVATSVEDILNNAYTSPANKKAIRQVIKVVDDIVKAASGKVPKQIAIEFTRDADENPKRSQTRGSKLQKVYKDLSTELASKTIAEELNEAIKDKKLVQDKYYLYFMQLGRDAYTGEPINIDEIQKYDIDHILPQSFIKDDALDNRVLVSRAVNNGKSDNVPVKLFGNEMAANLGMTIRKMWEEWKNIGLISKTKYNNLLTDPDHINKYKSAGFIRRQLVETSQIIKLVSTILQSRYPNTEIITVKAKYNHYLREKFDLYKSREVNDYHHAIDAYLSAICGNLLYQNYPNLRPFFVYGQYKKFSSDPDKEKAIFNKTRKFSFISQLLKNKSENSKEIAKKLKRAYQFKYMLVSRETETRDQEMFKMTVYPRFSHDTVKAPRNLIPKKMGMSPDIYGGYTNNSDAYMVIVRIDKKKGTEYKILGIPTRELVNLKKAEKEDHYKSYLKEILTPRILYNKNGKRDKKITSFEIVKSKIPYKQVIQDGDKKFMLGSSTYVYNAKQLTLSTESMKAITNNFDKDSDENDALIKAYDEILDKVDKYLPLFDINKFREKLHSGREKFIKLSLEDKKDTILKVLEGLHDNAVMTKIPTIGLSTPLGFMQFPNGVILSENAKLIYQSPTGLFKKSVKISDL

SEQ ID NO: 289 - protein, 1382 aa, Lactobacillus mucosae
  REGION 1..1382: note = Lactobacillus mucosae LM1
MDIGTNSIGWTAIDDHFSLLRVKGKNAIGVRTFKEGETAADRRGFRTARRRLSRRRWRLQFLDEFFAPYLAEVDPNFLARLKQSDISAKDPAKNQEYMGKLLFPDQEAASDGNGYPTLIQMRKAMPAEKAADFPVFNIYQLRYALMNEKRKFDLREIYLAVHHIVKYRGNFLNNTSVDKFKADQIDFNKSFETLNDLFRQVQPIAPFQIDLTKVDELGKLLLDTKQKKLDRQKAVAKLLPLIEDGTDKEIVKAHQQTAREISKLILGYKAKVGLILQNNLDQTLDMSTENSDDQLMQIAEELDDYQMELINQLSLLYSQIMLNEIVPNGETVSASMLNRYYKHRCQLKELKDYGAAQDKKTREQLDHLYAEYIGQIPKDSKFDFTKDLKKLMDKSDLGQKIKDEIEAGDYLPKQRTSANGVIPHQMHQQELDQIIENQKEYYPWLAEPNPVEKNIKNAKYKLDQLVSFRVPYYVGPMITLADQQKTSKASFAWAVRKKAGKITPWNFYDMIDREKSANNFIKRMTNKDTYLLSEDVLPASSLLYQKFTVLNELNNIRVNGRKLQPALKQAIYTDLFQKRKTVNLKTLTNFLAIHEPTLTKPKIEGLSNGRSFNSSLGTYIDMSKILGDSLDDLNYRDDIEKIIEWSTVFEDSEIYGVKLQEIQWLTNEQREKLVRKRYQGWGRLSKKLLTGITDENGQRIIDLMWDTSKNFMQIVHQPVFEEQIAELNQQLLQDADKAPLEVVDDILADAYTSPQNKKAIRQVVKVVADVVKAVGNAPASISIEFARNEDRNKELKNSRRHSIEKLYHETAEKLVKQTNLLEELGNVKDLNDRYYLYFTQAGRDMYDGTPINIDEISTHYEIDHILPQSFLKDNSLDNRVLVKKSENAAKSDRVPAKLYGAKMRAFWKQLKESQLISNRKYLNLTTDPEQVDKYQMQGFVHRQLVETRQIIKLAANIFGSLYPDSAVIETRAELTKQLREKFSLYKVRDVNDYHHAVDAYLTAFAGHYLYQRYPKLRPMFVYGDYAKIYADDLKRLRSVNLFHDLEKDQYNSGTAVNPETKEKIVDVDWLSDYVSKIQHFKYMLISKAVYTQHGQLYGATILPVAQVDKISAPIGIKDDKPVDIYGAYTNEVAAYMAIVRVNGKKPKYKVVSVPVRMLQRLKMAEQKGHDQYMQTLHDVLLRNFTSLKKNRKTGLKEAVVKDFDVLVPCVRYNQLVIDGDTKFTLGSATYQHNAKQLVLCNHSLETLANNFEYVRKHPDEADERMIMLYDDILDQVNHYFTLYDKNKFREKLNAGRDKYLKLPTFSQFENNKKTAIGKSEAIINILRGLHANAAITNLKCLGVSTPFGQLQSPSGIELSENAKLVYQSPTGLFSREVLLKDL

SEQ ID NO: 290 - protein, 1362 aa, Lactobacillus paracasei
  REGION 1..1362: note = Lactobacillus paracasei subsp. paracasei 8700:2
MTKLGKPYGIGVDIGSNSIGFAAVDENSHLIRLKGKTVIGARLFEEGKAAAKRRAGRTTRRRLSRNRWRLSFLRDFFESHITPTDPNFFMRQKYSEISPKDKARYKYEKRLFNDRTDAEFYQQYSTMYHLRNRLMTDPSRADVREIYFAIHHILKSRGHFLTPGDAKDFNTNDVALDEIFPALQDAYAQVYPDLGITFDEDKANEFKTILLNEIATSIDTQRALVKLLLAEEDDKDILKQQKQVLTEFAKAVVGLKTKLNLALGTEVDSSEATAWNFSLGQLDDKWAGIESAMTDEGTEILDQIRDLYRARLLNGIVPTGKTLSQAKVDDYTQHHEDLQLFKAYLKQLEDDGTAKAIRQLYDRYIDGDDAAPFLRENFVKALTKDVTAHPNTKSPELLERLAQPDFMLKQRNKANGAIPVQMQQRELDQIIKNQAVYYDWLAAPNPVEKHRKSMPYQLDELLNFRIPYYVGPLVTAKEQKAAQGGVFAWMVRKDPEGNITPYNFDEKVDREASANTFIQRMKTTDTYLIGEDVLPKQSLLYQRYEVLNELNNVRVNNEKLSIEQKQQVIRELFERHNSVTIKQFAENLRAHGDYAHIPEIRGLADEKRFLSSLSTYRQLKSLLPEAIDDPAKQADIENIIAWSTVFEDAAIFKTKLKEISWLGSEAITKLSNIRYRGWGQFSRKFLNGLTLGNGHTIIQELLLSTNNLMQILTDETLQKKMTELNADKLKTANINDAIDNAYTSPSNKKALRQVLRVVDDIKRAADGQDPSWLYVETADGGGTPGKRTRARQHQLQEIYANAAHELIDTAVRGELEDKISDKADFNDRLVLYFMQGGRDIYTGAPLNIDQLSSYDIDHILPQSLIKDNSLDNRVLVHAIINREKNATFASTIYAQKMNATWRQWHEAGLISGRKLRNLQMRPDQIDKYASGFVARQLVETRQIIKLTEQIVAAQYPDTKIIAVKAGLSHQLREELEFPKNRDVNHYHHAFDAFLAARIGTYLLKRFPNLQAFFTYGKFTKADVKKLRGFNFIRDITHAEDKIVAKDTGEVVWDKQRDVDELDRIYNFKRMLITHEVRFETADLFKQTVYGARDSKEAGGSKQLIPKKKGYPVDIYGGYFRENTAYLAVVKVTKKTETIFKVVKIATSQVAALNKARSRSTAEELSVLTELLKPKFSKVGKNGKITDTPFEVVLPRVPREQLFYNAKYGFFMVNSDTMFHNFQEIWVSRSDQKILQQIRKAKIDYPNVDQDLDNLFHNLADQIVKYFDLYSIAGFKEKISQSQNTFNDLAVDDTDQSVGKITVINELLKGAQANGMTGSLKVLKISTPFGFTQDKSGVLTKDSSIIYQSPTGLFERSVRLTDL

SEQ ID NO: 291 - protein, 1382 aa, Lactobacillus pentosus
  REGION 1..1382: note = Lactobacillus pentosus IG1
MKKIVNYNLGLDIGTSSIGYAAIDDQGRPVRHQNKTVMGVRLFKEGKTAESTRIFRGTRRRLSHRHWRLGYLDRIFDNEIAKVDENFLPRLKASKRARSDEKRSFRGSLLFPETGDDAYYQKYPTIYHLRYALITQKKQFDIRLIYLALHHMIKYRGNFLDTTPVSAFNIHDIDLTDQFASLNDCYQLLDMDFEFQFDLNNIEQVQKLLLDETLSKTKRQAAVSKVLVMSTGNKAFDDQQNGIASEFIKALLGGPFDLSKILNLSVADVKSWKLHMTDKDVDDTLNSLVEELDENHKQIVNLLQMIYSQVMMLGLLNGQQSISASMIERYDDHAKHWAALKKLLPALGEQEQSTIIHAYTAYTGHSRTKQLSRAEFYTKVNSILKKHENIAEATGLIELIDRNEFMPKQRDAVNGVIPHQLHQRELQLIIQNQQKYYPFLAAKAYPDADETMIEQLLSFRVPYYAGPLVDRDFINESSDQEQAMQNTKFSWLKRREAGEITPWNFEQKVDVQETANRFIKRLTTKDTYLMTEDVLPKESLIYQRFEVLNELNAIRINDRRLTAENKQLAFQQLFMAGNTKNVSIKKFRNFVFDSLKFPEKVKITGFAGQHNFLAKLSTYHDFKKIFGERVDHTDLQPDFERIVEWCTIFEDRHIYREKLKEIQWLSQSEIDQLVLIRNHGWGRLSKRLLTGIRDSDGRTVMDQLWFGTDNFMRIISQSDFAAAIANENRTQLNQHGLEDVLDSAFMSPQNKKAIRQVLKVVDDIEQTLGCPPKKVMIEFTRSPDKKKQRTVTRLEKVQQAYKAVADQLAGQSIVSELDQYANTHSKLSDTYYLYFMQLGRDLYSGKPIDIDSPMLDDDHILPRAFMKDNSLDNRALTEKPINNTKAAKFPSKVFGQQKEVTDFWKLLRRCGLMSNIKEKHLYLDPDNVDKWTRRGFIHRQLVETSQVIKIVANILNDRYQQSQTEVLEVPARLGTELRECFGWYKVREVNDYHHVFDAYLAAFIGNYLYRRYPKLQPYFVYGNFAELNKAQLKNIKSFNFLYNITDNKRVVKDIETGQTLWDDQIRQQIQHIYEYKYMLTSHEAFTQHKELYGQTIYPRREFKPGTLKAIKQDQPQELYGGYKNLTAAYMCIVKIQARKRRAAEYRVVRVATESLSALQQAKRLGVQAYERCLRQELVRNNEILRTNADPNSAPREFEVLLDRVLCHQMIISDGQKYLLGSHAYKINCMQLVLSNNSMKILSTSIVKLKQMTNEPLVQVYREILDVVNKYFTLYDVNSFRENLNQFFDKFRTLPITNEYESSKSGKKLIHRGQLETLTLILRGLHANSDKVQYGDQSTLLGGFQTKDGIKLSKDSVIQYTSPAGLNVRTVKLRDLEQKEAQK

SEQ ID NO: 292 - protein, 1361 aa, Lactobacillus pentosus
  REGION 1..1361: note = Lactobacillus pentosus KCA1
MNEPYGVGLDIGTNSVGWTVVDMNGRVRKVKGKTALGARLFKEGATAEDRRGFRTTRRRLKRVKWRLRLLREFFDQPISKIDPNFFARRKYSDISPRDPNYNGLAKTLFNDRTDKEFYDDYATIYHLRDKLMTSNRKFDIREIYLAIHHIVKYRGNFLRTGPASQYGSASLHLATSFQKLNDLFAQSEETLNLKLVTDEALLQQIQQILVRTDLSRSEQQRQIWPLMAVLTGASAAEKKRQKNVVVELSKALVGLKAKMNVVTLTEVDAAVVKDWTFTMEESQDKLPEIEEQLSEVGQQIMDEVIQLYASVNLAQLIPAGKRFSQHMVEKYKHHEKNLELLKAYIHSQSDSKRGREIRATYDRYIDGVDSKPVTQEMFYKDLMKYVEADATSNHLAAEIKDEIDSEQFMPKLRTKQNGSIPYQVQQYELDQIISHQKKYYPWLGEENPVAERRGKFPYKLDELVGFRVPYYVGPLITKEDQQATSGAGFAWMVRKADGPITPWNFDQKVDRIASATAFIQRMQTTDTYLIGEDVLPARSLIYQRFMVLNELNNMRVEDRKLAPQQKQRLYNQVFKQHQHVSVKNIQQNLMDAGEYRKTPQITGLADPKGFNSSLSTYHDFKKILLEAIADEHKRADIEKIILWSTTFEDSAIFKQKLEEVAWLTDAQRKQLSGLRYRGWGQLSHKLLTAFKDDKGRSIMDGLWETSDNFMQLRKQPAIETQIKEANQANLTDADIQDTINELYTSPQNKKAIREVMLVLDDIKNAMHGQTPSWIFVEAARGGGVAGRRTQSRSSQIVEAYKGTAKEIVSEKVQHELNEKIKAKADFNTRLVLYFLQNGRDLYTNEAINIDRLSEYDIDHILPQSLVKDDSLDNRVLTSARINREKNDTFASEKFGRKMGAQWRELHRNGLMTQRKLKHLLMRPDEISKHATDFINRQLVETRQVIKLVEELISSEYPAASIVAVKANLTHQFRQTFNFPKLREVNDYHHAFDASLTAFIGMYLLKQYPKLERFFVYGKFAKQPINLTRFNIIRKLAVAEKPIANIETGEILWDKTADIKYFEKLYNYKRLLVTHEVRENYGAMFKQTLFKASYNKSKTLVPKKNHMETSVYGGYSNQETAYLAIVRIPFKSGFKFIVVGIPTRMVAKIKHYQSLGATLNQATHKVIEPKFTKISRKTKQTVISDYEVVLPKVYLDQVVRDQVKGQMYRFSLGSDKEYHNVQELYLPLSIQQAFVGHYDESDDQRSNDLVKVYDAALKQLQRYFPLHLSRNFDQVASQAHQSFEGLKNNVQTSDKQLGKKEVLNSLFVGLHANATRSNLSVLGMSKDFGRIKSNGITLTDQAEIIYQSPTGLFERKVALKDL

SEQ ID NO: 293 - protein, 1358 aa, Lactobacillus pentosus
  REGION 1..1358: note = Lactobacillus pentosus MP-10
MNEPYGVGLDIGTNSVGWTVVDMNGRVRKVKGKTALGARLFKEGATAEDRRGFRTTRRRLKRVKWRLRLLREFFDQPISKIDPNFFARRKYSDISPRDPNYNGLAKTLFNDRTDQEFYHDYPTIYHLRDKLMTSDRKFDIREIYLAIHHIVKYRGNFLRTGPASQYGSASLHLATSFQKLNDLFAQSEESLNFKLVTDEAQLQQIQQILVRTDLSRSEQQRQIWPLMVVLMGATAAEKKRQKDFAKELANALVGLKAKLNVVTLTNVDTTVVKDWTFTLEESQDKLPEIEEQLSEVGQQIMDEVIQLYASVNLAQLIPAGKRFSQHMVEKYNHHEKNLELLKAYIHSQSDSKRGREIRATYDRYIDGVKSKPVTQEMFYKDLMKYVEADATSNHLAAEIKDEIDSEQFMPKLRTKQNGSIPYQVQQYELDQIISHQKKYYPWLGEENPVAERRGKFPYKLDELVGFRVPYYVGPLITKEDQQATSGAGFAWMVRKADGPITPWNFDQKVDRIASATAFIQRMQTTDTYLIGEDVLPARSLIYQRFMVLNELNNMRVEDQKLAPRQKQRLYNQVFKQHQHVSVKNIQQNLMDAGEYRETPKITGLADPKGFNSSLSTYHDFKKILPEAIADEHKRADIEKIILWSTTFEDSAIFKQKLEEVAWLTDAQRKQLSGLRYRGWGQLSHKLLTAFKDDNGRSVMDGLWETSDNFMQLRKQPAIETQIKEANQANLTDADIQDTINELYTSPQNKKAIREVMLVLDDIKNAMHGQTPSWIFIEAARGGGVAGRRTQSRSKQIVEAYKSTAKEIVSEKVQHELNEKIKAKADFNTRLVLYFLQNGRDLYTNEAINIDRLSEYDIDHILPQSLVKDDSLDNRVLTSARINREKNDTFASEKFGRKMGAQWRELHRNGLMTQRKLKHLLMRPDEISKHATDFINRQLVETRQVIKLVEELISSEYPSASIVAVKANLTHQFRQTFNFPKLREVNDYHHAFDASLTAFIGMYLLKQYPKLERFFVYGKFAKQPINLTRFNVIRKLAVAEEPIANIETGEILWDKTADIKCFEKLYNYKRLLVTHEVRENYGAMFDQTIFKATDSRKRLIQKKKGFATETYGGYTGRTLAYLAIVKVVTNKDTQYQVVGIPTTMVTQIQQLEASGLTSKQAVTKAIGAMINENNKKLQSYEVLLPKVRFEQVVRDEVKGHIHRFALGTDTYYHNIQELYLPLTIQRAFLGKRNDTDAQTEQNLLTVFETTLAQVNRYFPLYEMNKFKQILNSAQEKFAALPTKNKTVKNKLVTGKDGVLNNLFIGLHANASLGDLKILGMKIGFGKLQVPGGLKLTDQAEIIYQSPTGLFERKVALKDL

SEQ ID NO: 294 - protein, 1358 aa, Lactobacillus plantarum
MKEPYGVGLDIGTNSVGWTVVDASGHVRKIKGQTGIGVRLFKEGAAAADRRGFRTTRRRLKRVKWRLRLLREFFDQPISKVDINFFARRKYSDVSPRDPNYNGLEKTLFNDRSDQDFYHDYPTIYHLREALMTQHRKFDVREIYLAIHHIVKYRGNFLRNDAATAYRSGTLDLQQHFETLNHLFSQADLELNLNLTTDVALLDSIKQTLVRTDISRSDRQKLIMPLLAVLTGATTAEKKRQKAVVTEFAKALVGNKTKIDVLTLTDIDATEAKDWAFSLEENQDKLPGIEDRFSEVGQQIIDEVIRLYASVNLAQLIPEGKRFSQSMVEKYKRHGEDLKLLKAYIRSQSDAKRGRAIRATYDQYIDGVKSKQVTQEAFQKALGKFVDADVDLNSWAAQIKQAIDSEQFMPKLRTKQNGAIPYQVQQNELDQIISNQKEYYPWLGEENPVIKRRGKFPYKLDELFGFRVPYYVGPLITKEMQAATANAGFAWMVRKADGPITPWNFDDKVDRVASATAFIQRMQTTDTYLIGEEVLPARSLIYQRFMVLNELNNIRVDDGQLTPRQKQRLYNQVFKKHKRVTAKNIQDNLVAAREFPTAPRITGLADPKVFNSSLSTYHDLKQVLPEAMSDVRKQADIEKIILWSTIFEDSTIFKQKLTEISWLTAAQLKQLGQLRYRGWGQLLRKLLTGLKDDNNRSIMDGLWETNANFMQLRSQPAIENQIKSANQANLTTADLQDTINELYTSPQNKKAIREVMVVLADIKDAMHGQTPNWIFVEAARGGGVAGRRTQSRSKQIVAAYQGTAQAIVRDQVQRELKEKIKNKANFNTRLVLYFLQNGRDLYTGDAINIDRLSEYDIDHILPQSLVKDDSLDNRVLTNARINREKNDTFASEKFGKKMGAKWKEMHRMGLMTKRKLDHLLMRPDEISKYATGFINRQLVETRQVIKLVEELINAEYPSTAIVSVKANLTHQFRQTFDFPKIREVNDYHHAFDAALTAFIGTYLLKRYPKLERFFVYGKFAKQPVNLTRFNVIRKLAKTDTPITDIDTGEVLWDKLTDIKYFETLYDYKRLLVTREVSENYGAMFDQTLLKASDNGKRLIRKKQSFDTAIYGGYTGKTLAYMAIVKVSTKKDVQYQVVGVPTTMVTQIEQLEQQGMTNKQAVTKVIEPLIAANNKKMLTYEVLLPKVRFEQVVRDRIKGQTHRFALGTDTYYHNIQELYLPLTLQRAFLGKQNESEVQLNQNLLTVFDATLAQVNRYFPLYEMNKFKKILNSARDQIELLEAKNQFVKNKLVLGKQGILTNMFIGLHANASYGDLKVLGVKIDFGKLQVPGGIKLTGDAEIIYQSPTGLFERKIALKDL

SEQ ID NO: 295 - protein, 1363 aa, Lactobacillus rhamnosus
MTKLNQPYGIGLDIGSNSIGFAVVDANSHLLRLKGETAIGARLFREGQSAADRRGSRTTRRRLSRTRWRLSFLRDFFAPHITKIDPDFFLRQKYSEISPKDKDRFKYEKRLFNDRTDAEFYEDYPSMYHLRLHLMTHTHKADPREIFLAIHHILKSRGHFLTPGAAKDFNTDKVDLEDIFPALTEAYAQVYPDLELTFDLAKADDFKAKLLDEQATPSDTQKALVNLLLSSDGEKEIVKKRKQVLTEFAKAITGLKTKFNLALGTEVDEADASNWQFSMGQLDDKWSNIETSMTDQGTEIFEQIQELYRARLLNGIVPAGMSLSQAKVADYGQHKEDLELFKTYLKKLNDHELAKTIRGLYDRYINGDDAKPFLREDFVKALTKEVTAHPNEVSEQLLNRMGQANFMLKQRTKANGAIPIQLQQRELDQIIANQSKYYDWLAAPNPVEAHRWKMPYQLDELLNFHIPYYVGPLITPKQQAESGENVFAWMVRKDPSGNITPYNFDEKVDREASANTFIQRMKTTDTYLIGEDVLPKQSLLYQKYEVLNELNNVRINNECLGTDQKQRLIREVFERHSSVTIKQVADNLVAHGDFARRPEIRGLADEKRFLSSLSTYHQLKEILHEAIDDPTKLLDIENIITWSTVFEDHTIFETKLAEIEWLDPKKINELSGIRYRGWGQFSRKLLDGLKLGNGHTVIQELMLSNHNLMQILADETLKETMTELNQDKLKTDDIEDVINDAYTSPSNKKALRQVLRVVEDIKHAANGQDPSWLFIETADGTGTAGKRTQSRQKQIQTVYANAAQELIDSAVRGELEDKIADKASFTDRLVLYFMQGGRDIYTGAPLNIDQLSHYDIDHILPQSLIKDDSLDNRVLVNATINREKNNVFASTLFAGKMKATWRKWHEAGLISGRKLRNLMLRPDEIDKFAKGFVARQLVETRQIIKLTEQIAAAQYPNTKIIAVKAGLSHQLREELDFPKNRDVNHYHHAFDAFLAARIGTYLLKRYPKLAPFFTYGEFAKVDVKKFREFNFIGALTHAKKNIIAKDTGEIVWDKERDIRELDRIYNFKRMLITHEVYFETADLFKQTIYAAKDSKERGGSKQLIPKKQGYPTQVYGGYTQESGSYNALVRVAEADTTAYQVIKISAQNASKIASANLKSREKGKQLLNEIVVKQLAKRRKNWKPSANSFKIVIPRFGMGTLFQNAKYGLFMVNSDTYYRNYQELWLSRENQKLLKKLFSIKYEKTQMNHDALQVYKAIIDQVEKFFKLYDINQFRAKLSDAIERFEKLPINTDGNKIGKTETLRQILIGLQANGTRSNVKNLGIKTDLGLLQVGSGIKLDKDTQIVYQSPSGLFKRRIPLADL

SEQ ID NO: 296 - protein, 1361 aa, Lactobacillus rhamnosus
  REGION 1..1361: note = Lactobacillus rhamnosus HN001
MTKLNQPYGIGLDIGSNSIGFAVVDANSHLLRLKGETAIGARLFREGQSAAERRESRTTRRRLSRTRWRLSFLRDFFAPHITKIDPDFFLRQKYSEISPKDKDRFKYEKRLFNDRTDAEFYEDYPSMYHLRLHLMTHTHKADPREIFLAIHHILKSRGHFLTPGAAKDFNTDKVDLEDIFPALTEAYAQVYPDLELTFDLAKADDFKAKLLDEQATPSDTQKALVNLLLSSDGEKEIVKKRKQVLTEFAKAITGLKTKFNLALGTEVDEADASNWQFSMGQLDDKWSNIETSMTDQGTEIFEQIQEHYRARLLNGIVPAGMSLSQAKVADYGQHKEDLELFKTYLKKLNDHELAKTIRGLYDRYINGDDAKPFLREDFVKALTKEVTAHPNEVSEQLLNRMGQANFMLKQRTKANGAIPVQLQQRELDQIIANQSKYYDWLAKPNPVEKHRASKPYQLDELLTFRIPYYVGPLITPKEQAESRENVFAWMIRKDPSGNITPYNFDEKVDCPASANMFIQRMKNTDTYLIGEDVLPKRSLLYQKYEVLNELNNVSIDGRRLGADQKQRLIREVFERHSSVTIKQVAENLVAHGDFAKRPEIRGLADEKRFLSSLSTYHQLKKILHEAIDDPTKEHDIENIITWSTVFEDAAIFKTELAKISWLDSDTIKALSNIRYRGWGQFSRKLLDGLKLGNGHTVIQELMLSNHNLMQILTDETLKTTMAELNQDKLKADDIEDVINDAYTSPSNKKALRQVLRVVEDIKHAANGQDPSWLYIETADGPGTAGKRTQSRQKQIQTVYANAAQELIDSAVRGELEDKIADKASFTDRLVLYFMQGGRDIYTGAPLNIDQLSHYDIDHILPQSLIKDDSLDNRVLVNATINREKNNVFASTLFASKMAATWRKWHEAGLISGRKLRNLMLRPDEIDKFAHGFVARQLVETRQIIKLTEQIAAAQYPNTKIIAVKAGLSHQLREELDFPKNRDVNHYHHAFDAFLAARIGTYLLKRYPKLAPFFTYGEFAKVDVKKFREFNFIGALTHAKKNIVAKDTGEIVWDKERDIQELDRIYNFKRMLITHEVYFETADLFKQTIYAAKDSKERGGSKQLIPKKQGYPTQVYGGYTRENTAYLAVVKTVEKKADVYRVVRIATSQVAALKEARAQSTVKERELLKKFLTTKFTKIGKNGKKAITPFDIVIPRVPREQLFHNKRYGFFMVNSDTLMHNYQELWMSRSDQQILSKLVKSAKTVENGQVGRLFENIVEQINKYFPLYDINQFRKKLDQSKDIFSKLPLEGNGTTSGKRETIQNILTGAGTGAKNGDLKNLGIKTPFGFLQVPSGIVLDDDTTLIYQSPTGMLNRIVRLSEL

SEQ ID NO: 297 - protein, 1361 aa, Lactobacillus rhamnosus
  REGION 1..1361: note = Lactobacillus rhamnosus R0011
MTKLNQPYGIGLDIGSNSIGFAVVDANSHLLRLKGETAIGARLFREGQSAAERRESRTTRRRLSRTRWRLSFLRDFFAPHITKIDPDFFLRQKYSEISPKDKDRFKYEKRLFNDRTDAEFYEDYPSMYHLRLHLMTHTHKADPREIFLAIHHILKSRGHFLTPGAAKDFNTDKVDLEDIFPALTEAYAQVYPDLELTFDLAKADDFKAKLLDEQATPSDTQKALVNLLLSSDGEKEIVKKRKQVLTEFAKAITGLKTKFNLALGTEVDEADASNWQFSMGQLDDKWSNIETSMTDQGTEIFEQIQELYRARLLNGIVPAGMSLSQAKVADYGQHKEDLELFKTYLKKLNDHELAKTIRGLYDRYINGDDAKPFLREDFVKALTKEVTAHPNEVSEQLLNRMGQANFMLKQRTKANGAIPVQLQQRELDQIIANQSKYYDWLAKPNPVEKHRASKPYQLDELLTFRIPYYVGPLITPKEQAESRENVFAWMIRKDPSGNITPYNFDEKVDCPASANMFIQRMKNTDTYLIGEDVLPKRSLLYQKYEVLNELNNVSIDGRRLGADQKQRLIREVFERHSSVTIKQVAENLVAHGDFAKRPEIRGLADEKRFLSSLSTYHQLKKILHEAIDDPTKEHDIENIITWSTVFEDAAIFKTELAKISWLDSDTIKALSNIRYRGWGQFSRKLLDGLKLGNGHTVIQELMLSNHNLMQILTDETLKTTMAELNQDKLKADDIEDVINDAYTSPSNKKALRQVLRVVEDIKHAANGQDPSWLYIETADGPGTAGKRTQSRQKQIQTVYANAAQELIDSAVRGELEDKIADKASFTDRLVLYFMQGGRDIYTGAPLNIDQLSHYDIDHILPQSLIKDDSLDNRVLVNATINREKNNVFASTLFASKMAATWRKWHEAGLISGRKLRNLMLRPDEIDKFAHGFVARQLVETRQIIKLTEQIAAAQYPNTKIIAVKAGLSHQLREELDFPKNRDVNHYHHAFDAFLAARIGTYLLKRYPKLAPFFTYGEFAKVDVKKFREFNFIGALTHAKKNIVAKDTGEIVWDKERDIQELDRIYNFKRMLITHEVYFETADLFKQTIYAAKDSKERGGSKQLIPKKQGYPTQVYGGYTRENTAYLAVVKTVEKKADVYRVVRIATSQVAALKEARAQSTVKERELLKKFLTTKFTKIGKNGKKAITPFDIVIPRVPREQLFHNKRYGFFMVNSDTLMHNYQELWMSRSDQQILSKLVKSAKTVENGQVGRLFENIVEQINKYFPLYDINQFRKKLDQSKDIFSKLPLEGNGTTSGKRETIQNILTGAGTGAKNGDLKNLGIKTPFGFLQVPSGIVLDDDTTLIYQSPTGMLNRIVRLSEL

SEQ ID NO: 298 - protein, 1375 aa, Lactobacillus ruminis
  REGION 1..1375: note = Lactobacillus ruminis ATCC 25644
MRKNQEPYNIGLDIGTSSIGWSIMNDNFDLMRVKGKKGIGVRLYNEGQSAAERRMHRTARRRYGRRKWRLRLLEDFFDEHMAEVDDTFFARLKDSNISPKDDKKYRKSLLFPKSKGVTYQDDGEFYKKYPTMYHLRYALMTEHRKFDLREIYLAFHHMVKYRGNFLYDTSVDSFEAKNLDIKGKFDEINDLLSSYTDFYVDNSNAALVESILLEKNTTRKDKSKKIAKLLHVEDKEKGKNKKAKDLATQISNAVLGLKCNFHLIFELQQKYSFDLCSEKTEENIAKLSEVLDENQKMLLMILKEVQDQVMLNAFVPSGMSLSEAMMQKYDDYGEQLKIYHELEHSVSDDSAAKLRGAYRDYNDNIIKRIDGDNKKDTFYKRVKNILTKISKEYVDQDVLESCGKLKKLIDENKLFIRQRTAANGVLPHQLHQIEMRKIIDNQKEYYPWLAEPNPNEKRRVYSKYKVEELIAFRIPYYVGPLVDPNNADKNKEARFSWMVRKKDGEITPWNFYDKVDWAESANNFIERMKSKDTYLLGEDVVPKESMLYQKYEVLNELNNLRINDSGLSDSFEDVKLKQAIYNDLFKKQKIVKITDLQNYLVQNHKYLVKPKISGLADENRFLSSLSTYSDLKTIFGDKVDDRTYFNDFEKMVEYSTVFEDGHDYNQKLDEYTWLTKEEKYKIGKKRYRGWGKLSKKLLTGLRDKNNHTIMDNLWETNRNFMQIQTADEFSKQIAEENERHLKGSVSDAINDMYTSPANKKAIRQVLRVVDDIQKAMGYAPSSISLEFAREDGPSVRTVSRANRMKSIYEKYASEVSEEVMKDLDGVIKDKKGLNDRLYLYFEQQGKDMYSGHPLDFDKVISGQEYDIDHILPQAVIKDDSLDNRVLTTKALNNDVKSKGVPCRMFNGMHSFWKNLYDKGFISRRKFNNLTTNPENIDKYKMKGFVNRQLVETRQIIKLVANVLNDKYQNDDVDIIEVRAELTHDVRKHFKFYKNRNVNDYHHAFDAYLTSFIGHYLFKKYPNLRPLFDYNDFMKVSDNVFKQLRGNNFLGEFLNKTGDIISTDGNFVLNKEEMINKLNKAYAFKKILVTKEVGQRTGAMFNETRYPAPNSRKAALKYRRMPKPDSLISVKDYKNTDIYGGYSGKNDAYMVIVDMGKQYMVVGVPVRYTEKLDKLRIKHSELYRDELRKVLSRDKTLLDSKGNVKRFDIVLDRVLYGQLIEDGNELFTLGSSKYKRNFRQLFLDKQCIEILDSSATPQPTDEELIWVYDQILDKVDKYFELYDINRQRETLRKGRAAFCSLPNISMKKDDVTKKKILNEILVALHANESESNCEKIGKKVFGRLQVPGGIKLSKEAKLIYQSPTGLFERVVYLKDL

SEQ ID NO: 299 - protein, 1339 aa, Lactobacillus salivarius
  REGION 1..1339: note = Lactobacillus salivarius SMXD51
MERYHIGLDIGTSSIGWAVIGDDFKIKKKKGKNLIGTRLFNEGATAAERRGFRTQRRRLNRRKWRLKLLEEIFDPYMAEVDEYFFARLKSSNLSPKDSNKKYLGSLLFPDKSDSNFYDKYPTIYHLRRDLMEKDEKFDLREIYLAIHHIVKYRGNFLEKVPAKNYKNSGASIGFLLEEVNSLYKDIIGDESIAILNSEKFEDVEKIILDEETRNLDKQKSVGKLLVEDKKKKNIVTAFSKAIFGYKFNIEDLLLIENDEKNKLTFNDENIDDIFNELSHSLDDKQMDLLTKTREIYFKFKLNMIVPTGYTLSESMIEKYEMHKAHLKMYKEFINTLNTKDRKILKNAYSDYINTEKAKAANAQENFYKTVKKIIKDNNSDTAKKIIVLIDEGNFMPKQRTGENGVIPHQLHQIELDRIIENQAKYYPWLAEANPVEKNRKFAKYKLDELVTFRVPYYVGPLIDKTESNKNEKETKFAWMVRKAKGTITPWNFENLVDRTESANRFIKRMTSKDTYIIGEDVLPASSLLYEKFKVLNELNNIKVNEKKLDIEQKQDIYLNLFTTAKNVTKKSLATYLNCSADSISGLSDGEKFNSSLSSYIDLKAILGNIVDDCNKNEDLEKIIEYSTVFEDGNIYKEKLSEISWLTDEQIEKLSNIHFKGWGRLSKKLLTQITNENGERIIDALWNTSNNFMQIINDESIQAKLAEINGKYAGKSDLEDILSEAYTSPQNKKAIRQVMKVVEDIEKAMQCEPTSISIEFTRKKQKSRLTNTRYKKISDVYEKIADEVISEYELRKLQSELDSNANNMRDRYYLYFMQLGRDMYTGEKINIDELHQRYDIDHILPQSFIKDDSINNRVLTRKDVNNKEKSDKTAADLYAVEMSDFWRKLRKQGLITEQKYKNLLTKSDSIDKYAKKGFIKRQLVETSQVVKLVANILQDKYSDTKIIEVRAKLNSNLREEYKLIKNRAVNDYHHAIDGYLTTFIGQYLYKTYPKLRSYFVYNDFKKLDSNYLKHMKKFNFLWQLQDDKTIDIYDNVNNKFVLNVPEMKKYIQKIYNYKYMLVSKEVTTKNGAFYDQTKYNAKTVNLIPIKKNKPTNIYGGYKGKVSSYMMLVKIRKKKEVIYKFVGVPRLWTDELDRLKDTTERKILLNEIAKNSLSKTEQDFEVILDKVYYGQLIIDGNQKYTLGSSEYKYNAMQLHLSKHALEVLAKENVKDAEITDKDLVSVYEEILSVVNKYFELYDINKFRQKLNEGLEIFRKLPVYNVYESNKIKQVGKFEVLNRILMGLHANAMITDLKVLGIKTKLGQMQVNGGIKLSPDAKLIYQSPTGIFSRAVRVKDLG

SEQ ID NO: 300 - protein, 1331 aa, Lactobacillus sanfranciscensis
MNKQPYNIGLDIGTSSVGWSATELDNRLLHIKGHNGIGVRLFKEGESAADRRGFRTTRRRLARRKWRLRLLNEIFATEIAKVDPSFFARLKQSNVSPKDPNKTMFENILFDDENLDDQKFHHDYKTIYHLRQAIINHPEQKFDIRLIYLAMHHIIKYRGHFLNQANVQDFKGGKIDLEKSFKALNDIFENQGRDLRLVTDKANQYVKVLSDNAKTRSDRKKELSKLLYVPIDKDTDKNSKKVTGEILKAILGNKAKFDVIFGIEVENPKEWVLTFNSDDFDDKIEGLSSQMTDEDSEILLILKELYFALNLSDILNNSVTDKNAKTLSEAMINRYDDHKNQLAMLKKVIDSSDKKHAKELKEAYSAYIDGENNKKISFEDLKKRIQKNLVDSELSQKINDLLDHDYFLPKQRSKENGAIPHQLQQQELDQIIESQKQYYPFLAELNPNEKRSRQAKYKLDELVAFRVPYYVGPMVEVTDSNQENNGKFAWMIRKEQGEITPWNFDEKVDRTETATKFITRMTTTDTYLIGEPVLPKNSLLYQKFVVLNELNNLKINQEIITPGQKQYLYEHVMKKNKRVTLKKIADALVIKGDYPYAPEVKGTTDQKNLNNGLTTYIDLAKIFGNELDDVDREADFEKIIEWSTIFEDQHIFALKLQELKWLTEKQRNQVVKLRYQGWGKLSKELLAGLVDDNGQRIIDLLWSDNQNFMQIVNQKSFKESIADHNGAHLEEKNLKDVINDLYTSPQNKKAIRQVILVVDDIINAVGYEPANIMMEFAREDSNDHRLTNSRSRQLENVYKDITNSWFDNDSVKDELEDKIKNKDKFTDRLYLYFTQGGKDLYTGEPLNIDDLSSYDIDHILPQSFILDNSLDNRVLTSQRNNRVSKEDQLPGELFGTKMHAFWKRLKAAHLISNKKYYNLTLTPNSISKFNNQGRFINRQLVETRQVIKLAAEILHNRYSEEKGTNIVTIKANLTHHMREKFNFYKNRNVNDYHHAFDAYLTAFVGNWLLQQYPKLKPYFVYGDFAKTEINNLKSFNMLYKFEQAHQLNEKDGKIAKDADALLGYMKNVYHFKKMLVTKKLETNHGALFKQTLYPSPAHDIKKRQLIKPKDNRPTDIYGGYTHEERKYMSLVKVIGKKDNEYRMANVPLLKINKNNDIKEILKSQFSNKKFEIVLPKVLKNQLFSENGALFVIGSKGYKYNANQLVLSDLDMKLLNDLSNNKSIDEVTINQLFKNIVDSTNKYMPLYEIKNLNEVVEKFNNLEFNDKKKTITDFLLATHANPTMSNLKNIGLPSYFGRFTSGNAGIKLSENANVIYQSPTGLFSRKVKISDF

SEQ ID NO: 301 - protein, 1419 aa, Lactobacillus sp.
  REGION 1..1419: note = Lactobacillus sp. 66c
MAKPQNYTIGLDIGTNSVGWTVTDDQNNILRIKSKKAIGARLFEEGKVAAERRSFRTTRRRLSRRKWRIKLLEELFDEEISKVDPNFFARSHESWISPKDKRERYSAIVFPTPEEDKKFHNEYPTIYHLRDRLMKDDQKHDIREIYVAIHHIMKYRGNFLHDESIETYRSGMSSLGGGDERTILNTKILDDLNDAFADNLATQGISVNSASADQINEIVTSGHLNVDSQKAIAKLLLPTTLSSDDKKQDKKIKKLATDAAKNVASAWLGYKANFAAILNIQEVDKDKKKIYSFALQGADEEDKVETLESVLSQDQIEIVDRIIRIRHAIVLGEIIPVGMTLSEAMIEKYDQHAKDLKNLKTVIRNLKDRKNAVKLQAIYDLYVNNRHADTAKAMKLAGVKKRTELLEPEEFNKSIEKLLDDSPVSAEIKKRIAEKDFLPLQRSNSNGVIPNQLHQIELDEIIKKQSKYYPFLGETNEHASADVARKAPTKLDQLLTFRVPYYVGPLITKEEQEEQDGHSFAWMIRKNPKDHEKITPWNFDEKVDRMASATQFIKRMTTKDTYLLGEDVLPSSSLKYQLFTVLNELNNLRINHKKLTREEKEQVIEDLFKKYKTVKADKFKNYWQKGHAGLDVKIQGMADPEKFNSTMSTYIDLQKIFGDQLDDAQRQNDFEKIIEYSTIFEDRKILGEKLRADFVWLSEDQIKRLCRLRLQGWGRLSLKLLTRLTDADGQNVLERLLNSNDNFMQIVKDPVIKAKIEQKNQKLLRADWSENATESILDEAYTSPQNKKAIRQVMRVVHDIVKACDGNLPAKFAIEFARSQDDDPKRTVARADRLQKIYAQISDEVVSQGVKDQLSGMKSLKDRYYLYFMQGGRDAYTGKPLNIDRLSDYDIDHIMPQSFIKDDSLDNRVLVTRAVNNQKSDNVPVLLYGNHLVADLGITIREMWDRWQKSGMISKRKLANLLTDPATLSEYRAEGFINRQLVETSQVIKLTATILQSEFPDSKIIEVPAKYNSILRKQFDLYKSREVNDYHHAIDAYLSTIVGNYLYQVYPNLRRLFVYGEFKKFSHGEEESSHQAVRRVKSMNFLDDLLRGKHGDDIYCRVTGEVIFSRKDIISKLKQAYSFKQMLVTQEVFTKKSALFDQTVYPSPARDSKTRSGLIPRKQGMDTEIYGGYSGNKDAYFVLAQVVKSKGHTLQVVGVPIRALRALANCSNYSEQLLKIVKAQVLFNKKTGKAKKGISDVRILLDKIPYRQPVLDGSAFYMLGSSTYKYNLKQISLSQQSMKYILDYIDDPNFNKHEMTKIDQQNEKECLLSVYDEILDKMDKYLSLYDINGFRKKLHVGRDKFIKLEVEKQAEAIKNVLRGFHANSDMTKLSDLGLSTSLGFMQASDGIKLSDNAVFIYQSPTGLFERRVKVSDLLK

SEQ ID NO: 302 - protein, 1289 aa, Lactobacillus versmoldensis
  REGION 1..1289: note = Lactobacillus versmoldensis KCTC 3814
MRRRYRRRRNRLNWLDELFADELAKIDPSFLLRMKNSWVSKKESTRKRDPYNLFIDEKYNDVDYFNQYPTIFHLRKELITEDKKVDIRLIYLAIHNIIKYRGNFTLENQNFDISQLSSNFSQQISDFFALFSDFGVIMPEDFDPDKISDILLNPNLSPSGKVSEAIATISPKTNVKAKIKIILLLLVGNNGDLKKLFDLETTEKIAVKLSSRHIDSELPIILSELNEQQENIITIANSIFGSIILKDFLGDETSISAAKVISFEDHKQDLQKLKTMWRETSNKEAVKAGKKAYEDYIGHEDSETFYKKIKKFLEKAQPVDLANKALAEIELENYLPKQRNRNNTVIPYQLNENELIAILDHQEKYYPFLKENRDKILSLLTFRIPYYVGPLQDSNNNRFSWMTRKASGAIRPWNFSEKVNVEQSSNDFIKRMRSTDTYLIGEPVLPKKSLIYQCYEVLSELNNTRVKDGSSNPKRLDVTIKQRIYNEIFKNQKSVSVKVLQNWLIKESYFKSPEISGLADKKKYLSSLSTYIDFKKIFGQRFVDDPVNSPQLEELAEWLTLFEDKKILLIKLQNSKYSYDQATINKLSTMRYQGTGKLSKKLLVDLKTTKKSIGKSGAESLSILDLMWSTKDNFMQIIHDADYTFEQQIKEFNYDTEDELTPLEKVANLHGSPALKRGLNQSIKVVADIVKFMGHDPEKIFIEFTRSDDFSKLTISRYRRIKKQYLEIAKAIKKIPAEFKDIKEYQTQLEENKGKLASERLMLYFLQCGHSLYSNKPIDLNMINSSKYHVDHILPQSYIKDDSLENKALVLASENENKIDNMLISHDIIATNLPRWQALKDQNLMGSKKFADLTRTTVTENQKKGFIQRQLVQTSQIVKNITLILNDLYKNTSCIETRATLSSEFRKAFSNFDETTYHYQFPEFVKNRDVNDFHHAQDAFLACVIGEYQLKKYPKDNLRLVYDQYSKFLDSLKKDTRKKNGRMPRYTQNGFIIGSMFNGKTYVDDNGEIIWDQKIKESIRKTFNYHQFNVVRQTIEQHGKLFNDTIQPHSDRYKLIPLKTNRDPAIYGGYNNDNNAYSVVLDVDGKKKINGIPIRIANQLKSDELDLSSWLENNIKHKKPMTILIDKVPKYQRIINEETGDLLITSANEVINNVQLFLPSMYTALISLLDSTKTEMYSKLLSNYEANILIDIYDYLLTKLKNNYPLYRKEWAKLAEHRDDFIESDLVTQASTLQQLIKFMHADPSNVNLKFGNFKGNRFGRKNGNIKLSKTDFIYESPTGLFKSIKHID

SEQ ID NO: 303 - protein, 1372 aa, Legionella pneumophila
  REGION 1..1372: note = Legionella pneumophila 130b
MESSQILSPIGIDLGGKFTGVCLSHLEAFAELPNHANTKYSVILIDHNNFQLSQAQRRATRHRVRNKKRNQFVKRVALQLFQHILSRDLNAKEETALCHYLNNRGYTYVDTDLDEYIKDETTINLLKELLPSESEHNFIDWFLQKMQSSEFRKILVSKVEEKKDDKELKNAVKNIKNFITGFEKNSVEGHRHRKVYFENIKSDITKDNQLDSIKKKIPSVCLSNLLGHLSNLQWKNLHRYLAKNPKQFDEQTFGNEFLRMLKNFRHLKGSQESLAVRNLIQQLEQSQDYISILEKTPPEITIPPYEARTNTGMEKDQSLLLNPEKLNNLYPNWRNLIPGIIDAHPFLEKDLEHTKLRDRKRIISPSKQDEKRDSYILQRYLDLNKKIDKFKIKKQLSFLGQGKQLPANLIETQKEMETHFNSSLVSVLIQIASAYNKEREDAAQGIWFDNAFSLCELSNINPPRKQKILPLLVGAILSEDFINNKDKWAKFKNFWNTHKIGRTSLKSKCKEIEEARKNSGNAFKIDYEEALNHPEHSNNKALIKIIQTIPDIIQAIQSHLGHNDSQALIYHNPFSLSQLYTILETKRDGFHKNCVAVTCENYWRSQKTEIDPEISYASRLPADSVRPFDGVLARMMQRLAYEIAMAKWEQIKHIPDNSSLLIPIYLEQNRFEFEESFKKIKGGSSDKTLEQAIEKQNIQWEEKFQRIINASMNICPYKGASIGGQGEIDHIYPRSLSKKHFGVIFNSEANLIYCSSQGNREKKEEHYLLEHLSPLYLKHQFGTDNVSDIKNFISQNVANIKKYISFHLLTPEQQKAARHALFLDYDDEAFKTITKFLMSQQKARVNGTQKFLGKQIMEFLSTLADSKQLQLEFSIKQITAEEVHDHRELLSKQEPKLVKSRQQSFPSHAIDATLTMSIGLKEFPQFSQELDNSWFINHLMPDEVHLNPVRSKEKYNKPNISSTPLFKDSLYAERFIPVWVKGETFAIGFSEKDLFEIKPSNKEKLFTLLKTYSTKNPGESLQELQAKSKAKWLYFPINKTLALEFLHHYFHKEIVTPDDTTVCHFINSLRYYTKKESITVKILKEPMPVLSVKFESSKKNVLGSFKHTIALPATKDWERLFNHPNFLALKANPAPNPKEFNEFIRKYFLSDNNPNSDIPNNGHNIKPQKHKAVRKVFSLPVIPGNAGTMMRIRRKDNKGQPLYQLQTIDDTPSMGIQINEDRLVKQEVLMDAYKTRNLSTIDGINNSEGQAYATFDNWLTLPVSTFKPEIIKLEMKPHSKTRRYIRITQSLADFIKTIDEALMIKPSDSIDDPLNMPNEIVCKNKLFGNELKPRDGKMKIVSTGKIVTYEFESDSTPQWIQTLYVTQLKKQP

SEQ ID NO: 304 - protein, 1372 aa, Legionella pneumophila
MESSQILSPIGIDLGGKFTGVCLSHLEAFAELPNHANTKYSVILIDHNNFQLSQAQRRATRHRVRNKKRNQFVKRVALQLFQHILSRDLNAKEETALCHYLNNRGYTYVDTDLDEYIKDETTINLLKELLPSESEHNFIDWFLQKMQSSEFRKILVSKVEEKKDDKELKNAVKNIKNFITGFEKNSVEGHRHRKVYFENIKSDITKDNQLDSIKKKIPSVCLSNLLGHLSNLQWKNLHRYLAKNPKQFDEQTFGNEFLRMLKNFRHLKGSQESLAVRNLIQQLEQSQDYISILEKTPPEITIPPYEARTNTGMEKDQSLLLNPEKLNNLYPNWRNLIPGIIDAHPFLEKDLEHTKLRDRKRIISPSKQDEKRDSYILQRYLDLNKKIDKFKIKKQLSFLGQGKQLPANLIETQKEMETHFNSSLVSVLIQIASAYNKEREDAAQGIWFDNAFSLCELSNINPPRKQKILPLLVGAILSEDFINNKDKWAKFKIFWNTHKIGRTSLKSKCKEIEEARKNSGNAFKIDYEEALNHPEHSNNKALIKIIQTIPDIIQAIQSHLGHNDSQALIYHNPFSLSQLYTILETKRDGFHKNCVAVTCENYWRSQKTEIDPEISYASRLPADSVRPFDGVLARMMQRLAYEIAMAKWEQIKHIPDNSSLLIPIYLEQNRFEFEESFKKIKGSSSDKTLEQAIEKQNIQWEEKFQRIINASMNICPYKGASIGGQGEIDHIYPRSLSKKHFGVIFNSEVNLIYCSSQGNREKKEEHYLLEHLSPLYLKHQFGTDNVSDIKNFISQNVANIKKYISFHLLTPEQQKAARHALFLDYDDEAFKTITKFLMSQQKARVNGTQKFLGKQIMEFLSTLADSKQLQLEFSIKQITAEEVHDHRELLSKQEPKLVKSRQQSFPSHAIDATLTMSIGLKEFPQFSQELDNSWFINHLMPDEVHLNPVRSKEKYNKPNISSTPLFKDSLYAERFIPVWVKGETFAIGFSEKDLFEIKPSNKEKLFTLLKTYSTKNPGESLQELQAKSKAKWLYFPINKTLALEFLHHYFHKEIVTPDDTTVCHFINSLRYYTKKESITVKILKEPMPVLSVKFESSKKNVLGSFKHTIALPATKDWERLFNHPNFLALKANPAPNPKEFNEFIRKYFLSDNNPNSDIPNNGHNIKPQKHKAVRKVFSLPVIPGNAGTMMRIRRKDNKGQPLYQLQTIDDTPSMGIQINEDRLVKQEVLMDAYKTRNLSTIDGINNSEGQAYATFDNWLTLPVSTFKPEIIKLEMKPHSKTRRYIRITQSLADFIKTIDEALMIKPSDSIDDPLNMPNEIVCKNKLFGNELKPRDGKMKIVSTGKIVTYEFESDSTPQWIQTLYVTQLKKQP

SEQ ID NO: 305 - protein, 1355 aa, Leuconostoc gelidum
  REGION 1..1355: note = Leuconostoc gelidum KCTC 3527
MTYSIGLDIGTGSVGWAVIGDDYRLKRAKGKNLIGVRLFDSATTAAERRGYRTTRRRLSRRHWRLRLLNDIFASDLAEQDENFLPRLKYSWVNPDDEQNPQLNSDVANGALFGSSETDKAFHKNYPTIYHLRHELMTDTAKHDLREVYLAIHHIVKYRGNFLNTADKINAENSFNVDLFIAALDEYNEFLETPITSIKDAQLFSDKLTDINARNKSVRVENAMSETYDDKSKIFKAILTALVGNTANFQTIFDLSDLEKDEAKNFKFKLDLEDVETKLDVVRAKLSDEQNAFLEAVLIAYDGITLKMILGDYKSISQSMIESYKSHQRDWKYIKNNVRLNEQKIEPDKNSVKFFKLDPKKLIYPSNLAYLQVISSNEDEHRKGLDYFKTAIQDADILQRIENDTFLPRQRTKRNGVLPYQLHLAELEQIIKKQSKYYPFLANIYTQDNKTENKLIGLLKFRVPYYVGPLVEAEKVTGDGKNHWLIKKELQENTPITPFNFDDVVDKDKSGEQFIKRITGTDSYLIGEPTLPENSLLYQKYNVLQELNNVRNERHQRLPIKVKQDIFEHVFKIDKNVNAKKVMAYLKLNGYGDFQIAGLSDTRTGKFNSNLSSYNYFVDLLGREKTEKIREDRLEEIIEIQTVFEDKILVAKRLSNLDFLTPQEKSKLSAKHYTGWGRLSQKLLTTQFIKTALSEAGDIIPQSHSIIDLLYYTDKNLMEILNDKTFNVRNWLTEQNKGTESGNSLYDQIDALAGPKDIKRGITQVFSIIDDIKKAMGSNPETVYLEFARETQTSRLTNSRLNRVQEIYNSPELKTEFAYLAKKLEAETKESIHDDRLYLYYLQEGRDMYTGKEIPFDQISSNYDIDHIIPQAFTKDDSLDNRVLVNRATNARKSNSPTFTNDIIDNRKSWWQSLVKRGLMSKEKFERLTDKRKTFSENQTNHFIARQLVETRQIIKNVADLIKNNYDGTQAVAIRASLTGEMRRYLDWPKNRDMNDYHHAHDALMMATVGKYVDRRGFFDNGSVSDGAGNAYNLYTKDWLVAARVGTRNDSQRVNPYGFIVGSMNSKAVRQQVNKETGEIVWGNENLDYLRHVLSYKKILVTRRLSGSSGRLYAETLFSPNPKAKLIAQKANRSVALYGGFTKAESAYTALVEFNKKGDRSYKLIKVPMAIANRVNDKQITVTAYIASLNLRDFSRVVLEHLPLGTLIRESDGSEFYAASSEYKHNAKELWAPKEILRSSKKLDKATADNLIDIFDFLTNDKTISNFKFYEKDLLHLKNVRDKFVEASDEIKIKVLSDVIYELHNDAGWRDPFKHIQEKPAWTMLQVKGGIKLSEKAAIVYQSPTGLFETITIVGE

SEQ ID NO: 306 - protein, 1337 aa, Listeria innocua
  REGION 1..1337: note = Listeria innocua ATCC 33091
MKNMKKPYTIGLDIGTNSVGWAVLTDQYDLVKRKMKIAGDSEKKQIKKNFWGVRLFDEGQTAADRRMARTARRRIERRRNRISYLQGIFAEEMSKTDANFFCRLSDSFYVDNEKRNSRHPFFATIEEEVEYHKNYPTIYHLREELVNSSEKADLRLVYLALAHIIKYRGNFLIEGALDTQNTSVDGIYKQFIQTYNQVFASGIEDGSLKKLEDNKDVAKILVEKVTRKEKLERILKLYPGEKSAGMFAQFISLIVGSKGNFQKPFDLIEKSDIECAKDSYEEDLESLLALIGDEYAELFVAAKNAYSAVVLSSIITVAETETNAKLSASMIERFDTHEEDLGELKAFIKLHLPKHYEEIFSNTEKHGYAGYIDGKTKQADFYKYMKMTLENIEGADYFIAKIEKENFLRKQRTFDNGAIPHQLHLEELEAILHQQAKYYPFLKENYDKIKSLVTFRIPYFVGPLANGQSEFAWLTRKADGEIRPWNIEEKVDFGKSAVDFIEKMTNKDTYLPKENVLPKHSLCYQKYLVYNELTKVRYINDQGKTSYFSGQEKEQIFNDLFKQKRKVKKKDLELFLRNMSHVESPTIEGLEDSFNSSYSTYHDLLKVGIKQEILDNPVNTEMLENIVKILTVFEDKRMIKEQLQQFSDVLDGVVLKKLERRHYTGWGRLSAKLLMGIRDKQSHLTILDYLMNDDGLNRNLMQLINDSNLSFKSIIEKEQVTTADKDIQSIVADLAGSPAIKKGILQSLKIVDELVSVMGYPPQTIVVEMARENQTTGKGKNNSRPRYKSLEKAIKEFGSQILKEHPTDNQELRNNRLYLYYLQNGKDMYTGQDLDIHNLSNYDIDHIVPQSFITDNSIDNLVLTSSAGNREKGDDVPPLEIVRKRKVFWEKLYQGNLMSKRKFDYLTKAERGGLTEADKARFIHRQLVETRQITKNVANILHQRFNYEKDDHGNTMKQVRIVTLKSALVSQFRKQFQLYKVRDVNDYHHAHDAYLNGVVANTLLKVYPQLEPEFVYGDYHQFDWFKANKATAKKQFYTNIMLFFAQKDRIIDENGEILWDKKYLDTVKKVMSYRQMNIVKKTEIQKGEFSKATIKPKGNSSKLISRKTNWDPMKYGGLDSPNMAYAVVIEYAKGKNKLVFEKKIIRVTIMERKAFEKDEKAFLEEQGYRQPKVLAKLPKYTLYECEEGRRRMLASANEAQKGNQQVLPNHLVTLLHHVANCEVSDGKSLDYIESNREMFAELLAHVSEFAKRYTLAEANLNKINQLFEQNKEGDIKAIAQSFVDLMAFNAMGAPASFKFFETTIERKRYNNLKELLNSTIIYQSITGLYESRKRLDD

SEQ ID NO: 307 - protein, 1334 aa, Listeria innocua
MKKPYTIGLDIGTNSVGWAVLTDQYDLVKRKMKIAGDSEKKQIKKNFWGVRLFDEGQTAADRRMARTARRRIERRRNRISYLQGIFAEEMSKTDANFFCRLSDSFYVDNEKRNSRHPFFATIEEEVEYHKNYPTIYHLREELVNSSEKADLRLVYLALAHIIKYRGNFLIEGALDTQNTSVDGIYKQFIQTYNQVFASGIEDGSLKKLEDNKDVAKILVEKVTRKEKLERILKLYPGEKSAGMFAQFISLIVGSKGNFQKPFDLIEKSDIECAKDSYEEDLESLLALIGDEYAELFVAAKNAYSAVVLSSIITVAETETNAKLSASMIERFDTHEEDLGELKAFIKLHLPKHYEEIFSNTEKHGYAGYIDGKTKQADFYKYMKMTLENIEGADYFIAKIEKENFLRKQRTFDNGAIPHQLHLEELEAILHQQAKYYPFLKENYDKIKSLVTFRIPYFVGPLANGQSEFAWLTRKADGEIRPWNIEEKVDFGKSAVDFIEKMTNKDTYLPKENVLPKHSLCYQKYLVYNELTKVRYINDQGKTSYFSGQEKEQIFNDLFKQKRKVKKKDLELFLRNMSHVESPTIEGLEDSFNSSYSTYHDLLKVGIKQEILDNPVNTEMLENIVKILTVFEDKRMIKEQLQQFSDVLDGVVLKKLERRHYTGWGRLSAKLLMGIRDKQSHLTILDYLMNDDGLNRNLMQLINDSNLSFKSIIEKEQVTTADKDIQSIVADLAGSPAIKKGILQSLKIVDELVSVMGYPPQTIVVEMARENQTTGKGKNNSRPRYKSLEKAIKEFGSQILKEHPTDNQELRNNRLYLYYLQNGKDMYTGQDLDIHNLSNYDIDHIVPQSFITDNSIDNLVLTSSAGNREKGDDVPPLEIVRKRKVFWEKLYQGNLMSKRKFDYLTKAERGGLTEADKARFIHRQLVETRQITKNVANILHQRFNYEKDDHGNTMKQVRIVTLKSALVSQFRKQFQLYKVRDVNDYHHAHDAYLNGVVANTLLKVYPQLEPEFVYGDYHQFDWFKANKATAKKQFYTNIMLFFAQKDRIIDENGEILWDKKYLDTVKKVMSYRQMNIVKKTEIQKGEFSKATIKPKGNSSKLIPRKTNWDPMKYGGLDSPNMAYAVVIEYAKGKNKLVFEKKIIRVTIMERKAFEKDEKAFLEEQGYRQPKVLAKLPKYTLYECEEGRRRMLASANEAQKGNQQVLPNHLVTLLHHAANCEVSDGKSLDYIESNREMFAELLAHVSEFAKRYTLAEANLNKINQLFEQNKEGDIKAIAQSFVDLMAFNAMGAPASFKFFETTIERKRYNNLKELLNSTIIYQSITGLYESRKRLDD

SEQ ID NO: 308 - protein, 1334 aa, Listeria monocytogenes
MKNPYTIGLDIGTNSVGWAVLTNQYDLVKRKMKVAGNSDKKQIKKNFWGVRLFDDGQTAVDRRMNRTARRRIERRRNRISYLQEIFAVEMANIDANFFCRLNDSFYVDSEKRNSRHPFFATIEEEVAYHKNYRTIYHLREELVNSSEKADLRLVYLALAHIIKYRGNFLIEGALDTKNTSVDGVYEQFIQTYNQVFMSNIEEGTLAKVEENIEVANILAGKFTRREKFERILQLYPGEKSTGMFAQFISLIVGSKGNFQKVFDLIEKTDIECAKDSYEEDLEALLAIIGDEYAELFVAAKNTYNAVVLSSIITVTATETNAKLSASMIERFDAHEKDLGELKAFIKLHLPKQYQEIFNNAAIDGYAGYIDGKTKQVDFYKYLKTILENIEGADYFIAKIEEENFLRKQRTFDNGAIPHQLHLEELEAIIHQQAKYYPFLREDYEKIKSLVTFRIPYFVGPLAKGQSEFAWLTRKADGEIRPWNIEEKVDFGKSAVDFIEKMTNKDTYLPKENVLPKHSLCYQKYMVYNELTKVRYIDDQGKTNYFSGQEKQQIFNDLFKQKRKVKKKDLELFLRNINHIESPTIEGLEDSFNASYATYHDLLKVGMKQEILDNPLNTEMLEDIVKILTVFEDKPMIKEQLQQFSDVLDGGVLKKLERRHYTGWGRLSAKLLVGIREKQSHLTILDYLMNDDGLNRNLMQLINDSNLSFKSIIEKEQVSTTDKDLQSIVADLAGSPAIKKGILQSLKIVDELVSIMGYPPQTIVVEMARENQTTGKGKNNSKPRYKSLEKAIKEFGSKILKEHPTDNQELKNNRLYLYYLQNGKDMYTGQELDIHNLSNYDIDHIVPQSFITDNSIDNLVLTSSAGNREKGGDVPPLEIVRKRKVFWEKLYQGNLMSKRKFDYLTKAERGGLTDADKARFIHRQLVETRQITKNVANILHQRFNNETDNHGNTMEQVRIVTLKSALVSQFRKQFQLYKVREVNDYHHAHDAYLNGVVANTLLKVYPQLEPEFVYGEYHQFDWFKANKATAKKQFYTNIMLFFGQKERIIDENGEILWDKKYLETIKKVLDYRQMNIVKKTEIQKGEFSKATIKPKGNSSKLIPRKENWDPMKYGGLDSPNMAYAVIIEHAKGKKKLIFEKKIIRITIMERKMFEKDEEAFLEEKGYRHPKVLTKLPKYTLYECEKGRRRMLASANEAQKGNQLVLSNHLVSLLYHAKNCEASDGKSLKYIEAHRETFSELLAQVSEFATRYTLADANLSKINNLFEQNKEGDIQAIAQSFVDLMAFNAMGAPASFKFFEATIDRKRYTNLKELLSSTIIYQSITGLYESRKRLDD

SEQ ID NO: 309 - protein, 1334 aa, Listeria monocytogenes
  REGION 1..1334: note = Listeria monocytogenes FSL J1-194
MKNPYTIGLDIGTNSVGWAVLTDQYDLVKRKMKVAGNSDKKQIKKNFWGVRLFDDGQTAVDRRMNRTARRRIERRRNRISYLQEIFAVEMANIDANFFCRLNDSFYVDSEKRNSRHPFFATIEEEVAYHKNYRTIYHLREELVNSSEKADLRLVYLALAHIIKYRGNFLIEGALDTKNTSVDEVYKQFIQTYNQVFMSNIEEGALAKVEENTEVASILAGKFTRREKFERILRLYPGEKSTGMFAQFISLIVGNKGNFQKVFNLVEKTDIECAKDSYEEDLEALLAIIGDEYAELFVAAKNTYNAVVLSSIITVTATETNAKLSASMIERFDAHEKELGELKAFIKLHLPKQYQEIFNNAEIDGYAGYIDGKTKQVDFYKYLKTTLENVEGADYFITKIEEENFLRKQRTFDNGVIPHQLHLEELEAILHQQAKYYPFLREGYDKIKSLVTFRIPYFVGPLANGQSEFAWLTRKDDGEIRPWNIEEKVDFGKSAVDFIEKMTNKDTYLPKENVLPKHSLCYQKYMVYNELTKIRYIDDQGKTNYFSGREKQQIFNDLFKQKRKVKKKDLELFLRNINHIESPTIEGLEDSFNASYATYHDLLKVGLKQEILDNPLNTEILEDIVKILTVFEDKRMIKEQLEQFSDVLDGVVLKKLERRHYTGWGRLSAKLLVGIRDKQSHLTILDYLMNDDGLNRNLMQLINDSNLSFKSIIEKEQVSTTDKDLQSIVADLAGSPAIKKGILQSLKIVDELVSIMGYPPQTIVVEMARENQTTGKGKNNSKPRYKSLEKAIKDFGSQILKEHPTDNQELKNNRLYLYYLQNGKDIYTGQELDIHNLSNYDIDHIVPQSFITDNSIDNLVLTSSAGNREKGGDVPPLEIVRKRKVFWEKLYQGNLMSKRKFDYLTKAERGGLTEADKARFIHRQLVETRQITKNVANILHQRFNKETDNHGNTMEQVRIVTLKSALVSQFRKQFQLYKVREVNDYHHAHDAYLNGVVANTLLKVYPQLEPEFVYGEYHQFDWFKANKATAKKQFYTNIMLFFAQKERIIDENGEILWDKKYLETIKKVLDYRQINIVKKTEIQKGEFSKATIKPKGNSSKLIPRKENWDPMKYGGLDSPNMAYAVIIEHAKGKKKIVIEKKLIQINIMERKMFEKDEEAFLEEKGYHQPKVLTKLPKYTLYECEKGRRRMLSSANEAQKGNQLVLSNHLVSLLYHAKNCEASDGKSLKYIEAHRETFSELLAQVSEFATKYTLADANLSKINNLFEQNKEGDIKAIAQSFVDLMAFNAMGAPASFKFFEATIDRKRYTNLKELLSSTIIYQSITGLYESRKRLDD

SEQ ID NO: 310 - protein, 1334 aa, Listeria monocytogenes
  REGION 1..1334: note = Listeria monocytogenes FSL J1-208
MKNPYTIGLDIGTNSVGWAVLTDQYDLVKRKMKVAGNSDKKQIKKNFWGVRLFDEGETAADRRMNRTARRRIERRRNRISYLQEIFALEMANIDANFFCRLNDSFYVDSEKRNSRHPFFATIEEEVAYHKNYRTIYHLREELVNSSEKADLRLVYLALAHIIKYRGNFLIEGALDTKNTSVDGVYKQFIQTYNQVFISNIEEGTLAKMEENTTVADILAGKFTRKEKLERILQLYPGEKSTGMFAQFISLIVGSKGNFQKVFDLVEKTDIECAKDSYEEDLEALLAIIGDEYAELFVAAKNTYNAVVLSSIITVTDTETNAKLSASMIERFDAHEKDLSELKAFIKLHLPKQYEEIFSNVAIDGYAGYIDGKTKQVDFYKYLKTLLENIEGADYFIAKIEEENFLRKQRTFDNGAIPHQLHLEELEAILHQQAKYYPFLKEAYDKIKSLVTFRIPYFVGPLANGQSDFAWLTRKADGEIRPWNIEEKVDFGKSAVDFIEKMTNKDTYLPKENVLPKHSLYYQKYMVYNELTKVRYIDDQGKTNYFSGQEKQQIFNDYFKQKRKVSKKDLEQFLRNMSHIESPTIEGLEDSFNSSYATYHDLLKVGIKQEVLENPLNTEMLEDIVKILTVFEDKRMIKEQLQQFSDVLDGAVLKKLERRHYTGWGRLSAKLLVGIRDKQSHLTILDYLMNDDGLNRNLMQLINDSNLSFKSIIEKEQVSTTDKDLQSIVADLAGSPAIKKGILQSLKIVDELVSIMGYPPQTIVVEMARENQTTVKGKNNSRPRYKSLEKAIKEFGSQILKEHPTDNQELRNNRLYLYYLQNGKDMYTGQELDIHNLSNYDIDHIVPQSFITDNSIDNLVLTSSAGNREKGDDVPPLEIVRKRKVFWEKLFQGNLMSKRKFDYLTKAERGGLTEADKATFIHRQLVETRQITKNVANILHQRFNNETDNHGNNMEQVRIVMLKSALVSQFRKQFQLYKVREVNDYHHAHDAYLNGVVANTLLKVYPQLEPEFVYGEYHQFDWFKANKATAKKQFYTNIMLFFAQKERIIDENGEILWDKKYLETIKKVLDYRQMNIVKKTEIQKGEFSKATIKPKGNSSKLIPRKENWDPMKYGGLDSPNMAYAVIIEHAKGKKKVVFEKKIIRITIMERKAFEKDEKSFLEKQGYRQPKVLTKLPKYTLYECENGRRRMLASANEAQKGNQQVLKGQLITLLHHAKNCEASDGKSLDYIESNREMFGELLAHVSEFAKRYTLADANLSKINQLFEQNKDNDIKVIAQSFVNLMAFNAMGAPASFKFFEATIERKRYTNLKELLSATIIYQSITGLYEARKRLDG

SEQ ID NO: 311 - protein, 1334 aa, Listeria monocytogenes
  REGION 1..1334: note = Listeria monocytogenes FSL N3-165
MKKPYTIGLDIGTNSVGWAVLTDQYDLVKRKMKISGDSEKKQIKKNFWGVRLFEKGETAAKRRMSRTARRRIERRRNRISYLQEIFAIQMNEVDDNFFNRLKESFYAESDKKYNRHPFFGTVEEEVAYYKDFPTIYHLRKELIDSQKKADLRLVYLALAHIIKYRGHFLIEGALDTKNTSIDEMFKQFLQIYNQVFANDIEEASLKKTEKNQEVAQILAEKFTRKDKLDKILSLYPGEKTTGVFAQFVNIIVGSTGKFKKHFNLHEKKDINCAEDTYDTDLESLLAIIGDEFAEVFVAAKNAYNAVVLSNIITVTDSTTRAKLSASLIERFENHKEDLKKMKRFVRTYLPEKYDEIFDDTEKHGYAGYISGKTKQADFYKYMKATLEKIEGADYFIAKIEEENFLRKQRTFDNGVIPHQLHLEELEAILHQQAKYYPFLREDYEKIKSLVTFRIPYFVGPLAKGQSEFAWLTRKADGEIRPWNIEEKVDFGKSAVDFIEKMTNKDTYLPKENVLPKHSLCYQKYMVYNELTKVRYIDDQGKTNYFSGQEKQQIFNDLFKQKRKVKKKDLELFLRNINQIESPTIEGLEDSFNASYATYHDLLKVGMKQEILDNPLNTEMLEDIVKILTVFEDKRMIKEQLQQFSDVLDGTVLKKLERRHYTGWGRLSAKLLVGIRDKQSHLTILDYLMNDDGLNRNLMQLINDSNLSFKSIIEKEQVSTTDKDLQSIVAELAGSPAIKKGILQSLKIVDELVSVMGYPPQTIVVEMARENQTTNKGKNNSKPRYKSLEKAIKEFGSQILKEHPTDNQELKNNRLYLYYLQNGKDMYTGQELDIHNLSNYDIDHIVPQSFITDNSVDNLVLTSSAGNREKGDNVPPLEIVQKRKIFWEKLYQGNLMSKRKFDYLTKAERGGLTEADKARFIHRQLVETRQITKNVANILHQRFNYKTDGNKDTMETVRIVTLKSALVSQFRKQFQFYKVREVNDYHHAHDAYLNGVVANTLLKVYPQLEPEFVYGEYHQFGWFKANKATAKKQFYTNIMLFFAQKDRIIDENGEILWDKRYLETVKKVLGYRQMNIVKKTEIQKGEFSNVTPNPKGKSNKLIPRKKDWDPIKYGGFDGSKMAYAIIIEYEKQKRKVRIEKKLIQINIMEREAFEKDEKTFLEEKGYHQPKVLIKVPKYTLYECKNGRRRMLGSANEAHKGNQMLLPNHLMALLYHAEKYEAIDGESLAYIEVHRALFDELLAYISEFARKYTLSNDRLDEINMLYERNKDGDVKSIAESFVSLKKFNAFGVHQDFSFFGTKIERKRDRKLNELLNSTIIYQSITGLYESRKRLDN

SEQ ID NO: 312 - protein, 1334 aa, Listeria monocytogenes
  REGION 1..1334: note = Listeria monocytogenes FSL R2-503
MKNPYTIGLDIGTNSVGWAVLTDQYDLVKRKMKVAGNSDKKQIKKNFWGVRLFDDGQTAVDRRMNRTARRRIERRRNRISYLQEIFAVEMANIDANFFCRLNDSFYVDSEKRNSRHPFFATIEEEVAYHKNYRTIYHLREELVNSSEKADLRLVYLALAHIIKYRGNFLIEGALDTKNTSVDEVYKQFIQTYNQVFMSNIEEGALAKVEENTEVASILAGKFTRREKFERILRLYPGEKSTGMFAQFISLIVGNKGNFQKVFNLVEKTDIECAKDSYEEDLEALLAIIGDEYAELFVAAKNTYNAVVLSSIITVTATETNAKLSASMIERFDAHEKELGELKAFIKLHLPKQYQEIFNNAEIDGYAGYIDGKTKQVDFYKYLKTTLENVEGADYFITKIEEENFLRKQRTFDNGVIPHQLHLEELEAILHQQAKYYPFLREGYDKIKSLVTFRIPYFVGPLANGQSEFAWLTRKDDGEIRPWNIEEKVDFGKSAVDFIEKMTNKDTYLPKENVLPKHSLCYQKYMVYNELTKIRYIDDQGKTNYFSGREKQQIFNDLFKQKRKVKKKDLELFLRNINHIESPTIEGLEDSFNASYATYHDLLKVGLKQEILDNPLNTEILEDIVKILTVFEDKRMIKEQLEQFSDVLDGVVLKKLERRHYTGWGRLSAKLLVGIRDKQSHLTILDYLMNDDGLNRNLMQLINDSNLSFKSIIEKEQVSTTDKDLQSIVADLAGSPAIKKGILQSLKIVDELVSIMGYPPQTIVVEMARENQTTGKGKNNSKPRYKSLEKAIKDFGSQILKEHPTDNQELKNNRLYLYYLQNGKDIYTGQELDIHNLSNYDIDHIVPQSFITDNSIDNLVLTSSAGNREKGGDVPPLEIVRKRKVFWEKLYQGNLMSKRKFDYLTKAERGGLTEADKARFIHRQLVETRQITKNVANILHQRFNKETDNHGNTMEQVRIVTLKSALVSQFRKQFQLYKVREVNDYHHAHDAYLNGVVANTLLKVYPQLEPEFVYGEYHQFDWFKANKATAKKQFYTNIMLFFAQKERIIDENGEILWDKKYLETIKKVLDYRQINIVKKTEIQKGEFSKATIKPKGNSSKLIPRKENWDPVKYGGLDSPNMAYAVIIEHAKGKKKIVIEKKLIQINIMERKMFEKDEEAFLEEKGYHQPKVLTKLPKYTLYECEKGRRRMLSSANEAQKGNQLVLSNHLVSLLYHAKNCEASDGKSLKYIEAHRETFSELLAQVSEFATKYTLADANLSKINNLFEQNKEGDIKAIAQSFVDLMAFNAMGAPASFKFFEATIDRKRYTNLKELLSSTIIYQSITGLYESRKRLDD

SEQ ID NO: 313 - protein, 1334 aa, Listeria monocytogenes
  REGION 1..1334: note = Listeria monocytogenes serotype 1/2a str. F6854
MKNPYTIGLDIGTNSVGWAVLTNQYDLVKRKMKVAGNSDKKQIKKNFWGVRLFDDGQTAVDRRMNRTARRRIERRRNRISYLQEIFAVEMANIDANFFCRLNDSFYVDSEKRNSRHPFFATIEEEVAYHDNYRTIYHLREKLVNSSEKADLRLVYLALAHIIKYRGNFLIEGALDTKNTSVDEVYKQFIETYNQVFMSNIEEGALAKVEENIEVANILAGKFTRREKFERILQLYPGEKSTGMFAQFISLIVGSKGNFQKVFDLIEKTDIECAKDSYEEDLETLLAIIGDEYAELFVAAKNTYNAVVLSSIITVTDTETNAKLSASMIERFDAHEKDLVELKAFIKLNLPKQYEEIFSNAAIDGYAGYIDGKTKQVDFYKYLKTILENIEGSDYFIAKIEEENFLRKQRTFDNGAIPHQLHLEELEAIIHQQAKYYPFLKEDYDKIKSLVTFRIPYFVGPLANGQSEFAWLTRKADGEIRPWNIEEKVDFGKSAVDFIEKMTNKDTYLPKENVLPKHSLCYQKYMVYNELTKIRYIDDQGKTNYFSGREKQQVFNDLFKQKRKVKKKDLELFLRNINHIESPTIEGLEDSFNASYATYHDLLKVGMKQEILDNPLNTEMLEDIVKILTVFEDKPMIKEQLQQFSDVLDGGVLKKLERRHYTGWGRLSAKLLVGIREKQSHLTILDYLMNDDGLNRNLMQLINDSNLSFKSIIEKEQVSTTDKDLQSIVAELAGSPAIKKGILQSLKIVDELVSIMGYPPQTIVVEMARENQTTGKGKNNSKPRYKSLEKAIKEFGSQILKEHPTDNQELKNNRLYLYYLQNGKDMYTGQELDIHNLSNYDIDHIVPQSFITDNSIDNLVLTSSAGNREKGGDVPPLEIVRKRKVFWEKLYQGNLMSKRKFDYLTKAERGGLTEADKARFIHRQLVETRQITKNVANILYQRFNKETDNHGNTMEQVRIVTLKSALVSQFRKQFQLYKVREVNGYHHAHDAYLNGVVANTLLKVYPQLEPEFVYGEYHQFDWFKANKATAKKQFYTNIMLFFAQKERIIDENGEILWDKKYLETIKKVLDYRQMNIVKKTEIQKGEFSKATIKPKGNSSKLIPRKENWDPMKYGGLDSPNMAYAVIIEHAKGKKKIVIEKKLIQINIMERKMFEKDEEAFLEEKGYRHPKVLTKLPKYTLYECEKGRRRMLASANEAQKGNQLVLSNHLVSLLYHAKNCEASDGKSLKYIEAHRETFSELLAQVSEFATRYTLADANLSKINNLFEQNKEGDIKAIAQSFVDLMAFNAMGAPASFKFFEATIDRKRYTNLKELLSSTIIYQSITGLYESRKRLDD

SEQ ID NO: 314 - protein, 1087 aa, unidentified
  REGION 1..1087: note = Listeriaceae bacterium TTU M1-001
  source 1..1087: note = Listeriaceae bacterium
MKKLVLGLDIGVASVGWGIIDAENGDVVDTGVRLFSSRDASENESRRTSRQSRRLSRRKKHRRERIKQLLLAHDMDICDIVNENPYELRVKGLNEKLEVSEIYVALTHLAKRRGVSYLDDVVEEGGTIKSEHLNKNMEEIKSGKMPCEIQLERFEKYGQVRGMIEINQDTEESSFLVNIFRTSDYIKEAKTILATQQKFHKQITNEFIDEYIHIMASKRDYFIGPGNEKSRTDYGVYRTNGDTWDNLFEILIGKCSVFPEETRAARSSYVAQEFNLLNDLNNLKISNLESGKLSASQKHDIVEKVKNSKKFGTKDLLKYIASVCECKIEDIGGCRVDKNRKPIMHTFENYRKVHNALNEAGVDLRLSETDYDELMKIMTLNSETLEIKKQCKEKLPQLTEDYLNVCLVLNKKGAFSGWHALSLKAMKLMMPELYGTSKNQMQIIHTMQLGKAYLKPLNQQKYLNSEAILEEIYNPIAARSIRQTIKVTNAILKKYGHLDSVIIEMPRDYQTSEDERKMIEKMQKENEKEKKAALKRAREEYPFPDEAFRNHKELATKLRLWYQQDQFCVYSGRKISVVDLVRNPNQFEIDHIIPQSVSLDDSLNNKVLCFSEENQKKGQQTPFYYHKGKSGNWTYEQYKLFVEKLFDKKKISNKKRELLLFEEDINKWDVRRGFIARNLVDTRYASRVILNSYQQYFGNHEMGTKVKVVRGKFTSQLRKKWRIFKDRNESHSHHAIDALIVAATANLRLWKKNTLGVSDEGKVYDKETGEILPFEKLTESEYNEMMNKEPYLNFKTKLQNIETKVKYSYRVSKKVNRKISDATIYSTRERDGIDYIVGKIKNIYDVKTYKDQFLKRYKKNKEQFLMYQHDPQTFAILENIMATYQDAENPFLAYKKEYGVIRKYSKKGGGSPVTSLKFIDKVLGQKIDLTAKNQAALPKNKKVVLQSITPYRADVYYDEIDKRYHLIGVKYSLFSFSKQGYVINPIAYQKLLEKEQIHSEMKFCFSLYREDIIEFGEDPDSLTRYRFWSKNESGKNKIEVKPIEKPNFEKQTVLTITKKIKILNKYQTDVLGNSFKAQEEKDPRNIE

SEQ ID NO: 315 - protein, 1345 aa, Marinilabilia sp.
  REGION 1..1345: note = Marinilabilia sp. AK2
MKKILGLDLGTTSIGWAFIKEPEKDVVGSEIVDMGVRIVALSSDEENDFAKGNTISINADRTLKRGARRNLQRFKLRRDALLEIFKEMKLIPSNFKYAEDGPSSTFSTLKLRDKAAKEKIELDDLVKVLLQINKKRGYRSSRKAKSEEDDGSAIDSMGIAKELYENDLTPGQWVFEALQKGRKNVPDFYRSDLQEEFKKIVNYQSEFYPDVLNSSFVEDWMGKASTPTKQYFNKKGVHLAENKGKREERRLQEYNWRAVAVNSKIDLSEIALILSQINSQISNSSGYLGAISDRSKELYFKNQTVGQYLYQQIKINPHTRLKGQVFYRQDYLDEFEKIWSVQSGFHPQLNDALKKEIRDITIFFQRRLKSQKHLISNCEFEDYHKVVPKSHPIFQEFRIWQNLNNLTLIKKDNLNEKSELALEDKIALANELAFKREQSVKDALNILGLKSSEWEFNFTKIEGNRTNHAFFEAFAKIIEIEDGEPLDLGNLKADDILDQFSEAFLRIGIDPGLLQVNNDIEGPNYEKQPYIQFWHLLYSSEDDQKLKQNLIKKFGFKPDHAKILASISLQDDHASLSSRAIKKILPHLQSGLIYDKACTYAGYNHSSSFTKEENEKRELSSELDLLKKNSLRNPVVEKILNQMINVVNAILKDPNLGKPDEIRVEMARELKANAEQRKNMTSNIASATRDHEKYREILKKEFGLKRVTKNDLLRYKLWLETDGISLYTGKPIEASKLFSKEYDIEHIIPKTRLFDDSFSNKTICERQLNIDKANVTAFSFLQNKLSGDEFEQYQSRVKSLFGKLSKAKIQKLLMANDKIPEDFIARQLQETRYISKKAKEILFEITRRVSVTTGTITDKLREDWGLVEIMKELNWEKYDKLGLTYTIEGKHGERLNKIKDWSKRNDHRHHAMDALTVALTKPAYIQYLNNLNAKELNGKKSTEIFAIEQKYLKRENGKLCFIPPVENIRTEAKKHLSKVLISYKAKNKVVTINKNRTNKKAGFNEQIALTPRGQLHKETVYGKAFHYSTKFEKIGASFDVQKINAVAKKEEREALLKRLAENGDDPKKAFTGKNSLSKMPIYLDLKRNIKLPEKVKTVVLEQNYTIRKNIDPDLKLDKVIDVGVKRILENRLKEFGGNAKLALSNLDENPIWLNKEKGITIKRVKISGVSNVESLHVKKDHFGEPILDQVGNEIPVDFVSTGNNHHVAIYEDEKGNLQEEVVSFFEAVVRQNQGLPIINKNHSLGWKFLFTLKQNEYFVFPSDDFDPTDVDLMDEENYHLISPNLFRVQKFTTKDYFFRHHLETTVEDKSELKGVSFKRLGLPGLNCIKKIRINHLGKIIQVGEY

SEQ ID NO: 316 - protein, 1352 aa, Megasphaera sp.
  REGION 1..1352: note = Megasphaera sp. UPII 135-E
MKKRNREEYYVGLDIGTSSVGWAVATPDYRIPKFRGHKMWGSRLFAEGKRAAERRQFRTNRRRLARRRDRLQILEELFAEEMAKVDNTFFMRLKESKFFLEDKTVKEKHILFSTDKFDADRFYKDNPTIYHVRKRLMEEEPQDIRELFLAVHHILKYRGHFLFAGSLEQNGASIEELVRTLLGKQGLAILDDTIDSNEMVNILKNTGETKSDRKKDVQELWNPLKDKVKKAQAAEMAGLVLGLKSDISKLFANSDYKDLDSSIKNINFSSGDYEEKRDDYANSIGDDIVLLDTMKALYDTLILSQILQGKRSISAAKVEDYNTHKEQLRALKAILKPHKRLYNEMFRENNKKDLSNYVAYISSYSEGKRVNREGFYKYVQAVLKQVDDSDSKQAILEAIRLETFLPLLRVKDNAVIPHQIHQAELEAILETARKKYNFLNDVSDGVSVKDKIIQLFTFRIPYYVGPLNPHSGETVADRKQGTGWVVRKQRGKVYPWNFADMVDVKASAEAFITNLTNKCTYLIGEDVLPKRSLLYSEFMLLNELNMIKYDGHELPVAIKQLYIEQVFKQEHKKQTKGRVLDFLKRNGLITGSATAVITGMDDAIKGDLQSYRDMVRIFGAGFDHSMAERIIRWVTLFGEAKDILENKIREVYGNSISDSQMRAIKKLKYADWGRLSQAFLIAVKGCDKSGVERNIITCLRASSQNLMEILSDQGTYIKQIKAWNHQHTTNMMDTLDYQLVDDLYVAPSVKRSIWQSLCIVEELVKIMGQAPKKIFVEVTRTKQAEKTKKDSRKKRLVELYTAIGKEGAAWKKEIEAHQAGDFRRKKLYLYYTQMGRCMYSNEPIAMDALFTSAYDIDHIYPQSLTKDGSWDNLVLVKSQLNKEKSDQYPLRPAIREKNKAHWQYLCRAGFISEKKYERLMRTTELTAEELSGFIARQLVETSQATKAVTGLLERIYTNTEICFVKAETVSQFRHQHNFIKIRELNNYHHAKDAYLNIVVGNVYHEKFTKNPWEFIARSTERRPYNLNRMYDFDLLKQGRVIWQVPKSLETVQAMMKSNDVRITKKLLVQKGELYDATITKAHKAKEGTYFPLKGADARLRDVHRYGGYEKIKIAYYSVFSCREKASNTIHTLIIPIPVYKAGLLQTEADLTAYAWQTKQKTKPIKDIYSAITPIYKKLCINTVVKIDGFKYFLGGKTGDYMWLDPAIPVVLDEQAAAYLKAISKVGRADDVENTAQAIDLITAEANEAFYDVLLKKMEAKIFAKAYQTIVEKLASETARERFRELSIGAQCSCLLEILNLLANNKTTFTFFKDKMGVTMSRRKQPMDLTKLEECIVYETSITGLYEKAVSLL

SEQ ID NO: 317 - protein, 1080 aa, Methylocystis sp.
  REGION 1..1080: note = Methylocystis sp. ATCC 49242
MRVLGLDGGIASIGWALIEIFEDHEPSDGRIIDTGAWMFDAPEEKSQTGTKLKSELRRIFRGQRRVIRRRRQRMNEVRRILHRHGLLSSDNRDALKQPGLDPWKIRAEGIDRLLSPIEFAVALGHIARHRGFKSNSKGAKTSDLDAESSRMKKAVGETREKLARFGSPAKLLVEDEGFVLRQTKLKSGALETVRRFRNRDGDYSRSLLRDDLAAEVRALFRAQARLQSTFAKVELEAEFTQAAFFQRPLQDSERLVGPCPFEPAEKRSPKRGYSFELFRFLSRLNHLTLREGSEERTLTVEELRTAAADFGGVAKFTFSTLRKRLALPDIAIFVGIKADDEKKLDVVARSGEAATGTARLRRVVIDALGELAWGALISAPERLDKITEIITFRSDLDRIRAGLIEAGFDTPLIEAIVRAAADGKLDAFTGVGHISAKAARNIIPGLMRGMTYDKACAAAGYDHTASRERDAFDVGMHGKEALKKILQEERISRELVGSPSARKALIEAVKQVKAIIEKYGVPDRIHVELARDVGKSIEERRDIHFGIEKRSRQKDKLRELFGKEVGHLPQDGERGKEELLRFELWNEQMGRCLYTDEYINPKQLVASDNSVQVDHILPWSRFGDDSYLNKTLCTAKANQDKKGRTPYEWFRADKPEAEWDAFVARVESIQFMKGLKKRNYKLKNAEEAAEKFRSRNLNDTRWTCRLLAEALKQLYPKGEKDKDGKERRRVFTRPGALTNRLRRAWSLQRRKKSEKGERIADDRHHALDAIIVAATTESLLIRATREVQDIERKGLHYDLTKNITQPWPGFADEALDAVEKVFVARAERRRARGKAHDATIRHIAVRDDEAKVYERKKVGDIKLGDLIRVKDAERNAPLIENLRKWIEAGSPRDNPPLSPKGDPVSKVRLVTKNKVNITLDTGNPERLATVDRGEMARVDVFRKANRKGKYEYYLVPIYPHEIATMETPPMRAVQGGGDDDKWPEIDSTFEFLWSINQLSLLELTKPDGEVIRSYFRSLDRNTGALTVSGIANSTATRKGIGTRTLIDFKKLHVDRLGQIFEVERELRTWRGETWRGKDCI

SEQ ID NO: 318 - protein, 1082 aa, Methylosinus trichosporium
  REGION 1..1082: note = Methylosinus trichosporium OB3b
MRVLGLDAGIASLGWALIEIEESNRGELSQGTIIGAGTWMFDAPEEKTQAGAKLKSEQRRTFRGQRRVVRRRRQRMNEVRRILHSHGLLPSSDRDALKQPGLDPWRIRAEALDRLLGPVELAVALGHIARHRGFKSNSKGAKTNDPADDTSKMKRAVNETREKLARFGSAAKMLVEDESFVLRQTPTKNGASEIVRRFRNREGDYSRSLLRDDLAAEMRALFTAQARFQSAIATADLQTAFTKAAFFQRPLQDSEKLVGPCPFEVDEKRAPKRGYSFELFRFLSRLNHVTLRDGKQERTLTRDELALAAADFGAAAKVSFTALRKKLKLPETTVFVGVKADEESKLDVVARSGKAAEGTARLRSVIVDALGELAWGALLCSPEKLDKIAEVISFRSDIGRISEGLAQAGCNAPLVDALTAAASDGRFDPFTGAGHISSKAARNILSGLRQGMTYDKACCAADYDHTASRERGAFDVGGHGREALKRILQEERISRELVGSPTARKALIESIKQVKAIVERYGVPDRIHVELARDVGKSIEEREEITRGIEKRNRQKDKLRGLFEKEVGRPPQDGARGKEELLRFELWSEQMGRCLYTDDYISPSQLVATDDAVQVDHILPWSRFADDSYANKTLCMAKANQDKKGRTPYEWFKAEKTDTEWDAFIVRVEALADMKGFKKRNYKLRNAEEAAAKFRNRNLNDTRWACRLLAEALKQLYPKGEKDKDGKERRRVFSRPGALTDRLRRAWGLQWMKKSTKGDRIPDDRHHALDAIVIAATTESLLQRATREVQEIEDKGLHYDLVKNVTPPWPGFREQAVEAVEKVFVARAERRRARGKAHDATIRHIAVREGEQRVYERRKVAELKLADLDRVKDAERNARLIEKLRNWIEAGSPKDDPPLSPKGDPIFKVRLVTKSKVNIALDTGNPKRPGTVDRGEMARVDVFRKASKKGKYEYYLVPIYPHDIATMKTPPIRAVQAYKPEDEWPEMDSSYEFCWSLVPMTYLQVISSKGEIFEGYYRGMNRSVGAIQLSAHSNSSDVVQGIGARTLTEFKKFNVDRFGRKHEVERELRTWRGETWRGKAYI

SEQ ID NO: 319 - protein, 1123 aa, Mobiluncus curtisii
  REGION 1..1123: note = Mobiluncus curtisii subsp. holmesii ATCC 35242
MFVYLNSPRGFGPATFLTDLPHFCIIFGNNDFMDNRKYHVGIDVGTNSVGFAAVEVGDSGSPIRFLNTMVVIHDSGVDPEQKKYAITRLASAGTARRTRRLYRTRRQRLRELDDFISNELGYPLVNLENFADPYEPWKVRADLATIKLPADELPEAMSIALRHMARHRGWRSPYQRVEALHLHAEISEEFSALKKRVMEKTGDVFSDDATPAEVLVDLMGRQKIRGADGMLSGKLRQSDNANELRKIASVQGIDDETLNRIIDRVFFSRSPKGKASERVGMDALPGQGSKPRALKAMPSFQKFRIVSVICNLRIKDSGDDNRPLSMEEKEQLIGYLMSSTTDDHVTWTDVAELLHVKRSNLQGTAKEGPDGERPYTRPPVNSAWSKIKDSKIKSLVALWKTGDVDVQSAIVEALSNASVLEDARPGADIVVAYLESLDDKELESLDKVGLPAGRASYSEDSLERLTERMLQDDCDLFEARKREFGVSDDWKPPADPIYAPVGNPGVDRVLKIVNRLLMAAEREWGAPTQINIEHVRSGFSSELMQREFERENERRRAQNEEAVKAILTEKGGNSHVSKYDIIRYYAVKRQNCQCLYCGTPITFSDCELDHIVPRKGVGSTNSRVNLAAACRSCNRDKSNLPFAVWAGKTSNFDVSIDGAVSRVKQWQRSQNEGAREFRAFQNEVISRLLKTTEDPEIDSRSLESVAWMARELHHRVEYYFQSKGAQTQVSVYRGAVTAQARKSSGLEDKVKMIGGGGKTRLDRRHHAMDAATIALMTPGISTTLSEKNNLRDAQKFTGQSETWKDYCGRTETAREHFAVWKSNMERLTDLFNDKLENDAIPVVQPLRLRLSDSKAHDDGIGKLDSKKLGSVWSLADIDRAATPQIWTALTRCDDFDPTKGLPENANRVIRAQGVKYESEDNIPVFPSNVAAIAVRDGYAEIGSTIHHARIYRIDDGKKIFYSMIRVFAVDLLKHQAEDLFTVKLPPSAISIRTCEDSLRRALSNGTAEYLGWLVPGDEIIVDTSDKAFHTGQIGDLLRNFPVNSFRLTGFPSNSRLRLKPVLLAGEGLRDDAEDSIKKILSGQGWRPAINVLFSKGKPRIVRRNSLGIERPSSNNGLPFSWEA

SEQ ID NO: 320 - protein, 1091 aa, Mobiluncus mulieris
  REGION 1..1091: note = Mobiluncus mulieris 28-1
MDSRKYRVGIDVGTNSVGFAAVEEDDSGSPTRFLNTMVVIHDSGVDPEQKKYAITRLASAGTARRTRRLYRTRRQRLRELDDFISNELGYPLVNLENFADPYEPWKVRADLATTKLPNDELPEAMSIALRHMARHRGWRSPYQRVEALHLHAEISKEFAALKERVVEKTGDVFSDDATPAEVLVDLMGRQKVRGADGVLSGKLRQSDNANELRKIASVQGIDDETLNRIIDRVFSSKSPKGKASERVGMDALPGQGSKPRALKAMPSFQKFRVVSVICNLRIKDSGGDARPLSMEEKEKLIDYLMSSTTDDHVTWTDVADLLHVKRSQLQGTAKEGFDGERPYTRPPVNSTWSKIKDSKIKSLVALWKTGDVDVQSAIVEALSNASVLEDSRPGADIVVAYLESLDDKELESLDKVGLPAGRASYSEDSLERLTERMLRDDCDLFEARKREFNVADDWKPPADPIYAPVGNPGVDRVLKIVNRLLMAAEREWGAPTQINIEHVRSGFSSELMQREFERENERRRAQNEEAVKAILTEKGGNSRVSKYDITRYYAVKRQHCQCLYCGTPITFSDCELDHIVPRKGVGSTNTRVNLAAACRSCNRDKSNLPFAVWAGKASNFDVSIDDAVSRVKQWQRSQNEGVREFRAFQNEVISRLLKTTEDPEIDSRSLESVAWMARELHHRVEYYFQSKGAQTQVSVYRGAVTAQARKSSGLEDKVKMIGGGGKTRLDRRHHAMDAATIALMTPGISTTLSEKNNLRDAQKFTGQSETWKDYCGRTETARKHFAVWKSNMERLTDLFNDKLENDAIPVVQPLRLRLSNSKAHDDGIGKLDSKKLGSVWSLADIDRAATPQIWTALTRCDDFDPTKGLPENANRVIRAQGVKYESEDNIPVFPSNVAAIAVRDGYAEIGSTIHHARIYRIDDGKKTFYSMIRVFAVDLLKHQAEDLFTVKLPPSAISIRTCEDSLRRALSNGTAEYLGWLVPGDEIIVDTSDKAFHTGQIGDLLRNFPVNSFRLTGFPSNSRLRLKPVLLAGEGLRDDAEDSIKKILLGQGWRPAINVLFSKGKPRIVRRNSLGIERPSSNNGLPFSWEA

SEQ ID NO: 321 - protein, 1091 aa, Mobiluncus mulieris
  REGION 1..1091: note = Mobiluncus mulieris FB024-16
MDSRKYRVGIDVGTNSVGFAAVEEDDSGSPTRFLNTMVVIHDSGVDSEQKKYAITRLASAGTARRTRRLYRTRRQRLRELDDFISNELGYPLVNLENFADPYEPWKVRADLATTKLPNDELPEAMSIALRHMARHRGWRSPYQRVEALHLHAEISKEFAALKERVVEKTGDVFSDDATPAEVLVDLMGRQKVRGADGVLSGKLRQSDNANELRKIASVQGIDDETLNRIIDRVFSSKSPKGKASERVGMDALPGQGSKPRALKAMPSFQKFRVVSVICNLRIKDSGGDARPLSMEEKEKLIDYLMSSTTDDHVTWTDVADLLHVKRSQLQGTAKEGFDGERPYTRPPVNSTWSKIKDSKIKSLVALWKTGDVDVQSAIVEALSNASVLEDSRPGADIVVAYLESLDDKELESLDKVGLPAGRASYSEDSLERLTERMLRDDCDLFEARKREFNVADDWKPPADPIYAPVGNPGVDRVLKIVNRLLMAAEREWGAPTQINIEHVRSGFSSELMQREFERENERRRAQNEEAVKAILTEKGGNSRVSKYDITRYYAVKRQHCQCLYCGTPITFSDCELDHIVPRKGVGSTNTRVNLAAACRSCNRDKSNLPFAVWAGKASNFDVSIDDAVSRVKQWQRSQNEGVREFRAFQNEVISRLLKTTEDPEIDSRSLESVAWMARELHHRVEYYFQSKGAQTQVSVYRGAVTAQARKSSGLEDKVKMIGGGGKTRLDRRHHAMDAATIALMTPGISTTLSEKNNLRDAQKFTGQSETWKDYCGRTETARKHFAVWKSNMERLTDLFNDKLENDAIPVVQPLRLRLSNSKAHDDGIGKLDSKKLGSVWSLADIDRAATPQIWTALTRCDDFDPTKGLPENANRVIRAQGVKYESEDNIPVFPSNVAAIAVRDGYAEIGSTIHHARIYRIDDGKKTFYSMIRVFAVDLLKHQAEDLFTVKLPPSAISIRTCEDSLRRALSNGTAEYLGWLVPGDEIIVDTSDKAFHTGQIGDLLRNFPVNSFRLTGFPSNSRLRLKPVLLAGEGLRDDAEDSIKKILLGQGWRPAINVLFSKGKPRIVRRNSLGIERPSSNNGLPFSWEA

SEQ ID NO: 322 - protein, 1473 aa, Mucilaginibacter paludis
  REGION 1..1473: note = Mucilaginibacter paludis DSM 18603
MKNILGLDLGTNSIGWALIEKDTDQKNGNILGTGSRIIPMSQDIKDEFGKGNSISQTADRTKFRSVRRLRERHLLRRERLHRVLNVLGFLPKHYADQIDFKKRLGKLVNETEPKLVYDNKNFIFKKSFEAMLSDFNQHQPLLLADGKKVPFDWTIYYLRKKALTEKIEKEELAWLILNFNQKRGYYQLRGEEEEENPNKMVAFHSLKIVEVIADESQKGKAETWYSLILENGWIYRRSSKTPLYDWKGKQRDFIVTTDLNDDGSIKTDKEGLEKRSFRAPVEDDWTLVKKKTEQEINRSHKTVGTYIYENLLQDPKQKIKGKLVRTIEREFYKDELKMILKNQQKFHPELNDEHLYINCVRELYRNNQAHQTILSKKDFVHLFIDDIIFYQRPLRSQKSSISNCTLEFRKYKNENGTDQTDYLKAIPKSHPLFQEFRLWQWIYNLGIYQKEDDTNVTDELIKNIDGYQDLFDFLNNKKEIRQDILIKFLVEQTGLKGKPLSSVVAKYRWNFVEDKIYPCNETGTQIRTRLAKVENTPEDFLTAETEIKLWHIIYSVNDKADYEKALKTFAEKHNLDTHSFVENFKKFPPFKSEYGSFSEKAIKKLLPLIRLGKYWSWENIDKKTQERIEKILTGEFDEAIKSRVRDKAIHLTEEDHFQGLQLWLASYVVYGRHSEADNLDKWHTVADLEDYLAEFRQHSLRNPIVEQVITETLRVVKDIWLQYGQGAKDFFSEIHIELAREMKNTGDERKRLTSLVTDNENTNLRIKVLLSELLNDGNVENVRPYSPMQQEALKIFEDGVLNSDIEIEDDILKISKMAQPTNTELKRYKLWLEQKYRSPYTGQIIPLNRLFTADYEIEHIIPQSRFFDDSFSNKIICESAVNQLKDKQLGLEFIKNHSGTIVKLGMGKTAKILDVESYNEFVKGNYTKNISKRNKLMLEEIPDKMIERQLNDTRYISKFIISALSNIVRSESNDDGFNSKNVLPGNGKITSRLKQDWGMNDIWNELILPRFERMNKITDSAVFTAWNENNQKFLPIVPLEFSKGFQKKRIDHRHHALDALVIAASTREHINLLNNEHAKSDKRFDLNRKLRKFEKVAYNDPKTGKRIEKEVPTIFLKPWETFTVDAKNSLESIIVSFKQNLRVINRATNYSESYNDENGALRLGKDGNPLKEKIKQSKGDSWAIRKPMHKDFVYGKVHLQNVKLPKDKFITAIRKSLDVTFDLKRIETITDTGIQKILKNYLHSKENKVELAFSPEGIEDMNQHIERYNDGKKHQPIHKVRVFEIGSRFSLGESGNKKTKFVEAAKGTNLFFAVYQDDNKGKRNYETIPLNIVIERQKLGLHSVPTEDAKGGKLLFHLSPNDMVYVPTSEELEDNLASVNIKRLNTAQRKRIYKVEKASGVECYFIRQDIAYLIKNYDAKTKIGELESQNKLQTTMTDDRLKITDVCVKLNIDRLGSIAETFLGNQYGASKKT

SEQ ID NO: 323 - protein, 1233 aa, Mycoplasma canis
  REGION 1..1233: note = Mycoplasma canis PG 14
MEKKRKVTLGFDLGIASVGWAIVDSETNQVYKLGSRLFDAPDTNLERRTQRGTRRLLRRRKYRNQKFYNLVKRTEVFGLSSREAIENRFRELSIKYPNIIELKTKALSQEVCPDEIAWILHDYLKNRGYFYDEKETKEDFDQQTVESMPSYKLNEFYKKYGYFKGALSQPTESEMKDNKDLKEAFFFDFSNKEWLKEINYFFNVQKNILSETFIEEFKKIFSFTRDISKGPGSDNMPSPYGIFGEFGDNGQGGRYEHIWDKNIGKCSIFTNEQRAPKYLPSALIFNFLNELANIRLYSTDKKNIQPLWKLSSVDKLNILLNLFNLPISEKKKKLTSTNINDIVKKESIKSIMISVEDIDMIKDEWAGKEPNVYGVGLSGLNIEESAKENKFKFQDLKILNVLINLLDNVGIKFEFKDRNDIIKNLELLDNLYLFLIYQKESNNKDSSIDLFIAKNESLNIENLKLKLKEFLLGAGNEFENHNSKTHSLSKKAIDEILPKLLDNNEGWNLEAIKNYDEEIKSQIEDNSSLMAKQDKKYLNDNFLKDAILPPNVKVTFQQAILIFNKIIQKFSKDFEIDKVVIELAREMTQDQENDALKGIAKAQKSKKSLVEERLEANNIDKSVFNDKYEKLIYKIFLWISQDFKDPYTGAQISVNEIVNNKVEIDHIIPYSLCFDDSSANKVLVHKQSNQEKSNSLPYEYIKQGHSGWNWDEFTKYVKRVFVNNVDSILSKKERLKKSENLLTASYDGYDKLGFLARNLNDTRYATILFRDQLNNYAEHHLIDNKKMFKVIAMNGAVTSFIRKNMSYDNKLRLKDRSDFSHHAYDAAIIALFSNKTKTLYNLIDPSLNGIISKRSEGYWVIEDRYTGEIKELKKEDWTSIKNNVQARKIAKEIEEYLIDLDDEVFFSRKTKRKTNRQLYNETIYGIATKTDEDGITNYYKKEKFSILDDKDIYLRLLREREKFVINQSNPEVIDQIIEIIESYGKENNIPSRDEAINIKYTKNKINYNLYLKQYMRSLTKSLDQFSEEFINQMIANKTFVLYNPTKNTTRKIKFLRLVNDVKINDIRKNQVINKFNGKNNEPKAFYENINSLGAIVFKNSANNFKTLSINTQIAIFGDKNWDIEDFKTYNMEKIEKYKEIYGIDKTYNFHSFIFPGTILLDKQNKEFYYISSIQTVRDIIEIKFLNKIEFKDENKNQDTSKTPKRLMFGIKSIMNNYEQVDISPFGINKKIFE

SEQ ID NO: 324 - protein, 1233 aa, Mycoplasma canis; identical to SEQ ID NO: 323
  REGION 1..1233: note = Mycoplasma canis PG 14

SEQ ID NO: 325 - protein, 1233 aa, Mycoplasma canis
  REGION 1..1233: note = Mycoplasma canis UF31
MEKKRKVTLGFDLGIASIGWAIVDSETNQVYKLGSRLFDAPDTNLERRTQRGTRRLLRRRKYRNQKFYNLVKRTEVFGLSSREAIENRFRELSIKYPNIIELKTKALSQEVCPDEIAWILHDYLKNRGYFYDEKETKEDFDQQTVESMPSYKLNEFYKKYGYFKGALSQPTESEMKDNKDLKEAFFFDFSNKEWLKEINYFFNVQKNILSETFIEEFKKIFSFTRDISKGPGSDNMPSPYGIFGEFGDNGQGGRYEHIWDKNIGKCSIFTNEQRAPKYLPSALIFNFLNELANIRLYSTDKKNIQPLWKLSSIDKLNILLNLFNLPISEKKKKLTNANINDIVKKESTKSIMLSVEDIDMIKDEWAGKEPNVYGVGLSGLNIEESAKENKFKFQDLKILNVLINLLDNVGIKFEFKDRNDIIKNLELLDNLYLFLIYQKESNNKDSSIDLFIAKNELLNIENLKLKLKEFLLGAGNEFENHNSKTHSLSKKAIDAILPKLLDNNEGWNLEAIKNYDEEIKSQIEDNSSLMAKQDKKYLNDNFLKDAILPPNVKVTFQQAILIFNKIIQKFSKDFEIDKVVIELAREMTQDQENDALKGIAKAQKSKKSLVEERLEANNIDKSVFNDKYEKLIYKIFLWISQDFKDPYTGAQISTNEIVNNKVEIDHIIPYSLCFDDSSANKVLVHKQSNQEKSNSLPYEYIKQGHSGWNWDEFTKYVKRVFVNNVDSILSKKERLKKSENLLTTSYDGYDKLGFLARNLNDTRYATILFRDQLNNYAEHHLIDNKKMFKVIAMNGAVTSFIRKNMSYDNKLRLKDRSDFSHHAYDAAIIALFSNKTKTLYNLIDPSLNGIISKRSEGYWVIEDRYTGEIKELKKEDWTSIKNNVQARKIAKEIEEYLIDLDDEVFFSRKTKRKTNRQLYNETIYGIAAKTDEDGITNYYKKEKFSILDDKDIYLRLLREREKFVINQSNPEVIDQIIEIIESYGKENNIPSRDEAINIKYTKNKINYNLYLKQYMRSLTKSLDQFSEEFINQMIANKTFVLYNPTKNTTRKIKFLRLVNDVKINDIRKNQVINKFNGKNNEPKAFYENINSLGAIVFKNSANNFKTLSINTQIAIFGDKNWDIEDFKTYNMEKIEKYKEIYGIDKTYNFHSFIFPGTILLDKQNKEFYYISSIQTVRDIIEIKFLNKIEFKDENKNPDTSKTPKRLMFGIKSIMNNYEQVDISPFGINKKIFE

SEQ ID NO: 326 - protein, 1233 aa, Mycoplasma canis
  REGION 1..1233: note = Mycoplasma canis UF33
MEKKRKVTLGFDLGIASVGWAIVDSETNQVYKLGSRLFDAPDTNLERRTQRGTRRLLRRRKYRNQKFYNLVKRTEVFGLSSREAIENRFRELSIKYPNIIELKTKALSQEVCPDEIAWILHDYLKNRGYFYDEKETKEDFDQQTVESMPSYKLNEFYKKYGYFKGALSQPTESEMKDNKDLKEAFFFDFSNKEWLKEINYFFNVQKNILSETFIEEFKKIFSFTRDISKGPGSDNMPSPYGIFGEFGDNGQGGRYEHIWDKNIGKCSIFTNEQRAPKYLPSALIFNFLNELANIRLYSTDKKNIQPLWKLSSVDKLNILLNLFNLPISEKKKKLTSTNINDIVKKESIKSIMISVEDIDMIKDEWAGKEPNVYGVGLSGLNIEENAKENKFKFQDLKILNVLINLLDNVGIKFEFKDRNDIIKNLELLDNLYLFLIYQKESNNKDSSIDLFIAKNKSLNIENLKLKLKEFLLGAGNEFENHNSKSHSLSKKAIDAILPKLLDNNEGWNLEAIKNYDEEIKSQIEDNSSLMAKQDKKYLNDNFLKDAILPPNVKVTFQQAILIFNKIIQKFSKDFEIDKVVIELAREMTQDQENDALKGMAKAQKSKKSLVEERLEANNIDKSVFNDKYEKLIYKIFLWISQDFKDPYTGAQISVNEIVNNKVEIDHIIPYSLCFDDSSANKVLVHKQSNQEKSNSLPYEYIKQGHSGWNWDEFTKYVKRVFVNNVDSILSKKERLKKSENLLTTSYDGYDKLGFLARNLNDTRYATILFRDQLNNYAEHHLIDNKKMFKVIAMNGAVTSFIRKNMSYDNKLRLKDRSDFSHHAYDAAIIALFSNKTKTLYNLIDPSLNGIISKRSEGYWVIEDRYTGEIKELKKEDWTSIKNNVQARKIAKEIEEYLIDLDDEVFFSRKTKRKTNRQLYNETIYGIAAKTDEDGITNYYKKEKFSILDDKDIYLRLLREREKFVINQSNPEVIDQIIEIIESYGKENNIPSRDEAINIKYTKNKINYNLYLKQYMRSLTKSLDKFSEEFINQMIANKTFVLYNPTKNTTRKIKFLRLVNDVKINDIRKNQVINKFNGKNNEPKAFYENINSLGAIVFKNSANNFKTLSINTQIAIFGDKNWDIEDFKTYNMEKIEKYKEIYGIDKTYNFHSFIFPGTILLDKQNKEFYYISSIQTVRDIIEIKFLNKIEFKDENKNQDTSKTPKRLMFGIKSIMNNYEQVDISPFGINKKIFE

SEQ ID NO: 327 - protein, 1233 aa, Mycoplasma canis
  REGION 1..1233: note = Mycoplasma canis UFG1
MEKKRKVTLGFDLGIASVGWAIVDSETNQVYKLGSRLFDAPDTNLERRTQRGTRRLLRRRKYRNQKFYNLVKRTEVFGLSSREAIENRFRELSIKYPNIIELKTKALSQEVCPDEIAWILHDYLKNRGYFYDEKETKEDFDQQTVESMPSYKLNEFYKKYGYFKGALSQPTESEMKDNKDLKEAFFFDFSNKEWLKEINYFFNVQKNILSETFIEEFKKIFSFTRDISKGPGSDNMPSPYGIFGEFGDNGQGGRYEHIWDKNIGKCSIFTNEQRAPKYLPSALIFNFLNELANIRLYSTDKKNIQPLWKLSSVDKLNILLNLFNLPISEKKKKLTSTNINDIVKKESIKSIMLSVEDIDMIKYEWAGKEPNVYGVGLSGLNIEESAKENKFKFQDLKILNVLINLLDNVGIKFEFKDRNDIIKNLELLDNLYLFLIYQKESNNKDSSIDLFIAKNKSLNIENLKLKLKEFLLGAGNEFENHNSKTHSLSKKAIDAILPKLLDNNEGWNLEAIKNYDEEIKSQIEDNSSLMAKQDKKYLNDNFLKDAILPPNVKVTFQQAILIFNKIIQKFSKDFEIDKVVIELAREMTQDQENDALKGIAKAQKSKKSLVEERLEANNIDKSVFDDKYEKLIYKIFLWISQDFKDPYTGAKISANEIVNNKVEIDHIIPYSLCFDDSSANKVLVHKQSNQEKSNSLPYEYIKQGHSGWNWDEFTKYVKRVFVNNVDSILSKKERLKKSENLLTTSYDGYDKLGFLARNLNDTRYATILFRDQLNNYAEHHLIDNKKMFKVIAMNGAVTSFIRKNMSYDNKLRLKDRSDFSHHAYDAAIIALFSNKTKTLYNLIDPSLNGIISKRSEGYWVIEDRYTGEIKELKKEDWTSIKNNVQARKIAKEIEEYLIDLDDEVFFSRKTKRKTNRQLYNETIYGIAAKTDEDGITNYYKKEKFSILDDKDIYLRLLREREKFVINQSNPEVIDQIIEIIESYGKENNIPSRDEAINIKYTKNKINYNLYLKQYMRSLTKSLDQFSEEFINQMIANKTFVLYNPTKNTTRKIKFLRLVNDVKINDIRKNQVINKFNGKNNEPKAFYENINSLGAIVFKNSANNFKTLSINTQIAIFGDKNWDIEDFKTYNMEKIEKYKEIYGIDKTYNFHSFIFPGTILLDKQNKEFYYISSIQTVRDIIEIKFLNKIEFKDENKNQDTSKTPKRLMFGIKSIMNNYEQVDISPFGINKKIFE

SEQ ID NO: 328 - protein, 1233 aa, Mycoplasma canis
  REGION 1..1233: note = Mycoplasma canis UFG4
MEKKRKVTLGFDLGIASVGWAIVDSETNQVYKLGSRLFDAPDTNLERRTQRGTRRLLRRRKYRNQKFYNLVKRTEVFGLSSREAIENRFRELSIKYPNIIELKTKALSQEVCPDEIAWILHDYLKNRGYFYDEKETKEDFDQQTIESMPSYKLNEFYKKYGYFKGALSQPTESEMKDNKDLKEAFFFDFSNKEWLKEINYFFNVQKNILSETFIEEFKKIFSFTRDISKGPGSDNMPSPYGIFGEFGDNGQGGRYEHIWDKNIGKCSIFTNEQRAPKYLPSALIFNFLNELANIRLYSTDKKNIQPLWKLSSIDKLNILLNLFNLPISEKKKKLTSANINDIVKKESTKSIMLSVEDIDMIKDEWAGKEPNVYGVGLSGLNIEESAKENKFKFQDLKILNVLINLLDNVGIKFEFKDRNDIIKNLELLDNLYLFLIYQKESNNKDSSIDLFIAKNESLNIENLKLKLKEFLLGAGNEFENHNSKTHSLSKKAIDAILPKLLDNNEGWNLEAIKNYDEEIKSQIEDNSFLMAKQDKKYLNDNFLKDAILPPNVKVTFQQAILIFNKIIQKFSKDFEIDKVVIELAREMTQDQENDALKGIAKAQKSKKSLVEERLEANNIDKSVFNEKYEKLIYKIFLWISQDFKDPYTGAKISANEIVDNKVEIDHIIPYSLCFDDSSANKVLVHKQSNQEKSNSLPYEYIKQGHSGWNWDEFTKYVKRVFVNNVDSILSKKERLKKSENLLTTSYDGYDKLGFLARNLNDTRYATILFRDQLNNYAEHHLIDDKKMFKVIAMNGAVTSFIRKNMSYDNKLRLKNRNDFSHHAYDAAIIALFSNKTKTLYNLIDPSLNGIISKRSEGYWVIEDRYTGEIKELKKEDWTSIKNNVQARKIAKEIEEYLIDLDDEVFFSRKTKRKTNRQLYNETIYGIAAKTDEDGITNYYKKEKLSILDDKDIYLRLLREREKFVINQSNPEVIDQIIEIIESYGKENNIPSRDEAINIKYTKNKINYNLYLKQYMRSLTKSLDQFSEEFINQMIANKTFVLYNPTKNTTRKIKFLRLVNDVKINDIRKNQVINKFNGKNNEPKAFYENINSLGAIVFKNSANNFKTLSINTQIAIFGDKNWDIEDFKTYNMEKIEKYKEIYGIDKTYNFHSFIFPGTILLDKQNKEFYYISSIQTVRDIIEIKFLNKIEFKDENKNQDTSKTPKRLMFGIKSIMNNYEQVDISPFGINKKIFE

SEQ ID NO: 329 - protein, 1239 aa, Mycoplasma cynos
MEEKRKVTLGFDLGVASVGWAIVDSETNEVYKLGSRLFDIPDTNIDRRAKRGSRRLVRRRSYRNQKFYNLIKRTKTFGFLDKEAIEKEFVLLSIKYPNIIELKVKGLQEEVSKSEAVWILHDYLKNRGYFYDDKEEKDDLENPSIESMPSYKLYEFYKEYGYFKGALSSPTESEKNKDSDLEKAIFFNFSNKEWTKEINHFFKIQKNIFSEDFKAKFMEFFSFIRDISKGPGSENMPSQYSIFGKYGDDGMGGKYQHIWDKNIGKCSIFKDKVRAPKYLPSALFFNLLNELSNIRLYSVDKREKSVLWRLSSKDKINIILNILQIILFKNDGKISNLDINKIVKNESIKSIILNEIDLDLIKDMWFEKEPNVYGIGLSGLNIEENKKENRFKFQDLKIFSVFIDLLKKSNINIEFNNEKDIIHNLKLLDELYFFLITQKYSRDKYGSIKKFILNNKSFNIDNLDEKLNIFLSISDDEFDNHNSKTHSLSKEAIYFIFPKLLHNNEGWNLEAIKNYDIDVREEISKHSFGIKKQDKKYLDDAFLDDAILPPSVKVTIKQSILIFNKIIKKFSNKFQIDNVVIELAREMTQEKEMDAQKSLNRLKKSRKKIIEERLNANNIDSKMFRDKTGEISPNYIYKIYLWISQNFKDPYTGENISANDILKNNVEIDHIIPYSLCFDDSSSNKVLVFKHSNQSKGNFLPFDMISTFSENSVWNWKEYTQYVEKTFKTNLESILDKKERVKKADNLLTSSYDGYDKLGFLARNLNDTRYATILFRDQLINYSENHLIDSKKMFKVIAMNGGVTSFIRKNMSFDSGLKVKDRSIFSHHAYDAAIIALFSNKTKILYNLINPSLDGIISKRSEGYWVLEDRLTGEIRKLNYNDWQSIKNNVEVKKIAREIESHLSNLDNVVMFSRKSKRKTNKELYNETLYGIATRIDENGIKNYYKKEKFNILEDENIYLRLLNERENFIINRSNPEVIDAIIEIFETIDKNKIPARDVAKNIKYTDNKIKYNLYLKDYMRKLVDEFPDKFRKDFIEQMIAKKIFILFNPIKNTTRKIKSLRSINNNKIEDIRKKQVLEKFNTAKNEPRSFYESLNSLGAIIFKNNLNIYKKMSISSQIATFGDKNWKIDDINTYNKEKLNKYKEIYGIDETYDFYSFIFPGTILLDEKNKEFLYISSIQTLKDKIELKFLDRIEFEKKNVNSNLKPKIKREIISTKKLMSDYKIIKISPLGINKKIFE

SEQ ID NO: 330 - protein, 1269 aa, Mycoplasma gallisepticum
MNNSIKSKPEVTIGLDLGVGSVGWAIVDNETNIIHHLGSRLFSQAKTAEDRRSFRGARRLIRRRKYKLKRFINLIWKYNSYFGFKNKEDILNNYQEQQKLHNTVLNLKLEALNAKIDPKALSWILHDYLKNRGHFYEDNRDFNVYPTEELANYFGEYGYYKGIIDSKEDNDDKLEEGLTKYKFSNQHWLEEIKKVLSNQTGLPEKFKEEYESLFSYVRNYSEGPGSINSVSPYGIYHLDEKEGKVVQKYNNIWDKTIGKCSIFPDEYRAPKNSPIAMIFNEINELSTIRSYSIYLTGWFINQEFKKAYLNKLLDLLIKTNSEKPIDARQFKKLREETIAESIGKETLKDVEREEKLEKEDHKWKLKGLKLNTNGKIQYNDLSSLAKFVHKLKQHLKLDFLLEDQYTTLDKINFLQSLFVYLGKHLRYSNRVDSANLKEFSDSNKLFERVLQEQKDDLFKLFEQTDKDDEKILAQTHSLSTKAMLLAITRMTNLDNDEDNQKNNDKGWNFEAIKNFDQKFIDITKKNNNLSLKQDKRYLDDRFINDAILSPGVKRILREATKVFNAILKQFSEEYDVTKVVIELARELSEEKELENTKNYEKLIKKNSDKISERLEALDIAEDKIEDILKSPTKSYKVLLWLQQDHIDPYSQKEIAFEDILTKTEKTEIDHIIPYSISFDDSSSNKLLVLAESNQAKSNQTPYEFITSGNAGIKWEDYEAYCRKFKDGDTSLLDSTQRSKKFAKMMKTDTSSKYDIGFLARNLNDTRYATIVFRDALKDYANNHLVEDKPMFKVVCINGGVTSFLRKNFDKSWYAKKDRDKNIHHAVDASIISIFSNETKTLFNQLTQFADYKLFKNTDGSWKKIDPKTGVVTEVTDENWKQIRVRNQVSEIAKVINKCIQDSNIERKARYSRKIENKTNISLFNDTVYSAKKVGYEDQIKRKNLKTLDIHESAEENKNSKVKKQFVYRKLVNVSLLNNDKLADLFAEKEDILMYRANPWVINLAEQIFNEYTENKKIKSQNVFEKYMLDLTKEFPEKFSEAFVKSMLRNKTAIIYNVEKKVVHRIKRLKILSSELKENKLSNVIIRSKNESGTKLSYQDTINSIALMIMRSIDPTAKKQYIRVPLNTLNLHLGDQDFDLHNIDAYLKKPKFVKYLKANEIGDEYKPWRVLTSGTLLIHKKDKKLMYISSFQNLKDVIEIKNLIETEYKENDDSDPKKKKKANRFLMTLSTILNDYILLDAKDNFDILGLSKNRIDEILNSKLGLDKITK

SEQ ID NO: 331 - protein, 1224 aa, Mycoplasma gallisepticum
MNNSIKSKPEVTIGLDLGVGSVGWAIVDNETNIIHHLGSRLFSQAKTAEDRRSFRGARRLIRRRKYKLKRFINLIWKYNSYFGFKNKEDILNNYQEQQKLHNTVLNLKLEALNAKIDPKALSWILHDYLKNRGHFYEDNRDFNVYPTEELANYFGEYGYYKGIIDSKEDNDDKLEEGLTKYKFSNQHWLEEIKKVLSNQTGLPEKFKEEYESLFSYVRNYSEGPGSINSVSPYGIYHLDEKEGKVVQKYNNIWDKTIGKCSIFPDEYRAPKNSPIAMIFNEINELSTIRSYSIYLTGWFINQEFKKAYLNKLLDLLIKTNSEKPIDARQFKKLREETIAESIGKETLKDVEREEKLEKEDHKWKLKGLKLNTNGKIQYNDLSSLAKFVHKLKQHLKLDFLLEDQYTTLDKINFLQSLFVYLGKHLRYSNRVDSANLKEFSDSNKLFERVLQEQKDDLFKLFEQTDKDDEKILAQTHSLSTKAMLLAITRMTNLDNDEDNQKNNDKGWNFEAIKNFDQKFIDITKKNNNLSLKQDKRYLDDRFINDAILSPGVKRILREATKVFNAILKQFSEEYDVTKVVIELARELSEEKELENTKNYEKLIKKNSDKISERLEALDIAEDKIEDILKSPTKSYKVLLWLQQDHIDPYSQKEIAFEDILTKTEKTEIDHIIPYSISFDDSSSNKLLVLAESNQAKSNQTPYEFITSGNAGIKWEDYEAYCRKFKDGDTSLLDSTQRSKKFAKMMKTDTSSKYDIGFLARNLNDTRYATIVFRDALKDYANNHLVEDKPMFKVVCINGGVTSFLRKNFDKSWYAKKDRDKNIHHAVDASIISIFSNETKTLFNQLTQFADYKLFKNTDGSWKKIDPKTGVVTEVTDENWKQIRVRNQVSEIAKVINKCIQDSNIERKARYSRKIENKTNISLFNDTVYSAKKVGYEDQIKRKNLKTLDIHESAEENKNSKVKKQFVYRKLVNVSLLNNDKLADLFAEKEDILMYRANPWVINLAEQIFNEYTENKKIKSQNVFEKYMLDLTKEFPEKFSEAFVKSMLRNKTAIIYNVEKKVVHRIKRLKILSSELKENKLSNVIIRSKNESGTKLSYQDTINSIALMIMRSIDPTAKKQYIRVPLNTLNLHLGDQDFDLHNIDAYLKKPKFVKYLKANEIGDEYKPWRVLTSGTLLIHKKDKKLMYISSFQNLKDVIEIKNLIETEYKENDDSDPKKRRKQIGS

SEQ ID NO: 332 - protein, 1269 aa, Mycoplasma gallisepticum
MNNSIKSKPEVTIGLDLGVGSVGWAIVDNETNIIHHLGSRLFSQAKTAEDRRSFRGVRRLIRRRKYKLKRFVNLIWKYNSYFGFKNKEDILNNYQEQQKLHNTVLNLKSEALNAKIDPKALSWILHDYLKNRGHFYEDNRDFNVYPTKELAKYFDKYGYYKGIIDSKEDNDNKLEEELTKYKFSNKHWLEEVKKVLSNQTGLPEKFKEEYESLFSYVRNYSEGPGSINSVSPYGIYHLDEKEGKVVQKYNNIWDKTIGKCNIFPDEYRAPKNSPIAMIFNEINELSTIRSYSIYLTGWFINQEFKKAYLNKLLDLLIKTNGEKPIDARQFKKLREETIAESIGKETLKDVENEEKLEKEDHKWKLKGLKLNTNGKIQYNDLSSLAKFVHKLKQHLKLDFLLEDQYATLDKINFLQSLFVYLGKHLRYSNRVDSANLKEFSDSNKLFERILQKQKDGLFKLFEQTDKDDEKILAQTHSLSTKAMLLAITRMTNLDNDEDNQKNNDKGWNFEAIKNFDQKFIDITKKNNNLSLKQNKRYLDDRFINDAILSPGVKRILREATKVFNAILKQFSEEYDVTKVVIELARELSEEKELENTKNYKKLIKKNGDKISEGLKALGISEDEIKDILKSPTKSYKFLLWLQQDHIDPYSLKEIAFDDIFTKTEKFEIDHIIPYSISFDDSSSNKLLVLAESNQAKSNQTPYEFISSGNAGIKWEDYEAYCRKFKDGDSSLLDSTQRSKKFAKMMKTDTSSKYDIGFLARNLNDTRYATIVFRDALEDYANNHLVEDKPMFKVVCINGSVTSFLRKNFDDSSYAKKDRDKNIHHAVDASIISIFSNETKTLFNQLTQFADYKLFKNTDGSWKKIDPKTGVVTEVTDENWKQIRVRNQVSEIAKVIEKYIQDSNIERKARYSRKIENKTNISLFNDTVYSAKKVGYEDQIKRKNLKTLDIHESAKENKNSKVKRQFVYRKLVNVSLLNNDKLADLFAEKEDILMYRANPWVINLAEQIFNEYTENKKIKSQNVFEKYMLDLTKEFPEKFSEFLVKSMLRNKTAIIYDDKKNIVHRIKRLKMLSSELKENKLSNVIIRSKNQSGTKLSYQDTINSLALMIMRSIDPTAKKQYIRVPLNTLNLHLGDHDFDLHNMDAYLKKPKFVKYLKANEIGDEYKPWRVLTSGTLLIHKKDKKLMYISSFQNLNDVIEIKNLIETEYKENDDSDSKKKKKANRFLMTLSTILNDYILLDAKDNFDILGLSKNRIDEILNSKLGLDKIVK

SEQ ID NO: 333 - protein, 1269 aa, Mycoplasma gallisepticum; identical to SEQ ID NO: 332
  REGION 1..1269: note = Mycoplasma gallisepticum str. F

SEQ ID NO: 334 - protein, 1270 aa, Mycoplasma gallisepticum
MNNSIKSKPEVTIGLDLGVGSVGWAIVDNETNIIHHLGSRLFSQAKTAEDRRSFRGVRRLIRRRKYKLKRFVNLIWKYNSYFGFKNKEDILNNYQEQQKLHNTVLNLKLEALNAKIDPKALSWILHDYLKNRGHFYEDNRDFNVYPTEELANYFDEFGYYKGIIDSKNDDDDKLEEGLTKYKFSNQHWLEEVKKVLSNQTGLPEKFKEEYESLFSYVRNYSEGPGSINSVSPYGIYHLDEKEGKVVQKYNNIWDKTIGKCSIFPDEYRAPKNSPIAMIFNEINELSTIRSYSIYLTGWFINQEFKKAYLNKLLDLLIKTNSEKPIDARQFKKLREETIAESIGKETLKDVESEEKLEKDDHKWKLKGLKLNTNGKIQYNDLSSLAKFVHKLKQHLKLDFLLEDQYTPLDKINFLQSLYVYLGKHLRYSNRVDSANLKEFSDSSRLFERVLQEQKDGLFKLFEQTDKDDEKILTQTHSLSTKAMLLAITRMTNLDNDEDNQKNNDKGWNFEAIKNFDQKFIDITKTNNNLSLKQDKRYLDDQFINDAILSPGVKRILREATKVFNAILKQFSEEYDVTKVVIELARELSEEKELENTKNYKKLIKKNGDKISEGLKALGIAEDKIEEILKSPTKSYKVLLWLQQDHIDPYSQKEIAFDDILTKTEKTEIDHIIPYSISFDDSSSNKLLVLAESNQAKSNQTPYEFINSGKAEITWEVYEAYCHKFKNGDSSLLDSTQRSKKFAKMMKTDTSSKYDIGFLARNLNDTRYATIVFRDALKDYANNHLVEDKPMFKVVCINGGVTSFLRKNFDPKSWYAKKDRDKNIHHAVDASIISIFSNETKTLFNQLTKFADYKLFKNTDGSWKKIDPKTGVVSEVTDENWKQIRVRNQVSEIAKVIDKYIQDSNIERKARYSRKIENKTNISLFNDTVYSAKKVGYEDQIKRKNLKTLDIHESAEENKNSKVKKQFVYRKLVNVSLLNNDKLADLFAEKEDILMYRANPWVINLAEQIFNEYTENKKIKSQNVFEKYMLDLTKEFPEKFSEAFVKSMIRNKTAIIYNVEKDVVHRIKRLKILSSELKENKWSNVIIRSKNESGTKLSYQDTINSIALMIMRSIDPTAKKQYIRVPLNTLNLHLGDQDFDLHNIDAYLKKPKFVKYLKANEIGDEYKPWRVLTSGTLLIHKKDKKLMYISSFQNLNDLIEIKNLIETEYKENVDSDPKKKKKASQILRSLSVILNDYILLDAKYNFDILGLSKNKIDEILNSKLDLDKIAK

SEQ ID NO: 335 - protein, 1236 aa, Mycoplasma mobile
MYFYKNKENKLNKKVVLGLDLGIASVGWCLTDISQKEDNKFPIILHGVRLFETVDDSDDKLLNETRRKKRGQRRRNRRLFTRKRDFIKYLIDNNIIELEFDKNPKILVRNFIEKYINPFSKNLELKYKSVTNLPIGFHNLRKAAINEKYKLDKSELIVLLYFYLSLRGAFFDNPEDTKSKEMNKNEIEIFDKNESIKNAEFPIDKIIEFYKISGKIRSTINLKFGHQDYLKEIKQVFEKQNIDFMNYEKFAMEEKSFFSRIRNYSEGPGNEKSFSKYGLYANENGNPELIINEKGQKIYTKIFKTLWESKIGKCSYDKKLYRAPKNSFSAKVFDITNKLTDWKHKNEYISERLKRKILLSRFLNKDSKSAVEKILKEENIKFENLSEIAYNKDDNKINLPIINAYHSLTTIFKKHLINFENYLISNENDLSKLMSFYKQQSEKLFVPNEKGSYEINQNNNVLHIFDAISNILNKFSTIQDRIRILEGYFEFSNLKKDVKSSEIYSEIAKLREFSGTSSLSFGAYYKFIPNLISEGSKNYSTISYEEKALQNQKNNFSHSNLFEKTWVEDLIASPTVKRSLRQTMNLLKEIFKYSEKNNLEIEKIVVEVTRSSNNKHERKKIEGINKYRKEKYEELKKVYDLPNENTTLLKKLWLLRQQQGYDAYSLRKIEANDVINKPWNYDIDHIVPRSISFDDSFSNLVIVNKLDNAKKSNDLSAKQFIEKIYGIEKLKEAKENWGNWYLRNANGKAFNDKGKFIKLYTIDNLDEFDNSDFINRNLSDTSYITNALVNHLTFSNSKYKYSVVSVNGKQTSNLRNQIAFVGIKNNKETEREWKRPEGFKSINSNDFLIREEGKNDVKDDVLIKDRSFNGHHAEDAYFITIISQYFRSFKRIERLNVNYRKETRELDDLEKNNIKFKEKASFDNFLLINALDELNEKLNQMRFSRMVITKKNTQLFNETLYSGKYDKGKNTIKKVEKLNLLDNRTDKIKKIEEFFDEDKLKENELTKLHIFNHDKNLYETLKIIWNEVKIEIKNKNLNEKNYFKYFVNKKLQEGKISFNEWVPILDNDFKIIRKIRYIKFSSEEKETDEIIFSQSNFLKIDQRQNFSFHNTLYWVQIWVYKNQKDQYCFISIDARNSKFEKDEIKINYEKLKTQKEKLQIINEEPILKINKGDLFENEEKELFYIVGRDEKPQKLEIKYILGKKIKDQKQIQKPVKKYFPNWKKVNLTYMGEIFKK

SEQ ID NO: 336 - protein, 1265 aa, Mycoplasma ovipneumoniae
  REGION 1..1265: note = Mycoplasma ovipneumoniae SC01
MHNKKNITIGFDLGIASIGWAIIDSTTSKILDWGTRTFEERKTANERRAFRSTRRNIRRKAYRNQRFINLILKYKDLFELKNISDIQRANKKDTENYEKIISFFTEIYKKCAAKHSNILEVKVKALDSKIEKLDLIWILHDYLENRGFFYDLEEENVADKYEGIEHPSILLYDFFKKNGFFKSNSSIPKDLGGYSFSNLQWVNEIKKLFEVQEINPEFSEKFLNLFTSVRDYAKGPGSEHSASEYGIFQKDEKGKVFKKYDNIWDKTIGKCSFFVEENRSPVNYPSYEIFNLLNQLINLSTDLKTTNKKIWQLSSNDRNELLDELLKVKEKAKIISISLKKNEIKKIILKDFGFEKSDIDDQDTIEGRKIIKEEPTTKLEVTKHLLATIYSHSSDSNWININNILEFLPYLDAICIILDREKSRGQDEVLKKLTEKNIFEVLKIDREKQLDFVKSIFSNTKFNFKKIGNFSLKAIREFLPKMFEQNKNSEYLKWKDEEIRRKWEEQKSKLGKTDKKTKYLNPRIFQDEIISPGTKNTFEQAVLVLNQIIKKYSKENIIDAIIIESPREKNDKKTIEEIKKRNKKGKGKTLEKLFQILNLENKGYKLSDLETKPAKLLDRLRFYHQQDGIDLYTLDKINIDQLINGSQKYEIEHIIPYSMSYDNSQANKILTEKAENLKKGKLIASEYIKRNGDEFYNKYYEKAKELFINKYKKNKKLDSYVDLDEDSAKNRFRFLTLQDYDEFQVEFLARNLNDTRYSTKLFYHALVEHFENNEFFTYIDENSSKHKVKISTIKGHVTKYFRAKPVQKNNGPNENLNNNKPEKIEKNRENNEHHAVDAAIVAIIGNKNPQIANLLTLADNKTDKKFLLHDENYKENIETGELVKIPKFEVDKLAKVEDLKKIIQEKYEEAKKHTAIKFSRKTRTILNGGLSDETLYGFKYDEKEDKYFKIIKKKLVTSKNEELKKYFENPFGKKADGKSEYTVLMAQSHLSEFNKLKEIFEKYNGFSNKTGNAFVEYMNDLALKEPTLKAEIESAKSVEKLLYYNFKPSDQFTYHDNINNKSFKRFYKNIRIIEYKSIPIKFKILSKHDGGKSFKDTLFSLYSLVYKVYENGKESYKSIPVTSQMRNFGIDEFDFLDENLYNKEKLDIYKSDFAKPIPVNCKPVFVLKKGSILKKKSLDIDDFKETKETEEGNYYFISTISKRFNRDTAYGLKPLKLSVVKPVAEPSTNPIFKEYIPIHLDELGNEYPVKIKEHTDDEKLMCTIK

SEQ ID NO: 337 - protein, 1314 aa, Mycoplasma synoviae
MLRLYCANNLVLNNVQNLWKYLLLLIFDKKIIFLFKIKVILIRRYMENNNKEKIVIGFDLGVASVGWSIVNAETKEVIDLGVRLFSEPEKADYRRAKRTTRRLLRRKKFKREKFHKLILKNAEIFGLQSRNEILNVYKDQSSKYRNILKLKINALKEEIKPSELVWILRDYLQNRGYFYKNEKLTDEFVSNSFPSKKLHEHYEKYGFFRGSVKLDNKLDNKKDKAKEKDEEEESDAKKESEELIFSNKQWINEIVKVFENQSYLTESFKEEYLKLFNYVRPFNKGPGSKNSRTAYGVFSTDIDPETNKFKDYSNIWDKTIGKCSLFEEEIRAPKNLPSALIFNLQNEICTIKNEFTEFKNWWLNAEQKSEILKFVFTELFNWKDKKYSDKKFNKNLQDKIKKYLLNFALENFNLNEEILKNRDLENDTVLGLKGVKYYEKSNATADAALEFSSLKPLYVFIKFLKEKKLDLNYLLGLENTEILYFLDSIYLAISYSSDLKERNEWFKKLLKELYPKIKNNNLEIIENVEDIFEITDQEKFESFSKTHSLSREAFNHIIPLLLSNNEGKNYESLKHSNEELKKRTEKAELKAQQNQKYLKDNFLKEALVPLSVKTSVLQAIKIFNQIIKNFGKKYEISQVVIEMARELTKPNLEKLLNNATNSNIKILKEKLDQTEKFDDFTKKKFIDKIENSVVFRNKLFLWFEQDRKDPYTQLDIKINEIEDETEIDHVIPYSKSADDSWFNKLLVKKSTNQLKKNKTVWEYYQNESDPEAKWNKFVAWAKRIYLVQKSDKESKDNSEKNSIFKNKKPNLKFKNITKKLFDPYKDLGFLARNLNDTRYATKVFRDQLNNYSKHHSKDDENKLFKVVCMNGSITSFLRKSMWRKNEEQVYRFNFWKKDRDQFFHHAVDASIIAIFSLLTKTLYNKLRVYESYDVQRREDGVYLINKETGEVKKADKDYWKDQHNFLKIRENAIEIKNVLNNVDFQNQVRYSRKANTKLNTQLFNETLYGVKEFENNFYKLEKVNLFSRKDLRKFILEDLNEESEKNKKNENGSRKRILTEKYIVDEILQILENEEFKDSKSDINALNKYMDSLPSKFSEFFSQDFINKCKKENSLILTFDAIKHNDPKKVIKIKNLKFFREDATLKNKQAVHKDSKNQIKSFYESYKCVGFIWLKNKNDLEESIFVPINSRVIHFGDKDKDIFDFDSYNKEKLLNEINLKRPENKKFNSINEIEFVKFVKPGALLLNFENQQIYYISTLESSSLRAKIKLLNKMDKGKAVSMKKITNPDEYKIIEHVNPLGINLNWTKKLENNN

SEQ ID NO: 338 - protein, 1304 aa, Mycoplasma synoviae
  REGION 1..1304: note = Mycoplasma synoviae 53
MLNNVQNLWKYLLLLIFDKKIIFLFKIKVILIRRYMENNNKEKIVIGFDLGVASVGWSIVNAETKEVIDLGVRLFSEPEKADYRRAKRTTRRLLRRKKFKREKFHKLILKNAEIFGLQSRNEILNVYKDQSSKYRNILKLKINALKEEIKPSELVWILRDYLQNRGYFYKNEKLTDEFVSNSFPSKKLHEHYEKYGFFRGSVKLDNKLDNKKDKAKEKDEEEESDAKKESEELIFSNKQWINEIVKVFENQSYLTESFKEEYLKLFNYVRPFNKGPGSKNSRTAYGVFSTDIDPETNKFKDYSNIWDKTIGKCSLFEEEIRAPKNLPSALIFNLQNEICTIKNEFTEFKNWWLNAEQKSEILKFVFTELFNWKDKKYSDKKFNKNLQDKIKKYLLNFALENFNLNEEILKNRDLENDTVLGLKGVKYYEKSNATADAALEFSSLKPLYVFIKFLKEKKLDLNYLLGLENTEILYFLDSIYLAISYSSDLKERNEWFKKLLKELYPKIKNNNLEIIENVEDIFEITDQEKFESFSKTHSLSREAFNHIIPLLLSNNEGKNYESLKHSNEELKKRTEKAELKAQQNQKYLKDNFLKEALVPLSVKTSVLQAIKIFNQIIKNFGKKYEISQVVIEMARELTKPNLEKLLNNATNSNIKILKEKLDQTEKFDDFTKKKFIDKIENSVVFRNKLFLWFEQDRKDPYTQLDIKINEIEDETEIDHVIPYSKSADDSWFNKLLVKKSTNQLKKNKTVWEYYQNESDPEAKWNKFVAWAKRIYLVQKSDKESKDNSEKNSIFKNKKPNLKFKNITKKLFDPYKDLGFLARNLNDTRYATKVFRDQLNNYSKHHSKDDENKLFKVVCMNGSITSFLRKSMWRKNEEQVYRFNFWKKDRDQFFHHAVDASIIAIFSLLTKTLYNKLRVYESYDVQRREDGVYLINKETGEVKKADKDYWKDQHNFLKIRENAIEIKNVLNNVDFQNQVRYSRKANTKLNTQLFNETLYGVKEFENNFYKLEKVNLFSRKDLRKFILEDLNEESEKNKKNENGSRKRILTEKYIVDEILQILENEEFKDSKSDINALNKYMDSLPSKFSEFFSQDFINKCKKENSLILTFDAIKHNDPKKVIKIKNLKFFREDATLKNKQAVHKDSKNQIKSFYESYKCVGFIWLKNKNDLEESIFVPINSRVIHFGDKDKDIFDFDSYNKEKLLNEINLKRPENKKFNSINEIEFVKFVKPGALLLNFENQQIYYISTLESSSLRAKIKLLNKMDKGKAVSMKKITNPDEYKIIEHVNPLGINLNWTKKLENNN

SEQ ID NO: 339 - protein, 1401 aa, Myroides sp.
  REGION 1..1401: note = Myroides injenensis M09-0166
  source 1..1401: note = Myroides injenensis
MKRILGLDLGTTSIGWAYVHEAENVNETSSIQKVGVRVNPLTTEEQTNFEKGKPITTNASRTLARSARRNLQRYKLRRDNLIQILKENNWINNTTSLTETGNHSTFETYELRNKAASEKLTLDQLSRVLLMLNKKRGYKSSRKVNSKEEGQLIDGMEVAKKLYHEQLTPGQLSLQLMNQGVKKLPDYYRSDLNQELESIWNFQQQFYPNILTDKFKEEINGKGLTSTSSAFWNIYNFNTAENKGSRDEKKKQALQWRSEALSKQLSKEIVAYIIADLNGQIYNSSGYLGAISDRSKELYFNNLTVGQYLFKQLKSNPHTSLKNQVFYRQDYLNEFEKIWETQSKFYPKELTAALKREIRDVIIFYQRKLKSQKGLISFCEFEQKQKTINGKTKTIGHRVIPKSSPLFQEFKIWQQLHNVVLRNKKTNEIVSLADEQKVHLFEELNLKGKLKSNQVLKLIENKPKDWELNYTELEGNNTNKALYNAYLDILDIEGYDVRNELKVKLNKDDIELSDLDVNASEIKEMIFSVFKHLGINTEILEFDATLEDKVFEKQASYQLWHLLYSYEEDNSPTGLDRLYNLLHKKFGFKLNHAKLIGNVLFQDDYGSLSSKAIKNIFPYITENNYYTACELAGYKHSKHSLTKEENETRELKNRLTILPKNSLRNPVVEKIINQMINVVNTLIDEENNILIAQGKEPNFQFDEIRIELARELKKNAKEREELTKSINKSKTDHEKIIKILQKEDGIKNPTRNDIVRFKLYSELKNNGYKDLYTNEYIERKDIFTKEYDIEHIIPQSKLFDDSFSNKTLVRRNVNLKKGNQTAYDFILCEYGQEKANEFETRITNLYNLGKDEGISKSKFKKLLMQESEIGNGFIERDLRETQYIAKKAKSLLLEITRNVISTSGSITDRLREDWGLINVMKELNLQKYRDAGLTEFVKMKDGNKKEVIIDWTKRNDHRHHAMDALTIAFTKHNHIQYLNHLNARKNVNNELHNNIIAIEKLETTLVSDERGNKKRIFKEPIANFRTIAKSHLEAILVSHKAKNKVVTKNINKISGKKISQQTLTPRGQLHKETIYGKIRQYVSKQEKVGPKFTIEVIEQVSNPTYRNLLLKRLEENNNDPKKAFGGKNSLNKNPIYINLEKNIKVPEVLKLVWLEDNYTIRKEISPDLKIDKVIDQGVKQILQNRLAQYKGDSKLAFSNLDANPIWLNEDKGIAIKRVTISGIATAQPLHRKKDHLGQPILDHNGQEIPVDFISTGNNHHVAIYEDENGKLQESVVSHFEAVERVNQKLPIIDKTFNQHLGWKFLFTMKQNELFLFPSDDFNPNEIDLFDKQNYTVISKHLFRIQKLSTKDYSFRHHLETNVEEIKDLKTITWRREGLNGIQNIIKVRTNHLGEIIHIGEY

SEQ ID NO: 340 - protein, 1466 aa, Myroides odoratus
  REGION 1..1466: note = Myroides odoratus DSM 2801
MKNILGLDLGTNSIGWALVKEDFENKQGEILGLGSRIIPMSQDILGEFGRGNSISQTADRTGYRGVRRLRERHLLRRERLHRVLNILGFLPNHYAKEIDFTKRLGKFINHAEPKLSFDKEFIFKDSFNEMLKDFQQNQPGFIINKHGEEALVPYDWTIYYLRKKALTQKIDKEELAWILLNFNQKRGYYQLRGEEEEENTNKLVEFYSLKIIDVIADNEVNKKGEVWYSLHLENGWIYRRSSKISLVDWKDKVRDFIVTTDVNDDGSEKLDKDGVVKRSFRAPSADDWTLLKKKTEQDIDNSNKTVGAYIYENLLLNPKQKIKGKLVRTIERKFYKDELKQILEKQKEFHQELQNEQLLQDCVRELYKYNEQHQQMLESKDFVHLFLNDIIFYQRPLRSQKSLISNCTLEKRVSRDGVVFPIKVISKSNPYYQEFRLLQWLQNLAIYRKDDDVNVTQEFLNSIESWENLLQFLNAKKEIKQEQLIKFLLEQKGLKGNSLKTAILTYRWNYVTDKVYPMNETRSLIQDKLKKVENVATDFLSFDNEMALWHIIYSVNDKIEYEKALAKFASKHNLDEISFVESFKKFPPFKSDYGSFSEKAIKKLLPLMRFGSVWNKNNIVPSVLDRIDKILTGEYDEKIKIRVREKAEQFQLNQIEDFQNLPLWLAQYVVYDRHSEAEIAGKWNSVKDLENYLKEFKQHSLRNPIVEQIITETLRVVKDIWQQYGNGVQNFFDEIHIELGREMKNTADERKRITNSVTENENTNLRIKALLVELKEDTNIENVRPHSPMQQEILKIYEEGVLNAVENIDEDILKISKTAQPSKSELIRYKLWLEQKYQSPYTGEMIPLSRLFTSDYEIEHVIPQSRYFDDSLSNKVICEAAVNKRKDNQLGLEFIKNHHSEKIELGNGRTAQVLEVEAYESFVKKNYDKNRGKRNKLLLEDVPEKMIERQLNDTRYISKFVTHLLSNIVRKDEVNSKDDGINSKNIIPGNGKITSQLKQDWGLNDVWNELILPRFERMNNLTNSTDFTSTNTNGKIIPTVPLEYSKGFSKKRIDHRHHALDALVIALATRDHVNLLNNESALPKKDRTKEEQKSFRFDLQVNLRNKEKYFNVKEGREKEKFTTFKKPWNTLTQDTRDALENMVVSFKQNLRVINKATNYYESYTDENGNLRLDKYGNPKKELISQKGTNWAIRKSLHKETVSGQIHLDRVKVTKGKIVTATRKSLDSSFNEKSIESITDTGIQKILRNYLKAKDNKPDVAFSPEGIEELNKSISVYNEGKNHQPIIKVRIFEQGSKFPVGETGNKIAKFVEAAKGTNLFFGIYQDKTGKRSYDTIPLNLVIERLKQGLSPVPETNEKGHQLLFHLSPNDLVYVPTIDDNEQLDSNRVYKFTDSSDTTCNFIPSNISAIIFNINSKEQEKRGINYPIQNELGVGSPQSKNQKSFDGFMIKEVCIKLKVDRLGNISKT

SEQ ID NO: 341 - protein, 1077 aa, Neisseria bacilliformis
  REGION 1..1077: note = Neisseria bacilliformis ATCC BAA-1200
MQQKPQRYILGLDLGIASVGWACVWADENEHPTGLLDCGVRTFERAEVPKTGDSLALARRQARSVRRLIRRRAHRLLRLRRLLKREGVLLSADFNENGLVRGLPIDAWALRVAGLDRKLSNKEWAAVLLHLVKHRGYLSQRKNETQSKDKELGRLLAGVNGNREALQNRSDEYRTAAELAVKKFAAENNGSLRNKGGDYSHTFDRKDLQRELHLLFERQRALDNPFTSSEMEAAVDELLMKQRSALQGEAVLKMLGRCTFEPSEYKAAKNTYSAERFVWLTKLNNLRIQYNGEERALSEAERRLLLDEPYQKAKLTYKQVRTILELPESAVFKGLRYGHGEDGLKAESGTLMEMKAYHAVRKALKDAGLEGEWENRIRNPELLDAIGTAFSLYKTDEDIRANLAAFRLSENVLEALLAGLNFDKFVHLSLKALAKILPLMEQGMRYDEACKEAYGDHYGAKEQEDHRLLPPFVADDIRNPVVFRTLTQARKIVNEIVRRYGSPLRVHIETGREVGKSFSDRKEIEKRQEENRKERERAAAHFKELFPNFAGEPKAQDILKLRLYEQQHGKCLYSGKEIDLRRLPEKGYVEIDHALPFSRTWDDSFNNKVLVLGKENQDKRNRTPYEYLDGKGNSGAWRAFAERVSGCRFPYAKKQRLLTQKLDEKTEQGFLERNLNDTRYVARFLCQFIEEKMHLEGAGKKRVFASNGQITALLRGFWGLKKVREENDRHHALDAVVVACSSVSMQQKITRHFRYREELEHIDRETGEVIHGFPQPWEFFRQEVMTRVFSDDPVSELAEKLDSRPEAVHEFVTPLFVSRAPHRKVTGQGHLETIRSAKRLDEKISVVKLPLTQLKTKDIERIVGYPNREPALYDALAARLAAFKDDPAKAFSEPFYKTGKDGKCGVLVKAVRVENVQKSGLLVRKDESGKMQGVADNATMVRVDVFGKNGKNYLVPVYAWQVEKGELPNRAVVAYADEEDWDEMDDSFEFKFSLYPNDLVEVVTKKDKFFGYYSGFNRATGAINIKEHDLSKSKVKNGVYEGIGVKTAQSFQKYQVDTLGKTIRLCKPEKRMGFKKK

SEQ ID NO: 342 - protein, 1082 aa, Neisseria cinerea
  REGION 1..1082: note = Neisseria cinerea ATCC 14685
MAAFKPNPMNYILGLDIGIASVGWAIVEIDEEENPIRLIDLGVRVFERAEVPKTGDSLAAARRLARSVRRLTRRRAHRLLRARRLLKREGVLQAADFDENGLIKSLPNTPWQLRAAALDRKLTPLEWSAVLLHLIKHRGYLSQRKNEGETADKELGALLKGVADNTHALQTGDFRTPAELALNKFEKESGHIRNQRGDYSHTFNRKDLQAELNLLFEKQKEFGNPHVSDGLKEGIETLLMTQRPALSGDAVQKMLGHCTFEPTEPKAAKNTYTAERFVWLTKLNNLRILEQGSERPLTDTERATLMDEPYRKSKLTYAQARKLLDLDDTAFFKGLRYGKDNAEASTLMEMKAYHAISRALEKEGLKDKKSPLNLSPELQDEIGTAFSLFKTDEDITGRLKDRVQPEILEALLKHISFDKFVQISLKALRRIVPLMEQGNRYDEACTEIYGDHYGKKNTEEKIYLPPIPADEIRNPVVLRALSQARKVINGVVRRYGSPARIHIETAREVGKSFKDRKEIEKRQEENRKDREKSAAKFREYFPNFVGEPKSKDILKLRLYEQQHGKCLYSGKEINLGRLNEKGYVEIDHALPFSRTWDDSFNNKVLALGSENQNKGNQTPYEYFNGKDNSREWQEFKARVETSRFPRSKKQRILLQKFDEDGFKERNLNDTRYINRFLCQFVADHMLLTGKGKRRVFASNGQITNLLRGFWGLRKVRAENDRHHALDAVVVACSTIAMQQKITRFVRYKEMNAFDGKTIDKETGEVLHQKAHFPQPWEFFAQEVMIRVFGKPDGKPEFEEADTPEKLRTLLAEKLSSRPEAVHKYVTPLFISRAPNRKMSGQGHMETVKSAKRLDEGISVLRVPLTQLKLKDLEKMVNREREPKLYEALKARLEAHKDDPAKAFAEPFYKYDKAGNRTQQVKAVRVEQVQKTGVWVHNHNGIADNATIVRVDVFEKGGKYYLVPIYSWQVAKGILPDRAVVQGKDEEDWTVMDDSFEFKFVLYANDLIKLTAKKNEFLGYFVSLNRATGAIDIRTHDTDSTKGKNGIFQSVGVKTALSFQKYQIDELGKEIRPCRLKKRPPVR

SEQ ID NO: 343 - protein, 1081 aa, Neisseria flavescens
  REGION 1..1081: note = Neisseria flavescens SK114
MTAFKPNPINYILGLDIGIASVGWAMVEIDEEENPIRLIDLGVRVFERAEVPKTGDSLAAARRLARSVRRLTRRRAHRLLRARRLLKREGVLQAADFDENGLIKSLPNTPWQLRAAALDRKLTPLEWSAVLLHLIKHRGYLSQRKNEGETADKELGALLKGVADNAHALQTGDFRTPAELAVNKFEKESGHIRNQRGDYSHTFSRKDLQAELVLLFEKQKEFGNPHISDGLKEGIETLLMAQRPALSGDAVQKMLGYCTFEPTEPKAAKNTYTAERFIWLTKLNNLRILEQGSERPLTDTERATLIDMPYKNKLTYAKARELLGLDDTAFFKGLRYGKDNAESATLMEMKAYHAIRRALEKEGLKDKKSPLSLSPELQDEIGTAFSLFKTDEDITGRLKGCLQPEILDALLKHINFDKFVQISLKALRRIVPLMEQGKRYDEACAETYGDHYGEKNSEEMLYLPPIPADEIRNPVVLRALSQARKVINGVVRRYGSPARIHIETAREVGKSFKDRKEIEKRQEENRKDREKAAAKFREYFPNFVGEPKSKDILKLRLYEQQHGKCLYSGKAIDIRRLNGKGYVEIDHALPFSRTWDDSFNNKVLVLGSENQNKGNRTPYEYLNGKDNSREWLEFKARVETSRFPHSKKQRVLLQKFDEKGFKERNLNDTRYVNRFLCQFVADHMQLTGKGKRRVFASNGQITNLLRGFWGLHKVRAENDRHHALDAVVVACSTVAMQQKITCFVRYKEMNAFDGKTVDKETGEVLHQKTHFPQPWEFFAQEVMIRVFGKPDGKPEFEEADTPEKLRALLAEKLSSRPEAVHEYVTPLFVSRAPNRKMSGAHKDTLRSAKRFVKHNEKISVKRVWLTEIKLADLENMVNYKNGREIELYEALKARLGAYGGNAKQAFDPKDNPFYKKGGQLVKAVRVEKTQESGVLLNKKNAYTIADNGDMVRVDVFCKVDKKGKNQYFIVPIYAWQVAENILPDIDCKGYRIDDSYTFCFSLHKYDLIAFQKDEKSKVEFAYYINCDSSNGRFYLAWHDKGSKEQQFRISTQNLVLMQKYQIDELGKEIRPCRLKKRPPVR

SEQ ID NO: 344 - protein, 1082 aa, Neisseria lactamica
MAAFKPNPMNYILGLDIGIASVGWAMVEIDKEENPIRLIDLGVRVFERAEVPKTGDSLAMARRLARSVRRLTRRRAHRLLRARRLLKREGVLQDADFDENGLVKSLPNTPWQLRAAALDRKLTCLEWSAVLLHLIKHRGYLSQRKNEGETADKELGALLKGVADNAHALQTGDFRTPAELALNKFEKESGHIRNQRGDYSHTFSRKDLQAELNLLFEKQKEFSNPHVSDSLKEGIETLLMAQRPALSGDAVQKMLGHCTFEPAEPKAAKNTYTAERFIWLTKLNNLRILEQGSERPLTDTERATLMDEPYRKSKLTYAQARKLLGLEDTAFFKGLRYGKDNAEAPTLMEMKAYHAISRALEKEGLKDKKSPLNLSTELQDEIGTAFSLFKTDKDITGRLKDRVQPEILEALLKHISFDKFVQISLKALRRIVPLMEQGKRYDEACAEIYGDHYCKKNAEEKIYLPPIPADEIRNPVVLRALSQARKVINCVVRRYGSPARIHIETAREVGKSFKDRKEIEKRQEENRKDREKAAAKFREYFPNFVGEPKSKDILKLRLYEQQHGKCLYSGKEINLVRLNEKGYVEIDHALPFSRTWDDSFNNKVLVLGSENQNKGNQTPYEYFNGKDNSREWQEFKARVETSRFPRSKKQRILLQKFDEEGFKERNLNDTRYVNRFLCQFVADHILLTGKGKRRVFASNGQITNLLRGFWGLRKVRAENDRHHALDAVVVACSTVAMQQKITRFVRYKEMNAFDGKTIDKETGEVLHQKAHFPQPWEFFAQEVMIRVFGKPDGKPEFEEADTPEKLRTLLAEKLSSRPEAVHEYVTPLFVSRAPNRKMSGQGHMETVKSAKRLDEGISVLRVPLTQLKLKGLEKMVNREREPKLYDALKAQLETHKDNPAKAFAEPFYKYDKAGNRTQQVKAVRIEQVQKTGVWVRNHNGIADNATMVRVDVFEKGGKYYLVPIYSWQVAKGILPDRAVVAFKDEEDWTVMDDSFEFRFVLYANDLIKLTAKKNEFLGYFVSLNRATGAIDIRTHDTDSTKGKNGIFQSVGVKTALSFQKNQIDELGKEIRPCRLKKRPPVR

SEQ ID NO: 345 - protein, 1082 aa, Neisseria meningitidis
MAAFKPNPINYILGLDIGIASVGWAMVEIDEDENPICLIDLGVRVFERAEVPKTGDSLAMARRLARSVRRLTRRRAHRLLRARRLLKREGVLQAADFDENGLIKSLPNTPWQLRAAALDRKLTPLEWSAVLLHLIKHRGYLSQRKNEGETADKELGALLKGVADNAHALQTGDFRTPAELALNKFEKESGHIRNQRGDYSHTFSRKDLQAELNLLFEKQKEFGNPHISDGLKEGIETLLMTQRPALSGDAVQKMLGHCTFEPAEPKAAKNTYTAERFIWLTKLNNLRILEQGSERPLTDTERTTLIDEPYRKSKLTYAQARKLLELDNTAFFKGLRYGKDNAEASTLMEMKAYHAISRALEKEGLKDKKSPLNLSPELQDEIGTAFSLFKTDEDITGRLKDRVQPEILEALLKHISFDKFVQISLKALRRIVPLMEQGKRYDEACAEIYGDHYGKKNTEEKIDLPPIPADEIRNPVVLRALSQARKVINGVVRRYGSPARIHIETAREVGKSFKDRKEIEKRQEENRKDREKAATKFREYFPNFVGEPKSKDILKLRLYEQQHGKCLYSGKEINLGRLNEKGYVEIDHALPFSRTWDDSFNNKVLVLGSENQNKGNQTPYEYFNGKDNSREWQEFKARVETSRFPRSKKQRILLQKFDEEGFKERNLNDTRYVNRFLCQFVADHMLLTGKGKRRVFASNGQITNLLRGFWGLRKVRAENDRHHALDAVVVACSTVAMQQKITRFVRYKEMNAFDGKTIDKETGEVLHQKTHFPQPWEFFAQEVMIRVFGKPDGKPEFEEADTPEKLRTLLAEKLSSRPEAVHEYVTPLFVSRAPNRKMSGQGHMETVKSAKRLDEGVSVLRVPLTQLKLKDLEKMVNREREPKLYEALKARLEAHKDDPAKAFAEPFYKYDKAGNRTQQVKAVRVEQVQKTGVWVRNHNGIADNATMVRVDVFEKGDKYYLVPIYSWQVAKGILPDRAVVQGKDEEDWQLIDDSFNFKFSLHPNDLVEVITKKARMFGYFASCHRGTGNINIRIHDLDHKIGKNGILEGIGVKTALSFQKYQIDELGKEIRPCRLKKRPPVR

SEQ ID NO: 346 - protein, 1082 aa, Neisseria meningitidis
  REGION 1..1082: note = Neisseria meningitidis 2007056
MAAFKPNPINYILGLDIGIASVGWAMVEIDEDENPICLIDLGVRVFERAEVPKTGDSLAMARRLARSVRRLTRRRAHRLLRARRLLKREGVLQAADFDENGLIKSLPNTPWQLRAAALDRKLTPLEWSAVLLHLIKHRGYLSQRKNEGETADKELGALLKGVADNAHALQTGDFRTPAELALNKFEKESGHIRNQRGDYSHTFSRKDLQAELILLFEKQKEFGNPHVSGGLKEGIETLLMTQRPALSGDAVQKMLGHCTFEPAEPKAAKNTYTAERFIWLTKLNNLRILEQGSERPLTDTERATLMDEPYRKSKLTYAQARKLLGLEDTAFFKGLRYGKDNAEASTLMEMKAYHAISRALEKEGLKDKKSPLNLSPELQDEIGTAFSLFKTDEDITGRLKDRIQPEILEALLKHISFDKFVQISLKALRRIVPLMEQGKRYDEACAEIYGDHYGKKNTEEKIYLPPIPADEIRNPVVLRALSQARKVINGVVRRYGSPARIHIETAREVGKSFKDRKEIEKRQEENRKDREKAAAKFREYFPNFVGEPKSKDILKLRLYEQQHGKCLYSGKEINLGRLNEKGYVEIDHALPFSRTWDDSFNNKVLVLGSENQNKGNQTPYEYFNGKDNSREWQEFKARVETSRFPRSKKQRILLQKFDEDGFKERNLNDTRYVNRFLCQFVADRMRLTGKGKKRVFASNGQITNLLRGFWGLRKVRAENDRHHALDAVVVACSTVAMQQKITRFVRYKEMNAFDGKTIDKETGEVLHQKTHFPQPWEFFAQEVMIRVFGKPDGKPEFEEADTPEKLRTLLAEKLSSRPEAVHEYVTPLFVSRAPNRKMSGQGHMETVKSAKRLDEGVSVLRVPLTQLKLKDLEKMVNREREPKLYEALKARLEAHKDDPAKAFAEPFYKYDKAGNRTQQVKAVRVEQVQKTGVWVRNHNGIADNATMVRVDVFEKGDKYYLVPIYSWQVAKGILPDRAVVQGKDEEDWQLIDDSFNFKFSLHPNDLVEVITKKARMFGYFASCHRGTGNINIRIHDLDHKIGKNGILEGIGVKTALSFQKYQIDELGEEIRPCRLKKRPPVR

SEQ ID NO: 347 - protein, 1082 aa, Neisseria meningitidis
  REGION 1..1082: note = Neisseria meningitidis 63049
MAAFKPNPINYILGLDIGIASVGWAMVEIDEEENPIRLIDLSVRVFERAEVPKTGDSLAMARRLARSVRRLTRRRAHRLLRARRLLKREGVLQAADFDENGLIKSLPNTPWQLRAAALDRKLTPLEWSAVLLHLIKHRGYLSQRKNEGETADKELGALLKGVADNAHALQTGDFRTPAELALNKFEKESGHIRNQRGDYSHTFSRKDLQAELILLFEKQKEFGNPHVSGGLKEGIETLLMTQRPALSGDAVQKMLGHCTFEPAEPKAAKNTYTAERFVWLTKLNNLRILEQGSERPLTDTERATLMDEPYRKSKLTYAQARKLLGLEDTAFFKGLRYGKDNAEASTLMEMKAYHAISRALEKEGLKDKKSPLRLSPELQDEIGTAFSLFKTDEDITGRLKDRVQPEILEALLKHISFDKFVQISLKALRRIVPLMEQGKRYDEACAEIYGDHYGKKNAEEKIYLPPIPADEIRNPVVLRALSQARKVINGVVRRYGSPARIHIETAREVGKSFKDRKEIEKRQEENRKDREKAAAKFREYFPNFVGEPKSKDILKLRLYEQQHGKCLYSGKEINLGRLNEKGYVEIDHALPFSRTWDDSFNNKVLVLGSENQNKGNQTPYEYFNGKDNSREWQEFKARVETSRFPRSKKQRILLQKFDEDGFKERNLNDTRYVNRFLCQFVADRMRLTGKGKKRVFASNGQITNLLRGFWGLRKVRAENDRHHALDAVVVACSTVAMQQKITRFVRYKEMNAFDGKTIDKETGEVLHQKTHFPQPWEFFAQEVMIRVFGKPDGKPEFEEADTPEKLRTLLAEKLSSRPEAVHEYVTPLFVSRAPNRKMSGQGHMETVKSAKRLDEGVSVLRVPLTQLKLKDLEKMVNREREPKLYEALKARLEAHKDDPAKAFAEPFYKYDKAGNRTQQVKAVRVEQVQKTGVWVRNHNGIADNATMVRVDVFEKGDKYYLVPIYSWQVAKGILPDRAVVQGKDEEDWQLIDDSFNFKFSLHPNDLVEVITKKARMFGYFASCHRGTGNINIRIHDLDHKIGKNGILEGIGVKTALSFQKYQIDELGKEIRPCRLKKRPPVR

SEQ ID NO: 348 - protein, 1082 aa, Neisseria meningitidis
MAAFKPNSINYILGLDIGIASVGWAMVEIDEEENPIRLIDLGVRVFERAEVPKTGDSLAMARRLARSVRRLTRRRAHRLLRTRRLLKREGVLQAANFDENGLIKSLPNTPWQLRAAALDRKLTPLEWSAVLLHLIKHRGYLSQRKNEGETADKELGALLKGVAGNAHALQTGDFRTPAELALNKFEKESGHIRNQRSDYSHTFSRKDLQAELILLFEKQKEFGNPHVSGGLKEGIETLLMTQRPALSGDAVQKMLGHCTFEPAEPKAAKNTYTAERFIWLTKLNNLRILEQGSERPLTDTERATLMDEPYRKSKLTYAQARKLLGLEDTAFFKGLRYGKDNAEASTLMEMKAYHAISRALEKEGLKDKKSPLNLSPELQDEIGTAFSLFKTDEDITGRLKDRIQPEILEALLKHISFDKFVQISLKALRRIVPLMEQGKRYDEACAEIYGDHYGKKNTEEKIYLPPIPADEIRNPVVLRALSQARKVINGVVRRYGSPARIHIETAREVGKSFKDRKEIEKRQEENRKDREKAAAKFREYFPNFVGEPKSKDILKLRLYEQQHGKCLYSGKEINLGRLNEKGYVEIDHALPFSRTWDDSFNNKVLVLGSENQNKGNQTPYEYFNGKDNSREWQEFKARVETSRFPRSKKQRILLQKFDEDGFKERNLNDTRYVNRFLCQFVADRMRLTGKGKKRVFASNGQITNLLRGFWGLRKVRAENDRHHALDAVVVACSTVAMQQKITRFVRYKEMNAFDGKTIDKETGEVLHQKTHFPQPWEFFAQEVMIRVFGKPDGKPEFEEADTLEKLRTLLAEKLSSRPEAVHEYVTPLFVSRAPNRKMSGQGHMETVKSAKRLDEGVSVLRVPLTQLKLKDLEKMVNREREPKLYEALKARLEAHKDDPAKAFAEPFYKYDKAGNRTQQVKAVRVEQVQKTGVWVRNHNGIADNATMVRVDVFEKGDKYYLVPIYSWQVAKGILPDRAVVQGKDEEDWQLIDDSFNFKFSLHPNDLVEVITKKARMFGYFASCHRGTGNINIRIHDLDHKIGKNGILEGIGVKTALSFQKYQIDELGKEIRPCRLKKRPPVR

SEQ ID NO: 349 - protein, 1082 aa, Neisseria meningitidis
  REGION 1..1082: note = Neisseria meningitidis 92045
MAAFKPNPINYILGLDIGIASVGWAMVEIDEEENPIRLIDLGVRVFERAEVPKTGDSLAMARRLARSVRRLTRRRAHRLLRARRLLKREGVLQAADFDENGLIKSLPNTPWQLRAAALDRKLTPLEWSAVLLHLIKHRGYLSQRKNEGETADKELGALLKGVADNAHALQTGDFRTPAELALNKFEKECGHIRNQRGDYSHTFSRKDLQAELNLLFEKQKEFGNPHVSGGLKEGIETLLMTQRPALSGDAVQKMLGHCTFEPAEPKAAKNTYTAERFIWLTKLNNLRILEQGSERPLTDTERATLMDEPYRKSKLTYAQARKLLGLEDTAFFKGLRYGKDNAEASTLMEMKAYHAISRALEKEGLKDKKSPLNLSPELQDEIGTAFSLFKTDEDITGRLKDRIQPEILEALLKHISFDKFVQISLKALRRIVPLMEQGKRYDEACAEIYGDHYGKKNTEEKIYLPPIPADEIRNPVVLRALSQARKVINGVVRRYGSPARIHIETAREVGKSFKDRKEIEKRQEENRKDREKAAAKFREYFPNFVGEPKSKDILKLRLYEQQHGKCLYSGKEINLVRLNEKGYVEIDHALPFSRTWDDSFNNKVLVLGSENQNKGNQTPYEYFNGKDNSREWQEFKARVETSRFPRSKKQRILLQKFDEEGFKERNLNDTRYVNRFLCQFVADHILLTGKGKRRVFASNGQITNLLRGFWGLRKVRAENDRHHALDAVVVACSTVAMQQKITRFVRYKEMNAFDGKTIDKETGEVLHQKTHFPQPWEFFAQEVMIRVFGKPDGKPEFEEADTPEKLRTLLAEKLSSRPEAVHEYVTPLFVSRAPNRKMSGQGHMETVKSAKRLDEGVSVLRVPLTQLKLKDLEKMVNREREPKLYEALKARLEAHKDDPAKAFAEPFYKYDKAGNRTQQVKAVRVEQVQKTGVWVRNHNGIADNATMVRVDVFEKGGKYYLVPIYSWQVAKGILPDRAVVQGKDEEDWQLIDDSFNFKFSLHPNDLVEVITKKARMFGYFASCHRGTGNINIRIHDLDHKIGKNGILEGIGVKTALSFQKYQIDELGKEIRPCRLKKRPPVR

SEQ ID NO: 350 - protein, 1081 aa, Neisseria meningitidis
  REGION 1..1081: note = Neisseria meningitidis 93003
MAAFKPNPINYILGLDIGIASVGWAMVEIDEEENPIRLIDLGVRVFERAEVPKTGDSLAMARRLARSVRRLTRRRAHRLLRARRLLKREGVLQAADFDENGLIKSLPNTPWQLRAAALDRKLTPLEWSAVLLHLIKHRGYLSQRKNEGETADKELGALLKGVADNAHALQTGDFRTPAELALNKFEKESGHIRNQRGDYSHTFSRKDLQAELILLFEKQKEFGNPHVSGGLKEGIETLLMTQRPALSGDAVQKMLGHCTFEPAEPKAAKNTYTAERFIWLTKLNNLRILEQGSERPLTDTERATLMDEPYRKSKLTYAQARKLLGLEDTAFFKGLRYGKDNAEASTLMEMKAYHAISRALEKEGLKDKKSPLNLSPELQDEIGTAFSLFKTDEDITGRLKDRVQPEILEALLKHISFDKFVQISLKALRRIVPLMEQGKRYDEACAEIYGDHYGKKNTEEEIYLPPITADEIRNPVVLRALSQARKVINAVVRRYGSPARIHIETAREVGKSFKDRKEIEKRQEENRKDREKAAAKFREYFPNFVGEPKSKDILKLRLYEQQHGKCLYSGKEINLVRLNEKGYVEIDHALPFSRTWDDSFNNKVLVLGSENQNKGNQTPYEYFNGKENSREWQEFKARVETSRFPRSKKQRILLQKFDEDGFKERNLNDTRYVNRFLCQFVADRMRLTGKGKKRVFASNGQITNLLRGFWGLHKVRAENDRHHALDAVVVACSTIAMQQKITRFVRYKEMNAFDGKTIDKETGEVLHQKAHFPQPWEFFAQEVMIRVFGKPDGKPEFEEADTPEKLRTLLAEKLSSRPEAVHEYVTPLFVSRAPNRKMSGQGHMETVKSAKRLDEGISVLRVPLTQLKLKDLEKMVNRAREPKLYEALKARLEAHKDDPAKAFAEPFYKYDKAGNRTQQVKAVRVEQVQKTGVWVRNHNGIADNATMVRVDVFEKAGKYYLVPIYSWQVAKGILPDRAVVAYADEEDWTVIDESFRFKFVLYSNDLIKVQLKKDSFLGYFSGLDRATGAISLREHDLEKSKGKDGMHRIGVKTALSFQKYQIDEMGKEIRPCRLKKRPPVR

SEQ ID NO: 351 - protein, 1081 aa, Neisseria meningitidis
  REGION 1..1081: note = Neisseria meningitidis 93004
MAAFKPNPINYILGLDIGIASVGWAMVEIDEDENPICLIDLGVRVFERAEVPKTGDSLAMARRLARSVRRLTRRRAHRLLRARRLLKREGVLQAADFDENGLIKSLPNTPWQLRAAALDRKLTPLEWSAVLLHLIKHRGYLSQRKNEGETADKELGALLKGVADNAHALQTGDFRTPAKLALNKFEKESGHIRNQRGDYSHTFSRKDLQAELNLLFEKQKEFGNPHISDGLKEGIETLLMTQRPALSGDAVQKMLGHCTFEPTEPKAAKNTYTAERFVWLTKLNNLRILEQGSEQPLTDTQRAKLMDEPYRKSKLTYAQARKLLGLEDTAFFKGLRYGKDNAEASTLMEMKAYHAISRALEKEGLKDKKSPLNLSPELQDEIGTAFSLFKTDEDITGRLKDRVQPEILEALLKHISFDKFVQISLKALRRIVPLMEQGKRYNEACAEIYGDHYGKKNTEEKIYLPPIPADEIRNPVVLRALSQARKVINGVVRRYGSPARIHIETAREVGKSFKDRKEIEKRQEENRKDREKAAAKFQEYFPNFVGEPKSKDILKLRLYEQQHGKCLYSGKEINLGRLNEKGYVEIDHALPFSRTWDDSFNNKVLVLGSENQNKGNQTPYEYFNGKDNSREWQEFKARVETSRFPRSKKQRILLQKFDEDGFKERNLNDTRYVNRFLCQFVADRMRLTGKGKKRVFASNGQITNLLRGFWGLRKVRAENDRHHALDAVVVACSTVAMQQKITRFVRYKEMNAFDGKTIDKETGEVLHQKTHFPQPWEFFAQEVMIRVFGKPDGKPEFEEADTPEKLRTLLAEKLSSRPEAVHEYVTPLFVSRAPNRKMSGQGHMETVKSAKRLDEGVSVLRVPLTQLKLKDLEKMVNREREPKLYEALKARLEAHKDDPAKAFAEPFYKYDKAGNRTQQVKAVRVEQVQKTGVWVRNHNGIADNATMVRVDVFEKGDKYYLVPIYSWQVAKGILPDRAVVAYADEEDWTVIDESFRFKFVLYSNDLIKVQLKKDSFLGYFSGLDRATGAISLREHDLEKSKGKDGMHRIGVKTALSFQKYQIDEMGKEIRPCRLKKRPPVR

SEQ ID NO: 352 - protein, 1082 aa, Neisseria meningitidis
  REGION 1..1082: note = Neisseria meningitidis 96023
MAAFKPNPINYILGLDIGIASVGWAMVEIDEDENPICLIDLGVRVFERAEVPKTGDSLAMARRLARSVRRLTRRRAHRLLRARRLLKREGVLQAADFDENGLIKSLPNTPWQLRAAALDRKLTPLEWSAVLLHLIKHRGYLSQRKNEGETADKELGALLKGVADNAHALQTGDFRTPAELALNKFEKESGHIRNQRGDYSHTFSRKDLQAELILLFEKQKEFGNPHVSGGLKEGIETLLMTQRPALSSDAVQKMLGHCTFEPAEPKAAKNTYTAERFIWLTKLNNLRILEQGSERPLTDTERATLMDEPYRKSKLTYAQARKLLGLEDTAFFKGLRYGKDNAEASTLMEMKAYHAISRALEKEGLKDKKSPLNLSPELQDEIGTAFSLFKTDEDITGRLKDRIQPEILEALLKHISFDKFVQISLKALRRIVPLMEQGKRYDEACAEIYGDHYGKKNTEEKIYLPPIPADEIRNPVVLRALSQARKVINGVVRRYGSPARIHIETAREVGKSFKDRKEIEKRQEENRKDREKAAAKFREYFPNFVGEPKSKDILKLRLYEQQHGKCLYSGKEINLGRLNEKGYVEIDHALPFSRTWDDSFNNKVLVLGSENQNKGNQTPYEYFNGKDNSREWQEFKARVETSRFPRSKKQRILLQKFDEDGFKERNLNDTRYVNRFLYQFVADRMRLTGKGKKRVFASNGQITNLLRGFWGLRKVRAENDRHHALDAVVVACSTVAMQQKITRFVRYKEMNAFDGKTIDKETGEVLHQKTHFPQPWEFFAQEVMIRVFGKPDGKPEFEEADTPEKLRTLLAEKLSSRPEAVHEYVTPLFVSRAPNRKMSGQGHMETVKSAKRLDEGVSVLRVPLTQLKLKDLEKMVNREREPKLYEALKARLEAHKDDPAKAFAEPFYKYDKAGNRTQQVKAVRVEQVQKTGVWVRNHNGIADNATMVRVDVFEKGDKYYLVPIYSWQVAKGILPDRAVVQGKDEEDWQLIDDSFNFKFSLHPNDLVEVITKKARMFGYFASCHRGTGNINIRIHDLDHKIGKNGILEGIGVKTALSFQKYQIDELGKEIRPCRLKKRPPVR

SEQ ID NO: 353 - protein, 1081 aa, Neisseria meningitidis
  REGION 1..1081: note = Neisseria meningitidis 98008
MAAFKPNPINYILGLDIGIASVGWAMVEIDEDENPICLIDLGVRVFERAEVPKTGDSLAAARRLARSVRRLTRRRAHRLLRARRLLKREGVLQAADFDENGLIKSLPNTPWQLRSAALDRKLTPLEWSAVLLHLIKHRGYLSQRKNEGETADKELGALLKGVANNAHALQTGDFRTPAELALNKFEKESGHIRNQRGDYSHTFSRKDLQAELILLFEKQKEFGNPHVSGGLKEGIETLLMTQRPALSGDAVQKMLGHCTFEPAEPKAAKNTYTAERFIWLTKLNNLRILEQGSERPLTDTERATLMDEPYRKSKLTYAQARKLLGLEDTAFFKGLRYGKDNAEASTLMEMKAYHAISRALEKEGLKDKKSPLNLSPELQDEIGTAFSLFKTDEDITGRLKDRIQPEILEALLKHISFDKFVQISLKALRRIVPLMEQGKRYDEACAEIYGDHYGKKNTEEKIYLPPIPADEIRNPVVLRALSQARKVINGVVRRYGSPARIHIETAREVGKSFKDRKEIEKRQEENRKDREKAAAKFREYFPNFVGEPKSKDILKLRLYEQQHGKCLYSGKEINLGRLNEKGYVEIDHALPFSRTWDDSFNNKVLVLGSENQNKGNQTPYEYFNGKDNSREWQEFKARVETSRFPRSKKQRILLQKFDEDGFKERNLNDTRYVNRFLCQFVADRMRLTGKGKKRVFASNGQITNLLRGFWGLRKVRAENDRHHALDAVVVACSTVAMQQKITRFVRYKEMNAFDGKTIDKETGEVLHQKTHFPQPWEFFAQEVMIRVFGKPDGKPEFEEADTPEKLRTLLAEKLSSRPEAVHEYVTPLFVSRAPNRKMSGQGHMETVKSAKRLDEGVSVLRVPLTQLKLKDLEKMVNREREPKLYEALKARLEAHKDDPAKAFAEPFYKYDKAGNRTQQVKAVRVEQVQKTGVWVRNHNGIADNATMVRVDVFEKAGKYYLVPIYSWQVAKGILPDRAVVAYADEEGWTVIDESFRFKFVLYSNDLIKVQLKKDSFLGYFSGLDRATGAISLREHDLEKSKGKDGMHRIGVKTALSFQKYQIDEMGKEIRLCRLKKRPPVR

SEQ ID NO: 354 - protein, 1082 aa, Neisseria meningitidis
MAAFKPNPINYILGLDIGIASVGWAMVEIDEEENPIRLIDLGVRVFERAEVPKTGDSLAMVRRLARSVRRLTRRRAHRLLRARRLLKREGVLQAADFDENGLIKSLPNTPWQLRAAALDRKLTPLEWSAVLLHLIKHRGYLSQRKNEGETADKELGALLKGVADNAHALQTGDFRTPAELALNKFEKESGHIRNQRGDYSHTFSRKDLQAELILLFEKQKEFGNPHISGGLKEGIETLLMTQRPALSGDAVQKMLGHCTFEPAEPKAAKNTYTAERFIWLTKLNNLRILEQGSERPLTDTERATLMDEPYRKSKLTYAQARKLLGLEDTAFFKGLRYGKDNAEASTLMEMKAYHAISRALEKEGLKDKKSPLNLSPELQDEIGTAFSLFKTDEDITGRLKDRIQPEILEALLKHISFDKFVQISLKALRRIVPLMEQGKRYDEACAEIYGDHYGKKNTEEKIYLPPIPADEIRNPVVLRALSQARKVINGVVRRYGSPARIHIETAREVGKSFKDRKEIEKRQEENRKDREKAAAKFREYFPNFVGEPKSKDILKLRLYEQQHGKCLYSGKEINLGRLNEKGYVEIDHALPFSRTWDDSFNNKVLVLGSENQNKGNQTPYEYFNGKDNSREWQEFKARVETSRFPRSKKQRILLQKFDEDGFKERNLNDTRYVNRFLCQFVADRMRLTGKGKKRVFASNGQITNLLRGFWGLRKVRAENDRHHALDAVVVACSTVAMQQKITRFVRYKEMNAFDGKTIDKETGEVLHQKTHFPQPWEFFAQEVMIRVFGKPDGKPEFEEADTPEKLRTLLAEKLSSRPEAVHEYVTPLFVSRAPNRKMSGQGHMETVKSAKRLDEGVSVLRVPLTQLKLKDLEKMVNREREPKLYEALKARLEAHKDDPAKAFAEPFYKYDKAGNRTQQVKAVRVEQVQKTGVWVRNHNGIADNATMVRVDVFEKGDKYYLVPIYSWQVAKGILPDRAVVQGKDEEDWQLIDDSFNFKFSLHPNDLVEVITKKARMFGYFASCHRGTGNINIRIHDLDHKIGKNGILEGIGVKTALSFQKYQIDELGKEIRPCRLKKRPPVR

SEQ ID NO: 355 - protein, 1082 aa, Neisseria meningitidis
  REGION 1..1082: note = Neisseria meningitidis alpha275
MAAFKPNPINYILGLDIGIASVGWAMVEIDEDENPICLIDLGVRVFERAEVPKTGDSLAAARRLARSVRRLTRRRAHRLLRARRLLKREGVLQAADFDENGLIKSLPNTPWQLRAAALDRKLTPLEWSAVLLHLIKHRGYLSQRKNEGETADKELGALLKGVADNAHALQTGDFRTPAELALNKFEKESGHIRNQRGDYSHTFSRKDLQAELILLFEKQKEFGNPHVSGGLKEGIETLLMTQRPALSGDAVQKMLGHCTFEPAEPKAAKNTYTAERFIWLTKLNNLRILEQGSERPLTDTERATLMDEPYRKSKLTYAQARKLLGLEDTAFFKGLRYGKDNAEASTLMEMKAYHAISRALEKEGLKDKKSPLNLSPELQDEIGTAFSLFKTDEDITGRLKDRVQPEILEALLKHISFDKFVQISLKALRRIVPLMEQGKRYDEACAEIYGDHYGKKNTEEKIYLPPIPADEIRNPVVLRALSQARKVINGVVRRYGSPARIHIETAREVGKSFKDRKEIEKRQEENRKDREKAAAKFREYFPNFVGEPKSKDILKLRLYEQQHGKCLYSGKEINLGRLNEKGYVEIDHALPFSRTWDDSFNNKVLVLGSENQNKGNQTPYEYFNGKDNSREWQEFKARVETSRFPRSKKQRILLQKFDEDGFKERNLNDTRYVNRFLCQFVADRMRLTGKGKKRVFASNGQITNLLRGFWGLRKVRAENDRHHALDAVVVACSTVAMQQKITRFVRYKEMNAFDGKTIDKETGEVLHQKTHFPQPWEFFAQEVMIRVFGKPDGKPEFEEADTPEKLRTLLAEKLSSRPEAVHEYVTPLFVSRAPNRKMSGQGHMETVKSAKRLDEGVSVLRVPLTQLKLKDLEKMVNREREPKLYEALKARLEAHKDDPAKAFAEPFYKYDKAGNRTQQVKAVRVEQVQKTGVWVRNHNGIADNATMVRVDVFEKGDKYYLVPIYSWQVAKGILPDRAVVQGKDEEDWQLIDDSFNFKFSLHPNDLVEVITKKARMFGYFASCHRGTGNINIRIHDLDHKIGKNGILEGIGVKTALSFQKYQIDELGKEIRPCRLKKRPPVR

SEQ ID NO: 356 - protein, 1082 aa, Neisseria meningitidis
  REGION 1..1082: note = Neisseria meningitidis ATCC 13091
MAAFKPNPINYILGLDIGIASVGWAMVEIDEEENPIRLIDLGVRVFERAEVPKTGDSLAMARRLARSVRRLTRRRAHRLLRTRRLLKREGVLQAANFDENGLIKSLPNTLWQLRAAALDRKLTPLEWSAVLLHLIKHRGYLSQRKNEGETADKELGALLKGVAGNAHALQTGDFRTPAELALNKFEKESGHIRNQRGDYSHTFSRKDLQAELNLLFEKQKEFGNPHISDGLKEGIETLLMTQRPALSGDAVQKMLGHCTFEPTEPKAAKNTYTTERFIWLTKLNNLRILEQGSERPLTDTERATLMDEPYRKSKLTYAQARKLLELDDIAFFKGLRYGKDNAEASTLMEMKAYHAISRALEKEGLKDKKSPLNLSPELQDEIGTAFSLFKTDEDITGRLKDRIQPEILEALLKHINFDKFVQISLKALRRIVPLMEQGKRYDEACAEIYGDHYGKKNTEEKIDLPPIPADEIHNPVVLRALSQARKVINGVVRRYGSPARIHIETAREVGKSFKDRKEIEKRQEENRKDREKAAAKFREYFPNFVGEPKSKDILKLRLYEQQHGKCLYSGKEINLGRLNEKGYVEIDHALPFSRTWDDSFNNKVLVLGSENQNKGNQTPYEYFNGKDNSREWQEFKARVETSRFPRSKKQRILLQKFDEDGFKERNLNDTRYVNRFLCQFVADRMRLTGKGKKRVFASNGQITNLLRGFWGLRKVRAENDRHHALDAVVVACSTVAMQQKITRFVRYKEMNAFDGKTIDKETGEVLHQKTHFPQPWEFFAQEVMIRVFGKPDGKPEFEEADTPEKLRTLLTEKLSSRPEAVHEYVTPLFVSRAPNRKMSGQGHMETVKSAKRLDEGISVLRVPLTQLKLKDLEKMVNREREPKLYEALKARLEAHKDDPAKAFAEPFYKYDKAGNRTQQVKAMRVEQVQKTGVWVRNHNGIADNATMVRVDVFEKGDKYYLVPIYSWQVAKGILPDRAVVQGKDEEDWQLIDDSFNFKFSLHPNDLVEVITKKARMFGYFASCHRGTGNINIRIHDLDHKIGKNGILEGIGVKTALSFQKYQIDELGKEIRPCRLKKRPPVR

SEQ ID NO: 357 - protein, 1081 aa, Neisseria meningitidis
  REGION 1..1081: note = Neisseria meningitidis N1568
MAAFKPNPINYILGLDIGIASVGWAMVEIDEEENPIRLIDLGVRVFERAEVPKTGDSLAMARRLARSVRRLTRRRAHRLLRARRLLKREGVLQAADFDENGLIKSLPNTPWQLRAAALDRKLTPLEWSAVLLHLIKHRGYLSQRKNEGETADKELGALLKGVADNAHALQTGDFRTPAELALNKFEKECGHIRNQRGDYSHTFSRKDLQAELNLLFEKQKEFGNPHVSGGLKEGIETLLMTQRPALSGDAVQKMLGHCTFEPAEPKAAKNTYTAERFIWLTKLNNLRILEQGSERPLTDTERATLMDEPYRKSKLTYAQARKLLSLEDTAFFKGLRYGKDNAEASTLMEMKAYHTISRALEKEGLKDKKSPLNLSPELQDEIGTAFSLFKTDEDITGRLKDRIQPEILEALLKHISFDKFVQISLKALRRIVPLMEQGKRYDEACAEIYGDHYGKKNTEEKIYLPPIPADEIRNPVVLRALSQARKVINGVVRRYGSPARIHIETAREVGKSFKDRKEIEKRQEENRKDREKAAAKFREYFPNFVGEPKSKDILKLRLYEQQHGKCLYSGKEINLGRLNEKGYVEIDHALPFSRTWDDSFNNKVLVLGSENQNKGNQTPYEYFNGKDNSREWQEFKARVETSRFPRSKKQRILLQKFDEDGFKERNLNDTRYVNRFLCQFVADRMRLTGKGKKRVFASNGQITNLLRGFWGLRKVRAENDRHHALDAVVVACSTVAMQQKITRFVRYKEMNAFDGKTIDKETGEVLHQKTHFPQPWEFFAQEVMIRVFGKPDGKPEFEEADTPEKLRTLLAEKLSSRPEAVHEYVTPLFVSRAPNRKMSGQGHMETVKSAKRLDEGVSVLRVPLTQLKLKDLEKMVNREREPKLYEALKARLEAHKDDPAKAFAEPFYKYDKAGNRTQQVKAVRVEQVQKTGVWVRNHNGIADNATMVRVDVFEKGDKYYLVPIYSWQVAKGILPDRAVVAYADEEDWTVIDESFRFKFVLYSNDLIKVQLKKDSFLGYFSGLDRATGAISLREHDLEKSKGKDGMHRIGVKTALSFQKYQIDEMGKEIRPCRLKKRPPVR

SEQ ID NO: 358 - protein, 1081 aa, Neisseria meningitidis
  REGION 1..1081: note = Neisseria meningitidis NM140
MAAFKPNPINYILGLDIGIASVGWAMVEIDEDENPICLIDLGVRVFERAEVPKTGDSLAAARRLARSVRRLTRRRAHRLLRARRLLKREGVLQAADFDENGLIKSLPNTPWQLRSAALDRKLTPLEWSAVLLHLIKHRGYLSQRKNEGETADKELGALLKGVADNAHALQTGDFRTPAELALNKFEKESGHIRNRRGDYSHTFSRKDLQAELDLLFEKQKEFGNPHISDDLKEGIETLLMTQRPALSGDAVQKMLGHCTFEPTEPKAAKNTYTAERFVWLTKLNNLRILEQGSERPLTDTERATLMDEPYRKSKLTYAQARKLLELDDTAFFKGLRYGKDNAEASTLMEMKAYHAISRALEKEGLKDKKSPLNLSPELQDEIGTAFSLFKTDEDITGRLKDRVQPEILEVLLKHISFDKFVQISLKALRRIVPLMEQGKRYDEACAEIYGDHDGKKNTEEKIYLPPIPADEIRNPVVLRALSQARKVINAVVRRYGSPARIHIETAREVGKSFKDRKEIEKRQEENRKDREKAAAKFREYFPNFVGEPKSKDILKLRLYEQQHGKCLYSGKEINLGRLNEKGYVEIDHALPFSRTWDDSFNNKVLVLGSENQNKGNQTPYEYFNGKDNSREWQEFKARVETSRFPRSKKQRILLQKFDEEGFKERNLNDTRYVNRFLCQFVADHMLLTGKGKRRVFASNGQITNLLRGFWGLRKVRAENNRHHALDAVVVACSTVAMQQKITRFVRYKEMNAFDGKTIDKETGEVLHQKTHFPQPWEFFAQEVMIRVFGKPDGKPEFEEADTPEKLRTLLAEKLSSRPEAVHEYVTPLFVSRAPNRKMSGQGHMETVKSAKRLDEGVSVLRVPLTQLKLKDLEKMVNREREPKLYEALKARLEAHKDDPAKAFAEPFYKYDKAGNRTQQVKAVRVEQVQKTGVWVRNHNGIADNATMVRVDVFEKAGKYYLVPIYSWQVAKGILPDRAVVAYADEEGWTVIDESFRFKFVLYSNDLIKVQLKKDSFLGYFSGLDRATGAISLREHDLEKSKGKDGMHRIGVKTALSFQKYQIDEMGKEIRLCRLKKRPPVR

SEQ ID NO: 359 - protein, 1082 aa, Neisseria meningitidis
  REGION 1..1082: note = Neisseria meningitidis NM220
MAAFKPNPINYILGLDIGIASVGWAMVEIDEEENPIRLIDLGVRVFERAEVPKTGDSLAMARRLARSVRRLTRRRAHRLLRARRLLKREGVLQAADFDENGLIKSLPNTPWQLRAAALDRKLTPLEWSAVLLHLIKHRGYLSQRKNEGETADKELGALLKGVANNAHALQTGDFRTPAELALNKFEKESGHIRNQRGDYSHTFSRKDLQAELILLFEKQKEFGNPHVSGGLKEGIETLLMTQRPALSGDAVQKMLGHCTFEPAEPKAAKNTYTAERFIWLTKLNNLRILEQGSERPLTDTERATLMDEPYRKSKLTYAQARKLLGLEDTAFFKGLRYGKDNAEASTLMEMKAYHAISRALEKEGLKDKKSPLNLSSELQDEIGTAFSLFKTDEDITGRLKDRVQPEILEALLKHISFDKFVQISLKALRRIVPLMEQGKRYDEACAEIYGDHYGKKNTEEKIYLPPIPADEIRNPVVLRALSQARKVINGVVRRYGSPARIHIETAREVGKSFKDRKEIEKRQEENRKDREKAAAKFREYFPNFVGEPKSKDILKLRLYEQQHGKCLYSGKEINLVRLNEKGYVEIDHALPFSRTWDDSFNNKVLVLGSENQNKGNQTPYEYFNGKDNSREWQEFKARVETSRFPRSKKQRILLQKFDEDGFKECNLNDTRYVNRFLCQFVADHILLTGKGKRRVFASNGQITNLLRGFWGLRKVRAENDRHHALDAVVVACSTVAMQQKITRFVRYKEMNAFDGKTIDKETGKVLHQKTHFPQPWEFFAQEVMIRVFGKPDGKPEFEEADTPEKLRTLLAEKLSSRPEAVHEYVTPLFVSRAPNRKMSGAHKDTLRSAKRFVKHNEKISVKRVWLTEIKLADLENMVNYKNGREIELYEALKARLEAYGGNAKQAFDPKDNPFYKKGGQLVKAVRVEKTQESGVLLNKKNAYTIADNGDMVRVDVFCKVDKKGKNQYFIVPIYAWQVAENILPDIDCKGYRIDDSYTFCFSLHKYDLIAFQKDEKSKVEFAYYINCDSSNGRFYLAWHDKGSKEQQFRISTQNLVLIQKYQVNELGKEIRPCRLKKRPPVR

SEQ ID NO: 360 - protein, 1082 aa, Neisseria meningitidis
  REGION 1..1082: note = Neisseria meningitidis NM233
MAAFKPNPINYILGLDIGIASVGWAMVEIDEEENPIRLIDLGVRVFERAEVPKTGDSLAMARRLARSVRRLTRRRAHRLLRARRLLKREGVLQAADFDENGLIKSLPNTPWQLRAAALDRKLTPLEWSAVLLHLIKHRGYLSQRKNEGETADKELGALLKGVANNAHALQTGDFRTPAELALNKFEKESGHIRNQRGDYSHTFSRKDLQAELILLFEKQKEFGNPHVSGGLKEGIETLLMTQRPALSGDAVQKMLGHCTFEPAEPKAAKNTYTAERFIWLTKLNNLRILEQGSERPLTDTERATLMDEPYRKSKLTYAQARKLLGLEDTAFFKGLRYGKDNAEASTLMEMKAYHAISRALEKEGLKDKKSPLNLSSELQDEIGTAFSLFKTDEDITGRLKDRVQPEILEALLKHISFDKFVQISLKALRRIVPLMEQGKRYDEACAEIYGDHYGKKNTEEKIYLPPIPADKIRNPVVLRALSQARKVINGVVRRYGSPARIHIETAREVGKSFKDRKEIEKRQEENRKDREKAAAKFREYFPNFVGEPKSKDILKLRLYEQQHGKCLYSGKEINLVRLNEKGYVEIDHALPFSRTWDDSFNNKVLVLGSENQNKGNQTPYEYFNGKDNSREWQEFKARVETSRFPRSKKQRILLQKFDEDGFKECNLNDTRYVNRFLCQFVADHILLTGKGKRRVFASNGQITNLLRGFWGLRKVRAENDRHHALDAVVVACSTVAMQQKITRFVRYKEMNAFDGKTIDKETGKVLHQKTHFPQPWEFFAQEVMIRVFGKPDGKPEFEEADTPEKLRTLLAEKLSSRPEAVHEYVTPLFVSRAPNRKMSGAHKDTLRSAKRFVKHNEKISVKRVWLTEIKLADLENMVNYKNGREIELYEALKARLEAYGGNAKQAFDPKDNPFYKKGGQLVKAVRVEKTQESGVLLNKKNAYTIADNGDMVRVDVFCKVDKKGKNQYFIVPIYAWQVAENILPDIDCKGYRIDDSYTFCFSLHKYDLIAFQKDEKSKVEFAYYINCDSSNGRFYLAWHDKGSKEQQFRISTQNLVLIQKYQVNELGKEIRPCRLKKRPPVR

SEQ ID NO: 361 - protein, 1082 aa, Neisseria meningitidis
MAAFKPNPINYILGLDIGIASVGWAMVEIDEDENPICLIDLGVRVFERAEVPKTGDSLAMARRLARSVRRLTRRRAHRLLRARRLLKREGVLQAADFDENGLIKSLPNTPWQLRAAALDRKLTPLEWSAVLLHLIKHRGYLSQRKNEGETADKELGALLKGVADNAHALQTGDFRTPAELALNKFEKESGHIRNQRGDYSHTFSRKDLQAELILLFEKQKEFGNPHVSGGLKEGIETLLMTQRPALSSDAVQKMLGHCTFEPAEPKAAKNTYTAERFIWLTKLNNLRILEQGSERPLTDTERATLMDEPYRKSKLTYAQARKLLGLEDTAFFKGLRYGKDNAEASTLMEMKAYHAISRALEKEGLKDKKSPLNLSPELQDEIGTAFSLFKTDEDITGRLKDRIQPEILEALLKHISFDKFVQISLKALRRIVPLMEQGKRYDEACAEIYGDHYGKKNTEEKIYLPPIPADEIRNPVVLRALSQARKVINGVVRRYGSPARIHIETAREVGKSFKDRKEIEKRQEENRKDREKAAAKFREYFPNFVGEPKSKDILKLRLYEQQHGKCLYSGKEINLGRLNEKGYVEIDHALPFSRTWDDSFNNKVLVLGSENQNKGNQTPYEYFNGKDNSREWQEFKARVETSRFPRSKKQRILLQKFDEDGFKERNLNDTRYVNRFLCQFVADRMRLTGKGKKRVFASNGQITNLLRGFWGLRKVRAENDRHHALDAVVVACSTVAMQQKITRFVRYKEMNAFDGKTIDKETGEVLHQKTHFPQPWEFFAQEVMIRVFGKPDGKPEFEEADTPEKLRTLLAEKLSSRPEAVHEYVTPLFVSRAPNRKMSGQGHMETVKSAKRLDEGVSVLRVPLTQLKLKDLEKMVNREREPKLYEALKARLEAHKDDPAKAFAEPFYKYDKAGNRTQQVKAVRVEQVQKTGVWVRNHNGIADNATMVRVDVFEKGDKYYLVPIYSWQVAKGILPDRAVVQGKDEEDWQLIDDSFNFKFSLHPNDLVEVITKKARMFGYFASCHRGTGNINIRIHDLDHKIGKNGILEGIGVKTALSFQKYQIDELGKEIRPCRLKKRPPVR

SEQ ID NO: 362 - protein, 1082 aa, Neisseria meningitidis
MAAFKPNPINYILGLDIGIASVGWAMVEIDEDENPICLIDLGVRVFERAEVPKTGDSLAMARRLARSVRRLTRRRAHRLLRARRLLKREGVLQAADFDENGLIKSLPNTPWQLRAAALDRKLTPLEWSAVLLHLIKHRGYLSQRKNEGETADKELGALLKGVADNAHALQTGDFRTPAELALNKFEKESGHIRNQRGDYSHTFSRKDLQAELILLFEKQKEFGNPHVSGGLKEGIETLLMTQRPALSGDAVQKMLGHCTFEPAEPKAAKNTYTAERFIWLTKLNNLRILEQGSERPLTDTERATLMDEPYRKSKLTYAQARKLLGLEDTAFFKGLRYGKDNAEASTLMEMKAYHAISRALEKEGLKDKKSPLNLSPELQDEIGTAFSLFKTDEDITGRLKDRIQPEILEALLKHISFDKFVQISLKALRRIVPLMEQGKRYDEACAEIYGDHYGKKNTEEKIYLPPIPADEIRNPVVLRALSQARKVINGVVRRYGSPARIHIETAREVGKSFKDRKEIEKRQEENRKDREKAAAKFREYFPNFVGEPKSKDILKLRLYEQQHGKCLYSGKEINLGRLNEKGYVEIDHALPFSRTWDDSFNNKVLVLGSENQNKGNQTPYEYFNGKDNSREWQEFKARVETSRFPRSKKQRILLQKFDEDGFKERNLNDTRYVNRFLCQFVADRMRLTGKGKKRVFASNGQITNLLRGFWGLRKVRAENDRHHALDAVVVACSTVAMQQKITRFVRYKEMNAFDGKTIDKETGEVLHQKTHFPQPWEFFAQEVMIRVFGKPDGKPEFEEADTPEKLRTLLAEKLSSRPEAVHEYVTPLFVSRAPNRKMSGQGHMETVKSAKRLDEGVSVLRVPLTQLKLKDLEKMVNREREPKLYEALKARLEAHKDDPAKAFAEPFYKYDKAGNRTQQVKAVRVEQVQKTGVWVRNHNGIADNATMVRVDVFEKGDKYYLVPIYSWQVAKGILPDRAVVQGKDEEDWQLIDDSFNFKFSLHPNDLVEVITKKARMFGYFASCHRGTGNINIRIHDLDHKIGKNGILEGIGVKTALSFQKYQIDELGKEIRPCRLKKRPPVR

SEQ ID NO: 363 - protein, 1089 aa, Neisseria sp.
  REGION 1..1089: note = Neisseria sp. oral taxon 014 str. F0314
MTAFKPNPLNYILGLDIGIASVGWAMVEIDDKENPVRLIDLGVRVFERAEMPKTGDSLAAARRLARSVRRLTRRRAHRLLRARRLLKHEGVLKPEDFDENGLVKPLPYIPKQPRNTPWQLRAAALDRKLTPLEWAAVLLHLVKHRGYLSQRKNEGETDDKELGALLKGVADNTHALQAGNFRTPAELALNKFEKESGHIRNQRGDYSHTFSRKDLQAELVLLFEKQKEFGNPYVSDDLKNGIENLLMTQRPALSGDAIQKMLGHCTFEPAEPKAAKNTYTAERFIWLTKLNNLRILNQGNERPLTDAERTTLMDEPYKKSKLTYAQARKLLDLDDTAFFKGLRYGKDNAESATLMEMKAYHAISRALEKEGLKDKKSPLSLSPELQDEIGTAFSLFKTDEEITGRLKGCLQPEILDALLKHISFDKFVQISLKALRRIVPLMEQGKRYDEACAEIYGDHHGRRNSEETLYLPPIPADEIRNPVVLRALSQARKVINGVGRRYGSPARIHIETAREVGKSFKDRKEIEKRQEENRKDREKAAAEFQEYFPNFVGEPKSKDILKLRLYRQQNCKCLYSGKEINLGRLNEKGYVEIDHALPFSRTWDDSFNNKVLVLGSENQNKGNRTPYEYLNGKDNSREWQEFKARVETSRFPHSKKQRILLQKFDEEGFKERNLNDTRYVNRFLCKFVADHMQLTGKGKRRVFASNGQITNLLRGFWGLRKVRAENDRHHALDAVVVACSTVAMQQRITRFVRYKEMNAFDGKTVDKETGEVLHQKTHFPQPWEFFAQEVMIRVFGKPDGKPELEEADTPEKLRALLAEKLSSRPEAVHEYVAPLFVSRAPNRKMSGQGHMETIKSPKRLDEGISVVRVPLTQLKLKDLEKMVNREREPKLYEALKARLEAHKDDPAKAFAEPFYKQDKAGNRTQQVKAVRIEQVQKTGVWVRNQNGIADNATMVRVDVFEKGGKYYLVPIYSWQVAKGILPDKAIIAFKDEEEWQLIDDSFNFKFPLHPNDLVEVITKKARIFGYFASCHRGTGNINIRIHDLDNKVGKNGILEGIGVKTALSFQKYQIDELGKEIRPCRLKKRPPVR

SEQ ID NO: 364 - protein, 1097 aa, Neisseria wadsworthii
  REGION 1..1097: note = Neisseria wadsworthii 9715
MKKQPQRYILGLDLGIASVGWALILVDGAENPVGLLDCGVRTFERAEVPKTGDSLALARRQARSVRRLIRRRAHRLLRLRRLLKREGILSAADFNSDGLPNLPIDAWQLRVAGLERKLTNQEWAAVLLHLVKHRGYLSQRKSETQTENKELGRLLAGVAENSKLLSESSEQYRTPAELAVKLFAEQSGHLRNKGGEYTHTFNRLDLQKELHLLFERQYALGNPFASAELQSKVDELLMTQRSALQGEAVLKMLGKCTFEPSEYKAAKNTYSAERFIWLTKLNNLRILYNGEERALDEGDRKKLLDEPYKKAKLTYKQVRSILNLPESAVFKGLRYGKDSDGLKAENGTLMEMKAYHKIRTILDKAGLKGEWENRIRNPEILDKIGTAFSLYKTDEDIQAALADLRLPENVLDALLAGLNFDKFIQLSLKALRNILPLMERGIRYDEACKEVYGDHRALAESKNQVLLPPIPADEIRNPVVLRTLTQARKVINAIIRRYGSPQRVHIETARELGKSKQERDKIDRKNKENQNDRNRLASDIRKHFNFEPTPKDILKLRLYEQQHGKCLYSDLREEKGECLYTGNVIELHRLFEDGYVEIDHALPLSRTWDNSLNNKVLVLKSSNQNKGNKTPYEWLDGANNSRRWREFQARVQGCHFPYVKKQRIQTAKLDSKAEQGFLERNLNDTRYISKFMCQFITANLRLAETSNALMEEVAGENPYWKERKRQRVFAPSGSIIALLRGLWGLKKVREDNDRHHALDAIVVACSTVSMQQKITKAMQRRETLETVDSETGEVKTRIPQPWDFFRQEVMIRVFSDSPREELAEKLNSRPEALHDFVSPLFVSRAPNRKMTGQGHLETVKSAKRLSENISVVRKPLTALKLKDIENIVGYPDREPALYQALRERLLAHKDDPVKAFADKPFYKPAKDGGQGSLVKAVRIIENTKHGLKIRNGITDTNGDMVRTDVYQKTDKKGKRQYFIVPVYAWQVEKNELPTVDCKGYEIDDNYEFCFSLYKYDLIEIQNPNDINQELRAYYINCDSSDGRFWLAYHDKSAKEQQFRISTQNQPIIKKYQVDTLGKEIRLCKAEKRTALNGKKKK

SEQ ID NO: 365 - protein, 1426 aa, Niabella soli
  REGION 1..1426: note = Niabella soli DSM 19437
MPRKNILGLDLGTTSIGFAKIIEDDDYQCSSVELIGVRVNPLTTDEQTNFEKGKPVSVNADRTLKRGMRRNLDRYQLRRDYLIEILRTHHIITADTKLAEDGKNTTHTTYALRALAATAEIPLEAFVRVLLAINKKRGYKSSRKAKNEDEGQLIDGMAIARRLYEESLTPGQFSYQLLKEGKKYLPDFYRSDLNTELNKVWNFQKQFYPEILTDEFKRHLEGKGQRATAVAFWGQHGFSMAENKGSREEKKLHAYKWRSEAAHKQLTKEEVAFVITEINNDLNKSSGYLGAISDRSKELFFNKQTVGQYLHQQLKENPHTRLKGQVFYRQDYLDEFETIWEMQAKFYSALTLELKEEVRDVVIFYQRKLKSQMGLISLCEFESKEIEIEKNGEKAKKRIGLRVAPKSSPLFQEFKIWQVLNNLEFRNKKTKEVFVPEMAAKQQLFDELNIKGNLLASEAIKILGYKTKDWEANYHTLEGNRTNKSLYDAWLKILELEGYDENLLKLSGSDDIDVSKIEKPALEIRQMVLAVFEVLGISGAILDFDAEADGKAFEQQPAYQLWHLLYSAEDDGKKYSQEDIFTYGHDNIGLKKKLCEKFGFRPEHTKILVNVVFSDDYGNLSSKAMRRIYPFIKELTYDKACAEAGYRHSAASLTKEEIAARPLQNRLDLLKKNELRSPVVEKILNQMVNVVNTLVDDENQNRKARGLSEDFHFDEIRIELARELKKNAKERAEMTTNINTAKQSHEKIIRILQTEFGVPNPSRNDIVRYKLYEELKNNGYKDLYTNTYISRDILFSKQIDVDHIIPQMSLFDDSFSNKTVVFRKDNQDKGNKTAYDYILGKYGEQALEEYISRITSLFELGKKNKEEGIGKAKFQKLQKRLVDIGDGFIERDLRESQYIAKKANNMLYAICRSVVSTSGEITARLREDWDLVNVMQEINLPKFRALGLTEMVEKKDGAQKERITDWTKRNDHRHHAMDALAIAFTRHSHIQYLNHLNARKDEANKWHPVVSKIEEKETVLIYDDLGNRKRKFKAPMPNFREVVKEHLENVLISHKAKNKVVTKNKNKIKTVRGEKVKTELTPRGQLHKETIYGRYRYYESKEEKIGPKFDAEMIGMVTNPQYKKLLLERLAANGNDPKKAFWGKNALNKNPLYVDEARQELLPEKILLRWLNDDYSIRKDVTPENLKDIKTIEKILDKGVKKILLKRLADFGNDPKKAFSDLDKNPIWQNEAKRIAIKRVTISGIKNAAPLHHKKDHLGNDILDEKGKQIPSSFVSTGNNHHVAIYRDAEGNLQERVVSLFDAVQLVNGGEPVIDKEYNKGIGWQFLFTMKQNEMFVFPDEKTGFNPREVDLLSSGNRKLISPNLFRVQKLASKNYFFRHHLETSVEEKKELKNIAYKPQLGLNALSNIVKVRINHIGEIVSVGEY

SEQ ID NO: 366 - protein, 1132 aa, Nitratifractor salsuginis
MKKILGVDLGITSFGYAILQETGKDLYRCLDNSVVMRNNPYDEKSGESSQSIRSTQKSMRRLIEKRKKRIRCVAQTMERYGILDYSETMKINDPKNNPIKNRWQLRAVDAWKRPLSPQELFAIFAHMAKHRGYKSIATEDLIYELELELGLNDPEKESEKKADERRQVYNALRHLEELRKKYGGETIAQTIHRAVEAGDLRSYRNHDDYEKMIRREDIEEEIEKVLLRQAELGALGLPEEQVSELIDELKACITDQEMPTIDESLFGKCTFYKDELAAPAYSYLYDLYRLYKKLADLNIDGYEVTQEDREKVIEWVEKKIAQGKNLKKITHKDLRKILGLAPEQKIFGVEDERIVKGKKEPRTFVPFFFLADIAKFKELFASIQKHPDALQIFRELAEILQRSKTPQEALDRLRALMAGKGIDTDDRELLELFKNKRSGTRELSHRYILEALPLFLEGYDEKEVQRILGFDDREDYSRYPKSLRHLHLREGNLFEKEENPINNHAVKSLASWALGLIADLSWRYGPFDEIILETTRDALPEKIRKEIDKAMREREKALDKIIGKYKKEFPSIDKRLARKIQLWERQKGLDLYSGKVINLSQLLDGSADIEHIVPQSLGGLSTDYNTIVTLKSVNAAKGNRLPGDWLAGNPDYRERIGMLSEKGLIDWKKRKNLLAQSLDEIYTENTHSKGIRATSYLEALVAQVLKRYYPFPDPELRKNGIGVRMIPGKVTSKTRSLLGIKSKSRETNFHHAEDALILSTLTRGWQNRLHRMLRDNYGKSEAELKELWKKYMPHIEGLTLADYIDEAFRRFMSKGEESLFYRDMFDTIRSISYWVDKKPLSASSHKETVYSSRHEVPTLRKNILEAFDSLNVIKDRHKLTTEEFMKRYDKEIRQKLWLHRIGNTNDESYRAVEERATQIAQILTRYQLMDAQNDKEIDEKFQQALKELITSPIEVTGKLLRKMRFVYDKLNAMQIDRGLVETDKNMLGIHISKGPNEKLIFRRMDVNNAHELQKERSGILCYLNEMLFIFNKKGLIHYGCLRSYLEKGQGSKYIALFNPRFPANPKAQPSKFTSDSKIKQVGIGSATGIIKAHLDLDGHVRSYEVFGTLPEGSIEWFKEESGYGRVEDDPHH

SEQ ID NO: 367 - protein, 1166 aa, Nitrobacter hamburgensis
MHVEIDFPHFSRGDSHLAMNKNEILRGSSVLYRLGLDLGSNSLGWFVTHLEKRGDRHEPVALGPGGVRIFPDGRDPQSGTSNAVDRRMARGARKRRDRFVERRKELIAALIKYNLLPDDARERRALEVLDPYALRKTALTDTLPAHHVGRALFHLNQRRGFQSNRKTDSKQSEDGAIKQAASRLATDKGNETLGVFFADMHLRKSYEDRQTAIRAELVRLGKDHLTGNARKKIWAKVRKRLFGDEVLPRADAPHGVRARATITGTKASYDYYPTRDMLRDEFNAIWAGQSAHHATITDEARTEIEHIIFYQRPLKPAIVGKCTLDPATRPFKEDPEGYRAPWSHPLAQRFRILSEARNLEIRDTGKGSRRLTKEQSDLVVAALLANREVKFDKLRTLLKLPAEARFNLESDRRAALDGDQTAARLSDKKGFNKAWRGFPPERQIAIVARLEETEDENELIAWLEKECALDGAAAARVANTTLPDGHCRLGLRAIKKIVPIMQDGLDEDGVAGAGYHIAAKRAGYDHAKLPTGEQLGRLPYYGQWLQDAVVGSGDARDQKEKQYGQFPNPTVHIGLGQLRRVVNDLIDKYGPPTEISIEFTRALKLSEQQKAERQREQRRNQDKNKARAEELAKFGRPANPRNLLKMRLWEELAHDPLDRKCVYTGEQISIERLLSDEVDIDHILPVAMTLDDSPANKIICMRYANRHKRKQTPSEAFGSSPTLQGHRYNWDDIAARATGLPRNKRWRFDANAREEFDKRGGFLARQLNETGWLARLAKQYLGAVTDPNQIWVVPGRLTSMLRGKWGLNGLLPSDNYAGVQDKAEEFLASTDDMEFSGVKNRADHRHHAIDGLVTALTDRSLLWKMANAYDEEHEKFVIEPPWPTMRDDLKAALEKMVVSHKPDHGIEGKLHEDSAYGFVKPLDATGLKEEEAGNLVYRKAIESLNENEVDRIRDIQLRTIVRDHVNVEKTKGVALADALRQLQAPSDDYPQFKHGLRHVRILKKEKGDYLVPIANRASGVAYKAYSAGENFCVEVFETAGGKWDGEAVRRFDANKKNAGPKIAHAPQWRDANEGAKLVMRIHKGDLIRLDHEGRARIMVVHRLDAAAGRFKLADHNETGNLDKRHATNNDIDPFRWLMASYNTLKKLAAVPVRVDELGRVWRVMPN

SEQ ID NO: 368 - protein, 1044 aa, Nitrosomonas sp.
  REGION 1..1044: note = Nitrosomonas sp. AL212
MLHKMRYRLALDLGSTSLGWAMVRLNANQQPCAVIKAGVRIFSNGRNPKDGSSLAVTRREARSMRRRRDRLLKRKARMMRTLIEYGFFPANETQRKALENLNPYALRAKGLDEALTPSEFARALFHINQRRGFKSNRKTDKKDSDSGALKTAIKQLHSVLDPQGNDGKPRTVGELLYKRFTDLSKLPKDRTVRARYRQDKIVKDDGKTKIDKYYDLYIDRAMIEQEFDALWKKQSELNPILFTENARADLKDVLLYQRSLKPVKPGRCTFMSEEERAPLALPSTQRFRMYQEVNNLRILREGLKEESLTLQQRDDLINALEKNNRRTFTQIKKLLGVGGSVQFNFEDPKREELKGNTTSAILGKSEHFGEAWFAFNEAKQDAIVLQLIKEENEAKLVRWLQDETGIDEKRAEVIANAGLPEGYGSLCIEALARILPELRRDVVTYDKAVQAAGFEHHSKLNRNEEIPDITFKIESIDRNSGEIKQFHLHKELPYYGEYLQRHVGFGSGKPEDSIEKRYGKIANPTVHIGLNQVRVVVNALIKRYGHPSEIIVEVARDLKQSKDRRDEENKRQAENQKRNERLRKDIADILGISEERVRRDDIEKMILWEELSFDPADRRCPYSGVQVSTVMLLSDEVEVEHILPFSQTLDDSLNNKTVALRQANRIKGNRTPWEAFGTSNISGFDYSGILTRAELMPKAKRYRFAEDGYQRWLKDDAGFLARALNDTRHLSKIAREYMSLICPNTRVIPGQMTAMLRRNFGLNDVLGLNGEKNRNDHRHHAVDACVIAVTDQGLLQRFAAASASARERQLNRLVENMPLPWESYREHVRRAIDGIWVSHRPDHSHEGAMHNDTAYGLRGNGRVSFHKMVEGKREYIEDNLKVIEITDTKAIDRHGLLPTGKPRPYKGYKGDSNYCIEIVRNEKGRWEGEIISTFDAYQLVRKYGIVQLRYPVLSVSGKPLVMRLIRNDFVRLEHEGITRTLRVCKMREDGQVALADVTEANVDARTRTKEICYVFKTGGSLQKAKARRITISPIGELRDPGFKE

SEQ ID NO: 369 - protein, 1498 aa, Odoribacter laneus
  REGION 1..1498: note = Odoribacter laneus YIT 12061
METTLGIDLGTNSIGLALVDQEEHQILYSGVRIFPEGINKDTIGLGEKEESRNATRRAKRQMRRQYFRKKLRKAKLLELLIAYDMCPLKPEDVRRWKNWDKQQKSTVRQFPDTPAFREWLKQNPYELRKQAVTEDVTRPELGRILYQMIQRRGFLSSRKGKEEGKIFTGKDRMVGIDETRKNLQKQTLGAYLYDIAPKNGEKYRFRTERVRARYTLRDMYIREFEIIWQRQAGHLGLAHEQATRKKNIFLEGSATNVRNSKLITHLQAKYGRGHVLIEDTRITVTFQLPLKEVLGGKIEIEEEQLKFKSNESVLFWQRPLRSQKSLLSKCVFEGRNFYDPVHQKWIIAGPTPAPLSHPEFEEFRAYQFINNIIYGKNEHLTAIQREAVFELMCTESKDFNFEKIPKHLKLFEKFNFDDTTKVPACTTISQLRKLFPHPVWEEKREEIWHCFYFYDDNTLLFEKLQKDYALQTNDLEKIKKIRLSESYGNVSLKAIRRINPYLKKGYAYSTAVLLGGIRNSFGKRFEYFKEYEPEIEKAVCRILKEKNAEGEVIRKIKDYLVHNRFGFAKNDRAFQKLYHHSQAITTQAQKERLPETGNLRNPIVQQGLNELRRTVNKLLATCREKYGPSFKFDHIHVEMGRELRSSKTEREKQSRQIRENEKKNEAAKVKLAEYGLKAYRDNIQKYLLYKEIEEKGGTVCCPYTGKTLNISHTLGSDNSVQIEHIIPYSISLDDSLANKTLCDATFNREKGELTPYDFYQKDPSPEKWGASSWEEIEDRAFRLLPYAKAQRFIRRKPQESNEFISRQLNDTRYISKKAVEYLSAICSDVKAFPGQLTAELRHLWGLNNILQSAPDITFPLPVSATENHREYYVITNEQNEVIRLFPKQGETPRTEKGELLLTGEVERKVFRCKGMQEFQTDVSDGKYWRRIKLSSSVTWSPLFAPKPISADGQIVLKGRIEKGVFVCNQLKQKLKTGLPDGSYWISLPVISQTFKEGESVNNSKLTSQQVQLFGRVREGIFRCHNYQCPASGADGNFWCTLDTDTAQPAFTPIKNAPPGVGGGQIILTGDVDDKGIFHADDDLHYELPASLPKGKYYGIFTVESCDPTLIPIELSAPKTSKGENLIEGNIWVDEHTGEVRFDPKKNREDQRHHAIDAIVIALSSQSLFQRLSTYNARRENKKRGLDSTEHFPSPWPGFAQDVRQSVVPLLVSYKQNPKTLCKISKTLYKDGKKIHSCGNAVRGQLHKETVYGQRTAPGATEKSYHIRKDIRELKTSKHIGKVVDITIRQMLLKHLQENYHIDITQEFNIPSNAFFKEGVYRIFLPNKHGEPVPIKKIRMKEELGNAERLKDNINQYVNPRNNHHVMIYQDADGNLKEEIVSFWSVIERQNQGQPIYQLPREGRNIVSILQINDTFLIGLKEEEPEVYRNDLSTLSKHLYRVQKLSGMYYTFRHHLASTLNNEREEFRIQSLEAWKRANPVKVQIDEIGRITFLNGPLC

SEQ ID NO: 370 - protein, 1389 aa, Oenococcus kitaharae
  REGION 1..1389: note = Oenococcus kitaharae DSM 17330
MARDYSVGLDIGTSSVGWAAIDNKYHLIRAKSKNLIGVRLFDSAVTAEKRRGYRTTRRRLSRRHWRLRLLNDIFAGPLTDFGDENFLARLKYSWVHPQDQSNQAHFAAGLLFDSKEQDKDFYRKYPTIYHLRLALMNDDQKHDLREVYLAIHHLVKYRGHFLIEGDVKADSAFDVHTFADAIQRYAESNNSDENLLGKIDEKKLSAALTDKHGSKSQRAETAETAFDILDLQSKKQIQAILKSVVGNQANLMAIFGLDSSAISKDEQKNYKFSFDDADIDEKIADSEALLSDTEFEFLCDLKAAFDGLTLKMLLGDDKTVSAAMVRRFNEHQKDWEYIKSHIRNAKNAGNGLYEKSKKFDGINAAYLALQSDNEDDRKKAKKIFQDEISSADIPDDVKADFLKKIDDDQFLPIQRTKNNGTIPHQLHRNELEQIIEKQGIYYPFLKDTYQENSHELNKITALINFRVPYYVGPLVEEEQKIADDGKNIPDPTNHWMVRKSNDTITPWNLSQVVDLDKSGRRFIERLTGTDTYLIGEPTLPKNSLLYQKFDVLQELNNIRVSGRRLDIRAKQDAFEHLFKVQKTVSATNLKDFLVQAGYISEDTQIEGLADVNGKNFNNALTTYNYLVSVLGREFVENPSNEELLEEITELQTVFEDKKVLRRQLDQLDGLSDHNREKLSRKHYTGWGRISKKLLTTKIVQNADKIDNQTFDVPRMNQSIIDTLYNTKMNLMEIINNAEDDFGVRAWIDKQNTTDGDEQDVYSLIDELAGPKEIKRGIVQSFRILDDITKAVGYAPKRVYLEFARKTQESHLTNSRKNQLSTLLKNAGLSELVTQVSQYDAAALQNDRLYLYFLQQGKDMYSGEKLNLDNLSNYDIDHIIPQAYTKDNSLDNRVLVSNITNRRKSDSSNYLPALIDKMRPFWSVLSKQGLLSKHKFANLTRTRDFDDMEKERFIARSLVETRQIIKNVASLIDSHFGGETKAVAIRSSLTADMRRYVDIPKNRDINDYHHAFDALLFSTVGQYTENSGLMKKGQLSDSAGNQYNRYIKEWIHAARLNAQSQRVNPFGFVVGSMRNAAPGKLNPETGEITPEENADWSIADLDYLHKVMNFRKITVTRRLKDQKGQLYDESRYPSVLHDAKSKASINFDKHKPVDLYGGFSSAKPAYAALIKFKNKFRLVNVLRQWTYSDKNSEDYILEQIRGKYPKAEMVLSHIPYGQLVKKDGALVTISSATELHNFEQLWLPLADYKLINTLLKTKEDNLVDILHNRLDLPEMTIESAFYKAFDSILSFAFNRYALHQNALVKLQAHRDDFNALNYEDKQQTLERILDALHASPASSDLKKINLSSGFGRLFSPSHFTLADTDEFIFQSVTGLFSTQKTVAQLYQETK

SEQ ID NO: 371 - protein, 1389 aa, Oenococcus kitaharae; identical to SEQ ID NO: 370
  REGION 1..1389: note = Oenococcus kitaharae DSM 17330

SEQ ID NO: 372 - protein, 1399 aa, Olsenella uli
MNLRNTTDEYNIGLDMGTNSVGWAVTDKAGAIAHFKGKPTLGSRLFDAAQTAAGARIHRSQRRRYVRRRWRLDLLQSLFQDEVSKVDSEFFCRLRQSRLYVGDREKGHADYTWPIFNDSDFNEVDYYKRFPTIYHLRKWLMETDEKADIRLIYLATHNIVKHRGNFLRENNKSLSSRDANPAQAVKSLRLALNDWCSERDYECAWKGEEDDGAIDEAILNVLADGEKGRSDQAKEIAKLTGVDCGDAKQSKQCNEAIAKAIVGLKVEMKNIFGEFPAEKTSYIYLSSDEDVEAVRESCPDDSGELFQALCKLYSAYILQELLSYADPSGQTISANMVAKYKQYGRDLRLLKELTRTYAPQKYDLFFRGETYAGSSDYVVDEARGYTRYNLGTTKANYDDFQKSVKELFKGTDALQDERYQEMMVAFGEQKFLRRLKTSDNGSIYYQLHLEELHTILENQGKHYPFLLSEEDKIESLVSFRIPYYVGPLTRKNAAIGHDGKERFAWSSRKDGMEHAVITPWNWEEIIDRDKSAEDFIMRMTGDCTYLQGEPVLPKCSLLYEEFCALNEFNGAHWTVDGDDERRFDAAQRERIMCDLFRRTRSVTYNKVSDWLERKYNFTGARVRGGQGEHGFESKLGSYIFFCKDVFKTDGLDEADYTMIEQIILWSTLFEDRDILKRKIEEAYGGDRLTSEQIKVICKKRFTGWGRLSKRLLTDIKVNTDTGRKSIMDVLREGNPNNGQRSRTMVFMEVLRDEDLGFQKAIDGLNRDYFREHNNGLMDVNDLPGSPAIRRSINQAVRIVDEIASIARKEPTNIFIEVTREEDDPRKKGKRTKRRYDAIKSALEKFKKDDPSLWKELCEKAPGDMDERLSLYFMQRGKCMYSGRPIKIEELHTGKYEVDHIIPRSYIKDDSFENKVLVYREENQHKTDALLIDSSIRQKMGGYWRMLHDAKLVGDKKFRNLFRNHIDDKAMKGFVARQIVETSQMVKLVQTLFEARYPNTRIVPVKAGISHDLREAAGLVKCREANDFHHAHDAFLACRIGLFIQKRHPSVYDNPIGLARIMRDYARMQAREYKKSHCLAHTQGFIVNSFLSSGFDEETGEIFKDDWDAKAEVEGIRRVLNCRQCFISRMPVEGDTRYGGRYWGETIYSPKGKHKHEIPLKQGLDPNLYGGYSDLLYSYFLIYEASDVSSGERVLRFIGIPTSIAARMANQKRLEEYVSRLALQENLEHVRMVRKIMKKQLIEVDNCRLLVTAADAVTNATELAFSLDEMKIISTCAKCINGADPSAIDKIGNAQDSFFDNLKRRGSDRCALLFSQLKLDKLSQNFYMISSDDKSKILISILDRIRAKSNSVDLSLVGGAKHAAQMKFDFNAKLNNPASSFVLIDQSVTGMFERRTRIGL

SEQ ID NO: 373 - protein, 1535 aa, Ornithobacterium rhinotracheale
MNTILGLDLGTNSIGWALIKVLNDKTRLPLEIIDLGVVVIPTDQRTLDKFSKGESISKTAERTKQKGVRKLYERKKLRRERLHRVLNILGFLPEHYSKKIDFKKHLGQFFGNSQPKISYVENDHGKHEFIFMDSYREMLKEFSKHNIKNVPYDWTIYYLRKKALSQKISKEELAWVILNFNKKRGYYQFRDDNADENKENKIEKYYALKVTNVKKEDAQNYTITLENGWIYKNKSKISLLDWVGSTKEFISTEKFDNKGNIIKKKNGEDDRTLKLVDSEKDWIAIKKSTEDRIENYGKTVGTYLYEHLLKDPNQKLNGELINIIDRKFYKNELKQILEKQKEFHPELLNEDLFQKSIIELYPKNSTRQKELKNKDLCYLLIDDVIYYQRDLKKKNSTINKCSFESREYYLNGEKQIQKINCIAKSKPLYQEFRTLQFIKNLKVYEIIDGLEKDITSKLLPDFETKEHFFEWLNDKEKIDQLQLLSYKCFDLHDNVKNDLIAKGIKRPTEKAIRTELLEKYRWNYSKDNDRNFLLNETRFKILKYLKKVDKKLTLTNEQIESLWLLLYSAKDERELKNGLQKFSEKNKLPKKFSDIFISFPPFKKEYGAYSEKALKKLLSLVRFGKYWSFNKIDNNIQNKIMNILNGEVDDSISDRVREKTILLQDKNDFQDLPLWLASYVAYNRFSEVSEIKYWDSPDKIEFLKQHSIGNPIVEKIINETLKLIKDIWVIHGKSCKNFFSEIHIELSREIKSSSKKRAQITNNNTKNQKLNNLIKSLLIEMASDTKYENVTPYSPSQQEILKIYDEGIYSKEENSEKIKEINKIRNNNKISKSDITKYKLWLEQGYISPYTGKIIPLTKLFTAKYQKEHIIPQTKFFDDSFNNKVICEAEVNKLKDNSLAMNFIKAKGGKAVKLSDGETVTILNQEEYKQLVRTSFKKNSIKLRNLLLEEIPDTFTKRQLNDTKYISKLVLSLLSNIVREKGELESTAKRIVSTNGQITSILRNDWGLNNIWNKLITPRFERLNNINKNKIYGNWENKKGKNVFQINYLNDNLSTLNTKRIDHRHHALDALIVACTTRNHINFLNNQYAKSRNQRHDLRAKLKRRETITTEGSKKQVFKDFIKPWESFTQDALKKLETTIVNFKVNKRIINKTINWYKKWEKQKDGTYKKIQKKQTKGDAWAIRKPLHIDTIYGIVCKKLPLKSALENYKNIIDENLKHKIKELKEVNKFDNNQIINFFKECNFIFEDNNIQKVEVYDFKDNRDKTILSSSRQLIDESFTPKKIGKVLDPTIRNILLKHLNSTKYNNKFDSDGNPIKPEKLAFSPEGLKDLNKNIKHLNNNKEHQPIKRVKLFETLGNKIKVGYTQQKNKKFAETATGTNLFLGIYSDNNKRDFKTIPLILAIQREKEGLNPCPDTDEKGNQLLFSLSPNELVFVPNNEERKNPNLVDFENLSKDQIDRIYKFVSCTGSEAYFVPSRTAKPIIENENGTNNKSQRIIEFNEKTSIKNEKNEPVLIKTICWKIEVNRLGKIIKVIK

SEQ ID NO: 374 - protein, 1443 aa, Parabacteroides johnsonii
  REGION 1..1443: note = Parabacteroides johnsonii DSM 18315
MIKLLYLEKLKQYTMKKILGLDLGTSSIGWALVNEAENSDEVSSIIKLGVRVNPLTVDEMQNFEKGKSITTNADRTLKRSMRRNLQRYKLRRDALIELLKKVGFITDKTILSEQGNRTTFETYRLRAKAAEEEISLKELARVLLMINKKRGYKSSRKAKGEEEGALIDGMEIAKKLYDEDLTPGQLCLQLLESGKKFFPDFYRSDLQEEFNKIWDFQKQFNLFSFCDVAKEEVKGKNKSQTWAILAKYFVETKKVNVWNEHEAQTENREEVYKLVGLKRTVKGEELKKENYRWRVQALTEQLDLEKIAVVLQEINGQISASSGYLGAISDRSKVLYFNRQTVGQYQMAELNKNPNMSLRNMVFYRQDYLDEFNVIWEKQAEFHKELTPELKKEIRDIIIFYQRRLKSQKGLISFCEFENREVVVEKEGKKQTKIIGCKVIPRSHPLFQEFKIWQTLNNIEVFVGEKKGKRKKSNVSSDLFGDTEDALITEGRRFLYQEEKKILAKELSIKKGLTKAEILRLLFENPQELDINFKQIDGNQTGFALFSAYSNMIEKYGYEPLDFKKPAEDLISQLKTVFTDLGWNTDLLFIDLDKENKEWEKQPYFRLWHLLYSFEGDNTPTGNGKLIEKIMQLCGIEKEYAIELANVSLQDDYGSLSAKAIKKILLYLKEGNQYDMACEYAGYRHSKSSLTKEEIENKVLKDKLEILPKNSLRNPVVEKILNQMVNVINTVMEVYGRPDEIRVELARELKKSAKEREELTKAVAKNTREHEEIRKVLQSEFGMINVSRNDIIRYKLYEELKDNGYKTLYSNQYIPREKLFSKEIDIEHIIPQSRLFDDSLSNKTLEYKSINIEKGNKTAYDFVKEKYGEEGLQQYLNRCENLCKDKKAKLRKLKMELNEIPDGFIDRDLRNTQYIAKKALSMLTEICRRVVATTGSITDKLREDWQLVDVMKELNLPKYEALGLVEVYEDKDGRKIKRIKDWTKRNDHRHHAMDALTVAFTKDVFIQYFNNKNAAWESDSKEHTNIVGIKTRYFESGKAVPPIPLGQFRVEAKCHLENLLVSIKAKNKVVTTNVNCIKKKGGTYKNTQQTPRGQLHLETIYGSHNQYVTKIEKVNASFDAVKIATVSKQDYRNALLKRLEVFGNDPKKAFTGKNSLEKNPIYLDRAQTIQVPDKVQTVELETAYTIRKPVDPTLNVDKVVDKKIRLILEQRLKEYGGDAKKAFVNLDENPIWLNEEKGISIKRVTIRGISKAQALHDKKDKDGNFILDETGKRIPVDFVNTGNNHHVAIYRKPVLDKKGQVIFDDEGNPMYELDEDVVPFFEAVTRANLGIPIIDKDYKKSEGWQFLFSMKQNEYFVFPNEKTGFNPKEVDLLDPDNYAMISPNLFRVQKIGLNDYTFRHHLETTIQNDLKFITWIRCGKSGIKDIVKVRINHIGQIVSVGEY

SEQ ID NO: 375 - protein, 1424 aa, Parabacteroides sp.
  REGION 1..1424: note = Parabacteroides sp. D13
MKRILGLDLGTNSIGWALVNEAETDEEVSSIIRLGVRVNPLTVDETQNFEKGKSITTNAERTLKRSMRRNLQRYKLRRDALVEFLKELGFITDETILSEQGNRTTFETCRLRAKAAEEEISLEELSRVLLMINKKRGYKSSRKVKKEEDGVLIDGMEIAKKLYEEDLTPGQLCSQLLESGKKVLPDFYRSDLQEELDRIWSVQKQFHPDVFCDAAKEEIKGKNRSQTWAILANYFVWKEEVVGWNDREAKNETIEKECKLVGLKRTTKGYELKKENYRWRAQALTEQLGLEEIAVVLQEINGQINASSGYLGAISDRSKVLYFNHQTVGQYQMAELDKNPHASLRNMVFYRQDYLDEFDRIWEKQAEFHKELTAELKKEIRDMIIFYQRRLKSQKGLISFCEFERLEIVVEKDGKKQTKVIGCKVIPRSHPLFQEFKVWQTLNDIKVLGREKKRNALSASESRALYPEEKEILARELAIKENMKKADVLKLLFENPQELDLNFKQIDGNRTGFSLFSAYSKMIEKYGYEPLDFKKPADEIIGQLRTIFTDLGWNTNLFTIDLTKEGKELEMQPYFRLWHLLYSFEGDNTSTGNGKLIEKIMQLCGVEKEYAVELASLSFQDDYGSLSAKAIKRILPYLKEGNLYDVACEYAGYRHSKSSLTKEEIENKVLKGKLEVLPKNSLRNPVVEKILSQMVNVINTIIDTYGKPDEIRVELARELKKSAKEREELTKAIAKSTREHEEIRKLLQDEFGMMNVSRNDIIRYKLYEELKDNGYKTLYSNQYIPKEKIFSKEIDIEHIIPQSRLFDDSLSNKTLEYKAINIEKGNKTAYDFVKEKYGEEGLQQYINRCESLFNDKKAKLRKLKMEQKDIPDGFIDRDLRNTQYIAKKALAMLNEICRRVVATTGSITDQLREDWQLVDVMKELNLPKYEALGFVETYEDKDGRKIKRIKDWTKRNDHRHHAMDALTVAFTKDAFIQYFNNKNAAQDSGNRNHTNIIGIKTRYFDKGRALPPIPLEQFRIEAKQHLEKLLVSIKAKNKVVTVNVNRTKKRKGENTKIQQTPRGQLHLETVYGSHKQYVTKIEKVNASFDAAKIATVSKRAYRNALLKRLETFGNDPKKAFTGKNALEKNPLYADKYQTIRVPEKVQTVEFETIYTIRKPVDPALNVDKVVDVKVRAILERRLKEYGGDPKKAFVNFWENPIWLNKEKGISIKRVSIRGINNAQSIHVKKDKNGNPIWDENGKQIPVDFVNTGNNHHVAIYRKPVLDKKGQVTFDEDGNLMYELDEVVVPFFEAVTRANLGLPIIDKDYRKSEGWQFLFSMKQNEYFVFPNEKTGFNPKEVDLLNPDNYAMISPNLFRVQTMSKVMYGNNVVRDYKFRHHLETTVKDMKELKDIAYKQYKTLSFGNSVVKIRINHIGQIVSVGEY

SEQ ID NO: 376 - protein, 1428 aa, Parasutterella excrementihominis
  REGION 1..1428: note = Parasutterella excrementihominis YIT 11859
MGKTHIIGVGLDLGGTYTGTFITSHPSDEAEHRDHSSAFTVVNSEKLSFSSKSRTAVRHRVRSYKGFDLRRRLLLLVAEYQLLQKKQTLAPEERENLRIALSGYLKRRGYARTEAETDTSVLESLDPSVFSSAPSFTNFFNDSEPLNIQWEAIANSPETTKALNKELSGQKEADFKKYIKTSFPEYSAKEILANYVEGRRAILDASKYIANLQSLGHKHRSKYLSDILQDMKRDSRITRLSEAFGSTDNLWRIIGNISNLQERAVRWYFNDAKFEQGQEQLDAVKLKNVLVRALKYLRSDDKEWSASQKQIIQSLEQSGDVLDVLAGLDPDRTIPPYEDQNNRRPPEDQTLYLNPKALSSEYGEKWKSWANKFAGAYPLLTEDLTEILKNTDRKSRIKIRSDVLPDSDYRLAYILQRAFDRSIALDECSIRRTAEDFENGVVIKNEKLEDVLSGHQLEEFLEFANRYYQETAKAKNGLWFPENALLERADLHPPMKNKILNVIVGQALGVSPAEGTDFIEEIWNSKVKGRSTVRSICNAIENERKTYGPYFSEDYKFVKTALKEGKTEKELSKKFAAVIKVLKMVSEVVPFIGKELRLSDEAQSKFDNLYSLAQLYNLIETERNGFSKVSLAAHLENAWRMTMTDGSAQCCRLPADCVRPFDGFIRKAIDRNSWEVAKRIAEEVKKSVDFTNGTVKIPVAIEANSFNFTASLTDLKYIQLKEQKLKKKLEDIQRNEENQEKRWLSKEERIRADSHGICAYTGRPLDDVGEIDHIIPRSLTLKKSESIYNSEVNLIFVSAQGNQEKKNNIYLLSNLAKNYLAAVFGTSDLSQITNEIESTVLQLKAAGRLGYFDLLSEKERACARHALFLNSDSEARRAVIDVLGSRRKASVNGTQAWFVRSIFSKVRQALAAWTQETGNELIFDAISVPAADSSEMRKRFAEYRPEFRKPKVQPVASHSIDAMCIYLAACSDPFKTKRMGSQLAIYEPINFDNLFTGSCQVIQNTPRNFSDKTNIANSPIFKETIYAERFLDIIVSRGEIFIGYPSNMPFEEKPNRISIGGKDPFSILSVLGAYLDKAPSSEKEKLTIYRVVKNKAFELFSKVAGSKFTAEEDKAAKILEALHFVTVKQDVAATVSDLIKSKKELSKDSIENLAKQKGCLKKVEYSSKEFKFKGSLIIPAAVEWGKVLWNVFKENTAEELKDENALRKALEAAWPSSFGTRNLHSKAKRVFSLPVVATQSGAVRIRRKTAFGDFVYQSQDTNNLYSSFPVKNGKLDWSSPIIHPALQNRNLTAYGYRFVDHDRSISMSEFREVYNKDDLMRIELAQGTSSRRYLRVEMPGEKFLAWFGENSISLGSSFKFSVSEVFDNKIYTENAEFTKFLPKPREDNKHNGTIFFELVGPRVIFNYIVGGAASSLKEIFSEAGKERS

SEQ ID NO: 377 - protein, 1037 aa, Parvibaculum lavamentivorans
MERIFGFDIGTTSIGFSVIDYSSTQSAGNIQRLGVRIFPEARDPDGTPLNQQRRQKRMMRRQLRRRRIRRKALNETLHEAGFLPAYGSADWPVVMADEPYELRRRGLEEGLSAYEFGRAIYHLAQHRHFKGRELEESDTPDPDVDDEKEAANERAATLKALKNEQTTLGAWLARRPPSDRKRGIHAHRNVVAEEFERLWEVQSKFHPALKSEEMRARISDTIFAQRPVFWRKNTLGECRFMPGEPLCPKGSWLSQQRRMLEKLNNLAIAGGNARPLDAEERDAILSKLQQQASMSWPGVRSALKALYKQRGEPGAEKSLKFNLELGGESKLLGNALEAKLADMFGPDWPAHPRKQEIRHAVHERLWAADYGETPDKKRVIILSEKDRKAHREAAANSFVADFGITGEQAAQLQALKLPTGWEPYSIPALNLFLAELEKGERFGALVNGPDWEGWRRTNFPHRNQPTGEILDKLPSPASKEERERISQLRNPTVVRTQNELRKVVNNLIGLYGKPDRIRIEVGRDVGKSKREREEIQSGIRRNEKQRKKATEDLIKNGIANPSRDDVEKWILWKEGQERCPYTGDQIGFNALFREGRYEVEHIWPRSRSFDNSPRNKTLCRKDVNIEKGNRMPFEAFGHDEDRWSAIQIRLQGMVSAKGGTGMSPGKVKRFLAKTMPEDFAARQLNDTRYAAKQILAQLKRLWPDMGPEAPVKVEAVTGQVTAQLRKLWTLNNILADDGEKTRADHRHHAIDALTVACTHPGMTNKLSRYWQLRDDPRAEKPALTPPWDTIRADAEKAVSEIVVSHRVRKKVSGPLHKETTYGDTGTDIKTKSGTYRQFVTRKKIESLSKGELDEIRDPRIKEIVAAHVAGRGGDPKKAFPPYPCVSPGGPEIRKVRLTSKQQLNLMAQTGNGYADLGSNHHIAIYRLPDGKADFEIVSLFDASRRLAQRNPIVQRTRADGASFVMSLAAGEAIMIPEGSKKGIWIVQGVWASGQVVLERDTDADHSTTTRPMPNPILKDDAKKVSIDPIGRVRPSND

SEQ ID NO: 378 - protein, 1058 aa, Pasteurella multocida
  REGION 1..1058: note = Pasteurella multocida subsp. gallicida X73
MQTTNLSYILGLDLGIASVGWAVVEINENEDPIGLIDVGVRIFERAEVPKTGESLALSRRLARSTRRLIRRRAHRLLLAKRFLKREGILSTTDLEKGLPNQAWELRVAGLERRLSAIEWGAVLLHLIKHRGYLSKRKNESQTNNKELGALLSGVAQNHQLLQSDDYRTPAELALKKFAKEEGHIRNQRGAYTHTFNRLDLLAELNLLFAQQHQFGNPHCKEHIQQYMTELLMWQKPALSGEAILKMLGKCTHEKNEFKAAKHTYSAERFVWLTKLNNLRILEDGAERALNEEERQLLINHPYEKSKLTYAQVRKLLGLSEQAIFKHLRYSKESAESATFMELKAWHAIRKALENQGLKDTWQDLAKKPDLLDEIGTAFSLYKTDEDIQQYLEGKLPDSVINALLVSLNFDKFIELSLKSLRKILPLMEQGKRYDQACHEIYGHHYGEKNQQISQLLPVIPTQEIRNPVVLRTLSQARKVINAIIRQYGSPARVHIETGRELGKSFKERREIQKQQEDNRTKRESAVQKFKELFSDFSSEPKSKDILKFRLYEQQHGKCLYSGKEINIHRLNEKGYVEIDHALPFSRTWDDSFNNKVLVLASENQNKGNQTPYEWLQGKINSERWKNFVALVLGSQCSAAKKQRLLTQVIDDNKFIDRNLNDTRYIARFLSNYIQENLLLVGKNKKNVFTPNGQITALLRSRWGLIKVRENNDRHHALDAIVVACATPSMQQKITRFIRFKEVHPYKIENRYEMVDQESGEIISPHFPEPWAYFRQEVNIRVFDNHPDTVLKEMLPDRPQANHQFVQPLFVSRAPTRKMSGQGHMETIKSAKRLAEGISVLRIPLTQLKPNLLENMVNKEREPALYVGLKARLAEFNQDPAKAFATPFYKQGGQQVKAIRVELVQKSGVLVRQGNGVADNAPGSIVRTDVFIKNNKFFLVPIYTWQVAKGILPNKAIVAHKNEDEWEEMDEGAKFKFSIFPNDLIELRTKTECFLGYYIGPDRHNGSISLREHDSEISKGNAGVYRVGVKLALSLEKYHIDELGKNRRICRPHQRRPVR

SEQ ID NO: 379 - protein, 1056 aa, Pasteurella multocida
  REGION 1..1056: note = Pasteurella multocida subsp. multocida str. P52VAC
MQTTNLSYILGLDLGIASVGWAVVEINENEDPIGLIDVGVRIFERAEVPKTGESLALSRRLARSTRRLIRRRARRLLLAKRFLKREGILSTTDLEKGLPNQAWELRVAGLERRLSAIEWGAVLLHLIKHRGYLSKRKNESQTNNKELGALLSGVAQNHQLLQSDDYRTPAELALKKFAKEEGHIRNQRGAYTHTFNRLDLLAELNLLFAQQHQFGNPHCKEHIQQYMTELLMWQKPALSGEAILKMLGKCTHEKNEFKAAKHTYSAERFVWLTKLNNLRILEDGAERALNEEERQLLINHPYEKSKLTYAQVRKLLGLSEQAIFKHLRYSKENAESATFMELKAWHAIRKALENQGLKDTWQDLAKKPDLLDEIGTAFSLYKTDEDIQQYLTNKVPNSVINALLVFLNFDKFIELALKSLRKILPLMEQGKRYDQACREIYGHHYGEANQKTSQLLPAIPAQEIRNPVVLRTLSQARKVINAIIRQYGSPARVHIETGRELGKSFKERREIQKQQEDNRTKRESAVQKFKELFSDFSSEPKSKDILKFRLYEQQHGKCLYSGKEINIHRLNEKGYVEIDHALPFSRTWDDSFNNKVLVLASENQNKGNQTPYEWLQGKINSERWKNFVALVLGSQCSAAKKQRLLTQVIDDNKFIDRNLNDTRYIARFLSNYIQENLLLVGKNKKNVFTPNGQITALLRSRWGLIKIRENNDRHHALDAIVVACATPSMQQKITRFIRFKEVHPYKIENRYEMVDQESGEIISPHFPEPWAYFRQEVNIRVFDNHPDTVLKEMLPDRPQANHQFVQPLFVSRAPTRKMSGQGHMETIKSAKRLAEGISVLRIPLTQLKPNLLENMVNKEREPALYAGLKARLAEFNQDPAKAFTTPFYKQGGQQVKAIRVEQVQKSGVLVRENNGVADNASIVRTDVFIKNNKFFLVPIYTWQVAKGILPNKAIVAHKNEDEWEEMDEGAKFKFSLFPNDLVELKTKKEYFFGYYIGLDRATGNISLKEHDGEISKGKDGVYRVGVKLALSFEKYQVDELGKNRQICRPQQRQPVR

SEQ ID NO: 380 - protein, 1056 aa, Pasteurella multocida
MQTTNLSYILGLDLGIASVGWAVVEINENEDPIGLIDVGVRIFERAEVPKTGESLALSRRLARSTRRLIRRRAHRLLLAKRFLKREGILSTIDLEKGLPNQAWELRVAGLERRLSAIEWGAVLLHLIKHRGYLSKRKNESQTNNKELGALLSGVAQNHQLLQSDDYRTPAELALKKFAKEEGHIRNQRGAYTHTFNRLDLLAELNLLFAQQHQFGNPHCKEHIQQYMTELLMWQKPALSGEAILKMLGKCTHEKNEFKAAKHTYSAERFVWLTKLNNLRILEDGAERALNEEERQLLINHPYEKSKLTYAQVRKLLGLSEQAIFKHLRYSKENAESATFMELKAWHAIRKALENQGLKDTWQDLAKKPDLLDEIGTAFSLYKTDEDIQQYLTNKVPNSVINALLVSLNFDKFIELSLKSLRKILPLMEQGKRYDQACREIYGHHYGEANQKTSQLLPAIPAQEIRNPVVLRTLSQARKVINAIIRQYGSPARVHIETGRELGKSFKERREIQKQQEDNRTKRESAVQKFKELFSDFSSEPKSKDILKFRLYEQQHGKCLYSGKEINIHRLNEKGYVEIDHALPFSRTWDDSFNNKVLVLASENQNKGNQTPYEWLQGKINSERWKNFVALVLGSQCSAAKKQRLLTQVIDDNKFIDRNLNDTRYIARFLSNYIQENLLLVGKNKKNVFTPNGQITALLRSRWGLIKARENNNRHHALDAIVVACATPSMQQKITRFIRFKEVHPYKIENRYEMVDQESGEIISPHFPEPWAYFRQEVNIRVFDNHPDTVLKEMLPDRPQANHQFVQPLFVSRAPTRKMSGQGHMETIKSAKRLAEGISVLRIPLTQLKPNLLENMVNKEREPALYAGLKARLAEFNQDPAKAFATPFYKQGGQQVKAIRVEQVQKSGVLVRENNGVADNASIVRTDVFIKNNKFFLVPIYTWQVAKGILPNKAIVAHKNEDEWEEMDEGAKFKFSLFPNDLVELKTKKEYFFGYYIGLDRATGNISLKEHDGEISKGKDGVYRVGVKLALSFEKYQVDELGKNRQICRPQQRQPVR

SEQ ID NO: 381 - protein, 1364 aa, Pediococcus acidilactici
  REGION 1..1364: note = Pediococcus acidilactici DSM 20284
MGDRKYNLGLDIGTSSIGFAAVDENNQPIRVKGKTAIGVRLFEEGKTAADRRGFRTTRRRLSRRRWRINLLNEIFDAHLAEVDPTFLARLKESNRSNLDPKKSFQGSLLFPERKDYQFYEEYPTIYHLRKALMEKDRKFDFREIYLAVHHIIKYRGNFLNGTPMRSFKVENIELDTLFDQLNQLYAEIVPDNELAFDLAQVADVKDVLSSTTIYKMDKKKQLVKMMLLPASNKALQSENKKIVTQFVNAILNYKFKLDVLLQVETDADWSLKLNDEGADDKLEEFTGDLDENRLEIIDLLQRLHNWFSLNEITKDGNSLSAAMVEKYENHHHHLGLLKKVIENHPDAKKAKALKETYTAYVGKTDDKTQNQDDFYKAVEKNLDDSPDAKEIKRLIQLDQFMPKQRTGQNGAIPHQLHQQELDQIIEKQSKYYPFLAEPNPNVKRRKDAPYKLDELIAFKIPYYVGPLVTPEEQAQNGENVFAWMKRKAAGPITPWNFDEKVDRMESANRFIRRMTTKDTYLFGEDVLPAESMIYQKFVVLNELNNLKINGRHLSLKDKQDVYNDLFKQQKTVSIKALQNYYVTKKKAATAPTVGGLADPKKFLSSLSTYIDFKNMFGERVNDPQFQEDLEQIVEWSTIFEDRGIFKAKLQALGWLSEKQIQQLVAKRYKGWGRLSKKLLTGLKNAEGYSILDEMWRSTGNFMQIQSRPEFAALIQQANEKQFEGNDPDNVWENIENILGDAYTSPQNKKAIRQVVKVVQDIEKAVGNPPEKIAIEFTREAAANPQRTQSRLRTLEKLYESAEEVVDAGLTAELAEFKENKHVLSDKYYLYFTQLGRDVYTGDTISLDKLNDYDVDHILPQSFIKDDSLDNRVLTIRAVNNGKSDNVPAKMFGKKMGSFWRYLLDNGMISKRKYNNLITDPDNISKYAQKGFINRQLVETSQVIKLTANILNGIYDKDTEIIEVPAKMNSQMRKMFDLVKVREVNDYHHAFDAYLTIFIGNYLYKCYPKLQPYFVYDNFKKFGNKEDIGHKRFNFLGKIEREKKVVAPETGEILWSNVAPNETIKQIKKVYDYKFMIVSREITTRRAELFNQTVYPKNYHGKLIPIKEDRPTDLYGGYSGNTDAYLAIVALEDKKKGKYFKVVGIPTRVAAKLEKLKQQDSQQYLQALHKVIAPQFTKSTKKGIKKTEFEIVLDKVHYRQLVQDGPVKMMLGSSTYKYNAKQLVLSEKALQVIADDRKFDETQKDDNLIAVYDEILSIVNQSFDLYDINGFRKKLNDNRDQFIDLPAETKYEGRKVVAHGKREMILEILKGLHANAAFGNLKPIGFSTAFGQLQVPNGIILSKNAILIHQSPSGLFERKIKLSDL

SEQ ID NO: 382 - protein, 1366 aa, Pediococcus acidilactici
  REGION 1..1366: note = Pediococcus acidilactici MA18/5M
MGDRKYNLGLDIGTSSIGFAAVDENNQPIRVKGKTAIGVRLFEEGKTAADRRGFRTTRRRLSRRRWRINLLNEIFDAHLAEVDPTFLARLKESNRSNLDPKKSFQGSLLFPERKDYQFYEEYPTIYHLRKALMEEDRKFDIREIYLAVHHIIKYRGNFLNGTPMRSFKVENIELDTLFDQLNQLYAEIVPDNELAFDLAQVADVKDVLSSTTIYKMDKKKQLVKMMLLPASNKALQSENKKIVTQFVNAILNYKFKLDVLLQVETDADWSLKLNDEGADDKLEEFTGDLDENRLEIIDLLQRLHNWFSLNEITKDGNSLSAAMVEKYENHHHHLGLLKKVIENHPDAKKAKALKETYTAYVGKTDDKTQNQDDFYKAVEKNLDDSPDAKEIKRLIQLDQFMPKQRTGQNGAIPHQLHQQELDQIIEKQSKYYPFLAEPNPNVKRRKDAPYKLDELIAFKIPYYVGPLVTPEEQAQNKENVFAWMKRKAAGPITPWNFDEKVDRMESANRFIRRMTTKDTYLFGEDVLPAESMIYQKFVVLNELNNLKINGRHLSLKDKQDVYNDLFKQQKTVSIKALQNYYVTKKKAATAPTVGGLADPKKFLSSLSTYIDFKNMFGERVNDPQFQEDLEQIVEWSTIFEDRGIFKAKLQALGWLSEKQIQQLVAKRYKGWGRLSKKLLTGLKNAEGYSILDEMWRSTENFMQIQTRPEFAALIQQANEKQFEGNDPNNVWENIESILGDAYTSPQNKKAIRQVVKVVQDIEKAVGNPPEKIAIEFTREAAANPQRTQSRLRTLEKLYESAEEVVDAGLTAELAEFKENKHVLSDKYYLYFTQLGRDVYTGDTISLDKLNDYDVDHILPQSFIKDDSLDNRVLTIRAVNNGKSDNVPAKMFGKKMGSFWRYLLDNGMISKRKYNNLITDPDNISKYAQKGFINRQLVETSQVIKLTANILNGIYDKDTEIIEVPAKMNSQMRKMFDLVKVREVNDYHHAFDAYLTIFIGKYLYKCYPKLRPYFVYGKFKKFGDNEDIEVGDGRFNFLNRIERLKNVTDPETGEILWSNVAPNETIKQIKKVYNYKFMLVSRETTTRRAELFNQTVYPKNYRGKLIPIKEDRPTDLYGGYSGNTDAYLAIVALEDKKKGKYFKVVGIPTRAAAKLEKLKQQDSQQYLQALHKVIAPQFTKSTKKGIKKTEFEIVLDKVHYRQLVQDGPVKMMLGSSTYKYNAKQLVLSEKALQVIADDRKFDETQKDDNLIAVYDEILSIVNQSFDLYDINGFRKKLNDNRDQFIDLPAETKYEGRKVVAHGKREMILEILKGLHANAAFGNLKPIGFSTAFGQLQVPNGIILSKNAILIHQSPSGLFERKIKLSDL

SEQ ID NO: 383 - protein, 1364 aa, Peptoniphilus sp.
  REGION 1..1364: note = Peptoniphilus duerdenii ATCC BAA-1640
  source 1..1364: note = Peptoniphilus duerdenii
MKNLKEYYIGLDIGTASVGWAVTDESYNIPKFNGKKMWGVRLFDDAKTAEERRTQRGSRRRLNRRKERINLLQDLFATEISKVDPNFFLRLDNSDLYREDKDEKLKSKYTLFNDKDFKDRDYHKKYPTIHHLIMDLIEDEGKKDIRLLYLACHYLLKNRGHFIFEGQKFDTKNSFDKSINDLKIHLRDEYNIDLEFNNEDLIEIITDTTLNKTNKKKELKNIVGDTKFLKAISAIMIGSSQKLVDLFEDGEFEETTVKSVDFSTTAFDDKYSEYEEALGDTISLLNILKSIYDSSILENLLKDADKSKDGNKYISKAFVKKFNKHGKDLKTLKRIIKKYLPSEYANIFRNKSINDNYVAYTKSNITSNKRTKASKFTKQEDFYKFIKKHLDTIKETKLNSSENEDLKLIDEMLTDIEFKTFIPKLKSSDNGVIPYQLKLMELKKILDNQSKYYDFLNESDEYGTVKDKVESIMEFRIPYYVGPLNPDSKYAWIKRENTKITPWNFKDIVDLDSSREEFIDRLIGRCTYLKEEKVLPKASLIYNEFMVLNELNNLKLNEFLITEEMKKAIFEELFKTKKKVTLKAVSNLLKKEFNLTGDILLSGTDGDFKQGLNSYIDFKNIIGDKVDRDDYRIKIEEIIKLIVLYEDDKTYLKKKIKSAYKNDFTDDEIKKIAALNYKDWGRLSKRFLTGIEGVDKTTGEKGSIIYFMREYNLNLMELMSGHYTFTEEVEKLNPVENRELCYEMVDELYLSPSVKRMLWQSLRVVDEIKRIIGKDPKKIFIEMARAKEAKNSRKESRKNKLLEFYKFGKKAFINEIGEERYNYLLNEINSEEESKFRWDNLYLYYTQLGRCMYSLEPIDLADLKSNNIYDQDHIYPKSKIYDDSLENRVLVKKNLNHEKGNQYPIPEKVLNKNAYGFWKILFDKGLIGQKKYTRLTRRTPFEERELAEFIERQIVETRQATKETANLLKNICQDSEIVYSKAENASRFRQEFDIIKCRTVNDLHHMHDAYLNIVVGNVYNTKFTKNPLNFIKDKDNVRSYNLENMFKYDVVRGSYTAWIADDSEGNVKAATIKKVKRELEGKNYRFTRMSYIGTGGLYDQNLMRKGKGQIPQKENTNKSNIEKYGGYNKASSAYFALIESDGKAGRERTLETIPIMVYNQEKYGNTEAVDKYLKDNLELQDPKILKDKIKINSLIKLDGFLYNIKGKTGDSLSIAGSVQLIVNKEEQKLIKKMDKFLVKKKDNKDIKVTSFDNIKEEELIKLYKTLSDKLNNGIYSNKRNNQAKNISEALDKFKEISIEEKIDVLNQIILLFQSYNNGCNLKSIGLSAKTGVVFIPKKLNYKECKLINQSITGLFENEVDLLNL

SEQ ID NO: 384 - protein, 1087 aa, Phascolarctobacterium succinatutens
  REGION 1..1087: note = Phascolarctobacterium succinatutens YIT 12067
MLRMKYAIGLDIGIASVGYAVLALDHEENPWGIIRLGSRIFDVAENPKDGASLALPRREARSVRRRLRRHHHRLERIKNLLINTEFITKDELLHLYDGNLSDVYELRVKALDYSVTNAELTRILLHLAQRRGFKSNRKSDANDKEAGQLLEAVSANAKRMQENHYRTVGEMFYKDDLFSKYKRNKGGTYLTTVHRDMIAAEARTILEKQFALGNNICTQDFIDKYLSILLSQRQFDEGPGEPSPYAGNQIANMIGKCTFEPNEYRAAKASYSFERFNLLQKVNHLRLLLEGKSIALDNEQRKKIIALAHDKADLRYSHIRKALGLDEKVLFNTITYNDDVSVIEKKTKFNFLQAYHQIKKVLAEDMQKLTTEQLDNIGQILSTYKSDNKRTEELSALGLEKKIIDALLGINGLSKFAHLSLKALRKINPYLEEGKIYNEACTAAGYDFKAHANTQKTELLPAYKEEMDDITSPVARRAIAQSIKVINAIIREQKGSPLYINIELAREMAKGFDERTQIDKANKENQAKNERIMERIRTEFHKANPTGMDLIKLKLWEEQDGRSPYSQKAISINRLFEPGYVDIDHIVPYSISFDDSFKNKVLVFSDENRDKGNRLPIAYLQSKFGAKAAENFMIWVQSNIKDYKKRQKLLKREITEEDINKFKERNLQDTKTISRFLYNYINDYLLFAPSDTGKKKRVTAVNGTITAYLRKRWGINKIRANGDKHHAVDAVVIACTTDKMIKDLSSFSRYHELEYTHTDTESFLVNSLTGEILKRFPYPWEDFRPELMARLSDNPADALRKLNLIFYHGIDLSTIKPIFVSRMPRHKVTGAAHKATIKSARCLDNGIVICKTSLQNLKLDKEGEIANYYAPESDTILYNALKERLRSYDNKPAKAFAEPFYKPKADGTPGPLVKKVKVYEKSTLNVAVQQNTAVADNDSMVRVDVFHVKGNGYYLVPIYIADTLKKELPNKAIVAYKPYADWPVMDDSNFIFSLYPNDLIKFEHKNSVKFAKVNKESTLNDFYSTKSEIVYFKGCNINTGAITIINHENTYVVSSLGVKTLPSLEKYQADVLGNYTKVKKEVRKPFR

SEQ ID NO: 385 - protein, 1333 aa, Planococcus antarcticus
  REGION 1..1333: note = Planococcus antarcticus DSM 14505
MKNYTIGLDIGVASVGWVCIDENYKILNYNNRHAFGVHEFESAESAAGRRLKRGMRRRYNRRKKRLQLLQSLFDSYITDSGFFSKTDSQHFWKNNNEFENRSLTEVLSSLRISSRKYPTIYHLRSDLIESNKKMDLRLVYLALHNLVKYRGHFLQEGNWSEAASAEGMDDQLLELVTRYAELENLSPLDLSESQWKAAETLLLNRNLTKTDQSKELTAMFGKEYEPFCKLVAGLGVSLHQLFPSSEQALAYKETKTKVQLSNENVEEVMELLLEEESALLEAVQPFYQQVVLYELLKGETYVAKAKVSAFKQYQKDMASLKNLLDKTFGEKVYRSYFISDKNSQREYQKSHKVEVLCKLDQFNKEAKFAETFYKDLKKLLEDKSKTSIGTTEKDEMLRIIKAIDSNQFLQKQKGIQNAAIPHQNSLYEAEKILRNQQAHYPFITTEWIEKVKQILAFRIPYYIGPLVKDTTQSPFSWVERKGDAPITPWNFDEQIDKAASAEAFISRMRKTCTYLKGQEVLPKSSLTYERFEVLNELNGIQLRTTGAESDFRHRLSYEMKCWIIDNVFKQYKTVSTKRLLQELKKSPYADELYDEHTGEIKEVFGTQKENAFATSLSGYISMKSILGAVVDDNPAMTEELIYWIAVFEDREILHLKIQEKYPSITDVQRQKLALVKLPGWGRFSRLLIDGLPLDEQGQSVLDHMEQYSSVFMEVLKNKGFGLEKKIQKMNQHQVDGTKKIRYEDIEELAGSPALKRGIWRSVKIVEELVSIFGEPANIVLEVAREDGEKKRTKSRKDQWEELTKTTLKNDPDLKSFIGEIKSQGDQRFNEQRFWLYVTQQGKCLYTGKALDIQNLSMYEVDHILPQNFVKDDSLDNLALVMPEANQRKNQVGQNKMPLEIIEANQQYAMRTLWERLHELKLISSGKLGRLKKPSFDEVDKDKFIARQLVETRQIIKHVRDLLDERFSKSDIHLVKAGIVSKFRRFSEIPKIRDYNNKHHAMDALFAAALIQSILGKYGKNFLAFDLSKKDRQKQWRSVKGSNKEFFLFKNFGNLRLQSPVTGEEVSGVEYMKHVYFELPWQTTKMTQTGDGMFYKESIFSPKVKQAKYVSPKTEKFVHDEVKNHSICLVEFTFMKKEKEVQETKFIDLKVIEHHQFLKEPESQLAKFLAEKETNSPIIHARIIRTIPKYQKIWIEHFPYYFISTRELHNARQFEISYELMEKVKQLSERSSVEELKIVFGLLIDQMNDNYPIYTKSSIQDRVQKFVDTQLYDFKSFEIGFEELKKAVAANAQRSDTFGSRISKKPKPEEVAIGYESITGLKYRKPRSVVGTKR

SEQ ID NO: 386 - protein, 1197 aa, Porphyromonas sp.
  REGION 1..1197: note = Porphyromonas sp. oral taxon 279 str. F0450
MLMSKHVLGLDLGVGSIGWCLIALDAQGDPAEILGMGSRVVPLNNATKAIEAFNAGAAFTASQERTARRTMRRGFARYQLRRYRLRRELEKVGMLPDAALIQLPLLELWELRERAATAGRRLTLPELGRVLCHINQKRGYRHVKSDAAAIVGDEGEKKKDSNSAYLAGIRANDEKLQAEHKTVGQYFAEQLRQNQSESPTGGISYRIKDQIFSRQCYIDEYDQIMAVQRVHYPDILTDEFIRMLRDEVIFMQRPLKSCKHLVSLCEFEKQERVMRVQQDDGKGGWQLVERRVKFGPKVAPKSSPLFQLCCIYEAVNNIRLTRPNGSPCDITPEERAKIVAHLQSSASLSFAALKKLLKEKALIADQLTSKSGLKGNSTRVALASALQPYPQYHHLLDMELETRMMTVQLTDEETGEVTEREVAVVTDSYVRKPLYRLWHILYSIEEREAMRRALITQLGMKEEDLDGGLLDQLYRLDFVKPGYGNKSAKFICKLLPQLQQGLGYSEACAAVGYRHSNSPTSEEITERTLLEKIPLLQRNELRQPLVEKILNQMINLVNALKAEYGIDEVRVELARELKMSREERERMARNNKDREERNKGVAAKIRECGLYPTKPRIQKYMLWKEAGRQCLYCGRSIEEEQCLREGGMEVEHIIPKSVLYDDSYGNKTCACRRCNKEKGNRTALEYIRAKGREAEYMKRINDLLKEKKISYSKHQRLRWLKEDIPSDFLERQLRLTQYISRQAMAILQQGIRRVSASEGGVTARLRSLWGYGKILHTLNLDRYDSMGETERVSREGEATEELHITNWSKRMDHRHHAIDALVVACTRQSYIQRLNRLSSEFGREDKKKEDQEAQEQQATETGRLSNLERWLTQRPHFSVRTVSDKVAEILISYRPGQRVVTRGRNIYRKKMADGREVSCVQRGVLVPRGELMEASFYGKILSQGRVRIVKRYPLHDLKGEVVDPHLRELITTYNQELKSREKGAPIPPLCLDKDKKQEVRSVRCYAKTLSLDKAIPMCFDEKGEPTAFVKSASNHHLALYRTPKGKLVESIVTFWDAVDRARYGIPLVITHPREVMEQVLQRGDIPEQVLSLLPPSDWVFVDSLQQDEMVVIGLSDEELQRALEAQNYRKISEHLYRVQKMSSSYYVFRYHLETSVADDKNTSGRIPKFHRVQSLKAYEERNIRKVRVDLLGRISLL

SEQ ID NO: 387 - protein, 1485 aa, Prevotella bivia
  REGION 1..1485: note = Prevotella bivia JCVIHMP010
MKNILGLDLGTNSIGWAKISIDDNGKYIKDSIKLGSRIIPMSQDVLSNFSKGVTLSQTSERTSFRGARRLRERTLLRRERLHRILHLLGFLPKHYEKAIGWDRNDNKTYGKFINHAEPKLAWCKDNNGKMRFLFMDSFHDMLSEFSEKHPELLANGKKIPLDWTIYYLRKKALYKAITKEELAWILLNFNQKRGYYQLRGEEDRDSEANKKEYLELKVIGVEATGEKKGNDIWYNIHLENGWIYRRSSKNPLNDWLGKVKSFIVTTDLDADGNPKKDKDGNIKRSFRAPSEGDWTLIKKRTESLLENSGQTVGQFIYNHILEEPSAKIRGNFIRTIERKYYKDELKAILEKQKEFHHELSSESLLTECAKELYKRNIAHQEVLLKKGIIHLLLNDILFYQRPLKIKKSLIDNCPYENYKYVDKKSGDIKVKSIKCIAKSNPFFQEFRLWQFVSNLRLYRKSDDKDVTSEHLVTTDDYANLFTYLNNRKDIKQSVLLKEYFKIKKVKTINGAEYPVRWNYIDDDNKTYPCNETRYDILHALSKTELKSEWLTPERTYRLWHLLYSIESKEETKKALNKLNLSDDFTEAFLTIKPFKKEYGSYSEKAIKKLLSLMRMGYLWSEDEAIKQVGAEIEKTIEGELPDYVLQRLEKSQHNYNKISDFSGLPLWLASYIIYGRHSEAKEIIHWDNPESMMAYIKDFRQHSMRNPIVEQCVLETLRTVHDIWKEIGHIDEIHIELGREMKSTSEQRKAITQNVLHNQNTNIRIKLLLQELKNDNNITGVRPYSPMQQEILRIYEEGALQGLTKEDKDYNDILKISQTAQPTSNELTRYKLWLEQKYRSPYTGKAISLSKLFTSAYQIEHVIPQSRYFDDSLSNKVICESEVNTLKKAMLGMEFIKTCGGQKVHCTLLGDVEIYNEEDYKAFVNEHYSNNRTKRNKLLMEDIPQEFINRQLNDSRYISKMVKQLLSAIVRGQEEVEATSKFVIPCTGGITDRLKKDWGLNDIWNNLVSPRFQRMNALTGSEYFGHWENKEGKRVFQTTMPIQLQQGFSKKRIDHRHHAMDALVIACASRNIISYLNNETAQDTERRRDLRQKLCDKGGSVRKPWDSFTQDTQYALKDIIVTFKNYVRIINKATNYYEHYKTDGKKGMISQKGDELWAIRKPMHKETVFGKVNLRRPKRVSLSKAIDSVDIICNRKLKKYIKARLNEGLQKKQILNIFKELNNVWEGIDVNKIDIWEMSNDKEPMVATRKQLDTSFDEKKIRSISDTGIQKILLNYLITKNNNPELAFTPEGIQEMNSNISEYNDHKKHQPIYKVRVTEPLGAKYPIGTMGNNPKKFVEAQAGTNLYFAIYEDKEGKRNYDTIPLNIAAERLNQQLSPVPETNENNTPLKFYLSPNDLVYVPSEEERHSGNNIQLDKNRIYKMVSSTSKRCFFIHHRVAISLVDKKEFSAQNKMERSIDNEQVMIKSVCWKLITDRLGNIIKVIK

SEQ ID NO: 388 - protein, 1457 aa, Prevotella buccae
  REGION 1..1457: note = Prevotella buccae ATCC 33574
MKTILGLDLGTNSIGWAKVSVDDYGNYLHDIKLGSRIIPMSQDVLGNFDSGVTVSQTAQRTEFRSKRRLVQRNLQRRERLHRVLHVLDFLPAHYDAAIGWDRTEAVTYGKFLNHAEPKLAWEELGNGKRRFLFMDSFHEMVADFARCQPALVADGKKIPLDWTIYYLRKKALTQAITKEELAWILLNFNQKRGYYQLRGEEEEENPTKQEEYYELKVVSVEATDSRKGNDTWYNVHLENGWIYRRSSKISLDDWVGKVKQFIVTTEYEKDGATLKTDKEGYVKRSFRAPNENDWGLRKKRTETLLEMSGKTVGAFIYDHLLQEPADKIRGNFIRTIERHYYKAELEAILAEQCKYHIELRDKEMLEACARELYLNNLPHQRSLMKKDMTYLLLYDLIFYQRPLKSKKALIANCPYEYYEYVDKETGEIKRQNIKCIAKSNPYFQEFRLWQFVLNLRLFDRVEDKEVTANYLPTADDHARLFTYLNDRKEINQETLLKDYFKLKKVKIGNEKEYPIRWNYIEDKEKKYPCNETRYELLMALDRAGIEHKWLDDNNLEYRLWHLLYSVEVKSESETALRKLKNDDAFVNSFLKVKPFKKEYGAYSEKAIKRLLAVMRKGFLWNEQDICDETRKRIEIIIKGDVDEKVKERMGHAAYSFDRVSDFQGLPEWLACYVVYGRHSEAMDIQHWDSPERLMAYINNFKQYSLRNPIVEQCILETLRTVHDIWKETGQIDEIHVELGREMKSTSEERARRTQNVLRNENTNLRIKSLLIELKNDTDICNVHPYSPMQQEILRIYEEGALQELNREDEDFEEISKISQMSQPSGKELNRYKLWLEQKYRSPYTGKAISLAKLFTPAYQIEHVIPQSRYFDDSFTNKVICEAEVNTLKSNLLGYEFIKKHGGEIIHCTTLGDVRIFSESEYKAFVMDHYANNKSKKDKLLMEDIPQEFLSRQMNDSRYISKVVKTLLSNIVRMADESEATSKSVIVCTGGVTDRLKKDWGLNDVWNSIVYSRFERLNRLTGTEAFGHWENKDGKRVFQTSMPLELQRGFRKKRIDHRHHAMDALVIACASRNIVNYLNNESANNPKKREDLRRQLCDKNRVIRKPWETFTQDAYNALENVVVSFKNYVRVINKATNRYEHYDENGKKRFVQQKGSELWAIRKPMHKETYYGHVNLRRKELVTLQKALDDIPSICDKKLRDYISALVEKHFNKRQLLAHFKSTDYYWQKQYVNKVYVWTFSDDIKPLVATRKLLDTSFDAKRIGTITDTGIQKILRNYLEAKGGNATLAFTPEGIAEMNQNISKYNDGKPHQPILKVRITEPMGAKYRVGQTGNKMAKYVEAQSGTNLYFAIYEDSEGKRSYTTVPLDEVAERLKQRLSPVPEKDENDVPLKFYLSPNDLVYVPTEEELQLRECKLNKDRIYKMVSSTGNECHFIPYYVANVIYNKGGFNMQMHRPQS

SEQ ID NO: 389 - protein, 1218 aa, Prevotella buccalis
  REGION 1..1218: note = Prevotella buccalis ATCC 35310
MNKRILGLDTGTNSLGWAVVDWDEHAQSYELIKYGDVIFQEGVKIEKGIESSKAAERSGYKAIRKQYFRRRLRKIQVLKVLVKYHLCPYLSDDDLRQWHLQKQYPKSDELMLWQRTSDEEGKNPYYDRHRCLHEKLDLTVEADRYTLGRALYHLTQRRGFLSNRLDTSADNKEDGVVKSGISQLSTEMEEAGCEYLGDYFYKLYHEQGNKVRIRQRYTDRKKHYQHEFDAICEKQELSSELIEDLQRAIFFQLPLKSQRHGVGRCTFERGKPRCADSHPDYEEFRMLCFVNNIQVKGPHDLELRPLTYEEREKIEHLFFRKSKPNFDFEDIAKELAGKKNYAWIHDKEERAYKFNYRMTQGVPGCPTTAQLKSIFGDDWKTGIAETYTLIQKKNGSKSLQEMVDDVWNVLYSFSSVEKLKEFAHHKLQLDEENAEKFAKIKLSHSFAALSLKAIRKFLPFLRKGMYYTHASFFANIPTIVGKEIWNNEQSRKYIMENVGELVFNYQPKHRDVQGTIEMLIKDFLANNFELPAGATDKLYHPSMIETYPHALRNEFGILQLGSPRTNAIRNPMAMRSLHVLRRVVNQLLKESIIDENTEVHVEYARELNDANKRRAIADRQKEQDKQHKKYGDEIRKLYKEETGKDIEPTQTDVLKFQLWEEQNHYCLYTGEQIGITDFIGSNPKFDIEHTIPQSVGGDSTQMNLTLCDNRFNREVKKAKLPTELANHEEILTRIEPWKNKYEQLVKERDKQRTFAGMDKAVKDIRIQKRHKLQMEIDYWRGKYERFTMTEVPEGFSRRQGTGIGLISRYAGLYLKSLFHQADSRNKSNVYVVKGVATAEFRKMWGLQSEYEKKCRDNHSHHCMDAITIACIGKREYDLMAEYYHMEETFRQGRGSKPKFSKPWATFTEDVLNIYKNLLVVHDTPNNMPKHTKKYVQTSKGKVLAQGDTARGSLHLDTYYGAIERDGEIRYVVRRPLSSFTNPKELENIVDETVKRTIKEAIADKNFKQAIAEPIYMNEDKGILIKKVRCFANSVKQPINIRQHRDLSKKEYKQQYHVMNENNYLLAIYEGLVKNKVVREFEIVSYIEAAKYYKRSQDRNIFSSIVPTHSTKYGLPLKTKLLMGQQVLMFEENPDEIQVDNTKDLVKRLYKVVGIEKDGRIKFKHHQEARKEGLTIYSTPYKNNDDYVPIFRQSIKNINILVDGIDFNIDILGKVTLKE

SEQ ID NO: 390 - protein, 1422 aa, Prevotella denticola
  REGION 1..1422: note = Prevotella denticola CRIS 18C-A
MTQKVLGLDLGTNSIGSSVRNLDLSDDLKGQLEFFSSDIFRSSVNKESNGREYSLAAQRSAHSRSRGLNEARRRKLWATLDLLIKYGFCPMSPESLMRWRTYDKQRGLFREYPIDDKNFNAWILLDFDGDGKPDYSSPYQLRRELVIRQFDFDQPIERYKLGRALYHIAQHRGFKSSKGETLSQQETNSKQSLTDDTADVAGEMKASEEKLSKGLSTYMKENNLLTVGAAFAQLEDEGVRVRNNNDYRAIRSQFQREIETIFKFQQGLSVENELYERLVSEKKNIGTIFYKRPLRSQRGNVGKCTLERTKPRCAIGHPLFEKFRAWTLINNIKVRMSEEEQAEQLPMKLRFELYNDCFLAFVRAEFKFEDIRKYLEKRLGVHFSYNDKTINYKDSTSVAGCPITARFRKLLGEDWESFHVDGQKQRQAHGKNNASFHTVSYSTNDIWHFCYDAEEPEAVLSFAQDNLKWEKKKAEELVRIWSAIPQGYAMLSQKAIRNINKMLILGLKYSDAVLLAKVPEIVEITDGEILSVTEDYHRVEAQVGYEKQINNIVNALIAKYKSASEEYRFADHNYEYQLDKSDEKDIIKQIESNIGTRKWSLLDADEQTDILQKVRDKYQNFFRSHERKFVESPKLGECFEEYLMKKFPMVEGERWKKLYHPSQIAIYRPVPANKDRSALRLGNPDIGAIKNPTVLRVLNTLRKRVNQLLDDGIISPDETRVVVETARELNDANRKWALDTYNRIRHDENEKIKKILAEFYPKRDNISTVDIDKARYVIDQREMDYFTEAKTYHKDIKKYKLWLEQGGQCMYTGRTINLSNLFDPNSFDVEHTIPESISFDSSDMNLTLCDAHYNRFIKKNHIPADLPNYDKSVVIDGKEYSPIKPRLQRWADRVERLNRNVEYWRGQARRAQNKDRKDQCMREMHLWKMELEYWTKKLERFTITEVTDEFKNSQLVDTRVITRHAVLYLKSIFPHVDVQRGDVTAKFRKILGIQSVDEKKDRSLHSHHAIDATTLTIIPGAAKRERMLELFAKIEEVNKMLSFSGNEDRTGLKQELDGLKNQLNKEVKACRIGHNVSEIGTFINDNIIINHHVKNQALTPVRRRLRKRGHIVGGMDNPRWQTGDALRGEIHKASYYGAITQYAKDKEGKVLMKEGRPQINPTIKFVIRRELKYKKSSTDSGFASWDDLGKAIVDKELFALMKGQFPEGTSFKDACEQGIYMIKKGKNGEVDTKLYRIRHIRCKTKQKNALKIKEQAYKSEKEYKRYFYAAVGDLYAMCCYTNGKTREFKIYSLYDISCHRKVGVEDIPEFITDKKGNRLMLDYKLHTGDMILLYKENPEELYDLDNVSLSKLLYKINGFENDGLRIRMVNHLVAKEAMGESVKDYAKLPDIIRCGVKTIKFLVMGENRDFVIKNGKISFNHR

SEQ ID NO: 391 - protein, 1375 aa, Prevotella histicola
  REGION 1..1375: note = Prevotella histicola F0411
MKKILGLDLGTTSIGWALVYESENTDEKSSIVRLGVRVNPLSVDEKGNFEKGKAITTNADRQQTHGARINLQRYKLRRENLKDCLQKQGWIGTEALCEEGKTSTFETYMLRAKAAEEEISLHELCRVLFMMNKKRGYKSNRKANNKEDGKLFDGMTVAKKLYEEHLTPAEYSFQLLSSGKKFKQEYYRSDLKEEFDRIWNEQQKYYPEILTDDFKQQLQGKSKGNTSKIFLGKYGIYSADLKGLDRKLQPLKWRVEALKQQVDKEVLAFVISDLNGQIASTSGLLGAISDRSKELYFNKQTVGQYLWTSLKETPHVSIKNKPFYRQDYLDEFEKIWETQATYHKELTPELKQEIRDIIIFYQRPLKSKKGLISVCELEQRKVKVTIDGKEKEISIGPKVAPKSSPMFQEFRIWQNLNNILLIDKGNNSIHPLYEEEKNLLYEELSVKEKLSKAEALKVLNKNSKQWDLNYKEIEGNRTQAVLYDCYNRIIVMTGHEEYNFKKLKASEIRSYVKTTFTGLGFNTDILEFDSSLTGHELEKQPMYQLWHLLYSYESDNSRTGNDALLRKLETAFGFPKEYAAVLSDVVFEDSYGNLSVKAMRKILPHLQAGLNYSQACEEAGYKHSRRSLTKNELDQKEYKEKLELLPKNSLHNPVVEKILNQMINVINAVIDEYGKPDEIRIELARELKIGAAERENMTRSINQGNAENKRIREILEKEFALSYISRNDIIKYKLYEELKSNGFKTLYSDTYISKDKLFSKDFDIEHIIPKARLFDDSLSNKTIEARDVNIAKSNKTAFDFISEKYDQQGIEAYKKKLDILLQDGSISKAKYNRLLMKEADIPSGFIDRDLRDTQYIAKKAYEILSDLVRNVTPTTGAVTSRLREDWQLVDVMKELNFEKYQKLGLVEVIEDRDGRKIKRIKDWTKRNDHRHHAMDALTIAFTKPSYIQYLNNLNARSDKNSSIYGIENKELHREDNKLRFNAPLPINEFRAEARRHLKSILVSVKAKNKVMTQNVNVIKTKHGVIKKVQLTPRGELHNATFYGTKKRPIIKMVKVGAALDEVTIKKVSSSFIREALLDRLHEYNGDAKKAFTGRNSIDKNPIYIDEEHKKTVPALVKTIEWEMYHPTRKLISPDLKIDKVIDKGIREILKTRLAKFNGDAQKAFSNLDENPIYKDEAKKITLKRVSLEGVSSVIPLHTLKDREGKLVVGKDGKPVLGDYVQTSNNHHIAFYMDENGNLQDNVVSFFEAAERKSQGVPVIDKNYNHDKGWNFLFTMKQNEYFVFPNEVTGFNPSEVDLMDEANYSIISPNLYRVQKMSKASGRDYWFRHHLEAMLNDDPKLRNSMFKRITSLKALEGIVKVRINCIGKIVAVGEYD

SEQ ID NO: 392 - protein, 1380 aa, Prevotella intermedia
MKRILGLDLGTTSIGWALVNEAENNNEASSIVRLGVRVNPLTVDEKSNFEKGKAITTNADRQLRHGARINLQRYKLRRQNLHDCLQKQGWLGTEAMYEEGKASTFETYKLRAKAAEEEISLHEFARVLFMLNKKRGYKSNRKANNKEDGQLFDGMTIAKKLYEEHLTPAEYSLQLLNKGKKFTQGYYRSDLNAELERIWDEQKKYYPEILTDEFKQQLEGKTKTNTSKIFLAKYGIYSADLKGLDRKFQPLKWRVEALQQQVDKEVLAFVISDLKGQIANTSGLLGAISDRSKELYFNKQTVGQYLWASLEENPHISIKNKPFYRQDYLDEFEKIWETQAAFHKQLTPELKQEIRDIIIFYQRPLKSKKSLISVCELEQRKVKATIDGKEKEITIGPKVAPKSSPVFQEFRIWQNLNNVLLIDNDTNEKRPLDEVERNLLYKELSIKAKLSKTEALKILNKKGKQWDLNYRELEGNRTQAILFDCYNRIITLTGHEECDFKKIKASEIRHYVSTIFKNLGFSTEILDFDPSLKKHELEKQPMYQLWHLLYSYESDNSRTGNESLLRKLETTFGFPEEYATVLCDVVFEEDYGNLSVKAMREILPYLQAGNDYSQACAYAGYNHSRHSLTKEELDQKVYKERLELLPKNSLRNPVVEKILNQMINVINAIIDEYGKPDEIRIEMARELKSSAADRKKTTHAISQGNAENQRIREILEKEFSLSYISRNDIIKYKLYEELEPNYYKTLYSDTYITKDKLFSKDFDIEHIIPKARLFDDSFSNKTLEARNINLEKSNKTAFDFIKEKYGEDGAEAYKKKLDMLLENDAISRPKYNNLLRAEADIPSDFINRDLRNTQYIAKKACEILGELVKTVTPTTGKITNRLREDWQLVDVMKELNFEKYEKLGLTEIVEDRDGRKIKRIKDWTKRNDHRHHAMDALAIAFTKPSFIQYLNNLNARSNKGDSIYAIENKELHYEEGKLRFNAPIPVNEFRAEAKRHLSAILVSIKAKNKVMTQNVNKIKTKHGIIKKIQLTPRGPLHNETIYGTKMRPIIKMVKVGAALDEATINKVSSPAIREALLKRLNEYSGNAKKAFTGKNTLEKNPIYLNAGRTKTVPSLVKTVEWESFHPTRKLIDKDLNVDKVVDKGIREILKARLEEFNGDAKKAFSNLEENPIYLDEAKKIALKRVSIEGVLSAIPLHTLKNQAGKPITGKDGKPVLGNYVQTSNNHHIAFYYDEDGNLQDNAVSFFEAAERKSQGIPVIDKDYNRDKGWRFLFTMKQNEYFVFPNEATGFIPSEVDLTDEANYGIISPNLYRVQKVSRIDKGTSASRDYWFRHHLETILNDDAKLKNLAFKRIRGLLELKDIIKVRINSTGKIVAVGEYD

SEQ ID NO: 393 - protein, 1425 aa, Prevotella micans
  REGION 1..1425: note = Prevotella micans F0438
MIQKIFGLDLGTNSIGSSVRNLELGENLTEQLEFFSSDIFGSSVSKNSNGREYSLAGNRSAHRRSRGLNEARRRKLWATLDLLIEHGLCPMSPDSLMQWRTYDKQKGLYRQYPIEDKDFNAWIMLDFNGDGKPDYSSPYQLRRELVVRQFDFDQPIERYKLGRALYHIAQHRGFKSSKGETIADQEKNEKKPIAEEGADIANEMKASETKLSKGLVAYMQENHLKTVGEAFAKLEDERVRIRNNESYRAIRSQYQDEIKEIFTYQKKLSVESELYERLTSEKKGVGTIFYKRPLRSQRGNVGKCTLERNKPRCPIGRPEFEEFRAWTLINNIKIRETAGEPYKQLPIKLRQELLKDCFLSKVKADFKFEDIRKYIEKRLGLSFSNDDKTINYKDSVSIAACPVTVRMKKLLGENWANCRIDGEKRRQAHGKNNNNEHIVSYTEEDIWHVCYNAEDPEEVSNFARKALHWDENKIKELVRLWTSIPQGYAMLSLKAIRNINRMLLLGLKYSDAVLLAKLPDIVPVSDEDILAITKEFLQLEDKLNQEKQINNIVNSLIANYKSKLEENRFADHNYQYQLGEGDDEDINTQIKSHIGAKLWVQIGADEQTKIFQAVRSKYQDFFKSYKRKFVESPKLGELLVAFLTEKFPNVKSKQWERLYHPSQIAIYRPIPVDNDRSKLRLGNPNIGAIKNPTVMRVLNTLRRRVNQLLDDGVISPDETRVVVETARELNDANTKWALDRYNRIRRDENEKIRKILKELNPTTNSISEQDIDKARYIFEQCETDFYTDGKVPYYNKDIKKYKLWLEQGGQCLYTGQTINLTNLFNPNAFDMEHTIPKSISFDNSDQNLTLCESYYNRFIKKNNIPTDMPNYDKDVTINGKEYTAIKPRLQRWKERVDRLSRNVDFWKGQARRAQDKDRKDECIREKHLWDMELAYWKGKLERFTMTDVTDGFKNSQLVDTRVITRHAVLYLKSIFNHVEVQRGETTAEFRKILGLQSIDEKKDRSLHSHHAIDATMLTVIPSAAKRDRMLELFYKIEETKKALKNYNDNNKTGLNLELKGLEEKLDKEKKDCRVGRRVNDLDRFINENIIVSHHTKDQALTPAHRRLRKRGKIVGGKEHPRWQTGDSLRGEIHKASYYGAITQFAKDANGKVLMKDGQAQIDPTIYYVIRRELKYKRSTQDSGFTNWEDLEKVIVDTDLFGLMKGQFPEGTSFKDACEQGFYMIKKGKNGEGDVKTHRIRHVRCKAVKTALRIKEQTYKSSKDYKQFFYAAVGDLYVMCYYTDGKKRDFKIYSLYDISNHRKSGTEDIPKFITDKKGNHLPLDYKLRTGDMVLLYKDNPEELKDLDQVNLKRRLYKVNRFESEGLIILLTHHLSTTTERGCSIGKIENYQNLPTAIRCGIKTIKFLIMGKHRDFVIRNGNIEFKH

SEQ ID NO: 394 - protein, 1506 aa, Prevotella nigrescens
  REGION 1..1506: note = Prevotella nigrescens ATCC 33563
MKTILGLDLGPNSIGWAKVEVDDEGNYLRNIKLGSRIIPMTQDMLGDFDKGVKVSQTAIRTDFRGNRRLIERHLLRRERLHRVLHALKFLPKHYEDAIGWDRNEPATYGKFVNNSEPKLAWERQEDGSMRFLFMESFNEMVADFAQNQPSLVSDGKKIPLDWTIYYLRKKALTRPIKKEELAWILLNFNQKRGYYQLRGEEEEDNLTKRKEYYKLKVVGVEADGAPKGGKTWYNIHLENGWTARCQSKIPLDDWVGKVKEYIVTTEYEDDGKTPKCDKEGKVKRSFKSPEKDDWQLIKTRTEKFIDDSNKTVGAFIYDYLLEKPFDKIRGKYIRTIERKYYKNELREILREQTKYHEGLHSLEALKICAEELYKNNQQHQEYLLKKDMTFLLLNDLIFYQRPLKSKKSLIADCPYEVYKYDDKLTGKKGQKKIKCIAKSNPYYQEFRLWQFIANLRLFSVTDGKEVTAEYLKTEEDYVRLFSFLNDRKDIKQETFLRSFLKLKKESIGSEKIYPIRWNYIEDANKSYPCNATRHELLLAFDRADIPRELLDVEEREYRLWHLLYSIEAKEETESALRKLKANKAFGDLNIDDAFVNSFLKIKPFEKEYGAYSEKAIKKLLAVMRRGSLWKEADICEATKQNIAKILQNDIDEKLKKKIEAAVSSFNKLSDFQGLPTWLACYVVYGRHSEAAQIQCWQSPEDLKTYINKFKQHSLRNPIVEQCLLETLRTVYDIWKDAGQIDEIHIELGRNMKSTAEQRARKTKDILRNENTNLRIKNLLVELKNDDKIENVRPYSPSQQEILRIYEEGALQELSKEDEMFEDISKISKMAQPSPTELSRYKLWLEQKYRSPYTGRVIPLSKLFTTAYQIEHIIPQSRYFDDSFNNKVICESEVNSLKDNMLGYEFIKECGGRIVHCTLLGDVKIFTKEEYKDFVTKHYIDNTYKRDKLLLEDIPQEFSARQLNDSRYISKMVQTVLSNIVRAENEQEATSKFVVSCNGAITNRLKKDWGLNDVWSSIVCPRFKRLNEITKTNAFGHWEDKAGKHVFQTTVPLELQRGFSKKRIDHRHHAMDALVIACASRNIVNYLNNESANSPEKREDLRKKLCDEKRKIRKPWKTFTQDAREALSDVVVSFKNYVRVINKATNYYEHYSSSGNKVMISQKGNDMWAIRKPLHKESVFGRVNLCRKVIVSLKKALENIPAICDKTLRDYINALVEKHFNTRQLLAHFKSINYRLNRQCVEKVEVWQFSDEKIEMVARRKSLDTSFDDKQISSITDTGIQKILLNYLQTKDGNAEIAFTPEGIEEMNKNISLYNDGKAHQPILKVRVATPKGMKYPVGQTGNKATKFVVAEKGTNLYFAIYENELGVRSYDTIPLNIVVERLKEGLSPVPQANEADIPLKFYLSPNDLVYVPTKENEDELCRDRIYKFVDSSGTTANFVPHTSANTIYNVDKEYAEKCCNGAVFLNEYGLGSPQSKNQRALTGEMIKEICWKLKVDRLGNIIKVIK

SEQ ID NO: 395 - protein, 1380 aa, Prevotella nigrescens
  REGION 1..1380: note = Prevotella nigrescens F0103
MKRILGLDLGTTSIGWALVNEAESNNEASSIVRLGVRVNPLTVDEKSNFEKGKAITTNADRQLRHGARINLQRYKLRRQNLHDCLQKQGWLGTEAMYEEGKASTFETYKLRAKAAEEEISLHEFARVLFMLNKKRGYKSNRKANNKEDGQLFDGMTIAKKLYEEHLTPAEYSLQLLNKGKKFTQGYYRSDLNAELERIWDEQKKYYPEILTDEFKQQLEGKTKTNTSKIFLAKYGIYSADLKGLDRKLQPLKWRVEALKQQVDKEVLAFVISDLKGQIANTSGLLGAISDRSKELYFNKQTVGQYLWASLEENPHISIKNKPFYRQDYLDEFEKIWETQATFHKQLTPELKQEIRDIIIFYQRPLKSKKSLISVCELEQRKVKATIDGKEKEITIGPKVAPKSSPVFQEFRIWQNLNNVLLIDNDTNEKRPLDEDERYLLYKELSIKAKLSKTEALKILNKKGKQWDLNYKELEGNRTQAILFDCYNRIITLTGHEECDFKKIKASEIRHYVSTIFKNLGFSTEILDFDPSLEKHELEKQPMYQLWHLLYSYESDNSRTGNESLLRKLETTFGFPEEYATVLCDVVFEEDYGNLSVKAMRKILPYLQAGNDYSQACAYAGYNHSRHSLTKEELDQKVYKERLELLPKNSLRNPVVEKILNQMINVINAIIDEYGKPDEIRIEMARELKSSAADRKKTTHAINQGNDENQCIREILEKEFALSYISRNDIIKYKLYEELKPNGFKTLYSDTYIPKDKLFSKDFDIEHIIPKARLFDDSYSNKTLEARDINLAKSNKTAFDFVKEKYGEQGAEAYKKKLDMLLGNNVISKPKYNKLLMTEADIPSDFINRDLRNTQYIARKACEILGELVRTVTPTTGKITNRLREDWQLVDVMKELNFEKYEKLGLTEIVEDRDGRKIKRIKDWTKRNDHRHHAMDALAIAFTKPSYIQYLNNLNARSNKGDSIYAIENKELHYEEGKLRFNAPIPVNVFRAEAKRHLSAILVSIKAKNKVMTQNVNKIKTKHGIIKKIQLTPRGPLHNETIYGTKMRPIIKKVKVGAALDEATINKVSSPAIREVLLKRLNEYSGNAKKAFTGKNTLDKNPIYLNAERTKTVPASVKTVEWENYHPIRKPITPDLKVDKVIDKGIGEILKARLEEFNGDAKKAFSNLEENPIYLDQTKKIALKRVSIEGVLSTIPLHTLKNQAGKPIMGKDGKPVLGNYVQTSNNHHIAFYYDEDGNLQDNAVSFFEAAERKSQGISVIDKDYNRDKGWRFLFTMKQNEYFVFPNEATGFIPSEVDLTDEANYGIISPNLYRVQKMSRIEKGTSVSRDYWFRHHLETILNDDSRLKNSAFKRINSLKPLEGIIKVRINSIGKIVAVGEYD

SEQ ID NO: 396 - protein, 1391 aa, Prevotella oralis
  REGION 1..1391: note = Prevotella oralis ATCC 33269
MKKILGLDLGTTSIGWALVNEKENNEELSSIIRLGVRVNPLTVDEKSNFEKGKDITTNADRTKCRSARRNLQRFKLRREALADCLKRHGLMTDETPLCETNNSIIFKTYSNRAKAVCEKIALDDFVRVLFMINKKRGYKSSRKLNTDDEGTLVDGMDVAKLLYNEQITPGEYLLRLFKKGKKTRPDFYLSDLKAELERIWDFQRTFYPEILCNALKEDLKGKSRTQSSAIFYAKYKVSTAKIAGKDKRLQELTWRTDALRKQLTIDEVAYVICSINGEVNGSSQRLSMISDRSKLLYFNHQTIGQYLMQRLEENPNAGLKNIIFYRQDYEDEFNDIWNSQATYHKELTPELKKEVKDIIFYQRGLKSCKWLINYCELEHEEIEVKTPEGKLRKITIGSKTCPKSSPLFQEFKIWQVLNNLQVSPLNSRRKAKRKKDEEPSLFSDEDMNTACRYLNEEEKLTLFKELSIKKELKKKDALKLLFENYKELDLNYKVISGNVTMANLYRAFQDIISLTGNGEFDFQAMPAEEAEKTVEEIFGGLGYKTAFLHFDASLHDKEFERQPAYRLWHLLYSYAGDQSKTGIEALVKRIQELCGFEPEYARILANISFIPDYGNLSSKAMRKILPYMQDGYEYSEACSKAGYRHSASSLTKEEINKKNYKTHLDEIKRNSLRNPIVEKILNQMVNVVNSVIDTYSNIDEIRIEMARELKKSKPEREDMSFAISKATKETERIKGILEQEFKIQHVTRNDIIRYRLYEELKPNGYKTLYSNTYIPREDLFSKKFDIEHIIPKARLFDDSYSNKTLELRDINIEKGNQTAYDFVLSKYGEEGLYKYEQRVEEFKKNNEQAGTKCRKLLMREADIPSDFLNRDLNDSQYIAKKAHELLREIVPTVTATTGSITNRLREDWKLVNVMKELNWEKYDKLGLTEEYKDKDGNTVRHIKDWTKRNDHRHHAMDALTIAFTKPSFIQYLNNLNARSNRGGSIYGIEQKELERENNKLVFIPPIDPKIFRKQAKEHLSNILISIKAKNKVVTKNVNKTKSKSGTNRKVQLTPRGQLHLETVYGKIRTYKTEEIKVGTKLTEELIAKVADKKIREALMQRLSEYGGNIKKAFQNISKHPIWLNGSHTKHVPEKVKIVFFEDVFTIRKAITPDIKIDKVIDSKIRRILQERLNEFGGEASKAFSNLDENPIWFNRDKGIAIKSVKIRGIAKGTAIRVKKDIHGKTIIGNNGYPVANDYVNTGNNHHVAIFRDKDGNLQEHIVSFYEATARAIQNLPIVDRNYNSEKDWKFLFSMKQNEYFVFPNPNTGFNPSEISLKDEKNYALISPNLFRVQKLSHYYYVFRHHLETNVDTNLQLKDITWKRITAVNNLTGAVKVRIDHLGRIVDVGEYK

SEQ ID NO: 397 - protein, 1204 aa, Prevotella ruminicola
MERILGIDTGTNSLGWAIVDKDENQYHLVAKGTNIFSEGVKIEKGIESSKAAERTEHRSVRKHYWRRKIRKIRLLTILSDNDLCPRLKHEQLRQWRLKKVYPTDDTFMEWQRTEDKAQVNPYKFRYICLTQKLDLSDITQRFILGRALYHLNQRRGFLSNRKEATKESEGTVKEGISSLSKDMKDSGCEYLGEYFYQLYQQGKKIRNHYTARKEHYLKEFKAICSKQELDDALIEKLEKAIFDQRPLKSQKGQVGTCTFEKGKSRCPSSHPLYEDFRMYSFINNIKVQVDTLYDKGERSLTDEEKQLIIPLFKRKSKRTFPFEDIAKKIAGKNNYCYIKSNEEKAYKFNYQMDTQVSGSPVNAQLEEIFGEDWLSSVCEVYTLANNKSRFQIMNDVWHVLFFYDDEDKLKEFAKDRLQLDDELAEKFSKISIPNDYAALSLKAIRKIMPYLRDYGLIYSEAVFLANLVDVLPQHVWGIKEMREAAIENVIDVMHSYDKNNIDGITLEGCVKTFLKERYQVSDDNLKKLYHPSMLDPYPRQRPNDEGVFQLGSPRISSVKNPMAMHSLFRLRKVVNLMLKKGYITPDTKVHIEFSRDLNDANKRWAIQTWQRENEKERERCRKEIEKYIASPSDTDILKYQLWEEQNHKCLYTGDEIRITDFLGDNPKYDIEHTIPRSAGGDSTKMNLTLCSSRFNRDEKKTKLPAELVNHDEILERISNWKEKYEDIDKQIRKISTKGATSKEDKDSKIRRRHYLILQRDYWRGKYQRFTMTEVPEGFSRRQGTDISVISRYARMYLKSVFKQVYIVKGIATSDFRKMWGIQDEYAKKERVNHVHHCIDAITIACIGKAEYDKLADYRHQYDDYLFQGKTKPTFDKPWPSFVIDIKHIQDELLIAHYAKDNLEKFTKKNLRGKDGRIIRDKFGNKLQMKGDTSRNSLHNDKFYGAINHEGEIKYVYRTNIEALDAKSIGNIVDPTVRSIIESAIAIHGSLKAAINKGIWMNEEKHIPIKKVRVFRNDVKKPIELKDQRDLSDKDYKQHYYVTNDGNYMMLIFSKLNNKGREIRQHVVINSLEATEVIKSHKRSQVGKVVWESYYSKEGFDLIYKLKSGTMILLYENNRDEVWDLDIRNLQKRLYIITKMKYDGRIYMMHHQEAREKKDLEEKSGSFKINEDYRPLIVNSYNQFNALVQDLDFEINDLGEIRRLI

SEQ ID NO: 398 - protein, 1424 aa, Prevotella sp.
  REGION 1..1424: note = Prevotella sp. C561
MTQKVLGLDLGTNSIGSAVRNLDLSDDLQWQLEFFSSDIFRSSVNKESNGREYSLAAQRSAHRRSRGLNEVRRRRLWATLNLLIKHGFCPMSSESLMRWCTYDKRKGLFREYPIDDKDFNAWILLDFNGDGRPDYSSPYQLRRELVTRQFDFEQPIERYKLGRALYHIAQHRGFKSSKGETLSQQETNSKPSSTDEIPDVAGAMKASEEKLSKGLSTYMKEHNLLTVGAAFAQLEDEGVRVRNNNDYRAIRSQFQHEIETIFKFQQGLSVESELYERLISEKKNVGTIFYKRPLRSQRGNVGKCTLERSKPRCAIGHPLFEKFRAWTLINNIKVRMSVDTLDEQLPMKLRLDLYNECFLAFVRTEFKFEDIRKYLEKRLGIHFSYNDKTINYKDSTSVAGCPITARFRKMLGEEWESFRVEGQKERQAHSKNNISFHRVSYSIEDIWHFCYDAEEPEAVLAFAQETLRLERKKAEELVRIWSAMPQGYAMLSQKAIRNINKILMLGLKYSDAVILAKVPELVDVSDEELLSIAKDYYLVEAQVNYDKRINSIVNGLIAKYKSVSEEYRFADHNYEYLLDESDEKDIIRQIENSLGARRWSLMDANEQTDILQKVRDRYQDFFRSHERKFVESPKLGESFENYLTKKFPMVEREQWKKLYHPSQITIYRPVSVGKDRSVLRLGNPDIGAIKNPTVLRVLNTLRRRVNQLLDDGVISPDETRVVVETARELNDANRKWALDTYNRIRHDENEKIKKILEEFYPKRDGISTDDIDKARYVIDQREVDYFTGSKTYNKDIKKYKFWLEQGGQCMYTGRTINLSNLFDPNAFDIEHTIPESLSFDSSDMNLTLCDAHYNRFIKKNHIPTDMPNYDKAITIDGKEYPAITSQLQRWVERVERLNRNVEYWKGQARRAQNKDRKDQCMREMHLWKMELEYWKKKLERFTVTEVTDGFKNSQLVDTRVITRHAVLYLKSIFPHVDVQRGDVTAKFRKILGIQSVDEKKDRSLHSHHAIDATTLTIIPVSAKRDRMLELFAKIEEINKMLSFSGSEDRTGLIQELEGLKNKLQMEVKVCRIGHNVSEIGTFINDNIIVNHHIKNQALTPVRRRLRKKGYIVGGVDNPRWQTGDALRGEIHKASYYGAITQFAKDDEGKVLMKEGRPQVNPTIKFVIRRELKYKKSAADSGFASWDDLGKAIVDKELFALMKGQFPAETSFKDACEQGIYMIKKGKNGMPDIKLHHIRHVRCEAPQSGLKIKEQTYKSEKEYKRYFYAAVGDLYAMCCYTNGKIREFRIYSLYDVSCHRKSDIEDIPEFITDKKGNRLMLDYKLRTGDMILLYKDNPAELYDLDNVNLSRRLYKINRFESQSNLVLMTHHLSTSKERGRSLGKTVDYQNLPESIRSSVKSLNFLIMGENRDFVIKNGKIIFNHR

SEQ ID NO: 399 - protein, 1483 aa, Prevotella sp.
  REGION 1..1483: note = Prevotella sp. MSX73
MKTILGLDLGTNSIGWAKVSVDDYGNYLHDIKLGSRIIPMSQDVLGNFDSGVTVSQTAQRTEFRSKRRLVQRNLQRRERLHRVLHVLDFLPAHYDAAIGWDRTEAVTYGKFLNHAEPKLAWEELGNGKRRFLFMDSFHEMVADFARCQPALVADGKKIPLDWTIYYLRKKALTQAITKEELAWILLNFNQKRGYYQLRGEEEEENPTKQEEYYELKVVSVEATDSRKGNDTWYNVHLENGWIYRRSSKISLDDWVGKVKQFIVTTEYEKDGTTLKTDKEGNVKRSFRAPNENDWGLRKKRTETLLEMSGKTVGAFIYDHLLQEPADKIRGNFIRTIERHYYKAELEAILAEQCKYHIELRDKEMLEACARELYLNNLPHQRSLMKKDMTYLLLYDLIFYQRPLKSKKALIANCPYEYYEYVDKETGEIKRQNIKCIAKSNPYFQEFRLWQFVLNLRLFDRVEDKEVTANYLPTADDHARLFTYLNDRKEINQETLLKDYFKLKKVKIGNEKEYPIRWNYIEDKEKKYPCNETRYELLMALDRAGIEHKWLDDNNLEYRLWHLLYSVEVKSESETALRKLKNDDAFVNSFLKVKPFKKEYGAYSEKAIKRLLAVMRKGFLWNEQDICDETRKRIEIIIKGDVDEKVKERMGHAAYSFDRVSDFQGLPEWLACYVVYGRHSEAMDIQRWDSPERLMAYINNFKQYSLRNPIVEQCILETLRTVHDIWKETGQIDEIHVELGREMKSTSEERARRTQNVLRNENTNLRIKSLLIELKNDTDICNVHPYSPMQQEILRIYEEGALQELNREDEDFEEISKISQMSQPSGKELNRYKLWLEQKYRSPYTGKAISLAKLFTPAYQIEHVIPQSRYFDDSFTNKVICEAEVNTLKSNLLGYEFIKKHGGEIIHCTTLGDVRIFSESEYKAFVMDHYANNKSKKDKLLMEDIPQEFLSRQMNDSRYISKVVKTLLSNIVRMADESEATSKSVIVCTGGVTDRLKKDWGLNDVWNSIVYSRFERLNRLTGTEAFGHWENKDGKRVFQTSMPLELQRGFRKKRIDHRHHAMDALVIACASRNIVNYLNNESANNPKKREDLRRQLCDKNRVIRKPWETFTQDAYNALENVVVSFKNYVRVINKATNRYEHYDENGKKRFVQQKGSELWAIRKPMHKETYYGHVNLRRKELVTLQKALDDIPSICDKKLRDYISALVEKHFNKRQLLAHFKSTDYYWQKQYVNKVYVWTFSDDIKPLVATRKLLDTSFDAKRIGTITDTGIQKILRNYLEAKGGNATLAFTPEGIVEMNQNISKYNDGKPHQPILKVRITEPMGAKYRVGQTENKMAKYVEAQSGTNLYFAIYEDSEGKRSYTTVPLDEVAERLKQRLSPVPEKDENDVPLKFYLSPNDLVYVPTEEELQLRECKLNKDRIYKMVSSTGSECHFIPYYVANVIYNKVEFEAKNKIGRALTGEMIKAVCWKLEIDRLGNILKVIK

SEQ ID NO: 400 - protein, 1375 aa, Prevotella sp.
  REGION 1..1375: note = Prevotella sp. oral taxon 306 str. F0472
MKKILGLDLGTTSIGWALVNESENKDEQSSIVRLGVRVIPLTVDEKGNFEKGKAITTNADRQQVHAARINLQRYKLRRENLRDCLQKQGWIGSEPMCEDGKSSTFETYKLRAKAAVEEVSLHEFARVLFMLNKKRGYKSNRKANDKEEGKLFDGMTIAKKLYEEHLTPAEYSLQLLNTGRKFTPEYYRSDLIEEFEKIWNEQQKYYPEILTDEFKQQLEGKAKSNTSKLFLGKYGIYSADTKGLDRRLQPLKWRVEAMKQQVDKDVLAFVISDLKGQIANTSGLLGAISDRSKELYFSKQTIGQYLWASLQENPHISIKNQPFYRQDYLDEFEKIWETQATYHKELTSELKQEIRDIIIFYQRPLKSKKNLIAVCELEQRKVKVTVDGKEKEITIGPKIAPKSSPMFQEFRIWQNLNNILLLDHETNSKRPLYEEERNLLYEELSVKEKLSKTEALKVLGKKSKQWDLNYKELEGNRTQAVLYDCYNRIIVMSGHEECNFKKLKASDIRHYVKMIFKNLAFNTDILCFDSSLKGHELERQPMCQLWHLLYSYEGDNSRTGNDALLRKLETSFGFPKEYAAVLADVIFEDSYGNLSVKAMRNILPHLQAGKDYSQACEEAGYKHSRRSLTKEELNQKVYKEKLELLPKNSLHNPVVEKILNQMVNVINAVIEEYGKPDEIRIELARDLKIGAAERENMTRSINQGNAENKRIREILEKEFALSYLSRNDIIKYKLYEELKSNGFKTLYSDTYISKDKLFSKDFDIEHIIPKARLFDDSLSNKTIEARDVNIAKSNKTAFDFILERYGEQGVKTYKTKLLRLLEDGAISNKKYNNLLKTEADIPSGFIDRDLRNTQYIAKKAYEILSELVKIVTPTTGSVTNRLREDWQLVDVMKELNFEKYQKLGLADVIEDRDGRKVKRIKDWTKRNDHRHHAMDALTIAFTKPSYIQYLNNLNARSDKSSSIYGIEVKELHREEGKFRFNAPLPINEFRAEAKRHLKSVLVSIKAKKKVMTQNVNKIKTKHGIIKKVQLTPRGELHNATYYGTKKRPLVRMVKVGAALDEATIKRVCSPAIRAALLKRLNAYNGDAKEAFTGRNSIDKNPIYLDIEQTKLVPVLVKTIEWGMYHPIRKRITPDLKIDKVIDKGIREKLKARLAEFNGDAQKAFSNLDENPIYMDEAKRITLKRVSIEGVLSAIPLHTLKDKAGKPVIGSDGKPVFGDYVQTSNNHHIAFYIDDKGNLQDNPVSFFEAAERKSQGVPVIDRRYNCDKGWHFVFTMKQNEYFVFPNEATGFIPSEVDLLDEANYCIISPNLYRVQKLSKASGRDYWFRHHLETMLNDDLRLKNSTFKRIQSLKGLEDIVKVRINSIGKIVAVGKYD

SEQ ID NO: 401 - protein, 1216 aa, Prevotella stercorea
  REGION 1..1216: note = Prevotella stercorea DSM 18206
MTKILGIDTGTNSLGWAIVDKTADNYNLLDKGVNIFQEGVKIEKGIESSKAAERTEHRATRVRYYRIKLRKIRLLRILSDNHLCPPLSQEELSTWRLKKVYPKNELFMQWQRTDDDTEKTPYAYRHKCIHEKLDLSDVTDRYILGRAFYHIIQRRGFLSNRKEQGGEDSGKVKEGISTLTHEMNEAGYEYLGDYFYALYNKGEKIRKHYTARNEHFLSEFKAICEKQDLEKELGSEVVRNIEKAIFDQRPLKSQKGQVGKCVFEKNKTKCPSSHPMYEEFRMLTFINNIKIKTPNDDVLRPLNTGEREKIMPLFFRKSKKQFDFEDITKKLAPKKMYGFYKKEEDAEMPFLFNYPMDTSVSGCPVTAALKDVFGDDWITAICETYTLGEGKSRFDIVNDIWHALYFYSDKDKLAEFAINRLQLSEDEAKIFSEISLPADYASLSLKAICKILPYLRRGLIYSHAVFLGNLCEVMPKYEWSIKEMRETIIDNIIMEMDKCDTKDKRTFEVCIKDYLKGQYNVSDNSLKKLYHPSMIETYPRVQYTNEHGVYQLGSPRIDSVRNPMAMRSMFRLRKLVNRLLVEGKIDQNTEVHIEFARELNDANKRNAIALFVKENQSANDEARKQIITLFKKETGTDIEPTDKDILKYVLWEEQNHICLYTGKQIRISDFIGANPKFDIEHTIPRSVGGDSTKMNLTLCDSRFNREVKKTKLPVELPNHDEIMERIKEWKKNYELLDIQIRKNKKLSKGATTKEQKDTIIRKRHLLELRRDYWRGKYERFTMESVPEGFSRRQGTDISVISKYARLYLKSLFNRVYTVKGIATSDFRKIWGIQDIYSKKERINHVHHCIDAIVIACIGLDEYNKLGAYYHDEENNKWYGMSKASFKKPWATFVEDIKKIQDEILVYHYTPDNMPKQGRRRIKIDGKKILCKGDAARGSLHNDTYYGAIENDGAVKYVKRIDLASLEEKDVKNIVDDTVRSIIEAAIKEKGFKDAMASTIWMNEEKRVPIKKVRCFTPSITKPLNIRKQRDVSIKEYKQQYHVANDSNYLLALYIGTDNKGKEKREFEIVNILQAAQYYRTSNDKEVVDRHIVPIKSEHDYPFAYTLKIGTMVLLYEKSPNEVWDATIKERNRRLYKVTGLSTMRMKGRNGEYAYATVKLIHNEEARPSKDIKAKNGEYEQGEEFRPAIIMLHTQLNALVQGYDFEINELGEIRRLR

SEQ ID NO: 402 - protein, 1234 aa, Prevotella tannerae
  REGION 1..1234: note = Prevotella tannerae ATCC 51259
MPNFWSIFTENLQTYLMKTRILGLDTGTNSLGWAVVDRDENNQYTPICRGDLIFTEGVKQEKGIEFSLAAERTSYRASRRHYFRRRLRKVEVLKVLVKHKLCPPLSDEALNRWHTKKEYPLDEDFILWQRTNEADNKNPYHDRHICLHRKLNLKDSQTDRYTLGRALYHLTQRRGFLSNRLDQNEEAEETGKVKSAISELSKEMKEAGCEFLGDYFYLLYRTEGNRVRIRSRYTDREKHYLQEFKEICRVQELDEDLAKALEKTIFFQRPLKSQRQGVGKCTMEKGHSRCAVSHPLYEEYRLLCYLNNIRIKTPSDDRLRPLNAEEREKITPLFYKEKNFDFEKIAKKLAGKTPFGWIRDAEDWPYQFNYRMTQEAPACPTTAQLIKVFGEDWKAALAETYTMSAKQDGTLKTEDEICTDIWNVLYSFSSKEKLKEFGLKKLQLDEVQAKAFSEIRLTRDFASLSLKAIRKILFFLRTGEDYSKAIFLANIPTIVGEEIWNDIERRSRLLYKVDLALRPQEERDAEEHRTIAERIKAAVAAEVPDAPIDLLYHPSMIEAYPDAKRNERFDCYQLGSPKTNAVRNPMAMRSLHMVRKVINHLLRKHIIDEKTEIHIEYARELNDANKRQAIADWQRELSKRHTAYAQNIRQLYKAETGLVIEPTKADILKYQLWEEQQHVCLYTGKKIGIADFLGANPKFDIEHTIPRSRGGDSTQENLTLCESKFNRDIKRDKLPTELANYEEILARIEHWKKQCYALKLKRDGIRTHSGLEKSIKDSRIRRRHLVGLEYGYLKGKYDRFTMKEVPEGFSRRQGAGIGLISKYAGLFLKSLFKDPKNPNRSNVYVVKGAITAEFRKLWGLQQADEAKSRENHTHHCIDAYTIACIGPCEYAALAAYYRSDEEFKYGRRREKPQFEKPWPTFTEDLLKLQEELLIVHQTTDKLGKRDRRKVKTPRGKFLTGGDSARGRLHQETYYGAINYDGNIKYVVRKPLDSLTEKDLDKIVDETVMGIVKGAVEAKGSLKEALADGIYMNKEKGILIKRVRIFSDVSEPINLKQLRDVSTKEYKRHIHLRKDENYLFAIYEGIDKKKNKKQTETATVDYLDAAKFYKDSKRRDKANSLVGDYSKKNKLPLKCILKKRQMVLFYEHSPEEIRFKDKKDLSRRLYIVTSIAKDGRVKFLHHQAATATGIQSSPSPFTNDGEHQPYYRLSASNIKVLVAGIDFDINILGEITPKL

SEQ ID NO: 403 - protein, 1487 aa, Prevotella timonensis
  REGION 1..1487: note = Prevotella timonensis CRIS 5C-B1
MKNILGLDLGSNSVGWALVKVEENGNPIGSIKMGSRIIPMSQDILGSFEKGDTVSQTAQRTLYRGKRRLIERHVLRRERLCRVLHIMNFLPAHFDRLLGWDKTDNKTYGKFIDDSEPKLAWRQNKNEMGKMEFVFMDSFHEMLSDFAKHQPQLIANGKKVPLDWTIYYLRKKALTQLISKEELAWILLNFNKKRGYYQLRGEEEEEQPTKKEEYKVLKVISVDADEGQKGNGIWYNIHLEDGGIYKKKSDIPLYDWVGKTLQLIVVTTYEKDGKTPKIFDSGKQNPSYRLPKEDDWGLVKKRTESQLQSSGKTVGAFIYDNILSKPDDKIRGNLVRTIERKYYKKELIEILQQQAKYHDELHNQNLLESCAKELYAHNDVHYNEVIKSNMINLLVNDIIFYQRPLKSKKSLIANCKYESYEYVDKETGEIKEMPIKCIAKSNPYYQEFRLWQFIHNLRLSDVVTREDVTAQYLSTPQDYCNLFTYLNDRKEIKQDILLKDFFKIKKVQIDKEKVFPIEWNYIKDATKSYPCNETRYELLSALKRAGMDKQWLDDTPNMQYRLWHLLYSVEEKEESAKALRKLYDDDKFVTSFLKIKPFNKCYGAYSEKAIKRLLTLMRMGKAWNEQAIDAKTLKCIQQIITDNVDSKLKEKIDDSRYVLHHVSDFQGLPTYLASYVIYGRHSEVTDIQCWDSPEDLLKFIRDFKQHSLRNPIVEQVILETLRVVYDIWKAEKHIDEIHVEVAREMKLTAQQRNEANLRNLNNEATNLRIKYLLEELKNDTFIKDVRPLSPIHQEKMRIYEQAVLGNLNKQDKDYDDIIKISKKEHPTNAELIRYKLWLEQRYCSPYTGKAISLSKLFTTAYEIEHIIPQSRYFDNSFNNKVICEAEVNKAKGNMLGYEFIKKQGGQKIYCTQLGKAVTILKEEAYKQFVNEHYAHNKRKRDNLLAENIPESFSSRQLNDTRYITKTIMSLLSNVVRQQSEEEATAKNLLPSSGSVTDRLKNDWGLKDVWNTIVTPRFERLNKLSGTNDFGEMKEENGNRYFQTNVPLEYEKGFKKKRIDHRHHAMDALVIACTTRNMVNYISNANANSPKQREDLRQLLCDKNRIINKPWDTFTQDALKALNDIVVSFKNNVRIINRATNRYQRYDKNGKKIIFSQKGDDMWAIRKSMHKETVFGRVNLIRKEVLPIAKALDNISAICNAQLRAYVNDLVDKHFNKKQLVAHFKSLNYKWNRQDVSKVEVWISSDNKTPMVAVRKPLDTSFDKKKIASITDTGIQTILLNYLESKGGDASVAFAPEGIQEMNSNIELYNNGKAHKPIKNVRLSEPLGAKYQVGERGAKTKKYVEADKGTNLFFAIYEDEEGKRYYYSVPLREAIERQKQKLSPVPEYNEKGVALKFYLSPNDLVYVPTEEERTMGTCHIDKARIYKMVSSTGCSCYFVPSTFAKVIVDKVELQSLNKMEKAITDECIKEVCWKLKVDRLGNIINVIK

SEQ ID NO: 404 - protein, 1218 aa, Prevotella timonensis
  REGION 1..1218: note = Prevotella timonensis CRIS 5C-B1
MNKRILGLDTGTNSLGWAVVDWDEHAQSYELIKYGDVIFQEGVKIEKGIESSKAAERSGYKAIRKQYFRRRLRKIQVLKVLVKYHLCPYLSDDDLRQWHLQKQYPKSDELMLWQRTSDEEGKNPYYDRHRCLHEKLDLTVEADRYTLGRALYHLTQRRGFLSNRLDTSADNKEDGVVKSGISQLSTEMEEAGCEYLGDYFYKLYDAQGNKVRIRQRYTDRNKHYQHEFDAICEKQELSSELIEDLQRAIFFQLPLKSQRHGVGRCTFERGKPRCADSHPDYEEFRMLCFVNNIQVKGPHDLELRPLTYEEREKIEPLFFRKSKPNFDFEDIAKALAGKKNYAWIHDKEERAYKFNYRMTQGVPGCPTIAQLKSIFGDDWKTGIAETYTLIQKKNGSKSLQEMVDDVWNVLYSFSSVEKLKEFAHHKLQLDEESAEKFAKIKLSHSFAALSLKAIRKFLPFLRKGMYYTHASFFANIPTIVGKEIWNKEQNRKYIMENVGELVFNYQPKHREVQGTIEMLIKDFLANNFELPAGATDKLYHPSMIETYPNAQRNEFGILQLGSPRTNAIRNPMAMRSLHILRRVVNQLLKESIIDENTEVHVEYARELNDANKRRAIADRQKEQDKQHKKYGDEIRKLYKEETGKDIEPTQTDVLKFQLWEEQNHHCLYTGEQIGITDFIGSNPKFDIEHTIPQSVGGDSTQMNLTLCDNRFNREVKKAKLPTELANHEEILTRIEPWKNKYEQLVKERDKQRTFAGMDKAVKDIRIQKRHKLQMEIDYWRGKYERFTMTEVPEGFSRRQGTGIGLISRYAGLYLKSLFHQADSRNKSNVYVVKGVATAEFRKMWGLQSEYEKKCRDNHSHHCMDAITIACIGKREYDLMAEYYRMEETFKQGRGSKPKFSKPWATFTEDVLNIYKNLLVVHDTPNNMPKHTKKYVQTSIGKVLAQGDTARGSLHLDTYYGAIERDGEIRYVVRRPLSSFTKPEELENIVDETVKRTIKEAIADKNFKQAIAEPIYMNEEKGILIKKVRCFAKSVKQPINIRQHRDLSKKEYKQQYHVMNENNYLLAIYEGLVKNKVVREFEIVSYIEAAKYYKRSQDRNIFSSIVPTHSTKYGLPLKTKLLMGQLVLMFEENPDEIQVDNTKDLVKRLYKVVGIEKDGRIKFKYHQEARKEGLPIFSTPYKNNDDYAPIFRQSINNINILVDGIDFTIDILGKVTLKE

SEQ ID NO: 405 - protein, 1496 aa, Prevotella veroralis
  REGION 1..1496: note = Prevotella veroralis F0319
MKTILGLDLGTNSIGWAKVCVDDNGNYLRDIKLGSRIIPMSQDVLGNFDKGVTESQTSVRTGFRGVRRIRERSLLRRERLHRVLHVLGYLPPHYDSAIGWNKNEPSTYGKFLNHGEPKLAWEHKEDGSMRFLFMESFHEMMADFAKSQPSLVSDGKKIPLDWTIYYLRKKALSQPIRKEELAWLLLNFNQKRGYYQLRGEEDDDNPTKCEEYYELKVVGIEADEEGKNGNTWYNVKLENGWIYRRQSKIPLDDWIGKVREFIVTTEYEKDGITLKKDKNGDVKRSFRSPSEDDWGLRKKRTEKLLDSSKMTVGAFVYDHLLAEPSDKIRGKFIRTIERKYYKKELYAILCEQSKYHEELRSGDYLNKCAEELYKNNQPHRNSLLTKDLAYLLLEDLIFYQRPLKTKKSLIAECPYEAYKYVDKETGEIKRQGIKCIAKSNPYYQEFRLWQFISNLRLFNKADDKEVTADYLPTQDDYVRLFAYLNDRKEINQETLLKEFFKLKKITVNSEKVFPIRWNYIEDKEKKYPCNETRHELLLALDRARIDHSWLEKPGQEYRLWHLLYSVESKEETKEALRKLKDDDAFVESFLKVKPFKREYGAYSEKAIKKLLAVMRMGSLWRETDICDTTKGNITKILQGEIDEKLKEKISASVSSYNQLSDFQGLPVWLACYVVYGRHSEAAEIQHWKTPESLLAYINGFKQHSLRNPIVEQCILETLRTVHDIWKEVGHIDEIHVELGRNMKSTADQRARISENVLRNENTNLRIKSLLLELKNDPNIKDVRPYSPMQQEKLRIYEEGVLQELTKDDKDFTEITKISTMAQPSAKELQRYKLWLEQKYRSPYTGKSISLTKLFTSAYQIEHVIPQSRYFDDSFSNKVICESEVNSLKDNMLGYEFIKNHGGEIIHCTMLGDVKVLSESEYKAFVNDHYAHNKRKRENLLLEDIPQEFLNRQMNDSRYISKVVKALLSNIVRAEGEEEATSKFVVSCSGGITDRLKKDWGLNDVWNKIVYPRFERLNRLTGTEAFGQWENKDGKRVFQTAVPLELQRGFNKKRIDHRHHAMDALVIACTSRNIINYLNNESANNPKKREDLRQKLCDKNRTIRKPWETFTQDATAALEDVIVSFKNYVRIINKATNYYERYDVEGKKVIAEQRGDDMWAIRKPMHEATYYGRVNLRRKKKVNLRVALENISSICDNKLRIYINGLVEKGFNTKQILDKFKNTNDHFSMQKIDKVEIWQFTNEEEKLVATRKPLDTSFDTKKIASITDTGIQTILLNYLETKGGDSTIAFTPEGIVEMNQNISKYNNGKEHMPILKVRLYTKLGKKIPVGQTGCKAKQFVIAEAGTNLYFAIYEDEEGKRSYRTIPLNEVVERLKQGLSPVPEKNDKDVHLKFYLSPNDLVYVPIEDEHESLAKDHIYKFVDSSGTTANFIPHRSANVIFELNKKDAEKFCSGSIIQNEYGVGSSQSKNQKAITGEMIKAVCRKLEVDRLGNVIKVI

SEQ ID NO: 406 - protein, 1062 aa, Ralstonia syzygii
  REGION 1..1062: note = Ralstonia syzygii R24
MAEKQHRWGLDIGTNSIGWAVIALIEGRPAGLVATGSRIFSDGRNPKDGSSLAVERRGPRQMRRRRDRYLRRRDRFMQALINVGLMPGDAAARKALVTENPYVLRQRGLDQALTLPEFGRALFHLNQRRGFQSNRKTDRATAKESGKVKNAIAAFRAGMGNARTVGEALARRLEDGRPVRARMVGQGKDEHYELYIAREWIAQEFDALWASQQRFHAEVLADAARDRLRAILLFQRKLLPVPVGKCFLEPNQPRVAAALPSAQRFRLMQELNHLRVMTLADKRERPLSFQERNDLLAQLVARPKCGFDMLRKIVFGANKEAYRFTIESERRKELKGCDTAAKLAKVNALGTRWQALSLDEQDRLVCLLLDGENDAVLADALREHYGLTDAQIDTLLGLSFEDGHMRLGRSALLRVLDALESGRDEQGLPLSYDKAVVAAGYPAHTADLENGERDALPYYGELLWRYTQDAPTAKNDAERKFGKIANPTVHIGLNQLRKLVNALIQRYGKPAQIVVELARNLKAGLEEKERIKKQQTANLERNERIRQKLQDAGVPDNRENRLRMRLFEELGQGNGLGTPCIYSGRQISLQRLFSNDVQVDHILPFSKTLDDSFANKVLAQHDANRYKGNRGPFEAFGANRDGYAWDDIRARAAVLPRNKRNRFAETAMQDWLHNETDFLARQLTDTAYLSRVARQYLTAICSKDDVYVSPGRLTAMLRAKWGLNRVLDGVMEEQGRPAVKNRDDHRHHAIDAVVIGATDRAMLQQVATLAARAREQDAERLIGDMPTPWPNFLEDVRAAVARCVVSHKPDHGPEGGLHNDTAYGIVAGPFEDGRYRVRHRVSLFDLKPGDLSNVRCDAPLQAELEPIFEQDDARAREVALTALAERYRQRKVWLEELMSVLPIRPRGEDGKTLPDSAPYKAYKGDSNYCYELFINERGRWDGELISTFRANQAAYRRFRNDPARFRRYTAGGRPLLMRLCINDYIAVGTAAERTIFRVVKMSENKITLAEHFEGGTLKQRDADKDDPFKYLTKSPGALRDLGARRIFVDLIGRVLDPGIKGD

SEQ ID NO: 407 - protein, 1066 aa, Rhodopseudomonas palustris
MSERVVRRILGIDLGIASCGWGVVDISGAGGGIIATGVRCFDAPLIDKTGEPKSATRRTARGQRRIVRRRRQRMNGVRRLLCEFGLLPDPRPDALNQAMRRISTASAAAQVTPWTLRAAAHQRLLSNEELAVVLGHIARHRGFRSNAKNEAGANAADETSKMKKAMEATREGLAKYHAFGDMIANDPKFANRKRNRDKDYSHTAKRSDLEDEVRAILRAQLRFGSAAATETLAQTFADVAFFQRPLQDSEDRVGDCPFEPGQKRAARRAPSFELFRFLSRLANLKLAVGRSPERRLTAEEIALAAKGFGETKKTITFKSLREALDLDPNARFSGIGKDKEASLDVVARTGGAAYGTKTLKDALGDAPWRSLSRTPETLDRIAEILSFREDITSIRNGLEDLGLDSLVVEALMQAAANGDFKEFTRAGHISARAARNIIPGLREGLVYSEACARVGYDHAARLSVPLDQVGSPVTRKALSEALKQVRAVAREYGPIDYFHIELARSVGKSAEERKQLTDGIEARNVEKAKRRKQAEEHLGRAPSDDELLRYELAKEQNFKCIYSGDAIDPAGVAANDTRYQVDHILPWSRFGDDSYLNKTLCTARSNQNKRGRTPFEWFEADKTDVEWMEYVARVENLQEVKGRKKRNYSIKDAAAIEDKFKARNLTDTQWATRLLADELSRMFPPRECERAICGRADGGNDGLTIVEERRVFTRPGAITSKLRRAWGLEGLKKQDGKRVEDDRHHAVDALVLAATTESLLQRLTVEVQRREREGRPDDIFHCAEPWRGFRADVRRTVYGSETMPGIFVSRAERRRARGKAHDATIKQIREIEGERLVFERKPVEKLTDKDLEKIPIPKPYGQVSDPKRLRDELVESLRAWIAAGKPKDRPPLSPKGDVIRKVRIQTNDKVSVEINGGTVDRGDMARVDVFRKKNKKAVWEYYVVPIYPHQIVALNDPPDRAVIAYAEDKDWKEIDSSYEFLWSLFGLSYVEISKANGECIDGYFRGLHRGTGAASVCKHISLGKDATVSGIGLKTLASFKKFTIDRLGRKFEIPREVRTWRGEACT

SEQ ID NO: 408 - protein, 1064 aa, Rhodopseudomonas palustris
MSECVTRRILGIDLGIASCGWGVIEVGEASGSIIASGVRCFDAPLIDKTGEPKSATRRTARGQRRIIRRRRQRMNAVRRLLAEFGVLTGRSPDALHQALLRLSQSVAGSQVTPWTLRAAAHERKLTNDELAVVLGHIARHRGFRSNSKNDGGANAADETSKMKKAMETTREGLARYHSFGAMIASDPKFADRKRNRDKDYSHTAKRSDLEDEVRTIFRSQTRFGSLVASEKLSQAFADAAFFQRPLQDSEDMVGSCPFEPGQKRTARRAPSFELFRFLSRLANLKLTVGRAPERRLTPDEIALAAKGFGETKKSITFKSLREALDLDPNARFSGVAKEKESTLDVAARTGGAAYGTKTLKDALGDAPWRSLSRMPEKLDRIAEILSFREDMKAIRNGLEEVGLDGLVVDALMQATANGDFKDFTRAAHISALAARNIIPGLREGLVYSDACTRVGYDHAARPAVPLSQIGSPVTRKALSEALKQVRAVAREYGPIDYFHIELARSIGKSAEERKKLTDGIEARNVEKEKRRKEAAEHLGRAPSDDELLRYELAKEQNFKCIYSGDPIDPAGISANDTRYQVDHILPWSRFGDDSYVNKTLCTARSNQNKRGRTPFEWFDADKTEAEWMEYSARVEDLKEVKGRKKRNYSIKDAASVEDKFKARNLTDTQWATRLLADELKRMFPPRECERVVTVRADGGNDGLSIVEERRVFTRPGAITSKLRRAWGLEGLKKQDGKRVEDDRHHAVDALVLAATTESLLNRLTVEVQQREREGRQDDIFHCSQPWPGFRVDVQRTVYGSETMPGIFVSRAERRRARGKAHDATVKQIRDIDGERIVFERKPIEKLTDKDLERIPVPEPYGKAADPKKLRDELVENLRAWIAAGKPKDKPPRSPKGDIIRKVRIETKDKVAVEINGGTVDRGDMARVDVFRKKNKKGVWEFYVIPIYPHQIVASALPPNRAVIAYKAESEWTAIDGCFEFAWSLNPMSYLELVKSNGELIEGYFRSMDRTTGAINLSPMSTNSETIRSIGVKTLSSFRKFTVDRLGRKFEIPREVRTWRGEACT

SEQ ID NO: 409 - protein, 1173 aa, Rhodospirillum rubrum
  REGION 1..1173: note = Rhodospirillum rubrum ATCC 11170
MRPIEPWILGLDIGTDSLGWAVFSCEEKGPPTAKELLGGGVRLFDSGRDAKDHTSRQAERGAFRRARRQTRTWPWRRDRLIALFQAAGLTPPAAETRQIALALRREAVSRPLAPDALWAALLHLAHHRGFRSNRIDKRERAAAKALAKAKPAKATAKATAPAKEADDEAGFWEGAEAALRQRMAASGAPTVGALLADDLDRGQPVRMRYNQSDRDGVVAPTRALIAEELAEIVARQSSAYPGLDWPAVTRLVLDQRPLRSKGAGPCAFLPGEDRALRALPTVQDFIIRQTLANLRLPSTSADEPRPLTDEEHAKALALLSTARFVEWPALRRALGLKRGVKFTAETERNGAKQAARGTAGNLTEAILAPLIPGWSGWDLDRKDRVFSDLWAARQDRSALLALIGDPRGPTRVTEDETAEAVADAIQIVLPTGRASLSAKAARAIAQAMAPGIGYDEAVTLALGLHHSHRPRQERLARLPYYAAALPDVGLDGDPVGPPPAEDDGAAAEAYYGRIGNISVHIALNETRKIVNALLHRHGPILRLVMVETTRELKAGADERKRMIAEQAERERENAEIDVELRKSDRWMANARERRQRVRLARRQNNLCPYTSTPIGHADLLGDAYDIDHVIPLARGGRDSLDNMVLCQSDANKTKGDKTPWEAFHDKPGWIAQRDDFLARLDPQTAKALAWRFADDAGERVARKSAEDEDQGFLPRQLTDTGYIARVALRYLSLVTNEPNAVVATNGRLTGLLRLAWDITPGPAPRDLLPTPRDALRDDTAARRFLDGLTPPPLAKAVEGAVQARLAALGRSRVADAGLADALGLTLASLGGGGKNRADHRHHFIDAAMIAVTTRGLINQINQASGAGRILDLRKWPRTNFEPPYPTFRAEVMKQWDHIHPSIRPAHRDGGSLHAATVFGVRNRPDARVLVQRKPVEKLFLDANAKPLPADKIAEIIDGFASPRMAKRFKALLARYQAAHPEVPPALAALAVARDPAFGPRGMTANTVIAGRSDGDGEDAGLITPFRANPKAAVRTMGNAVYEVWEIQVKGRPRWTHRVLTRFDRTQPAPPPPPENARLVMRLRRGDLVYWPLESGDRLFLVKKMAVDGRLALWPARLATGKATALYAQLSCPNINLNGDQGYCVQSAEGIRKEKIRTTSCTALGRLRLSKKAT

SEQ ID NO: 410 - protein, 1059 aa, Rhodovulum sp.
  REGION 1..1059: note = Rhodovulum sp. PH10
MGIRFAFDLGTNSIGWAVWRTGPGVFGEDTAASLDGSGVLIFKDGRNPKDGQSLATMRRVPRQSRKRRDRFVLRRRDLLAALRKAGLFPVDVEEGRRLAATDPYHLRAKALDESLTPHEMGRVIFHLNQRRGFRSNRKADRQDREKGKIAEGSKRLAETLAATNCRTLGEFLWSRHRGTPRTRSPTRIRMEGEGAKALYAFYPTREMVRAEFERLWTAQSRFAPDLLTPERHEEIAGILFRQRDLAPPKIGCCTFEPSERRLPRALPSVEARGIYERLAHLRITTGPVSDRGLTRPERDVLASALLAGKSLTFKAVRKTLKILPHALVNFEEAGEKGLDGALTAKLLSKPDHYGAAWHGLSFAEKDTFVGKLLDEADEERLIRRLVTENRLSEDAARRCASIPLADGYGRLGRTANTEILAALVEETDETGTVVTYAEAVRRAGERTGRNWHHSDERDGVILDRLPYYGEILQRHVVPGSGEPEEKNEAARWGRLANPTVHIGLNQLRKVVNRLIAAHGRPDQIVVELARELKLNREQKERLDRENRKNREENERRTAILAEHGQRDTAENKIRLRLFEEQARANAGIALCPYTGRAIGIAELFTSEVEIDHILPVSLTLDDSLANRVLCRREANREKRRQTPFQAFGATPAWNDIVARAAKLPPNKRWRFDPAALERFEREGGFLGRQLNETKYLSRLAKIYLGKICDPDRVYVTPGTLTGLLRARWGLNSILSDSNFKNRSDHRHHAVDAVVIGVLTRGMIQRIAHDAARAEDQDLDRVFRDVPVPFEDFRDHVRERVSTITVAVKPEHGKGGALHEDTSYGLVPDTDPNAALGNLVVRKPIRSLTAGEVDRVRDRALRARLGALAAPFRDESGRVRDAKGLAQALEAFGAENGIRRVRILKPDASVVTIADRRTGVPYRAVAPGENHHVDIVQMRDGSWRGFAASVFEVNRPGWRPEWEVKKLGGKLVMRLHKGDMVELSDKDGQRRVKVVQQIEISANRVRLSPHNDGGKLQDRHADADDPFRWDLATIPLLKDRGCVAVRVDPIGVVTLRRSNV

SEQ ID NO: 411 - protein, 1405 aa, Riemerella anatipestifer
MKTILGLDLGTNSIGWALVKEAENSNEKSEIIKLGVRVNPLTVDEKTNFEAGRPLSTNADRTAKRSARRNLQRYKLRRKNLIDLLIKNQLIDKDTPLTEIGKNTTHQTLELRAKAARERIELEDLARVFLAINKKRGYRSSRKVNNEEEGQAVDGMAVAKKLYDENLTPGQYAYELLSKGKKYVPDFYRSDLQAEFNAIWEYQKQFYADILDDELYNALKGQGQQNSRKRFLAIKGVYTAENKGKRDDVKLRHYKWRSEAISKKINIEEVAYVLVEINNDLNKSSGYLGAISDRSKELYFNKETVGENLWKQIQKNPHTSLKNQVFYRQDYLDEFEQIWETQAQFHPQLTLALKEQIRDVIIFYQRKLKSQKGLLSFCQFESWEIERKDENGNVILNKTTQLPKRQTVGRRVAPKSSPLFQEFKIWQNINNLEVTKISEGASKNKKETETLSDDERKLLFEELNLRGNLSQKEVLQILGLKDKEYKTNFSEGLEGNRTNAALFNIYQQIAENEGYGFDWSKKSAQEIKEELKAVFPQIGIQADILDFNANLDGKEFENQASYQLWHLLYSAEEDDKINEEDQIIYGNSAVSLKKKLCEKFGFTPEYAKWIANVSLQDDYGNLSTKAMRKIIPYLIDGNDYSEACALAGYNHSNSLTKEENDNRELLDKLELLPKNSLRNPVVEKILNQMVNVVNQVIETYGKPDEVRIELARELKKSAEKRAEMTKSINEATRRNEDIKKLITKDFGIPNPTKSDVVRYRLWEELAPLAYKDVFTGKQIKKEDLFSSKIDIEHIIPKALLFDDSFSNKTLVFRETNLKKADRTAYDFIESDYNATLDDYIQRVETLYNNTKGTISKGKRNKLLMAQKNLPDGFIERDLRNSQYIAKKAKAMLYQVFKDVNVTSGSITDRLREDWDLINVMKELNFPKYKALGLTEIEERYDIGQEKTKRVEVITDWTKRNDHRHHAMNALTVAFTTSSHIQYLNYLNARKNESHKEHKNIKGIENKITHKQKDKRKFIPPMPNFREEAKKHIETILVSIKNKNKVYTKNINKTKKKSGHNTKEQLTPRGQLHKETVYGKSKRPMSKPTKINKNFSLEQAQLIINVQEKELVLRHLAQFDNNPAVAFDTKTLKKMPLLKNGEPLKEVLCFEEIFTIRKDITPDLKIEKVVDEKIKAILEQRKKDFGGNAKEAFSDLDKNPIWLNKKKGICIKRVTITGVSNAEALHHQKDHLGREILDDNGNPIPADFVSTGNNHHLAVYLDSEGKLQDNIVSFYEAVVRTSQGLPVVDKGLNKDLGWKFLFSLKQNEMFVFPNDDFDINDFDLLDDKKAELISKHLYRVQKISKVSAGNSFVRDIVFRHHLETTVKEVKELKDISYIQLKSLEGLRNIKKVRINHIGKIVQVGEY

SEQ ID NO: 412 - protein, 1400 aa, Riemerella anatipestifer
MKTILGLDLGTNSIGWALVKETENSNEKSEIIKLGVRVNPLTVDEKTNFEAGRPLSTNADRTAKRSARRNLQRYKLRRKNLIDLLIKHRLIDKDTPLTEIGKNTTHQTLELRAKAARERIELEDLARVFLAINKKRGYRSSRKVNNEEEGQVVDGMAVAKKLYDENLTPGQYAYELLSKGKKYVPDFYRSDLQAEFDSIWEYQKQFYADILDDELYNALKGQGQQNSRKRFLAIKGVYTAENKGKRDEVKLQHYKWRSEAITQKLSIEEVAYVLVEINNDLNKSSGYLGAISDRSKELYFNKETVGENLWKQIQKNPHTSLKNQVFYRQDYLDEFEQIWETQAQFHPQLTLALKEQIRDVVIFYQRKLKSQKGLLSFCQFESWEIERKDENGNVILNKTTQLPKRQTVGRRVAPKSSPLFQEFKIWQNINNLEIAKISDGNSKNKKETEALSDDERKLLFEELNLRGNLSQKEVLQILGLKDKEYKTNFPEGLEGNRTNAALFNIYQQIAENEGYGDWTKKSAQEIKEELKAVFPQIGIQADILDFNAELDGKEFENQASYQLWHLLYSAEEDDKINEEDQIIYGNSAVSLKKKLCEKFGFTPEYAKWIANVSLQDDYGNLSTKAMRKIIPYLIDGNDYSEACALAGYNHSNSLTKEENDNRERLNKLELLPKNSLRNPVVEKILNQMVNVVNQVIETYGKPDEVRIELARELKKSAEERAEMTKGINEATRRNEDIKKLITKNFGIPNPTKNDVVRYRLWEELAPLAYKDVFTGRQIKKEDLFSSKIDIEHIIPKALLFDDSFSNKTLAFRETNLKKADRTAYGFIESDYNATLDDYIQRVETLYNNAKGTISKGKRNKLLMAQKNLPDGFIERDLRNSQYIAKKAKSMIEKVFNDVNVTSGSITDRLREDWDLINVMKELNFPKYKALGLTEIEERYDIGQEKTKKVEVITDWTKRNDHRHHAMDALTVAFTTKSHVQYLNNLNTIHSLKGDEVDLELSKLYGLKNTITEVVNKKRKFIPPMPNFREEAKKHIETILVSIKNKNKVYTKNINKTKKESGYHTKEQLTPRGQLHKETVYGKSKRPMNKPTKINKNFSLEQAQLIINVQEKELVLRHLAQFDNNPAVAFDTKTLKKMPLLKNGEPLKEVLCFEEIFTIRKDITPDLKIEKVVDEKIKAILEQRKKDFGGNAKEAFSDLDKNPIWLNKEKGICIKRVTITGVSNAEALHHQKDHLGREILDDNGNPIPADFVSTGNNHHVAIYEDEKGKLQEKVVSLYEAVARANQGLPVVDKGLNEDLGWKFLFTMKQNEMFVFPNDDFDVNDIDLLDENNAKIISQHLFRVQKLATKNYMFRHHLETNVQEVKELNDIAYKSIRSTEPLKNIKKVRINHIGKIVQVGEY

SEQ ID NO: 413 - protein, 1140 aa, Roseburia intestinalis
  REGION 1..1140: note = Roseburia intestinalis L1-82
MRENGSDERRRNMDEKMDYRIGLDIGIASVGWAVLQNNSDDEPVRIVDLGVRIFDTAEIPKTGESLAGPRRAARTTRRRLRRRKHRLDRIKWLFENQGLINIDDFLKRYNMAGLPDVYQLRYEALDRKLTDEELAQVLLHIAKHRGFRSTRKAETAAKENGAVLKATDENQKRMQEKGYRTVGEMIYLDEAFRTGCSWSEKGYILTPRNKAENYQHTMLRAMLVEEVKEIFSSQRRLGNEKATEELEEKYLEIMTSQRSFDLGPGMQPDGKPSPYAMEGFSDRVGKCTFLGDQGELRGAKGTYTAEYFVALQKINHTKLVNQDGETRNFTEEERRALTLLLFTQKEVKYAAVRKKLGLPEDILFYNLNYKKAATKEEQQKENQNTEKAKFIGMPYYHDYKKCLEERVKYLTENEVRDLFDEIGMILTCYKNDDSRTERLAKLGLVPIEMEGLLAYTPTKFQHLSMKAMRNIIPFLEKGMTYDKACEEAGYDFKADSKGTKQKLLTGENVNQTINEITNPVVKRSVSQTVKVINAIIRTYGSPQAINIELAREMSKTFEERRKIKGDMEKRQKNNEDVKKQIQELGKLSPTGQDILKYRLWQEQQGICMYSGKTIPLEELFKPGYDIDHILPYSITFDDSFRNKVLVTSQENRQKGNRTPYEYMGNDEQRWNEFETRVKTTIRDYKKQQKLLKKHFSEEERSEFKERNLTDTKYITTVIYNMIRQNLEMAPLNRPEKKKQVRAVNGAITAYLRKRWGLPQKNRETDTHHAMDAVVIACCTDGMIQKISRYTKVRERCYSKGTEFVDAETGEIFRPEDYSRAEWDEIFGVHIPKPWETFRAELDVRMGDDPKGFLDTHSDVALELDYPEYIYENLRPIFVSRMPNHKVTGAAHADTIRSPRHFKDEGIVLTKTALTDLKLDKDGEIDGYYNPQSDLLLYEALKKQLLLYGNDAKKAFAQDFHKPKADGTEGPVVRKVKIQKKQTMGVFVDSGNGIAENGGMVRIDVFRVNGKYYFVPVYTADVVKKVLPNRASTAHKPYGEWKVMEDKDFLFSLYSRDLIHIKSKKDIPIKMVNGGMEGIKETYAYYIGADISAANIQGIAHDSRYKFRGLGIQSLDVLEKCQIDVLGHVSVVRSEKRMGFS

SEQ ID NO: 414 - protein, 1128 aa, Roseburia intestinalis
  REGION 1..1128: note = Roseburia intestinalis M50/1
MDEKMDYRIGLDIGIASVGWAVLQNNSDDEPVRIVDLGVRIFDTAEIPKTGESLAGPRRAARTTRRRLRRRKHRLDRIKWLFENQGLINIDDFLKRYNMAGLPDVYQLRYEALDRKLTDEELAQVLLHIAKHRGFRSTRKAETAAKENGAVLKATDENQKRMQEKGYRTVGEMIYLDEAFRIGCSWSEKGYILTPRNKAENYQHTMLRAMLVEEVKEIFSSQRRLGNKKATEELEEKYLEIMTSQRSFDLGPGMQPDGKPSPYAMEGFSDRVGKCTFLGDQGELRGAKGTYTAEYFVALQKINHTKLVNQDGETRNFTEEERRALTLLLFTQKEVKYAAVRKKLGLPEDILFYNLNYKKAATKEEQQKENQNTEKAKFIGMPYYHDYKKCLEERVKYLTENEVRDLFDEIGMILTCYKNDDSRTERLAKLGLVPIEMEGLLAYTPTKFQHLSMKAMRNIIPFLEKGMTYDKACEEAGYDFKADSKGTKQKLLTGENVNQTINEITNPVVKRSVSQTVKVINAIIRTYGSPQAINIELAREMSKTFEERRKIKGDMEKRQKNNEDVKKQIQELGKLSPTGQDILKYRLWQEQQGICMYSGKTIPLEELFKPGYDIDHILPYSITFDDSFRNKVLVTSQENRQKGNRTPYEYMGNDEQRWNEFETRVKTTIRDYKKQQKLLKKHFSEEERSEFKERNLTDTKYITTVIYNMIRQNLEMAPLNRPEKKKQVRAVNGAITAYLRKRWGLPQKNRETDTHHAMDAVVIACCTDGMIQKISRYTKVRERCYSKGTEFVDAETGEIFRPEDYSRAEWDEIFGVHIPKPWETFRAELDVRMGDDPKGFLDTHSDVALELDYPEYIYENLRPIFVSRMPNHKVTGAAHADTIRSPRHFKDEGIVLTKTALTDLKLDKDGEIDGYYNPQSDLLLYEALKKQLLLYGNDAKKAFAQDFHKPKADGTEGPVVRKVKIQKKQTMGVFVDSGNGIAENGGMVRIDVFRVNGKYYFVPVYTADVVKKVLPNRASTANKPYSEWRTMEDKDFLFSLYSRDLVHIKSKKGIPIKNVDGSLGESKEVYAYYIGADISGAKIEGKAHDSRYTFRGIGVQKLELIEKCQVDILGHISTVKNEKRMGFS

SEQ ID NO: 415 - protein, 1152 aa, Roseburia inulinivorans
  REGION 1..1152: note = Roseburia inulinivorans DSM 16841
MNAEHGKEGLLIMEENFQYRIGLDIGITSVGWAVLQNNSQDEPVRITDLGVRIFDVAENPKNGDALAAPRRDARTTRRRLRRRRHRLERIKFLLQENGLIEMDSFMERYYKGNLPDVYQLRYEGLDRKLKDEELAQVLIHIAKHRGFRSTRKAETKEKEGGAVLKATTENQKIMQEKGYRTVGEMLYLDEAFHTECLWNEKGYVLTPRNRPDDYKHTILRSMLVEEVHAIFAAQRAHGNQKATEGLEEAYVEIMTSQRSFDMGPGLQPDGKPSPYAMEGFGDRVGKCTFEKDEYRAPKATYTAELFVALQKINHTKLIDEFGTGRFFSEEERKTIIGLLLSSKELKYGTIRKKLNIDPSLKFNSLNYSAKKEGETEEERVLDTEKAKFASMFWTYEYSKCLKDRTEEMPVGEKADLFDRIGEILTAYKNDDSRSSRLKELGLSGEEIDGLLDLSPAKYQRVSLKAMRKMQPYLEDGLIYDKACEAAGYDFRALNDGNKKHLLKGEEINAIVNDITNPVVKRSVSQTIKVINAIIQKYGSPQAVNIELAREMSKNFQDRTNLEKEMKKRQQENERAKQQIIELGKQNPTGQDILKYRLWNDQGGYCLYSGKKIPLEELFDGGYDIDHILPYSITFDDSYRNKVLVTAQENRQKGNRTPYEYFGADEKRWEDYEASVRLLVRDYKKQQKLLKKNFTEEERKEFKERNLNDTKYITRVVYNMIRQNLELEPFNHPEKKKQVWAVNGAVTSYLRKRWGLMQKDRSTDRHHAMDAVVIACCTDGMIHKISRYMQGRELAYSRNFKFPDEETGEILNRDNFTREQWDEKFGVKVPLPWNSFRDELDIRLLNEDPKNFLLTHADVQRELDYPGWMYGEEESPIEEGRYINYIRPLFVSRMPNHKVTGSAHDATIRSARDYETRGVVITKVPLTDLKLNKDNEIEGYYDKDSDRLLYQALVRQLLLHGNDGKKAFAEDFHKPKADGTEGPVVRKVKIEKKQTSGVMVRGGTGIAANGEMVRIDVFRENGKYYFVPVYTADVVRKVLPNRAATHTKPYSEWRVMDDANFVFSLYSRDLIHVKSKKDIKTNLVNGGLLLQKEIFAYYTGADIATASIAGFANDSNFKFRGLGIQSLEIFEKCQVDILGNISVVRHENRQEFH

SEQ ID NO: 416 - protein, 1156 aa, Ruminococcus albus
  REGION 1..1156: note = Ruminococcus albus 8
MGNYYLGLDVGIGSIGWAVINIEKKRIEDFNVRIFKSGEIQEKNRNSRASQQCRRSRGLRRLYRRKSHRKLRLKNYLSIIGLTTSEKIDYYYETADNNVIQLRNKGLSEKLTPEEIAACLIHICNNRGYKDFYEVNVEDIEDPDERNEYKEEHDSIVLISNLMNEGGYCTPAEMICNCREFDEPNSVYRKFHNSAASKNHYLITRHMLVKEVDLILENQSKYYGILDDKTIAKIKDIIFAQRDFEIGPGKNERFRRFTGYLDSIGKCQFFKDQERGSRFTVIADIYAFVNVLSQYTYTNNRGESVFDTSFANDLINSALKNGSMDKRELKAIAKSYHIDISDKNSDTSLTKCFKYIKVVKPLFEKYGYDWDKLIENYTDTDNNVLNRIGIVLSQAQTPKRRREKLKALNIGLDDGLINELTKLKLSGTANVSYKYMQGSIEAFCEGDLYGKYQAKFNKEIPDIDENAKPQKLPPFKNEDDCEFFKNPVVFRSINETRKLINAIIDKYGYPAAVNIETADELNKTFEDRAIDTKRNNDNQKENDRIVKEIIECIKCDEVHARHLIEKYKLWEAQEGKCLYSGETITKEDMLRDKDKLFEVDHIVPYSLILDNTINNKALVYAEENQKKGQRTPLMYMNEAQAADYRVRVNTMFKSKKCSKKKYQYLMLPDLNDQELLGGWRSRNLNDTRYICKYLVNYLRKNLRFDRSYESSDEDDLKIRDHYRVFPVKSRFTSMFRRWWLNEKTWGRYDKAELKKLTYLDHAADAIIIANCRPEYVVLAGEKLKLNKMYHQAGKRITPEYEQSKKACIDNLYKLFRMDRRTAEKLLSGHGRLTPIIPNLSEEVDKRLWDKNIYEQFWKDDKDKKSCEELYRENVASLYKGDPKFASSLSMPVISLKPDHKYRGTITGEEAIRVKEIDGKLIKLKRKSISEITAESINSIYTDDKILIDSLKTIFEQADYKDVGDYLKKTNQHFFTTSSGKRVNKVTVIEKVPSRWLRKEIDDNNFSLLNDSSYYCIELYKDSKGDNNLQGIAMSDIVHDRKTKKLYLKPDFNYPDDYYTHVMYIFPGDYLRIKSTSKKSGEQLKFEGYFISVKNVNENSFRFISDNKPCAKDKRVSITKKDIVIKLAVDLMGKVQGENNGKGISCGEPLSLLKEKN

SEQ ID NO: 417 - protein, 1341 aa, Ruminococcus lactaris
  REGION 1..1341: note = Ruminococcus lactaris ATCC 29176
MGKGYYVGLDMGTGSVGWAVTDESYQILRRHGKAMWGVRLFESAKTAEERRMFRTGRRRLDRRGWRIEILQEIFAEEISRVDPGFFLRMKESKYYPEDKRDIQGNCPELPYTLFVDKTFTDKDFHKKYPTIYHLRKMLMETEDTPDMRLVYLALHHMMKHRGHFLLSGDISQVTEFKNTFNQFIENIRNEEMDFEIELDESAVQMIEETLKDKNLTRSAKKSKLVKGLNAKNVRDKAFLTLLSGGTVKLSDLFGMEELNEGERPKISFADNGYEEYAAVVEMELGELYYIVESAKAVYDWAILSDILGGSTSVSDAKVRAYEKHKADLKYLKAVVKEYFPKEVYNAVFVESSDKLNNYPAYIGMTKKNGKKVSLEGKRCSREEFMDFLKKNIVVKLPDEEAKMYLQSELEKDSFLPKQVNKDNGVIPYQVHKYELKKILDNLGDKIPFLKENAEKIEKLFSFRIPYYVGPLRTGNGENSKFAWAERKSTEKIYPWNFENVIDVEQSAENFIRRMTNKCTYLIGEDVLPKDSLLYSKFMVLNELNNLRLDGQKISVELKQKIYRDVFCRSRKVTQKKLKSYLIREGIAGKNVELTGIDGDFKGSLTAYHDFKEKLIDVELTQKEKEEIILNIVLFGDDKKLLKQRLKKKFPQLTEKQINTVTALSYKGWGRLSKKLLEEVTVPAPETGEVWNIITALWETNDNFMQLLSKEYQFSDRIEEFNEEKADPEVSYQTIEDLYVSPAVKRQIWQTLQIIQEIEKVMGEKPKRVFVEMAREKQENKRTESRKKTLSDLYTKCKKEEPEWIEALCTSLEKHEEHQLRSDKLYLYYTQKGRCMYSGEPIDLEDLWDNTKYDIDHIYPQSKTMDDSLKNRVLVKKEYNAKKSDTYPIAADIQKKMMPFWKSLLTGGFIPKEKYDRLVRNNPLDANELAGFIERQIVETRQSTKAVAEILKKILPDTEIVYVKAKTVSKFRQDFDFIKVRDMNDLHHAKDAYLNIVVGNVYFVKFTKNAAWFVKENPGRTYNLEKMFIWDVARDGEIAWKAGKSGSIVQVRAMMEKNHILVTRRSYEVKGGLFDQQILKKGKGQVPVKESDERLRDIGKYGGYNKAAGVYFMLVSSKDKKGKEQRTIEFVPIYLKDRVEKDMESARNYLMEERGLREPKILIKKIKIDTLFKVDGFYMWLSGRTSNQLIFKGANQLILSKEDMKTLKKVVKYIQRQKEDKNVKISMRDGITEEELLKLYETFLDKIRHSIYGARLSSQEKTLVNGKEKFIDLSVEAKCQVLYEILHLFQCQSGAANLKMIGGPASAGILVMNNNISKCKNISIVNQSPTGIYEKEIDLLRV

SEQ ID NO: 418 - protein, 1471 aa, Scardovia wiggsiae
  REGION 1..1471: note = Scardovia wiggsiae F0424
MGYKAPRNDKGEIDYGVGLDLGNGSVGWVAMDKDYHLIRARGHELIGARLFDPANSAENRRESRTTRRRLSRRRWRLRMLDSLFASELAKIDPNFLARRKYSWVHPKDEQNHENWYGSIIFGSKEQDKQFYKDYPTIYHLRKKLTEDTERHDIREIYVAIHHIVKYRGHFLREGEINSENLFDPEGFVELIKDVIKLNNSYDESTPIFEASPADVSEALLNEHTSRSGRIEDTLDKLDFSVSRVDKHELKGMRDAAKAVIGAIVGNTADFSKIFNLDNLDKDSKDNLKLKFADSNFDEKYGGVVGSGLLDETQIELVDRIHAVYDAVALKGILGDAHTISEAKVESYEKHRKNWKLIKEELRTKENKDEVDLWYGDLSGRQYKNPPDPEKGPDEGSKKDSPIRDSDQKQNLIKKANDYFTELIDDSQLSEEQKNCLKNDINNGQLFPVQRSSDNGVIPYQIHLNELRRIIENQKQYYPFLAETFIRKTAEGKSYEENKIVALLKFRVPYYVGPLVSKEDMEEHSSGNSAYHWMARNPGRGEAITPWNFDEVVDKDESGARFISRLTGTDTYLLGEPTLPQHSLLYEEYMVLSELNNVRLNVRQGNHWSDKNRQRLSYKQKEFLIENLFKEHKTVTRKRAEDCLSSMGCGEVQLFGLSDEKKFASSLSSYITLKKILGKAFVDDSGNSAILERIIEVQTVFEDREPLTHQLSLIDSLTVEQRKQLAKIHYTGWGKLSRKLLTSKKGSYKIHSQNEIMRTQHSIIDIMRGDSLNLIEIIRDKKIGIGEWIDNENLDRETGESDVSRLESVFEGIVMSPRVKRGVVQAVRVIDDLAKAIGNPPQRIFIEMADEVQASQRTVSRLSRLKALYGSPSLQKEFNDLKDLRKSLNETKDADLQEDRLYLYYIQLGKDLYTGKEISIDSLSSAYDIDHIVPQALTQDDSIDNRVLVSRKENARKTDSYLYTPDLIKNMRPLWGKLLAAGLMSQKKYDALTRVDDFKDREKQRFVQRSLVETRQIMKNVSTILRTYYGEDTNVVTLKSSITHDMRKYLGFPYKNRDINDYHHAQDALCISAAGQFMLNRHFVSGGEVTDGASNAYNMYLAEYLQEFRDAKARGERKRSTAFGFVVGSMSSKDDEKRTDHRTGEIVWSETNAEYLRKVMNYKKMLITQKVGDVKTRALYDETRYGHKESSAKSIKFDNLRRDTSLYGGFSGASTAYMMLVEYKKKNKLVSITAQEASLLAVADQKNDTVSVMDGILASHGLSGAKILLPKIVTGQLLDYSDALVTLQSASELNTARQMWLPRNDYNDIDIILKSKDIEDAAHKLGYDSDTVHVLRRIQKLFEAVFRVAESQFPLHQLSKDQQEEILRDPQNYGFGSAVKLLGGLLKALHANAENTNLAGLVKVLHGDKEYSDDGKAKEFKKFGFSPRWRRISNPTGFTLSDSDTFIYQSPSGIFEQRVTVKELKEKADKQK

SEQ ID NO: 419 - protein, 1178 aa, Scardovia inopinata
  REGION 1..1178: note = Scardovia inopinata F0304
MGKRHNSNMAKKKISYRIGIDVGLNSTGLAAIEVDDDGAPIRILNTMSVIHDGGVDPDAAKVRGTRLAISGIARRTRRMRRRRAKRLDRLEQILEKYGYTDTEPVLEEPYGPWICRAELADGFINDDEQRRMMIGIAIRHIARHRGWRNPYQNVRALLNIDDSDLSEEYKNLKEKVQDQINDGKDLPNFTPSQLVRDYLDNFSGQPAARIRTGKAGPRGNRRDAVGILPQRMRQSDYAYELQRIFDMQKIGRDEAQELLMAVFEAKSPKGSAEKRIGKDPLTGKKRALKASLAFQKYRIVATITNLRIKTGTGSERMLSPTELNDIYTYLLRVQDDNHLPTWEDICEEVLHIGRYQLAGIGKTFEGGERISNMPPVIQTSLAIHGLSEGTLAEKLTKWWDKADDDSRESMIKLLSNTVDIDRVNEVDENFASALDFIDSLDDEELTKLDKIALPRGRAAYSEEALNKLTADMLNTGDDLFSARQRIYHVNNSWRPPQPPIGEPLGNPAVDRVLKITNRYLMNCLNRWGQPRRVTIEHTRSGFTSVKQATEHQKISDKRAEYRRDIVKQLEEAGVESVHEYDIRRWEAVQRQNGQCLYCGRDITFKTCEMDHIVPRKGPGSTNTRTNFAAVCPECNRMKSNIPFASWAETKEAKDRGVSLDKAIKQVRFFNFTKNEYSPQAQRNFKKSMIERLKQKTSDEPLDNRSIESVSWMADELYKRIDWYFNHEQYETSKKAINDDKDNLSGTQVVVYPGSITAEARNAAGLGGNIHFIGGRYKTRLDRRHHAVDACVIAMMEPGIARILTERNQLRQAQRLTARIEDDEVNWKDYPTENTAGYNKYQAWSDRMHALLEYMNNALDYDKIPVVRWERLQLGNRSAHEDTIHPLKKLPLSHEISAIDINHASTPALYEALVSLPDFSEQDGLPADPSRQINVNGERYSGDDLVSFFNSNAAQIAIQGGSAELGTAFHHARIYRCWTVGKNGKKKIFFGMIRVYQHDLLHAKNEDLFTYPLKRSSVSMRYAKKEVVHAILSGNAEYVGYLCVGDELVLDLKGDKSNDEGGSRLSGQVGEFVQKFEEDSKVNSQIVNRWTVDGFPDEAKLRLRPSMFAGEGLKNMKSELVENAAIKNILSKTGWRVSVDVISKKSPVVLRRNAFGEPRWKTNAGLPVSYRWQDTETKE

SEQ ID NO: 420 - protein, 1063 aa, Simonsiella muelleri
  REGION 1..1063: note = Simonsiella muelleri ATCC 29453
MEKFHYVLGLDLGIASVGWAAIEIDKETETSIGLLDCGVRTFERAEVPKTGDSLAKARREARSTRRLIRRRSHRLLRLKRLLKREIFRQPETFKDLPINAWQLRVKGLDSRLNEYEWAAVLLHLVKHRGYLSQRKSEMSETDSKSEMGRLLAGVAENHQLLQQEQYRTPAELALKKFVKHFRNKGGDYAHTFNRLDLQAELHLLFQKQRELGNPFTSPELERQVDDLLMTQRSALQGDAILKMLGHCGFEPEQFKAAKNTFSAERFIWLTKLNNLRIQDQGKERALTADERTKLLDEPYKKSKLTYAQVRKLLSLPQTAIFKGLRYDLEHDKKAENSTLMEMKSYHNIRQTLEKSGLKTEWQSIATQPEILDAIGTAFSIYKTDEDISHELKTCRLPENVLNELLKNINFDGFIQLSLTALRKILPLMEQGYRYDEACTQIYGNHHSGSLQQESKQFLPHIPIDDVRNPVVFRTLTQARKVVNAIIRRYGSPARVHIEMARELGKSKSDRDRIEKQQQKNKKERENAVAKFKEDFPDFVGEPRGKDILKMRLYEQQHGKCLYSGHDIDINRLNEKGYVEIDHALPFSRTWDDSQNNKVLVLGSENQNKRNQTPDEYLDGANNSQRWLEFQARVQTCHFSYGKKQRIQLAKLDDETEKGFLERNLNDTRYIARFMCQFVQENLYLTGKGKRLVFASNGGMTATLRNLWGLRKVREDNDRHHALDAIVVACSTASMQQKITKAFQRHESIEYVDTETGEVKFRIPQPWDFFRQEVMIRVFSDQPCEDLVEKLSARPEALHDNVTPLFVSRAPNRKMSGQGHLETIKSAKRLSEENSMVKKPLTTLKLKDIPEIVGYPSREPQLYAALKTRLETHDDDPIKAFAKPFYKPNKNGELGALVRSVRVKGVQNTGVMVHDGKGIADNATMVRVDVYTKAGKNYLVPVYVWQVAQGILPNRAVTSGKSEADWDLIDESFEFKFSLSRGDLVEMISNKGRIFGYYNGLDRANGSIGIREHDLEKSKGKDGVHRVGVKTATAFNKYHVDPLGKEIHRCSSEPRPTLKIKSKK

SEQ ID NO: 421 - protein, 1327 aa, Solobacterium moorei
  REGION 1..1327: note = Solobacterium moorei F0204
MEGQMKNNGNNLQQGNYYLGLDVGTSSVGWAVTDTDYNVLKFRGKSMWGARLFDEASTAEERRTHRGNRRRLARRKYRLLLLEQLFEKEIRKIDDNFFVRLHESNLWADDKSKPSKFLLFNDTNFTDKDYLKKYPTIYHLRSDLIHNSTEHDIRLVFLALHHLIKYRGHFIYDNSANGDVKTLDEAVSDFEEYLNENDIEFNIENKKEFINVLSDKHLTKKEKKISLKKLYGDITDSENINISVLIEMLSGSSISLSNLFKDIEFDGKQNLSLDSDIEETLNDVVDILGDNIDLLIHAKEVYDIAVLTSSLGKHKYLCDAKVELFEKNKKDLMILKKYIKKNHPEDYKKIFSSPTEKKNYAAYSQTNSKNVCSQEEFCLFIKPYIRDMVKSENEDEVRIAKEVEDKSFLTKLKGTNNSVVPYQIHERELNQILKNIVAYLPFMNDEQEDISVVDKIKLIFKFKIPYYVGPLNTKSTRSWVYRSDEKIYPWNFSNVIDLDKTAHEFMNRLIGRCTYTNDPVLPMDSLLYSKYNVLNEINPIKVNGKAIPVEVKQAIYTDLFENSKKKVTRKSIYIYLLKNGYIEKEDIVSGIDIEIKSKLKSHHDFTQIVQENKCTPEEIERIIKGILVYSDDKSMLRRWLKNNIKGLSENDVKYLAKLNYKEWGRLSKTLLTDIYTINPEDGEACSILDIMWNTNATLMEILSNEKYQFKQNIENYKAENYDEKQNLHEELDDMYISPAARRSIWQALRIVDEIVDIKKSAPKKIFIEMAREKKSAMKKKRTESRKDTLLELYKSCKSQADGFYDEELFEKLSNESNSRLRRDQLYLYYTQMGRSMYTGKRIDFDKLINDKNTYDIDHIYPRSKIKDDSITNRVLVEKDINGEKTDIYPISEDIRQKMQPFWKILKEKGLINEEKYKRLTRNYELTDEELSSFVARQLVETQQSTKALATLLKKEYPSAKIVYSKAGNVSEFRNRKDKELPKFREINDLHHAKDAYLNIVVGNVYDTKFTEKFFNNIRNENYSLKRVFDFSVPGAWDAKGSTFNTIKKYMAKNNPIIAFAPYEVKGELFDQQIVPKGKGQFPIKQGKDIEKYGGYNKLSSAFLFAVEYKGKKARERSLETVYIKDVELYLQDPIKYCESVLGLKEPQIIKPKILMGSLFSINNKKLVVTGRSGKQYVCHHIYQLSINDEDSQYLKNIAKYLQEEPDGNIERQNILNITSVNNIKLFDVLCTKFNSNTYEIILNSLKNDVNEGREKFSELDILEQCNILLQLLKAFKCNRESSNLEKLNNKKQAGVIVIPHLFTKCSVFKVIHQSITGLFEKEMDLLK

SEQ ID NO: 422 - protein, 1179 aa, Sphaerochaeta globosa
MSKKVSRRYEEQAQEICQRLGSRPYSIGLDLGVGSIGVAVAAYDPIKKQPSDLVFVSSRIFIPSTGAAERRQKRGQRNSLRHRANRLKFLWKLLAERNLMLSYSEQDVPDPARLRFEDAVVRANPYELRLKGLNEQLTLSELGYALYHIANHRGSSSVRTFLDEEKSSDDKKLEEQQAMTEQLAKEKGISTFIEVLTAFNTNGLIGYRNSESVKSKGVPVPTRDIISNEIDVLLQTQKQFYQEILSDEYCDRIVSAILFENEKIVPEAGCCPYFPDEKKLPRCHFLNEERRLWEAINNARIKMPMQEGAAKRYQSASFSDEQRHILFHIARSGTDITPKLVQKEFPALKTSIIVLQGKEKAIQKIAGFRFRRLEEKSFWKRLSEEQKDDFFSAWTNTPDDKRLSKYLMKHLLLTENEVVDALKTVSLIGDYGPIGKTATQLLMKHLEDGLTYTEALERGMETGEFQELSVWEQQSLLPYYGQILTGSTQALMGKYWHSAFKEKRDSEGFFKPNTNSDEEKYGRIANPVVHQTLNELRKLMNELITILGAKPQEITVELARELKVGAEKREDIIKQQTKQEKEAVLAYSKYCEPNNLDKRYIERFRLLEDQAFVCPYCLEHISVADIAAGRADVDHIFPRDDTADNSYGNKVVAHRQCNDIKGKRTPYAAFSNTSAWGPIMHYLDETPGMWRKRRKFETNEEEYAKYLQSKGFVSRFESDNSYIAKAAKEYLRCLFNPNNVTAVGSLKGMETSILRKAWNLQGIDDLLGSRHWSKDADTSPTMRKNRDDNRHHGLDAIVALYCSRSLVQMINTMSEQGKRAVEIEAMIPIPGYASEPNLSFEAQRELFRKKILEFMDLHAFVSMKTDNDANGALLKDTVYSILGADTQGEDLVFVVKKKIKDIGVKIGDYEEVASAIRGRITDKQPKWYPMEMKDKIEQLQSKNEAALQKYKESLVQAAAVLEESNRKLIESGKKPIQLSEKTISKKALELVGGYYYLISNNKRTKTFVVKEPSNEVKGFAFDTGSNLCLDFYHDAQGKLCGEIIRKIQAMNPSYKPAYMKQGYSLYVRLYQGDVCELRASDLTEAESNLAKTTHVRLPNAKPGRTFVIIITFTEMGSGYQIYFSNLAKSKKGQDTSFTLTTIKNYDVRKVQLSSAGLVRYVSPLLVDKIEKDEVALCGE

SEQ ID NO: 423 - protein, 1426 aa, Sphingobacterium spiritivorum
  REGION 1..1426: note = Sphingobacterium spiritivorum ATCC 33861
MKHILGLDLGTNSIGWALIKQDFENKQGEILGMGSRIIPMSQDILGDFGKGNSVSQTAERTKYRSVRRLRERFLLRRERLHRILNVLGFLPEHYASQIDFTKRFGKFKEETEPKLVYSNEGFIFKKSFEEMLSDFKTHQPQLLEDNKKIPYDWTIYYLRKKALSRKIEKEELAWILLNFNQKRGYYQLRGEEEEENPNKLIEFYSLKIVDVLADEPQKGKSDIWYSLILENGWIYRRSSKTPLFDWKEKTRDFIVTIDLNDDGSVKTDKEGNEKRSFRAPGENDWTLVKKKTEQEIDSSRKTVGTYIYETLLKNPKQKIKGKLVRTIERKFYKTELKQILEKQKEFHPELRQDDLYSDCVRELYKNNEAHQLTLSKKDFVHLFMEDIIFYQRPLGSQKSSISNCTLEFRKYKDENGTEHTQYLKAIPKSNPYYQEFRIWQWMYNLNIYKKEDDTNVTKDFLNTKADFESLFEFLNNRKEVDQKALLKHFKLNDKTHRWNYVEDKKYPCNETKTMILSRLDKVENISDDFLTREMEQKIWHIIYSVNDKVEYEKALKSFAGKNNLEDNSFFEAFKKFPPFKSEYGAFSEKAIKKLLPLMRMGKFWNYNNISEQSKSRIQKIITGEYDENIKDKVREKAIHLTTETDFQGLQLWLVQYIVYGRHSEAAMLGKWNSADDLEEFLKEFKQHSLRNPIVEQVITETLRVVKDIWQKYGNGAKDFFREIHIELGREMKLPAEERERLTRQISENENTNFRIKALLAEMMDDNSVENVRPFSPMQQEILKIYEEGVLNSDIEIEDDILKISKTAQPSSSDLKRYKLWLEQKYKSPYTGQIIPLNKLFTPEYEIEHIIPQSRYFDDSFTNKIICESAVNKLKDNYIGLEFIKKLGGSIVECGNGKSVAILKHDAYEDFIKKHYANNRSKRNKLLLEDIPEKMIERQMNDTRYISKYISGVLSNIVRVEDGTDEGVNSKNIVPGNGKITTQLKQDWGLNDVWNDLILPRFERMNHLTNSTDFTAWNENHQKFLPTVPVEFSKGFSKKRIDHRHHALDALVIACATKDHVNLLNNQSAKSDTKRYDLKKKLMKFEKVAYNHPQTGERIEREAPKQFLKPWETFTIDAKNHLETIIVSFKQNLRVINKATNYYEKYVEKEGTKVKERVEQKGTNWAIRKPMHKETVSGKIDLPRIKVPKGKILTATRKSLDTSFNLKTIGSITDTGIQKILKNYLQYKDNNPELAFSPEGIEDMNKNIEKFNNGKAHQSISKVRVFELGSKFPLGQSGNKKEKYVEAAKGTNLFFAIYQDKNGKRSYETIPLNEVIERQKQGLSVVDLKGVDDFYLSPNDLVYVPSEDELENISMIDFNKMSSERIYKVVSFTGNQIFFVRQDIATSVVNKAEFSTLNKMERAIDGTMIKETCVKLQIDRLGNISKI

SEQ ID NO: 424 - protein, 1110 aa, Sphingobium sp.
  REGION 1..1110: note = Sphingobium sp. AP49
MAEGKKRIWRLGADLGANSLGWAAIELSAPVNGKPIAILAAGSRIFSDGRDPKSGASLAVDRRDARAMRRRRDRFKQRQKALIKYLIADGLFPADEAARNAMAAIDPYAVRARALDEALSLPELGRALFHLNQRRGFKSNRKADRKADDDAGKIAIGIDRTRDAIAEDEADAGAEPGSWTFGKWLHERRLKGQSVRTRLRPESGEDAKGDGYDFYPDRALMEEEFDAIWAAQAPHHPDVLTNDVHDRLHEIIFYQRPLKAPQVGMCSLIPGDRRLPKAHPLFQRRRLLEELNALMIVRPGEVAQRLTREERDILLLKLKDKNKVSFATLRKALKLDPDARFNKESEDRTDLKGDEVAAVMGSKTRFGNLWVHLSIEAQWDVLARLDAVESDAEDAAFCAWLVETYALTPEQARAVANAPLPPGYGRFGETATRKLIEALRDGKKDDRVLVYSEAVTEAGLGHHSDRRTGEVFEDAKGRPQLPYYGVALERHIMPGTGDPSDPEEMRVGRLTNPTVHIGLNQLRRILNVLIRAYGPPAEIAIELARELKLTDEDKKRINRENNDNRIAAERRSEKLLAIGQADSGANRALLKLWEELNPANVLDRRCIYSGRQISIDMLFSAAVEVDHILPFAATLDDSNGNKIVCLREANREKRKRSPHDAWGHSARWDEIAARAAQLPRNKRWRFEPDAMDKFRDEGGFQARHLVDTQYLARLSREYLATLYPEKGEGSGHIWVSPGRLTEMVRRKLGLNDLLPDHNFGGGADQAKNRLDHRHHAIDAVVVAIVDRGMLNAIARASGQEGAEGRERIIIPEPWDGFRDALRETVNRITVSHRTDHGTASKAGLPKGKDATAGRLHNDTAYGFTGDTDAKGNSIVVRRVPLSSFKKLADLDRIRDADLKAALYQHLNGLEGKAFEKALAEFHKLEWHNFGGVRRVRVTEPLTVIPIKDRNGRIYKGYKGDSNYRYDVWELPDGKWVTNWKNEAGEAMSSVISMFDAHQSSEPPRPHPAARKILSLHQNDLLAIEREGEDRKLMRVVKFGQSGQITLAEHQQAGDLKKRDAVSNDDDPFKYFAPTSGGLKKVKARQVRIDEIGRVLDPGFPARTARRKTRG

SEQ ID NO: 425 - protein, 1090 aa, Sphingomonas sp.
  REGION 1..1090: note = Sphingomonas sp. S17
MDWRLGLDLGANSLGWAALRLDRAGDPIGILAMGSRIFSDGRDPKSGASLAVDRRAARAMRRRRDRFKQRQAALLKYLIRDGLFPADQADRQRLADEDPYALRARALDEELSLFEIGRALFHLNQRRGFQSNRKADRGQDDEAGKIAVGVDRLNQQMEEQGARTLGEFLHQRRRAATDANHIPSVRTRLRPETGEGAKGDGYDFYPSRALIAEEFEEIWAAQAPHYPDTLTQQVHDRLYEIIFHQRPLRAPQVGQCTLVAGETRLPKAHPLFQKRRLLEEINALMIVRPGEIAQRLTPEERDTLYLKLKDKRTVSFATLRKTLKLDSAARFNKESENRTELKGDEVAAELGAKTRLGTRWQHLSGDQQWEVVHRLMALESQADEAAFRDWISQTYDLLPEQAAAVLGARLPQGHGRFGPTATTTLIDSLLHDRTEDGRVVVYSEAVQRSGLGHHSDLRHDRDDEDVTELPYYGVALERHIMPGTAEPTDPEEMRIGRLTNPTVHIGLNQLRHVVNRLIRAYGPPKEIAIELARELKLSEDEKKKRNSENRDNRLAAEGRSKKLEEIRQRDTGANRALLKLWEELNPGNVLDRRCIYTGEQISIDMLFSDRVEVDHILPFAQTLDDSNGNKLLCLREANREKRRRSPYEAWGHTDRWPDIAERASRLPKPKRWRFEPDAMQRFATEDGFLARHLVDTQYLGRLAREYLSWLYPGRGEGSGHVWVSPGRLTEMVRRKLGLNDLLPDHNFGGGADQPKNRLDHRHHAIDALVVAIVDRGMLQAIARASGQDGSEGRERIHIPAPWDGFRDDLRVAVNGIIVSHRPDHGTVAKAGLARGRDQTAGRLHNDTAYGLTGETDAKGNSIVVRRIPLSAIKKPADIARVRDPLLRNALAEFTKGLDGKAFEARIGRFHELGPLLYRGIRRVRVVETLTVIPIRDAEGRAYKGYKGDSNYRYDVWEMPDGKWRCQVVSMFDAHQSTEQARPHPAARKILSLQRNDILAIERTEGDRELVRVVKFSEKQFAVAPPHEGGSLKTRDGNADDPFRYLYPSPNTLKGWRARQVRIDELGRVLDPGFPARKSVRRTRPRAAPVD

SEQ ID NO: 426 - protein, 1084 aa, Sporolactobacillus vineae
  REGION 1..1084: note = Sporolactobacillus vineae DSM 21990 = SL153
MKYSIGLDIGISSVGWSVINLDRERIELMGARLFDAAENPKNGSSLAAPRRDARSARRRLRRRRYRVGRVRHFIIDRGLVTRGQADQLFDWKDGDLDIWLVRVNALERLLTDREFARVLIHIAKNRGYRSNRKSEAKSGENGQVLSAIKANKELMEEKGYQTVAEMLVNEPETFAGRKRNRGGEYTHVIARSELEHEIRLIFTKQRAFGNRFATEENENTYVKIWAAQRPVATKDDILKKIGDCTFEKGEKRAPKASYAFQYFRALDKLNRLRILSVREPSRNLTDDERNLIVPALFNHDKQKYSDLRKILQLRDDQKFNELFYDPGKSLKENENKTFLSLAEQYKIRKVIRDVQGKDGLLQYRPLDIDTIAYALTVFKDDQDTRDYLSNTFVNGNGKQVLNLANRAFDAELIDGLLSLSFAKFGHLSLKALHKLIPHMEQGLSYYDACKKVGYHDNEQVGKSKQHLLPVIPADEIRNPVVVRSLSQTRKVINAIIKRYGSPTFMYIELAREMGRPYNERRDLEKQYNKNRTVNDSAIEQIHELYPEIGAPRGHDILKYKLWQQQDCKCAYSLEKIPAEKIFEPGYAEVDHIIPYSRSFDDSNSNKVLVLSRMNQEKKNRTPYEWFGGDEHRWNKFESYVNALKVNRKKKSLLTKKNMDTEEEDTFKSRHLNDTRYITRFIKSFVEDNLLFREIEGAKQHVFTVNGAYTSLMRKRWGFNKNREESDLHHSVDAVIIAVSQPFRNEVSRYFKHREISLPQLLKRTWDYFPEPWEGFVKELRARTLQDPEKLKLALESLDLDSYDPEFIDEVKPIFISRMPKRSIKGQIHDETLRRNRGKTKDGFVKIVTRTRLENIKFDKNGDFPMYGRESDPKTYQAIKQRYLENNKDKKKAFIEPLYKPAKNPNNASLIRSVKIEDKANQIVPLRDEAVAYNASIVRTEVYRNKETGKFYLAPVYVSDVFAGREPRRFIRANVPYEQWVNITDKFTFLFNLYPNDVIYIKMKKVKTTKSNINKTISWQESYFYFKGTDIHTGAITIIDHMNSFTDRVGTQGLQLFEKYQVDPLGNLSRVHGETQYGVPALSHS

SEQ ID NO: 427 - protein, 1053 aa, Staphylococcus aureus; identical to SEQ ID NO: 28
  REGION 1..1053: note = Staphylococcus aureus subsp. aureus

SEQ ID NO: 428 - protein, 1054 aa, Staphylococcus lugdunensis
  REGION 1..1054: note = Staphylococcus lugdunensis M23590
MNQKFILGLDIGITSVGYGLIDYETKNIIDAGVRLFPEANVENNEGRRSKRGSRRLKRRRIHRLERVKKLLEDYNLLDQSQIPQSTNPYAIRVKGLSEALSKDELVIALLHIAKRRGIHKIDVIDSNDDVGNELSTKEQLNKNSKLLKDKFVCQIQLERMNEGQVRGEKNRFKTADIIKEIIQLLNVQKNFHQLDENFINKYIELVEMRREYFEGPGKGSPYGWEGDPKAWYETLMGHCTYFPDELRSVKYAYSADLFNALNDLNNLVIQRDGLSKLEYHEKYHIIENVFKQKKKPTLKQIANEINVNPEDIKGYRITKSGKPQFTEFKLYHDLKSVLFDQSILENEDVLDQIAEILTIYQDKDSIKSKLTELDILLNEEDKENIAQLTGYTGTHRLSLKCIRLVLEEQWYSSRNQMEIFTHLNIKPKKINLTAANKIPKAMIDEFILSPVVKRTFGQAINLINKIIEKYGVPEDIIIELARENNSKDKQKFINEMQKKNENTRKRINEIIGKYGNQNAKRLVEKIRLHDEQEGKCLYSLESIPLEDLLNNPNHYEVDHIIPRSVSFDNSYHNKVLVKQSENSKKSNLTPYQYFNSGKSKLSYNQFKQHILNLSKSQDRISKKKKEYLLEERDINKFEVQKEFINRNLVDTRYATRELTNYLKAYFSANNMNVKVKTINGSFTDYLRKVWKFKKERNHGYKHHAEDALIIANADFLFKENKKLKAVNSVLEKPEIESKQLDIQVDSEDNYSEMFIIPKQVQDIKDFRNFKYSHRVDKKPNRQLINDTLYSTRKKDNSTYIVQTIKDIYAKDNTTLKKQFDKSPEKFLMYQHDPRTFEKLEVIMKQYANEKNPLAKYHEETGEYLTKYSKKNNGPIVKSLKYIGNKLGSHLDVTHQFKSSTKKLVKLSIKPYRFDVYLTDKGYKFITISYLDVLKKDNYYYIPEQKYDKLKLGKAIDKNAKFIASFYKNDLIKLDGEIYKIIGVNSDTRNMIELDLPDIRYKEYCELNNIKGEPRIKKTIGKKVNSIEKLTTDVLGNVFTNTQYTKPQLLFKRGN

SEQ ID NO: 429 - protein, 1334 aa, Staphylococcus pseudintermedius
MGRKPYILSLDIGTGSVGYACMDKGFNVLKYHDKDALGVYLFDGALTAQERRQFRTSRRRKNRRIKRLGLLQELLAPLVQNPNFYQFQRQFAWKNDNMDFKNKSLSEVLSFLGYESKKYPTIYHLQEALLLKDEKFDPELIYMALYHLVKYRGHFLFDHLKIENLTNNDNMHDFVELIETYENLNNIKLNLDYEKTKVIYEILKDNEMTKNDRAKRVKNMEKKLEQFSIMLLGLKFNEGKLFNHADNAEELKGANQSHTFADNYEENLTPFLTVEQSEFIERANKIYLSLTLQDILKGKKSMAMSKVAAYDKFRNELKQVKDIVYKADSTRTQFKKIFVSSKKSLKQYDATPNDQTFSSLCLFDQYLIRPKKQYSLLIKELKKIIPQDSELYFEAENDTLLKVLNTTDNASIPMQINLYEAETILRNQQKYHAEITDEMIEKVLSLIQFRIPYYVGPLVNDHTASKFGWMERKSNESIKPWNFDEVVDRSKSATQFIRRMTNKCSYLINEDVLPKNSLLYQEMEVLNELNATQIRLQTDPKNRKYRMMPQIKLFAVEHIFKKYKTVSHSKFLEIMLNSNHRENFMNHGEKLSIFGTQDDKKFASKLSSYQDMTKIFGDIEGKRAQIEEIIQWITIFEDKKILVQKLKECYPELTSKQINQLKKLNYSGWGRLSEKLLTHAYQGHSIIELLRHSDENFMEILTNDVYGFQNFIKEENQVQSNKIQHQDIANLTTSPALKKGIWSTIKLVRELTSIFGEPEKIIMEFATEDQQKGKKQKSRKQLWDDNIKKNKLKSVDEYKYIIDVANKLNNEQLQQEKLWLYLSQNGKCMYSGQSIDLDALLSPNATKHYEVDHIFPRSFIKDDSIDNKVLVIKKMNQTKGDQVPLQFIQQPYERIAYWKSLNKAGLISDSKLHKLMKPEFTAMDKEGFIQRQLVETRQISVHVRDFLKEEYPNTKVIPMKAKMVSEFRKKFDIPKIRQMNDAHHAIDAYLNGVVYHGAQLAYPNVDLFDFNFKWEKVREKWKALGEFNTKQKSRELFFFKKLEKMEVSQGERLISKIKLDMNHFKINYSRKLANIPQQFYNQTAVSPKTAELKYESNKSNEVVYKGLTPYQTYVVAIKSVNKKGKEKMEYQMIDHYVFDFYKFQNGNEKELALYLAQRENKDEVLDAQIVYSLNKGDLLYINNHPCYFVSRKEVINAKQFELTVEQQLSLYNVMNNKETNVEKLLIEYDFIAEKVINEYHHYLNSKLKEKRVRTFFSESNQTHEDFIKALDELFKVVTASATRSDKIGSRKNSMTHRAFLGKGKDVKIAYTSISGLKTTKPKSLFKLAESRNEL

SEQ ID NO: 430 - protein, 1334 aa, Staphylococcus pseudintermedius; identical to SEQ ID NO: 429
  REGION 1..1334: note = Staphylococcus pseudintermedius ED99

SEQ ID NO: 431 - protein, 1112 aa, Staphylococcus simulans
  REGION 1..1112: note = Staphylococcus simulans ACS-120-V-Sch1
MLVGLKFKQSILFENMENAEDIKESATGSDAISLSDDYYENLSEFLTDEQLNFIESANTFFMGIMLDRILKGATSISAAKVRDYKIFKSQLKLIKDIVYQNKYDKYHEFFVTSKEDMRAYQENPDAKNFGKLSKFDQYLIHSKDQYAKLMKDLKGLVPKEYTEVLNLIDEQKFLVVQNTTDNASIPYQNNVFEAENILRNQQKYYPEITEEMIGKVINLISFRIPYYVGPLTNKNGQSDFAWMIRKSDEQTLPWNFDKVIDKSKSAEKFIRRMTSKCTYLLEEDVLPKHSLLYQEMEVLNELNNVQLRGENEPKHRIHRLDPKVKQFIYHNLFQKKKNVTHKDLITLLQNSEHRNTLNKTSGQKLKVFGTQNDSKFASKLSTYNDMKAILGSVENKRQMIEELVLWITIFEDKAILKQKIGEKYPNITEKQLNQIVKLNYSGWGRLSEKLLTKEVNGRSLIDLMYSTENNFMEIITDKTLGFDCFIKNSNKVKNAKISYKDVAELRTSPALKKGIWNAIKMVREISNLFGAPEKIIIEFATEDQAKGKRQKSRSELWDDLVKKNNLKRNKEFEGLFEELKAYPDLDFSNPKLWLYIHQNGKCMYTKKPIDLERLMSDTNNQLYEIDHILPRTFVKDDSINNKVLVIQSANQKKSGDKMPLEIFDNHVLVPFWKMLYENDLISSSKLSKLMKKEFNDLDKEGFIQRQLVETRQIISHVSDFLTEEYPSTTVVPMKANVVSELRRKFDIPKIRQLNDWHHAVDAYLNGFVYQAARVFYPKVNLFEFNFKWEKVREKWRQLGEFTENNKKREFFLFKRMENYVNEYGEGMISKLIFDLDNFKFNYSRKVESTESAFYKQSAFSPKNTTAQYDSDKNKTAIYKEMKNKRGIVVSYTYVKKDQELIGYGVFNETVFEYVNNADVDMNTRALKIVRKAFPKLDIKKAQYLFSINKGDALLVNGHPFLFVSAYERINGKQLEFDIAMQRKIKQALSPYNNMTEQEKVEFYNQFAEKVIEEFRNSIGLQSRDRKVNLIKNLFNNTEKSNDSMTQSILEVLKMTKVSAERSKELKIRWNGQTPNTFIDTKNNAEIQYKSITGLKTTKPKSIFKLAESKNEL

SEQ ID NO: 432 - protein, 1370 aa, Streptococcus agalactiae
  REGION 1..1370: note = Streptococcus agalactiae 2603V/R
MNKPYSIGLDIGTNSVGWSIITDDYKVPAKKMRVLGNTDKEYIKKNLIGALLFDGGNTAADRRLKRTARRRYTRRRNRILYLQEIFAEEMSKVDDSFFHRLEDSFLVEEDKRGSKYPIFATLQEEKDYHEKFSTIYHLRKELADKKEKADLRLIYIALAHIIKFRGHFLIEDDSFDVRNTDISKQYQDFLEIFNTTFENNDLLSQNVDVEAILTDKISKSAKKDRILAQYPNQKSTGIFAEFLKLIVGNQADFKKYFNLEDKTPLQFAKDSYDEDLENLLGQIGDEFADLFSAAKKLYDSVLLSGILTVIDLSTKAPLSASMIQRYDEHREDLKQLKQFVKASLPEKYQEIFADSSKDGYAGYIEGKTNQEAFYKYLSKLLTKQEDSENFLEKIKNEDFLRKQRTFDNGSIPHQVHLTELKAIIRRQSEYYPFLKENQDRIEKILTFRIPYYIGPLAREKSDFAWMTRKTDDSIRPWNFEDLVDKEKSAEAFIHRMTNNDFYLPEEKVLPKHSLIYEKFTVYNELTKVRYKNEQGETYFFDSNIKQEIFDGVFKEHRKVSKKKLLDFLAKEYEEFRIVDVIGLDKENKAFNASLGTYHDLEKILDKDFLDNPDNESILEDIVQTLTLFEDREMIKKRLENYKDLFTESQLKKLYRRHYTGWGRLSAKLINGIRDKESQKTILDYLIDDGRSNRNFMQLINDDGLSFKSIISKAQAGSHSDNLKEVVGELAGSPAIKKGILQSLKIVDELVKVMGYEPEQIVVEMARENQTTNQGRRNSRQRYKLLDDGVKNLASDLNGNILKEYPTDNQALQNERLFLYYLQNGRDMYTGEALDIDNLSQYDIDHIIPQAFIKDDSIDNRVLVSSAKNRGKSDDVPSLEIVKDCKVFWKKLLDAKLMSQRKYDNLTKAERGGLTSDDKARFIQRQLVETRQITKHVARILDERFNNELDSKGRRIRKVKIVTLKSNLVSNFRKEFGFYKIREVNNYHHAHDAYLNAVVAKAILTKYPQLEPEFVYGDYPKYNSYKTRKSATEKLFFYSNIMNFFKTKVTLADGTVVVKDDIEVNNDTGEIVWDKKKHFATVRKVLSYPQNNIVKKTEIQTGGFSKESILAHGNSDKLIPRKTKDIYLDPKKYGGFDSPIVAYSVLVVADIKKGKAQKLKTVTELLGITIMERSRFEKNPSAFLESKGYLNIRADKLIILPKYSLFELENGRRRLLASAGELQKGNELALPTQFMKFLYLASRYNESKGKPEEIEKKQEFVNQHVSYFDDILQLINDFSKRVILADANLEKINKLYQDNKENISVDELANNIINLFTFTSLGAPAAFKFFDKIVDRKRYTSTKEVLNSTLIHQSITGLYETRIDLGKLGED

SEQ ID NO: 433 - protein, 1377 aa, Streptococcus agalactiae
  REGION 1..1377: note = Streptococcus agalactiae 515
MNKPYSIGLDIGTNSVGWSIITDDYKVPAKKMRVLGNTDKEYIKKNLIGALLFDGGNTAADRRLKRTARRRYTRRRNRILYLQEIFAEEMSKVDDSFFHRLEDSFLVEEDKRGSKYPIFATMQEEKYYHEKFPTIYHLRKELADKKEKADLRLVYLALAHIIKFRGHFLIEDDRFDVRNTDIQKQYQAFLEIFDTTFENNHLLSQNVDVEAILTDKISKSAKKDRILAQYPNQKSTGIFAEFLKLIVGNQADFKKHFNLEDKTPLQFAKDSYDEDLENLLGQIGDEFADLFSVAKKLYDSVLLSGILTVTDLSTKAPLSASMIQRYDEHHEDLKHLKQFVKASLPENYREVFADSSKDGYAGYIEGKTNQEAFYKYLLKLLTKQEGSEYFLEKIKNEDFLRKQRTFDNGSIPHQVHLTELRAIIRRQSEYYPFLKENQDRIEKILTFRIPYYVGPLAREKSDFAWMTRKTDDSIRPWNFEDLVDKEKSAEAFIHRMTNNDLYLPEEKVLPKHSLIYEKFTVYNELTKVRFLAEGFKDFQFLNRKQKETIFNSLFKEKRKVTEKDIISFLNKVDGYEGIAIKGIEKQFNASLSTYHDLKKILGKDFLDNTDNELILEDIVQTLTLFEDREMIKKCLDIYKDFFTESQLKKLYRRHYTGWGRLSAKLINGIRNKENQKTILDYLIDDGSANRNFMQLINDDDLSFKPIIDKARTGSHSDNLKEVVGELAGSPAIKKGILQSLKIVDELVKVMGYEPEQIVVEMARENQTTAKGLSRSRQRLTTLRESLANLKSNILEEKKPKYVKDQVENHHLSDDRLFLYYLQNGRDMYTKKALDIDNLSQYDIDHIIPQAFIKDDSIDNRVLVSSAKNRGKSDDVPSIEIVKARKMFWKNLLDAKLMSQRKYDNLTKAERGGLTSDDKARFIQRQLVETRQITKHVARILDERFNNEVDNGKKICKVKIVTLKSNLVSNFRKEFGFYKIREVNDYHHAHDAYLNAVVAKAILTKYPQLEPEFVYGMYRQKKLSKIVHEDKEEKYSEATRKMFFYSNLMNMFKRVVRLADGSIVVRPVIETGRYMGKTAWDKKKHFATVRKVLSYPQNNIVKKTEIQTGGFSKESILAHGNSDKLIPRKTKDIYLDPKKYGGFDSPIVAYSVLVVADIKKGKAQKLKTVTELLGITIMERSRFEKNPSAFLESKGYLNIRDDKLMILPKYSLFELENGRRRLLASAGELQKGNELALPTQFMKFLYLASRYNESKGKPEEIEKKQEFVNQHVSYFDDILQLINDFSKRVILADANLEKINKLYQDNKENIPVDELANNIINLFTFTSLGAPAAFKFFDKIVDRKRYTSTKEVLNSTLIHQSITGLYETRIDLGKLGED

SEQ ID NO: 434 - protein, 1370 aa, Streptococcus agalactiae; identical to SEQ ID NO: 432

SEQ ID NO: 435 - protein, 1378 aa, Streptococcus agalactiae
  REGION 1..1378: note = Streptococcus agalactiae ATCC 13813
MNKPYSIGLDIGTNSVGWSIITDDYKVPAKKMRVLGNTDKEYIKKNLIGALLFDGGNTAADRRLKRTARRRYTRRRNRILYLQEIFAEEMSKVDDSFFHRLEDSFLVEEDKRGSKYPIFATMQEEKYYHEKFPTIYHLRKELADKKEKADLRLIYLALAHIIKFRGHFLIEDDRFDVRNTDIQKQYQAFLEIFDTTFENNDLLSQNVDVEAILTDKISKSAKKDRILARYPNQKSTGIFAEFLKLIVGNQADFKKHFNLEDKTPLQFAKDSYDEDLENLLGQIGDEFADLFSAAKKLYDSVLLSGILTVIDLSTKAPLSASMIQRYDEHHEDLKHLKQFVKASLPENYREVFADSSKDGYAGYIEGKTSQEAFYKYLLKLLTKQEGSEYLLEKIKNEDFLRKQRTFDNGSIPHQVHLTELRAIIRRQSEYYPFLKENLDRIEKILTFRIPYYVGPLAREKSDFAWMTRKTDDSIRPWNFEDLVDKEKSAEAFIHRMTNNDLYLPEEKVLPKHSLIYEKFTVYNELTKVRFLAEGFKDFQFLNRKQKETIFNSLFKEKRKVTEKDIISFLNKVDGYEGIAIKGIEKQFNASLSTYHDLKKILGKDFLDNTDNELILEDIIQTLTLFEDREMIKKRLDIYKDFFTESQLKKLYRRHYTGWGRLSAKLINGIRNKENQKTILDYLIDDGSANRNFMQLIKDAGLSFKPIIDKARTGSHSDNLKEVVGELAGSPAIKKGILQSLKIVDELVKVMGYEPEQIVVEMARENQTTAKGLSRSRQRLTTLRESLGNLKSNILEEKKPKYVKDQVENHHLSDDRLFLYYLQNGKDMYTDDELDIDNLSQYDIDHIIPQAFIKDDSIDNRVLVSSAKNRGKSDDVPSIEIVKARKMFWKNLLDAKLMSQRKYDNLTKAERGGLTSDDKARFIQRQLVETRQITKHVARILDERFNNELDSKGRRIRKVKIVTLKSNLVSNFRKEFGFYKIREVNNYHHAHDAYLNAVVAKAILTKYPQLEPEFVYGLYRRKKLSKIVREDKEEKYSEATRKMFFYSNLMNMFKRVVRLADGSIVVRPVIETGRYMGKTAWDKKKHFATVRKVLSYPQNNIVKKTEIQTGGFSKESILAHGNSDKLIPRKTKDIYLDPKKYGGFDSPIVAYSVLVVADIKKGKAQKLKTVTELLGITIMERSRFEKNTSAFLESKGYLNIRDDKLMILPKYSLFELENGRRRLLASAGELQKGNELALPTQFMKFLYLASRYNESKGKPEEIEKKQEFVNQHVSYFDDILQLINDFSNRVILADANLEKINKLYQDNKENIPVDELANNIINLFTFTSLGAPAAFKFFDKIVDRKRYTSTKEVLNSTLIHQSITGLYETRIDLGKLGEG

SEQ ID NO: 436 - protein, 1370 aa, Streptococcus agalactiae
  REGION 1..1370: note = Streptococcus agalactiae CJB111
  VARIANT 117: note = MOD_RES - Any amino acid
MNKPYSIGLDIGTNSVGWSIITDDYKVPAKKMRVLGNTDKEYIKKNLIGALLFDGGNTAADRRLKRTARRRYTRRRNRILYLQEIFAEEMSKVDDSFFHRLEDSFLVEEDKRGSKYXIFATLQEEKDYHEKFSTIYHLRKELADKKEKADLRLIYIALAHIIKFRGHFLIEDDSFDVRNTDISKQYQDFLEIFNTTFENNDLLSQNVDVEAILTDKISKSAKKDRILAQYPNQKSTGIFAEFLKLIVGNQADFKKYFNLEDKTPLQFAKDSYDEDLENLLGQIGDEFADLFSAAKKLYDSVLLSGILTVIDLSTKAPLSASMIQRYDEHREDLKQLKQFVKASLPEKYQEIFADSSKDGYAGYIEGKTNQEAFYKYLSKLLTKQEDSENFLEKIKNEDFLRKQRTFDNGSIPHQVHLTELKAIIRRQSEYYPFLKENQDRIEKILTFRIPYYIGPLAREKSDFAWMTRKTDDSIRPWNFEDLVDKEKSAEAFIHRMTNNDFYLPEEKVLPKHSLIYEKFTVYNELTKVRYKNEQGETYFFDSNIKQEIFDGVFKEHRKVSKKKLLDFLAKEYEEFRIVDVIGLDKENKAFNASLGTYHDLEKILDKDFLDNPDNESILEDIVQTLTLFEDREMIKKRLENYKDLFTESQLKKLYRRHYTGWGRLSAKLINGIRDKESQKTILDYLIDDGRSNRNFMQLINDDGLSFKSIISKAQAGSHSDNLKEVVGELAGSPAIKKGILQSLKIVDELVKVMGYEPEQIVVEMARENQTTNQGRRNSRQRYKLLDDGVKNLASDLNGNILKEYPTDNQALQNERLFLYYLQNGRDMYTGEALDIDNLSQYDIDHIIPQAFIKDDSIDNRVLVSSAKNRGKSDDVPSLEIVKDCKVFWKKLLDAKLMSQRKYDNLTKAERGGLTSDDKARFIQRQLVETRQITKHVARILDERFNNELDSKGRRIRKVKIVTLKSNLVSNFRKEFGFYKIREVNNYHHAHDAYLNAVVAKAILTKYPQLEPEFVYGDYPKYNSYKTRKSATEKLFFYSNIMNFFKTKVTLADGTVVVKDDIEVNNDTGEIVWDKKKHFATVRKVLSYPQNNIVKKTEIQTGGFSKESILAHGNSDKLIPRKTKDIYLDPKKYGGFDSPIVAYSVLVVADIKKGKAQKLKTVTELLGITIMERSRFEKNPSAFLESKGYLNIRADKLIILPKYSLFELENGRRRLLASAGELQKGNELALPTQFMKFLYLASRYNESKGKPEEIEKKQEFVNQHVSYFDDILQLINDFSKRVILADANLEKINKLYQDNKENISVDELANNIINLFTFTSLGAPAAFKFFDKIVDRKRYTSTKEVLNSTLIHQSITGLYETRIDLGKLGED

SEQ ID NO: 437 - protein, 1370 aa, Streptococcus agalactiae
  REGION 1..1370: note = Streptococcus agalactiae COH1
MNKPYSIGLDIGTNSVGYSVVTDDYKVPAKKMRVLGNTDKEYIKKNLIGALLFDGGNTASDRRLKRTARRRYTRRRNRILYLQEIFAEEMSKVDDSFFHRLEDSFLVEDDKRGSKYPIFATMQEEKDYHEKFPTIYHLRKELADKKEKANLRLVYLALAHIIKFRGHFLIEDDSFDVRNTDIQRQYQAFLEIFDTTFENNHLLSQNIDVEGILTDKISKSAKKDRILAQYPNQKSTGIFAEFLKLIVGNQADFKKHFNLEDKTPLQFAKDSYDEDLENLLGQIGDEFADLFSVAKKLYDSVLLSGILTVTDLSTKAPLSASMIQRYDEHREDLKQLKQFVKASLPEKYQEIFTDSSKDGYAGYIEGKTNQGAFYKYLSKLLTKQEGSEYFLEKIKNEDFLRKQRTFDNGSIPHQVHLTELKAIIRRQSEYYPFLKENLDRIEKILTFRIPYYVGPLAREKSDFAWMTRKTDDSIRPWNFEELVDKEASAEAFIHRMTNNDLYLPEEKVLPKHSLIYEKFTVYNELTKVRYKNEQGETYFFDSNIKQEIFDGVFKEHRKVSKKKLLDFLAKEYEEFRIVDVIGLDKENKAFNASLGTYHDLKKILDKDFLDNPDNESILEDIVQTLTLFEDREMIKKRLENYKDLFTESQLKKLYRRHYTGWGRLSAKLINGIRDKESQKTILDYLISDGRANRNFMQLIHDDGLSFKPIIDKAQAGSHSDNLKEVVGELAGSPAIKKGILQSLKIVDELVKVMGYEPEQVVVEMARENQTTNQGRRNTRQRYKLLEEGVKNLASDLNGNILKEYPTDNQALQNERLFLYYLQNGRDMYTGEALDIDNLSQYDIDHIVPQAFIKDDSIDNRVLVSSAKNRGKSDNVPSIDIVKARKAFWKKLLDAKLMSQRKYDNLTKAERGGLTSDDKARFIQRQLVETRQITKHVARILDERFNNELDSKGRRIRKVKIVTLKSNLVSNFRKEFGFYKIREVNDYHHAHDAYLNAVVAKAILTKYPQLEPEFVYGDYPKYNSYKTRKSATEKLFFYSNIMNFFKTKVTLADGTVVVKDDIEVNNDTGEIVWDKKKHFATVRKVLSYPQVNIVKKTEIQTGGFSKESILAHGNSDKLIPRKTKDIYLDPKKYGGFDSPIVAYSVLVVADIKKGKAQKLKTVTELLGITIMERFRFEKNPSAFLESKGYLNIRDDKLMILPKYSLFELENGRRRLLASAGELQKGNELALPTQYMKFLYLASRYNELKGKPEEIEQKQEFVVQHVSYFDDILQIINDFSNRVILADANLEKINKLYQDNKENISVDELANNIINLFTFTSLGAPAAFKFFDKIVDRKRYTSTKEVLNSTLIHQSITGLYETRIDLGKLGED

SEQ ID NO: 438 - protein, 1370 aa, Streptococcus agalactiae
  REGION 1..1370: note = Streptococcus agalactiae FSL S3-026
MNKPYSIGLDIGTNSVGWSIITDDYKVPAKKMRVLGNTDKEYIKKNLIGALLFDGGNTAADRRLKRTARRRYTRRRNRILYLQEIFAEEMSKVDDSFFHRLEDSFLVEEDKRGSKYPIFATMQEEKYYHEKFPTIYHLRKELADKKEKADLRLIYLALAHIIKFRGHFLIEDDRFDVRNTDIQKQYQAFLEIFDTTFENNDLLSQNVDVEAILTDKISKSAKKDRILARYPNQKSTGIFAEFLKLIVGNQADFKKHFNLEDKTPLQFAKDSYDEDLENLLGQIGDEFADLFSAAKKLYDSVLLSGILTVTDLSTKAPLSASMIQRYDEHREDLKQLKQFVKASLPEKYQEIFADSSKDGYAGYIEGKTNQEAFYKYLSKLLTKQEGSEYLLEKIKNEDFLRKQRTFDNGSIPHQVHLTELRAIIRRQSEYYPFLKENLDRIEKILTFRIPYYVGPLAREKSDFAWMTRKTDDSIRPWNFEDLVDKEKSAEAFIHRMTNNDLYLPEEKVLPKHSLIYEKFTVYNELTKVRFLAEGFKDFQFLNRKQKETIFNSLFKEKRKVTEKDIISFLNKVDGYEGIAIKGIEKQFNASLSTYHDLKKILGKDFLDNTDNELILEDIVQTLTLFEDREMIRKRLDIYKDFFTESQLKKLYRRHYTGWGRLSAKLINGIRNKENQKTILDYLIDDGSANRNFMQLIKDAGLSFKPIIDKARTGSHSDNLKEVVGELAGSPAIKKGILQSLKIVDELVKVMGYEPEQIVVEMARENQTTAKGLSRLRQRLTTLRESLANLKSNILEEKKPKYVKDQVENHHLSDDRLFLYYLQNGKDMYTDDELDIDNLSQYDIDHIIPQAFIKDDSIDNRVLVSSAKNRGKSDDVPSVEIVKDCKVFWKKLLDAKLMSQRKYDNLTKAERGGLTSDDKARFIQRQLVETRQITKHVARILDERFNNELDSKGRRIRKVKIVTLKSNLVSNFRKEFGFYKIREVNNYHHAHDAYLNAVVAKAILTKYPQLEPEFVYGDYPKYNSYKTRKSATEKLFFYSNIMNFFKTKVTLADGTVVVKDDIEVNNDTGEIVWDKKKHFATVRKVLSYPQVNIVKKTEIQTGGFSKESILAHGNSDKLIPRKTKDIYLDPKKYGGFDSPIVAYSVLVVADIKKGKAQKLKTVTELLGITIMERSRFEKNPSAFLESKGYLNIRDDKLMILPKYSLFELENGRRRLLASADELQKGNELALPTQFMKFLYLASRYNELKGKPEEIEQKQEFVVQHVSYFDDILQIINDFSNRVILADANLEKINKLYQDNKENIPVDELANNIINLFTFTSLGAPAAFKFFDKIVDRKRYTSTKEVLNSTLIHQSITGLYETRIDLGKLGED

SEQ ID NO: 439 - protein, 1370 aa, Streptococcus agalactiae
  REGION 1..1370: note = Streptococcus agalactiae GB00112
MNKPYSIGLDIGTNSVGYSVVTDDYKVPAKKMRVLGNTDKEYIKKNLIGALLFDGGNTASDRRLKRTARRRYTRRRNRILYLQEIFAEEMSKVDDSFFHRLEDSFLVEDDKRGSKYPIFATMQEEKDYHEKFPTIYHLRKELADKKEKADLRLVYLALAHIIKFRGHFLIEDDSFDVRNTDIQRQYQAFLEIFDTTFENNHLLSQNIDVEGILTDKISKSAKKDRILAQYPNQKSTGIFAEFLKLIVGNQADFKKHFNLEDKTPLQFAKDSYDEDLENLLGQIGDEFADLFSVAKKLYDSVLLSGILTVTDLSTKAPLSASMIQRYDEHREDLKQLKQFVKASLPEKYQEIFTDSSKDGYAGYIEGKTNQGAFYKYLSKLLTKQEGSEYFLEKIKNEDFLRKQRTFDNGSIPHQVHLTELKAIIRRQSEYYPFLKENLDRIEKILTFRIPYYVGPLAREKSDFAWMTRKTDDSIRPWNFEELVDKEASAEAFIHRMTNNDLYLPEEKVLPKHSLIYEKFTVYNELTKVRYKNEQGETYFFDSNIKQEIFDGVFKEHRKVSKKKLLDFLAKEYEEFRIVDVIGLDKENKAFNASLGTYHDLKKILDKDFLDNPDNESILEDIVQTLTLFEDREMIKKRLENYKDLFTESQLKKLYRRHYTGWGRLSAKLINGIRDKESQKTILDYLISDGRANRNFMQLIHDDGLSFKPIIDKAQAGSHSDNLKEVVGELAGSPAIKKGILQSLKIVDELVKVMGYEPEQVVVEMARENQTTNQGRRNTRQRYKLLEEGVKNLASDLNGNILKEYPTDNQALQNERLFLYYLQNGRDMYTGEALDIDNLSQYDIDHIVPQAFIKDDSIDNRVLVSSAKNRGKSDNVPSIDIVKARKAFWKKLLDAKLMSQRKYDNLTKAERGGLTSDDKARFIQRQLVETRQITKHVARILDERFNNELDSKGRRIRKVKIVTLKSNLVSNFRKEFGFYKIREVNDYHHAHDAYLNAVVAKAILTKYPQLEPEFVYGDYPKYNSYKTRKSATEKLFFYSNIMNFFKTKVTLADGTVVVKDDIEVNNDTGEIVWDKKKHFATVRKVLSYPQVNIVKKTEIQTGGFSKESILAHGNSDKLIPRKTKDIYLDPKKYGGFDSPIVAYSVLVVADIKKGKAQKLKTVTELLGITIMERFRFEKNPSAFLESKGYLNIRDDKLMILPKYSLFELENGRRRLLASAGELQKGNELALPTQYMKFLYLASRYNELKGKPEEIEQKQEFVVQHVSYFDDILQIINDFSNRVILADANLEKINKLYQDNKENISVDELANNIINLFTFTSLGAPAAFKFFDKIVDRKRYTSTKEVLNSTLIHQSITGLYETRIDLGKLGED

SEQ ID NO: 440 - protein, 1370 aa, Streptococcus agalactiae
  REGION 1..1370: note = Streptococcus agalactiae H36B
  VARIANT 9: note = MOD_RES - Any amino acid
MNKPYSIGXDIGTNSVGWSIITDDYKVPAKKMRVLGNTDKEYIKKNLIGALLFDGGNTAADRRLKRTARRRYTRRRNRILYLQEIFAEEMSKVDDSFFHRLEDSFLVEEDKRGSKYPIFATLQEEKDYHEKFSTIYHLRKELADKKEKADLRLIYIALAHIIKFRGHFLIEDDSFDVRNTDISKQYQDFLEIFNTTFENNDLLSQNVDVEAILTDKISKSAKKDRILAQYPNQKSTGIFAEFLKLIVGNQADFKKYFNLEDKTPLQFAKDSYDEDLENLLGQIGDEFADLFSAAKKLYDSVLLSGILTVIDLSTKAPLSASMIQRYDEHREDLKQLKQFVKASLPEKYQEIFADSSKDGYAGYIEGKTNQEAFYKYLSKLLTKQEDSENFLEKIKNEDFLRKQRTFDNGSIPHQVHLTELKAIIRRQSEYYPFLKENQDRIEKILTFRIPYYIGPLAREKSDFAWMTRKTDDSIRPWNFEDLVDKEKSAEAFIHRMTNNDFYLPEEKVLPKHSLIYEKFTVYNELTKVRYKNEQGETYFFDSNIKQEIFDGVFKEHRKVSKKKLLDFLAKEYEEFRIVDVIGLDKENKAFNASLGTYHDLEKILDKDFLDNPDNESILEDIVQTLTLFEDREMIKKRLENYKDLFTESQLKKLYRRHYTGWGRLSAKLINGIRDKESQKTILDYLIDDGRSNRNFMQLINDDGLSFKSIISKAQAGSHSDNLKEVVGELAGSPAIKKGILQSLKIVDELVKVMGYEPEQIVVEMARENQTTNQGRRNSRQRYKLLDDGVKNLASDLNGNILKEYPTDNQALQNERLFLYYLQNGRDMYTGEALDIDNLSQYDIDHIIPQAFIKDDSIDNRVLVSSAKNRGKSDDVPSLEIVKDCKVFWKKLLDAKLMSQRKYDNLTKAERGGLTSDDKARFIQRQLVETRQITKHVARILDERFNNELDSKGRRIRKVKIVTLKSNLVSNFRKEFGFYKIREVNNYHHAHDAYLNAVVAKAILTKYPQLEPEFVYGDYPKYNSYKTRKSATEKLFFYSNIMNFFKTKVTLADGTVVVKDDIEVNNDTGEIVWDKKKHFATVRKVLSYPQNNIVKKTEIQTGGFSKESILAHGNSDKLIPRKTKDIYLDPKKYGGFDSPIVAYSVLVVADIKKGKAQKLKTVTELLGITIMERSRFEKNPSAFLESKGYLNIRADKLIILPKYSLFELENGRRRLLASAGELQKGNELALPTQFMKFLYLASRYNESKGKPEEIEKKQEFVNQHVSYFDDILQLINDFSKRVILADANLEKINKLYQDNKENISVDELANNIINLFTFTSLGAPAAFKFFDKIVDRKRYTSTKEVLNSTLIHQSITGLYETRIDLGKLGED

SEQ ID NO: 441 - protein, 1377 aa, Streptococcus agalactiae
MNKPYSIGLDIGTNSVGWSIITDDYKVPAKKMRVLGNTDKEYIKKNLIGALLFDGGNTAADRRLKRTARRRYTRRRNRILYLQEIFAEEMSKVDDSFFHRLEDSFLVEEDKRGSKYPIFATMQEEKYYHEKFPTIYHLRKELADKKEKADLRLVYLALAHIIKFRGHFLIEDDRFDVRNTDIQKQYQAFLEIFDTTFENNHLLSQNVDVEAILTDKISKSAKKDRILAQYPNQKSTGIFAEFLKLIVGNQADFKKHFNLEDKTPLQFAKDSYDEDLENLLGQIGDEFADLFSVAKKLYDSVLLSGILTVTDLSTKAPLSASMIQRYDEHHEDLKHLKQFVKASLPENYREVFADSSKDGYAGYIEGKTNQEAFYKYLLKLLTKQEGSEYFLEKIKNEDFLRKQRTFDNGSIPHQVHLTELRAIIRRQSEYYPFLKENQDRIEKILTFRIPYYVGPLAREKSDFAWMTRKTDDSIRPWNFEDLVDKEKSAEAFIHRMTNNDLYLPEEKVLPKHSLIYEKFTVYNELTKVRFLAEGFKDFQFLNRKQKETIFNSLFKEKRKVTEKDIISFLNKVDGYEGIAIKGIEKQFNASLSTYHDLKKILGKDFLDNTDNELILEDIVQTLTLFEDREMIKKCLDIYKDFFTESQLKKLYRRHYTGWGRLSAKLINGIRNKENQKTILDYLIDDGSANRNFMQLINDDDLSFKPIIDKARTGSHSDNLKEVVGELAGSPAIKKGILQSLKIVDELVKVMGYEPEQIVVEMARENQTTAKGLSRSRQRLTTLRESLANLKSNILEEKKPKYVKDQVENHHLSDDRLFLYYLQNGRDMYTKKALDIDNLSQYDIDHIIPQAFIKDDSIDNRVLVSSAKNRGKSDDVPSIEIVKARKMFWKNLLDAKLMSQRKYDNLTKAERGGLTSDDKARFIQRQLVETRQITKHVARILDERFNNEVDNGKKICKVKIVTLKSNLVSNFRKEFGFYKIREVNDYHHAHDAYLNAVVAKAILTKYPQLEPEFVYGMYRQKKLSKIVHEDKEEKYSEATRKMFFYSNLMNMFKRVVRLADGSIVVRPVIETGRYMRKTAWDKKKHFATVRKVLSYPQNNIVKKTEIQTGGFSKESILAHGNSDKLIPRKTKDIYLDPKKYGGFDSPIVAYSVLVVADIKKGKAQKLKTVTELLGITIMERSRFEKNPSAFLESKGYLNIRDDKLMILPKYSLFELENGRRRLLASAGELQKGNELALPTQFMKFLYLASRYNESKGKPEEIEKKQEFVNQHVSYFDDILQLINDFSKRVILADANLEKINKLYQDNKENIPVDELANNIINLFTFTSLGAPAAFKFFDKIVDRKRYTSTKEVLNSTLIHQSITGLYETRIDLGKLGED

SEQ ID NO: 442 - protein, 1370 aa, Streptococcus agalactiae
MNKPYSIGLDIGTNSVGWSIITDDYKVPAKKMRVLGNTDKEYIKKNLIGALLFDGGNTAADRRLKRTARRRYTRRRNRILYLQEIFAEEMSKVDDSFFHRLEDSFLVEEDKRGSKYPIFATMQEEKDYHEKFPTIYHLRKELADKKEKADLRLVYLALAHIIKFRGHFLIEDDRFDVRNTDIQKQYQAFLEIFDTSFENNHLLSQNVDVEAILTDKISKSAKKDRILAQYPNQKSTGIFAEFLKLIVGNQADFKKHFNLEDKTPLQFAKDSYDEDLENLLGQIGDEFADLFSAAKKLYDSVLLSGILTVTDLSTKAPLSASMIQRYDEHREDLKQLKQFVKASLPEKYQEIFADSSKDGYAGYIEGKTNQEAFYKYLSKLLTKQEDSEYFLEKIKNEDFLRKQRTFDNGSIPHQVHLTELKAIIRRQSEYYPFLKENQDKIEKILTFRIPYYVGPLARGNSDFAWMTRKTDDSIRPWNFEDLVDKEKSAEAFIHRMTNNDLYLPEEKVLPKHSLIYEKFTVYNELTKVRYKNEQGETYFFDSNVKQEIFDGVFKEHRKVSKKQLLDFLAKEFEEFRIVDVTGLDKENKAFNASLGTYHDLKKILDKDFLDNPDNESILEDIVQTITLFEDREMIKKRLENYKDLFTESQLKKLYRRHYTGWGRLSAKLINGIRDRESQKTILDYLISDGRANRNFMQLINDDGLSFKSIISKAQSGSHSDNLKEVVGELAGSPAIKKGILQSLKIVDELVKVMGYEPEQIVVEMARENQTTNQGRRNSRQRYKLLEDGVKNLASDLNGDILKEYPTDNQALQNERLFLYYLQNGRDMYTGEALDIDNLSQYDIDHIVPQAFIKDDSIDNRVLVSSAKNRGKSDDVPSIDIVKARKAFWKKLLDAKLISQRKYDNLTKAERGGLTPDDKAGFIQRQLVETRQITKHVARILDERFNNKVDDNNKPIRKVKIVTLKSNLVSNFRKEFGFYKIREVNNYHHAHDAYLNAVVAKAILTKYPQLEPEFVYGDYPKYNSYKTRKSATEKLFFYSNIMNFFKTKVTLADETVVVKDDIEVNNETGEIAWDKKKHFATVRKVLSYPQVNIVKKTEVQTGGFSKESILAHSNSDKLIPRKTKDIYLDPKKYGGFDSPIVAYSVLVLADIKKGKAQKLKTVKELIGITIMERERFEKNPSAFLESKGYLNIRTDKLIILPKYSLFELENGRRRLLASAGELQKGNELALPTQYMKFLYLASRYNESKGKPEEIEKKQEFVNQHVSYFDDILQLINDFSKRVILADANLEKINKLYSDNKDNTPVDELAKNIINLFTFTSLGAPAAFKFFDKSVDRKRYTSTKEVLDSTLIHQSITGLYETRIDLGKLGED

SEQ ID NO: 443 - protein, 1370 aa, Streptococcus agalactiae
  REGION 1..1370: note = Streptococcus agalactiae STIR-CD-17
MNKPYSIGLDIGTNSVGWSIITDDYKVPAKKMRVLGNTDKEYIKKNLIGALLFDGGNTAADRRLKRTARRRYTRRRNRILYLQEIFAEEMSKVDDSFFHRLEDSFLVEEDKRGSKYPIFATMQEEKDYHEKFPTIYHLRKELADKKEKADLRLVYLALAHIIKFRGHFLIEDDRFDVRNTDIQKQYQAFLEIFDTSFENNHLLSQNVDVEAILTDKISKSAKKDRILAQYPNQKSTGIFAEFLKLIVGNQADFKKHFNLEDKTPLQFAKDSYDEDLENLLGQIGDEFADLFSAAKKLYDSVLLSGILTVTDLSTKAPLSAYMIQRYDEHREDLKQLKQFVKASLPEKYQEIFADSSKDGYAGYIEGKTNQEAFYKYLSKLLTKQEDSEYFLEKIKNEDFLRKQRTFDNGSIPHQVHLTELKAIIRRQSEYYPFLKENQDKIEKILTFRIPYYVGPLARGNSDFAWMTRKTDDSIRPWNFEDLVDKEKSAEAFIHRMTNNDLYLPEEKVLPKHSLIYEKFTVYNELTKVRYKNEQGETYFFDSNVKQEIFDGVFKEHRKVSKKQLLDFLAKEFEEFRIVDVTGLDKENKAFNASLGTYHDLKKILDKDFLDNPDNESILEDIVQTITLFEDREMIKKRLENYKDLFTESQLKKLYRRHYTGWGRLSAKLINGIRDRESQKTILDYLISDGRANRNFMQLINDDGLSFKSIISKAQSGSHSDNLKEVVGELAGSPAIKKGILQSLKIVDELVKVMGYEPEQIVVEMARENQTTNQGRRNSRQRYKLLEDGVKNLASDLNGDILKEYPTDNQALQNERLFLYYLQNGRDMYTGEALDIDNLSQYDIDHIVPQAFIKDDSIDNRVLVSSAKNRGKSDDVPSIDIVKARKAFWKKLLDAKLISQRKYDNLTKAERGGLTPDDKAGFIQRQLVETRQITKHVARILDERFNNKVDDNNKPIRKVKIVTLKSNLVSNFRKEFGFYKIREVNNYHHAHDAYLNAVVAKAILTKYPQLEPEFVYGDYPKYNSYKTRKSATEKLFFYSNIMNFFKTKVTLADETVVVKDDIEVNNETGEIAWDKKKHFATVRKVLSYPQVNIVKKTEVQTGGFSKESILAHSNSDKLIPRKTKDIYLDPKKYGGFDSPIVAYSVLVLADIKKGKAQKLKTVKELIGITIMERERFEKNPSAFLESKGYLNIRTDKLIILPKYSLFELENGRRRLLASAGELQKGNELALPTQYMKFLYLASRYNESKGKPEEIEKKQEFVNQHISYFDDILQLINDFSKRVILADANLEKINKLYSDNKDNTPVDELAKNIINLFTFTSLGAPAAFKFFDKSVDRKRYTSTKEVLDSTLIHQSITGLYETRIDLGKLGED

SEQ ID NO: 444 - protein, 1125 aa, Streptococcus anginosus
  REGION 1..1125: note = Streptococcus anginosus 1_2_62CV
MNGLVLGLDIGIASVGVGILNKETGEIIHANSRIFPAATADSNVERRGFRQGRRLGRRKKHRSARLNNLFEEFGFITDFSAIPLNLNPYALRVKGLSEELTNEELFIALKNIIKRRGISYLDDASEDGETASNEYGKAVEENRKLLADKTPGQIQLERFEKYGQVRGDFTVVENGENHRLINVFSTSAYKKEAERILRRQQEFNVRISDEFIEAYLTILTGKRKYYHGPGNEKSRTDYGRFRTDGTTLDNIFGILIGKCTFYPDEYRAAKASYTAQEFNLLNDLNNLTVPTETKKLSPEQKRQIVEYARTAKTLGTPTLLKYIAKLVDGSIDDIKGYRIDKSDKPEMHTFDAYRKMRTLDLVNIDALSRETLDDLAHILTLNTESEGILEALNSKMPSTFTKEQIDELIQFRKKNSAVFGKGWHNFSLKLMNELISELYETSEEQMTILTRLGKQRSREISKRTKYIDEKELTEEIYNPVVAKSVRQAIKIINEATKRYGIFDNIVIEMARENNEEDAKKDYIKRQKANQDEKNASMEKAAFQYNGKKELPDSIFHGHKELATKIRLWHQQGERCLYTGKNISIRDLIHNPHQYEIDHILPLSLSFDDGLANKVLVLATANQEKGQRTPFQAIDSMDDAWSYREFKQYVRNSKSLSNKKKDYLLTEEDISKIEVKQKFIERNLVDTRYSSRVVLNTLQEFYKTNDFDTKISVVRGQFTSQLRRKWKIEKSRDTYHHHAVDALIIAASSQLRLWKKQNNPLISYKEGQFVDPETGEILSLTDDEYKELVFRPPYDYFVDTLKSKSFEDSILFSYQVDSKYNRKISDATIYGTRKAQLGKDKQEETYVLGKIKDIYSQKGYEDFIKRYNKDETQFLIYHKDPQTFEKVIEEILKTYPDKELNEKGKEIPCNPFEKYRQENGPIRKYSKKGKGPEIKSLKYYDNKLGNHIDITPVNSQNQVVLQSLKPWRTDVYFNPRTSKYELMGLKYSDLRFEKGSGSYGISPEKYNKVKAKEGVNEDSEFKFTLYKNDLILIKDTETGEQQLFRYGSRNDTSKHYVELKPYEKAKFEGNQQLMNLLGTVAKGGQCLKGINKPNLSIYKVKTDVLGNKYFIKKEGDQPQLNFKKKF

SEQ ID NO: 445 - protein, 1345 aa, Streptococcus anginosus
  REGION 1..1345: note = Streptococcus anginosus F0211
MDQKYSIGLDIGTNSVGWAVVTDDYKVPAKKMKVLGNTDKQSIKKNLLGALLFDSGETAEATRLKRTARRRYTRRRNRLRYLQEIFAEEMNKVDENFFQRLDDSFLVDEDKRGERHPIFGNIAAEVKYHDDFPTIYHLRKHLADISQKADLRLVYLALAHMIKFRGHFLIEGQLKAENTNVQALFKDFVEVYDKTVEESHLSEMTVDALSILTEKVSKSRRLENLIAHYPAEKKNTLFGNLIALSLGLQPNFKTNFQLSEDAKLQFSKDTYEEDLEGLLGEIGDEYADLFASAKNLYDAILLSGILTVDDNSTKAPLSASMVKRYEEHQKDLKKLKDFIKVNAPDQYNAIFKDKNKKGYAGYIENGVKQDEFYKYLKGILLQINGSGDFLDKIDREDFLRKQRTFDNGSIPHQIHLQEMHAILRRQEEHYPFLKENQDKIEKILTFRIPYYVGPLARKGSRFAWAEYKADEKITPWNFDDILDKEKSAEKFITRMTLNDLYLPEEKVLPKHSLLYETFTVYNELTKVKYVNEQGEAKFFDANMKQEIFDHVFKENRKVTKDKLLNYLNKEFEEFRIVNLTGLDKENKAFNSSLGTYHDLRKILDKSFLDDKANEKTIEDIIQTLTLFEDREMIRQRLQKYSDIFTKAQLKKLERRHYTGWGRLSYKLINGIRNKENKKTILDYLIDDGYANRNFMQLINDDALSFKEEIARAQIIGDVDDIANVVHDLPGSPAIKKGILQSVKIVDELVKVMGHNPANIIIEMARENQMTDKGRRNSQQRLKLLQDSLKNLDNPVNIKNVENQQLQNDRLFLYYIQNGKDMYTGETLDINNLSQYDIDHIIPQAFIKDNSLDNRVLTRSDKNRGKSDDVPSIEVVHEMKSFWSKLLSVKLITQRKFDNLTKAERGGLTEEDKAGFIKRQLVETRQITKHVAQILDERFNTEFDGNKRRIRNVKIITLKSNLVSNFRKEFELYKVREINDYHHAHDAYLNAVVGNALLLKYPQLEPEFVYGEYPKYNSYRSRKSATEKFLFYSNILRFFKKEDIQTNEDGEIAWNKEKHIKILRKVLSYPQVNIVKKTEEQTGGFSKESILPKGESDKLIPRKTKNSYWNPKKYGGFDSPVVAYSILVFADVEKGKSKKLRKVQDMVGITIMEKKRFEKHPVDFLEQRGYRNVRLEKIIKLPKYSLFELENKRRRLLASARELQKGNELVIPQRFTTLLYHSYQIEKNYEPEHREYVEKHKDEFKELLEYISVFSRKYVLADNNLTKIEMLFSKNKDAEVSSLAKSFISLLTFTAFGAPAAFNFFGENIDRKRYTSVTECLNATLIHQSITGLYETRIDLSKLGED

SEQ ID NO: 446 - protein, 1386 aa, Streptococcus anginosus
  REGION 1..1386: note = Streptococcus anginosus SK1138
MNQKYSIGLDIGTNSVGWAVITDDYKVPAKKMKVLGNTDKQSIKKNLLGALLFDSGETAEATRLKRTARRRYTRRRNRLRYLQEIFAEEMMQVDESFFQRLDDSFLVDEDKRGERHPIFGNIAAEVKYHDEFPTIYHLRKHLADISQKADLRLVYLALAHMIKFRGHFLIEGQLKAENTNVQALFKDFVEVYDKTVEESHLSEITVDALSILTEKVSKSRRLENLIAHYPAEKKNTLFGNLIALFLGLQPNFKTNFQLSEDAKLQFSKDTYEEDLEGLLGEVGDEYADLFASAKNLYDAILLSGILTVDDNSTKAPLSASMVKRYEEHQKDLKKFEDFIKVNALDQYNAIFKDKNKKGYAGYIESGVKQDEFYKYLKGILLQINGSGDFLDKIDREDFLRKQRTFDNGSIPHQIHLQEMHAILRRQGEHYPFLKENQDKIEKILTFRIPYYVGPLARKGSRFAWAEYKADEKITPWNFDDILDKEKSAEKFITRMTLNDLYLPEEKVLPKHSLLYETFTVYNELTKVKYVNEQGEAKFFDANMKQEIFDHVFKENRKVTKDKLLNYLNKEFEEFRIVNLTGLDKENKVFNSSLGTYHDLRKILNKSFLDNKENAQIIEDIIQTLTLFEDREMIRQRLQKYSDIFTKAQLKKLERRHYTGWGRLSYKLINGIRNKENKKTILDYLIDDGYANRNFMQLINDDALSFKEEIAKAQIIGDVDDIANVVHDLPGSPAIKKGILQSVKIVDELVKVMGHNPANIIIEMARENQTTDRGRRNSQQRLKLLQDSLKNLDNPVNIKNVENQQLQNDRLFLYYIQNGKDMYTGETLDINNLSQYDIDHIIPQAYIKDDSFDNRVLTSSSENRGKSDNVPSIEVVCARKADWMRLRKAGLISQRKFDNLTKAERGGLTENDKAGFIKRQLVETRQITKHVAQVLDARFNAKHDENKKVIRDVKIITLKSNLVSQFRKDFKFYKVREINDYHHAHDAYLNAVIGTALLKKYPKLASEFVYGEFKKYDVRKFIAKSDKEIGKATAKYFFYSNLMNFFKKEVKFADGTVVERPDIETSEDGEIAWNKQTDFKIVRKVLSYPQVNIVKKTEVQTHGLDRGKPRGLFNANPSPKPKPDSSENLVGVKRNLDPKKYGGYAGISNSYAVLVKAIIEKGVKKKETMVLEFQGISILDRITFEKDKRAFLLGKGYKDIKKIIELPKYSLFELKDGSRRMLASILSTNNKRGEIHKGNELFVPQKFTTLLYHAKRINNPINKDHIEYVKKHRDDFKELLNYVLEFNEKYVGATKNGERLKEAVADFDSKSNEEICTSFLGAVNSKNAGLFELTSLGSASDFEFLGVKIPRYRDYTPSSLLKDSTLIHQSITGLYETRIDLSKLGED

SEQ ID NO: 447 - protein, 1396 aa, Streptococcus anginosus
  REGION 1..1396: note = Streptococcus anginosus SK52 = DSM 20563
MTKPYSIGLDIGTNSVGWAVITDDYKVPAKKMKVLGNTNRDYIKKNLLGALLFDGGETAEGRRLKRTARRRYTRRKNRLRYLQEIFAEEMMQVDESFFQRLDDSFLVEEDKQGSKYPIFGTLKEEKEYHKKFKTIYHLREELANSKEKADLRLVYLALAHMIKFRGHFLYEGDLKAENTDVQALFKDFVEEYDKTIEESHLSEITVDALSILTEKVSKSSRLENLIAHYPTEKKNTLFGNLIALSLGLQANFKTNFQLSEDAKLQFSKDTYEEDLEGLLGEVGDEYADLFVSAKNLYDAILLSGILTVDDNSTKAPLSASMVKRYKEHKEELAAFKRFIKEKLPKKYEEIFKDDTKNGYAGYVGADKKLRKRSGKLATEEEFYKYVKGILNKVEGADYFLDKIDREDFLRKQRTFDNGSIPHQIHLQEMHAILRRQGEHYPFLKENQDKIEKILTFRIPYYVGPLARKGSRFAWAEYKADEKITPWNFDDILDKEKSAEKFITRMTLNDLYLPEEKVLPKHSPLYETFTVYNELTKVKYVNEQGEAKFFDTNMKQEIFDHVFKENRKVTKDKLLNYLNKEFEEFRIVNLTGLDKENKAFNASLGTYHDLRKILDKSFLDDKVNEKIIEDIIQTLTLFEDREMIRQRLQKYSDIFTTQQLKELERRHYTGWGRLSYKLINGIRNKENKKTILDYLIDDGYANRNFMQLINDDALSFKEEIARAQIIGDVDDIANVVHDLPGSPAIKKGILQSVKIVDELVKVMGHNPTNIIIEMARENQTTDKGRRNSQQRLKLLQDSLKNLDNPVNIKNVENQQLQNDRLFLYYIQNGKDMYTGETLDINNLSQYDIDHIIPQAFIKDNSLDNRVLTRSDKNRGKSDDVPSIEVVHEMKSFWSKLLSVKLITQRKFDNLTKAERGGLTENDKAGFIKRQLVETRQITKHVAQVLDARFNAKHDENKKVIRDVKIITLKSNLVSQFRKDFKFYKVREINDYHHAHDAYLNAVIGTALLKKYPKLASEFVYGEFKKYDVRKFIAKSDKEIGKATAKYFFYSNLMNFFKKEVKFADGTVVERPDIETSEDGEIAWNKQTDFKIVRKVLSYPQVNIVKKTEVQTHGLDRGKPRGLFNANPSPKPKPDSSENLVGIKRNLDPKKYGGYAGISNSYAVLVKAIIEKGVKKKETMVLEFQGISILDRITFEKDKRAFLLGKGYKDIKKIIELPKYSLFELKDGSRRMLASILSTNNKRGEIHKGNELFVPQKFTTLLYHAKRINNPINKDHIEYVKKHRDDFKELLNYVLEFNEKYVGATKNGERLKEAVADFDSKSNEEICTSFLGAVNSKNAGLFELTSLGSASDFEFLGVKIPRYRDYTPSSLLKDSILIHQSITGLYETRIDLSKLGED

SEQ ID NO: 448 - protein, 1373 aa, Streptococcus bovis
  REGION 1..1373: note = Streptococcus bovis ATCC 700338
MTKKNYSIGLDIGTNSVGWAVITDDYKVPAKKMKVLGNTDKKYIKKNLLGALLFDSGETAEATRLKRTARRRYTRRKNRLRYLQEIFAEEMTKVDESFFQRLDESFLRWDDDNKKLGRYPIFGNKADVVKYHQEFPTIYHLRKHLADSSEKADLRLVYLALAHMIKFRGHFLIEGELNAENTDVQKIFADFVGVYDRTFDDSHLSEITVDAASILTEKISKSRRLENLIKYYPTEKKNTLFGNLIALALGLQPNFKMNFKLSEDAKLQFSKDSYEEDLGELLGKIGDDYADLFTSAKNLYDAILLSGILIVDDNSTKAPLSASMIKRYVEHQEDLEKLKEFIKANKSELYHDIFKDKNKNGYAGYIENGVKQDEFYKYLKNTLSKIAGSDYFLDKIEREDFLRKQRTFDNGSIPHQIHLQEMHAILRRQGDYYPFLKENQDRIEKILTFRIPYYVGPLARKDSRFSWAEYHSDEKITPWNFDKVIDKEKSAEKFITRMTLNDLYLPEEKVLPKHSHVYETYAVYNELTKIKYVNEQGKDSFFDSNMKQEIFDHVFKENRKVTKEKLLNYLNKEFPEYRIKDLIGLDKENKSFNASLGTYHDLKKILDKAFLDDKVNEEVIEDIIKTLTLFEDKDMIHERLQKYSDIFTADQLKKLERRHYTGWGRLSYKLINGIRNKENNKTILDYLIDDGSANRNFMQLINDDTLPFKQIIQKSQVVGDVDDIEAVVHDLPGSPAIKKGILQSVKIVDELVKVMGDNPDNIVIEMARENQTTNRGRSQSQQRLKKLQNSLKELGSNILNEEKPSYIEDKVENSHLQNDQLFLYYIQNGKDMYTGDELDIDHLSDYDIDHIIPQAFIKDDSIDNRVLTSSAKNRGKSDDVPSLDIVRARKAEWVRLYKSGLISKRKFDNLTKAERGGLTEADKAGFIKRQLVETRQITKHVAQILDARFNTESDENDKVIRDVKVITLKSNLVSQFRKDFEFYKVREINDYHHAHDAYLNAVVGTALLKKYPKLASEFVYGEYKKYDIRKFITNSSDKATAKYFFYSNLMNFFKRVIRYSNGKVIVRPVVEYSKDTEDIAWDKKSNFRTICKVLSYPQVNIVKKVETQTGGFSKESILPKGDSDKLIPRKTKKAYWDTKKYGGFDSPTVAYSVFVVADVEKGKAKKLKTVKELVGISIMERSFFEENPVEFLENKGYHNIREDKLIKLPKYSLFEFEGGKRRLLASASELQKGNEMVIPGHLVKLLYHAQRINSFNSTKYLDYVSAHKKEFEKVLSCVEDFANLYVDVEKNLSKIRAVADSMDNFSIEEISNSFINLLTLTALGAPADFNFLGEKIPRKRYTSTKECLNATLIHQSITGLYETRIDLSKIGEE

SEQ ID NO: 449 - protein, 1375 aa, Streptococcus canis
  REGION 1..1375: note = Streptococcus canis FSL Z3-227
MEKKYSIGLDIGTNSVGWAVITDDYKVPSKKFKVLGNTNRKSIKKNLMGALLFDSGETAEATRLKRTARRRYTRRKNRIRYLQEIFANEMAKLDDSFFQRLEESFLVEEDKKNERHPIFGNLADEVAYHRNYPTIYHLRKKLADSPEKADLRLIYLALAHIIKFRGHFLIEGKLNAENSDVAKLFYQLIQTYNQLFEESPLDEIEVDAKGILSARLSKSKRLEKLIAVFPNEKKNGLFGNIIALALGLTPNFKSNFDLTEDAKLQLSKDTYDDDLDELLGQIGDQYADLFSAAKNLSDAILLSDILRSNSEVTKAPLSASMVKRYDEHHQDLALLKTLVRQQFPEKYAEIFKDDTKNGYAGYVGIGIKHRKRTTKLATQEEFYKFIKPILEKMDGAEELLAKLNRDDLLRKQRTFDNGSIPHQIHLKELHAILRRQEEFYPFLKENREKIEKILTFRIPYYVGPLARGNSRFAWLTRKSEEAITPWNFEEVVDKGASAQSFIERMTNFDEQLPNKKVLPKHSLLYEYFTVYNELTKVKYVTERMRKPEFLSGEQKKAIVDLLFKTNRKVTVKQLKEDYFKKIECFDSVEIIGVEDRFNASLGTYHDLLKIIKDKDFLDNEENEDILEDIVLTLTLFEDREMIEERLKTYAHLFDDKVMKQLKRRHYTGWGRLSRKMINGIRDKQSGKTILDFLKSDGFSNRNFMQLIHDDSLTFKEEIEKAQVSGQGDSLHEQIADLAGSPAIKKGILQTVKIVDELVKVMGHKPENIVIEMARENQTTTKGLQQSRERKKRIEEGIKELESQILKENPVENTQLQNEKLYLYYLQNGRDMYVDQELDINRLSDYDVDHIVPQSFIKDDSIDNKVLTRSVENRGKSDNVPSEEVVKKMKNYWRQLLNAKLITQRKFDNLTKAERGGLSEADKAGFIKRQLVETRQITKHVARILDSRMNTKRDKNDKPIREVKVITLKSKLVSDFRKDFQLYKVRDINNYHHAHDAYLNAVVGTALIKKYPKLESEFVYGDYKVYDVRKMIAKSEQEIGKATAKRFFYSNIMNFFKTEVKLANGEIRKRPLIETNGETGEVVWNKEKDFATVRKVLAMPQVNIVKKTEVQTGGFSKESILSKRESAKLIPRKKGWDTRKYGGFGSPTVAYSILVVAKVEKGKAKKLKSVKVLVGITIMEKGSYEKDPIGFLEAKGYKDIKKELIFKLPKYSLFELENGRRRMLASATELQKANELVLPQHLVRLLYYTQNISATTGSNNLGYIEQHREEFKEIFEKIIDFSEKYILKNKVNSNLKSSFDEQFAVSDSILLSNSFVSLLKYTSFGASGGFTFLDLDVKQGRLRYQTVTEVLDATLIYQSITGLYETRTDLSQLGGD

SEQ ID NO: 450 - protein, 1345 aa, Streptococcus constellatus
  REGION 1..1345: note = Streptococcus constellatus subsp. constellatus SK53
MGKPYSIGLDIGTNSVGWAVVTDDYKVPAKKMKVLGNTDKQSIKKNLLGALLFDSGETAEATRLKRTARRRYTRRKNRLRYLQEIFTGEMNKVDENFFQRLDDSFLVDEDKRGEHHPIFGNIAAEVKYHDDFPTIYHLRRHLADTSKKADLRLVYLALAHMIKFRGHFLYEGDLKAENTDVQALFKDFVEEYDKTIEESHLSEITVDALSILTEKVSKSSRLENLIAHYPTEKKNTLFGNLIALSLDLHPNFKTNFQLSEDAKLQFSKDTYEEDLEGFLGEVGDEYADLFASAKNLYDAILLSGILTVDDNSTKAPLSASMVKRYEEHQKDLKKLKDFIKVNAPDQYNAIFKDKNKKGYASYIESGVKQDEFYKYLKGILLKINGSGDFLDKIDREDFLRKQRTFDNGSIPHQIHLQEMHAILRRQGEHYPFLKENQDKIEKILTFRIPYYVGPLARKGSRFAWAEYKADEKITPWNFDDILDKEKSAEKFITRMTLNDLYLPEEKVLPKHSPLYEAFTVYNELTKVKYVNEQGEAKFFDTNMKQEIFDHVFKENRKVTKDKLLNYLNKEFEEFRIVNLTGLDKENKAFNSSLGTYHDLRKILDKSFLDDKANEKTIEDIIQTLTLFEDREMIRQRLQKYSDIFTKAQLKKLERRHYTGWGRLSYKLINGIRNKENKKTILDYLIDDGYANRNFMQLINDDALSFKEEIARAQIIDDVDDIANVVHDLPGSPAIKKGILQSVKIVDELVKVMGHNPANIIIEMARENQTTDKGRRNSQQRLKLLQDSLKNLDNPVNIKNVENQQLQNDRLFLYYIQNGKDMYTGETLDINNLSQYDIDHIIPQAFIKDNSLDNRVLTRSDKNRGKSDDVPSIEVVHEMKSFWSKLLSVKLITQRKFDNLTKAERGGLTEEDKAGFIKRQLVETRQITKHVAQILDERFNTEFDGNKRRIRNVKIITLKSNLVSNFRKEFELYKVREINDYHHAHDAYLNAVVGNALLLKYPQLEPEFVYGEYPKYNSYRSRKSATEKFLFYSNILRFFKKEDIQTNEDGEIAWNKEKHIKILRKVLSYPQVNIVKKTEEQTGGFSKESILPKGESDKLIPRKTKNSYWDPKKYGGFDSPVVAYSILVFADVEKGKSKKLRKVQDMVGITIMEKKRFEKNPVDFLEQRGYRNVRLEKIIKLPKYSLFELENKRRRLLASAKELQKGNELVIPQRFTTLLYHSYRIEKDYEPEHREYVEKHKDEFKELLEYISVFSRKYVLADNNLTKIEMLFSKNKDAEVSSLAKSFISLLTFTAFGAPAAFNFFGENIDRKRYTSVTECLNATLIHQSITGLYETRIDLSKLGED

SEQ ID NO: 451 - protein, 1371 aa, Streptococcus dysgalactiae
MDKKYSIGLDIGTNSVGWAVITDDYKVPSKKFKVLGNTDRHSIKKNLIGALLFDSGETAEATRLKRTARRRYTRRKNRIRYLQEIFSSEMSKVDDSFFHRLEESFLVEEDKKHERHPIFGNIVDEVAYHEKYPTIYHLRKKLADSTDKADLRLIYLALAHMIKFRGHFLIEGDLNPDNSDMDKLFIQLVQTYNQLFEENPINASRVDAKAILSARLSKSRRLENLIAQLPGEKRNGLFGNLIALSLGLTPNFKSNFDLAEDAKLQLSKDTYDDDLDNLLAQIGDQYADLFLAAKNLSDAILLSDILRVNSEITKAPLSASMIKRYDEHHQDLTLLKALVRQQLPEKYKEIFFDQSKNGYAGYIDGGASQEEFYKFIKPILEKMDGTEELLAKLNREDLLRKQRTFDNGSIPHQIHLGELHAILRRQEDFYPFLKDNREKIEKILTFRIPYYVGPLARGNSRFAWMTRKSEETITPWNFEEVVDKGASAQSFIERMTNFDKNLPNEKVLPKHSLLYEYFTVYNELTKVKYVTEGMRKPEFLSGKQKEAIVDLLFKTNRKVTVKQLKEDYFKKIECFDSVEISGVEDRFNASLGTYHDLLKIIKDKDFLDNEENEDILEDIVLTLTLFEDKEMIEERLKKYANLFDDKVMKQLKRRHYTGWGRLSRKLINGIRDKQSGKTILDFLKSDGFANRNFMQLINDDSLTFKEAIQKAQVSGQGHSLHEQIANLAGSPAIKKGILQSVKVVDELVKVMGHKPENIVIEMARENQTTQKGQKNSRERMKRIEEGIKELGSQILKEHPVENTQLQNEKLYLYYLQNGRDMYVDQELDINRLSDYDVDHIVPQSFIKDDSIDNKVLTRSDKNRGKSDNVPSEEVVKKMKNYWRQLLNAKLITQRKFDNLTKAERGGLSELDKAGFIKRQLVETRQITKHVAQILDSRMNTKYDENDKLIREVKVITLKSKLVSDFRKDFQFYKVREINNYHHAHDAYLNAVVGTALIKKYPKLESEFVYGDYKVYDVRKMIAKSEQEIGKATAKRFFYSNIMNFFKTEITLANGEIRKRPLIETNEETGEIVWDKGRDFATVRKVLSMPQVNIVKKTEVQTGALTNESIYARGSFDKLISRKHRFESSKYGGFGSPTVTYSVLVVAKSKVQDGKVKKIKTGKELIGITLLDKLVFEKNPLKFIEDKGYGNVQIDKCIKLPKYSLFEFENGTRRMLASVMANNNSRGDLQKANEMFLPAKLVTLLYHAHKIESSKELEHEAYILDHYNDLYQLLSYIERFASLYVDVEKNISKVKELFSNIESYSISEICSSVINLLTLTASGAPADFKFLGTTIPRKRYGSPQSILSSTLIHQSITGLYETRIDLSQLGGD

SEQ ID NO: 452 - protein, 1371 aa, Streptococcus dysgalactiae
MDKKYSIGLDIGTNSVGWAVITDDYKVPSKKFKVLGNTDRHSIKKNLIGALLFDSGETAEATRLKRTARRRYTRRKNRIRYLQEIFSSEMSKVDDSFFHRLEESFLVEEDKKHERHPIFGNIVDEVAYHEKYPTIYHLRKKLADSTDKADLRLIYLALAHMIKFRGHFLIEGDLNPDNSDVDKLFIQLVQTYNQLFEEKPINASGVDAKAILSARLSKSKRLENLIAQLPGEKKNGLFGNLIALSLGLTPNFKSNFDLAEDAKLQLSKDTYDDDLDNLLAQIGNQYADLFLAAKNLSDAILLSDILRVNSEITKAPLSASMIKRYDEHHQDLTLLKALVRQQLPEKYKEIFFDQSKNGYAGYIDGGASQEEFYKFIKPILEKMDGTEELLAKLNREDLLRKQRTFDNGSIPHQIHLGELHAILRRQEDFYPFLKDNREKIEKILTFRIPYYVGPLARGNSRFAWMTRKSEETITPWNFEEVVDKGASAQSFIERMTNFDKNLPNEKVLPKHSLLYEYFTVYNELTKVKYVTEGMRKPEFLSGKQKEAIVDLLFKTNRKVTVKQLKEDYFKKIECFDSVEISGVEDRFNASLGTYHDLLKIIKDKDFLDNEENEDILEDIVLTLTLFEDKEMIEERLKKYANLFDDKVMKQLKRRHYTGWGRLSRKLINGIRDKQSGKTILDFLKSDGFANRNFMQLINDDSLTFKEAIQKAQVSGQGHSLHEQIANLAGSPAIKKGILQSVKVVDELVKVMGHKPENIVIEMARENQTTQKGQKNSRERMKRIEEGIKELGSQILKEHPVENTQLQNEKLYLYYLQNGRDMYVDQELDINRLSDYDVDHIVPQSFIKDDSIDNKVLTRSDKNRGKSDNVPSEEVVKKMKNYWRQLLNAKLITQRKFDNLTKAERGGLSELDKAGFIKRQLVETRQITKHVAQILDSRMNTKYDENDKLIREVKVITLKSKLVSDFRKDFQFYKVREINNYHHAHDAYLNAVVGTALIKKYPKLESEFVYGDYKVYDVRKMIAKSEQEIGKATAKRFFYSNIMNFFKTEITLANGEIRKRPLIETNEETGEIVWDKGRDFATVRKVLSMPQVNIVKKTEVQTGALTNESIYARGSFDKLISRKHRFESSKYGGFGSPTVTYSVLVVAKSKVQDGKVKKIKTGKELIGITLLDKLVFEKNPLKFIEDKGYGNVQIDKCIKLPKYSLFEFENGTRRMLASVMANNNSRGDLQKANEMFLPAKLVTLLYHAHKIESSKELEHEAYILDHYNDLYQLLSYIERFASLYVDVEKNISKVKELFSNIESYSISEICSSVINLLTLTASGAPADFKFLGTTIPRKRYGSPQSILSSTLIHQSITGLYETRIDLSQLGGD

SEQ ID NO: 453 - protein, 1371 aa, Streptococcus dysgalactiae
MDKKYSIGLDIGTNSVGWAVITDDYKVPSKKFKVLGNTDRHSIKKNLIGALLFDSGETAEATRLKRTARRRYTRRKNRIRYLQEIFSSEMSKVDDSFFHRLEESFLVEEDKKHERHPIFGNIVDEVAYHEKYPTIYHLRKKLADSTDKADLRLIYLALAHMIKFRGHFLIEGDLNPDNSDMDKLFIQLVQTYNQLFEENPINASRVDAKAILSARLSKSRRLENLIAQLPGEKRNGLFGNLIALSLGLTPNFKSNFDLAEDAKLQLSKDTYDDDLDNLLAQIGDQYADLFLAAKNLSDAILLSDILRVNSEITKAPLSASMIKRYDEHHQDLTLLKALVRQQLPEKYKEIFFDQSKNGYAGYIDGGASQEEFYKFIKPILEKMDGTEELLAKLNREDLLRKQRTFDNGSIPHQIHLGELHAILRRQEDFYPFLKDNREKIEKILTFRIPYYVGPLARGNSRFAWMTRKSEETITPWNFEEVVDKGASAQSFIERMTNFDKNLPNEKVLPKHSLLYEYFTVYNELTKVKYVTEGMRKPEFLSGKQKEAIVDLLFKTNRKVTVKQLKEDYFKKIECFDSVEISGVEDRFNASLGTYHDLLKIIKDKDFLDNEENEDILEDIVLTLTLFEDKEMIEERLKKYANLFDDKVMKQLKRRHYTGWGRLSRKLINGIRDKQSGKTILDFLKSDGFANRNFMQLINDDSLTFKEAIQKAQVSGQGHSLHEQIANLAGSPAIKKGILQSVKVVDELVKVMGHKPENIVIEMARENQTTQKGQKNSRERMKRIEEGIKELGSQILKEHPVENTQLQNEKLYLYYLQNGRDMYVDQELDINRLSDYDVDHIVPQSFIKDDSIDNKILTRSDKNRGKSDNVPSEEVVKKMKNYWRQLLNAKLITQRKFDNLTKAERGGLSELDKAGFIKRQLVETRQITKHVAQILDSRMNTKYDENDKLIREVKVITLKSKLVSDFRKDFQFYKVREINNYHHAHDAYLNAVVGTALIKKYTKLESEFVYGDYKVYDVRKMIAKSEQEIGKATAKRFFYSNIMNFFKTEITLANGEIRKRPLIETNEETGEIVWDKGRDFATVRKVLSMPQVNIVKKTEVQTGALTNESIYARGSFDKLISRKHRFESSKYGGFGSPTVTYSVLVVAKSKVQDGKVKKIKTGKELIGMTLLDKLVFEKNPLKFIEDKGYGNVQIDKCIKLPKYSLFEFENGTRRMLASVMANNNSRGDLQKANEMFLPAKLVTLLYHAHKIESSKELEHEAYILDHYNDLYQLLSYIERFASLYVDVEKNISKVKELFSNIESYSISEICSSVINLLTLTASGAPADFKFLGTTIPRKRYGSPQSILSSTLIHQSITGLYETRIDLSQLGGD

SEQ ID NO: 454 - protein, 1371 aa, Streptococcus dysgalactiae
MDKKYSIGLDIGTNSVGWAVITDDYKVPSKKFKVLGNTDRHSIKKNLIGALLFDSGETAEATRLKRTARRRYTRRKNRIRYLQEIFSSEMSKVDDSFFHRLEESFLVEEDKKHERHPIFGNIVDEVAYHEKYPTIYHLRKKLADSTDKADLRLIYLALAHMIKFRGHFLIEGDLNPDNSDMDKLFIQLVQTYNQLFEENPINASRVDAKAILSARLSKSRRLENLIAQLPGEKRNGLFGNLIALSLGLTPNFKSNFDLAEDAKLQLSKDTYDDDLDNLLAQIGDQYADLFLAAKNLSDAILLSDILRVNSEITKAPLSASMIKRYDEHHQDLTLLKALVRQQLPEKYKEIFFDQSKNGYAGYIDGGASQEEFYKFIKPILEKMDGTEELLAKLNREDLLRKQRTFDNGSIPHQIHLGELHAILRRQEDFYPFLKDNREKIEKILTFRIPYYVGPLARGNSRFAWMTRKSEETITPWNFEEVVDKGASAQSFIERMTNFDKNLPNEKVLPKHSLLYEYFTVYNELTKVKYVTEGMRKPEFLSGKQKEAIVDLLFKTNRKVTVKQLKEDYFKKIECFDSVEISGVEDRFNASLGTYHDLLKIIKDKDFLDNEENEDILEDIVLTLTLFEDKEMIEERLKTYAHLFDDKVMKQLKRRHYTGWGRLSRKLINGIRDKQSGKTILDFLKSDGFANRNFIQLIHDDSLTFKEAIQKAQVSGQGHSLHEQIANLAGSPAIKKGILQSVKVVDELVKVMGHKPENIVIEMARENQTTQKGQKNSRERMKRIEEGIKELGSQILKEHPVENTQLQNEKLYLYYLQNGRDMYVDQELDINRLSDYDVDHIVPQSFIKDDSIDNKVLTRSDKNRGKSDDVPSEEVVKKMKNYWRQLLNAKLITQRKFDNLTKAERGGLSELDKAGFIKRQLVETRQITKHVAQILDSRMNTKYDENDKLIREVKVITLKSKLVSDFRKDFQFYKVREINNYHHAHDAYLNAVVGTALIKKYPKLESEFVYGDYKVYDVRKMIAKSEQEIGKATAKRFFYSNIMNFFKTEITLANGEIRKRPLIETNEETGEIVWNKGRDFATVRKVLSMPQVNIVKKTEVQTGALTNESIYARGSFDKLISRKHRFESSKYGGFGSPTVTYSVLVVAKSKVQDGKVKKIKTGKELIGITLLDKLVFEKNPLKFIEDKGYGNVQIDKCIKLPKYSLFEFENGTRRMLASVMANNNSRGDLQKANEMFLPAKLVTLLYHAHKIESSKELEHEAYILDHYNDLYQLLSYIERFASLYVDVEKNISKVKELFSNIESYSISEICSSVINLLTLTASGAPADFKFLGTTIPRKRYGSPQSILSSTLIHQSITGLYETRIDLSQLGGD

SEQ ID NO: 455 - protein, 1348 aa, Streptococcus equi
MKKPYTIALDIGTNSVGWVVVTDDYRVPTKKMKVLGNTERKTIKKNLIGALLFDSGDTAEGTRLKRTARRRYTRRKNRLRYLKEIFTEEMAKVDDGFFQRLEDSFYVLEDKEGNKHPIFANLADEVAYHKKYPTIYHLRKELVDNPQKADLRLIYLAVAHIIKFRGHFLIEGTLSSKNNNLQKSFDHLVDTYNLLFEEQRLLTEGINAKELLSAALSKSKRLENLISLIPGQKKTGIFGNIIALSLGLTPNFKANFGLSKDVKLQLAKDTYADDLDSLLAQIGDQYADLFLAAKNLSDAILLSDILTESDEITRAPLSASMVKRYREHHKDLVTLKTLIKDQLPEKYQEIFLDKTKNGYAGYIEGQVSQEEFYKYLKPILARLDGSEPLLLKIDREDFLRKQRTFDNGSIPHQIHLEELHAILRRQEVFYPFLKDNRKKIESLLTFRIPYYVGPLARGHSRFAWVKRKFDGAIRPWNFEEIVDEEASAQIFIEKMTKNDLYLPNEKVLPKHSLLYETFTVYNELTKVKYATEGMTRPQFLSADQKQAIVDLLFKTNRKVTVKQLKENYFKKIECWDSVEITGVEDSFNASLGTYHDLLKIIQDKDFLDNPDNQKIIEDIILTLTLFEDKKMISKRLDQYAHLFDKVVLNKLERHHYTGWGRLSGKLINGIRDKQSGKTILDFLKADGFANRNFMQLIHDSELSFIDEIAKAQVIGKTEYSKDLVGNLAGSPAIKKGISQTIKIVDELVKIMGYLPQQIVIEMARENQTTAQGIKNARQRMRKLEETAKKLGSNILKEHPVDNSQLQNDKRYLYYLQNGKDMYTGDDLDIDYLSSYDIDHIIPQSFIKNNSIDNKVLTSQGANRGKLDNVPSEAIVRKMKGYWQSLLRAGAISKQKFDNLTKAERGGLTQVDKAGFIQRQLVETRQITKHVAQILDSRFNTEFDDHNKRIRKVHIITLKSKLVSDFRKEFGLYKIRDINHYHHAHDAYLNAVVAKAILGKYPQLAPEFVYGDYPKYNSFKERQKATQKMLFYSNILKFFKDQESLHVNSDGEEIWNANKHLPIIKNVLSIPQVNIVKKTEVQTGGFYKESILSKGNSDKLIPRKNNWDTRKYGGFDSPTVAYSVLVIAKMEKGKAKVLKPVKEMVGITIMERTAFEENPVVFLEARGYREIQEHLIIKLPKYSLFELENGRRRLLASASELQKGNELFLPVDYMTFLYLAAHYHELTGSSEDVLRKKYFVDRHLHYFDDIIQMINDFAERHILASSNLEKINHTYHNNSDLPVNERAENIINVFTFVALGAPAAFKFFDATIDRKRYTSTKEVLNATLIHQSVTGLYETRIDLSQLGEN

SEQ ID NO: 456 - protein, 1377 aa, Streptococcus equinus
  REGION 1..1377: note = Streptococcus equinus ATCC 9812
MEKTYSIGLDIGTNSVGWAVITDDYKVPAKKMKVLGNTDKKYIKKNLLGALLFDSGETAEATRLKRAARRRYTRRKNRLRYLQEIFAKEMAKVDESFFQRLEESFLTDDDKTFDSHPIFGNKAEEDTYHQEFPTIYHLRKHLADSPEKVDLRLVYLALAHMIKFRGHFLIEGQLNAENTDVQKIFADFVGVYDRTFDDSHLSEITVDAASILTEKISKSRRLENLIKQYPTEKKNTLFGNLVALALGLQPNFKTNFKLSEDAKLQFSKDTYDEDLEELLGKIGDDYADLFTAAKNLYDAILLSGILTVDDNSTKAPLSASMIKRYEEHHEDLEKLKTFIKVNNFDKYHEIFKDKSKNGYAGYIENGVKQDIFYKHLKSIISEKNGGQYFLDKIEREDFLRKQRTFDNGSIPYQIHLQEMRTILRRQGEYYPFLKENQAKIEKILTFRIPYYVGPLARKNSRFAWAKYHSDEPITPWNFDEVVDKEKSAEKFITRMTLNDLYLPEEKVLPKHSYVYETFAVYNELTKIKYVNEQGKSFFFDANMKQEIFDHVFKENRKVTKAKLLSYLNNEFEEFRINDLIGLDKDSKSFNASLGTYHDLKKILDKSFLDDKTNEQIIEDIVLTLTLFEDRDMIHERLQKYSDIFTSQQLKKLERRHYTGWGRLSYKLINGIRNKENNKTILDFLIDDGDANRNFMQLINDDSLSFKTTIQEAQVVGDVDDIEAVVHDLPGSPAIKKGILQSVKIVDELVKVMGHNPQNIVIEMARENQITGYGRNRSNQRLKRLQDSLKEFGSDILSKKKPSYVDSKVENSHLQNDRLFLYYIQNGKDMYTGEELDIDHLSDYDIDHIIPQAFIKDNSIDNRVLTSSAKNRGKSDDVPSIEIVRNRKSYWYKLYKSGLISKRKFDNLTKAERGGLTETDKAGFIKRQLVETRQITKHVAQILDARFNTKCDENDKVIRDVKVITLKSSLVSQFRKEFKFYKVREINDYHHAHDAYLNAVVGTALLKKYPKLAPEFVYGEYKKYDVRKLVAKSSDNHSELGKATAKYFFYSNLMNFFKTEVKYADGRVFERPDIETNADGEVVWNKQRDFNIVRKVLSYPQVNIVKKVEVQTGGFSKESILPKGDSDKLIPRKTKKLQWETQKYGGFDSPTVAYSVLVVADVEKGKTRKLKTVKELVGISIMERSSFEENPVSFLEKKGYHNVQEDKLIKLPKYSLFEFEGGRRRLLASATELQKGNEVVLPQYMVNLLYHSQHVNNSHKPEHLNYVKQHKDEFKDIFNLIISIARINILKPKVVDNLINEFTEYGQEDISSLSESFINLLKFISFGAPGAFKFLKLDVKQSNLRYKSTTEALSATLIHQSVTGLYETRIDLSKLGEE

SEQ ID NO: 457 - protein, 1370 aa, Streptococcus gallolyticus
MTKKNYSIGLDIGTNSVGWAVITDDYKVPAKKMKVLGNTDKKYIKKNLLGALLFDSGETAEATRLKRTARRRYTRRKNRLRYLQEIFAEEMTKVDESFFYRLDESFLTTDEKDFERHPIFGNKAEEDAYHQKFPTIYHLRNYLADSSEKADLRLVYLALAHMIKYRGHFLIEGKLNAENTDVQKLFTDFVGVYDRTFDDSHLSEITVDVASTLTEKISKSRRLENLIKYYPTEKKNTLFGNLIALALGLQPNFKMNFKLSEDAKLQFSKDTYEEDLEELLGKIGDDYADLFTSAKNLYDAILLSGILTVDDNSTKAPLSASMIKRYVEHHEDLEKLKEFIKANKSELYHDIFKDKNKNGYAGYIENGVKQDEFYKYLKNTLSKIDGSDYFLDKIEREDFLRKQRTFDNGSIPHQIHLQEMHAILRRQGDYYPFLKEKQDRIEKILTFRIPYYVGPLVRKDSRFAWAEYRSDEKITPWNFDKVIDKEKSAEKFITRMTLNDLYLPEEKVLPKHSHVYETYAVYNELTKIKYVNEQGKESFFDSNMKQEIFDHVFKENRKVTKEKLLNYLNKEFPEYRIKDLIGLDKENKSFNASLGTYHDLKKILDKAFLDDKVNEEVIEDIIKTLTLFEDKDMIHERLQKYSDIFTANQLKKLERRHYTGWGRLSYKLINGIRNKENNKTILDYLIDDGSANRNFMQLINDDTLPFKQIIQKSQVVGDVDDIEAVVHDLPGSPAIKKGILQSVKIVDELVKVMGDNPDNIVIEMARENQTTNRGRSQSQQRLKKLQSSLKELGSNILNEEKPSYIEDKVENSHLQNDQLFLYYIQNGKDMYTGDELDIDHLSDYDIDHIIPQAFIKDDSIDNRVLTSSAKNRGKSDDVPSLDIVRARKAEWVRLYKSGLISKRKFDNLTKAERGGLTEADKAGFIKRQLVETRQITKHVAQILDARFNTEHDENDKVIRDVKVITLKSNLVSQFRKDFEFYKVREINDYHHAHDAYLNAVVGTALLKKYPKLASEFVYGEYKKYDIRKFITNSSDKATAKYFFYSNLMNFFKTKVKYADGTVFERPIIETNADGEIAWNKQIDFEKVRKVLSYPQVNIVKKVETQTGGFSKESILPKGDSDKLIPRKTKKVYWDTKKYGGFDSPTVAYSVFVVADVEKGKAKKLKTVKELVGISIMERSFFEENPVEFLENKGYHNIREDKLIKLPKYSLFEFEGGRRRLLASASELQKGNEMVLPGYLVELLYHAHRADNFNSTEYLNYVSEHKKEFEKVLSCVEDFANLYVDVEKNLSKIRAVADSMDNFSIEEISNSFINLLTLTALGAPADFNFLGEKIPRKRYTSTKECLTATLIHQSITGLYETRIDLSKLGEE

SEQ ID NO: 458 - protein, 1370 aa, Streptococcus gallolyticus; identical to SEQ ID NO: 457
  REGION 1..1370: note = Streptococcus gallolyticus subsp. gallolyticus TX20005

SEQ ID NO: 459 - protein, 1371 aa, Streptococcus gallolyticus
MTEKNYSIGLDIGTNSVGWAVITDDYKVPAKKMKVLGNTDKKYIKKNLLGALLFDNGETAEATRLKRTARRRYTRRKNRLRYLQEIFAEEMAKVDESFFYRLDESFLTTDDKDFERHPIFGNKADEIKYHQEFPTIYHLRKHLADSHEKADLRLIYLALAHMIKFRGHFLIEGELNAENTDVQKLFEAFVEVYDRTFDDSNLSEITVDASSILTEKFSKSRRLENLIKHYPTEKKNTLFGNLVALALGLQPNFKTSFKLSEDAKLQFSKDTYEEDLEELIGKIGDEYADLFTSAKNLYDAILLSGILTVADNTTKAPLSASMIKRYNEHQVDLKKLKEFIKNNASDKYDEIFNDKDKNGYAGYIENGVKQDEFYKYLKTTLSKIDGSDYFLDKIEREDFLRKQRTFDNGSIPHQIHLQEMHAILRRQGEHYAFLKENQAKIEKILTFRIPYYVGPLARKNSRFAWAEYHSDEKITPWNFDEIIDKEKSAEKFITRMTLNDLYLPEEKVLPKHSLVYETYTVYNELTKVKYVNEQGKSNFFDANMKQEIFEHVFKENRKVTKDKFLNYLNKEFPEYRIQDLIGLDKENKSFNASLGTYHDLKKILDKSFLDDKTNETIIEDIIQTLTLFEDRDMIRQRLQKYSDIFTPQQLKKLERRHYTGWGRLSYKLINGIRNKENGKSILDYLIDDGYANRNFMQLISDDTLPFKQIIKDAQIIGDIDDVTSVVRELPGSPAIKKGILQSVKIVDELVKVMGHNPDNIVIEMARENQTTNRGRNQSQQRLKKLQDSLKELGSNILNEEKPSYIEGKVENNHLQDDRLFLYYIQNGKDMYTGDELDIDHLSDYDIDHIIPQAFIKDDSIDNRVLTSSAKNRGKSDDVPSLDIVHDRKADWIRLYKSGLISKRKFDNLTKAERGGLTENDKAGFIKRQLVETRQITKHVAQILDSRFNTERDENDKVIRNVKVITLKSNLVSQFRKDFKFYKVREINDYHHAHDAYLNAVVGTALLKKYPKLAPEFVYGEYKKYDIRKFITSSGDKATAKYFFYSNLMNFFKRVIRYSNGKVVVRPVIECSKDTGEIAWNKQTDFEKVRRVLSYPQVNIVKKVETQTGGFSKESILPKGNSDKLIPRKTKKFRWDTPKYGGFDSPNIAYSVFVIADVEKGKAKKLKTVKELVGISIMERSSFEENPVVFLEKKGYQNVQEDNLIKLPKYSLFEFEGGRRRLLASASELQKGNEVVLSRHLVELLYHAHRVNSFNNSEHLKYVSEHKKEFGEVLSCVENFAKSYVDVEKNLGKIRAVADKIDTFSIEDISISFVNLLTLTALGAPADFNFLGEKIPRKRYTSTKECLNATLIHQSITGLYETRIDLSKLGEE

SEQ ID NO: 460 - protein, 1130 aa, Streptococcus gallolyticus
MTNGKILGLDIGIASVGVGIIEAKTGKVVHANSRLFSAANAENNAERRGFRGSRRLNRRKKHRVKRVRDLFEKYEIVTDFRNLNLNPYELRVKGLTEQLTNEELFAALRTISKRRGISYLDDAEDDSTGSTDYAKSIDENRRLLKTKTPGQIQLERLEKYGQLRGNFTVYDENGEAHRLINVFSTSDYEKEARKILETQADYNKKITAEFIDDYVEILTQKRKYYHGPGNEKSRTDYGRFRTDGTTLENIFGILIGKCSFYPDEYRASKASYTAQEYNFLNDLNNLKVPTETGKLSTEQKEALVEFAKSTATLGPAKLLKEIAKILDCKVDEIKGYREDDKGKPDLHTFEPYRKLKFNLDSVNIDDLSREVLDKLADILTLNTEREGIEDAIRHNLPNQFTEGQISEIIKVRKSQSTAFNKGWHSFSAKLMNELIPELYATSDEQMTILTRLEKFKVNKKSSKNTKTIDEKEVTDEIYNPVVAKSVRQTIKIINAAVKKYGDFDKIVIEMPRDKNADDEKKFIDKRNKENKKEKDDALKRAAYLYNGTDKLPDEVFHGNKQLETKIRLWYQQGERCLYSGKPIPIQELVHNSNNFEIDHILPLSLSFDDSLANKVLVYAWTNQEKGQKTPYQVIDSMDAAWSFREMKDYVLKQKGLGKKKRDYLLTTENIDKIEVKKKFIERNLVDTRYASRVVLNSLQSALRELGKDTKISVIRGQFTSQLRRKWKIDKSRETYHHHAVDALIIAASSQLKLWEKQDNPMFVDYGNNQVVDKQTGEILSVSDDEYKELVFQPPYQGFVNMISSKGFEDEILFSYQVDSKYNRKVSDATIYSTRKAKIGKDKKEETYVLGKIKDIYSQNGFDTFIKKYNKDKTQFLMYQKDPLTWENVIEVILRDYPTTKKSEDGKNDVKCNPFEEYRRENGLVCKYSKKGKGTPIKSLKYYDKKLGNCIDITPEGSKNEVVLQSLNPWRADVYFNPETLKYELLGLKYSDLSFEKGTGKYHISQEKYDVIKEKEGIGKKSEFKFTLYRNDLILIKDTASGEQEIYRFLSRTMPNVKHYAELKPYDKEKFDNVQELVEALGEADKVGRCIKGLNKSNLSIYKVRTDVLGNKYFVKKEGDKPKLDFKNNKK

SEQ ID NO: 461 - protein, 1136 aa, Streptococcus gordonii
MNGLVLGLDIGIASVGVGILEKDTGKIIHASSRLFPAATADNNVERRSNRQGRRLNRRKKHRSVRLQDLFEGYGLLTDFSKVSMNLNPYQLRVQGMENQLTNEELFVALKNIVKRRGISYLDDASEDGGTVSSDYGKAVEENRKLLAEKTPGQIQLERFEKYGQLRGDFTVEENGEKHRLINVFSTSAYRKEAERILRKQQEFNSKITDEFIEDYLIILTGKRKYYHGPGNEKSRTDYGRFRTDGTTLDNIFGILIGKCTFYTEEYRASKASYTAQEFNLLNDLNNLTVPTETKKLSEEQKKLIIEYAKSAKTLGASTLLKYIAKMIDASVDQIRGYRVDVNNKPEMHTFEVYRKMQSLETIKVEELPRKVLDELAHILTLNTEREGIEEAINSKLKDIFNRDQVLELVQFRKNNSSLFSKGWHNFSIKLMMELIPELYETSEEQMTILTRLGKQRSKETSKRTKYIDEKELTEEIYNPVVAKSVRQAIKIINEATKKYGIFDNIVIEMARENNEEDAKKDYIKRQKANQDEKNAAMEKAAFQYNGKKELPDNIFHGHKELTTKIRLWHQQGEKCLYTGKNIPISDLIHNQYKYEIDHILPLSLSFDDSLSNKVLVLATANQEKGQRTPFQALDSMDDAWSYREFKSYVKDSKLLSNKKKDYLLTEEDISKIEVKQKFIERNLVDTRYSSRVVLNALQDFYKSHQLDTTISVVRGQFTSQLRRKWGIEKSRETYHHHAVDALIIAASSQLRLWKKHSNPLIAYKEGQFVDSETGEIVSLSDEEYKELVFKAPYDHFVDTLRSKKFEDSILFSYQVDSKYNRKISDATIYATRKAKLDKEKKEYTYTLGKIKDIYALGTKTPSKTGFYKFLDLYKTDKSQFLMYQKDRKTWDEVIEKIIEQYRPFKEYDKNGKEVDFNPFEKYRIGNGPIRKYSKKGNGPEIKSLKYYDILLGKHKNITPDGSRNTVALLSLNPWRTDVYYNSETKKYEFLGLKYADLCFEEGGAYGISEVKYKKIREKEGIGKNSEFKFTLYKNDLILIKDTETNCQQFFRFWSRTGKDNPKSFEKHKIELKPYEKAKFEKGEELKVLGKVPPSSNQFQKNMQIENLSIYKVKTDILGNKHFIKKEGDEPKLKFKK

SEQ ID NO: 462 - protein, 1129 aa, Streptococcus infantarius
  REGION 1..1129: note = Streptococcus infantarius subsp. infantarius ATCC BAA-102
MSNGKILGLDIGVASVGVGIIDSKTGNVIHANSRLFSAANAENNAERRGFRGARRLTRRKKHRVKRVRDLFEKYDISTDFRNLNLNPYELRVKGLTEQLTNEELFAALRTIAKRRGISYLDDAEDDSTGSSDYAKSIDENRRLLKTKTPGQIQLERLEKYGQLRGNFTVYDENGEAHRLINVFSTSDYKNEARKILETQSNYNKQITDEFIEDYIEILTQKRKYYHGPGNEKSRTDYGRFRTDGTTLENIFGILIGKCSFYPEEYRASKASYTAQEFNFLNDLNNLKVPTETGKLSTEQKEYLVDFAKKSKALGASKLLKEIAKIVDCSVDDIKGYRVDNKDKPDLHTFEPYRKLKFNLSSIDIDELSRETLDKLADILTLNTEREGIEDAIKRNLPSQFTEEQISEIVQIRKNQSSAFNKGWHSFSAKLMNELIPELYVTSEEQMTILTRLEKFKVNKKSSKNTKTIDEKEITDEIYNPVVAKSVRQTIKIINAAVKKYGDFDKIVIEMPRDKNAEDEKKFIDKKQKENKKEKDDSLKRAAFLYNGTDNLPDGVFHGNKELKTKIRLWYQQGERCLYSGKLISIHDLVHNSNKFEIDHILPLSLSFDDSLANKVLVYAWTNQEKGQKTPYQVIDSMDTAWSFREMKDYVLKQKGLGKKKCEYLLTTENIDKIEVKKKFIERNLVDTRYASRVVLNSLQTALKELGKDTKVSVVRGQFTSQLRRKWNIDKSRETYHHHAVDALIIAASSQLKLWQKQENPMFESYGENQVVNKETGEILSISDDKYKELVFQPPYQGFVNTISSKGFEDEILFSYQVDSKFNRKVSDATIYSTRKAKLGKDKKDETYVLGKIKDIYSQDGFDTFIKRYKKDKTQFLMYQKDPLTWENVIEVILRDYPSEKLSEDGKKTVKCNPFEEYRRENGLICKYSKKGNGTPIKSLKYYDKKLGNCIDITPEKSKNRVVLRQISPWRADIYFNLETLKYELMGLKYSDLSFEKGTGKYHISQEKYDAIREKEGIGKKSEFKFTLYRNDLILIKDTLNNCERMLRFGSKNDTSKHYVELKPLEKGTFDSEEEILPVLGKVAKSGQFIKGLNKPNISIYKVRTDVLGNKFFIKKEGDKPKLDFKNNNK

SEQ ID NO: 463 - protein, 1375 aa, Streptococcus infantarius
MEKSYSIGLDIGTNSVGWAVITDDYKVPAKKMKVLGNTDKKYIKKNLLGALLFDSGETAEVTRLKRTARRRYTRRKNRLRYLQEIFAKEMTKVDESFFQRLEESFLTDDDKTFDSHPIFGNKAEEDAYHQKFPTIYHLRKYLADSQEKADLRLVYLALAHMIKYRGHFLIEGELNAENTDVQKLFNVFVETYDKIVDESHLSEIEVDASSILTEKVSKSRRLENLIKQYPTEKKNTLFGNLIALALGLQPNFKTNFKLSEDAKLQFSKDTYEEDLEELLGKVGDDYADLFISAKNLYDAILLSGILTVDDNSTKAPLSASMIKRYVEHHEDLEKLKEFIKINKLKLYHDIFKDKTKNGYAGYIDNGVKQDEFYKYLKTILTKIDDSDYFLDKIERDDFLRKQRTFDNGSIPHQIHLQEMHSILRRQGDYYPFLKENQAKIEKILTFRIPYYVGPLARKDSRFAWANYHSDEPITPWNFDEVVDKEKSAEKFITRMTLNDLYLPEEKVLPKHSHVYETFTVYNELTKIKYVNEQGESFFFDANMKQEIFDHVFKENRKVTKAKLLSYLNNEFEEFRINDLIGLDKDSKSFNASLGTYHDLKKILDKSFLDDKTNGQIIEDIVLTLTLFEDRDMIHERLQKYSDFFTSQQLKKLERRHYTGWGRLSYKLINGIRNKENNKTILDFLIDDGHANRNFMQLINDESLSFKTIIQEAQVVGDVDDIEAVVHDLPGSPAIKKGILQSVKIVDELVKVMGDNPDNIVIEMARENQTTGYGRNKSNQRLKRLQDSLKEFGSDILSKKKPSYVDSKVENSHLQNDRLFLYYIQNGKDMYTGEELDIDRLSDYDIDHIIPQAFIKDNSIDNKVLTSSAKNRGKSDDVPSIEIVRNRRSYWYKLYKSGLISKRKFDNLTKAERGGLTEADKAGFIKRQLVETRQITKHVAQILDARFNTKRDENDKVIRDVKVITLKSNLVSQFRKEFKFYKVREINDYHHAHDAYLNAVVGTALLKKYPKLTPEFVYGEYKKYDVRKLIAKSSDDYSEMGKATAKYFFYSNLMNFFKTEVKYADGRVFERPDIETNADGEVVWNKQKDFDIVRKVLSYPQVNIVKKVEAQTGGFSKESILSKGDSDKLIPRKTKKVYWNTKKYGGFDSPTVAYSVLVVADIEKGKAKKLKTVKELVGISIMERSFFEENPVSFLEKKGYHNVQEDKLIKLPKYSLFEFEGGRRRLLASATELQKGNEVMLPAHLVELLYHAHRIDSFNSTEHLKYVSEHKKEFEKVLSCVENFSNLYVDVEKNLSKVRAAAESMTNFSLEEISASFINLLTLTALGAPADFNFLGEKIPRKRYTSTKECLSATLIHQSVTGLYETRIDLSKLGEE

SEQ ID NO: 464 - protein, 1368 aa, Streptococcus iniae
  REGION 1..1368: note = Streptococcus iniae 9117
MRKPYSIGLDIGTNSVGWAVITDDYKVPSKKMRIQGTTDRTSIKKNLIGALLFDNGETAEATRLKRTTRRRYTRRKYRIKELQKIFSSEMNELDIAFFPRLSESFLVSDDKEFENHPIFGNLKDEITYHNDYPTIYHLRQTLADSDQKADLRLIYLALAHIIKFRGHFLIEGNLDSENTDVHVLFLNLVNIYNNLFEEDIVETASIDAEKILTSKTSKSRRLENLIAEIPNQKRNMLFGNLVSLALGLTPNFKTNFELLEDAKLQISKDSYEEDLDNLLAQIGDQYADLFIAAKKLSDAILLSDIITVKGASTKAPLSASMVQRYEEHQQDLALLKNLVKKQIPEKYKEIFDNKEKNGYAGYIDGKTSQEEFYKYIKPILLKLDGTEKLISKLEREDFLRKQRTFDNGSIPHQIHLNELKAIIRRQEKFYPFLKENQKKIEKLFTFKIPYYVGPLANGQSSFAWLKRQSNESITPWNFEEVVDQEASARAFIERMTNFDTYLPEEKVLPKHSPLYEMFMVYNELTKVKYQTEGMKRPVFLSSEDKEEIVNLLFKKERKVTVKQLKEEYFSKMKCFHTVTILGVEDRFNASLGTYHDLLKIFKDKAFLDDEANQDILEEIVWTLTLFEDQAMIERRLVKYADVFEKSVLKKLKKRHYTGWGRLSQKLINGIKDKQTGKTILGFLKDDGVANRNFMQLINDSSLDFAKIIKNEQEKTIKNESLEETIANLAGSPAIKKGILQSIKIVDEIVKIMGQNPDNIVIEMARENQSTMQGIKNSRQRLRKLEEVHKNTGSKILKEYNVSNTQLQSDRLYLYLLQDGKDMYTGKELDYDNLSQYDIDHIIPQSFIKDNSIDNTVLTTQASNRGKSDNVPNIETVNKMKSFWYKQLKSGAISQRKFDHLTKAERGALSDFDKAGFIKRQLVETRQITKHVAQILDSRFNSNLTEDSKSNRNVKIITLKSKMVSDFRKDFGFYKLREVNDYHHAQDAYLNAVVGTALLKKYPKLEAEFVYGDYKHYDLAKLMIQPDSSLGKATTRMFFYSNLMNFFKKEIKLADDTIFTRPQIEVNTETGEIVWDKVKDMQTIRKVMSYPQVNIVMKTEVQTGGFSKESIWPKGDSDKLIARKKSWDPKKYGGFDSPIIAYSVLVVAKIAKGKTQKLKTIKELVGIKIMEQDEFEKDPIAFLEKKGYQDIQTSSIIKLPKYSLFELENGRKRLLASAKELQKGNELALPNKYVKFLYLASHYTKFTGKEEDREKKRSYVESHLYYFDEIMQIIVEYSNRYILADSNLIKIQNLYKEKDNFSIEEQAINMLNLFTFTDLGAPSAFKFFNGDIDRKRYSSTNEIINSTLIYQSPTGLYETRIDLSKLGGK

SEQ ID NO: 465 - protein, 1338 aa, Streptococcus macacae
  REGION 1..1338: note = Streptococcus macacae NCTC 11558
MTKPYSIGLDIGTNSVGWAVVTDGYKVPAKKMKVLGNTDKSHIKKNLLGALLFDSGNTAKDRRLKRTARRRYTRRRNRILYLQEIFAEEMAKADESFFQRLNESFLTNDDKEFDSHPIFGNKAEEEAHHHKFPTIFHLRKHLADSTEKSDLRLIYLALAHMIKFRGHFLIEGQLKAENTNVQTLFDDFVEVYDKTVEESHLSEISVSSILTEKISKSRRLENLIKYYPTEKKNTLFGNLIALSLGLQPNFKTNFKLSEDAKLQFSKDTYEEDLGELLGKIGDNYADLFISAKNLYDAILLSGILTIDDNTTKAPLSASMIKRYEEHQEDLAQLKKFIRQNLPDQYSEVFSDKTKDGYAGYIDGKTNQEAFYKYIKNMLSKTEGADYFLDKIDREDFLRKQRTFDNGSVPHQIHLQEMHAILRRQGEYYPFLKENQDKIEKILTFRIPYYVGPLARKGSRFAWAEYKADKKVTPWNFDDILDKEKSAEEFITRMTLNDLYLPEEKVLPKHSLVYETFNVYNELTKVKYVNEQGKAIFFDANMKQEIFDHVFKENRKVTKDKLLNYLNKEFEEFRIVNLTGLDKENKAFNSSLGTYHDLRKILDKSFLDDKVNEKIIEDIIQTLTLFEDREMIRQRLQKYSDIFTTQQLKKLERRHYTGWGRLSAKLINGIRDKQSNKTILGYLIDDGYSNRNFMQLINDDSLPFKEEIARAQVIGETDDLNQLVSDIAGSPAIKKGILQSLKIVDELVKVMGHNPANIVIEMARENQTTAKGRRSSQQRYKRLEEAIKNLDHDLNHKILKEHPTDNQALQNDRLFLYYLQNGRDMYTEDPLDINRLSDYDIDHIIPQSFIKDDSIDNKVLVSSAKNRGKSDNVPSEDVVNRMRPFWNKLLSCGLISQRKYSNLTKKELKPDDKAGFIKRQLVETRQITKHVAQILDARFNTKRDENKKVIRDVKIITLKSNLVSQFRKDFKFYKVREINDYHHAHDAYLNAVIGKALLDVYPQLEPEFVYGEYPHFHGYKENKATAKKFFYSNIMNFFKKDDIRTDENGEIVWKKDEHISNIKRVLSYPQVNIVKKVEIQTVGQNGGLFDDNPKSPLEVTPSKLVPLKKELNPKKYGGYQKPTTAYPVLLITDTKQLIPISVMNKKQFEQNPVKFLRDRGYQQVGKNDFIKLPKYTLVDIGDGIKRLWASSKEIHKGNQLVVSKKSQILLYHAHHLDSDLSNDYLQNHNQQFDVLFNEIISFSKKCKLGKEHIQKIENVYSNKKNSASIEELAESFIKLLGFTQLGATSPFNFLGVKLNQKQYKGKKDYILPCTEGTLIRQSITGLYETRVDLSKIGED

SEQ ID NO: 466 - protein, 1130 aa, Streptococcus sp.
  source 1..1130: note = Streptococcus macedonicus
MTNGKILGLDIGIASVGVGIIEAKTGKVVHANSRLFSAANAENNAERRGFRGSRRLNRRKKHRVKRVRDLFEKYGIVTDFRNLNLNPYELRVKGLTEQLTNEELFAALRTISKRRGISYLDDAEDDSTGSTDYAKSIDENRRLLKTKTPGQIQLERLEKYGQLRGNFTVYDENGEAHRLINVFSTSDYEKEARKILETQADYNKKITAEFIDDYVEILTQKRKYYHGPGNEKSRTDYGRFRTDGTTLENIFGILIGKCNFYPDEYRASKASYTAQEYNFLNDLNNLKVPTETGKLSTEQKESLVEFAKNTAILGPAKLLKEIAKILDCKVDEIKGYREDDKGKPDLHTFEPYRKLKFNLDSVNIDYLSREVLDKLADILTLNTEREGIEDAIKRNLPNQFTEEQISEIINVRKSQSTAFNKGWHSFSAKLMNELIPELYATSDEQMTILTRLEKFKVKKKSSKNIKTIDEKEITDEIYNPVVAKSVRQTIKIINAAVKKYGDFDKIVIEMPRDKNADDEKKFINKRNKENKKEKDDALKRAAYLYNGTDKLPDEVFHGNKQLETKIRLWYQQGERCLYSGKPIPIQELVHNSNNFEIDHILPLSLSFDDSLANKVLVYSWTNQEKGQKTPYQVIDSMDAAWSFREMKEYVLKQKGLGKKKRDYLLTTENIDKIEVKKKFIERNLVDTRYASRVVLNSLQSALRELGKDTKVSVVRGQFTSQLRRKWKIDKSRETYHHHAVDALIIAASSQLKLWEKQDNPMFVDYGNNQVVDKQTGEILSVSDNEYKELVFQPPYQGFVNTISSKGFEDEILFSYQVDSKYNRKVSDATIYSTRKAKIGKDKKEETYVLGKIKDIYSQNGFDTFVKKYNKDKTQFLMYQKDPLTWENVIEVILGDYPTTKKSEDGKNDVKCNPFEEYRRENGLICKYSKKGKGTPIKSLKYYDKKLGNCIDITPEESRNKVILQSINPWRADVYFNPETLKYELMGLKYSDLSFEKGTGNYHISQEKYDAIKEKEGIGKKSEFKFTLYRNDLILIKDIASGEQEIYRFLSRTMPNVNHYVELKPYDKEKFDNVQELVEALGEADKVGRCIKSLNKPNISIYKVRTDVLGNKYFVKKEGDKPKLDFKNNKK

SEQ ID NO: 467 - protein, 1134 aa, Streptococcus mitis
  REGION 1..1134: note = Streptococcus mitis ATCC 6249
MNGLVLGLDIGIASEGVGILEKNSGKIIHANSRLFPAATADNNVERRKNRQARRLNRRKKHRGVRFQDLFEDYGLLTDFSKVSINLNPYRLRVDGLNQQLTNEELFIALKNIVKRRGISYLDDASEDGGAVSSDYGKAVEENRKLLAEQTPGQIQLERFEKYGQVRGDFTVVENGEKLRLINVFSTSAYKKEAERILRKQQEFNNQITDEFIEDYLKILTGKRKYYHGPGNEKSRTDYGRFRTDGTTLDNIFGILIGKCTFYPEEYRASKASYTAQEFNLLNDLNNLTVPTETKKLSEEQKKVIVEYAKEAKTLGASTLLKYIAKMIDASVDQIRGYRVDVNNKPEMHTFEVYRKMQSLETISVGELSRNVLDELAHILTLNTEREGMEEAINTKLKDSFSQDQVLELVQFRKNNSSLFSKGWHNFSLKLMMELIPELYETSEEQMTILTRLGKQKSKETSKRTKYIDEKELTEEIYNPVVAKSVRQAIKIINEATKKHGIFDNIVIEMARENNEEDAKKDYIKRQKANQDEKNAAMEKAAFQYNGKKELPDNIFHGHKELATKIRLWHQQGEKCLYTGKTIPISDLIYNQYKYEIDHILPLSLSFDDSLSNKVLALATANQEKGQRTPFQALDSMDDAWSYREFKSYVKDLKSLSNKKKDYLLTEEDISKIEVKQKFIERNLVDTRYSSRVVLNALQDFYKSHQFDTTISVVRGQFTSQLRRKWGLEKSRETYHHHAVDALIIAASSQLRLWKKQNNPLITYKEGQFVDSQTGEIISLTDDEYKELVFKAPYDHFVDTLSSKTFEDSILFSYQVDSKFNRKISDATIYATRKAKLDKEKKEYTYTLGKIKDIYSLGTKTPSKTGFYKFLDLYNKDKSQFLMFQKDRKTWDEVIEKIMEQYRPFKEYDKTGKLVDFNPFEKYRQENEPIRKYSKKGNGPEIKSLKYYDILLGKHKNITPEGSRNTVALLSLNPWRTDVYYNMETKKYEFLGLKYADLPFEEGGAYGISTETYNELREKEGIGKNSEFKFTLYKNDLILIKDTETNCQQIFRFWSRTGKDNPKSFEKHKIELKPYEKARFEKGEELEVLGKVPPSSNQLQKNMQIENLSIYKVKTDVLGNKHFIKKEGDKPKLKF

SEQ ID NO: 468 - protein, 1392 aa, Streptococcus mitis
  REGION 1..1392: note = Streptococcus mitis SK321
MNNNNYSIGLDIGTNSVGWAVITDDYKVPSKKMKVLGNTDKHFIKKNLIGALLFDEGATAEDRRFKRTARRRYTRRKNRLRYLQEIFSEEMSKVDSSFFHRLDDSFLVPEDKRGSKYPIFATLAEEKEYHKKFPTIYHLRKHLADSKEKTDLRLIYLALAHMIKYRGHFLYEESFDIKNNDIQKIFSEFISIYDNTFEGSSLSGQNAQVEAIFTDKISKSAKRERILKLFAYEKSTDLFSEFLKLIVGNQADFKKHFDLEEKAPLQFSKDTYDEDLENLLGQIGDDFADLFLVAKKLYDAILLSGILTVTDSSTKAPLSASMIERYENHQKDLAALKQFIQNNLQEKYDEVFSDQSKDGYARYINGKTTQEAFYKYIKNLLSKFEGSDYFLDKIEREDFLRKQRTFDNGSIPHQIHLQEMNAIIRRQGEHYPFLKEYKEKIETILTFRIPYYVGPLARGNRNFAWLTRNSDQAIRPWNFEEIVDQASSAEEFINKMTNYDLYLPEEKVLPKHSLLYETFAVYNELTKVKFISEGLRDYQFLDSGQKKQIVNQLFKEKRKVTEKDIIQYLHNVDGYDGIELKGIEKQFNASLSTYHDLLKIIKDKEFMDDPKNEEILENIVHTLTIFEDREMIKQRLAQYASIFDKKVIKALTRRHYTGWGKLSAKLINGICDKKTGKTILDYLIDDGYSNRNFMQLINDDGLSFKDIIQKAQVVGKTNDVKQVVQELPGSPAIKKGILQSIKLVDELVKVMGHAPESIVIEIARENQTTARGKKNSQQRYKRIEDALKNLAPGLDSNILKEHPTDNIQLQNDRLFLYYLQNGKDMYTGEALDINQLSSYDIDHIVPQAFIKDDSLDNRVLTSSKDNRGKSDNVPSLEVVQKRKAFWQQLLDSKLISEHKFNNLTKAERGGLDERDKVGFIRRQLVETRQITKHVAQILDARFNTEVNEKDKKNRTVKIITLKSNLVSNFRKEFKLYKVREINDYHHAHDAYLNAVVAKAILKKYPKLEPGFVYGDYQKYDIKRYISRSKDPKEVEKATEKYFFYSNLLNFFKEEVHYADGTIVKRENIEYSKDTGEIAWNKEKDFATIKKVLSLPQVNIVKKTEIQTHGLDRGKPRGLFNSNPSPKPSEDRKENLVPIKQGLDPRKYGGYAGISNSYAVLVKAIIEKGAKKQQKTVLEFQGISILDKINFEKNKENYLLEKGYIKILSTITLPKYSLFEFPDGTRRRLASILSTNNKRGEIHKGNELVIPEKYTTLLYHAKNINKTLEPEHLEYVEKHRNDFAKLLEYVLNFNDKYVGALKNGERIRQAFIDWETVDIEKLCFSFIGPRNSKNAGLFELTSQGSASDFEFLGVKIPRYRDYTPSSLLNATLIHQSITGLYETRIDLSKLGED

SEQ ID NO: 469 - protein, 1345 aa, Streptococcus mutans
  REGION 1..1345: note = Streptococcus mutans 11SSST2
MKKPYSIGLDIGTNSVGWAVVTDDYKVPAKKMKVLGNTDKSHIKKNLLGALLFDSGNTAADRRLKRTARRRYTRRRNRILYLQEIFAEEMSKVDDSFFHRLEDSFLVTEDKRGERHPIFGNLEEEVKYHENFPTIYHLRQYLADNPEKVDLRLVYLALAHIIKFRGHFLIEGKFDTRNNDVQRLFQEFLAVYDNTFENSSLQEQNVQVEEILTDKISKSAKKDRVLKLFPNEKSNGRFAEFLKLIVGNQADFKKHFELEEKAPLQFSKDTYEEELEVLLTQIGDNYAELFLSAKKLYDSILLSGILTVTDVSTKAPLSASMIQRYNEHQMDLAQLKQFIRQKLSDKYNEVFSDVSKDGYAGYIDGKTNQEAFYKYLKGLLNKIEGSGYFLDKIEREDFLRKQRTFDNGSIPHQIHLQEMRAIIRRQAEFYPFLADNQDRIEKILTFRIPYYVGPLARGKSDFAWLSRKSADKITPWNFDEIVDKESSAEAFINRMTNYDLYLPNQKVLPKHSLLYEKFTVYNELTKVKYKTEQGKTAFFDANMKQEIFDGVFKVYRKVTKDKLMDFLEKEFDEFRIVDLTGLDKENKAFNASYGTYHDLRKILDKDFLDNSKNEKILEDIVLTLTLFEDREMIRKRLENYSDLLTKEQVKKLERRHYTGWGRLSAELIHGIRNKESRKTLLDYLIDDGNSNRNFMQLINDDALSFKEEIAKAQVIGETDNLNQVVSDIAGSPAIKKGILQSLKIVDELVKIMGHQPENIVVEMARENQFTNQGRRNSQQRLKGLTDSIKEFGSQILKEHPVENSQLQNDRLFLYYLQNGRDMYTGEELDIDYLSQYDIDHIIPQAFIKDNSIDNRVLTSSKENRGKSDDVPSKDVVRKMKPYWSKLLSAKLITQRKFDNLTKAERGGLTDDDKAGFIKRQLVETRQITKHVARILDERFNTETDENNKKIRQVKIVTLKSNLVSNFRKEFELYKVREINDYHHAHDAYLNAVIGKALLGVYPQLEPEFVYGDYPHFHGHEENKATAKKFFYSNIMNFFKKDDVRTDKNGEIIWKKDEHISNIKKVLSYPQVNIVKKVEEQTGGFSKESILPKGNSDKLIPRKTKKFYWDTKKYGGFDSPIVAYSILVIADIEKGKSKKLKTVKALVGVTIMEKMTFERDPVAFLERKGYRNVQEENIIKLPKYSLFKLENGRKRLLASARELQKGNEIVLPNHLGTLLYHAKNIHKVDEPKHLDYVDKHKDEFKELLDVVSNFSKKYTLAEGNLEKIKELYAQNNGEDLKELSSSFINLLTFTAIGAPAAFKFFDKNIDRKRYTSTTEILNATLIHQSITGLYETRIDLSKLGGD

SEQ ID NO: 470 - protein, 1345 aa, Streptococcus mutans; identical to SEQ ID NO: 469
  REGION 1..1345: note = Streptococcus mutans 11SSST2

SEQ ID NO: 471 - protein, 1345 aa, Streptococcus mutans
  REGION 1..1345: note = Streptococcus mutans 11VS1
MKKPYSIGLDIGTNSVGWAVVTDDYKVPAKKMKVLGNTDKSHIKKNLLGALLFDSGNTAEDRRLKRTARRRYTRRRNRILYLQEIFSEEMGKVDDSFFHRLEDSFLVTEDKRGERHPIFGNLEEEVKYHENFPTIYHLRQYLADNPEKVDLRLVYLALAHIIKFRGHFLIEGKFDTRNNDVQRLFQEFLAVYDNTFENSSLQEQNVQVEEILTDKISKSAKKDRVLKLFPNEKSNGRFAEFLKLIVGNQADFKKHFELEEKAPLQFSKDTYEEELEVLLAQIGDNYAELFLSAKKLYDSILLSGILTVTDVSTKAPLSASMIQRYNEHQMDLAQLKQFIRQKLSDKYNEVFSDVSKDGYAGYIDGKTNQEAFYKYLKGLLNKIEGSGYFLDKIEREDFLRKQRTFDNGSIPHQIHLQEMRAIIRRQAEFYPFLADNQDRIEKILTFRIPYYVGPLARGKSDFAWLSRKSADKITPWNFDEIVDKESSAEAFINRMTNYDLYLPNQKVLPKHSLLYEKFTVYNELTKVKYKTEQGKTAFFDANMKQEIFDGVFKVYRKVTKDKLMDFLEKEFDEFRIVDLTGLDKENKVFNASYGTYHDLCKILDKDFLDNSKNEKILEDIVLTLTLFEDREMIRKRLENYSDLLTKEQVKKLERRHYTGWGRLSAELIHGIRNKESRKTILDYLIDDGNSNRNFMQLINDDALSFKEEIAKAQVIGETDNLNQVVSDIAGSPAIKKGILQSLKIVDELVKIMGHQPENIVVEMARENQFTKQGRRNSQQRLKGLTDSIKEFGSQILKEHPVENSQLQNDRLFLYYLQNGRDMYTGEELDIDYLSQYDIDHIIPQAFIKDNSIDNRVLTSSKENRGKSDDVPSKDVVRKMKSYWSKLLSAKLITQRKFDNLTKAERGGLTDDDKAGFIKRQLVETRQITKHVARILDERFYTETDENNKKIRQVKIVTLKSNLVSNFRKEFELYKVREINDYHHAHDAYLNAVIGKALLGVYPQLEPEFVYGDYPHFHGHKENKATAKKFFYSNIMNFFKKDDVRTDKNGEIIWKKDEHISNIKKVLSYPQVNIVKKVEEQTGGFSKESILPKGNSDKLIPRKTKKFYWDTKKYGGFDSPIVAYSILVIADIEKGKSKKLKTVKALVGVTIMEKMTFERDPVAFLERKGYRNVQEENIIKLPKYSLFKLENGRKRLLASARELQKGNEIVLPNHLGTLLYHAKNIHKVDEPKHLDYVDKHKDEFKELLDVVSNFSKKYTLAEGNLEKIKELYAQNNGEDLKELASSFINLLTFTAIGAPATFKFFDKNIDRKRYTSTTEILNATLIHQSITGLYETRIDLSKLGGD

SEQ ID NO: 472 - protein, 1345 aa, Streptococcus mutans
  REGION 1..1345: note = Streptococcus mutans 14D
MKKPYSIGLDIGTNSVGWAVVTDDYKVPAKKMKVLGNTDKSHIKKNLLGALLFDSGNTAADRRLKRTARRRYTRRRNRILYLQEIFAEEMSKVDDSFFHRLEDSFLVTEDKRGERHPIFGNLEEEVKYHENFPTIYHLRQYLADNPEKVDLRLVYLALAHIIKFRGHFLIEGKFDTRNNDVQRLFQEFLAVYDNTFENSSLQEQNVQVEEILTDKISKSAKKDRVLKLFPNEKSNGRFAEFLKLIVGNQADFKKHFELEEKAPLQFSKDTYEEELEVLLAQIGDNYAELFLSAKKLYDSILLSGILTVTDVSTKAPLSASMIQRYNEHQMDLAQLKQFIRQKLSDKYNEVFSDVSKDGYAGYIDGKTNQEAFYKYLKGLLNKIEGSGYFLDKIEREDFLRKQRTFDNGSIPHQIHLQEMRAIIRRQAEFYPFLADNQDRIEKILTFRIPYYVGPLARGKSDFAWLSRKSADKITPWNFDEIVDKESSAEAFINRMTNYDLYLPNQKVLPKHSLLYEKFTVYNELTKVKYKTEQGKTAFFDANMKQEIFDGVFKVYRKVTKDKLMDFLEKEFDEFRIVDLTGLDKENKAFNASYGTYHDLRKILDKDFLDNSKNEKILEDIVLTLTLFEDREMIRKRLENYSDLLTKEQVKKLERRHYTGWGRLSAELIHGIRNKESRKTILDYLIDDGNSNRNFMQLINDDALSFKEEIAKAQVIGETDNLNQVVSDIAGSPAIKKGILQSLKIVDELVKIMGHQPENIVVEMARENQFTNQGRRNSQQRLKGLTDSIKEFGSQILKEHPVEHSQLQNDRLFLYYLQNGRDMYTGEELDIDYLSQYDIDHIIPQAFIKDNSIDNRVLTSSKENRGKSDDVPSKNVVRKMKSYWSKLLSAKLITQRKFDNLTKAERGGLTDDDKAGFIKRQLVETRQITKHVARILDERFHTETDENNKKIRQVKIVTLKSNLVSNFRKEFELYKVREINDYHHAHDAYLNAVIGKALLGVYPQLEPEFVYGDYPHFHGHKENKATAKKFFYSNIMNFFKKDDVRTDKNGEIIWKKDEHISNIKKVLSYPQVNIVKKVEEQTGGFSKESILPKGNSDKLIPRKTKKFYWDTKKYGGFDSPIVAYSILVIADIEKGKSKKLKTVKALVGVTIMEKMTFERDPVAFLERKGYRNVQEENIIKLPKYSLFKLENGRKRLLASARELQKGNEIVLPNHLGTLLYHAKNIHKVDEPKHLDYVDKHKDEFKELLDVVSNFSKKYTLAEGNLEKIKELYAQNNGEDLKELASSFINLLTFTAIGAPATFKFFDKNIDRKRYTSTTEILNATLIHQSITGLYETRIDLSKLGGD

SEQ ID NO: 473 - protein, 1355 aa, Streptococcus mutans
  REGION 1..1355: note = Streptococcus mutans 15VF2
MKKSYSIGLDIGTNSVGWAVVTDDYKVPAKKMKVLGNTDKSHIKKNLLGALLFDSGNTAEDRRLKRTARRRYTRRRNRILYLQEIFSEEMGKVDDSFFHRLDESFLTDDDKNFDSHPIFGNKAEEDAYHQKFPTIYHLRKHLADSTEKADLRLVYLALAHMIKFRGHFLIEGELNAENTDVQKLFADFVGVYDRTFDDSHLSEITVDASSILTEKISKSRRLEKLINNYPKEKKNTLFGNLIALSLGLQPNFKTNFKLSEDAKLQFSKDTYEEDLEELLGKIGDDYADLFTLAKNLYDAILLSGILTADDSSTKAPLSASMIKRYAEHHEDLEKLKEFIKANKPELYHDIFKDETKNGYAGYIENGVKQDEFYKYLKNTLSKIAGSDYFLDKIEREDFLRKQRTFDNGSIPHQIHLQEMHAILRRQGDYYPFLKENQDRIEKILTFRIPYYVGPLARKNSRFAWAEYHSDEAVMPWNFDQVIDKESSAQAFIEHMTNNDLYLPNEKVLPKHSPLYEKYTVYNELTKIKYVTEIGEAKFFDANLKQEIFDGLFKHERKVTKKKLRTFLDKNFDEFRIVDIQGLDKETETFNASYATYQDLLKVIKDKVFMDNPENAEILENIVLTLTLFEDREMIKQRLAKYADVFDKKVIDQLARRHYTGWGRLSAKLLNGIRDKQSCKTIMDYLIDDAQSNRNLMQLITDDNLTFKDDIVKAQYVDNSDDLHQVVQSLAGSPAIKKGILQSLKIVDELVKVMGKEPEQIVVEMARENQTTAKGRRNSQQRYKRLKEAIKSLDRDLNHKILKEHPTDNQALQNNRLFLYYLQNGRDMYTGESLDINRLSDYDIDHVIPQAFIKDNSIDNRVLTSSKANRGKSDDVPSEDVVNRMRPFWNKLLSSGLISQRKYNNLTKKELTPDDKAGFIKRQLVETRQITKHVARMLDERFNKEFDDNNKRIRRVKIVTLKSNLVSSFRKEFELYKVREINDYHHAHDAYLNAVVVKALLVKYPKLEPEFVYGEYPKYNSYRERKTATQKMFFYSNIMNMFKSKVKLADDQIVERPMIEVNDETGEIAWDKTKHITTVKKVLSYPQVNIVKKVEEQTIGQNGGLFDDNPKSPLEVIPSKLVPLKKALNPEKYGGYQKPTTAYPILLIVDTKQLIPISVMDKKRFEQNPVKFLKDKGYQQIEKNNFVKLPKYTLVDIGNGIKRLWASSKEVHKGNQLVVSKKSQDLLYHAHHLDNDYSNEYVKNHYQQFDILFNEITSFSKKCKLGKEHIQKIEEAYSKERDSASIEELADGFIKLLGFTQLGATSPFSFLGIKLNQKQYTGKKDYLLPCMEATLIHQSITGLYETRIDLNKLGGD

SEQ ID NO: 474 - protein, 1355 aa, Streptococcus mutans; identical to SEQ ID NO: 473
  REGION 1..1355: note = Streptococcus mutans 15VF2

SEQ ID NO: 475 - protein, 1345 aa, Streptococcus mutans
  REGION 1..1345: note = Streptococcus mutans 1SM1
MKKPYSIGLDIGTNSVGWAVVTDDYKVPAKKMKVLGNTDKSHIKKNLLGALLFDSGNTAEDRRLKRTARRRYTRRRNRILYLQEIFSEEMGKVDDSFFHRLEDSFLVTEDKRGERHPIFGNLEEEVKYHENFPTIYHLRQYLADNPEKVDLRLVYLALAHIIKFRGHFLIEGKFDTRNNDVQRLFQEFLAVYDNTFENSSLQEQNVQVEEILTDKISKSAKKDRVLKLFPNEKSNGRFAEFLKLIVGNQADFKKHFELEEKAPLQFSKDTYEEDLEELLGKIGDDYADLFTLAKNLYDAILLSGILTADDSSTKAPLSASMIQRYNEHQMDLAQLKQFIRQKLSDKYNEVFSDVSKDGYAGYIDGKTNQEAFYKYLKGLLNKIEGSGYFLDKIEREDFLRKQRTFDNGSIPHQIHLQEMRAIIRRQAEFYPFLADNQDRIEKILTFRIPYYVGPLARGKSDFAWLSRKSADKITPWNFDEIVDKESSAEAFINRMTNYDLYLPNQKVLPKHSLLYEKFTVYNELTKVKYKTEQGKTAFFDANMKQEIFDGVFKVYRKVTKDKLMDFLEKEFDEFRIVDLTGLDKENKVFNASYGTYHDLCKILDKDFLDNSKNEKILEDIVLTLTLFEDREMIRKRLENYSDLLTKEQVKKLERRHYTGWGRLSAELIHGIRNKESRKTILDYLIDDGNSNRNFMQLINDDALSFKEEIAKAQVIGETDNLNQVVSDIAGSPAIKKGILQSLKIVDELVKIMGHQPENIVVEMARENQFTNQGRRNSQQRLKGLTDSIKEFGSQILKEHPVENSQLQNDRLFLYYLQNGRDMYTGEELDIDYLSQYDIDHIIPQAFIKDNSIDNRVLTSSKENRGKSDDVPSKDVVRKMKSYWSKLLSAKLITQRKFDNLTKAERGGLTDDDKAGFIKRQLVETRQITKHVARILDERFYTETDENNKKIRQVKIVTLKSNLVSNFRKEFELYKVREINDYHHAHDAYLNAVIGKALLGVYPQLEPEFVYGDYPHFHGHKENKATAKKFFYSNIMNFFKKDDVRTDKNGEIIWKKDEHISNIKKVLSYPQVNIVKKVEEQTGGFSKESILPKGNSDKLIPRKTKKFYWDTKKYGGFDSPIVAYSILVIADIEKGKSKKLKTVKALVGVTIMEKMTFERDPVAFLERKGYRNVQEENIIKLPKYSLFKLENGRKRLLASARELQKGNEIVLPNHLGTLLYHAKNIHKVDEPKHLDYVDKHKDEFKELLDVVSNFSKKYTLAEGNLEKIKELYAQNNGEDLKELASSFINLLTFTAIGAPATFKFFDKNIDRKRYTSTTEILNATLIHQSITGLYETRIDLSKLGGD

SEQ ID NO: 476 - protein, 1345 aa, Streptococcus mutans; identical to SEQ ID NO: 475
  REGION 1..1345: note = Streptococcus mutans 1SM1

SEQ ID NO: 477 - protein, 1350 aa, Streptococcus mutans
  REGION 1..1350: note = Streptococcus mutans 24
MKKPYSIGLDIGTNSVGWAVVTDDYKVPAKKMKVLGNTDKSHIEKNLLGALLFDSGNTAEDRRLKRTARRRYTRRRNRILYLQEIFSEEMGKVDDSFFHRLEDSFLVTEDKRGERHPIFGNLEEEVKYHENFPTIYHLRQYLADNPEKVDLRLVYLALAHIIKFRGHFLIEGKFDTRNNDVQRLFQEFLAVYDNTFENSSLQEQNVQVEEILTDKISKSAKKDRVLKLFPNEKSNGRFAEFLKLIVGNQADFKKHFELEEKAPLQFSKDTYEEELEVLLAQIGDNYAELFLSAKKLYDSILLSGILTVTDVSTKAPLSASMIQRYNEHQMDLTQLKQFIRQKLSDKYNEVFSDVSKDGYAGYIDGKTNQEAFYKYLKGLLNKIEGSGYFLDKIEREDFLRKQRTFDNGSIPHQIHLQEMRAIIRRQAEFYPFLADNQDRIEKILTFRIPYYVGPLARGKSDFAWLSRKSADKITPWNFDEIVDKESSAEAFINRMTNYDLYLPNQKVLPKHSLLYEKFTVYNELTKVKYKTEQGKTAFFDANMKQEIFDGVFKVYRKVTKDKLMDFLEKEFDEFRIVDLTGLDKENKAFNASYGTYHDLRKILDKDFLDNSKNEKILEDIVLTLTLFEDREMIRKRLKNYSDLLTKEQLKKLERRHYTGWGRLSAELIHGIRNKESRKTILDYLIDDGNSNRNFMQLINDDALSFKEEIAKAQVIGETDNLNQVVSDIAGSPAIKKGILQSLKIVDELVKIMGHQPENIVVEMARENQFTNQGRQNSQQRLKGLTDSIKEFGSQILKEHPVENSQLQNDRLFLYYLQNGRDMYTGEELDIDYLSQYDIDHIIPQAFIKDNSIDNRVLTSSKENRGKSDDVPSEDVVNRMRPFWNKLLSSGLISQRKYNNLTKKELTLDDKAGFIKRQLVETRQITKHVARMLDERFNKEFDDNNKRICKVKIVTLKSNLVSSFRKEFELYKVREINDYHHAHDAYLNAVVVKALLVKYSKLEPEFVYGEYPKYNSYRERKTATQKMFFYSNIMNMFKSKVKLADDQIVERPMIEVNDETGEIAWDKTKHITTVKKVLSYPQVNIVKKVEEQTIGQNGGLFDDNPKSPLEVIPSKLVPLKKALNPEKYGGYQKPTTAYPILLIVDTKQLIPISVMDKKRFEQNPVKFLKDKGYQQIEKNNFVKLPKYTLVDIGNGIKRLWASSKEVHKGNQLVVSKKSQDLLYHAHHLDNDYSNEYVKNHYQQFDILFNEITSFSKKCKLGKEHIQKIEEAYSKERDSASIEELADGFIKLLGFTQLGATSPFSFLGIKLNQKQYTGKKDYLLPCMEATLIHQSITGLYETRIDLSKLGGD

SEQ ID NO: 478 - protein, 1350 aa, Streptococcus mutans; identical to SEQ ID NO: 477
  REGION 1..1350: note = Streptococcus mutans 24

SEQ ID NO: 479 - protein, 1345 aa, Streptococcus mutans; identical to SEQ ID NO: 472
  REGION 1..1345: note = Streptococcus mutans 2VS1

SEQ ID NO: 480 - protein, 1345 aa, Streptococcus mutans; identical to SEQ ID NO: 472
  REGION 1..1345: note = Streptococcus mutans 2VS1

SEQ ID NO: 481 - protein, 1345 aa, Streptococcus mutans; identical to SEQ ID NO: 471
  REGION 1..1345: note = Streptococcus mutans 3SN1

SEQ ID NO: 482 - protein, 1345 aa, Streptococcus mutans; identical to SEQ ID NO: 471
  REGION 1..1345: note = Streptococcus mutans 3SN1

SEQ ID NO: 483 - protein, 1345 aa, Streptococcus mutans
  REGION 1..1345: note = Streptococcus mutans 4SM1
MKKPYSIGLDIGTNSVGWAVVTDDYKVPAKKMKVLGNTDKSHIKKNLLGALLFDSGNTAEDRRLKRTARRRYTRRRNRILYLQEIFSEEMGKVDDSFFHRLEDSFLVTEDKRGERHPIFGNLEEEVKYHENFPTIYHLRQYLADNPEKVDLRLVYLALAHIIKFRGHFLIEGKFDTRNNDVQRLFQEFLAVYDNTFENSSLQEQNVQVEEILTDKISKSAKKDRVLKLFPNEKSNGRFAEFLKLIVGNQADFKKHFELEEKAPLQFSKDTYEEDLEELLGKIGDDYADLFTLAKNLYDAILLSGILTADDSSTKAPLSASMIQRYNEHQMDLAQLKQFIRQKLSDKYNEVFSDVSKDGYAGYIDGKTNQEAFYKYLKGLLNKIEGSGYFLDKIEREDFLRKQRTFDNGSIPHQIHLQEMRAIIRRQAEFYPFLADNQDRIEKILTFRIPYYVGPLARGKSDFAWLSRKSADKITPWNFDEIVDKESSAEAFINRMTNYDLYLPNQKVLPKHSLLYEKFTVYNELTKVKYKTEQGKTAFFDANMKQEIFDGVFKVYRKVTKDKLMDFLEKEFDEFRIVDLTGLDKENKVFNASYGTYHDLCKILDKDFLDNSKNEKILEDIVLTLTLFEDREMIRKRLENYSDLLTKEQVKKLERRHYTGWGRLSAELIHGIRNKESRKTILDYLIDDGNSNRNFMQLINDDALSFKEEIAKAQVIGETDNLNQVVSDIAGSPAIKKGILQSLKIVDELVKIMGHQPENIVVEMARENQFTNQGRRNSQQRLKGLTDSIKEFGSQILKEHPVENSQLQNDRLFLYYLQNGRDMYTGEELDIDYLSQYDIDHIIPQAFIKDNSIDNRVLTSSKENRGKSDDVPSKDVVRKMKPYWSKLLSAKLITQRKFDNLTKAERGGLTDDDKAGFIKRQLVETRQITKHVARILDERFNTETDENNKKIRQVKIVTLKSNLVSNFRKEFELYKVREINDYHHAHDAYLNAVIGKALLGVYPQLEPEFVYGDYPHFHGHEENKATAKKFFYSNIMNFFKKDDVRTDKNGEIIWKKDEHISNIKKVLSYPQVNIVKKVEEQTGGFSKESILPKGNSDKLIPRKTKKFYWDTKKYGGFDSPIVAYSILVIADIEKGKSKKLKTVKALVGVTIMEKMTFERDPVAFLERKGYRNVQEENIIKLPKYSLFKLENGRKRLLASARELQKGNEIVLPNHLGTLLYHAKNIHKVDEPKHLDYVDKHKDEFKELLDVVSNFSKKYTLAEGNLEKIKELYAQNNGEDLKELASSFINLLTFTAIGAPATFKFFDKNIDRKRYTSTTEILNATLIHQSITGLYETRIDLSKLGGD

SEQ ID NO: 484 - protein, 1345 aa, Streptococcus mutans; identical to SEQ ID NO: 483
  REGION 1..1345: note = Streptococcus mutans 4SM1

SEQ ID NO: 485 - protein, 1345 aa, Streptococcus mutans
  REGION 1..1345: note = Streptococcus mutans 4VF1
MKKPYSIGLDIGTNSVGWAVVTDDYKVPAKKMKVLGNTDKSHIKKNLLGALLFDSGNTAEDRRLKRTARRRYTRRRNRILYLQEIFSEEMGKVDDSFFHRLEDSFLVTEDKRGERHPIFGNLEEEVKYHENFPTIYHLRQYLADNPEKVDLRLVYLALAHIIKFRGHFLIEGKFDTRNNDVQRLFQEFLAVYDNTFENSSLQEQNVQVEEILTDKISKSAKKDRVLKLFPNEKSNGRFAEFLKLIVGNQADFKKHFELEEKAPLQFSKDTYEEELEVLLAQIGDNYAELFLSAKKLYDSILLSGILTVTDVSTKAPLSASMIQRYNEHQMDLAQLKQFIRQKLSDKYNEVFSDVSKDGYAGYIDGKTNQEAFYKYLKGLLNKIEGSGYFLDKIEREDFLRKQRTFDNGSIPHQIHLQEMRAIIRRQAEFYPFLADNQDRIEKILTFRIPYYVGPLARGKSDFAWLSRKSADKITPWNFDEIVDKESSAEAFINRMTNYDLYLPNQKVLPKHSLLYEKFTVYNELTKVKYKTEQGKTAFFDANMKQEIFDGVFKVYRKVTKDKLMDFLEKEFDEFRIVDLTGLDKENKVFNASYGTYHDLCKILDKDFLDNSKNEKILEDIVLTLTLFEDREMIRKRLENYSDLLTKEQVKKLERRHYTGWGRLSAELIHGIRNKESRKTILDYLIDDGNSNRNFMQLINDDALSFKEEIAKAQVIGETDNLNQVVSDIAGSPAIKKGILQSLKIVDELVKIMGHQPENIVVEMARENQFTKQGRRNSQQRLKGLTDSIKEFGSQILKEHPVENSQLQNDRLFLYYLQNGRDMYTGEELDIDYLSQYDIDHIIPQAFIKDNSIDNRVLTSSKENRGKSDDVPSKDVVRKMKSYWSKLLSAKLITQRKFDNLTKAERGGLTDDDKAGFIKRQLVETRQITKHVARILDERFYTETDENNKKIRQVKIVTLKSNLVSNFRKEFELYKVREINDYHHAHDAYLNAVIGKALLGVYPQLEPEFVYGDYPHFHGHKENKATAKKFFYSNIMNFFKKDDVRTDRNGEIIWKKDEHISNIKKVLSYPQVNIVKKVEEQTGGFSKESILPKGNSDKLIPRKTKKFYWDTKKYGGFDSPIVAYSILVIADIEKGKSKKLKTVKALVGVTIMEKMTFERDPVAFLERKGYRNVQEENIIKLPKYSLFKLENGRKRLLASARELQKGNEIVLPNHLGTLLYHAKNIHKVDEPKHLDYVDKHKDEFKELLDVVSNFSKKYTLAEGNLEKIKELYAQNNGEDLKELASSFINLLTFTAIGAPATFKFFDKNIDRKRYTSTTEILNATLIHQSITGLYETRIDLSKLGGD

SEQ ID NO: 486 - protein, 1345 aa, Streptococcus mutans; identical to SEQ ID NO: 485
  REGION 1..1345: note = Streptococcus mutans 4VF1

SEQ ID NO: 487 - protein, 1345 aa, Streptococcus mutans
  REGION 1..1345: note = Streptococcus mutans 5SM3
MKKPYSIGLDIGTNSVGWAVVTDDYKVPAKKMKVLGNTDKSHIEKNLLGALLFDSGNTAEDRRLKRTARRRYTRRRNRILYLQEIFSEEMGKVDDSFFHRLEDFFLVTEDKRGERHPIFGNLEEEVKYHENFPTIYHLRQYLADNPEKVDLRLVYLALAHIIKFRGHFLIEGKFDTRNNDVQRLFQEFLAVYDNTFENSSLQEQNVQVEEILTDKISKSAKKDRVLKLFPNEKSNGRFAEFLKLIVGNQADFKKHFELEEKAPLQFSKDTYEEELEVLLAQIGDNYAELFLSAKKLYDSILLSGILTADDSSTKAPLSASMIQRYNEHQMDLAQLKQFIRQKLSDKYNEVFSDVSKDGYAGYIDGKTNQEAFYKYLKGLLNKIEGSGYFLDKIEREDFLRKQRTFDNGSIPHQIHLQEMRAIIRRQSEFYPFLADNQDRIEKILTFRIPYYVGPLARGKSDFAWLSRKSADKITPWNFDEIVDKESSAEAFINRMTNYDLYLPNQKVLPKHSLLYEKFTVYNELTKVKYKTEQGETAFFDANMKQEIFDGVFKVYRKVTKDKLMDFLEKEFDEFRIVDLTGLDKENKAFNASYGTYHDLRKILDKDFLDNSKNEKILEDIVLTLTLFEDREMIRKRLKNYSDLLTKEQLKKLERRHYTGWGRLSAELIHGIRNKESRKTILDYLIDDGNSNRNFMQLINDDALSFKEEIAKAQVIGETDNLNQVVSDIAGSPAIKKGILQSLKIVDELVKIMGHQPENIVVEMARENQFTNQGRRNSQQRLKGLTDSIKEFGSQILKEHPVENSQLQNDRLFLYYLQNGRDMYTGEELDIDYLSQYDIDHIIPQAFIKDNSIDNRVLTSSKENRGKSDDVPSKDVVRKMKPYWSKLLSAKLITQRKFDNLTKAERGGLTDDDKAGFIKRQLVETRQITKHVARILDERFNTETDENNKKIRQVKIVTLKSNLVSNFRKEFELYKVREINDYHHAHDAYLNAVIGKALLGVYPQLEPEFVYGDYPHFHGHEENKATAKKFFYSNIMNFFKKDDVRTDKNGEIIWKKDEHISNIKKVLSYPQVNIVKKVEEQTGGFSKESILPKGNSDKLIPRKTKKFYWDTKKYGGFDSPIVAYSILVIADIEKGKSKKLKTVKALVGVTIMEKMTFERDPVAFLERKGYRNVQEENIIKLPKYSLFKLENGRKRLLASARELQKGNEIVLPNHLGTLLYHAKNIHKVDEPKHLDYVDKHKDEFKELLDVVSNFSKKYTLAEGNLEKIKELYAQNNGEDLKELASSFINLLTFTAIGAPATFKFFDKNIDRKRYTSTTEILNATLIHQSITGLYETRIDLSKLGGD

SEQ ID NO: 488 - protein, 1345 aa, Streptococcus mutans; identical to SEQ ID NO: 487
  REGION 1..1345: note = Streptococcus mutans 5SM3

SEQ ID NO: 489 - protein, 1359 aa, Streptococcus mutans
  REGION 1..1359: note = Streptococcus mutans 66-2A
MKKPYSIGLDIGTNSVGWAVVTDDYKVPAKKMKVLGNTDKSHIKKNLLGALLFDSGNTAEDRRLKRTARRRYTRRRNRILYLQEIFAEEMMQVDESFFQRLDDSFLVEEDKRGSRYPIFGTLKEEKKYHKEFKTIYHLREKLANSTEKADLRLVYLSLAHMIKFRGHFLIEGQLKAENTNVQALFKDFVEVYDKTVEESHLSEMTVDALSILTEKVSKSRRLENLVECYPTEKKNTLFGNLIALSLGLQPNFKTNFQLSEDAKLQFSKDTYEEDLEGLLGEIGDEYADLFASAKNLYDAILLSGILAVDDNTTKAPLSASMVKRYKEHKEELAAFKRFIKEKLPKKYEEIFKDDTKNGYAGYVGADKKLRKRSGKLATEEEFYKYVKGILNKVEGADVWLDKIDREDFLRKQRTFDNGSIPHQIHLQEMHAILRRQGEHYPFLKENQDKIEKILTFRIPYYVGPLVRKGSRFAWAEYKADEKITPWNFDDILDKEKSAEKFITRMTLNDLYLPEEKVLPKHSLLYETFTVYNELTKVKYVNEQGEAKFFDANMKQEIFDHVFKENRKVTKDKLLNYLNKEFEEFRIVNLTGLDKENKVFNSSLGTYHDLRKILNKSFLDNKENEQIIEDIIQTLTLFEDREMIRQRLQKYSDIFTKAQLKKLERRHYTGWGRLSYKLINGIRDKQSNKTILGYLIDDGYSNRNFMQLINDDALSFKEEIAKAQVIGEMDGLNQVVSDIAGSPAIKKGILQSLKIVDELVKVMGHNPANIVIEMARENQTTAKGRRSSQKRYKRLEEAIKNLDHDLNHKILKEHPTDNQALQNDRLFLYYLQNGRDMYTEDPLDINRLSDYDIDHIIPQAFIKDNSIDNRVLTRSDKNRGKSDDVPSEEVVHKMKPFWSKLLSAKLITQRKFDNLTKAERGGLTDDDKAGFIKRQLVETRQITKHVARILDERFNTETDENNKKIRQVKIVTLKSNLVSNFRKEFELYKVREINDYHHAHDAYLNAVIGKALLGVYPQLEPEFVYGDYPHFHGHKENKATAKKFFYSNIMNFFKKGDVRTDKNGEIIWKKDEHISNIKKVLSYPQVNIVKKVEEQTGGFSKESILPKGNSDKLIPRKTKKFYWDTKKYGGFDSPIVAYSILVIADIEKGKSKKLKTVKALVGVTIMEKMTFERDPVAFLERKGYRNVQEENIIKLPKYSLFKLENGRKRLLASARELQKGNEIVLPNHLETLLYHAKNIHKVDEPKHLDYVDKHKDEFKELLDVVSNFSKKYTLAEGNLEKIKELYAQNNGEDLKELASSFINLLTFTAIGAPAAFKFFDKNIDRKRYTSTTEILNATLIHQSITGLYETRIDLNKLGGD

SEQ ID NO: 490 - protein, 1359 aa, Streptococcus mutans; identical to SEQ ID NO: 489
  REGION 1..1359: note = Streptococcus mutans 66-2A

SEQ ID NO: 491 - protein, 1345 aa, Streptococcus mutans
  REGION 1..1345: note = Streptococcus mutans 8ID3
MKKPYSIGLDIGTNSVGWAVVTDDYKVPAKKMKVLGNTDKSHIEKNLLGALLFDSGNTAEDRRLKRTARRRYTRRRNRILYLQEIFSEEMGKVDDSFFHRLEDSFLVTEDKRGERHPIFGNLEEEVKYHENFPTIYHLRQYLADNPEKVDLRLVYLALAHIIKFRGHFLIEGKFDTRNNDVQRLFQEFLAVYDNTFENSSLQEQNVQVEEILTDKISKSAKKDRVLKLFPNEKSNGRFAEFLKLIVGNQADFKKHFELEEKAPLQFSKDTYEEELEVLLAQIGDNYAELFLSAKKLYDSILLSGILTVTDVGTKAPLSASMIQRYNEHQMDLAQLKQFIRQKLSDKYNEVFSDVSKDGYAGYIDGKTNQEAFYKYLKGLLNKIEGSGYFLDKIEREDFLRKQRTFDNGSIPHQIHLQEMRAIIRRQAEFYPFLADNQDRIEKLLTFRIPYYVGPLARGKSDFAWLSRKSADKITPWNFDEIVDKESSAEAFINRMTNYDLYLPNQKVLPKHSLLYEKFTVYNELIKVKYKTEQGKTAFFDANMKQEIFDGVFKVYRKVTKDKLMDFLEKEFDEFRIVDLTGLDKENKVFNASYGTYHDLCKILDKDFLDNSKNEKILEDIVLTLTLFEDREMIRKRLENYSDLLTKEQVKKLERRHYTGWGRLSAELIHGIRNKESRKTILDYLIDDGNSNRNFMQLINDDALSFKEEIAKAQVIGETDNLNQVVSDIAGSPAIKKGILQSLKIVDELVKIMGHQPENIVVEMARENQFTNQGRRNSQQRLKGLTDSIKEFGSQILKEHPVENSQLQNDRLFLYYLQNGRDMYTGEELDIDYLSQYDIDHIIPQAFIKDNSIDNRVLTSSKENRGKSDDVPSKDVVRKMKSYWSKLLSAKLITQRKFDNLTKAERGGLTDDDKAGFIKRQLVETRQITKHVARILDERFNTETDENNKKIRQVKIVTLKSNLVSNFRKEFELYKVREINDYHHAHDAYLNAVIGKALLGVYPQLEPEFVYGDYPHFHGHKENKATAKKFFYSNIMNFFKKDDVRTDKNGEIIWKKDEHISNIKKVLSYPQVNIVKKVEEQTGGFSKESILPKGNSDKLIPRKTKKFYWDTKKYGGFDSPIVAYSILVIADIEKGKSKKLKTVKALVGVTIMEKMTFERDPVAFLERKGYRNVQEENIIKLPKYSLFKLENGRKRLLASARELQKGNEIVLPNHLGTLLYHAKNIHKVDEPKHLDYVDKHKDEFKELLDVVSNFSKKYTLAEGNLEKIKELYAQNNGEDLKELASSFINLLTFTAIGAPATFKFFDKNIDRKRYTSTTEILNATLIHQSITGLYETRIDLNKLGGD

SEQ ID NO: 492 - protein, 1345 aa, Streptococcus mutans; identical to SEQ ID NO: 491
  REGION 1..1345: note = Streptococcus mutans 8ID3

SEQ ID NO: 493 - protein, 1345 aa, Streptococcus mutans
  REGION 1..1345: note = Streptococcus mutans A19
MKKPYSIGLDIGTNSVGWSVVTDDYKVPAKKMKVLGNTDKSHIEKNLLGALLFDSGNTAEDRRLKRTARRRYTRRRNRILYLQEIFSEEMGKVDDSFFHRLEDSFLVTEDKRGERHPIFGNLEEEVKYHENFPTIYHLRQYLADNPEKVDLRLVYLALAHIIKFRGHFLIEGKFDTRNNDVQRLFQEFLAVYDNTFENSSLQEQNVQVEEILTDKISKSAKKDRVLKLFPNEKSNGRFAEFLKLIVGNQADFKKHFELEEKAPLQFSKDTYEEELEVLLAQIGDNYAELFLSAKKLYDSILLSGILTVTDVGTKAPLSASMIQRYNEHQMDLAQLKQFIRQKLSDKYNEVFSDVSKDGYAGYIDGKTNQEAFYKYLKGLLNKIEGSGYFLDKIEREDFLRKQRTFDNGSIPHQIHLQEMRAIIRRQAEFYPFLADNQDRIEKLLTFRIPYYVGPLARGKSDFAWLSRKSADKITPWNFDEIVDKESSAEAFINRMTNYDLYLPNQKVLPKHSLLYEKFTVYNELTKVKYKTEQGKTAFFDANMKQEIFDGVFKVYRKVTKDKLMDFLEKEFDEFRIVDLTGLDKENKVFNASYGTYHDLCKILDKDFLDNSKNEKILEDIVLTLTLFEDREMIRKRLENYSDLLTKEQVKKLERRHYTGWGRLSAELIHGIRNKESRKTILDYLIDDGNSNRNFMQLINDDALSFKEEIAKAQVIGETDNLNQVVSDIAGSPAIKKGILQSLKIVDELVKIMGHQPENIVVEMARENQFTNQGRRNSQQRLKGLTDSIKEFGSQILKEHPVENSQLQNDRLFLYYLQNGRDMYTGEELDIDYLSQYDIDHIIPQAFIKDNSIDNRVLTSSKENRGKSDDVPSKDVVRKMKSYWSKLLSAKLITQRKFDNLTKAERGGLTDDDKAGFIKRQLVETRQITKHVARILDERFNTETDENNKKIRQVKIVTLKSNLVSNFRKEFELYKVREINDYHHAHDAYLNAVIGKALLGVYPQLEPEFVYGDYPHFHGHKENKATAKKFFYSNIMNFFKKDDVRIDKNGEIIWKKDEHISNIKKVLSYPQVNIVKKVEEQTGGFSKESILPKGNSDKLIPRKTKKFYWDTKKYGGFDSPIVAYSILVIADIEKGKSKKLKTVKALVGVTIMEKMTFERDPVAFLERKGYRNVQEENIIKLPKYSLFKLENGRKRLLASARELQKGNEIVLPNHLGTLLYHAKNIHKVDEPKHLDYVDKHKDEFKELLDVVSNFSKKYTLAEGNLEKIKELYAQNNGEDLKELASSFINLLTFTAIGAPATFKFFDKNIDRKRYTSTTEILNATLIHQSITGLYETRIDLSKLGGD

SEQ ID NO: 494 - protein, 1345 aa, Streptococcus mutans; identical to SEQ ID NO: 493
  REGION 1..1345: note = Streptococcus mutans A19

SEQ ID NO: 495 - protein, 1345 aa, Streptococcus mutans; identical to SEQ ID NO: 472
  REGION 1..1345: note = Streptococcus mutans B

SEQ ID NO: 496 - protein, 1345 aa, Streptococcus mutans; identical to SEQ ID NO: 472
  REGION 1..1345: note = Streptococcus mutans G123

SEQ ID NO: 497 - protein, 1345 aa, Streptococcus mutans
MKKPYSIGLDIGTNSVGWAVVTDDYKVPAKKMKVLGNTDKSHIKKNLLGALLFDSGNTAEDRRLKRTARRRYTRRRNRILYLQEIFSEEMGKVDDSFFHRLDESFLTDDDKNFDSHPIFGNKAEEDAYHQKFPTIYHLRKHLADSTEKADLRLVYLALAHMIKFRGHFLIEGELNAENTDVQKLFADFVGVYDRTFDDSHLSEITVDASSILTEKISKSRRLEKLINNYPKEKKNTLFGNLIALSLGLQPNFKTNFKLSEDAKLQFSKDTYEEELEVLLAQIGDNYAELFLSAKKLYDSILLSGILTVTDVSTKAPLSASMIQRYNEHQMDLAQLKQFIRQKLSDKYNEVFSDVSKDGYAGYIDGKTNQEAFYKYLKGLLNKIEGSGYFLDKIEREDFLRKQRTFDNGSIPHQIHLQEMRAIIRRQAEFYPFLADNQDRIEKILTFRIPYYVGPLARGKSDFAWLSRKSADKITPWNFDEIVDKESSVEAFINRMTNYDLYLPNQKVLPKHSLLYEKFTVYNELTKVKYKTEQGKTAFFDANMKQEIFDGVFKVYRKVTKDKLMDFLEKEFDEFRIVDLTGLDKENKAFNASYGTYHDLRKILDKDFLDNSKNEKILEDIVLTLTLFEDREMIRKRLKNYSDLLTKEQLKKLERRHYTGWGRLSAELIHGIRNKESRKTILDYLIDDGNSNRNFMQLINDDALSFKEEIAKAQVIGETDNLNQVVSDIAGSPAIKKGILQSLKIVDELVKIMGHQPENIVVEMARENQFTNQGRRNSQQRLKGLTDSIKEFGSQILKEHPVENSQLQNDRLFLYYLQNGRDMYTGEELDIDYLSQYDIDHIIPQAFIKDNSIDNRVLTSSKENRGKSDDVPSKDVVRKMKSYWSKLLSAKLITQRKFDNLTKGERGGLTDDDKAGFIKRQLVETRQITKHVARILDERFNTETDENNKKIRQVKIVTLKSNLVSNFRKEFELYKVREINDYHHAHDAYLNAVIGKALLGVYPQLEPEFVYGDYPHFHGHKENKATAKKFFYSNIMNFFKKDDVRTDKNGEIIWKKDEYISNIKKVLSYPQVNIVKKVEEQTGGFSKESILPKGDSDKLIPRKTKKFYWDTKKYGGFDSPIVAYSILVIADIEKGKSKKLKTVKALVGVTIMEKMTFERDPVAFLERKGYRNVQEENIIKLPKYSLFKLENGRKRLLASARELQKGNEIVLPNHLGTLLYHAKNIHKVDEPKHLDYVDKHKDEFKELLDVVSNFSKKYTLAEGNLEKIKELYAQNNGEDLKELASSFINLLTFTAIGAPATFKFFDKNIDRKRYTSTTEILNATLIHQSITGLYETRIDLSKLGGD

SEQ ID NO: 498 - protein, 1345 aa, Streptococcus mutans
MKKPYSIGLDIGTNSVGWAVVTDDYKVPDKKMKVLGNTDKSHIKKNLLGALLFDSGNTAEDRRLKRTARRRYTRRRNRILYLQEIFSEEMGKVDDSFFHRLEDSFLVTEDKRGERHPIFGNLEEEVKYHENFPTIYHLRQYLADNPEKTDLRLVYLALAHIIKFRGHFLIEGKFDTRNNDVQRLFQEFLAVYDNTFENSSLQEQNVQVEEILTDKISKSAKKDRVLKLFPNEKSNGRFAEFLKLIVGNQADFKKHFELEEKAPLQFSKDIYEEELEVLLAQIGDNYAELFLSAKKLYDSILLSGILTVTDVSTKAPLSASMIQRYNEHQMDLAQLKQFIRQKLSDKYNEVFSDVSKDGYAGYIDGKTNQEAFYKYLKGLLNKIEGSGYFLDKIEREDFLRKQRTFDNGSIPHQIHLQEMRAIIRRQAEFYPFLADNQDRIEKILTFRIPYYVGPLARGKSDFAWLSRKSADKITPWNFDEIVDKESSVEAFINRMTNYDLYLPNQKVLPKHSLLYEKFTVYNELTKVKYKTEQGKTAFFDANMKQEIFDGVFKVYRKVTKDKLMDFLEKEFDEFRIVDLTGLDKENKAFNASYGTYHDLRKILDKDFLDNSKNEKILEDIVLTLTLFEDREMIRKRLKNYSDLLTKEQLKKLERRHYTGWGRLSAELIHGIRNKESRKTILDYLIDDGNSNRNFMQLINDDALSFKEEIAKAQVIGETDNLNQVVSDIAGSPAIKKGILQSLKIVDELVKIMGHQPENIVVEMARENQFTNQGRRNSQQRLKGLTDSIKEFGSQILKEHPVENSQLQNDRLFLYYLQNGRDMYTGEELDIDYLSQYDIDHIIPQAFIKDNSIDNRVLTSSKENRGKSDDVPSKDVVRKMKSYWSKLLSAKLITQRKFDNLTKAERGGLTDDDKAGFIKRQLVETRQITKHVARILDERFYTETDENNKKIRQVKIVTLKSNLVSNFRKEFELYKVREINDYHHAHDAYLNAVIGKALLGVYPQLEPEFVYGDYPHFHGHKENKATAKKFFYSNIMNFFKKDDVRTDKNGEIIWKKDEHISNIKKVLSYPQVNIVKKVEEQTGGFSKESILPKGNSDKLIPRKTKKFYWDTKKYGGFDSPIVAYSILVIADIEKGKSKKLKTVKALVGVTIMEKMTFERDPVAFLERKGYRNVQEENIIKLPKYSLFKLENGRKRLLASARELQKGNEIVLPNHLGTLLYHAKNIHKVDEPKHLDYVDKHKDEFKELLDVVSNFSKKYTLAEGNLEKIKELYAQNNGEDLKELASSFINLLTFTAIGAPATFKFFDKNIDRKRYTSTTEILNATLIHQSITGLYETRIDLSKLGGD

SEQ ID NO: 499 - protein, 1345 aa, Streptococcus mutans
  REGION 1..1345: note = Streptococcus mutans M21
MKKPYSIGLDIGTNSVGWAVVTDDYKVPAKKMKVLGNTDKSHIKKNLLGALLFDSGNTAEDRRLKRTARRRYTRRRNRILYLQEIFSEEMGKVDDSFFHRLEDSFLVTEDKRGERHPIFGNLEEEVKYHENFPTIYHLRQYLADNPEKTDLRLVYLALAHIIKFRGHFLIEGKFDTRNNDVQRLFQEFLAVYDNTFENSSLQEQNVQVEEILTDKISKSAKKDRVLKLFPNEKSNGRFAEFLKLIVGNQADFKKHFELEEKAPLQFSKDIYEEELEVLLAQIGDNYAELFLSAKKLYDSILLSGILTVTDVSTKAPLSASMIQRYNEHQMDLAQLKQFIRQKLSDKYNEVFSDVSKDGYAGYIDGKTNQEAFYKYLKGLLNKIEGSGYFLDKIEREDFLRKQRTFDNGSIPHQIHLQEMRAIIRRQAEFYPFLADNQDRIEKILTFRIPYYVGPLARGKSDFAWLSRKSADKITPWNFDEIVDKESSVEAFINRMTNYDLYLPNQKVLPKHSLLYEKFTVYNELTKVKYKTEQGKTAFFDANMKQEIFDGVFKVYRKVTKDKLMDFLEKEFDEFRIVDLTGLDKENKAFNASYGTYHDLRKILDKDFLDNSKNEKILEDIVLTLTLFEDREMIRKRLKNYSDLLTKEQLKKLERRHYTGWGRLSAELIHGIRNKESRKTILDYLIDDGNSNRNFMQLINDDALSFKEEIAKAQVIGETDNLNQVVSDIAGSPAIKKGILQSLKIVDELVKIMGHQPENIVVEMARENQFTNQGRRNSQQRLKGLTDSIKEFGSQILKEHPVENSQLQNDRLFLYYLQNGRDMYTGEELDIDYLSQYDIDHIIPQAFIKDNSIDNRVLTSSKENRGKSDDVPSKNVVRKMKSYWSKLLSAKLITQRKFDNLTKAERGGLTDDDKAGFIKRQLVETRQITKHVARILDERFHTETDENNKKIRQVKIVTLKSNLVSNFRKEFELYKVREINDYHHAHDAYLNAVIGKALLGVYPQLEPEFVYGDYPHFHGHKENKATAKKFFYSNIMNFFKKDDVRTDKNGEIIWKKDEHISNIKKVLSYPQVNIVKKVEEQTGGFSKESILPKGNSDKLIPRKTKKFYWDTKKYGGFDSPIVAYSILVIADIEKGKSKKLKTVKALVGVTIMEKMTFERDPVAFLERKGYRNVQEENIIKLPKYSLFKLENGRKRLLASARELQKGNEIVLPNHLGTLLYHAKNIHKVDEPKHLDYVDKHKDEFKELLDVVSNFSKKYTLAEGNLEKIKELYAQNNGEDLKELASSFINLLTFTAIGAPATFKFFDKNIDRKRYTSTTEILNATLIHQSITGLYETRIDLSKLGGD

SEQ ID NO: 500 - protein, 1345 aa, Streptococcus mutans; identical to SEQ ID NO: 499
  REGION 1..1345: note = Streptococcus mutans M21

SEQ ID NO: 501 - protein, 1345 aa, Streptococcus mutans
  REGION 1..1345: note = Streptococcus mutans M230
MKKPYSIGLDIGTNSVGWAVVTDDYKVPAKKMKVLGNTDKSHIKKNLLGALLFDSGNTAEDRRLKRTARRRYTRRRNRILYLQEIFSEEMGKVDDSFFHRLEDSFLVTEDKRGERHPIFGNLEEEVKYHENFPTIYHLRQYLADNPEKVDLRLVYLALAHIIKFRGHFLIEGKFDTRNNDVQRLFQEFLAVYDNTFENSSLQEQNVQVEEILTDKISKSAKKDRVLKLFPNEKSNGRFAEFLKLIVGNQADFKKHFELEEKAPLQFSKDTYEEELEVLLAQIGDNYAELFLSAKKLYDSILLSGILTVTDVSTKAPLSASMIQRYNEHQMDLAQLKQFIRQKLSDKYNEVFSDVSKDGYAGYIDGKTNQEAFYKYLKGLLNKIEGSGYFLDKIEREDFLRKQRTFDNGSIPHQIHLQEMRAIIRRQAEFYPFLADNQDRIEKILTFRIPYYVGPLARGKSDFAWLSRKSADKITPWNFDEIVDKESSAEAFINRMTNYDLYLPNQKVLPKHSLLYEKFTVYNELTKVKYKTEQGKTAFFDANMKQEIFDGVFKVYRKVTKDKLMDFLEKEFDEFRIVDLTGLDKENKVFNASYGTYHDLCKILDKDFLDNSKNEKILEDIVLTLTLFEDREMIRKRLENYSDLLTKEQVKKLERRHYTGWGRLSAELIHGIRNKESRKTILDYLIDDGNSNRNFMQLINDDALSFKEEIAKAQVIGETDNLNQVVSDIAGSPAIKKGILQSLKIVDELVKIMGHQPENIVVEMARENQFTNQGRQNSQQRLKGLTDSIKEFGSQILKEHPVENSQLQNDRLFLYYLQNGRDMYTGEELDIDYLSQYDIDHIIPQAFIKDNSIDNRVLTSSKENRGKSDDVPSEDVVRKMKSYWSKLLSAKLITQRKFDNLTKAERGGLTDDDKAGFIKRQLVETRQITKHVARILDERFYTETDENNKKIRQVKIVTLKSNLVSNFRKEFELYKVREINDYHHAHDAYLNAVIGKALLGVYPQLEPEFVYGDYPHFHGHKENKATAKKFFYSNIMNFFKKDDVRTDKNGEIIWKKDEHISNIKKVLSYPQVNIVKKVEEQTGGFSKESILPKGNSDKLIPRKTKKFYWDTKKYGGFDSPIVAYSILVIADIEKGKSKKLKTVKALVGVTIMEKMTFERDPVAFLERKGYRNVQEENIIKLPKYSLFKLENGRKRLLASARELQKGNEIVLPNHLGTLLYHAKNIHKVDEPKHLDYVDKHKDEFKELLDVVSNFSKKYTLAEGNLEKIKELYAQNNGEDLKELASSFINLLTFTAIGAPATFKFFDKNIDRKRYTSTTEILNATLIHQSITGLYETRIDLSKLGGD

SEQ ID NO: 502 - protein, 1345 aa, Streptococcus mutans; identical to SEQ ID NO: 501
  REGION 1..1345: note = Streptococcus mutans M230

SEQ ID NO: 503 - protein, 1345 aa, Streptococcus mutans
  REGION 1..1345: note = Streptococcus mutans M2A
MKKPYSIGLDIGTNSVGWAVVTDDYKVPAKKMKVLGNTDKSHIKKNLLGALLFDSGNTAEDRRLKRTARRRYTRRRNRILYLQEIFSEEMGKVDDSFFHRLEDSFLVTEDKRGERHPIFGNLEEEVKYHENFPTIYHLRQYLADNPEKTDLRLVYLALAHIIKFRGHFLIEGKFDTRNNDVQRLFQEFLAVYDNTFENSSLQEQNVQVEEILTDKISKSAKKDRVLKLFPNEKSNGRFAEFLKLIVGNQADFKKHFELEEKAPLQFSKDIYEEELEVLLAQIGDNYAELFLSAKKLYDSILLSGILTVTDVSTKAPLSASMIQRYNEHQMDLAQLKQFIRQKLSDKYNEVFSDVSKDGYAGYIDGKTNQEAFYKYLKGLLNKIEGSGYFLDKIEREDFLRKQRTFDNGSIPHQIHLQEMRAIIRRQAEFYPFLADNQDRIEKILTFRIPYYVGPLARGKSDFAWLSRKSADKITPWNFDEIVDKESSVEAFINRMTNYDLYLPNQKVLPKHSLLYEKFTVYNELTKVKYKTEQGKTAFFDANMKQEIFDGVFKVYRKVTKDKLMDFLEKEFDEFRIVDLTGLDKENKAFNASYGTYHDLRKILDKDFLDNSKNEKILEDIVLTLTLFEDREMIRKRLKNYSDLLTKEQLKKLERRHYTGWGRLSAELIHGIRNKESRKTILDYLIDDGNSNRNFMQLINDDALSFKEEIAKAQVIGETDNLNQVVSDIAGSPAIKKGILQSLKIVDELVKIMGHQPENIVVEMARENQFTNQGRRNSQQRLKGLTDSIKEFGSQILKEHPVENSQLQNDRLFLYYLQNGRDMYTGEELDIDYLSQYDIDHIIPQAFIKDNSIDNRVLTSSKENRGKSDDVPSKDVVRKMKSYWSKLLSAKLITQRKFDNLTKAERGGLTDDDKAGFIKRQLVETRQITKHVARILDERFNTETDENNKKIRQVKIVTLKSNLVSNFRKEFELYKVREINDYHHAHDAYLNAVIGKALLGVYPQLEPEFVYGDYPHFHGHKENKATAKKFFYSNIMNFFKKDDVRTDKNGEIIWKKDEHISNIKKVLSYPQVNIVKKVEEQTGGFSKESILPKGNSYKLIPRKTKKFYWDTKKYGGFDSPIVAYSILVIADIEKGKSKKLKTVKALVGVTIMEKMTFERDPVAFLERKGYRNVQEENIIKLPKYSLFKLENGRKRLLASARELQKGNEIVLPNHLGTLLYHAKNIHKVDEPKHLDYVDKHKDEFKELLDVVSNFSKKYTLAEGNLEKIKELYAQNNGEDLKELASSFINLLTFTAIGAPAAFKFFDKNIDRKRYTSTTEILNATLIHQSITGLYETRIDLSKLGGD

SEQ ID NO: 504 - protein, 1345 aa, Streptococcus mutans; identical to SEQ ID NO: 503
  REGION 1..1345: note = Streptococcus mutans M2A

SEQ ID NO: 505 - protein, 1345 aa, Streptococcus mutans
  REGION 1..1345: note = Streptococcus mutans N29
MKKPYSIGLDIGTNSVGWAVVTDDYKVPAKKMKVLGNTDKSHIKKNLLGALLFDSGNTAADRRLKRTARRRYTRRRNRILYLQEIFAEEMSKVDDSFFHRLEDSFLVTEDKRGERHPIFGNLEEEVKYHENFPTIYHLRQYLADNPEKVDLRLVYLALAHIIKFRGHFLIEGKFDTRNNDVQRLFQEFLAVYDNTFENSSLQEQNVQVEEILTDKISKSAKKDRVLKLFPNEKSNGRFAEFLKLIVGNQADFKKHFELEEKAPLQFSKDTYEEELEVLLAQIGDNYAELFLSAKKLYDSILLSGILTVTDVSTKAPLSASMIQRYNEHQMDLAQLKQFIRQKLSDKYNEVFSDVSKDGYAGYIDGKTNQEAFYKYLKGLLNKIEGSGYFLDKIEREDFLRKQRTFDNGSIPHQIHLQEMRAIIRRQAEFYPFLADNQDRIEKILTFRIPYYVGPLARGKSDFAWLSRKSADKITPWNFDEIVDKESSAEAFINRMTNYDLYLPNQKVLPKHSLLYEKFTVYNELTKVKYKTEQGKTAFFDANMKQEIFDGVFKVYRKVTKDKLMDFLEKEFDEFRIVDLTGLDKENKAFNASYGTYHDLRKILDKDFLDNSKNEKILEDIVLTLTLFEDREMIRKRLENYSDLLTKEQVKKLERRHYTGWGRLSAELIHGIRNKESRKTILDYLIDDGNSNRNFMQLINDDALSFKEEIAKAQVIGETDNLNQVVSDIAGSPAIKKGILQSLKIVDELVKIMGHQPENIVVEMARENQFTNQGRRNSQQRLKGLTDSIKEFGSQILKEHPVENSQLQNDRLFLYYLQNGRDMYTGEELDIDYLSQYDIDHIIPQAFIKDNSIDNRVLTSSKENRGKSDDVPSKNVVRKMKSYWSKLLSAKLITQRKFDNLTKAERGGLTDDDKAGFIKRQLVETRQITKHVARILDERFHTETDENNKKIRQVKIVTLKSNLVSNFRKEFELYKVREINDYHHAHDAYLNAVIGKALLGVYPQLEPEFVYGDYPHFHGHKENKATAKKFFYSNIMNFFKKDDVRTDKNGEIIWKKDEHISNIKKVLSYPQVNIVKKVEEQTGGFSKESILPKGNSDKLIPRKTKKFYWDTKKYGGFDSPIVAYSILVIADIEKGKSKKLKTVKALVGVTIMEKMTFERDPVAFLERKGYRNVQEENIIKLPKYSLFKLENGRKRLLASARELQKGNEIVLPNHLGTLLYHAKNIHKVDEPKHLDYVDKHKDEFKELLDVVSNFSKKYTLAEGNLEKIKELYAQNNGEDLKELSSSFINLLTFTAIGAPAAFKFFDKNIDRKRYTSTTEILNATLIHQSITGLYETRIDLSKLGGD

SEQ ID NO: 506 - protein, 1345 aa, Streptococcus mutans; identical to SEQ ID NO: 505
  REGION 1..1345: note = Streptococcus mutans N29

SEQ ID NO: 507 - protein, 1345 aa, Streptococcus mutans
  REGION 1..1345: note = Streptococcus mutans N3209
MKKPYSIGLDIGTNSVGWAVVTDDYKVPAKKMKVLGNTDKSHIKKNLLGALLFDSGNTAEDRRLKRTTRRRYTRRRNRILYLQEIFSEEMGKVDDSFFHRLEDSFLVTEDKRGERHPIFGNLEEEVKYHENFPTIYHLRQYLADNPEKTDLRLVYLALAHIIKFRGHFLIEGKFDTRNNDVQRLFQEFLAVYDNTFENSSLQEQNVQVEEILTDKISKSAKKDRVLKLFPNEKSNGCFAEFLKLIVGNQADFKKHFELEEKAPLQFSKDTYEEELEVLLAQIGDNYAELFLSAKKLYDSILLSGILTVTDVSTKAPLSASMIQRYNEHQMDLTQLKQFIRQKLSDKYNEVFSDVSKDGYAGYIDGKTNQEAFYKYLKGLLNKIEGSGYFLDKIEREDFLRKQRTFDNGSIPHQIHLQEMRAIIRRQAEFYPFLADNQDRIEKLLTFRIPYYVGPLASGKSDFAWLSRKSADKITPWNFDEIVDKESSAEAFINRMTNYDLYLPNQKVLPKHSLLYEKFTVYNELTKVKYKTEQGKTAFFDANMKQEIFDGVFKVYRKVTKDKLMDFLEKEFDEFRIVDLTGLDKENKVFNASYGTYHDLCKILDKDFLDNSKNEKILEDIVLTLTLFEDREMIRKRLENYSDLLTKEQVKKLERRHYTGWGRLSAELIHGIRNKESRKTILDYLIDDGNSNRNFMQLINDDALSFKEEIAKAQVIGETDNLNQVVSDIAGSPAIKKGILQSLKIVDELVKIMGHQPENIVVEMARENQFTNQGRRNSQQRLKGLTDSIKEFGSQILKEHPVENSQLQNDRLFLYYLQNGRDMYTGEELDIDYLSQYDIDHIIPQAFIKDNSIDNRVLTSSKENRGKSDDVPSKDVVRKMKSYWSKLLSAKLITQRKFDNLTKAERGGLTDDDKAGFIKRQLVETRQITKHVARILDERFNTETDENNKKIRQVKIVTLKSNLVSNFRKEFELYKVREINDYHHAHDAYLNAVIGKALLGVYPQLEPEFVYGDYPHFHGHKENKATAKKFFYSNIMNFFKKDDVRTDKNGEIIWKKDEHISNIKKVLSYPQVNIVKKVEEQTGGFSKESILPKGNSDKLIPRKTKKFYWDTKKYGGFDSPIVAYSILVIADIEKGKSKKLKTVKALVGVTIMEKMTFERDPVAFLERKGYRNVQEENIIKLPKYSLFKLENGRKRLLASARELQKGNEIVLPNHLGTLLYHAKNIHKVDEPKHLDYVDKHKDEFKELLDVVSNFSKKYTLAEGNLEKIKELYAQNNGEDLKELASSFINLLTFTAIGAPATFKFFDKNIDRKRYTSTTEILNATLIHQSITGLYETRIDLSKLGGD

SEQ ID NO: 508 - protein, 1345 aa, Streptococcus mutans; identical to SEQ ID NO: 507
  REGION 1..1345: note = Streptococcus mutans N3209

SEQ ID NO: 509 - protein, 1345 aa, Streptococcus mutans
  REGION 1..1345: note = Streptococcus mutans N66
MKKPYSIGLDIGTNSVGWAVVTDDYKVPAKKMKVLGNTDKSHIKKNLLGALLFDSGNTAEDRRLKRTARRRYTRRRNRILYLQEIFSEEMGKVDDSFFHRLEDSFLVTEDKRGERHPIFGNLEEEVKYHENFPTIYHLRQYLADNPEKTDLRLVYLALAHIIKFRGHFLIEGKFDTRNNDVQRLFQEFLAVYDNTFENSSLQEQNVQVEEILTDKISKSAKKDRVLKLFPNEKSNGRFAEFLKLIVGNQADFKKHFELEEKAPLQFSKDIYEEELEVLLAQIGDNYAELFLSAKKLYDSILLSGILTVTDVSTKAPLSASMIQRYNEHQMDLAQLKQFIRQKLSDKYNEVFSDVSKDGYAGYIDGKTNQEAFYKYLKGLLNKIEGSGYFLDKIEREDFLRKQRTFDNGSIPHQIHLQEMRAIIRRQAEFYPFLADNQDRIEKILTFRIPYYVGPLARGKSDFAWLSRKSADKITPWNFDEIVDKESSAEAFINRMTNYDLYLPNQKVLPKHSLLYEKFTVYNELTKVKYKTEQGKTAFFDANMKQEIFDGVFKVYRKVTKDKLMDFLEKEFDEFRIVDLTGLDKENKAFNASYGTYHDLRKILDKDFLDNSKNEKILEDIVLTLTLFEDREMIRKRLKNYSDLLTKEQLKKLERRHYTGWGRLSAELIHGIRNKESRKTILDYLIDDGNSNRNFMQLINDDALSFKEEIAKAQVIGETDNLNQVVSDIAGSLAIKKGILQSLKIVDELVKIMGHQPENIVVEMARENQFTNQGRRNSQQRLKGLTDSIKEFGSQILKEHPVENSQLQNDRLFLYYLQNGRDMYTGEELDIDYLSQYDIDHIIPQAFIKDNSIDNRVLTSSKENRGKSDDVPSKDVVRKMKSYWSKLLSAKLITQRKFDNLTKGERGGLTDDDKAGFIKRQLVETRQITKHVARILDERFNTETDENNKKIRQVKIVTLKSNLVSNFRKEFELYKVREINDYHHAHDAYLNAVIGKALLGVYPQLEPEFVYGDYPHFHGHKENKATAKKFFYSNIMNFFKKDDVRTDKNGEIIWKKDEYISNIKKVLSYPQVNIVKKVEEQTGGFFKESILPKGDSDKLIPRKTKKFYWDTKKYGGFDSPIVAYSILVIADIEKGKSKKLKTVKALVGVTIMEKMTFERDPVAFLERKGYRNVQEENIIKLPKYSLFKLENGRKRLLASARELQKGNEIVLPNHLGTLLYHAKNIHKVDEPKHLDYVDKHKDEFKELLDVVSNFSKKYTLAEGNLEKIKELYAQNNGEDLKELASSFINLLTFTAIGAPATFKFFDKNIDRKRYTSTTEILNATLIHQSITGLYETRIDLSKLGGD

SEQ ID NO: 510 - protein, 1345 aa, Streptococcus mutans; identical to SEQ ID NO: 509
  REGION 1..1345: note = Streptococcus mutans N66

SEQ ID NO: 511 - protein, 1350 aa, Streptococcus mutans
  REGION 1..1350: note = Streptococcus mutans NFSM1
MKKPYSIGLDIGTNSVGWAVVTDDYKVPAKKMTVLGNTDKSHIKKNLLGALLFDSGNTAADRRLKRTARRRYTRRRNRILYLQEIFAEEMSKVDDSFFHRLEDSFLVTEDKRGERHPIFGNLEEEVKYHENFPTIYHLRQYLADNPEKVDLRLVYLALAHIIKFRGHFLIEGKFDTRNNDVQRLFQEFLAVYDNTFENSSLQEQNVQVEEILTDKISKSAKKDRVLKLFPNEKSNGRFAEFLKLIVGNQADFKKHFELEEKTPLQFSKDTYEEELEVLLAQIGDNYAELFLSAKKLYDSILLSGILTVTDVSTKAPLSASMIQRYNEHQMDLAQLKQFIRQKLSDKYNEVFSDVSKDGYAGYIDGKTNQEAFYKYLKGLLNKIEGSGYFLDKIEREDFLRKQRTFDNGSIPHQIHLQEMRAIIRRQAEFYPFLADNQDRIEKILTFRIPYYVGPLARGKSDFAWLSRKSADKITPWNFDEIVDKESSAEAFINRMTNYDLYLPNQKVLPKHSLLYEKFTVYNELTKVKYKTEQGKTAFFDANMKQEIFDGVFKVYRKVTKDKLMDFLEKEFDEFRIVDLTGLDKENKAFNASYGTYHDLRKILDKDFLDNSKNEKILEDIVLTLTLFEDREMIRKRLENYSDLLTKEQVKKLERRHYTGWGRLSAELIHGIRNKESRKTILDYLIDDGNSNRNFMQLINDDALSFKEEIAKAQVIGETDNLNQVVSDIAGSPAIKKGILQSLKIVDELVKIMGHQPENIVVEMARENQFTNQGRRNSQQRLKGLTDSIKEFGSQILKEHPVENSQLQNDRLFLYYLQNGRDMYTGEELDIDYLSQYDIDHIIPQAFIKDNSIDNRVLTSSKENRGKSDDVPSEDVVNRMRPFWNKLLSSGLISQRKYNNLTKKELTPDDKAGFIKRQLVETRQITKHVARMLDERFNKEFDDNNKRIRRVKIVTLKSNLVSSFRKEFELYKVREINDYHHAHDAYLNAVVVKALLVKYPKLEPEFVYGEYPKYNSYRERKTATQKMFFYSNIMNMFKSKVKLADDQIVERPMIEVNDETGEIAWDKTKHITTVKKVLSYPQVNIVKKVEEQTIGQNGGLFDDNPKSPLEVIPSKLVPLKKALNPEKYGGYQKPTTAYPILLIVDTKQLIPISVMDKKRFEQNPVKFLKDKGYQQIEKNNFVKLPKYTLVDIGNGIKRLWASSKEVHKGNQLVVSKKSQDLLYHAHHLDNDYSNEYVKNHYQQFDILFNEITSFSKKCKLGKEHIQKIEEAYSKERDSASIEELADGFIKLLGFTQLGATSPFSFLGIKLNQKQYTGKKDYLLPCMEATLIHQSITGLYETRIDLSKLGGD

SEQ ID NO: 512 - protein, 1350 aa, Streptococcus mutans; identical to SEQ ID NO: 511
  REGION 1..1350: note = Streptococcus mutans NFSM1

SEQ ID NO: 513 - protein, 1345 aa, Streptococcus mutans; identical to SEQ ID NO: 485
  REGION 1..1345: note = Streptococcus mutans NLML1

SEQ ID NO: 514 - protein, 1338 aa, Streptococcus mutans
  REGION 1..1338: note = Streptococcus mutans NLML4
MDLIGTNSVGWAVVTDDYKVPAKKMKVLGNTDKSHIKKNLLGALLFDSGNTAADRRLKRTARRRYTRRRNRILYLQEIFAEEMSKVDDSFFHRLEDSFLVTEDKRGERHPIFGNLEEEVKYHENFPTIYHLRQYLADNPEKVDLRLVYLALAHIIKFRGHFLIEGKFDTRNNDVQRLFQEFLAVYDNTFENSSLQEQNVQVEEILTDKISKSAKKDRVLKLFPNEKSNGRFAEFLKLIVGNQADFKKHFELEEKAPLQFSKDTYEEELEVLLAQIGDNYAELFLSAKKLYDSILLSGILTVTDVSTKAPLSASMIQRYNEHQMDLAQLKQFIRQKLSDKYNEVFSDVSKDGYAGYIDGKTNQEAFYKYLKGLLNKIEGSGYFLDKIEREDFLRKQRTFDNGSIPHQIHLQEMRAIIRRQAEFYPFLADNQDRIEKILTFRIPYYVGPLARGKSDFAWLSRKSADKITPWNFDEIVDKESSAEAFINRMTNYDLYLPNQKVLPKHSLLYEKFTVYNELTKVKYKTEQGKTAFFDANMKQEIFDGVFKVYRKVTKDKLMDFLEKEFDEFRIVDLTGLDKENKAFNASYGTYHDLRKILDKDFLDNSKNEKILEDIVLTLTLFEDREMIRKRLENYSDLLTKEQVKKLERRHYTGWGRLSAELIHGIRNKESRKTILDYLIDDGNSNRNFMQLINDDALSFKEEIAKAQVIGETDNLNQVVSDIAGSPAIKKGILQSLKIVDELVKIMGHQPENIVVEMARENQFTNQGRRNSQQRLKGLTDSIKEFGSQILKEHPVEHSQLQNDRLFLYYLQNGRDMYTGEELDIDYLSQYDIDHIIPQAFIKDNSIDNRVLTSSKENRGKSDDVPSKNVVRKMKSYWSKLLSAKLITQRKFDNLTKAERGGLTDDDKAGFIKRQLVETRQITKHVARILDERFHTETDENNKKIRQVKIVTLKSNLVSNFRKEFELYKVREINDYHHAHDAYLNAVIGKALLGVYPQLEPEFVYGDYPHFHGHKENKATAKKFFYSNIMNFFKKDDVRTDKNGEIIWKKDEHISNIKKVLSYPQVNIVKKVEEQTGGFSKESILPKGNSDKLIPRKTKKFYWDTKKYGGFDSPIVAYSILVIADIEKGKSKKLKTVKALVGVTIMEKMTFERDPVAFLERKGYRNVQEENIIKLPKYSLFKLENGRKRLLASARELQKGNEIVLPNHLGTLLYHAKNIHKVDEPKHLDYVDKHKDEFKELLDVVSNFSKKYTLAEGNLEKIKELYAQNNGEDLKELASSFINLLTFTAIGAPATFKFFDKNIDRKRYTSTTEILNATLIHQSITGLYETRIDLSKLGGD

SEQ ID NO: 515 - protein, 1338 aa, Streptococcus mutans; identical to SEQ ID NO: 514
  REGION 1..1338: note = Streptococcus mutans NLML4

SEQ ID NO: 516 - protein, 1128 aa, Streptococcus mutans
  REGION 1..1128: note = Streptococcus mutans NLML5
MANSKILGLDIGIASVGVGIIDKETGKIIHVNSRIFPAATADSNVERRGFRQGRRLVRRKKHRKVRLADLFLDSNLLTDFSKVSLNLNPYQLRVKGLNEELSNEELFIALKSIVSRRGISYLDDASEDSGANSSEYGKAVEENRKLLEDRTPGQIQLERFEKYGKVRGDFTVVENGENHRLINVFSTSAYKKEAERILRRQQEFNIRIADEFIEAYLTILTGKRKYYHGPGNEKSRTDYGRFRTDGTTLDNIFGILIGKCTFYPDEYRAAKASYTAQEFNLLNDLNNLTVPTETKKLSEEQKRQIIEHAKTVKTLGAPTLLKYIAKLVGCSADDIKGYRIDKSDKPEIHTFEAYRKMRTMELIKVADLSRESLDALAHILTLNTEREGIEEAIRDRFTNKEFNQEQINELVLFRKNNSSLFGKGWHNFSLKLMKELIPELYETSEEQMTILTRLGKQRVKKSSNRTNYIDEKELTEEIYNPVVAKSVRQAIKIINLATKKYGVFDNIVIEMARESNEDDEKKAIQNAQKANEDEKEAALLKAAHQFNGKEELPDSIFHGHKELLTKIRLWHQQGEKCLYTGKTIFINDLIHNPYKYEIDHILPLSLSFDDSLANKVLVLSTANQEKGQRTPFQSLDSMDGAWTYREFKAYVKGLKTLSNKKKDYLLNEEDINKNEVKQKFIERNLVDTRYSSRVVLNTLQDFYKKREFDTKISVVRGQFTSQIRRKWRIEKTRETYHHHAVDALIIAASSQLNLWKKQNNPLISYKEDQFVDPETGEILSLSDDEYKELVFKAPYDHFVDTLKSKKFEDSILFSYQVDSKYNRKISDATIYGTRKARLGKDSQEETYVLGKIKDIYSQKGYEDFIKKYKKDKTQFLMYHKDPQTFEKVIEEILKTYSDKELNEKGKEVPCNPFEKYRQENGPVRKYSKKGNGPEIKSIKYYDNKLGNHIDITPNNSHHQVVLQSLKPWRTDVYFNPKSGKYELMGLKYSDLRFEKVSGDYGISVKKYNEIKSKEGVDENSEFKFTLYKNDLILIKDTESGEQELFRFLSRTMPNQKHYVELKPYDKSKFEGHQKLMDIFGEVAKGGQCLKGLNKSNISIYKVKTDVLGNKYFIKKEGDQPQLNFKKKI

SEQ ID NO: 517 - protein, 1128 aa, Streptococcus mutans; identical to SEQ ID NO: 516
  REGION 1..1128: note = Streptococcus mutans NLML5

SEQ ID NO: 518 - protein, 1125 aa, Streptococcus mutans
  REGION 1..1125: note = Streptococcus mutans NLML8
MTNGKILGLDIGIASVGVGIINAKTGNVEHASSRIFPAANADNNVERRSARGGRRLIRRKKHRLKRVEDLFEKYNIDTDFSNLNLNPYQLRVKGLNEQLSNEELFAILKNIAKRRGISYLDDAEDDSVGSSDYAKAIDENRKLLKKQTPGEIQLKRLEKYGQLRGNFTIQDENGEYHRLINVFSTSDYVKEARRILETQSYYNKFITESFVEDYIKILQGKRKYYVGPGNEKSRTDYGIYRTDGETLDNLFGILIGKCGFYPEEYRAAKASYTAQEYNFLNDLNNLTVPTETKKLSTEQKYQLVDFAKTASTLEAAKLLKEIAKLVGCQVEEIKGYRLDNKDKPDLHTFEPFRKLKSNLTTIAVENLSITTLDTLAHILTLNTEREGIEEAIQKELPNIFSDEQITGIIAVRKKNSQIFGKGWHSFSIKLMKELIPELYETSEEQMTILIRLKKVKTNSKITNRTKYINEQEVTDEIYNPVVSKSIRQTVKIINAAIKKYGAFDQIVIEMPRESNEEDERKFIADLQKSNAKEKDDAMKQAALLYNGKAELPHGVFHGHKELATKIRLWYQQGERCLYSGKHIDIHDLIHNQHMFEIDHVLPLSLSFDDSLANKVLVYSWANQEKGQRTPFQALPQMASAWSFRELRDYISKQKGISKKKRDYLLTEQDINKVEVKQKFIERNLVDTRYVSRVVLNTLQDALKVMNKETKISVIRGQFTSQLRRQWRIDKSRETYHHHAVDALIIAASSQLRLWKKQNNPMFAEDKHGQKINLDTGEVLSDDAYKELVYQAPYQGFVNTISSKSFEDEILFSYQVDSKVNRKISDATIYATRQAQLGKDKKEETYVLGKIKDIYSQAGYDAFRKKYDKDKAVFLMYQKDPETWEKVIEVILRDYKELDDKGKEIGNPFERYKVKHGFVRKYSRKNKGTEIKSLKYYDNKLGNHIDITPNNSKHSVVLQSINPWRADLYFNPETTKYELMGLKYADLSFEKGTGKYSISREKYDEIKEREGISSKSEFKFTLYKNDLILVKDIGNHKELIARFNSKNDTSKHYVELKPWNKAKFDSEEELIPAFGKVAKSGQFIKGLNKPDLSIYKVKTDILGHKYYIKKEGDKPKLNFENKIKNK

SEQ ID NO: 519 - protein, 1125 aa, Streptococcus mutans; identical to SEQ ID NO: 518
  REGION 1..1125: note = Streptococcus mutans NLML8

SEQ ID NO: 520 - protein, 1345 aa, Streptococcus mutans
  REGION 1..1345: note = Streptococcus mutans NLML9
MKKPYSIGLDIGTNSVGWAVVTDDYKVSAKKMKVLGNTDKSHIKKNLLGALLFDSGNTAEDRRLKRTARRRYTRRRNRILYLQEIFAEEMSKVDDSFFHRLEDSFLVTEDKRGERHPIFGNLEEEVKYHENFPTIYHLRQYLADNPEKVDLRLVYLALAHIIKFRGHFLIEGKFDTRNNDVQRLFQEFLAVYDNTFENSSLQEQNVQVEEILTDKISKSAKKDRVLKLFPNEKSNGRFAEFLKLIVGNQADFKKHFELEEKAPLQFSKDTYEEELEVLLAQIGDNYAELFLSAKKLYDSILLSGILTVTDVSTKAPLSASMIQRYNEHQMDLAQLKQFIRQKLSDKYNEVFSDVSKDGYAGYIDGKTNQEAFYKYLKGLLNKIEGSGYFLDKIEREDFLRKQRTFDNGSIPHQIHLQEMRAIIRRQAEFYPFLADNQDRIEKILTFRIPYYVGPLARGKSDFAWLSRKSADKITPWNFDEIVDKESSAEAFINRMTNYDLYLPNQKVLPKHSLLYEKFTVYNELTKVKYKTEQGKTAFFDANMKQEIFDGVFKVYRKVTKDKLMDFLEKEFDEFRIVDLTGLDKENKAFNASYGTYHDLRKILDKDFLDNSKNEKILEDIVLTLTLFEDREMIRKRLENYSDLLTKEQVKKLERRHYTGWGRLSAELIHGIRNKESRKTILDYLIDDGNSNRNFMQLINDDALSFKEEIAKAQVIGETDNLNQVVSDIAGSPAIKKGILQSLKIVDELVKIMGHQPENIVVEMARENQFTNQGRRNSQQRLKGLTDSIKEFGSQILKEHPVEHSQLQNDRLFLYYLQNGRDMYTGEELDIDYLSQYDIDHIIPQAFIKDNSIDNRVLTSSKENRGKSDDVPSKNVVRKMKSYWSKLLSAKLITQRKFDNLTKAERGGLTDDDKAGFIKRQLVETRQITKHVARILDERFHTETDENNKKIRQVKIVTLKSNLVSNFRKEFELYKVREINDYHHTHDAYLNAVIGKALLGVYPQLEPEFVYGDYPHFHGHKENKATAKKFFYSNIMNFFKKDDVRTDKNGEIIWKKDEHISNIKKVLSYPQVNIVKKVEEQTGGFSKESILPKGNSDKLIPRKTKKFYWDTKKYGGFDSPIVAYSILVIADIEKGKSKKLKTVKALVGVTIMEKMTFERDPVAFLERKGYRNVQEENIIKLPKYSLFKLENGRKRLLASARELQKGNEIVLPNHLGTLLYHAKNIHKVDEPKHLDYVDKHKDEFKELLDVVSNFSKKYTLAEGNLEKIKELYAQNNGEDLKELASSFINLLTFTAIGAPATFKFFDKNIDRKRYTSTTEILNATLIHQSITGLYETRIDLSKLGGD

SEQ ID NO: 521 - protein, 1345 aa, Streptococcus mutans; identical to SEQ ID NO: 520
  REGION 1..1345: note = Streptococcus mutans NLML9

SEQ ID NO: 522 - protein, 1355 aa, Streptococcus mutans
  REGION 1..1355: note = Streptococcus mutans NMT4863
MKKPYSIGLDIGTNSVGWAVVTDDYKVPAKKMKVLGNTDKSHIKKNLLGALLFDSGNTAEDRRLKRTARRRYTRRRNRILYLQEIFAEEMSKVDDSFFHRLDESFLTDDDKNFDSHPIFGNKAEEDAYHQKFPTIYHLRKHLADSTEKADLRLVYLALAHMIKFRGHFLIEGELNAENTDVQKLFADFVGVYDRTFDDSHLSEITVDASSILTEKISKSRRLEKLINNYPKEKKNTLFGNLIALSLGLQPNFKTNFKLSEDAKLQFSKDTYEEDLEELLGKIGDDYADLFTLAKNLYDAILLSGILTADDSSTKAPLSASMIKRYAEHHEDLEKLKEFIKANKPELYHDIFKDETKNGYAGYIENGVKQDEFYKYLKNTLSKITGSDYFLDQIEREDFLRKQRTFDNGSIPHQIHLQEMHAILRRQGDYYPFLKENQDRIEKILTFRIPYYVGPLARKNSRFAWAEYHSDEAVTPWNFDQVIDKESSAQAFIEHMTNNDLYLPNEKVLPKHSPLYEKYTVYNELTKIKYVTEIGEAKFFDANLKQEIFDGLFKHERKVTKKKLRTFLDKNFDEFRIVDIQGLDKETETFNASYATYQDLLKVIKDKVFMDNPENAEILENIVLTLTLFEDREMIKQRLAKYADVFDKKVIDQLARRHYTGWGRLSAKLLNGIRDKQSCKTIMDYLIDDAQSNRNLMQLITDDNLTFKDDIVKAQYVDNSDDLHQVVQSLAGSPAIKKGILQSLKIVDELVKVMGKEPEQIVVEMARENQTTAKGRRNSQQRYKRLKEAIKSLDRDLNHKILKEHPTDNQALQNNRLFLYYLQNGRDMYTGESLDINRLSDYDIDHVIPQAFIKDNSIDNRVLTSSKANRGKSDDVPSEDVVNRMRPFWNKLLSSGLISQRKYNNLTKKELTLDDKAGFIKRQLVETRQITKHVARMLDERFNKEFDDNNKRIRRVKIVTLKSNLVSSFRKEFELYKVREINDYHHAHDAYLNAVVVKALLVKYPKLEPEFVYGEYPKYNSYRERKTATQKMFFYSNIMNMFKSKVKLADDQIVERPMIEVNDETGEIAWDKTKHITTVKKVLSYPQVNIVKKVEEQTIGQNGGLFDDNPKSPLEVIPSKLVPLKKALNPEKYGGYQKPTTAYPILLIVDTKQLIPISVMDKKRFEQNPVKFLKDKGYQQIEKNNFVKLPKYTLVDIGNGIKRLWASSKEVHKGNQLVVSKKSQDLLYHAHHLDNDYSNEYVKNHYQQFDILFNEITSFSKKCKLGKEHIQKIEEAYSKERDFASIEELADGFIKLLGFTQLGATSPFSFLGIKLNQKQYTGKKDYLLPCMEATLIHQSITGLYETRIDLSKLGGD

SEQ ID NO: 523 - protein, 1355 aa, Streptococcus mutans; identical to SEQ ID NO: 522
  REGION 1..1355: note = Streptococcus mutans NMT4863

SEQ ID NO: 524 - protein, 1345 aa, Streptococcus mutans
MKKPYSIGLDIGTNSVGWAVVTDDYKVPAKKMKVLGNTDKSHIKKNLLGALLFDSGNTAADRRLKRTARRRYTRRRNRILYLQEIFAEEMSKVDDSFFHRLEDSFLVTEDKRGERHPIFGNLEEEVKYHENFPTIYHLRQYLADNPEKVDLRLVYLALAHIIKFRGHFLIEGKFDTRNNDVQRLFQEFLAVYDNTFENSSLQEQNVQVEEILTDKISKSAKKDRVLKLFPNEKSNGRFAEFLKLIVGNQADFKKHFELEEKAPLQFSKDTYEEELEVLLAQIGDNYAELFLSAKKLYDSILLSGILTVTDVSTKAPLSASMIQRYNEHQMDLAQLKQFIRQKLSDKYNEVFSDVSKDGYAGYIDGKTNQEAFYKYLKGLLNKIEGSGYFLDKIEREDFLRKQRTFDNGSIPHQIHLQEMRAIIRRQAEFYPFLADNQDRIEKILTFRIPYYVGPLARGKSDFAWLSRKSADKITPWNFDEIVDKESSAEAFINRMTNYDLYLPNQKVLPKHSLLYEKFTVYNELTKVKYKTEQGKTAFFDANMKQEIFDGVFKVYRKVTKDKLMDFLEKEFDEFRIVDLTGLDKENKAFNASYGTYHDLRKILDKDFLDNSKNEKILEDIVLTLTLFEDREMIRKRLENYSDLLTKEQVKKLERRHYTGWGRLSAELIHGIRNKESRKTILDYLIDDGNSNRNFMQLINDDALSFKEEIAKAQVIGETDNLNQVVSDIAGSPAIKKGILQSLKIVDELVKIMGHQPENIVVEMARENQFTNQGRRNSQQRLKGLTDSIKEFGSQILKEHPVKHSQLQNDRLFLYYLQNGRDMYTGEELDIDYLSQYDIDHIIPQAFIKDNSIDNRVLTSSKENRGKSDDVPSKNVVRKMKSYWSKLLSAKLITQRKFDNLTKAERGGLTDDDKAGFIKRQLVETRQITKHVARILDERFHTETDENNKKIRQVKIVTLKSNLVSNFRKEFELYKVREINDYHHAHDAYLNAVIGKALLGVYPQLEPEFVYGDYPHFHGHKENKATAKKFFYSNIMNFFKKDDVRTDKNGEIIWKKDEHISNIKKVLSYPQVNIVKKVEEQTGGFSKESILPKGNSDKLIPRKTKKFYWDTKKYGGFDSPIVAYSILVIADIEKGKSKKLKTVKALVGVTIMEKMTFERDPVAFLERKGYRNVQEENIIKLPKYSLFKLENGRKRLLASARELQKGNEIVLPNHLGTLLYHAKNIHKVDEPKHLDYVDKHKDEFKELLDVVSNFSKKYTLAEGNLEKIKELYAQNNGEDLKELASSFINLLTFTAIGAPATFKFFDKNIDRKRYTSTTEILNATLIHQSITGLYETRIDLSKLGGD

SEQ ID NO: 525 - protein, 1345 aa, Streptococcus mutans; identical to SEQ ID NO: 471
  REGION 1..1345: note = Streptococcus mutans NV1996

SEQ ID NO: 526 - protein, 1345 aa, Streptococcus mutans
  REGION 1..1345: note = Streptococcus mutans NVAB
MKKPYSIGLDIGTNSVGWAVVTDDYKVPAKKMKVLGNTDKSHIKKNLLGALLFDSGNTAADRRLKRTARRRYTRRRNRILYLQEIFAEEMSKVDDSFFHRLEDSFLVTEDKRGERHPIFGNLEEEVKYHENFPTIYHLRQYLADNPEKVDLRLVYLALAHIIKFRGHFLIEGKFDTRNNDVQRLFQEFLAVYDNTFENSSLQEQNVQVEEILTDKISKSAKKDRVLKLFPNEKSNGRFAEFLKLIVGNQADFKKHFELEEKAPLQFSKDTYEEELEVLLAQIGDNYAELFLSAKKLYDSILLSGILTVTDVSTKAPLSASMIQRYNEHQMDLAQLKQFIRQKLSDKYNEVFSDVSKDGYAGYIDGKTNQEAFYKYLKGLLNKIEGSGYFLDKIEREDFLRKQRTFDNGSIPHQIHLQEMRAIIRRQAEFYPFLADNQDRIEKILTFRIPYYVGPLARGKSDFAWLSRKSADKITPWNFDEIVDKESSAEAFINRMTNYDLYLPNQKVLPKHSLLYEKFTVYNELTKVKYKTEQGKTAFFDANMKQEIFDGVFKVYRKVTKDKLMDFLEKEFDEFRIVDLTGLDKENKVFNASYGTYHDLCKILDKDFLDNSKNEKILEDIVLTLTLFEDREMIRKRLENYSDLLTKEQVKKLERRHYTGWGRLSAELIHGIRNKESRKTILDYLIDDGNSNRNFMQLINDDALSFKEEIAKAQVIGETDNLNQVVSDIAGSPAIKKGILQSLKIVDELVKIMGHQPENIVVEMARENQFTKQGRRNSQQRLKGLTDSIKEFGSQILKEHPVENSQLQNDRLFLYYLQNGRDMYTGEELDIDYLSQYDIDHIIPQAFIKDNSIDNRVLTSSKENRGKSDDVPSKDVVRKMKSYWSKLLSAKLITQRKFDNLTKAERGGLTDDDKAGFIKRQLVETRQITKHVARILDERFYTETDENNKKIRQVKIVTLKSNLVSNFRKEFELYKVREINDYHHAHDAYLNAVIGKALLGVYPQLEPEFVYGDYPHFHGHKENKATAKKFFYSNIMNFFKKDDVRTDKNGEIIWKKDEHISNIKKVLSYPQVNIVKKVEEQTGGFSKESILPKGNSDKLIPRKTKKFYWDTKKYGGFDSPIVAYSILVIADIEKGKSKKLKTVKALVGVTIMEKMTFERDPVAFLERKGYRNVQEENIIKLPKYSLFKLENGRKRLLASARELQKGNEIVLPNHLGTLLYHAKNIHKVDEPKHLDYVDKHKDEFKELLDVVSNFSKKYTLAEGNLEKIKELYAQNNGEDLKELASSFINLLTFTAIGAPATFKFFDKNIDRKRYTSTTEILNATLIHQSITGLYETRIDLSKLGGD

SEQ ID NO: 527 - protein, 1345 aa, Streptococcus mutans; identical to SEQ ID NO: 526
  REGION 1..1345: note = Streptococcus mutans NVAB

SEQ ID NO: 528 - protein, 1345 aa, Streptococcus mutans
  REGION 1..1345: note = Streptococcus mutans R221
MKKPYSIGLDIGTNSVGWAVVTDDYKVPAKKMKVLGNTDKSHIKKNLLGALLFDSGNTAEDRRLKRTARRRYTRRRNRILYLQEIFSEEMGKVDDSFFHRLEDSFLVTEDKRGERHPIFGNLEEEVKYHENFPTIYHLRQYLADNPEKTDLRLVYLALAHIIKFRGHFLIEGKFDTRNNDVQRLFQEFLAVYDNTFENSSLQEQNVQVEEILTDKISKSAKKDRVLKLFPNEKSNGRFAEFLKLIVGNQADFKKHFELEEKAPLQFSKDIYEEELEVLLAQIGDNYAELFLSAKKLYDSILLSGILTVTDVSTKAPLSASMIQRYNEHQMDLAQLKQFIRQKLSDKYNEVFSDVSKDGYAGYIDGKTNQEAFYKYLKGLLNKIEGSGYFLDKIEREDFLRKQRTFDNGSIPHQIHLQEMRAIIRRQAEFYPFLADNQDRIEKILTFRIPYYVGPLARGKSDFAWLSRKSADKITPWNFDEIVDKESSVEAFINRMTNYDLYLPNQKVLPKHSLLYEKFTVYNELTKVKYKTEQGKTAFFDANMKQEIFDGVFKVYRKVTKDKLMDFLEKEFDEFRIVDLTGLDKENKAFNASYGTYHDLRKILDKDFLDNSKNEKILEDIVLTLTLFEDREMIRKRLKNYSDLLTKEQLKKLERRHYTGWGRLSAELIHGIRNKESRKTILDYLIDDGNSNRNFMQLINDDALSFKEEIAKAQVIGETDNLNQVVSDIAGSPAIKKGILQSLKIVDELVKIMGHQPENIVVEMARENQFTNQGRRNSQQRLKGLTDSIKEFGSQILKEHPVENSQLQNDRLFLYYLQNGRDMYTGEELDIDYLSQYDIDHIIPQAFIKDNSIDNRVLTSSKENRGKSDDVPSKDVVRKMKSYWSKLLSAKLITQRKFDNLTKAERGGLTDDDKAGFIKRQLVETRQITKHVARILDERFNTETDENNKKIRQVKIVTLKSNLVSNFRKEFELYKVREINDYHHAHDAYLNAVIGKALLGVYPQLEPEFVYGDYPHFHGHKENKATAKKFFYSNIMNFFKKDDVRTDKNGEIIWKKDEHISNIKKVLSYPQVNIVKKVEEQTGGFSKESILPKGNSDKLIPRKTKKFYWDTKKYGGFDSPIVAYSILVIADIEKGKSKKLKTVKALVGVTIMEKMTFERDPVAFLERKGYRNVQEENIIKLPKYSLFKLENGRKRLLASARELQKGNEIVLPNHLGTLLYHAKNIHKVDEPKHLDYVDKHKDEFKELLDVVSNFSKKYTLAEGNLEKIKELYAQNNGEDLKELASSFINLLTFTAIGAPATFKFFDKNIDRKRYTSTTEILNATLIHQSITGLYETRIDLNKLGGD

SEQ ID NO: 529 - protein, 1345 aa, Streptococcus mutans; identical to SEQ ID NO: 528
  REGION 1..1345: note = Streptococcus mutans R221

SEQ ID NO: 530 - protein, 1345 aa, Streptococcus mutans
  REGION 1..1345: note = Streptococcus mutans S1B
MKKPYSIGLDIGTNSVGWAVVTDDYKVPAKKMKVLGNTDKSHIKKNLLGALLFDSGNTAEDRRLKRTARRRYTRRRNRILYLQEIFSEEMGKVDDSFFHRLDESFLTDDDKNFDSYPIFGNKAEEDAYHQKFPTIYHLRKHLADSTEKADLRLVYLALAHMIKFRGHFLIEGELNAENTDVQKLFADFVGVYDRTFDDSHLSEITVDASSILTEKISKSRRLEKLINNYPKEKKNTLFRNLVALSLGLQPNFKTNFKLSEDAKLQFSKDTYEEDLEELLGKIGDDYADLFTLAKNLYDAILLSGILTADDSSTKAPLSASMIKRYAEHHEDLEKLKEFIKANKPELYHDIFKDETKNGYAGYIENGVKQDEFYKYLKNTLSKIAGSDYFLDKIEREDFLRKQRTFDNGSIPHQIHLQEMHAILRRQGDYYPFLKENQDRIEKILTFRIPYYVGPLARGKSDFAWLSRKSADKITPWNFDEIVDKESSVEAFINRMTNYDLYLPNQKVLPKHSLLYEKFTVYNELTKVKYKTEQGKTAFFDANMKQEIFDGVFKVYRKVTKDKLMDFLEKEFDEFRIVDLTGLDKENKAFNASYGTYHDLRKILDKDFLDNSKNEKILEDIVLTLTLFEDREMIRKRLKNYSDLLTKEQLKKLERRHYTGWGRLSAELIHGIRNKESRKTILDYLIDDGNSNRNFMQLINDDALSFKEEIAKAQVIGETDNLNQVVSDIAGSPAIKKGILQSLKIVDELVKIMGHQPENIVVEMARENQFTNQGRRNSQQRLKGLTDSIKEFGSQILKEHPVENSQLQNDRLFLYYLQNGRDMYTGEELDIDYLSQYDIDHIIPQAFIKDNSIDNRVLTSSKENRGKSDDVPSKDVVRKMKSYWSKLLSAKLITQRKFDNLTKGERGGLTDDDKAGFIKRQLVETRQITKHVARILDERFNTETDENNKKIRQVKIVTLKSNLVSNFRKEFELYKVREINDYHHAHDAYLNAVIGKALLGVYPQLEPEFVYGDYPHFHGHKENKATAKKFFYSNIMNFFKKDDVRTDKNGEIIWKKDEYISNIKKVLSYPQVNIVKKVEEQTGGFSKESILPKGDSDKLIPRKTKKFYWDTKKYGGFDSPIVAYSILVIADIEKGKSKKLKTVKALVGVTIMEKMTFERDPVAFLERKGYRNVQEENIIKLPKYSLFKLENGRKRLLASARELQKGNEIVLPNHLGTLLYHAKNIHKVDEPKHLDYVDKHKDEFKELLDVVSNFSKKYTLAEGNLEKIKELYAQNNGEDLKELASSFINLLTFTAIGAPATFKFFDKNIDRKRYTSTTEILNATLIHQSITGLYETRIDLSKLGGD

SEQ ID NO: 531 - protein, 1345 aa, Streptococcus mutans; identical to SEQ ID NO: 530
  REGION 1..1345: note = Streptococcus mutans S1B

SEQ ID NO: 532 - protein, 1345 aa, Streptococcus mutans; identical to SEQ ID NO: 471
  REGION 1..1345: note = Streptococcus mutans SF1

SEQ ID NO: 533 - protein, 1345 aa, Streptococcus mutans
  REGION 1..1345: note = Streptococcus mutans SF14
MKKPYSIGLDIGTNSVGWAVVTDDYKVPAKKMKVLGNTDKSHIKKNLLGALLFDSGNTAEDRRLKRTARRRYTRRRNRILYLQEIFSEEMGKVNDSFFHRLEDSFLVTEDKRGERHPIFGNLEEEVKYHENFPTIYHLRQYLADNPEKVDLRLVYLALAHIIKFRGHFLIEGKFDTRNNDVQRLFQEFLAVYDNTFENSSLQEQNVQVEEILTDKISKSAKKDRVLKLFPNEKSNGRFAEFLKLIVGNQADFKKHFELEEKAPLQFSKDTYEEELEVLLAQIGDNYAELFLSAKKLYDSILLSGILTVTDVSTKAPLSASMIQRYNEHQMDLAQLKQFIRQKLSDKYNEVFSDVSKDGYAGYIDGKTNQEAFYKYLKGLLNKIEGSGYFLDKIEREDFLRKQRTFDNGSIPHQIHLQEMRAIIRRQAEFYPFLADNQDRIEKILTFRIPYYVGPLARGKSDFAWLSRKSADKITPWNFDEIVDKESSAEAFINRMTNYDLYLPNQKVLPKHSLLYEKFTVYNELTKVKYKTEQGKTAFFDANMKQEIFDGVFKVYRKVTKDKLMDFLEKEFDEFRIVDLTGLDKENKVFNASYGTYHDLCKILDKDFLDNSKNEKILEDIVLTLTLFEDREMIRKRLENYSDLLTKEQVKKLERRHYTGWGRLSAELIHGIRNKESRKTILDYLIDDGNSNRNFMQLINDDALSFKEEIAKAQVIGETDNLNQVVSDIAGSPAIKKGILQSLKIVDELVKIMGHQPENIVVEMARENQFTKQGRRNSQQRLKGLTDSIKEFGSQILKEHPVENSQLQNDRLFLYYLQNGRDMYTGEELDIDYLSQYDIDHIIPQAFIKDNSIDNRVLTSSKENRGKSDDVPSKDVVRKMKSYWSKLLSAKLITQRKFDNLTKAERGGLTDDDKAGFIKRQLVETRQITKHVARILDERFYTETDENNKKIRQVKIVTLKSNLVSNFRKEFELYKVREINDYHHAHDAYLNAVIGKALLGVYPQLEPEFVYGDYPHFHGHKENKATAKKFFYSNIMNFFKKDDVRTDKNGEIIWKKDEYISNIKKVLSYPQVNIVKKVEEQTGGFSKESILPKGNSDKLIPRKTKKFYWDTKKYGGFDSPIVAYSILVIADIEKGKSKKLKTVKALVGVTIMEKMTFERDPIAFLERKGYRNVQEENIIKLPKYSLFKLENGRKRLLASARELQKGNEIVLPNHLGTLLYHAKNIHKVDEPKHLDYVDKHKDEFKELLDVVSNFSKKYTLAEGNLEKIKELYAQNNGEDLKELASSFINLLTFTAIGAPAAFKFFDKNIDRKRYTSTTEILNATLIHQSITGLYETRIDLSKLGGD

SEQ ID NO: 534 - protein, 1345 aa, Streptococcus mutans; identical to SEQ ID NO: 533
  REGION 1..1345: note = Streptococcus mutans SF14

SEQ ID NO: 535 - protein, 1345 aa, Streptococcus mutans
  REGION 1..1345: note = Streptococcus mutans SM1
MKKPYSIGLDIGTNSVGWAVVTDDYKVPAKKMKVLGNTDKSHIKKNLLGALLFDSGNTAEDRRLKRTARRRYTRRRNRILYLQEIFSEEMGKVDDSFFHRLEDSFLVTEDKRGERHPIFGNLEEEVKYHENFPTIYHLRQYLADNPEKVDLRLVYLALAHIIKFRGHFLIEGKFDTRNNDVQKLFQEFLAVYDNTFENSSLQEQNVQVEEILTDKISKSAKKDRVLKLFPNEKSNGRFAEFLKLIVGNQADFKKHFELEEKAPLQLSKDTYEEELEVLLAQIGDNYAELFLSAKKLYDSILLSGILTVTDVSTKAPLSASMIQRYNEHQMDLAQLKQFIRQKLSDKYNEVFSDVSKDGYAGYIDGKTNQEAFYKYLKGLLNKIEGSGYFLDKIEREDFLRKQRTFDNGSIPHQIHLQEMRAIIRRQAEFYPFLADNQDRIEKILTFRIPYYVGPLARGKSDFAWLSRKSADKITPWNFDEIVDKESSVEAFINRMTNYDLYLPNQKVLPKHSLLYEKFTVYNELTKVKYKTEQGKTAFFDANMKQEIFDGVFKVYRKVTKDKLMDFLEKEFDEFRIVDLTGLDKENKAFNASYGTYHDLRKILDKDFLDNSKNEKILEDIVLTLTLFEDREMIRKRLENYSDLLTKEQVKKLERRHYTGWGRLSAELIHGIRNKESRKTLLDYLIDDGNSNRNFMQLINDDALSFKEEIAKAQVIGETDNLNQVVSDIAGSPAIKKGILQSLKIVDELVKIMGHQPENIVVEMARENQFTNQGRRNSQQRLKGLTDSIKEFGSQILKEHPVENSQLQNDRLFLYYLQNGRDMYTGEELDIDYLSQYDIDHIIPQAFIKDNSIDNRVLTSSKENRGKSDDVPSKDVVRKMKSYWSKLLSAKLITQRKFDNLTKAERGGLTDDDKAGFIKRQLVETRQITKHVARILDERFNTETDENNKKIRQVKIVTLKSNLVSNFRKEFELYKVREINDYHHAHDAYLNAVIGKALLGVYPQLEPEFVYGDYPHFHGHKENKATAKKFFYSNIMNFFKKDDVRTDKNGEIIWKKDEYISNIKKVLSYPQVNIVKKVEEQTGGFSKESILPKGNSDKLIPRKTKKFYWDTKKYGGFDSPIVAYSILVIADIEKGKSKKLKTVKALVGVTIMEKMTFERDPIAFLERKGYRNVQEENIIKLPKYSLFKLENGRKRLLASARELQKGNEIVLPNHLGTLLYHAKNIHKVDEPKHLDYVDKHKDEFKELLDVVSNFSKKYTLAEGNLEKIKELYAQNNGEDLKELASSFINLLTFTAIGAPATFKFFDKNIDRKRYTSTTEILNATLIHQSITGLYETRIDLSKLGGD

SEQ ID NO: 536 - protein, 1345 aa, Streptococcus mutans; identical to SEQ ID NO: 535
  REGION 1..1345: note = Streptococcus mutans SM1

SEQ ID NO: 537 - protein, 1345 aa, Streptococcus mutans
  REGION 1..1345: note = Streptococcus mutans SM4
MKKPYSIGLDIGTNSVGWAVVTDDYKVPAKKMKVLGNTDKSHIKKNLLGALLFDSGNTAEDRRLKRTARRRYTRRRNRILYLQEIFSEEMDKVDDSFFHRLEDSFLVTEDKRGERHPIFGNLEEEVKYHENFPTIYHLRQYLADNPEKVDLRLVYLALAHIIKFRGHFLIEGKFDTRNNDVQRLFQEFLAVYDNTFENSSLQEQNVQVEEILTDKISKSAKKDRVLKLFPNEKSNGRFAEFLKLIVGNQADFKKHFELEEKAPLQFSKDTYEEELEVLLAQIGDNYAELFLSAKKLYDSILLSGILTVTDVSTKAPLSASMIQRYNEHQMDLAQLKQFIRQKLSDKYNEVFSDVSKDGYAGYIDGKTNQEAFYKYLKGLLNKIEGSGYFLDKIEREDFLRKQRTFDNGSIPHQIHLQEMRAIIRRQAEFYPFLADNQDRIEKILTFRIPYYVGPLARGKSDFAWLSRKSADKITPWNFDEIVDKESSAEAFINRMTNYDLYLPNQKVLPKHSLLYEKFTVYNELTKVKYKTEQGKTAFFDANMKQEIFDGVFKVYRKVTKDKLMDFLEKEFDEFRIVDLTGLDKENKVFNASYGTYHDLCKILDKDFLDNSKNEKILEDIVLTLTLFEDREMIRKRLENYSDLLTKEQVKKLERRHYTGWGRLSAELIHGIRNKESRKTILDYLIDDGNSNRNFMQLINDDALSFKEEIAKAQVIGETDNLNQVVSDIAGSPAIKKGILQSLKIVDELVKIMGHQPENIVVEMARENQFTKQGRRNSQQRLKGLTDSIKEFGSQILKEHPVENSQLQNDRLFLYYLQNGRDMYTGEELDIDYLSQYDIDHIIPQAFIKDNSIDNRVLTSSKENRGKSDDVPSKDVVRKMKSYWSKLLSAKLITQRKFDNLTKAERGGLTDDDKAGFIKRQLVETRQITKHVARILDERFYTETDENNKKIRQVKIVTLKSNLVSNFRKEFELYKVREINDYHHAHDAYLNAVIGKALLGVYPQLEPEFVYGDYPHFHGHKENKATAKKFFYSNIMNFFKKDDVRTDKNGEIIWKKDEHISNIKKVLSYPQVNIVKKVEEQTGGFSKESILPKGNSDKLIPRKTKKFYWDTKKYGGFDSPIVAYSILVIADIEKGKSKKLKTVKALVGVTIMEKMTFERDPVAFLERKGYRNVQEENIIKLPKYSLFKLENGRKRLLASARELQKGNEIVLPNHLGTLLYHAKNIHKVDEPKHLDYVDKHKDEFKELLDVVSNFSKKYTLAEGNLEKIKELYAQNNGEDLKELASSFINLLTFTAIGAPATFKFFDKNIDRKRYTSTTEILNATLIHQSITGLYETRIDLSKLGGD

SEQ ID NO: 538 - protein, 1345 aa, Streptococcus mutans; identical to SEQ ID NO: 537
  REGION 1..1345: note = Streptococcus mutans SM4

SEQ ID NO: 539 - protein, 1345 aa, Streptococcus mutans
  REGION 1..1345: note = Streptococcus mutans SM6
MKKPYSIGLDIGTNSVGWAVVTDDYKVPAKKMKVLGNTDKSHIKKNLLGALLFDSGNTAEDRRLKRTARRRYTRRRNRILYLQEIFSEEMGKVDDSFFHRLEDSFLVTEDKRGERHPIFGNLEEEVKYHENFPTIYHLRQYLADNPEKTDLRLVYLALAHIIKFGGHFLIEGKFDTRNNDVQRLFQEFLAVYDNTFENSSLQEQNVQVEEILTDKISKSAKKDRVLKLFPNEKSNGRFAEFLKLIVGNQADFKKHFELEEKAPLQFSKDIYEEELEVLLAQIGDNYAELFLSAKKLYDSILLSGILTVTDVSTKAPLSASMIQRYNEHQMDLAQLKQFIRQKLSDKYNEVFSDVSKDGYAGYIDGKTNQEAFYKYLKGLLNKIEGSGYFLDKIEREDFLRKQRTFDNGSIPHQIHLQEMRAIIRRQAEFYPFLADNQDRIEKILTFRIPYYVGPLARGKSDFAWLSRKSADKITPWNFDEIVDKESSVEAFINRMTNYDLYLPNQKVLPKHSLLYEKFTVYNELTKVKYKTEQGKTAFFDANMKQEIFDGVFKVYRKVTKDKLMDFLEKEFDEFRIVDLTGLDKENKAFNASYGTYHDLRKILDKDFLDNSKNEKILEDIVLTLTLFEDREMIRKRLKNYSDLLTKEQLKKLERRHYTGWGRLSAELIHGIRNKESRKTILDYLIDDGNSNRNFMQLINDDALSFKEEIAKAQVIGETDNLNQVVSDIAGSPAIKKGILQSLKIVDELVKIMGHQPENIVVEMARENQFTNQGRRNSQQRLKGLTDSIKEFGSQILKEHPVENSQLQNDRLFLYYLQNGRDMYTGEELDIDYLSQYDIDHIIPQAFIKDNSIDNRVLTSSKENRGKSDDVPSKNVVRKMKSYWSKLLSAKLITQRKFDNLTKAERGGLTDDDKAGFIKRQLVETRQITKHVARILDERFHTETDENNKKIRQVKIVTLKSNLVSNFRKEFELYKVREINDYHHAHDAYLNAVIGKALLGVYPQLEPEFVYGDYPHFHGHKENKATAKKFFYSNIMNFFKKDDVRTDKNGEIIWKKDEHISNIKKVLSYPQVNIVKKVEEQTGGFSKESILPKGNSDKLIPRKTKKFYWDTKKYGGFDSPIVAYSILVIADIEKGKSKKLKTVKALVGVTIMEKMTFERDPVAFLERKGYRNVQEENIIKLPKYSLFKLENGRKRLLASARELQKGNEIVLPNHLGTLLYHAKNIHKVDEPKHLDYVDKHKDEFKELLDVVSNFSKKYTLAEGNLEKIKELYAQNNGEDLKELASSFINLLTFTAIGAPATFKFFDKNIDRKRYTSTTEILNATLIHQSITGLYETRIDLSKLGGD

SEQ ID NO: 540 - protein, 1345 aa, Streptococcus mutans; identical to SEQ ID NO: 539
  REGION 1..1345: note = Streptococcus mutans SM6

SEQ ID NO: 541 - protein, 1134 aa, Streptococcus mutans
  REGION 1..1134: note = Streptococcus mutans ST1
MANGKILGLDIGIASVGVGIIDKETGKIIHVNSRIFPAATADSNVERRGFRQGRRLVRRKKHRKVRLADLFLDSNLLTDFSKVSLNLNPYQLRVKGLNEELSNEELFIALKSIVSRRGISYLDDASEDSGANSSEYGKAVEENRKLLEDRTPGQIQLERFEKYGKVRGDFTVVENGENHRLINVFSTSAYKKEAERILRRQQEFNMRIADEFIEAYLTILTGKRKYYHGPGNEKSRTDYGRFRTDGTTLDNIFGILIGKCTFYPDEYRAAKASYTAQEFNLLNDLNNLTVPTETKKLSEEQKRQIIEHAKTVKTLGAPTLLKYIVKLVGCSADDIKGYRIDKSDKPEIHTFEAYRKMRTMELIKVDDLSRESLDALAHILTLNTEREGIEEAIRDRFTNKEFNQEQINELVLFRKNNSSLFGKGWHNFSLKLMKELIPELYETSEEQMTILTRLGKQRVKKSSNRTNYIDEKELTEEIYNPVVAKSVRQAIKIINLATKKYGVFDNIVIEMARESNEDDEKKAIQNAQKANEDEKKAALLKAAHQFNGKEELPDSIFHGHKELLTKIRLWHQQGEKCLYTGKTIFINDLIHNPYKYEIDHILPLSLSFDDSLANKVLVLSTANQEKGQRTPFQSLDSMDGAWTYREFKSYVKGLKTLSNKKKDYLLTEENIDKIEVKQKFIERNLVDTRYSSRVVLNALQDFYKERKFDTKISVVRGQFTSQLRRKWRIEKTRETYHHHAVDALIIAASSQLNLWKKQNNPLISYKEDQFVDPETGEILSLSDDEYKKLVFKAPYEHFVDTLKSKKFEDSILFSYQVDSKYNRKISGATICGTRKAQLGKDTQEETYVLGKIKDIYSQKGYEDFIKKYKKDKTQFLMYHKDPQTFEKVIEEILKTYPDKELNEKGKEVSCNPFEKYRQENGPVRKYSKKGNGPEIKSLKYYDEVLGKNIDITPKNSLNKVVLRSLNPWRTDVYFNHETRKYEFLGLKYSDLRYLKGEHRYGILIGDYKKIKDKEGIEKESEFKFTLYKNDLILIKDTAKGKEELFRFWSRTGKDNAKTFEKNKIELKPYSKSQFEKGEDTNVLGKLYASSNQLQKSFGTLENLSIYKVRTDVLGNKYFIKKEGDKPQLNFKKKL

SEQ ID NO: 542 - protein, 1134 aa, Streptococcus mutans; identical to SEQ ID NO: 541
  REGION 1..1134: note = Streptococcus mutans ST1

SEQ ID NO: 543 - protein, 1350 aa, Streptococcus mutans
  REGION 1..1350: note = Streptococcus mutans ST6
MKKPYSIGLDIGTNSVGWAVVTDDYKVPAKKMKVLGNTDKSHIEKNLLGALLFDSGNTAEDRRLKRTARRRYTRRRNRILYLQEIFSEEMGKVDDSFFHRLEDSFLVTEDKRGERHPIFGNLEEEVKYHENFPTIYHLRQYLADNPEKVDLRLVYLALAHIIKFRGHFLIEGKFDTRNNDVQRLFQEFLAVYDNTFENSSLQEQNVQVEEILTDKISKSAKKDRVLKLFPNEKSNGRFAEFLKLIVGNQADFKKHFELEEKAPLQFSKDTYEEELEVLLAQIGDNYAELFLSAKKLYDSILLSGILTVTDVSTKAPLSASMIQRYNEHQMDLTQLKQFIRQKLSDKYNEVFSDVSKDGYAGYIDGKTNQEAFYKYLKGLLNKIEGSGYFLDKIEREDFLRKQRTFDNGSIPHQIHLQEMRAIIRRQAEFYSFLADNQDRIEKILTFRIPYYVGPLARGKSDFAWLSRKSADKITPWNFDEIVDKESSAEAFINRMTNYDLYLPNQKVLPKHSLLYEKFTVYNELTKVKYKTEQGKTAFFDANMKQEIFDGVFKVYRKVTKDKLMDFLEKEFDEFRIVDLTGLDKENKAFNASYGTYHDLRKILDKDFLDNSKNEKILEDIVLTLTLFEDREMIRKRLENYSDLLTKEQVKKLERRHYTGWGRLSAELIHGIRNKESRKTILDYLIDDGNSNRNFMQLINDDALSFKEEIAKAQVIGETDNLNQVVSDIAGSPAIKKGILQSLKIVDELVKIMGHQPENIVVEMARENQFTNQGRRNSQQRLKGLTDSIKEFGSQILKEHPVENSQLQNDRLFLYYLQNGRDMYTGEELDIDYLSQYDIDHIIPQAFIKDNSIDNRVLTSSKENRGKSDDVPSEDVVNRMRPFWNKLLSSGLISQRKYNNLTKKELTLDDKAGFIKRQLVETRQITKHVARMLDERFNKEFDDNNKRIRKVKIVTLKSNLVSSFRKEFELYKVREINDYHHAHDAYLNAVVVKALLVKYSKLEPEFVYGEYPKYNSYRERKTATQKMFFYSNIMNMFKSKVKLADDQIVERPMIEVNDETGEIAWDKTKHITTVKKVLSYPQVNIVKKVEEQTIGQNGGLFDDNPKSPLEVIPSKLVPLKKALNPEKYGGYQKPTTAYPILLIVDTKQLIPISVMDKKRFEQNPVKFLKDKGYQQIEKNNFVKLPKYTLVDIGNGIKRLWASSKEVHKGNQLVVSKKSQDLLYHAHHLDNDYSNEYVKNHYQQFDILFNEITSFSKKCKLGKEHIQKIEEAYSKERDSASIEELADGFIKLLGFTQLGATSPFSFLGIKLNQKQYTGKKDYLLPCMEATLIHQSITGLYETRIDLSKLGGD

SEQ ID NO: 544 - protein, 1350 aa, Streptococcus mutans; identical to SEQ ID NO: 543
  REGION 1..1350: note = Streptococcus mutans ST6

SEQ ID NO: 545 - protein, 1125 aa, Streptococcus mutans
  REGION 1..1125: note = Streptococcus mutans U2A
MTNGKILGLDIGIASVGVGIINAKTGNVEHASSRIFPAANADNNVERRSARGGRRLIRRKKHRLKRVEDLFEKYNIDTDFSNLNLNPYQLRVKGLNEQLSNEELFAILKNIAKRRGISYLDDAEDDSVGSSDYAKAIDENRKLLKKQTPGEIQLKRLEKYGQLRGNFTIQDENGEYHRLINVFSTSDYVKEARRILETQSYYNKFITESFVEDYIKILQGKRKYYVGPGNEKSRTDYGIYRTDGETLDNLFGILIGKCGFYPEEYRAAKASYTAQEYNFLNDLNNLTVPTETKKLSTEQKYQLVDFAKTASTLGAAKLLKEIAKLVGCQVEEIKGYRLDNKDKPDLHTFEPFRKLKSNLTTIAVENLSITTLDTLAHILTLNTEREGIEEAIQKELPNIFSDEQITEIIAVRKKNSQIFGKGWHSFSIKLMKELIPELYETSEEQMTILTRLKKVKTNSKITNRTKYINEEEITDEIYNPVVSKSIRQTVKIINATIKKYGAFDQIIIEMPRESNEEDERKFIADLQKSNAKEKDDAMKQAALLYNGKDELPHDVFHGHKELATKIRLWYQQGERCLYSGKHIDIHDLIHNQHMFEIDHVLPLSLSFDDSLANKVLVYSWANQEKGQRTPFQALPQMASAWSFRELRDYISKQKGISKKKRDYLLTEQDINKVEVKQKFIERNLVDTRYVSRVVLNTLQDALKVMNKETKISVIRGQFTSQLRRQWRIDKSRETYHHHAVDALIIAASSQLRLWKKQNNPMFAEDKHGQKINLDTGEVLSDDAYKELVYQAPYQGFVNTISSKSFEDEILFSYQVDSKVNRKISDATIYATRQAQLGKDKKEETYVLGKIKDIYSQAGYDAFRKKYDKDKAVFLMYQKDPETWEKVIEVILRDYKELDDKGKEIGNPFERYKVKHGFVRKYSRKNKGTEIKSLKYYDNKLGNHIDITPNNSKHSVVLQSINPWRADLYFNPETTKYELMGLKYADLSFEKGTGKYSISREKYDEIKEREGISSKSEFKFTLYKNDLILVKDIGNHKELIARFNSKNDTSKHYVELKPWNKAKFDSEEELIPAFGKVAKSGQFIKGLNKPDLSIYKVKTDILGHKYYIKKEGDKPKLNFENKIKNK

SEQ ID NO: 546 - protein, 1125 aa, Streptococcus mutans; identical to SEQ ID NO: 545
  REGION 1..1125: note = Streptococcus mutans U2A

SEQ ID NO: 547 - protein, 1345 aa, Streptococcus mutans
  REGION 1..1345: note = Streptococcus mutans UA159
MKKPYSIGLDIGTNSVGWAVVTDDYKVPAKKMKVLGNTDKSHIEKNLLGALLFDSGNTAEDRRLKRTARRRYTRRRNRILYLQEIFSEEMGKVDDSFFHRLEDSFLVTEDKRGERHPIFGNLEEEVKYHENFPTIYHLRQYLADNPEKVDLRLVYLALAHIIKFRGHFLIEGKFDTRNNDVQRLFQEFLAVYDNTFENSSLQEQNVQVEEILTDKISKSAKKDRVLKLFPNEKSNGRFAEFLKLIVGNQADFKKHFELEEKAPLQFSKDTYEEELEVLLAQIGDNYAELFLSAKKLYDSILLSGILTVTDVGTKAPLSASMIQRYNEHQMDLAQLKQFIRQKLSDKYNEVFSDVSKDGYAGYIDGKTNQEAFYKYLKGLLNKIEGSGYFLDKIEREDFLRKQRTFDNGSIPHQIHLQEMRAIIRRQAEFYPFLADNQDRIEKLLTFRIPYYVGPLARGKSDFAWLSRKSADKITPWNFDEIVDKESSAEAFINRMTNYDLYLPNQKVLPKHSLLYEKFTVYNELTKVKYKTEQGKTAFFDANMKQEIFDGVFKVYRKVTKDKLMDFLEKEFDEFRIVDLTGLDKENKVFNASYGTYHDLCKILDKDFLDNSKNEKILEDIVLTLTLFEDREMIRKRLENYSDLLTKEQVKKLERRHYTGWGRLSAELIHGIRNKESRKTILDYLIDDGNSNRNFMQLINDDALSFKEEIAKAQVIGETDNLNQVVSDIAGSPAIKKGILQSLKIVDELVKIMGHQPENIVVEMARENQFTNQGRRNSQQRLKGLTDSIKEFGSQILKEHPVENSQLQNDRLFLYYLQNGRDMYTGEELDIDYLSQYDIDHIIPQAFIKDNSIDNRVLTSSKENRGKSDDVPSKDVVRKMKSYWSKLLSAKLITQRKFDNLTKAERGGLTDDDKAGFIKRQLVETRQITKHVARILDERFNTETDENNKKIRQVKIVTLKSNLVSNFRKEFELYKVREINDYHHAHDAYLNAVIGKALLGVYPQLEPEFVYGDYPHFHGHKENKATAKKFFYSNIMNFFKKDDVRTDKNGEIIWKKDEHISNIKKVLSYPQVNIVKKVEEQTGGFSKESILPKGNSDKLIPRKTKKFYWDTKKYGGFDSPIVAYSILVIADIEKGKSKKLKTVKALVGVTIMEKMTFERDPVAFLERKGYRNVQEENIIKLPKYSLFKLENGRKRLLASARELQKGNEIVLPNHLGTLLYHAKNIHKVDEPKHLDYVDKHKDEFKELLDVVSNFSKKYTLAEGNLEKIKELYAQNNGEDLKELASSFINLLTFTAIGAPATFKFFDKNIDRKRYTSTTEILNATLIHQSITGLYETRIDLNKLGGD

SEQ ID NO: 548 - protein, 1345 aa, Streptococcus mutans; identical to SEQ ID NO: 472
  REGION 1..1345: note = Streptococcus mutans W6

SEQ ID NO: 549 - protein, 1121 aa, Streptococcus oralis
  REGION 1..1121: note = Streptococcus oralis SK1074
MNGLVLGLDIGIASVGVGILEKNSGKIIHANSRLFPAATADNNVERRKNRQARRLNRRKKHRGVRFQDLFEDYGLLTDFSKVSINLNPYRLRVDGLNQQLTNEELFIALKNIVKRRGISYLDDASEDGGAVSSDYGKAVEENRKLLAEQTPGQIQLERFEKYGQVRGDFTVVENGEKCRLINVFSTSAYRKEAEKILRKQQEFNNQITDEFIEDYLKILTGKRKYYHGPGNEKSRTDYGRFRTDGTTLDNIFGVLIGKCTFYPNEYRASKSSYTAQEFNLLNDLNNLTVPTETKKLSEEQKKVIVEYAKEAKTLGASTLLKYIVKMIDASVDQISGYRVDVNNKPEMHTFEVYRKMQSLETISVGELSRNVLDELAHILTLNTEREGIEEAINSKLMGVFSQDQVLELVQFRKNNSSLFSKGWHNFSLKLMMELIPELYETSEEQMTILTRLGKQKSKETSKRTKYIDEKELTEEIYNPVVAKSVRQAIKIINEATKKHGIFDNIVIEMARENNEEDAKKDYIKRQKANQDEKNAAMEKAAFQYNGKKELPGNIFNGHKELATKIRLWHQQGEKCLYTGKTIPISDLIHNQYKYEIDHILPLSLSFDDSLSNKVLVHATANQEKGQRTPFQALDSMDDAWSYREFKSYVKDLKSLSNKKKDYLLTEEDISKIEVKQKFIERNLVDTRYSSRVVLNALQDFYKSHQFDTTISVVRGQFTSQLRRKWGLEKSRETYHHHAVDALIIAASSQLRLWKKQNNPLITYKEGQFVDSQTGEIISLTDDEYKELVFKAPYDHFVDTLHSKTFEDGILFSYQVDSKYNRKISDATIYATRKAKLDKDKSEETYVLGKIKDIYSQAGYDAFIKIYNKDKRKFLMYHKDPQTFEKVIEEILRTYPSKERNDKNKEVPCNPFEKYRQENGPIRKYSKKGNGPEIKCLKYYDNKLGNYIDISPDGSDNQVVLQSLKPWRTDVYFNHQTKEYELMGLKYSDLSFEKGSGKYSISNEKYNSIKRIEGVNEQSEFKFTLYKNDLILIKDSENNEQKLFRFNSRNDTAKHYVELKPYDKARFDGQQELITILGNVAKGGQCLKGLNKSNISIFKVKTDVLGKKHIIKKEGDEPKLKF

SEQ ID NO: 550 - protein, 1373 aa, Streptococcus oralis
  REGION 1..1373: note = Streptococcus oralis SK304
MENKNYSIGLDIGTNSVGWAVITDDYKVPSKKMKVLGNTDKRFIKKNLIGALLFDEGTTAEARRLKRTARRRYTRRKNRLRYLQEIFAEEMSKVDSSFFHRLDDSFLIPEDKKGSKYPIFATLIEEKEYHKQFPTIYHLRKQLADSKEKTDLRLIYLALAHMIKYRGHFLYEDTFDIKNNDIQKIFNEFISIYNNTFEGNSLSGQNVQVEAIFTDKISKSAKRERVLKLFPDEKSTGLFSEFLKLIVGNQADFKKHFDLEEKAPLQFSRDTYDEDLENLLGQIGDDFADLFVAAKKLYDAILLSGILTVTDPSTKAPLSASMIERYENHQKDLATLKQFIKTNLPEKYDEVFSDQSKDGYAGYIDGKTTQESFYKYIKNLLSKFEGADYFLEKIEREDFLRKQRTFDNGSIPHQIHLQEMNAILRRQGEHYPFLKENKEKIEKILTFRIPYYVGPLARGNRDFAWLTRNSDQAIRPWNFEEIVDKASSAESFINKMTNYDLYLPEEKVLPKHSLLYETFAVYNELTKVKFIAEGLRDYQFLDSRQKKDIFYTLFKAEDKRKVTEKDIIQYLHTVDGYDGIELKGIEKQFNASLSTYHDLLKIIKDKEFMDDPNNEEILENIVHTLTIFEDREMIKQRLAQYDSLFDEKVIKALTRRHYTGWGKLSSKLINGIRDKQTGKTILDYLMDDGYNNRNFMQLINDDELSFKEIIKKAQVVGKTDDVKQVVQELPGSPAIKKGILQSIKLVDELVKVMGHEPESIVIEMARENQTTARGKKNSQQRYKRIEDSLKILASGLNAKILKEHPTDNIQLQNDRLFLYYLQNGRDMYTGKPLDINQLSSYDIDHIVPQAFIKDDSLDNRVLTSLKDNRGKSDNVPSLEVVEKMKTFWQQLLDSKLISYRKFNNLTKAERGGLDERDKVGFIKRQLVETRQITKHVAQILDARYNTEVNEKDKKNRTVKIITLKSNLVSNFRKEFRLYKIREINDYHHAHDAYLNAVVAKAILKKYPKLEPEFVYGDYQKYDLKRYISRSKDPKEIEKATEKYFFYSNLLNFFKEEVHYADGTIVKRENIEYSKDTGEIAWNKEKDFATIKKVLSLPQVNIVKKREVQTGGFSKESILPKGNSDKLIPRKTKDILWDTTKYGGFDSPVIAYSILLIADIEKGKAKRLKTVKTLVGITIMEKATFEKSPIAFLENKGYHNVRKENILCLPKYSLFELKNGRRRMLASAKELQKGNEIVLPVHLTTLLYHAKNIHRLDEPEHLEYIQKHRNEFKGLLNLVSEFSQKYVLADANLEKIKNLYADNEQADIEILANSFINLLTFTALGAPAAFKFFGKDVDRKRYTTVSEILNATLIHQSITGLYETRIDLSKLGED

SEQ ID NO: 551 - protein, 1134 aa, Streptococcus oralis
  REGION 1..1134: note = Streptococcus oralis SK313
MNGLVLGLDIGIASVGVGILEKNSGKIVHASSRIFPAATADNNVERRKNRQARRLHRRKKHRGARLKDLFEYYGLLTDFSKVSINLNPYRLRVDGLDQQLTNEELFIALKNIVKRRGISYLDDASEDGGTVSSDYGKAVEENRKLLAEQTPGQIQLERFEKYGQLRGDFTVVENSEKCRLINVFSTSAYKKEAERILRKQQEFNNQITDEFIEDYLKILTGKRKYYHGPGNEKSRTDYGRFRTDGATLDNIFGILIGKCTFYPNEYRASKASYTAQEFNLLNDLNNLTVPTETKKLSEEQKKTIIEYAKSAKTLGASTLLKYIAKMIDASVDQIRGYRVDVNNKPEMHTFEVYRKMQSLETISVGELSRNILDELAHILTLNTEREGIEEAINTKLRDSFSQDQVLELVQFRKNNSSLFSKGWHNFSLKLMMELIPELYETSEEQMTILTRLGKQKSKETSKRTKYIDEKEVTEEIYNPVVAKSVRQAIKIINEATKKHGIFDNIVIEMARENNEEDAKKDYIKRQKANQDEKYAAMEKAAFQYNGKKELPDNIFHGHKELATKIRLWHQQGEKCLYTGKSIPISDLIHNQYKYEIDHILPLSLSFDDSLSNKVLVLATANQEKGQRTPFQALDSMDDAWSYREFKSYVKESKLLGNKKKEYLLTEEDISKIEVKQKFIERNLVDTRYSSRVVLNALQDFYKNHNFDTTISVVRGQFTSQLRRKWGLEKSRETYHHHAVDALIIAASSQLRLWKKQNNPLIAYKEGQFVDSQTGEIISLTDDEYKELVFKAPYDHFVDTLSSKTFEDSILFSYQVDSKFNRKISDATIYATRKAKLDKEKKEYTYTLGKIKDIYSLGTKTPSKTGFYKFLDLYNKDKSQFLMFQKDRKTWDEVIEKIMEQYRPFKEYDKAGKLVDFNPFEKYRQENGPIRKYSKKGNGPEIKSLKYYDILLGKHKNITPEGSRNTVALLSLNPWRTDVYYNMETKKYEFLGLKYADLPFEEGGAYGISTETYNELREKEGIGKNSEFKFTLYKNDLILIKDTETNCQQFFRFWSRTGKDNPKSFEKHKIELKPYEKAKFEKGEELEVLGKVPPSSNQFQKNMQIENLSIYKVKTDVLGNKHFIKKEGDKPKLKF

SEQ ID NO: 552 - protein, 1371 aa, Streptococcus oralis
  REGION 1..1371: note = Streptococcus oralis SK610
MENKNYSIGLDIGTNSVGWSVITDDYKVPSKKMKVLGNTDKRFIKKNLIGALLFDEGTTAEARRLKRTARRRYTRRKNRLRYLQEIFAEEMSKVDSSFFHRLDDSFLIPEDKRGSKYPIFATLAEEKEYHKQFPTIYHLRKQLADSKEKTDLRLIYLALAHMIKYRGHFLYEDTFDIKNNDIQKIFSEFISIYDNTFEGSSLSGQNAQVEAIFTDKISKSAKRERVLKLFPDEKSTGLFSEFLKLIVGNQADFKKHFDLGEKAPLQFSKDTYDEDLENLLGQIGDDFADLFLVAKKLYDAILLSGILTVTDPSTKAPLSASMIERYENHQKDLAVLKQFIKNNLPEKYDEVFSDQSKDGYAGYIDGKTTQEAFYKYIKNLLSKFEGTDYFLEKIEREDFLRKQRTFDNGSIPHQIHLQEMNAILRRQGEHYPFLKDNKEKIEKILTFRIPYYVGPLARGNRDFAWLTRNSDEAIRPWNFEEIVDKASSAEDFINKMTNYDLYLPEEKVLPKHSLLYETFAVYNELTKVKFIAEGLRDYQFLDSGQKKQIVTQLFKEKRKVTEKDIIQFLHNVDGYDGIELKGIEKQFNASLSTYHDLLKIIKDKEFMDDSKNEEILENIVHTLTIFEDREMIKQRLAQYDSLFDEKVIKALIRRHYTGWGKLSAKLIDGICDKQTGNTILDYLIDDGKNNRNFMQLINDDGLSFKEITQKAQVVGKTDDVKQVVQELPGSPAIKKGILQSIKIVDELVKVMGHTPESIVIEMARENQTTARGKKNSQQRYKRIEDALKNLASGLDSNILKEHPTNNIQLQNDRLFLYYLQNGRDMYTGKPLDINQLSSYDIDHIVPQAFIKDDSLDNRVLTSLKDNRGKSDNVPSIEVVQKRKAFWQQLLDSKLISERKFNNLTKAERGGLDERDKVGFIKRQLVETRQITKHVAQILDARFNKEVNEKDKKNRTVKIITLKSNLVSNFRKEFRLYKVREINDYHHAHDAYLNAVVAKAILKKYPKLEPEFVYGDYQKYDLKRYISRSRNPKEVEKATEKYFFYSNLLNFFKEEVHYADGTIVKRENIEYSKDTGEIAWNKEKDFATIKKVLSYPQVNIVKKREVQTGGFSKESILPKGNSDKLIPRKTKDILWETTKYGGFDSPVIAYSILLIADIEKGKAKKLKTVKTLVGITIMEKAAFEENPITFLENKGYHNVRKENILCLPKYSLFELENGRRRLLASAKELQKGNEIVLPVYLTTLLYHSKNVHKLDEPEHLEYIQKHRNEFKDLLNLVSEFSQKYVLADANLEKIQNLYADNEQADIEILANSFINLLTFTALGAPAAFKFFGKDIDRKRYTTVSEILNATLIHQSITGLYETRIDLSKLGED

SEQ ID NO: 553 - protein, 1140 aa, Streptococcus parasanguinis
  REGION 1..1140: note = Streptococcus parasanguinis F0449
MNGLVLGLDIGIASVGVGILKKDIGEIIHTNSRLFSAATADSNIERRGHRGGKRLTRRKKHRSIRLHDLFEDFGLLTDFSKVSINLNPYQLRVQGLDNQLTNEELFIALKNIVKRRGISYLDDASEDGGTVSSDYGKAVEENRKLLAEQTPGQIQLDRFEKYGQVRGDFNVVENGEKRRLINVFTTSAYSKEAERILRKQQEFNKKITDEFIEDYLTILTGKRKYYHGPGNEKSRTDYGRYTTKKDPEGKYITLDNIFGILIGKCTFYPDEYRASKASYTAQEFNLLNDLNNLTVPTETKKLSEEQKKTIIKYAKTAKTLGASTLLKYIAKLIGASVDQIHGYRIDPNKKPEMHTFETYRKMQSLETISVEELPRKVLDELAHILTLNTEREGIEEAINATLKDTFSQDQVLELVQFRKNNSSLFSKGWHSFSLKLMMELIPELYETSEEQMTILTRLGKQKSKETSKRTKYIDEKELTEEIYNPVVAKSVRQAIKIINEATKKYGIFDNIVIEMARENNEEDAKKEYIKRQKANLDEKNAAMEKAAFQYNGKKELPDNVFHGHKELATKIRLWHQQGEKCLYTGKNIPISDLIQNQYKYEIDHILPLSLSFDDSLSNKVLVLATANQEKGQRTPFQALDSMDDAWSYREFKSYVKDSKLLGNKKKEYLLTEEDISKIEVKQKFIERNLVDTRYSSRVVLNALQDFYKEHQFDTTISVVRGQFTSQLRRKWGLEKSRETYHHHAVDALIIAASSQLRLWKKQNNPLISYTEGQFVDQVTGEIISLSDDEYKELVFKAPYDHFVDTLKSKKFEDSILFSYQVDSKYNRKISDATIYATRKAKLDKENKEYTYTLGKIKDIYALGTKSPSKTGFYKFLDLYNKDKSQFLMFQKDRKTWDEVIEKIIEQYRPFKEYDENGKEVDFNPFEKYRIENGPIRKYSKKGNGPEIKSLKYYDNLLGKFVDITPSESKNPVALLSLNPWRTDVYYNTETSKYEFLGLKYADLCFEKGGAYGISEVKYNKIREKEGIGKESEFKFTLYKNDLILIKDTETNCQQIFRFWSRTGKDNPKSFEKHKIELKPYEKARFEKGEELEVLGKVPPSSNQLQKNMQIENLSIYKVKTDVLGNKHFIKKEGEEPKLKF

SEQ ID NO: 554 - protein, 1130 aa, Streptococcus sp.
  source 1..1130: note = Streptococcus pasteurianus
MTNGKILGLDIGIASVGVGIIEAKTGKVVHANSRLFSAANAENNAERRGFRGSRRLNRRKKHRVKRVRDLFEKYGIVTDFRNLNLNPYELRVKGLTEQLKNEELFAALRTISKRRGISYLDDAEDDSTGSTDYAKSIDENRRLLKNKTPGQIQLERLEKYGQLRGNFTVYDENGEAHRLINVFSTSDYEKEARKILETQADYNKKITAEFIDDYVEILTQKRKYYHGPGNEKSRTDYGRFRTDGTTLENIFGILIGKCNFYPDEYRASKASYTAQEYNFLNDLNNLKVSTETGKLSTEQKESLVEFAKNTATLGPAKLLKEIAKILDCKVDEIKGYREDDKGKPDLHTFEPYRKLKFNLESINIDDLSREVIDKLADILTLNTEREGIEDAIKRNLPNQFTEEQISEIIKVRKSQSTAFNKGWHSFSAKLMNELIPELYATSDEQMTILTRLEKFKVNKKSSKNTKTIDEKEVTDEIYNPVVAKSVRQTIKIINAAVKKYGDFDKIVIEMPRDKNADDEKKFIDKRNKENKKEKDDALKRAAYLYNSSDKLPDEVFHGNKQLETKIRLWYQQGERCLYSGKPISIQELVHNSNNFEIDHILPLSLSFDDSLANKVLVYAWTNQEKGQKTPYQVIDSMDAAWSFREMKDYVLKQKGLGKKKRDYLLTTENIDKIEVKKKFIERNLVDTRYASRVVLNSLQSALRELGKDTKVSVVRGQFTSQLRRKWKIDKSRETYHHHAVDALIIAASSQLKLWEKQDNPMFVDYGKNQVVDKQTGEILSVSDDEYKELVFQPPYQGFVNTISSKGFEDEILFSYQVDSKYNRKVSDATIYSTRKAKIGKDKKEETYVLGKIKDIYSQNGFDTFIKKYNKDKTQFLMYQKDSLTWENVIEVILRDYPTTKKSEDGKNDVKCNPFEEYRRENGLICKYSKKGKGTPIKSLKYYDKKLGNCIDITPEESRNKVILQSINPWRADVYFNPETLKYELMGLKYSDLSFEKGTGNYHISQEKYDAIKEKEGIGKKSEFKFTLYRNDLILIKDIASGEQEIYRFLSRTMPNVNHYVELKPYDKEKFDNVQELVEALGEADKVGRCIKGLNKPNISIYKVRTDVLGNKYFVKKKGDKPKLDFKNNKK

SEQ ID NO: 555 - protein, 1374 aa, Streptococcus pseudoporcinus
  REGION 1..1374: note = Streptococcus pseudoporcinus LQ 940-04
MKKRYSYSIGLDIGTNSVGWAVINEDYKVPAKKMTVFGNTDRKTIKKNLLGTVLFDSGETAQARRLKRTNRRRYTRRRYRLCQLQNIFATEMVKVDDTFFQRLSESFFYYQDKAFDKHPIFGNSKEERAYHKTYPTIYHLRKDLADRDQKADLRLIYLALSHIIKFRGHFLIEGKLNSENTDVQKLFIALVTVYNLLFEEEPIAGETCDAKALLTAKTSKSKRLESLISEFPGQKKNGLFGNLLALALGLRPNFKSNFGLSEDAKLQITKDTYEEELDNLLAEIGDHYADLFLAAKNLSDAILLSDILTLSDENTRAPLSASMIKRYEEHQEDLALLKKLVKEQMPEKYWEIFSNAKKNGYAGYIEGKVSQEDFYRYIKPILSRLKGGDEFLAKIDRDDFLRKQRTFDNGSIPHQIHLKELHAILRRQEKYYPFLAEQKEKIEQLLCFRIPYYVGPLAKGGNSSFAWLKRRSDEPITPWNFKDVVDEEASAQAFIEGMTNYDTYLPEEKVLPKHSPLYEMFTVYNELTKVKYIAENMTKPLYLSAEQKEAIIDHLFKQTRKVTVKDLKEKYFSQIEGLENVDVTGVEGAFNASLGTYNDLLKIIKDKAFLDDEANAEILEEIVLILTLFQDEKLIEKRLAKYANLFEKSVLKKLRKRHYRGWGRLSRQLIDGMKDKASGKTILDFLKADDFANRNFIQLINDSSLDFEKLIDDAQKKAIKRESLTEAVANLAGSPAIKKGILQSLKVVDEIVKVMGHNPDNIVIEMSRENQTTAQGLKNARQRLKKIKEVHKKTGSRILEDNSERITNLTLQDNRLYLYLLQDGKDMYTGQDLDINNLSQYDIDHIIPQSFIKDNSIDNLVLTTQKANRGKSDNVPSIEVVRDMKDRVWRRQLANGAISRQKFDHLTKAERGGLADSDKARFLRRQLVETRQITKHVAQLLDSRFNSKSNQNKKLARNVKIITLKSKIVSDFRKDFGLYKLREVNNYHHAHDAYLNAVVGTALLKKYPKLEAEFVYGDYKHFDLVKLISKSDPSLGKATAKVFFYSNIMNFFKEELSLADGTLMKRPVIETNTETGEVVWDKVKDFKTIRKVLSYPQVNIVKKTEIQSGAFSKESVLSKGNSDKLIERKKGWDPKKYGGFDSPNTAYSIFVVAKVAKRKAQKLKTVKEIVGITIMEQAEYEKDNIAFLEKKGYQDIQEKLLIKLPKYSLFELENGRRRLLASANEFQKGNELALSGKYMKFLYLASRYDKLSSKIESEQQKKLFVEQHLHYFDEILDIVVKHATCYIKAENNLKKIISLYKKKEAYSINEQALNMLNLFIFTSLGAPSTFVFFDETIDRKRYTTSSDVLNGILIQQSITGLYETRIDLSRFGGD

SEQ ID NO: 556 - protein, 1368 aa, Streptococcus pyogenes
  REGION 1..1368: note = Streptococcus pyogenes MGAS10270
MDKKYSIGLDIGTNSVGWAVITDDYKVPSKKFKVLGNTDRHSIKKNLIGALLFDSGETAEATRLKRTARRRYTRRKNRICYLQEIFSNEMAKVDDSFFHRLEESFLVEEDKKHERHPIFGNIVDEVAYHEKYPTIYHLRKKLVDSTDKADLRLIYLALAHMIKFRGHFLIEGDLNPDNSDVDKLFIQLVQTYNQLFEENPINASGVDAKAILSARLSKSRRLENLIAQLPGEKKNGLFGNLIALSLGLTPNFKSNFDLAEDAKLQLSKDTYDDDLDNLLAQIGDQYADLFLAAKNLSDAILLSDILRLNSEITKAPLSASMIKRYDEHHQDLTLLKALVRQQLPEKYKEIFFDQSKNGYAGYIDGGASQEEFYKFIKPILEKMDGTEELLAKLNREDLLRKQRTFDNGSIPHQIHLGELHAILRRQEDFYPFLKDNREKIEKILTFRIPYYVGPLARGNSRFAWMTRKSEETITPWNFEEVVDKGASAQSFIERMTNFDKNLPNEKVLPKHSLLYEYFTVYNELTKVKYVTEGMRKPAFLSGEQKKAIVDLLFKTNRKVTVKQLKEDYFKKIECFDSVEISGVEDRFNASLGTYHDLLKIIKDKDFLDNEENEDILEDIVLTLTLFEDREMIEERLKTYAHLFDDKVMKQLKRRRYTGWGRLSRKLINGIRDKQSGKTILDFLKSDGFANRNFMQLIHDDSLTFKEDIQKAQVSGQGDSLHEHIANLAGSPAIKKGILQTVKVVDELVKVMGRHKPENIVIEMARENQTTQKGQKNSRERMKRIEEGIKELGSQILKEHPVENTQLQNEKLYLYYLQNGRDMYVDQELDINRLSDYDVDHIVPQSFIKDDSIDNKVLTRSDKNRGKSDNVPSEEVVKKMKNYWRQLLNAKLITQRKFDNLTKAERGGLSELDKAGFIKRQLVETRQITKHVAQILDSRMNTKYDENDKLIREVKVITLKSKLVSDFRKDFQFYKVREINNYHHAHDAYLNAVVGTALIKKYPKLESEFVYGDYKVYDVRKMIAKSEQEIGKATAKYFFYSNIMNFFKTEITLANGEIRKRPLIETNGETGEIVWDKGRDFATVRKVLSMPQVNIVKKTEVQTGGFSKESILPKRNSDKLIARKKDWDPKKYGGFDSPTVAYSVLVVAKVEKGKSKKLKSVKELLGLTIMERSSFEKNPIDFLEAKGYKEVKKDLIIKLPKYSLFELENGRKRMLASAGELQKGNELALPSKYVNFLYLASHYEKLKGSPEDNEQKQLFVEQHKHYLDEIIEQISEFSKRVILADANLDKVLSAYNKHRDKPIREQAENIIHLFTLTNLGAPAAFKYFDTTIDRKRYTSTKEVLDATLIHQSITGLYETRIDLSQLGGD

SEQ ID NO: 557 - protein, 1371 aa, Streptococcus pyogenes
MDKKYSIGLDIGTNSVGWAVITDDYKVPSKKFKVLGNTDRHSIKKNLIGALLFDSGETAEATRLKRTARRRYTRRKNRICYLQEIFSNEMAKVDDSFFHRLEESFLVEEDKKHERHPIFGNIVDEVAYHEKYPTIYHLRKKLADSTDKADLRLIYLALAHMIKFRGHFLIEGDLNPDNSDVDKLFIQLVQTYNQLFEENPINASRVDAKAILSARLSKSRRLENLIAQLPGEKKNGLFGNLIALSLGLTPNFKSNFDLAEDAKLQLSKDTYDDDLDNLLAQIGDQYADLFLAAKNLSDATLLSDILRVNSEITKAPLSASMIKRYDEHHQDLTLLKALVRQQLPEKYKEIFFDQSKNGYAGYIDGGASQEEFYKFIKPILEKMDGTEELLAKLNREDLLRKQRTFDNGSIPHQIHLGELHAILRRQEDFYPFLKDNREKIEKILTFRIPYYVGPLARGNSRFAWMTRKSEETITPWNFEEVVDKGASAQSFIERMTNFDKNLPNEKVLPKHSLLYEYFTVYNELTKVKYVTEGMRKPAFLSGEQKKAIVDLLFKTNRKVTVKQLKEDYFKKIECFDSVEISGVEDRFNASLGTYHDLLKIIKDKDFLDNEENEDILEDIVLTLTLFEDKEMIEERLKTYAHLFDDKVMKQLKRRHYTGWGRLSRKLINGIRDKQSGKTILDFLKSDGFANRNFIQLIHDDSLTFKEAIQKAQVSGQGHSLHEQIANLAGSPAIKKGILQSVKVVDELVKVMGHKPENIVIEMARENQTTQKGQKNSRERMKRIEEGIKELGSQILKEHPVENTQLQNEKLYLYYLQNGRDMYVDQELDINRLSDYDVDHIVPQSFIKDDSIDNKVLTRSDKNRGKSDDVPSEEVVKKMKNYWRQLLNAKLITQRKFDNLTKAERGGLSELDKAGFIKRQLVETRQITKHVAQILDSRMNTKYDENDKLIREVKVITLKSKLVSDFRKDFQFYKVREINNYHHAHDAYLNAVVGTALIKKYPKLESEFVYGDYKVYDVRKMIAKSEQEIGKATAKRFFYSNIMNFFKTEITLANGEIRKRPLIETNEETGEIVWDKGRDFATVRKVLSMPQVNIVKKTEVQTGALTNESIYARGSFDKLISRKHRFESSKYGGFGSPTVTYSVLVVAKSKVQDGKVKKIKTGKELIGITLLDKLVFEKNPLKFIEDKGYGNVQIDKCIKLPKYSLFEFENGTRRMLASVMANNNSRGDLQKANEMFLPAKLVTLLYHAHKIESSKELEHEAYILDHYNDLYQLLSYIERFASLYVDVEKNISKVKELFSNIESYSISEICSSVINLLTLTASGAPADFKFLGTTIPRKRYGSPQSILSSTLIHQSITGLYETRIDLSQLGSD

SEQ ID NO: 558 - protein, 1367 aa, Streptococcus pyogenes
MDKKYSIGLDIGTNSVGWAVITDDYKVPSKKFKVLGNTDRHSIKKNLIGALLFGSGETAEATRLKRTARRRYTRRKNRICYLQEIFSNEMAKVDDSFFHRLEESFLVEEDKKHERHPIFGNIVDEVAYHEKYPTIYHLRKKLADSTDKADLRLIYLALAHMIKFRGHFLIEGDLNPDNSDVDKLFIQLVQIYNQLFEENPINASRVDAKAILSARLSKSRRLENLIAQLPGEKRNGLFGNLIALSLGLTPNFKSNFDLAEDAKLQLSKDTYDDDLDNLLAQIGDQYADLFLAAKNLSDAILLSDILRVNSEITKAPLSASMIKRYDEHHQDLTLLKALVRQQLPEKYKEIFFDQSKNGYAGYIDGGASQEEFYKFIKPILEKMDGTEELLVKLNREDLLRKQRTFDNGSIPHQIHLGELHAILRRQEDFYPFLKDNREKIEKILTFRIPYYVGPLARGNSRFAWMTRKSEETITPWNFEEVVDKGASAQSFIERMTNFDKNLPNEKVLPKHSLLYEYFTVYNELTKVKYVTEGMRKPAFLSGEQKKAIVDLLFKTNRKVTVKQLKEDYFKKIECFDSVEISGVEDRFNASLGAYHDLLKIIKDKDFLDNEENEDILEDIVLTLTLFEDRGMIEERLKTYAHLFDDKVMKQLKRRRYTGWGRLSRKLINGIRDKQSGKTILDFLKSDGFANRNFMQLIHDDSLTFKEDIQKAQVSGQGHSLHEQIANLAGSPAIKKGILQTVKIVDELVKVMGHKPENIVIEMARENQTTQKGQKNSRERMKRIEEGIKELGSQILKEHPVENTQLQNEKLYLYYLQNGRDMYVDQELDINRLSDYDVDHIVPQSFIKDDSIDNKVLTRSDKNRGKSDNVPSEEVVKKMKNYWRQLLNAKLITQRKFDNLTKAERGGLSELDKAGFIKRQLVETRQITKHVAQILDSRMNTKYDENDKLIREVKVITLKSKLVSDFRKDFQFYKVREINNYHHAHDAYLNAVVGTALIKKYPKLESEFVYGDYKVYDVRKMIAKSEQEIGKATAKYFFYSNIMNFFKTEITLANGEIRKRPLIETNGETGEIVWDKGRDFATVRKVLSMPQVNIVKKTEVQTGGFSKESILPKRNSDKLIARKKDWDPKKYGGFDSPTVAYSVLVVAKVEKGKSKKLKSVKELLGITIMERSSFEKNPIDFLEAKGYKEVKKDLIIKLPKYSLFELENGRKRMLASAGELQKGNELALPSKYVNFLYLASHYEKLKGSPEDNEQKQLFVEQHKHYLDEIIEQISEFSKRVILADANLDKVLSAYNKHRDKPIREQAENIIHLFTLTNLGAPAAFKYFDTTIDRKRYTSTKEVLDATLIHQSITGLYETRIDLSQLGGD

SEQ ID NO: 559 - protein, 1368 aa, Streptococcus sp.
MDKKYSIGLDIGTNSVGWAVITDDYKVPSKKFKVLGNTDRHSIKKNLIGALLFDSGEIAEATRLKRTARRRYTRRKNRICYLQEIFSNEMAKVDDSFFHRLEESFLVEEDKKHERHPIFGNIVDEVAYHEKYPTIYHLRKKLVDSTDKADLRLIYLALAHMIKFRGHFLIEGDLNPDNSDVDKLFIQLVQTYNQLFEENPINASGVDAKAILSARLSKSRRLENLIAQLPGEKKNGLFGNLIALSLGLTPNFKSNFDLAEDAKLQLSKDTYDDDLDNLLAQIGDQYADLFLAAKNLSDAILLSDILRLNSEITKAPLSASMIKRYDEHHQDLTLLKALVRQQLPEKYKEIFFDQSKNGYAGYIDGGASQEEFYKFIKPILEKMDGTEELLAKLNREDLLRKQRTFDNGSIPHQIHLGELHAILRRQEDFYPFLKDNREKIEKILTFRIPYYVGPLARGNSRFAWMTRKSEETITPWNFEEVVDKGASAQSFIERMTNFDKNLPNEKVLPKHSLLYEYFTVYNELTKVKYVTEGMRKPAFLSGEQKKAIVDLLFKTNRKVTVKQLKEDYFKKIECFDSVEISGVEDRFNASLGTYHDLLKIIKDKDFLDNEENEDILEDIVLTLTLFEDREMIEERLKTYAHLFDDKVMKQLKRRRYTGWGRLSRKLINGIRDKQSGKTILDFLKSDGFANRNFMQLIHDDSLTFKEDIQKAQVSGQGDSLHEHIANLAGSPAIKKGILQTVKVVDELVKVMGRHKPENIVIEMARENQTTQKGQKNSRERMKRIEEGIKELGSQILKEHPVENTQLQNEKLYLYYLQNGRDMYVDQELDINRLSDYDVDHIVPQSFIKDDSIDNKVLTRSDKNRGKSDNVPSEEVVKKMKNYWRQLLNAKLITQRKFDNLTKAERGGLSELDKAGFIKRQLVETRQITKHVAQILDSRMNTKYDENDKLIREVKVITLKSKLVSDFRKDFQFYKVREINNYHHAHDAYLNAVVGTALIKKYPKLESEFVYGDYKVYDVRKMLAKSEQEIGKATAKYFFYSNIMNFFKTEITLANGEIRKRPLIETNGETGEIVWDKGRDFATVRKVLSMPQVNIVKKTEVQTGGFSKESILPKRNSDKLIARKKDWDPKKYGGFDSPTVAYSVLVVAKVEKGKSKKLKSVKELLGITIMERSSFEKNPIDFLEAKGYKEVRKDLIIKLPKYSLFELENGRKRMLASAGELQKGNELALPSKYVNFLYLASHYEKLKGSPEDNEQKQLFVEQHKHYLDEIIEQISEFSKRVILADANLDKVLSAYNKHRDKPIREQAENIIHLFTLTNLGAPTAFKYFDTTIDRKRYTSTKEVLDATFIHQSITGLYETRIDLSQLGGD

SEQ ID NO: 560 - protein, 1368 aa, Streptococcus pyogenes
MDKKYSIGLDIGTNSVGWAVITDDYKVPSKKLKGLGNTDRHGIKKNLIGALLFDSGETAEATRLKRTARRRYTRRKNRICYLQEIFSNEMAKVDDSFFHRLEESFLVEEDKKHERHPIFGNIVDEVAYHEKYPTIYHLRKKLADSTDKVDLRLIYLALAHMIKFRGHFLIEGDLNPDNSDVDKLFIQLVQTYNQLFEENPINASRVDAKAILSARLSKSRRLENLIAQLPGEKKNGLFGNLIALSLGLTPNFKSNFDLAEDAKLQLSKDTYDDDLDNLLAQIGDQYADLFLAAKNLSDATLLSDILRVNSEITKAPLSASMIKRYDEHHQDLTLLKALVRQQLPEKYKEIFFDQSKNGYAGYIDGGASQEEFYKFIKPILEKMDGTEELLAKLNREDLLRKQRTFDNGSIPYQIHLGELHAILRRQEDFYPFLKDNREKIEKILTFRIPYYVGPLARGNSRFAWMTRKSEETITPWNFEEVVDKGASAQSFIERMTNFDKNLPNEKVLPKHSLLYEYFTVYNELTKVKYVTEGMRKPAFLSGEQKKAIVDLLFKTNRKVTVKQLKEDYFKKIECFDSVEISGVEDRFNASLGTYHDLLKIIKDKDFLDNEENEDILEDIVLTLTLFEDREMIEERLKTYAHLFDDKVMKQLKRRRYTGWGRLSRKLINGIRDKQSGKTILDFLKSDGFANRNFMQLIHDDSLTFKEDIQKAQVSGQGDSLHEHIANLAGSPAIKKGILQTVKVVDELVKVMGRHKPENIVIEMARENQTTQKGQKNSRERMKRIEEGIKELGSDILKEYPVENTQLQNEKLYLYYLQNGRDMYVDQELDINRLSDYDVDHIVPQSFLKDDSIDNKVLTRSDKNRGKSDNVPSEEVVKKMKNYWRQLLNAKLITQRKFDNLTKAERGGLSELDKVGFIKRQLVETRQITKHVAQILDSRMNTKYDENDKLIREVRVITLKSKLVSDFRKDFQFYKVREINNYHHAHDAYLNAVVGTALIKKYPKLESEFVYGDYKVYDVRKMIAKSEQEIGKATAKYFFYSNIMNFFKTEITLANGEIRKRPLIETNGETGEIVWDKGRDFATVRKVLSMPQVNIVKKTEVQTGGFSKESILPKRNSDKLIARKKDWDPKKYGGFDSPTVAYSVLVVAKVEKGKSKKLKSVKELLGITIMERSSFEKDPIDFLEAKGYKEVRKDLIIKLPKYSLFELENGRKRMLASAGELQKGNELALPSKYVNFLYLASHYEKLKGSPEDNEQKQLFVEQHKHYLDEIIEQISEFSKRVILADANLDKVLSAYNKHRDKPIREQAENIIHLFTLTNLGAPAAFKYFDTTIDRKRYTSTKEVLDATLIHQSITGLYETRIDLSQLGGD

SEQ ID NO: 561 - protein, 1368 aa, Streptococcus pyogenes
MDKKYSIGLDIGTNSVGWAVITDDYKVPSKKFKVLGNTDRHSIKKNLIGALLFDSGETAEATRLKRTARRRYTRRKNRICYLQEIFSNEMAKVDDSFFHRLEESFLVEEDKKHERHPIFGNIVDEVAYHEKYPTIYHLRKKLVDSTDKADLRLIYLALAHMIKFRGHFLIEGDLNPDNSDVDKLFIQLVQTYNQLFEENPINASGVDAKAILSARLSKSRRLENLIAQLPGEKKNGLFGNLIALSLGLTPNFKSNFDLAEDAKLQLSKDTYDDDLDNLLAQIGDQYADLFLAAKNLSDAILLSDILRVNTEITKAPLSASMIKRYDEHHQDLTLLKALVRQQLPEKYKEIFFDQSKNGYAGYIDGGASQEEFYKFIKPILEKMDGTEELLVKLNREDLLRKQRTFDNGSIPHQIHLGELHAILRRQEDFYPFLKDNREKIEKILTFRIPYYVGPLARGNSRFAWMTRKSEETITPWNFEEVVDKGASAQSFIERMTNFDKNLPNEKVLPKHSLLYEYFTVYNELTKVKYVTEGMRKPAFLSGEQKKAIVDLLFKTNRKVTVKQLKEDYFKKIECFDSVEISGVEDRFNASLGTYHDLLKIIKDKDFLDNEENEDILEDIVLTLTLFEDREMIEERLKTYAHLFDDKVMKQLKRRRYTGWGRLSRKLINGIRDKQSGKTILDFLKSDGFANRNFMQLIHDDSLTFKEDIQKAQVSGQGDSLHEHIANLAGSPAIKKGILQTVKVVDELVKVMGRHKPENIVIEMARENQTTQKGQKNSRERMKRIEEGIKELGSQILKEHPVENTQLQNEKLYLYYLQNGRDMYVDQELDINRLSDYDVDHIVPQSFLKDDSIDNKVLTRSDKNRGKSDNVPSEEVVKKMKNYWRQLLNAKLITQRKFDNLTKAERGGLSELDKAGFIKRQLVETRQITKHVAQILDSRMNTKYDENDKLIREVKVITLKSKLVSDFRKDFQFYKVREINNYHHAHDAYLNAVVGTALIKKYPKLESEFVYGDYKVYDVRKMIAKSEQEIGKATAKYFFYSNIMNFFKTEITLANGEIRKRPLIETNGETGEIVWDKGRDFATVRKVLSMPQVNIVKKTEVQTGGFSKESILPKRNSDKLIARKKDWDPKKYGGFDSPTVAYSVLVVAKVEKGKSKKLKSVKELLGITIMERSSFEKNPIDFLEAKGYKEVKKDLIIKLPKYSLFELENGRKRMLASAGELQKGNELALPSKYVNFLYLASHYEKLKGSPEDNEQKQLFVEQHKHYLDEIIEQISEFSKRVILADANLDKVLSAYNKHRDKPIREQAENIIHLFTLTNLGAPAAFKYFDTTIDRKRYTSTKEVLDATLIHQSITGLYETRIDLSQLGGD

SEQ ID NO: 562 - protein, 1368 aa, Streptococcus pyogenes
MDKKYSIGLDIGTNSVGWAVITDDYKVPSKKFKVLGNTDRHSIKKNLIGALLFDSGETAEATRLKRTARRRYTRRKNRICYLQEIFSNEMAKVDDSFFHRLEESFLVEEDKKHERHPIFGNIVDEVAYHEKYPTIYHLRKKLVDSTDKADLRLIYLALAHMIKFRGHFLIEGDLNPDNSDVDKLFIQLVQTYNQLFEENPINASGVDAKAILSARLSKSRRLENLIAQLPGEKKNGLFGNLIALSLGLTPNFKSNFDLAEDAKLQLSKDTYDDDLDNLLAQIGDQYADLFLAAKNLSDAILLSDILRLNSEITKAPLSASMIKRYDEHHQDLTLLKALVRQQLPEKYKEIFFDQSKNGYAGYIDGGASQEEFYKFIKPILEKMDGTEELLAKLNREDLLRKQRTFDNGSIPHQIHLGELHAILRRQEDFYPFLKDNREKIEKILTFRIPYYVGPLARGNSRFAWMTRKSEETITPWNFEEVVDKGASAQSFIERMTNFDKNLPNEKVLPKHSLLYEYFTVYNELTKVKYVTEGMRKPAFLSGEQKKAIVDLLFKTNRKVTVKQLKEDYFKKIECFDSVEISGVEDRFNASLGTYHDLLKIIKDKDFLDNEENEDILEDIVLTLTLFEDREMIEERLKTYAHLFDDKVMKQLKRRRYTGWGRLSRKLINGIRDKQSGKTILDFLKSDGFANRNFMQLIHDDSLTFKEDIQKAQVSGQGDSLHEHIANLAGSPAIKKGILQTVKVVDELVKVMGRHKPENIVIEMARENQTTQKGQKNSRERMKRIEEGIKELGSQILKEHPVENTQLQNEKLYLYYLQNGRDMYVDQELDINRLSDYDVDHIVPQSFIKDDSIDNKVLTRSDKNRGKSNNVPSEEVVKKMKNYWRQLLNAKLITQRKFDNLTKAERGGLSELDKAGFIKRQLVETRQITKHVAQILDSRMNTKYDENDKLIREVKVITLKSKLVSDFRKDFQFYKVREINNYHHAHDAYLNAVVGTALIKKYPKLESEFVYGDYKVYDVRKMIAKSEQEIGKATAKYFFYSNIMNFFKTEITLANGEIRKRPLIETNGETGEIVWDKGRDFATVRKVLSMPQVNIVKKTEVQTGGFSKESILPKRNSDKLIARKKDWDPKKYGGFDSPTVAYSVLVVAKVEKGKSKKLKSVKELLGITIMERSSFEKNPIDFLEAKGYKEVRKDLIVKLPKYSLFELENGRKRMLASAGELQKGNELALPSKYVNFLYLASHYEKLKGSPEDNEQKQLFVEQHKHYLDEIIEQISEFSKRVILADANLDKVLSAYNKHRDKPIREQAENIIHLFTLTNLGAPAAFKYFDTTIDRKRYTSTKEVLDATFIHQSITGLYETRIDLSQLGGD

SEQ ID NO: 563 - protein, 1368 aa, Streptococcus pyogenes
MDKKYSIGLDIGTNSVGWAVITDDYKVPSKKFKVLGNTDRHSIKKNLIGALLFDSGEIAEATRLKRTARRRYTRRKNRICYLQEIFSNEMAKVDDSFFHRLEESFLVEEDKKHERHPIFGNIVDEVAYHEKYPTIYHLRKKLVDSTDKADLRLIYLALAHMIKFRGHFLIEGDLNPDNSDVDKLFIQLVQTYNQLFEENPINASGVDAKAILSARLSKSRRLENLIAQLPGEKKNGLFGNLIALSLGLTPNFKSNFDLAEDAKLQLSKDTYDDDLDNLLAQIGDQYADLFLAAKNLSDAILLSDILRLNSEITKAPLSASMIKRYDEHHQDLTLLKALVRQQLPEKYKEIFFDQSKNGYAGYIDGGASQEEFYKFIKPILEKMDGTEELLAKLNREDLLRKQRTFDNGSIPHQIHLGELHAILRRQEDFYPFLKDNREKIEKILTFRIPYYVGPLARGNSRFAWMTRKSEETITPWNFEEVVDKGASAQSFIERMTNFDKNLPNEKVLPKHSLLYEYFTVYNELTKVKYVTEGMRKPAFLSGEQKKAIVDLLFKTNRKVTVKQLKEDYFKKIECFDSVEISGVEDRFNASLGTYHDLLKIIKDKDFLDNEENEDILEDIVLTLTLFEDREMIEERLKTYAHLFDDKVMKQLKRRRYTVWGRLSRKLINGIRDKQSGKTILDFLKSDGFANRNFMQLIHDDSLTFKEDIQKAQVSGQGDSLHEHIANLAGSPAIKKGILQTVKVVDELVKVMGRHKPENIVIEMARENQTTQKGQKNSRERMKRIEEGIKELGSQILKEHPVENTQLQNEKLYLYYLQNGRDMYVDQELDINRLSDYDVDHIVPQSFIKDDSIDNKVLTRSDKNRGKSDNVPSEEVVKKMKNYWRQLLNAKLITQRKFDNLTKAERGGLSELDKAGFIKRQLVETRQITKHVAQILDSRMNTKYDENDKLIREVKVITLKSKLVSDFRKDFQFYKVREINNYHHAHDAYLNAVVGTALIKKYPKLESEFVYGDYKVYDVRKMLAKSEQEIGKATAKYFFYSNIMNFFKTEITLANGEIRKRPLIETNGETGEIVWDKGRDFATVRKVLSMPQVNIVKKTEVQTGGFSKESILPKRNSDKLIARKKDWDPKKYGGFDSPTVAYSVLVVAKVEKGKSKKLKSVKELLGITIMERSSFEKNPIDFLEAKGYKEVRKDLIIKLPKYSLFELENGRKRMLASAGELQKGNELALPSKYVNFLYLASHYEKLKGSPEDNEQKQLFVEQHKHYLDEIIEQISEFSKRVILADANLDKVLSAYNKHRDKPIREQAENIIHLFTLTNLGAPTAFKYFDTTIDRKRYTSTKEVLDATFIHQSITGLYETRIDLSQLGGD

SEQ ID NO: 564 - protein, 1368 aa, Streptococcus pyogenes
MDKKYSIGLDIGTNSVGWAVITDDYKVPSKKFKVLGNTDRHSIKKNLIGALLFDSGETAEATRLKRTARRRYTRRKNRICYLQEIFSNEIAKVDDSFFHRLEESFLVEEDKKHERHPIFGNIVDEVAYHEKYPTIYHLRKKLADSTDKADLRLIYLALAHMIKFRGHFLIEGDLNPDNSDVDKLFIQLVQTYNQLFEENPINASRVDAKAILSARLSKSRRLENLIAQLPGEKRNGLFGNLIALSLGLTPNFKSNFDLAEDAKLQLSKDTYDDDLDNLLAQIGDQYADLFLAAKNLSDAILLSDILRVNTEITKAPLSASMIKRYDEHHQDLTLLKALVRQQLPEKYKEIFFDQSKNGYAGYIDGGASQEEFYKFIKPILEKMDGTEELLAKLNREDLLRKQRTFDNGSIPHQIHLGELHAILRRQEDFYPFLKDNREKIEKILTFRIPYYVGPLARGNSRFAWMTRKSEETITPWNFEEVVDKGASAQSFIERMTNFDKNLPNEKVLPKHSLLYEYFTVYNELTKVKYVTEGMRKPAFLSGEQKKAIVDLLFKTNRKVTVKQLKEDYFKKIECFDSVEISGVEDRFNASLGTYHDLLKIIKDKDFLDNEENEDILEDIVLTLTLFEDREMIEERLKTYAHLFDDKVMKQLKRRRYTGWGRLSRKLINGIRDKQSGKTILDFLKSDGFANRNFMQLIHDDSLTFKEDLQKAQVSGQGDSLHEHIANLAGSPAIKKGILQTVKVVDELVKVMGRHKPENIVIEMARENQTTQKGQKNSRERMKRIEEGIKELGSDILKEYPVETTQLQNEKLYLYYLQNGRDMYVDQELDINRLSDYDVDHIVPQSFLKDDSIDNKVLTRSDKNRGKSDNVPSEEVVKKMKNYWKQLLNAKLITQRKFDNLTKAERGGLSELDKAGFIKRQLVETRQITKHVAQILDSRMNTKYDENDKLIREVRVITLKSKLVSDFRKDFQFYKVREINNYHHAHDAYLNAVVGTALIKKYPKLESEFVYGDYKVYDIRKMIAKSEQEIGKATAKYFFYSNIMNFFKTEITLANGEIRKRPLIETNGETGEIVWDKGRDFATVRKVLSMPQVNIVKKTEVQTGGFSKESILPKRNSDKLIARKKDWDPKKYGGFDSPTVAYSVLVVAKVEKGKSKKLKSVKELVGITIMERSSFEKDPVDFLEAKGYKEVRKDLIIKLPKYSLFELENGRKRMLASAGELQKGNELALPSKYVNFLYLASHYEKLKGSPEDNEQKQLFVEQHKHYLDEIIEQISEFSKRVILADANLDKVLSAYNKHRDKPIREQAENIIHLFTLTNLGAPAAFKCFDTTIGRNRYKSIKEVLDATLIHQSITGLYETRIDLSQLGGD

SEQ ID NO: 565 - protein, 1368 aa, Streptococcus pyogenes [sequence omitted]

SEQ ID NO: 566 - protein, 1368 aa, Streptococcus pyogenes; identical to SEQ ID NO: 560

SEQ ID NO: 567 - protein, 1370 aa, Streptococcus ratti
  REGION 1..1370: note = Streptococcus ratti FA-1 = DSM 20564
MKKPYSIGLDIGTNSVGWAVITDDYKVPAKKMKVLGNTDKNYIKKNLLGALLFDSGNTAEDRRLKRTARRRYTRRRNRLLYLQDIFSDEMNKVDESFFHRLEDSFLVSEDKRGDHHPIFGNVVDEVKYHEQFPTIYHLRKYLADTPEKADLRLVYLALAHMIKFRGHFLIDDPKLDVKNTDSQELFSQFLTAYDVTQEDSHLADVKINISDIITEKMNKSRKVEALLFHFPSQKKNSFFGNLVSLVFGLLPNFKTNFNLAEDAKLQLSKDSYDEDLENLLGQIGDEYTDVFVAARKLYDSILLSGILTVNDLSTKAILSASMVRRYEEHNKDLAKLKAFVKANFTHDVFKEVFSDASKNGYAGYIEGKTSQEDFYKYVKNLIGKVDGSADFIEKIDREDFLRKQRTFDNGSIPHQVHLAEMKAILRRQGEYYPFLKEHAEKIQQILTFRIPYYVGPLDRHGHSDFAWASFNSEEKVTPWNFEEIIDKNKSAQAFIERMTNQDLYLPNEKVLPKHSPLYEKYTVYNELTKIKYVTETGTAKFFDANLKQEIFDGLFKKERKVTKRKLLTFLEKNFDEFRIVDIQGLDKETETFNASYGIYQDLLKIIKDKAFMDDSENADILEDIVLTLTLFEDREMIKQRLAKYADLFDKKVIDNLARRRYTGWGRLSAKLLNGIRDKRSRKTIMDYLVDDGRSNRNLMQLITDDNLTFKDEIAKAQYSDNSDDLHQVVQDLAGSPAIKKGILQSVKIVDELVKVMGYEPEQIVVEMARENQTTAKGRRNSQQRYKRLEEAIKNLDRDLNYKILKEHPTDNQALQNDRLFLYYLQNGRDMYTGESLDINRLSDYDIDHIIPQAFIKDNSIDNRVLVSSAKNRGKSDDVPSEDVVNRMRPFWNKLLNCGLISQRKYSNLTKKELTPNDKAGFIKRQLVETRQITKHVARILDEHFNKEFDEDKKRIRKVKVVTLKSNLVSNFRKEFELYKVREINDYHHAHDAYLNAVVAKALLMKYPKLEPEFVYGEYPKYNSYRERKTATQRMFFYSNIMNMFKSKVKLADERIIERPMIEVNDETGEIAWDKTKHIATVKKVLSYPQINIVKKVEEQTGGLTNETIYPRGSFDKLLNRKNTLEASKYGGFGSPTVAYCVLVVADSKNENGKVKKLKLGSELLGITILEKNDFENNSLDFLSRKGYQGVQEKKIIKLPKYSLFEFQDGSRRMLSSVMANDNKRGDLQKANEMILPAYLVKLLYHAKHINSVGEPAHKNYINEHCSEFQDLLNYIRQFADKFVDVDKNLSKIRSLSKSMAEYSVSEICSSFVNLLTLTALGAPADFKFFGTTIPRKRYGSPQSILSATLIHQSITGLYETRIDLSKLGED

SEQ ID NO: 568 - protein, 1127 aa, Streptococcus salivarius
MSDLVLGLDIGIGSVGVGILNKVTGEIIHKNSRIFPAAQAENNVERRINRQGRRLTRRKKHRRVRLNHLFEESGLITDFTNVSINLNPYQLRVKGLTDELSNEELFIALKNMVKHRGISYLDDASDDGNSSVGDYAQIVKENSKQLETKTPGQIQLERYQKYGQLRGDFTVEEDGKKHRLINVFPTSAYRAEALRILQTQQEFNPQITDEFINSYLQILTGKRKYYHGPGNEKSRTDYGRYTTKKDSEDEYITLDNIFGILIGKCTFYPEEYRAAKASYTAQEFNLLNDLNNLTVPTETKKLSEEQKNQIITNVKNEKAMGPAKLFKYIAKLLSCDVADIKGYRIDKSDKAEIHTFEAYRKMKTLATIDIEQMERENLDKLAYVLTLNTEKEGIQEALEHEFADGTFSQEQIDELVQFRKANSSIFGKGWHSFSVKLMMELIPELYATSEEQMTILTRLGKQKTTSSSNKTKYIDEKQLTEEIYNPVAAKSVRQAIKIVNAAIKEYGDFDNIVIEMARETNEDDEKKAIQKIQKANKDEKDAAMLKAANQYNGKAELPHSVFHGHKQLATKIRLWHQQGERCLYTGKTISIHDLINNSNQFEIDHILPLSITFDDSLANKVLVYATANQEKGQRTPYQALDSMDDAWSFRELKAFVRDSKALSNKKKEYLLTEEDISKFDVRKKFIERNLVDTRYASRVVLNALQEHFRVHKTDTKVSVVRGQFTSQLRRHWGIEKTRDTYHHHAVDALIIAASSQLNLWKKQKNTLVSYSEDQLLDIETGELISDDEYKESVFKAPYQHFVDTLKSKEFEDSILFSYQVDSKFNRKISDATIYATRQAKVGKDKKDETYVLGKIKDIYSQTGYDAFIKIYKKDKSKFLMYRHDPQTFEKVIEPILENYPNKELNEKGKEVPCNPFLKYKEDHGYIRKYSKKGNGPEIKSLKYYDSKLGNHIDITPKNSNNKVVLQSVSPWRADVYFNKTTGKYEILGLKYADLKFEKGTGTYKISEEKYNDIKIKEGVDSDSEFKFTLYKNDLLLIKDTETKEQQLFRFLSRTMPNVKHYVELKPYDKQKFDDNEELIKILGIVAKGGQCKKGVSKPNISIYKIRTDVLGNQHIIKNEGDKPKLDF

SEQ ID NO: 569 - protein, 1385 aa, Streptococcus salivarius
  REGION 1..1385: note = Streptococcus salivarius K12
MTKPYSIGLDIGTNSVGWAVITDDYKVPSKKMKVLGNTSKKYIKKNLLGALLFDSGITAEGRRLKRTARRRYTRRRNRILYLQEIFSTEMATLDDAFFQRLDDSFLVPDDKRDSKYPIFGNLVEEKVYHDEFPTIYHLRKHLADSSKKADLRLVYLALAHMIKYRGHFLIEGDFNSKNNDLQKNFQDFLDTYNAIFESDLSLENSKQLEEIVKDKISKSAKKDRILKLFPGEKNSGIFSEFLKLIVGNQADFRKYFNLDEKTSLQFSKESYDEDLETLLGHIGDDYSDVFLKAKKLYDAILLSGILTVTDNGTEAPLSSAMIMRYKEHEEDLALLKAYIRNISLETYNEVFKDNTKNGYAGYIDGKTSQEDFYVYLKRLLAGLEGADYFLEKIDREDFLRKQRTFDNGSIPYQIYLQEMRAILDKQAKFYPFLAKNKERIEKILTFRIPYYVGPLARGNSDFAWSIRKRNEKITPWNFEDVIDKESSAEAFINRMTSFDLYLPEEKVLPKHSLLYENFTVYNELTKVRFIAEGMRDYQFLDSKQKKDIVRLYFKGKRKVTDKDIIEYLHAIDGYDGIELKGIEKQFNSSLSTYHDLLNIINDKEFLDDSSNETIIEEIIHTLTMFEDREMIKQRLSKFDNIFDKSVLKKLSRRHYTGWGKLSAKLINGIRDEKSGNTILDYLIDDGVSNRNFMQLIHDDALSFKKKIKKAQIIGDKDNIKQVVKSLPGSPAIKKGILQSIKIVDELVKVMGREPESIVVEMARENQYTNQGKSNSQQRLKRLEESLKGLGSKILKENVPTRLSKIDNNALQNDRLYLYYLQNGKDMYTGEELDIDRLSNYDIDHIIPQAFLKDDSIDNKVLVSSASNRGKSDDVPSLEVVKKRKTLWYQLLKSKLISQRKFDNLTKAERGGLSQEEKAGFIQRQLVETRQITKHVARLLDERFNNKKDENNRTLRTVKIITLKSSLVSQFRKDFELYKVREINDFHHAHDAYLNAVVASALLKKYPKLEPEFVYGDYPKYNSFRERKSATEKVYFYSNIMNIFKKSIPLADGTVIDRPLIEVNEETGESVWNKVADLNTVRKVLSYSQVNIVKKVEEQNHGLDRGKPKGLFNANLSSKPKPNSKENLVGAKEYLDPKKYGGYAGISNSFAILVKGTIEKGAKKKITNVLEFQGISILDRIYYRKDKLNFLLEKGYKDIELIIELPKYSLFELSDGSRRMLASILSTNNKRGEIHKGNQIFISQKFVKLLYHAKRISSTFNENHRKYVENHKKEFEELFYYILEFNENYVGAKKNGELLKSAFQSWQNHSIDELCSSFIGPTGSERKGLFELTSRGGAADFEFLGVKIPRYRDYTPSSLLKDATLIHQSVTGLYETRIDLGKLGED

SEQ ID NO: 570 - protein, 1135 aa, Streptococcus salivarius
  REGION 1..1135: note = Streptococcus salivarius PS4
MSDLVLGLDIGIGSVGVGILNKVTGEIIHKNSRIFPAAQAENNLERRTNRQGRRLTRRKKHRRVRLNHLFEESGLITDFTKVSINLNPYQLRVKGLTAELSNEELFIALKNMVKHRGISYLDDASDDGNSSVGDYAQIVKENSKQLETKTPGQIQLERYQKYGQLRGDFTVEEDGRKHRLINVFPTSAYHAEALRILQTQQEFNPQITDEFINSYLEILTGKRKYYHGPGNEKSRTDYGKYTTKKDAQGQYITLNNIFGILIGKCTFYPEEYRAAKASYTAQEFNLLNDLNNLTVPTETKKLSEEQKYQIITYVKNEKAMGPAKLFKYIAKLLACDIADIKGYRIDKSDKAEIHTFEAYRKMKTLETIDIEQIEREKLDKLAYVLTLNTEREGIQEALDHEFADGTFSQEQVDELVQFRKANSSIFGKGWHSFSVKLMMELIPELYATSEEQMTILTRLGKQKTTSSSNKTKYIDEKQLTEEIYNPVVAKSVRQAIKIVNAAIKKYGDFDNIVIEMARETNEDDEKKAIQKIQKANKAEKDAAMRKAANQYNGKAELPHSVFHGHKQLATKIRLWHQQGERCLYTGKTISIHDLINNPNQFEIDHILPLSITFDDSLANKVLVYATANQEKGQRTPYQALDSMDDAWSFRELKAFVRESKALSNKKKEYLLTEEDISKFDVRKKFIERNLVDTRYASRVVLNALQEHFKAHKIDTKVSVVRGQFTSQLRRHWGIDKTRDTYHHHAVDALIIAASSQLNLWKKQKNTLVSYSEDQLLDIETGELISDDEYKESVFKAPYQHFVDTLKSKEFEDSILFSYQVDSKFNRKISDATIYATRQAKVGKDKKDETYVLGKIKDIYALGTKTPSKTGFYKFLDLYNKDKSQFLVYQKDRKTWDEVIEKIMEQYRPFKESDKNGKEVDFNPFEKYRIENGPIRKYSRKGNGPEIKSLKYYASKLGNHIDITPKDSNNKVVLQSVSPWRADVYFNKTTGSYEILGLKYADLQFEKGTGTYRISEEKYNDIKKKEGVDSDSEFKFTLYKNDLLLIKDTETKEQRLFRFLSRSMPNKKHYVELKPYSKDKFEKNESLIEILGSADKSGRCIKGLAKSNLSIFKVRTDVLGNQHIIKNEGDKPKLDF

SEQ ID NO: 571 - protein, 1377 aa, Streptococcus sanguinis
  REGION 1..1377: note = Streptococcus sanguinis SK115
MKKPYSIGLDIGTNSVGWAVITDDYKVPSKKMKVLGNTDKHFIKKNLIGALLFDEGTTAEDRRLKRTSRRRYTRRKNRLRYLQEIFSEEISKLDSSFFHRLDDSFLVPEDKRGSKYPIFATLEEEKEYHKKFPTIYHLRKHLADSKEKTDLRLIYLALAHMIKYRGHFLYEESFDIKNNDIQKIFNEFISIYDNTFEGSSLSGQNAQVEAIFTDKISKSTKRERVLKLFSDEKSTGLFSEFLKLIVGNQADFKKHFDLEEKAPLQFSKDTYDEDLENLLGQIGDGFADLFLVAKKLYDAILLSGILTVTDPSTKAPLSASMIERYENHQEDLAALKQFIKNNLSEKYAEVFSDQSKDGYAGFIDGKTTQEAFYKYIKNLLSKLEGADYFLNKIEREDFLRKQRTFDNGSIPHQIHLQEMNAILRRQGEHYLFLKENREKIEKILAFRIPYYVGPLARGNRDFAWLTRNSDQAIRPWNFEEVVDKASSAEDFINKMTNYDLYLPEEKVLPKHSLLYETFAVYNELTKVKFIAEGLRDYQFLDSGQKKQIVNQLFKDKRKVTEKDIIHYLHNVDGYDGIELKGIEKQFNASLSTYHDLLKIIKDKEFMDNPKNGEILENIIHTLTIFEDREMIKQRLAQYDTLFDEKVIKALTRRHYTGWGKLSAKLINGIRDKQTGKTILEYLIDDGDCNRNFMQLINDDGLSFKEIIQKAQVVGKTDDVKQVVQEIPGSPAIKKGILQSIKIVDELVKVMGHNPESIVIEMARENQTTAKGKKNSQQRYKRIEDALKNLAPGLDSNILKENPTDNIQLQNDRLFLYYLQNGKDMYTGKAIDINQLSNYDIDHIIPQAFIKDDSLDNRVLTSSKDNRGKSDNVPSIEVVQKRKAFWQQLLDSKLISERKFNNLTKAKRGGLDERDKVGFIKRQLVETRQITKHVAQLLDTRFNTEVNEENQKIRTVKIITLKSNLVSNFRKEFGLYKVREINDYHHAHDAYLNAVVAKAILKKYPKLEPEFVYGDYQKYDLKRYILKSKASNTIDKATEKYFFYSNLLNFFKEKVRYADGTIKKRENIEYSNDTGEIAWNKEKDFATIKKVLSLPQVNIVKKTEEQTVGQNGGLFDNNIVSKKKVVDASKLIPIKSSLSPEKYGGYARPTIAYSVLVIADIEKGKGKAKKLKRIKEIVGITIQDKKKFESNPVTYLEECGYKNINSNLIIKLPKYSLFEFNDGQRRLLASSIELQKGNELILPYHLTALLYHAQRINKISEPIHKQYVEAHQNEFKELLTTIISLSKKYIQKPNVELLLQQAFDQADKDIYQLSESFISLLKLTSFGAPGAFKFLGVEISQSSVRYKPNSQFLDTTLIHQSITGLYETRIDLSKLGED

SEQ ID NO: 572 - protein, 1392 aa, Streptococcus sanguinis
  REGION 1..1392: note = Streptococcus sanguinis SK330
MENKNYSIGLDIGTNSVGWAVITDDYKVPSKKMKVFGNTDKHFIKKNLIGALLFDEGATAEDRRLKRTARRRYTRRKNRLRYLQEIFSEEISKLDSSFFHRLDDSFLVPKDKRGSKYPIFATLEEEKEYHKKFPTIYHLRKHLADSKEKTDLRLIYLALAHMIKYRGHFLYEESFDIKNNDIQKIFNEFISIYDNTFEGSSLSGQNAQVEAIFTDKISKSAKRERVLKLFSDEKSTSLFSEFLKLIVGNQADFKKHFDLEEKAPLQFSKDTYDEDLENLLGQIGDGFTDLFLVAKKLYDAILLSGILTVTDPSTKAPLSASMIERYESHQKDLAALKQFIKNNLPKRYNEVFSDQSKDGYAGYIDGKTTQEAFYKYIKNLLSKFEGADYFLDKIEREDFLRKQRTFDNGSIPHQIHLQEMNAILRRQGEHYPFLKENREKIEKILTFRIPYYVGPLARGNRDFAWLTRNSDQAIRPWNFEEIVDKASSAEEFINKMTNYDLYLPEEKVLPKHSLLYETFAVYNELTKVKFIAEGLRDYQFLDSGQKKQIVNQLFKEKRKVTEKDIIHYLHNVDGYDGIELKGIEKQFNASLSTYHDLLKIIKDKEFMDDPKNEEILENIVHTLTIFEDREMIKQRLAQYDSIFDEKVIKALTRRHYTGWGKLSAKLINGICDKQTGDTILDYLIDDGKINRNFMQLINDDGLSFKEIIQKAQVVGKTDDVKQVVQELPGSPAIKKGILQSIKIVDELVKVMGYAPESIVIEMARENQTTARGKKNSQQRYKRIEDSLKNLAPGLDSNILKENPTDNIQLQNDRLFLYYLQNGKDMYTGKPLDIDQLSSYDIDHIIPQAFIKDDSIDNRVLTSSKDNRGKSDNVPSLEVVQKRKAFWQQLLDSKLISERKFNNLTKAERGGLDERDKVGFIRRQLVETRQITKHVAQILDASFNTEVNEKNQKIRTVKIITLKSNLVSNFRKEFELYKVREINDYHHAHDAYLNAVVAKAILKKYPKLEPEFVYGDYQKYDLKRYISRFKPSKEIEKATEKYFFYSNLLNFFKEEVHYADGIIVKRENIEYSKDTGEIAWNKEKDFATIKKVLSYPQVNIVKKTEIQTHGLDRGKPKGLFNSNPSPKPSEDSKENLVPIKQGLDPRKYGGYAGISNSYAVLVKAIVEKGAKKQQKTILEFQGISILDKINFENNKENYLLKKRYIEILSTITLPKYSLFEFPDGTRRRLASILSTNNKRGEIHKGNELVLPGKYTTLLYHAKNINKKLEPEHLEYVEKHRNDFAKLLECVLNFNDKYVGALKNGERIRQAFTDWETVDIEKLCFSFIGPENSKNAGLFELTSQGSASDFEFLGVKIPRYRDYAPSSLLKATLIHQSITGLYETRIDLSKLGED

SEQ ID NO: 573 - protein, 1370 aa, Streptococcus sanguinis
  REGION 1..1370: note = Streptococcus sanguinis SK353
MKKPYSIGLDIGTNSVGWAVVTDDYKVPAKKMRVFGDTDRSHIKKNLLGTLLFDDGNTAESRRLKRTARRRYTRRRNRILYLQEIFTESMNEIDESFFHRLDDSFLVPEDKRGSKYPIFATLQEEKEYHKQFPTIYHLRKQLADSKEKSDVRLIYLALAHMIKYRGHFLYEETFDIKNNDIQKIFNEFINIYDNTFEGSSLSGQNAQVEAIFTDKISKSAKRERVLKLFPDEKSTGLFSEFLKLIVGNQADFKKHFDLEEKAPLQFSKDTYDEELENLLGQIGDDFADLFLIAKKLYDAILLSGILTVTDPSTKAPLSASMIERYENHQKDLAALKQFIKNNLPEKYVEVFSDQSKDGYAGYIDGKTTQEAFYKYIKNLLSKFEGADYFLDKIEREDFLRKQRTFDNGSIPHQIHLQEMNAILRRQGEHYPFLKENREKIEKILTFRIPYYVGPLARDNRDFSWLTRNSDEPIRPWNFEEVVDKARSAEDFIHRMTNYDLYLPEEKVLPKHSLLYETFAVYNELTKVKFIAEGLRDYQFLDSGQKKQIVNQLFKEKRKVTEKDIIHYLHNVDGYDGIELKGIEKQFNANLSTYHDLLKITKDKEFMDDPKNEEILENIVHTLTIFEDREMIKQRLAQYDTLFDEKVIKALTRRHYTGWGKLSAKLINGIRDKQSGKTILDYLIDDDKINRNFMQLINDDGLSFKEIIQKAQVVGKTDDVKQVVQELPGSPAIKKGILQSIKIVDELVKVMGYALESIVIEMARENQTTARGKKNSQQRYKRIEDALKNLAPGLDSNILKENPTDNIQLKNDRLFLYYLQNGKDMYTGKPLDINQLSSYDIDHIIPQAFIKDDSIDNRVLTSSKDNRGKSDNVPSLEVVQKRKAFWQQLLDSKLISERKFNNLTKAERGGLDERDKVGFIRRQLVETQQITKNVAQILDARFNTEVKEKNQKIRTVKIITLKSNLVSNFRKEFGLYKVREINNYHHAHDAYLNAVVAKAILKKYPKLEPEFVYGDYQKYDLKKYISRFKPSKEIEKATEKYFFYSNLLNFFKEEVLYADGTIRKRENIEYSKDTGEIAWDKEKDFATIKKVLSYPQVNIVKKREVQTGGFSKESILPKGNSDKLIPRKTKDILWDTTKYGGFDSPVIAYSILLIADIEKGKAKKLKTVKTLVGITIMEKAAFEENPITFLENKGYHNVRKENILCLPKYSLFELENGRRRLLASAKELQKGNEIVLPVCLTTLLYHSKNLHKLDEPEHLEYIQKHRNEFKDLLNLVSEFSQKYILAEANLEKIKDLYADNEQADIEILANSFINLLTFTALGAPAAFKFFGKDVDRKRYTTVSEILNATLIHQSITGLYETRIDLSKLGEE

SEQ ID NO: 574 - protein, 1421 aa, Streptococcus sanguinis
  REGION 1..1421: note = Streptococcus sanguinis SK49
MTKFNKNYSIGLDIGVSSVGYAVVTEDYRVPAFKFKVLGNTEKEKIKKNLIGSTTFVSAQPAKGTRVFRVNRRRIDRRNHRITYLRDIFQKEIEKVDKNFYRRLDESFRVLGDKSEDLQIKQPFFGDKELETAYHKKYPTIYHLRKHLADADKNSPVADIREVYMAISHILKYRGHFLTLDKINPNNINMQNSWIDFIESCQEVFDLEISDESKNIADIFKSSENRQEKVKKILPYFQQELLKKDKSIFKQLLQLLFGLKTKFKDCFELEEEPDLNFSKENYDENLENFLGSLEEDFSDVFAKLKVLRDTILLSGMLTYTGATHARFSATMVERYEEHRKDLQRFKFFIKQNLSEQDYLDIFGRKTQNGFDVDKETKGYVGYITNKMVLTNPQKQKTIQQNFYDYISGKITGIEGAEYFLNKISDGTFLRKLRTSDNGAIPNQIHAYELEKIIERQGKDYPFLLENKDKLLSILTFKIPYYVGPLAKGSNSRFAWIKRATSSDILDDNDEDTRNGKIRPWNYQKLINMDETRDAFITNLIGNDIILLNEKVLPKRSLIYEEVMLQNELTRVKYKDKYGKAHFFDSELRQNIINGLFKNNSKRVNAKSLIKYLSDNHKDLNAIEIVSGVEKGKSFNSTLKTYNDLKTIFSEELLDSEIYQKELEEIIKVITVFDDKKSIKNYLTKFFGHLEILDEEKINQLSKLRYSGWGRYSAKLLLDIRDEDTGFNLLQFLRNDEENRNLTKLISDNTLSFEPKIKDIQSKSTIEDDIFDEIKKLAGSPAIKRGILNSIKIVDELVQIIGYPPHNIVIEMARENMTTEEGQKKAKTRKTKLESALKNIENSLLENGKVPHSDEQLQSEKLYLYYLQNGKDMYTLDKTGSPAPLYLDQLDQYEVDHIIPYSFLPIDSIDNKVLTHRENNQQKLNNIPDKETVANMKPFWEKLYNAKLISQTKYQRLTTSERTPDGVLTESMKAGFIERQLVETRQIIKHVARILDNRFSDTKIITLKSQLITNFRNTFHIAKIRELNDYHHAHDAYLAVVVGQTLLKVYPKLAPELIYGHHAHFNRHEENKATLRKHLYSNIMRFFNNPDSKVSKDIWDCNRDLPIIKDVIYNSQINFVKRTMIKKGAFYNQNPVGKFNKQLAANNRYPLKTKALCLDTSIYGGYGPMNSALSIIIIAERFNEKKGKIETVKEFHDIFIIDYEKFNNNPFQFLNDTSENGFLKKNNINRVLGFYRIPKYSLMQKIDGTRMLFESKSNLHKATQFKLTKTQNELFFHMKRLLTKSNLMDLKSKSAIKESQNFILKHKEEFDNISNQLSAFSQKMLGNTTSLKNLIKGYNERKIKEIDIRDETIKYFYDNFIKMFSFVKSGAPKDINDFFDNKCTVARMRPKPDKKLLNATLIHQSITGLYETRIDLSKLGED

SEQ ID NO: 575 - protein, 1026 aa, Streptococcus sp.
  REGION 1..1026: note = Streptococcus sp. BS35b
MNGLVLGLDIGIASVGVGILEKNSGKIIHANSRLFPAATADNNVERRKNRQARRLNRRKKHRGVRFQDLFEDYGLLTDFSKVSINLNPYRLRVDGLNQQLTNEELFIALKNIVKRRGISYLDDASEDGGAVSSDYGKAVEENRKLLAEQTPGQIQLERFEKYGQVRGDFTVVENGEKRRLINVFSTSAYRKEAEKILRKQQEFNNQITDEFIEDYLKILTGKRKYYHGPGNEKSRTDYGRFRTDGTTLDNIFGVLIGKCTFYPNEYRASKSSYTAQEFNLLNDLNNLTVPTETKKLSEEQKKVIVEYAKEAKTLGASTLLKYIVKMIDASVDQISGYRVDVNNKPEMHTFEVYRKMQSLETISVGELSRNVLDELAHILTLNTEREGIEEAINSKLMGVFSQDQVLELVQFRKNNSSLFSKGWHNFSLKLMMELIPELYETSEEQMTILTRLGKQKSKETSKRTKYIDEKELTEEIYNPVVAKSVRQAIKIINEATKKHGIFDNIVIEMARENNEEDAKKDYIKRQKANQDEKNAAMEKAAFQYNGKKELPGNIFNGHKELATKIRLWHQQGEKCLYTGKTIPISDLIHNQYKYEIDHILPLSLSFDDSLSNKVLVHATANQEKGQRTPFQALDSMDDAWSYREFKSYVKDLKSLSNKKKDYLLTEEDISKIEVKQKFIERNLVDTRYSSRVVLNALQDFYKSHQFDTTISVVRGQFTSQLRRKWGLEKSRETYHHHAVDALIIAASSQLRLWKKQNNPLITYKEGQFIDSQTGEIISLTDDEYKELVFKAPYDHFVDTLHSKTFEDGILFSYQVDSKYNRKISDATIYATRKAKLDKDKSEETYVLGKIKDIYSQAGYDAFIKIYNKDKRKFLMYHKDPQTFEKVIEEILRTYPSKERNDKNKEVPCNPFEKYRQENGPIRKYSKKGNGPEIKCLKYYDNKLGNYIDISPDGSDNQVVLQSLKPWRTDVYFNHQTKKYELMGLKYSDLSFEKGSGKYSISNEKYNSIKRIEGVNEQSEFKFTLYK

SEQ ID NO: 576 - protein, 1139 aa, Streptococcus sp.
  REGION 1..1139: note = Streptococcus sp. C150
MSDLVLGLDIGIGSVGVGILNKVTGEIIHKNSRIFPAAQAENNLERRTNRQGRRLTRRKKHRRVRLNHLFEESGLITDFTKVSINLNPYQLRVKGLTAELSNEELFIALKNMVKHRGISYLDDASDDGNSSVGDYAQIVKENSKQLETKTPGQIQLERYQKYGQLRGDFTVEEDGRKHRLINVFPTSAYHAEALRILQTQQEFNPQITDEFINSYLEILTGKRKYYHGPGNEKSRTDYGKYTTKKDAQGQYITLNNIFGILIGKCTFYPEEYRAAKASYTAQEFNLLNDLNNLTVPTETKKLSEEQKYQIITYVKNEKAMGPAKLFKYIAKLLSCDVADIKGYRIDKSDKAEIHTFEAYRKMKTLETLDVKKMAREELDKLAYVLTLNTEREGIQEALDHEFADGTFSQEQVDELVQFRKANSSIFGKGWHSFSVKLMMELIPELYATSEEQMTILTRLGKQKTTSSSNKTKYIDEKQLTEEIYNPVVAKSVRQAIKIVNAAIKKYGDFDNIVIEMARETNEDDEKKAIQKIQKANKAEKDAAMRKAANQYNGKAELPHSVFHGHKQLATKIRLWHQQGERCLYTGKTISIHDLINNPNQFEIDHILPLSITFDDSLANKVLVYATANQEKGQRTPYQALDSMDDAWSFRELKAFVRESKALSNKKKEYLLTEEDISKFDVRKKFIERNLVDTRYASRVVLNALQEHFRTHKIDTKVSVVRGQFTSQLRRHWGIEKTRDTYHHHAVDALIIAASSQLNLWKKQKNTLVSYSEDQLLDIETGELISDDEYKESVFKAPYQHFVDTLKSKEFEDSILFSYQVDSKFNRKISDATIYATRKAKLDKEKKEYTYTLGKIKDIYALGTKTPSKTGFYKFLDLYKKDKSQFLMYQKDRRTWDEVIEKILEQYRPFKEKDKNGKEVDFNPFEKYRIENGPIRKYSRKGNGPEIKSLKYYDNLLGRFVDITPSESKNPVALLSLNPWRTDVYYNTETRKYEFLGLKYADLCFEKGGSYGISKVKYNKIREKEGIGKNSEFKFTLYKNDLILIKDTETNRQQIFRFWSRTGKDNPKSFEKHKLELKPYEKTRFEKGEELKVLGKVPPSSNRLQKNMQIENLSIYKVRTDVLGNQHIIKNEGDKPKLDF

SEQ ID NO: 577 - protein, 1377 aa, Streptococcus sp.
  REGION 1..1377: note = Streptococcus sp. C300
MNNKPYSIGLDIGTNSVGWSVITDDYKVPSKKMKVLGNTDKRFIKKNLIGALLFDEGTTAEARRLKRTARRRYTRRKNRLRYLQEIFAEEMSKVDSSFFHRLDDSFLIPEDKRGSKYPIFATLVEEKEYHKQFPTIYHLRKQLADSKEKADLRLIYLVLAHMIKYRGHFLYEEAFDIKNNDIQKIFNEFISIYDNTFEGSSLSGQNAQVETIFTDKISKSAKRERVLKLFPDEKSTGLFSEFLKLIVGNQADFKKHFDLEEKAPLQFSKDTYDEDLENLLEQIGDDFADLFVAAKKLYDAILLSGILTVTDPSTKAPLSASMIERYENHQKDLAVLKQFIKTNLPEKYVEVFSDQSKDGYAGYIDGKTTQEAFYKYIKNLLSKFDGADYFLDKIEREVFLRKQRTFDNGSIPHQIHLQEMNTILRRQGEHYPFLKENKEKIEKILTFRIPYHVGPLARGNRDFAWLTRNSDQAIRPWNFEEIVDKASSAEDFINKMTNYDLYLPEEKVLPKHSLLYETFAVYNELTKVKFIAEGMRDYQFLDSGQKKKIINQLFKKKRKVTEDDIIDCLQKIDNYDGIELKGIEKQFNASLSTYHDILKIIRDKEFMDDPKNGDILENVIHTLTIFEDREMIKQRLAQYNSIFDEKVIKALSRKHYTGWGKLSAKLIDGIRDKQTGKTILDYLMDDGKSNRNFMQLIKDDELSFTEIIQKAQVVGDTDNLRQVVQNLPGSPAIKKGILQSIKIVDELVKVMGHAPESIVIEMARENQTTARGKKNSQQRYKRIEDSLKNLASGLDSNILKENPTDNIQLQNDRLFLYYLQNGKDMYTGEALNINQLSSYDIDHIIPQAFIKDDSLDNRVLTSSKDNRGKSDNVPSLEVVEKMKAFWQQLLDSKLISERKYNNLTKAERERGGLNELDKVGFIKRQLVETRQITKHVAQILDARFNKEVTEKNKKNRNVKIITLKSNMVSNFRKEFGLYKVREINDYHHAHDAYLNAVVAKAILKKYPKLEPEFVYGDYQKYDLKRYISRSKDPKEVEKATEKYFFYSNLLNFFKEEVHYADGTIVKRENIEYSKDTGEIAWNKEKDFATIKKVLSLPQVNIVKKTEEQTVGQNGGLFDNNIVSKKKVVDASKLIPIKSGLSPEKYGGYARPTIAYSVLVTYKQNNKIKNTMVGIPVLTKLEFERDPNLYLRNLGINNVSHVIKLVKYTVLEFKHKYGTYRRFIVSNQELKRANQIFVTTKQMKLISQYTTLDKNEHDSLLKNNQQLIQSIWNQFLEFMLATDLVNKKQYDELILTNNQTIEECRNIMNRVITTLSFTNINAGQKKIIFDDTLSLPIKRWQFTDSDKMVKKIIESTLIHQSITGLYETRIDLSKLGED

SEQ ID NO: 578 - protein, 1371 aa, Streptococcus sp.
  REGION 1..1371: note = Streptococcus sp. F0441
MENKNYSIGLDIGTNSVGWSVITDDYKVPSKKMKVLGNTDKHFIKKNLIGALLFDEGTTAEARRLKRTARRRYTRRKNRLRYLQEIFSEEIGKVDSSFFHRLDDSFLIPEDKRGSKYPIFATLAEEKKYHKQFPTIYHLRKQLADSKEKTDLRLIYLALAHMIKYRGHFLYEEAFDIKNNDIQKIFNEFISIYNNTFEGNSLSGQNVQVEAIFTDKISKSAKRERVLKLFPDEKSTGLFSEFLKLIVGNQADFKKHFDLEEKAPLQFSRDTYDEDLENLLGQIGDDFADLFLVAKKLYDAILLSGILTVTNPSTKAPLSASMIERYENHQKDLASLKQFIKNNLPEKYDEVFSDQSEDGYAGYIDGKTTQETFYKYIKNLLSKFEGADYFLDKIEREDFLRKQRTFDNGSIPHQIHLQEMNAILRRQGEHYPFLKENKEKIEKILTFRIPYYVGPLARGNRDFAWLTRNSDQAIRPWNFEEIVDKASSAEDFINKMTNYDLYLPEEKVLPKHSLLYETFAVYNELTKVKFIAEGLRDYQFLDSGQKKQIVTQLFKEKRKVTEKDIIQFLHNVDGYDGIELKGIEKQFNASLSTYHDLLKIIKDKAFMDDAKNEAILENIVHTLTIFEDREMIKQRLAQYDSLFDEKVIKALTRRHYTGWGKLSAKLINGISDKQTGNTILDYLIDDGEINRNFMQLINDDGLSFKEIIQKAQVVGKTNDVKQVVQELPGSPAIKKGILQSIKIVDELVKVMGHAPESIVIEMARENQTTARGKKNSQQRYKRIEDSLKILASGLNSKILKEHPTDNIQLQNDRLFLYYLQNGKDMYTGEALDINQLSSCDIDHIIPQAFIKDDSLDNRVLTSSKDNRGKSDNVPSLEVVDKMKVFWQQLLDSKLISYRKFNNLTKAERGGLNELDKVGFIKRQLVETRQITKHVAQILDARFNKEVTEKDKKNRTVKIITLKSNLVSNFRKEFELYKVREINDYHHAHDAYLNAVVAKAILKKYPKLEPEFVYGDYQKYDLKRYISRSKDPKEIEKATEKYFFYSNLLNFFKEEVHYADGTIVKRENIEYSKDTGEIAWNKEKDFATIKKVLSLPQVNIVKKREVQTGGFSKESILPKGNSDKLIPRKTKDILWDTTKYGGFDSPVIAYSILLIADIEKGKAKKLKTVKTLVGITIMEKDAFEKNPIAFLENKGYHNVCKENILCLPKYSLFELENGRRRLLASAKELQKCNEIVLPVYLTTLLYHSKNVHKLDEPGHLEYIQKHRNEFKDLLNLVSEFSQKYVLADANLEKIKNLYADNEQADIEILANSFINLLTFTALGAPAAFKFFGKDVDRKRYTTVSEILNATLIHQSITGLYETRIDLSKLGED

SEQ ID NO: 579 - protein, 1121 aa, Streptococcus sp.
  REGION 1..1121: note = Streptococcus sp. GMD6S
MNGLVLGLDIGIASVGVGILEKNSGKIIHANSRLFPAATADNNVERRKNRQARRLHRRKKHRGVRFQDLFEDYGLLTDFSKVSINLNPYRLRVDGLNQQLTNEELFIALKNIVKRRGISYLDDASEDGGTVSSDYGKAVEENRKLLAEQTPGQIQLERFEKYGQVRGDFTVVENGEKRRLINVFSTSAYRKEAERILRKQQEFNSKITDEFIEDCLKILTGKRKYYHGPGNEKSRTDYGRFRTDGTTLDNIFGILIGKCTFYPDEYRASKASYTAQEFNLLNDLNNLTVPTETKKLSEEQKKVIVEYAKEAKTLGASTLLKYIAKMIDASVDQIRGYRVDVNNKPEIHTFEAYRKMQSLETISVGELSRNVLDELAHILTLNTEREGIEEAINTKLKDSFSQDQVLELVQFRKNNSSLFSKGWHNFSLKLMMELIPELYETSEEQMTILTRLGKQKSKEISKRTKYIDEKELTEEIYNPVVAKSVRQAIKIINEATKKHGIFDNIVIEMARENNEEDAKKDYIKRQKANQDEKNAAMEKAAFQYNGKKELPDSIFHGQKELATKIRLWHQQGEKCLYTGKNIPISDLIHNQYKYEIDHILPLSLSFDDSLSNKVLVLATANQEKGQRTPFQALDSMDDAWSYREFKSYVKESKLLGNKKKEYLLTEEDISKIEVKQKFIERNLIDTRYSSRVVLNALQDFYKAHKFDTTISVVRGQFTSQLRRKWGLEKSRETYHHHAVDALIIAASSQLRLWKKQNNPLIAYKEGQFVDSETGEIISLSDDEYKELVFKAPYDHFVDTLSSKTFEDSILFSYQVDSKFNRKISDATIYATRKAKLDKEKSEETYVLGKIKDIYSQAGYDAFIKIYNKDKSKFLMYHKDPQTFEKVIEEILRTYPSKELNDKNKEIPCNPFEKYRQENGPIRKYSKKSNGPEIKSLKYYDNKLGNHIDITPESSDNQVVLQSLKPWRTDVYFNHQTKKYELMGLKYSDLSFEKGSGKYSISNQKYNSIKRIEGIDEQSEFKFTLYKNDLILIKDSENNEQKLFRFNSRNDTAKHYIELKPYDKAKFDGEQELITILGNVAKGGRCLKGLNKSNISIFKVKTDVLGKKHIIKKEGDEPKLKF

SEQ ID NO: 580 - protein, 1375 aa, Streptococcus sp.
  REGION 1..1375: note = Streptococcus sp. M334
MSNKSYSIGLDIGTNSVGWAVITDDYKVPSKKMKVLGNTDKHFIKKNLIGALLFDEGTTAEDRRLKRTARRRYTRRKNRLRYLQEIFSQEISKVDSSFFHRLDDFFLVPEDKRGSKYPIFATLVEEKEYHKKFPTIYHLRKHLADSKEKTDLRLIYLALAHMIKYRGHFLYEESFDIKNNDIQKIFSEFISIYDNTFEGKSLSGQNAQVEAIFTDKISKSTKRERVLKLFPDEKSTGLFSEFLKLIVGNQADFKKHFDLEEKAPLQFSKDTYDEDLENLLGQIGDDFADLFLVAKKLYDAILLSGILTVKDLSTKAPLSASMIERYENHQKDLAALKQFIQNNLQEKYDEVFSDQSKDGYAGYIDGKTTQEAFYKYIKNLLSKFEGADYFLDKIEREDFLKKQRTFDNGSIPHQIHLQEMNAIIRRQGEHYPFLQENKEKIEKILTFRIPYYVGPLARGNGDFAWLTRNSDQAIRPWNFEEIVDQASSAEDFINKMTNYDLYLPEEKVLPKHSLLYETFAVYNELTKVKFIAEGLTRYQFLDKKQKKDIFDTFFKAENKRKVTEKDIIHYLHNVDGYDGIELKGIEKQFNASLSTYHDLLKIIKDKAFMDDSKNEEILENIIHTLTIFEDREMIKQRLAQYDSLFDEKVIKALTRRHYTGWGKLSAKLINGIRDKKSGKTILDYLIDDGEINRNFMQLIHDDGLSFKEIIQKAQVFGKTNDVKQVVQELPGSPAIKKGILQSIKIVDELVKVMGHAPESIVIEMARENQTTARGKKNSQQRYKRIEDSLKNLASGLDSNILKENPTDNIQLQNDRLFLYYLQNGRDMYTGKPLEINQLSNYDIDHIIPQAFIKDDSLDNRVLTSSKDNRGKSDNVPSLEVVEKMKAFWQQLLDSKLISERKFNNLTKAERERGGLNELDKVGFIKRQLVETRQITKHVAQFLDARFNKEVTEKDKKNRNVKIITLKSNLVSNFRKEFGLYKVREINDYHHAHDAYLNAVLAKAILKKYPKLEPEFVYGDYQKYDLQRYISKSREPKEVEKATQKYFFYSNLLNFFKEEVHYADGTIVKRENIEYSKDTGEIAWNKEKDFATVKKVLSLPQVNIVKKTEVQTGGFSKESILPKGNSDKLIPRKTKEILWDTTKYGGFDSPVIAYSILLIADIEKGKAKKLKTVKTLVGITIMEKATFEKNPITFLENKGYHNVRKENILCLPKYSLFELESGRRRMLASAKELQKGNEIVLPVYLTTLLYHSKNVHKLDEPEHLEYIQKHRYEFKDLLNLVSEFSQKYVLADANLEKIKNLYADNEQADIEILANSFINLLTFTALGAPAAFKFLGKDVDRKRYTTVSEILNATLIHQSITGLYETRIDLSKLGED

SEQ ID NO: 581 - protein, 1371 aa, Streptococcus sp.
  REGION 1..1371: note = Streptococcus sp. oral taxon 056 str. F0418
MNNNNYSIGLDIGTNSVGWAVITDDYKVPSKKMRVLGNTDKRFIKKNLIGALLFDEGTTAEDRRLKRTARRRYTRRKNRLRYLQEIFAEEMSKVDSSFFHRLDDSFLVPEDKSGSKYPIFATLAEEKEYHKKFPTIYHLRKHLADSKEKADLRLIYLALAHITKYRGHFLYEEAFDIKNNDIQKIFNEFINIYDNTFEGSSLSGQNAQVEAIFTGKISKSVKREHVLKLFPDEKSTGLFSEFLKLIVGNQADFKKHFDLEEKASLQFSKDTYDEDLENLLGQIGDDFADLFLVAKKLYDAILLSGILTVTDPSTKAPLSASMIERYENHQEDLAALKQFIKNNLPEKYAEVFSDQSKDGYAGYIDGKTTQEAFYKYIKNLLSKFEGADYFLDKIEREDFLRKQRTFDNGSIPHQIHLQEMNAILRRQGEHYPLLKENKEKIEKILTFRIPYYVGPLARGNRDFAWLTRNSDQAIRPWNFEEIVDKASSAESFINKMTNYDLYLPEEKVLPKHSLLYETFAVYNELTKVKFIAEGLRDYQFFDSGQKKQIVNQLFKEKRKVTEKDIIHYLHNVDGYDGIELKGIEKQFNASLSTYHDLLKIIKDKEFMDNHKNQEILENIVHTLTIFEDREMIKQRLAQYDSIFDEKVIKALTRRHYTGWGKLSAKLINGICDKKTGKTILDYLIDDGYNNRNFMQLINDDGLSFKEIIQKAQVVGKTDDLTQVVRELSGSPAIKKGILQSIKIVDELVKIMGYAPESIVIEMARENQTTAKGKKNSQQRYKRIEDALKNLAPGLDSTISKENPTDNIQLQNDRLFLYYLQNGKDMYTGEALDINQLSSYDIDHIIPQAFIKDDSLDNRVLTSSKDNRGKSDNVPSLEVVKKRKAFWQQLLDSKLISERKFNNLTKAERGGLDERDKVGFIKRQLVETRQITKHVARILDARFNTEVSEKNQKIRSVKIITLKSNLVSNFRKEFKLYKVREINDYHHAHDAYLNAVVAKAILKKYPKLEPEFVYGDYQKYDLKRYISKSKDPKEVEKATEKYFFYSNLLNFFKEEVHYADGTIVKRENIEYSKDTGEIAWNKEKDFVTIKKVLSYPQVNIVKKREVQTGGFSKESILPKGNSDKLIPRKTKDILWDTTKYGGFDSPVIAYSILLIADIEKGKAKKLKTVKTLVGITIMEKAAFEKNPITFLENKGYHNVRKENILCLPKYSLFELENGRRRLLASAKELQKGNEIVLPVYLTTLLYHSKNVHKLDEPEHLEYIQKHRYEFKDLLNLVSEFSQKYVLAEANLEKIKSLYVDNEQADIEILANSFINLLTFTALGAPAAFKFFGKDVDRKRYTTVSEILNATLIHQSITGLYETRIDLSKLGED

SEQ ID NO: 582 - protein, 1420 aa, Streptococcus sp.
  REGION 1..1420: note = Streptococcus sp. oral taxon 071 str. 73H25AP
MAKFNKNYSIGLDIGVSSVGYAVVTEDYRVPAFKFKVLGNTEKEKIKKNLIGSTTFVPAQSAQGTRVFRVNRRRIDRRNHRIAYLRDIFQKEIEKIDKNFYRRLDESFRVLGDKSEDIQIKQPFFGNKELETAYHKKYPTIYHLRKHLADADKNSPVADIREVYMVLSHILKYRGHFLTLGKIDPNNINMQNSWIDFIESCQDAFDLEISDESKTIAAIFKSSENRQEKVKQILSYFQQELLKKDKSIFKQLLQLLFGLKTKFKDCFELEEEPDLNFSKENYDENLENLLGALEEDFSDVFAKLKILRDTILLSSMLTYTGATHARFSATMVERYEEHRKDLQRFKSFVKQNLSEQDYLDIFGRKTPTGFDVDKETKGYVGYISNKMVLTNPQKQKTIQQNFYDYISGKITGIEGAECFLNKISDGTFLRKLRTTDNGAIPNQIHAYELEKIIERQGRDYPFLLENKDKLLSILTFKIPYYVGPLAKGNNSRFAWIKRTTSQDVLDDNDEDTRNGKIRPWNYHKLINMDETRDAFIINLIGNDIILLNEKVLPKRSLIYEEVMLQNELTRVKYKDKYGKIHFFNSELRQEIINNLFKTNSKRVSSAMLLSYLENFTNLQAVEIVSGIEKGKSLNSTLKTYNDLKTIFSEELLDSEIYQKELEEIIKVITVFDDKKSIKNYLTKYFGHLEFLNEEKINQLSKLRYTGWGRYSGKLLLGIRDEDTGFNLMQFLRNDDENRNLTQLISDTTLSFDSAIKAIQSKSTVEDDVFEEIKNLAGSPAIKRGILNSIKIVDELVQIIGYPPQNIIIEMARENMTTEEGQKKAKTRKSKLESALKNIEDSVLESGKVPHSDEQLQSEKLYLYYLQNGKDMYSLDKTGSPTPLYRDQLDQYEVDHIIPYSFLPIDSIDNKVLTHRENNQRKLNNIPDKETVANMKPFWEKLYNAKLISQTKYQRLTTSERTPDGVLTESMKAGFIERQLVETRQIIKHVARILDNRFSDTKIITLKSQLVTNFRNTFHIAKIRELNDYHHAHDAYLAVVVGQTLLKAYPKLAPELIYGHHAHFNRHEENKATLRKHLYSNIMRFFNNPDSKVSKDIWDCNRDLPIVKDVIYNSQINFVKRTMIKKGAFYNQNPVGKLNKQIAANNRYPLKTKVSSLDTSIYGGYGPMNSALSIIIIAERFNEKKGKIETVKEFHDIFIIDYEKFNNNPFQFLNNVSEEGFLKKNDLNRVLAFYRISKYSLMQKIDGTRMLFESKSNLHKVTQFKLTKTQNELFFHMKRLLTKSNLMDLKSESAIKESQNFIQTHQNEFDNIADRLSNYSQKMLGETKSLQTLINGYNERPIKQIDNNEETIRYYYDNFIKMFSFVKSGAPKDIINFFNDKYTVPRMRPKPDRKMLDATLIHQSITGLYETRIDLSKLGED

SEQ ID NO: 583 - protein, 1122 aa, Streptococcus suis
  REGION 1..1122: note = Streptococcus suis 89/1591
MSNGKILGLDIGIASVGVGVIDAQTGEIIHASSRIFPSANAANNAERRTFRGSRRLIRRKKHRIKRLDDLFNDFHINLDGEMSTDNPYVLRVKGLSQKLTVEELYISIKNIMKRRGISYLDDAESDNEAGRSDYAKAIERNRQLLTSKTPGEIQLERLEKYGQLRGNFTIIDEEGQSQQIINVFSTSDYVKEVEKILDCQKMYHKFISDEFCDKLIELLREKRKYYVGPGNEKSRTDYGIYRTDGTTLENLFGILIGKCTFYPDQYRSSRASYTAQEFNFLNDLNNLTVPTETKKLSQEQKEFLVNYAKETSVLGAGKILQQIAKLADCKVEDIRGYRLDNKDKPELHTFETYRAMKGLVPLVDIGVLSREQLDILADILTLNTDFEGIREALKKQLPNVFDEKQVKGLASFRKSKSQLFAKGWHNLSQKIMLEVIPELYATSDEQMTILTRLGKFEKSSVAEYPSSINVDEITDEIYNPVVAKSIRQTIKIINASIKKWGEFDQIVIEMPRDRNEDEEKKRIADGQKANAKEKADSILRAAELYCAGKVLPDYVYNGHNQLATKIRLWYQQGERCIYTGQPISIHDLIHNQNQYEIDHILPLSLTFDDSLSNKVLVLATANQEKAQRTPYNYLKSATSAWSYREFKDYVTKRKGIGKKKCEYLTFEEDINGFEVRSKFIQRNLVDTRYASKVILNALQDYFKISGIQTKVSVVRGQFTSQLRHKWGIEKTRETYHHHAVDALIIAASSQLRLWKKQESPLVVDYQEGRQVDLETGEILELTDEQYKELVYQPPYQGFVNTISSSAFDNEILFSYQVDSKVNRKISDATIYATRNAQLGKDKTEGIYVLGKIKDIYTQAGYEAFLKRYTKDKTSFLMYHKDLDTWEKVIEIILRDYREYDEKGKEIGNPFERYRRENGYVKKYSRKGNGTAIKSLKYYDNKLGNHIDITPENSRNAVVLQSLKPWRTDVYFNKETGKYEFLGIKYSDLSFEKGTGEYGISQEKYDSIKIAEGVAKKSIFKFTLYKQDLLFIKDIENNFGKLLRFTSKNDTSKHYVELKPYDKNKFGTEEPLLPVLGNVAKSGQCIKGLNKSNISIYKVRTDILGYRHFIKQEGEHPQLKFKK

SEQ ID NO: 584 - protein, 1122 aa, Streptococcus suis
MSNGKILGLDIGIASVGVGVIDAQTGEIIHASSRIFPSANAANNAERRTFRGSRRLIRRKKHRIKRLDDLFNDFHINLDGEMSTDNPYVLRVKGLSQKLTVEELYISIKNIMKRRGISYLDDAESDNEAGRSDYAKAIERNRQLLTSKTPGEIQLERLEKYGQLRGNFTIIDEEGQSQQIINVFSTSDYVKEVEKILDCQKMYHKFISDEFCDKLIELLREKRKYYVGPGNEKSRTDYGIYRTDGTTLENLFGILIGKCTFYPDQYRSSRASYTAQEFNFLNDLNNLTVPTETKKLSQEQKEFLVNYAKETSVLGAGKILQQIAKLADCKVEDIRGYRLDNKDKPELHTFETYRAMKGLVPLVDIGVLSREQLDILADILTLNTDFEGIREALKKQLPNVFDEKQVKGLASFRKSKSQLFAKGWHNLSQKIMLEVIPELYATSDEQMTILTRLGKFEKSSVAEYPSSINVDEITDEIYNPVVAKSIRQTIKIINASIKKWDEFDQIVIEMPRDRNEDEEKKRIADGQKANAKEKADSILRAAELYCAGKVLPDYVYNGHNQLATKIRLWYQQGERCIYTGQPISIHDLIHNQNQYEIDHILPLSLTFDDSLSNKVLVLATANQEKAQRTPYNYLKSATSAWSYREFKDYVTKRKGIGKKKCEYLTFEEDINGFEVRSKFIQRNLVDTRYASKVILNALQDYFKISGIQTKVSVVRGQFTSQLRHKWGIEKTRETYHHHAVDALIIAASSQLRLWKKQESPLVVDYQEGRQVDLETGEILELTDEQYKELVYQPPYQGFVNTISSSAFDNEILFSYQVDSKVNRKISDATIYATRNAQLGKDKTEGIYVLGKIKDIYTQAGYEAFLKRYTKDKTSFLMYHKDLDTWEKVIEIILRDYREYDEKGKEIGNPFERYRRENGYVKKYSRKGNGTAIKSLKYYDNKLGNHIDITPENSRNAVVLQSLKPWRTDVYFNKETGKYEFLGIKYSDLSFEKGTGEYGISQEKYDSIKIAEGVAKKSIFKFTLYKQDLLFIKDIENNFGKLLRFTSKNDTSKHYVELKPYDKNKFGTEEPLLPVLGNVAKSGQCIKGLNKSNISIYKVRTDILGYRHFIKQEGEHPQLKFKK

SEQ ID NO: 585 - protein, 1381 aa, Streptococcus suis
MVKKKYAIGIDIGTNSVGWSIVTDDYKVPSKKMKVFGNTEKRYIKKNLLGTLLFDEGNTAENRRLKRTARRRYTRRRNRILYLQEIFAEEINKIDDSFFQRLDDSFLIVEDKQGSKHPIFGTLQEEKEYHKQFPTIYHLRKQLADSSQKADIRLIYLALAHIIKYRGHFLFEGDLKSENKDVQHLFNDFVEMFDKTVEGSYLSENLPNVADVLVEKVSKSRRLENILHYFPNEKKNGLFGNFLALALGLQPNFKTNFELAEDAKIQFSKETYEEDLEELLGKIGDDYADLFIATKSLYDGILLAGILSTTDSTTKAPLSSSMVNRYEEHQKDLALLKNFIHQNLSDSYKEVFNDKLKDGYAGYIEGKTTQENFYRFIKKAIEKIEGSNYFIDKIDREDFLRKQRTFDNGSIPHQIHLQEMHAIIRRQAEFYPFLVENQDKIEKILTFRIPYYVGPLARGKSEFAWLNRKSDEKIRPWNFDEMVDKETSAENFITRMTNYDRYLPDQKVLPKHSLLYEKFAVYNELTKVKFIAEGMRDYQFLDSGQKKDIVKTLFKTKRKVTAKDIKAYLENSNGYAGVELKGLEEQFNASLPTYHDLLKILRDKAFIDAEENQEILEDIVLTLTLFEDREMIRKRLEKYKDILTEEQRKKLERRHYTGWGRLSAKLINGILDKVTRKTILGYLIDDGTSNRNFMQLINDDTLSFVDEIRLAQGSGEAEDYRAEVQNLAGSPAIKKGILQSLKIVDELIEVMGYEPEHIVVEMARENQFTNQGRRNSQQRINRLENALKDFGSKILEEQKPYGVSKVNNIHLQSDRLFLYYLQNGKDMYTDEELDIDHLSEYDIDHIIPQAFIKDDSLDNKVLTKSAKNRGKSDDVPSMEIVHNRKNFWRQLLKSKLISQRKFDNLTKAERGGLTNEDKARFIQRQLVETRQITKHVARMLDTRFNTKLDEAGNRIRDPKVNIITLKSNLVSQFRKDYQLYKIREINNYHHAHDAYINAVVATALLKKYPQLAPEFVYGEYPTYNSYNSRKSATEKVLFYSNIMNFFKRIVVHSKTGEVRIRPVIEVNKETGEIVWDKKSDFRTVRKVLSYPQVNVVKKTEVQNHGLDRGKPKGFYNANLSPRPKEGSVENLVPAKQSFDTKRYGGYAGISNSYAVLVNGIIEKGKKKSKAEVTEFQGISILARKDFDKNPKQYLLNLGYKDIKSIIKLPKYSLFELENGSRRMLASILSTNNKRGEIHKGNEMYLPDKFVTLLYHAMRVNRTLEPGHKKYVETHRHVFDELLIYILEYNEKIVGAKANGKRIVEAYSARKDTDNLEELCNSFINLLNLTALGSAVDFEFLGTKIPRYRDYTPSSLLKATLIHQSVTGLYETRIDLSKLGGD

SEQ ID NO: 586 - protein, 1122 aa, Streptococcus suis; identical to SEQ ID NO: 583

SEQ ID NO: 587 - protein, 1388 aa, Streptococcus thermophilus
MTKPYSIGLDIGTNSVGWAVITDNYKVPSKKMKVLGNTSKKYIKKNLLGVLLFDSGITAEGRRLKRTARRRYTRRRNRILYLQEIFSTEMATLDDAFFQRLDDSFLVPDDKRDSKYPIFGNLVEEKVYHDEFPTIYHLRKYLADSTKKADLRLVYLALAHMIKYRGHFLIEGEFNSKNNDIQKNFQDFLDTYNAIFESDLSLENSKQLEEIVKDKISKLEKKDRILKLFPGEKNSGIFSEFLKLIVGNQADFRKCFNLDEKASLHFSKESYDEDLETLLGYIGDDYSDVFLKAKKLYDAILLSGFLTVTDNETEAPLSSAMIKRYNEHKEDLALLKEYIRNISLKTYNEVFKDDTKNGYAGYIDGKTNQEDFYVYLKNLLAEFEGADYFLEKIDREDFLRKQRTFDNGSIPYQIHLQEMRAILDKQAKFYPFLAKNKERIEKILTFRIPYYVGPLARGNSDFAWSIRKRNEKITPWNFEDVIDKESSAEAFINRMTSFDLYLPEEKVLPKHSLLYETFNVYNELTKVRFIAESMRDYQFLDSKQKKDIVRLYFKDKRKVTDKDIIEYLHAIYGYDGIELKGIEKQFNSSLSTYHDLLNIINDKEFLDDSSNEAIIEEIIHTLTIFEDREMIKQRLSKFENIFDKSVLKKLSRRHYTGWGKLSAKLINGIRDEKSGNTILDYLIDDGISNRNFMQLIHDDALSFKKKIQKAQIIGDEDKGNIKEVVKSLPGSPAIKKGILQSIKIVDELVKVMGGRKPESIVVEMARENQYTNQGKSNSQQRLKRLEKSLKELGSKILKENIPAKLSKIDNNALQNDRLYLYYLQNGKDMYTGDDLDIDRLSNYDIDHIIPQAFLKDNSIDNKVLVSSASNRGKSDDFPSLEVVKKRKTFWYQLLKSKLISQRKFDNLTKAERGGLLPEDKAGFIQRQLVETRQITKHVARLLDEKFNNKKDENNRAVRTVKIITLKSTLVSQFRKDFELYKVREINDFHHAHDAYLNAVIASALLKKYPKLEPEFVYGDYPKYNSFRERKSATEKVYFYSNIMNIFKKSISLADGRVIERPLIEVNEETGESVWNKESDLATVRRVLSYPQVNVVKKVEEQNHGLDRGKPKGLFNANLSSKPKPNSNENLVGAKEYLDPKKYGGYAGISNSFAVLVKGTIEKGAKKKITNVLEFQGISILDRINYRKDKLNFLLEKGYKDIELIIELPKYSLFELSDGSRRMLASILSTNNKRGEIHKGNQIFLSQKFVKLLYHAKRISNTINENHRKYVENHKKEFEELFYYILEFNENYVGAKKNGKLLNSAFQSWQNHSIDELCSSFIGPTGSERKGLFELTSRGSAADFEFLGVKIPRYRDYTPSSLLKDATLIHQSVTGLYETRIDLAKLGEG

SEQ ID NO: 588 - protein, 1128 aa, Streptococcus thermophilus
MSDLVLGLDIGIGSVGVGILNKVTGEIIHKNSRIFPAAQAENNLVRRTNRQGRRLTRRKKHRIVRLNRLFEESGLITDFTKISINLNPYQLRVKGLTDELSNEELFIALKNMVKHRGISYLDDASDDGNSSVGDYAQIVKENSKQLETKTPGQIQLERYQTYGQLRGDFTVEKDGKKHRLINVFPTSAYRSEALRILQTQQEFNPQITDEFINRYLEILTGKRKYYHGPGNEKSRTDYGRYRTSGETLDNIFGILIGKCTFYPEEFRAAKASYTAQEFNLLNDLNNLTVPTETKKLSKEQKNQIINYVKNEKAMGPAKLFKYIAKLLSCDVADIKGYRIDKSGKAEIHTFEAYRKMKTLETLDIEQMDRETLDKLAYVLTLNTEREGIQEALEHEFADGSFSQKQVDELVQFRKANSSIFGKGWHNFSVKLMMELIPELYETSEEQMTILTRLGKQKRLRLQIKQNISNKTKYIDEKLLTEEIYNPVVAKSVRQAIKIVNAAIKEYGDFDNIVIEMARETNEDDEKKAIQKIQKANKDEKDAAMLKAANQYNGKAELPHSVFHGHKQLATKIRLWHQQGERCLYTGKTISIHDLINNPNQFEVDHILPLSITFDDSLANKVLVYATANQEKGQRTPYQALDSMDDAWSFRELKAFVRESKTLSNKKKEYLLTEEDISKFDVRKKFIERNLVDTRYASRVVLNALQEHFRAHKIDTKVSVVRGQFTSQLRRHWGIEKTRDTYHHHAVDALIIAASSQLNLWKKQKNTLVSYSEEQLLDIETGELISDDEYKESVFKAPYQHFVDTLKSKEFEDSILFSYQVDSKFNRKISDATIYATRQAKVGKDKKDETYVLGKIKDIYTQDGYDAFMKIYKKDKSKFLMYRHDPQTFEKVIEPILENYPNKQMNEKGKEVPCNPFLKYKEEHGYIRKYSKKGNGPEIKSLKYYDSKLLGNPIDITPENSKNKVVLQSLKPWRTDVYFNKATGKYEILGLKYADLQFEKGTGTYKISQEKYNDIKKKEGVDSDSEFKFTLYKNDLLLVKDTETKEQQLFRFLSRTLPKQKHYVELKPYDKQKFEGGEALIKVLGNVANGGQCIKGLAKSNISIYKVRTDVLGNQHIIKNEGDKPKLDF

SEQ ID NO: 589 - protein, 1121 aa, Streptococcus thermophilus
MSDLVLGLDIGIGSVGVGILNKVTGEIIHKNSRIFPAAQAENNLVRRTNRQGRRLTRRKKHRIVRLNRLFEESGLITDFTKISINLNPYQLRVKGLTDELSNEELFIALKNMVKHRGISYLDDASDDGNSSVGDYAQIVKENSKQLETKTPGQIQLERYQTYGQLRGDFTVEKDGKKHRLINVFPTSAYRSEALRILQTQQEFNPQITDEFINRYLEILTGKRKYYHGPGNEKSRTDYGRYRTSGETLDNIFGILIGKCTFYPDEFRAAKASYTAQEFNLLNDLNNLTVPTETKKLSKEQKNQIINYVKNEKAMGPAKLFKYIAKLLSCDVADIKEYRIDKSGKAEIHTFEAYRKMKTLETLDIEQMDRETLDKLAYVLTLNTEREGIQEALEHEFADGSFSQKQVDELVQFRKANSSIFGKGWHNFSVKLMMELIPELYETSEEQMTILTRLGKQKTTSSSNKTKYIDEKLLTEEIYNPVVAKSVRQAIKIVNAAIKEYGDFDNIVIEMARETNEDDEKKAIQKIQKANKDEKDAAMLKAANQYNGKAELPHSVFHGHKQLATKIRLWHQQGERCLYTGKTISIHDLINNSNQFEVDHILPLSITFDDSLANKVLVYATANQEKGQRTPYQALDSMDDAWSFRELKAFVRESKTLSNKKKEYLLTEEDISKFDVRKKFIERNLVDTRYASRVVLNALQEHFRAHKIDTKVSVVRGQFTSQLRRHWGIEKTRDTYHHHAVDALIIAASIQLNLWKKQKNTLVSYSEDQLLDIETGELISDDEYKESVFKAPYQHFVDTLKSKEFEDSILFSYQVDSKFNRKISDATIYATRQAKVGKDKADETYVLGKIKDIYTQDGYDAFMKIYKKDKSKFLMYRHDPQTFEKVIEPILENYPNKQINEKGKEVPVNPFLKYKEEHGYIRKYSKKGNGPEIKSLKYYDSKLGNHIDITPKDSNNKVVLQSVSPWRADVYFNKTTGKYEILGLKYADLQFEKGTGTYKISQEKYNDIKKKEGVDSDSEFKFTLYKNDLLLVKDTETKEQQLFRFLSRTMPKQKHYVELKPYDKQKFEGGEALIKVLGNVANSGQCKKGLGKSNISIYKVRTDVLGNQHIIKNEGDKPKLDF

SEQ ID NO: 590 - protein, 1388 aa, Streptococcus thermophilus
MTKPYSIGLDIGTNSVGWAVTTDNYKVPSKKMKVLGNTSKKYIKKNLLGVLLFDSGITAEGRRLKRTARRRYTRRRNRILYLQEIFSTEMATLDDAFFQRLDDSFLVPDDKRDSKYPIFGNLVEEKAYHDEFPTIYHLRKYLADSTKKADLRLVYLALAHMIKYRGHFLIEGEFNSKNNDIQKNFQDFLDTYNAIFESDLSLENSKQLEEIVKDKISKLEKKDRILKLFPGEKNSGIFSEFLKLIVGNQADFRKCFNLDEKASLHFSKESYDEDLETLLGYIGDDYSDVFLKAKKLYDAILLSGFLTVTDNETEAPLSSAMIKRYNEHKEDLALLKEYIRNISLKTYNEVFKDDTKNGYAGYIDGKTNQEDFYVYLKKLLAEFEGADYFLEKIDREDFLRKQRTFDNGSIPYQIHLQEMRAILDKQAKFYPFLAKNKERIEKILTFRIPYYVGPLARGNSDFAWSIRKRNEKITPWNFEDVIDKESSAEAFINRMTSFDLYLPEEKVLPKHSLLYETFNVYNELTKVRFIAESMRDYQFLDSKQKKDIVRLYFKDKRKVTDKDIIEYLHAIYGYDGIELKGIEKQFNSSLSTYHDLLNIINDKEFLDDSSNEAIIEEIIHTLTIFEDREMIKQRLSKFENIFDKSVLKKLSRRHYTGWGKLSAKLINGIRDEKSGNTILDYLIDDGISNRNFMQLIHDDALSFKKKIQKAQIIGDEDKGNIKEVVKSLPGSPAIKKGILQSIKIVDELVKVMGGRKPESIVVEMARENQYTNQGKSNSQQRLKRLEKSLKELGSKILKENIPAKLSKIDNNALQNDRLYLYYLQNGKDMYTGDDLDIDRLSNYDIDHIIPQAFLKDNSIDNKVLVSSASNRGKSDDVPSLEVVKKRKTFWYQLLKSKLISQRKFDNLTKAERGGLSPEDKAGFIQRQLVETRQITKHVARLLDEKFNNKKDENNRAVRTVKIITLKSTLVSQFRKDFELYKVREINDFHHAHDAYLNAVVASALLKKYPKLEPEFVYGDYPKYNSFRERKSATEKVYFYSNIMNIFKKSISLADGRVIERPLIEVNEETGESVWNKESDLATVRRVLSYPQVNVVKKVEEQNHGLDRGKPKGLFNANLSSKPKPNSNENLVGAKEYLDPKKYGGYAGISNSFTVLVKGTIEKGAKKKITNVLEFQGISILDRINYRKDKLNFLLEKGYKDIELIIELPKYSLFELSDGSRRMLASILSTNNKRGEIHKGNQIFLSQKFVKLLYHAKRISNTINENHRKYVENHKKEFEELFYYILEFNENYVGAKKNGKLLNSAFQSWQNHSIDELCSSFIGPTGSERKGLFELTSRGSAADFEFLGVKIPRYRDYTPSSLLKDATLIHQSVTGLYETRIDLAKLGEG

SEQ ID NO: 591 - protein, 1121 aa, Streptococcus thermophilus
MSDLVLGLDIGIGSVGVGILNKVTGEIIHKNSRIFPAAQAENNLVRRTNRQGRRLARRKKHRRVRLNRLFEESGLITDFTKISINLNPYQLRVKGLTDELSNEELFIALKNMVKHRGISYLDDASDDGNSSVGDYAQIVKENSKQLETKTPGQIQLERYQTYGQLRGDFTVEKDGKKHRLINVFPTSAYRSEALRILQTQQEFNPQITDEFINRYLEILTGKRKYYHGPGNEKSRTDYGRYRTSGETLDNIFGILIGKCTFYPDEFRAAKASYTAQEFNLLNDLNNLTVPTETKKLSKEQKNQIINYVKNEKAMGPAKLFKYIAKLLSCDVADIKGYRIDKSGKAEIHTFEAYRKMKTLETLDIEQMDRETLDKLAYVLTLNTEREGIQEALEHEFADGSFSQKQVDELVQFRKANSSIFGKGWHNFSVKLMMELIPELYETSEEQMTILTRLGKQKTTSSSNKTKYIDEKLLTEEIYNPVVAKSVRQAIKIVNAAIKEYGDFDNIVIEMARETNEDDEKKAIQKIQKANKDEKDAAMLKAANQYNGKAELPHSVFHGHKQLATKIRLWHQQGERCLYTGKTISIHDLINNSNQFEVDHILPLSITFDDSLANKVLVYATANQEKGQRTPYQALDSMDDAWSFRELKAFVRESKTLSNKKKEYLLTEEDISKFDVRKKFIERNLVDTRYASRVVLNALQEHFRAHKIDTKVSVVRGQFTSQLRRHWGIEKTRDTYHHHAVDALIIAASSQLNLWKKQKNTLVSYSEDQLLDIETGELISDDEYKESVFKAPYQHFVDTLKSKEFEDSILFSYQVDSKFNRKISDATIYATRQAKVGKDKADETYVLGKIKDIYTQDGYDAFMKIYKKDKSKFLMYRHDPQTFEKVIEPILENYPNKQINEKGKEVPCNPFLKYKEEHGYIRKYSKKGNGPEIKSLKYYDSKLGNHIDITPKDSNNKVVLQSVSPWRADVYFNKTTGKYEILGLKYADLQFEKGTGTYKISQEKYNDIKKKEGVDSDSEFKFTLYKNDLLLVKDTETKEQQLFRFLSRTMPKQKHYVELKPYDKQKFEGGEALIKVLGNVANSGQCKKGLGKSNISIYKVRTDVLGNQHIIKNEGDKPKLDF

SEQ ID NO: 592 - protein, 1122 aa, Streptococcus thermophilus
MSDLVLGLDIGIGSVGVGILNKVTGEIIHKNSRIFPAAQAENNLVRRTNRQGRRLTRRKKHRIVRLNRLFEESGLITDFTKISINLNPYQLRVKGLTDELSNEELFIALKNMVKHRGISYLDDASDDGNSSVGDYAQIVKENSKQLETKTPGQIQLERYQTYGQLRGDFTVEKDGKKHRLINVFPTSAYRSEALRILQTQQEFNSQITDEFINRYLEILTGKRKYYHGPGNEKSRTDYGRYRTNGETLDNIFGILIGKCTFYPDEFRAAKASYTAQEFNLLNDLNNLTVPTETKKLSKEQKNQIINYVKNEKVMGPAKLFKYIAKLLSCDVADIKGHRIDKSGKAEIHTFEAYRKMKTLETLDIEQMDRETLDKLAYVLTLNTEREGIQEALEHEFADGSFSQKQVDELVQFRKANSSIFGKGWHNFSVKLMMELIPELYETSEEQMTILTRLGKQKTTSSSNKTKYIDEKLLTEEIYNPVVAKSVRQAIKIVNAAIKEYGDFDNIVIEMARETNEDDEKKAIQKIQKANKDEKDAAMLKAANQYNGKAELPHSVFHGHKQLATKIRLWHQQGERCLYTGKTISIHDLINNPNQFEVDHILPLSITFDDSLANKVLVYATANQEKGQRTPYQALDSMDDAWSFRELKAFVRESKTLSNKKKEYLLTEEDISKFDVRKKFIERNLVDTRYASRVVLNALQEHFRAHKIDTKVSVVRGQFTSQLRRHWGIEKTRDTYHHHAVDALIIAASSQLNLWKKQKNTLVSYSEEQLLDIETGELISDDEYKESVFKAPYQHFVDTLKSKEFEDSILFSYQVDSKFNRKISDATIYATRQAKVGKDKKDETYVLGKIKDIYTQDGYDAFMKIYKKDKSKFLMYRHDPQTFEKVIEPILENYPNKEMNEKGKEVPCNPFLKYKEEHGYIRKYSKKGNGPEIKSLKYYDSKLLGNPIDITPENSKNKVVLQSLKPWRTDVYFNKNTGKYEILGLKYADLQFEKKTGTYKISQEKYNGIMKEEGVDSDSEFKFTLYKNDLLLVKDTETKEQQLFRFLSRTMPNVKYYVELKPYSKDKFEKNESLIEILGSADKSGRCIKGLGKSNISIYKVRTDVLGNQHIIKNEGDKPKLDF

SEQ ID NO: 593 - protein, 1388 aa, Streptococcus thermophilus
MTKPYSIGLDIGTNSVGWAVITDNYKVPSKKMKVLGNTSKKYIKKNLLGVLLFDSGITAEGRRLKRTARRRYTRRRNRILYLQEIFSTEMATLDDAFFQRLDDSFLVPDDKRDSKYPIFGNLVEEKAYHDEFPTIYHLRKYLADSTKKADLRLVYLALAHMIKYRGHFLIEGEFNSKNNDIQKNFQDFLDTYNAIFESDLSLENSKQLEEIVKDKISKLEKKDRILKLFPGEKNSGIFSEFLKLIVGNQADFRKCFNLDEKASLHFSKESYDEDLETLLGYIGDDYSDVFLKAKKLYDAILLSGFLTVTDNETEAPLSSAMIKRYNEHKEDLALLKEYIRNISLKTYNEVFKDDTKNGYAGYIDGKTNQEDFYVYLKNLLAEFEGADYFLEKIDREDFLRKQRTFDNGSIPYQIHLQEMRAILDKQAKFYPFLAKNKERIEKILTFRIPYYVGPLARGNSDFAWSIRKRNEKITPWNFEDVIDKESSAEAFINRMTSFDLYLPEEKVLPKHSLLYETFNVYNELTKVRFIAESMRDYQFLDSKQKKDIVRLYFKDKRKVTDKDIIEYLHAIYGYDGIELKGIEKQFNSSLSTYHDLLNIINDKEFLDDSSNEAIIEEIIHTLTIFEDREMIKQRLSKFENIFDKSVLKKLSRRHYTGWGKLSAKLINGIRDEKSGNTILDYLIDDGISNRNFMQLIHDDALSFKKKIQKAQIIGDEDKGNIKEVVKSLPGSPAIKKGILQSIKIVDELVKVMGGRKPESIVVEMARENQYTNQGKSNSQQRLKRLEKSLKELGSKILKENIPAKLSKIDNNALQNDRLYLYYLQNGKDMYTGDDLDIDRLSNYDIDHIIPQAFLKDNSIDNKVLVSSASNRGKSDDFPSLEVVKKRKTFWYQLLKSKLISQRKFDNLTKAERGGLLPEDKAGFIQRQLVETRQITKHVARLLDEKFNNKKDENNRAVRTVKIITLKSTLVSQFRKDFELYKVREINDFHHAHDAYLNAVIASALLKKYPKLEPEFVYGDYPKYNSFRERKSATEKVYFYSNIMNIFKKSISLADGRVIERPLIEVNEETGESVWNKESDLATVRRVLSYPQVNVVKKVEEQNHGLDRGKPKGLFNANLSSKPKPNSNENLVGAKEYLDPKKYGGYAGISNSFAVLVKGTIEKGAKKKITNVLEFQGISILDRINYRKDKLNFLLEKGYKDIELIIELPKYSLFELSDGSRRMLASILSTNNKRGEIHKGNQIFLSQKFVKLLYHAKRISNTINENHRKYVENHKKEFEELFYYILEFNENYVGAKKNGKLLNSAFQSWQNHSIDELCSSFIGPTGSERKGLFELTSRGSAADFEFLGVKIPRYRDYTPSSLLKDATLIHQSVTGLYETRIDLAKLGEG

SEQ ID NO: 594 - protein, 1121 aa, Streptococcus thermophilus
MSDLVLGLDIGIGSVGVGILNKVTGEIIHKNSRIFPAAQAENNLVRRTNRQGRRLTRRKKHRRVRLNRLFEESGLITDFTKISINLNPYQLRVKGLTDELSNEELFIALKNMVKHRGISYLDDASDDGNSSVGDYAQIVKENSKQLETKTPGQIQLERYQTYGQLRGDFTVEKDGKKHRLINVFPTSAYRSEALRILQTQQEFNPQITDEFVNRYLEILTGKRKYYHGPGNEKSRTDYGRYRTNGETLDNIFGILIGKCTFYPEEFRAAKASYTAQEFNLLNDLNNLTVPTETKKLSKEQKNQIINYVKNEKAMGPAKLFKYIAKLLSCDVADIKGYRIDKSGKAEIHTFEAYRKMKTLETLDIEQMDRETLDKLAYVLTLNTEREGIQEALEHEFADGSFSQKQVDELVQFRKANSSIFGKGWHNFSVKLMMELIPELYETSEEQMTILKRLGKQKTTSSSNKTKYIDEKLLTEEIYNPVVAKSIRQAIKIVNAAIKEYGDFDNIVIEMARETNEDDEKKAIQKIQKANKDEKDAAMLKAANQYNGKAELPHSVFHGHKQLATKIRLWHQQGERCLYTGKTISIHDLINNPNQFEVDHILPLSITFDDSLANKVLVYATANQEKGQRTPYQALDSMDDAWSFRELKAFVRESKTLSNKKKEYLLTEEDISKFDVRKKFIERNLVDTRYASRVVLNALQEHFRAHKIDTKVSVVRGQFTSQLRRHWGIEKTRDTYHHHAVDALIIAASSQLNLWKKQKNTLVSYSEDQLLDIETGELISDDEYKESVFKAPYQHFVDTLKSKEFEDSILFSYQVDSKFNRKISDATIYATRQAKVGKDKKDETYVLGKIKDIYTQDGYDAFMKIYKKDKSKFLMYRHDPQTFEKVIEPILENYPNKEMNEKGKEVPCNPFLKYKEEHGYIRKYSKKGNDPEIKSLKYYDSKLGNHIDITPKDSNNKVVLQSVSPWRADVYFNKTTGKYEILGLKYADLQFEKGTGTYKISQEKYNDIKKKEGVDSDSEFKFTLYKNDLLLVKDTETKEQQLFRFLSRTMPKQKHYVELKPYDKQKFEGGEALIKVLGNVANSGQCKKGLGKSNISIYKVRTDVLGNQHIIKNEGDKPKLDF

SEQ ID NO: 595 - protein, 1122 aa, Streptococcus thermophilus
  REGION 1..1122: note = Streptococcus thermophilus MTCC 5460
MSDLVLGLDIGIGSVGVGILNKVTGEIIHKNSRIFPAAQAENNVERRTNRQGRRLTRRKKHRRVRLNRLFEESGLITDFTKISINLNPYQLRVRGLTDELSNEELFIALKNMVKHRGISYLDDASDDGNSSVGDYAQIVKENSKQLETKTPGQIQLERYQTYGQLRGDFTVEKDGKKHRLINVFPTSAYRSEALRILQTQQEFNSQITDEFINRYLEILTGKRKYYHGPGNEKSRTDYGRYRTSGETLDNIFGILIGKCTFYPEEFRAAKASYTAQEFNLLNDLNNLTVPTETKKLSKEQKNQIINYVKNEKAMGPAKLFKYIAKLLSCDVADIKGYRIDKSGKAEIHTFEAYRKMKTLETLDIEQMDRETLDKLAYVLTLNTEREGIQEALEHEFADGSFSQKQVDELVQFRKASSSIFGKGWHNFSVKLMMELIPELYETSEEQMTILTRLGKQKTTSSSNKTKYIDEKLLTEEIYNPVVAKSVRQAIKIVNAAIKEYGDFDNIVIEMARETNEDDEKKAIQKIQKANKDEKDAAMLKAANQYNGKAELPHSVFHGHKQLATKIRLWHQQGERCLYTGKTISIHDLINNPNQFEVDHILPLSITFDDSLANKVLVYATANQEKGQRTPYQALDSMDDAWSFRELKAFVRESKTLSNKKKEYLLTEEDISKFDVRKKFIERNLVDTRYASRVVLNALQEHFRAHKIDTKVSVVRGQFTSQLRRHWGIEKTRDTYHHHAVDALIIAASSQLNLWKKQKNTLVSYSEDQLLDIETGELISDDEYKESVFKAPYQHFVDTLKSKEFEDSILFSYQVDSKFNRKLSDATIYATRQAKVGKDKKDETYVLGKIKDIYTQDGYDAFMKIYKKDKSKFLMYRHDPQTFEKVIEPILENYPNKEMNEKGKEVPCNPFLKYKEEHGYIRKYSKKGNGPEIKSLKYYDSKLLGNPIDITPENSKNKVVLQSLKPWRADVYFNKTTGKYEILGLKYADLQFEKKTGTYKISQEKYNGIMKEEGVDSDSEFKFTLYKNDLLLVKDTETKEQQLFRFLSRTMPNVKYYVELKPYSKDKFEKNESLIEILGSADKSGRCIKGLGKSNISIYKVRTDVLGNQHIIKNEGDKPKLDF

SEQ ID NO: 596 - protein, 1121 aa, Streptococcus thermophilus
MSDLVLGLDIGIGSVGVGILNKVTGEIIHKNSRIFPAAQAENNLVRRTNRQGRRLTRRKKHRIVRLNRLFEESGLITDFTKISINLNPYQLRVKGLTDELSNEELFIALKNMVKHRGISYLDDASDDGNSSVGDYAQIVKENSKQLETKTPGQIQLERYQTYGQLRGDFTVEKDGKKHRLINVFPTSAYRSEALRILQTQQEFNPQITDEFINRYLEILTGKRKYYHGPGNEKSRTDYGRYRTSGETLDNIFGILIGKCTFYPDEFRAAKASYTAQEFNLLNDLNNLTVPTETKKLSKEQKNQIINYVKNEKAMGPAKLFKYIAKLLSCDVADIKGYRIDKSGKAEIHTFEAYRKMKTLETLDIEQMDRETLDKLAYVLTLNTEREGIQEALEHEFADGSFSQKQVDELVQFRKANSSIFGKGWHNFSVKLMMELIPELYETSEEQMTILTRLGKQKTTSSSNKTKYIDEKLLTEEIYNPVVAKSVRQAIKIVNAAIKEYGDFDNIVIEMARETNEDDEKKAIQKIQKANKDEKDAAMLKAANQYNGKAELPHSVFHGHKQLATKIRLWHQQGERCLYTGKTISIHDLINNSNQFEVDHILPLSITFDDSLANKVLVYATANQEKGQRTPYQALDSMDDAWSFRELKAFVRESKTLSNKKKEYLLTEEDISKFDVRKKFIERNLVDTRYASRVVLNALQEHFRAHKIDTKVSVVRGQFTSQLRRHWGIEKTRDTYHHHAVDALIIAASSQLNLWKKQKNTLVSYSEDQLLDIETGELISDDEYKESVFKAPYQHFVDTLKSKEFEDSILFSYQVDSKFNRKISDATIYATRQAKVGKDKADETYVLGKIKDIYTQDGYDAFMKIYKKDKSKFLMYRHDPQTFEKVIEPILENYPNKQMNEKGKEVPCNPFLKYKEEHGYIRKYSKKGNGPEIKSLKYYDSKLGNHIDITPKDSNNKVVLQSVSPWRADIYFNNTTGKYEILGLKYADLQFEKGTGTYKISQEKYNDIKKKEGVDSDSEFKFTLYKNDLLLVKETETKEQQLFRFLSRTMPKQKHYVELKPYDKQKFEGGEALIKVLGNVANGGQCIKGLGKSNISIYKVRTDVLGNQHIIKNEGDKPKLDF

SEQ ID NO: 597 - protein, 1388 aa, Streptococcus thermophilus
MTKPYSIGLDIGTNSVGWAVITDNYKVPSKKMKVLGNTSKKYIKKNLLGVLLFDSGITAEGRRLKRTARRRYTRRRNRILYLQEIFSTEMATLDDAFFQRLDDSFLVPDDKRDSKYPIFGNLVEEKAYHDEFPTIYHLRKYLADSTKKADLRLVYLALAHMIKYRGHFLIEGEFNSKNNDIQKNFQDFLDTYNAIFESDLSLENSKQLEEIVKDKISKLEKKDRILKLFPGEKNSGIFSEFLKLIVGNQADFRKCFNLDEKASLHFSKESYDEDLETLLGYIGDDYSDVFLKAKKLYDAILLSGFLTVTDNETEAPLSSAMIKRYNEHKEDLALLKEYIRNISLKTYNEVFKDDTKNGYAGYIDGKTNQEDFYVYLKNLLAEFEGADYFLEKIDREDFLRKQRTFDNGSIPYQIHLQEMRAILDKQAKFYPFLAKNKERIEKILTFRIPYYVGPLARGNSDFAWSIRKRNEKITPWNFEDVIDKESSAEAFINRMTSFDLYLPEEKVLPKHSLLYETFNVYNELTKVRFIAESMRDYQFLDSKQKKDIVRLYFKDKRKVTDKDIIEYLHAIYGYDGIELKGIEKQFNSSLSTYHDLLNIINDKEFLDDSSNEAIIEEIIHTLTIFEDREMIKQRLSKFENIFDKSVLKKLSRRHYTGWGKLSAKLINGIRDEKSGNTILDYLIDDGISNRNFMQLIHDDALSFKKKIQKAQIIGDEDKGNIKEVVKSLPGSPAIKKGILQSIKIVDELVKVMGGRKPESIVVEMARENQYTNQGKSNSQQRLKRLEKSLKELGSKILKENIPAKLSKIDNNALQNDRLYLYYLQNGKDMYTGDDLDIDRLSNYDIDHIIPQAFLKDNSIDNKVLVSSASNRGKSDDFPSLEVVKKRKTFWYQLLKSKLISQRKFDNLTKAERGGLLPEDKAGFIQRQLVETRQITKHVARLLDEKFNNKKDENNRAVRTVKIITLKSTLVSQFRKDFELYKVCEINDFHHAHDAYLNAVIASALLKKYPKLEPEFVYGDYPKYNSFRERKSATEKVYFYSNIMNIFKKSISLADGRVIERPLIEVNEETGESVWNKESDLATVRRVLSYPQVNVVKKVEEQNHGLDRGKPKGLFNANLSSKPKPNSNENLVGAKEYLDPKKYGGYAGISNSFAVLVKGTIEKGAKKKITNVLEFQGISILDRINYRKDKLNFLLEKGYKDIELIIELPKYSLFELSDGSRRMLASILSTNNKRGEIHKGNQIFLSQKFVKLLYHAKRISNTINENHRKYVENHKKEFEELFYYILEFNENYVGAKKNGKLLNSAFQSWQNHSIDELCSSFIGPTGSERKGLFELTSRGSAADFEFLGVKIPRYRDYTPSSLLKDATLIHQSVTGLYETRIDLAKLGEG

SEQ ID NO: 598 - protein, 1128 aa, Streptococcus vestibularis
  REGION 1..1128: note = Streptococcus vestibularis ATCC 49124
MSDLVLGLDIGIGSVGVGILNKVTGEIIHKNSRIFPAAQAENNVERRTNRQGRRLTRRKKHRRVRLNHLFEESGLITDFTKVSINLNPYQLRVKGLIDELSNEELFIALKNMVKHRGISYLDDASDDGNSSVGDYAQIVKENSKQLETKTPGQIQLERYQKYGQLRGDFTVEEDGKKHRLINVFPTSAYRSEALRILQTQKEFNPQITDEFINRYLEILTGKRKYYHGPGNEKSRTDYGRYTTKKDSENEYITLDNIFGILIGKCTFYPEEYRAAKASYTAQEFNLLNDLNNLTVPTETKKLSEEQKNQIINYVKNEKAMGPAKLFKYIAKLLSCDVADIKGYRIDKSDKAEIHTFEAYRKMKTLETIDFEKMSRDQLDKLAYVLTLNTEREGIQEALDHEFADGNFSQEQIDELVQFRKANSSIFGKGWHNFSVKLMMELIPELYATSEEQMTILTRLGKQKTTSSSNKTKYIDEKLLTEEIYNPVVAKSVRQAIKIVNAAIKEYGDFDNIVIEMARETNEDDEKKAIQKIQKANKDEKDAAMLKAANQYNGRAELPHSVFHGHKQLATKIRLWHQQGERCLYTGKTISIHDLINNPNQFEIDHILPLSITFDDSLANKVLVYATANQEKGQRTPYQALDSMDDAWSFRELKAFVRESKSLSNKKKEYLLTEEDISRFDVRKKFIERNLVDTRYASRVVLNALQEHFRAHKTDTKVSVVRGQFTSQLRRHWGIEKTRDTYHHHAVDALIIAASSQLNLWKKQKNTLVNYSENQLLDIETGELISDDEYKESVFKAPYQHFVDTLKSKEFEDSILFSYQVDSKFNRKISDATIYATRQAKVGKDKKDETYVLGKIKDIYSQTGYDAFIKIYQKDKSKFLMYRHDPQTFEKVIEPILENYPNKEMNEKGKEVPCNPFLKYKEEHGDYIRKYSKKGNGPEIKSLKYYDSKLGNHIDITPKDSNNKVVLQSVSPWRADVYFNKTTGKYEILGLKYADLQFEKGTGTYKISQEKYNVIKKKEGVDSDSEFKFTLYKNDLLLIKDTETKEQQLFRFLSRTKPNVKHYVELKPYDKQKFEGNESLINVLGAVAKGGQCQKGINKPNISIYKVRTDVLGNQHIIKNEGDKPKLDF

SEQ ID NO: 599 - protein, 1084 aa, Subdoligranulum sp.
  REGION 1..1084: note = Subdoligranulum sp. 4_3_54A2FAA
MKNTLYGIGLDIGVASVGWAVVGLNGTGEPVGLHRLGVRIFDKAEQPKTGESLAAPRRMARGMRRRLRRKALRRADVYALLERSGLSTREELAQMFEAGGLEDIYALRTRALDEPVGKAEFSRILLHLAQRRGFKSNRRTASDGEDGRLLAAVNENRRRMAQGGWRTVGEMLYRHEAFALHKRNKADDYLSTVGRDMVAEEASILFERQRAMGCSWAAPELQAEYLSILLRQRSFDEGPGGNSPYGGNQVEKMVGRCTFEPDEPRAAKAAYSFEYFSLLQKLNHIRLAENGETRPLTQPQRQQLLSLAHKTPDISLARIRKELALPETVQFNGVRCRANETLEESEKKEKFACLPAYHKMRKALDGVVKGRISSLSISQRDAAATALSLYKNEDTLRAKLTEAGFQAPEIDALAGLTGFSKFGHLSLKACRKLIPHLEQGLTYDQACTAAGYDFKGHGAGERAFTLPAAAPEMEQITSPVVRRAVAQTIKVVNGIIREMDASPAWVRIELARELSKTFGERQEMDRSMRENAAQNERLMQELRDTFHLLSPTGQDLVKYRLWKEQDGVCAYSLRRLDVERLFEPGYVDVDHIVPYSLSFDDRRSNKVLVLSSENRQKGNRLPLQYLQGKRREDFIVWTNSSVHDYRKRQNLLREKLSGDEAEGFRQRNLQDTQHMARFLYNYISDHLAFAQSEALGKKRVFAVSGAVTSHLRKRWGLSKVRADGDLHHALDAAVVACTTDGMIRRISGYYGHIEGEYLQDADGAGSQHARTKERFPAPWPRFRDELIVRLSEQPAEPLLDINPEFYCEYGTEHIRPVFVSRMPRRKVTGPGHKETIKGAAAADEGLLTVRKALTELKLDKDGEIKDYYMPSSDTLLYEALKAQLRRFGGDGKKAFAEPFYKPKADGTPGPLVRKVKTTEKATLTVPVHGGAASNDTMVRVDVFLVPGDGYYWVPVYTADTLKPELPNRAVVQGKPYSEWKEMREEDFIFSLYPNDLVYVEHKSGLKFTLQNADSTLEKTRTQTSAFAYFVSGSISTASITIRTHDNAYGIPSLGVKTLKTFHKYQVDVLGNVFPVHKETRQKFR

SEQ ID NO: 600 - protein, 1422 aa, Sutterella wadsworthensis
  REGION 1..1422: note = Sutterella wadsworthensis 3_1_45B
MTQSERRFSCSIGIDMGAKYTGVFYALFDREELPTNLNSKAMTLVMPETGPRYVQAQRTAVRHRLRGQKRYTLARKLAFLVVDDMIKKQEKRLTDEEWKRGREALSGLLKRRGYSRPNADGEDLTPLENVRADVFAAHPAFSTYFSEVRSLAEQWEEFTANISNVEKFLGDPNIPADKEFIEFAVAEGLIDKTEKKAYQSALSTLRANANVLTGLRQMGHKPRSEYFKAIEADLKKDSRLAKINEAFGGAERLARLLGNLSNLQLRAERWYFNAPDIMKDRGWEPDRFKKTLVRAFKFFHPAKDQNKQHLELIKQIENSEDIIETLCTLDPNRTIPPYEDQNNRRPPLDQTLLLSPEKLTRQYGEIWKTWSARLTSAEPTLAPAAEILERSTDRKSRVAVNGHEPLPTLAYQLSYALQRAFDRSKALDPYALRALAAGSKSNKLTSARTALENCIGGQNVKTFLDCARRYYREADDAKVGLWFDNADGLLERSDLHPPMKKKILPLLVANILQTDETTGQKFLDEIWRKQIKGRETVASRCARIETVRKSFGGGFNIAYNTAQYREVNKLPRNAQDKELLTIRDRVAETADFIAANLGLSDEQKRKFANPFSLAQFYTLIETEVSGFSATTLAVHLENAWRMTIKDAVINGETVRAAQCSRLPAETARPFDGLVRRLVDRQAWEIAKRVSTDIQSKVDFSNGIVDVSIFVEENKFEFSASVADLKKNKRVKDKMLSEAEKLETRWLIKNERIKKASRGTCPYTGDRLAEGGEIDHILPRSLIKDARGIVFNAEPNLIYASSRGNQLKKNQRYSLSDLKANYRNEIFKTSNIAAITAEIEDVVTKLQQTHRLKFFDLLNEHEQDCVRHALFLDDGSEARDAVLELLATQRRTRVNGTQIWMIKNLANKIREELQNWCKTTNNRLHFQAAATNVSDAKNLRLKLAQNQPDFEKPDIQPIASHSIDALCSFAVGSADAERDQNGFDYLDGKTVLGLYPQSCEVIHLQAKPQEEKSHFDSVAIFKEGIYAEQFLPIFTLNEKIWIGYETLNAKGERCGAIEVSGKQPKELLEMLAPFFNKPVGDLSAHATYRILKKPAYEFLAKAALQPLSAEEKRLAALLDALRYCTSRKSLMSLFMAANGKSLKKREDVLKPKLFQLKVELKGEKSFKLNGSLTLPVKQDWLRICDSPELADAFGKPCSADELTSKLARIWKRPVMRDLAHAPVRREFSLPAIDNPSGGFRIRRTNLFGNELYQVHAINAKKYRGFASAGSNVDWSKGILFNELQHENLTECGGRFITSADVTPMSEWRKVVAEDNLSIWIAPGTEGRRYVRVETTFIQASHWFEQSVENWAITSPLSLPASFKVDKPAEFQKAVGTELSELLGQPRSEIFIENVGNAKHIRFWYIVVSSNKKMNESYNNVSKS

SEQ ID NO: 601 - protein, 1049 aa, Tistrella mobilis
MINERLTFGIDLGIGSCGWAVLRHADAAGEPGVIEGLGSWCFDVPETSKERIPTNQVRRSNRLLRRVIRRRRNRMAEIRRLFHAQGLLPSADEDALKRPRLDPWELRARGLDQCLSAEEFAVALGHIARHRGFRSSAKRKAANTSGEDSKMLSALLVTRERTARYRTVGEMFARDPEYSARRRNRDGIFDRTVARDDLIHEVGKLFEAQRARGSAFASPDLEADFNAIAFRQAEMQDSERLVGNCPFERDEKRAARWAPSFERFRLLTRLINLRIATAEGERRFTPEDLARVSAELGATAKLPVSRVRALIGLLPDERFTTIRVEDEDRDIVARTGEAAPGTWRLRKTLGEALWAEMQARPDQLDAIAHVLSFFEATAKIRSELDRLGLPAAVIEALDRGLEDGAFAKFKGAGHISAKACRNLLPHLQQGHRYDQACRLAGYDHAASTLSHTAQVVSKAGFNALVTELGESIANPIARKALTEGLKQIRAMCARWGLPGAIHIELAREVGNSIEKRRELESQRETTTKRRQTERDEIRGLLALEDVDDDTLLRYRLWKEQGGKCLYTGKDIHVRQLIATDNSVQVDHILPWSRFGDDSFNNKTLCLASANQRKRGQTPWEWFSLTGTPEAWEVFASRVETSKDLRGFKKRNLLLKNADEVAQRFRSRNLNDTRYAARLLAEAAKLFYPAGDRQEKDGRRRVLTRPGPLTAALRHAWGLESLKKADGKRVSDDRHHALDALAVAAISEREVQRLTRSFQEWEQQGLARPLRHVAPPWPGFRGDVLAAYAQAFVARPERRRARGKGHDASIRQVVGEGPEAQVFERRGLADLKEADLDRVKDPERNQAIIEAVRAWILAGRPADAPPRSPRGDVIVKLRTAPAKKIKPAVPVRGGTADRGDMVRIDVFTRPNRKGRDEWYLVPIYPHQVMNRKAWPHPPMRSVVAYKDEAGWTEIGAEHSFRFSLYPRSYVQLVKSNGDVIEGYLVSMDRSTGAFRVFVHNNPAEMAKGIGAKTLLNLRKFNVDRFGVRTEVKSEVRTWHGEVCTSPVPPD

SEQ ID NO: 602 - protein, 1395 aa, Treponema denticola
  REGION 1..1395: note = Treponema denticola AL-2
MKKEIKDYFLGLDVGTGSVGWAVTDTDYKLLKANRKDLWGMRCFETAETAEVRRLHRGARRRIERRKKRIKLLQELFSQEIAKIDEGFFQRMKESPFYAEDKTILQENALFNDKDFTDKTYHKAYPTINHLIKAWIENKVKPDPRLLYLACHNIIKKRGHFLFEGDFDSENQFDTSIQALFEYLREDMEVDIDADSQKVKEILKDSSLKNSEKQSRLNKILGLKPSDKQKKAITNLISGNKINFADLYDNPDLKDAEKNSISFSKDDFDALSDDLASILGDSFELLLKAKAVYNCSVLSKVIGDEQYLSFAKVKIYEKHKTDLTKLKAVIKKHFPNNYKKVFGYNQDNESKNNYSGYVGVCKTKNKKLVINNSVNQEDFYKFLKPILSAKSEIKEVNDILAEIETGNFLPKQISKSNAEIPYQLRKMELEKILSNAEKHFSFLKQKDEKGLSHSEKIIMLLTFKIPYYIGPINDNHKKSFPDRCWVVKKEKSPSGKTTPWNFFDHIDKEKTAEEFITSRTNFCTYLIGESVLPKNSLLYSEYTVLNEINNLQIIIDGKNICDTKLKQKIYEDLFKKYKKITQKQISTFIKHEGICNKTDEVIILGIDKECTSSLKSYIELKNIFGKQVDEISTKNMLEEIIRWATIYDEGEGKTILKTKIKAEYGKYCSDEQIKKILNLKFSGWGRLSRKFLETVTSEMPGFSEPVNIITAMRETQNNLMELLSSEFKFTENIKKINSGFEDAEKQFSYDGLVKPLFLSPSVKKMLWQTLKLVKEISHITQAPPKKIFIEMAKGAELEPARTKTRLKILQDLYSSCKNDADAFSSEIQYLSGKIENEDNLRLRSDKLYLYYTQLGKCMYCGKPIEIGHVFDTSNYDIDHIYPQSKIKDDSISNRVLVCSSCNKNKEDKYPLKSEIQSKQRGFWNFLQRNNFISLEKLNRLTRTTPISDDETAKFIARQLVETRQATKVAAKVLEKMFPETKIVYSKAETVSMFRNKFDIIKCREINDFHHAHDAYLNIVVGNVYNTKFTNNPWNFIKEKRDNPKIADTYNYYKVFDYDVKRNNITAWEKGKTIITVKDMLKRNTPIYTRQAACKKGGLFDQTIMKKGLGQHPLKKEGPFSNISKYGGYNKVSAAYYTLIEYEEKGNKIRSLETIPLYLVKDIQKDQDVLKSYLTDLLGKKEFKILVPKIKINSLLKINGFPCHITGKTNDSFLLRPAVQFCCSNDEVLYFKKIIRFSEIRSQREKIGKTISPYEDLSFRSYIKENLCKKTKNDEIGEKEFYDLLQKKNLEIYDMLLTKHKDTIYKKRPNSATIDILVKGKEKFKSLIIENQFEVILEILKLFSATRNVSELQHIGGSKYSGVAKIGNKISSLDNCILIYQSITGIFEKRIDLLKV

SEQ ID NO: 603 - protein, 1395 aa, Treponema denticola
  REGION 1..1395: note = Treponema denticola ASLM
MKKEIKDYFLGLDVGTGSVGWAVTDTDYKLLKANRKDLWGMRCFETAETAEVRRLHRGARRRIERRKKRIKLLQELFSQEIAKIDEGFFQRMKESPLYAEDKTILQENTLFNDKDFTDKTYHKAYPTINHLIKAWIENKVKPDPRLLYLACHNIIKKRGHFLFEGDFDSENQFDTSIQALFEYLREDMEVDIDADSQKVKEILKDSSLKNSEKQSRLNKMLGLKPSDKQKKAITNLISGNKINFADLYDNPDLKDAEKNSISFSKDDFDALSDDLASILGDSFELLLKAKAVYNCSVLSKVIGDEQYLSFAKVKIYEKHKTDLTKLKNVIKKHFPKDYKKVFGYNKNEKNNNNYSGYVGVCKTKSKKLIINNSVNQEDFYKFLKTILSAKSEIKEVNDILTEIETGTFLPKQISKSNAEIPYQLRKMELEKILSNAEKHFSFLKQKDEKGLSHSEKIIMLLTFKIPYYIGPINDNHKKSFPDRCWVVKKEKSPSGKTTPWNFFDHIDKEKTAEEFITSRTNFCTYLIGESVLPKNSLLYSEYTVLNEINNLQIIIDGKNICDTKLKQKIYEELFKKYKKITQKQISTFIKHEGICNKTDEVIILGIDKECTSSLKSYIELKNIFGKQVDEISTKNMLEEIIRWATIYDEGEGKTILKTKIKAEYGKYCSDEQIKKILNLKFSGWGRLSRKFLETVTSEMPGFSEPVNIITAMRETQNNLMELLSSEFKFTENIKKINSGFEDVEKQFSYDGLVKPLFLSPSVKKMLWQTLKLVKEISHITQAPPKKIFIEMAKGAELDPVRTKTRLKILQDLYNNCKNDADAFSSEIKDLSGKIENEDNLRLRSDKLYLYYTQLGKCMYCGKPIEIGHVFDTSNYDIDHIYPQSKIKDDSISNRVLVCSSCNKNKEDKYPLKAEIQSKQRGFWNFLQRNNFISLEKFNRLTRATPISDDETAKFIARQLVETRQATKVAARVLEKMFPETKIVYSKAETVSMFRNKFDIVKCREINDFHHAHDAYLNIVVGNVYNTKFTNNLWNFIKEKRDNPKIADTYNYYKVFDYDVKRNNITAWEKGKTIITVKDMLKRNTPIYTRQAACKKGGLFDQTIMKKGLGQHPLKKEGPFSNISKYGGYNKVSAAYYTLIEYEEKGNKIRSLETIPLYLVKDIQKDQDVLKSYLTDLLGKKEFKILVPKIKINSLLKINGFPCHITGKTNDSFLLRPAVQFCCSNDEVLYFKKIIRFSEIRSQREKIGKTISPYEDLSFRSYIKENLCKKTKNDEIGEKEFYDLLQKKNLEIYDMLLTKHKDTIYKKRPNSATIDILVKGKEKFKSLIIENQFEVILEILKLFSATRNVSDLQHIGGSKYSGVAKIGNKISSLDNCILIYQSITGIFEKRIDLLKV

SEQ ID NO: 604 - protein, 1395 aa, Treponema denticola
  REGION 1..1395: note = Treponema denticola ATCC 35405
MKKEIKDYFLGLDVGTGSVGWAVTDTDYKLLKANRKDLWGMRCFETAETAEVRRLHRGARRRIERRKKRIKLLQELFSQEIAKTDEGFFQRMKESPFYAEDKTILQENTLFNDKDFADKTYHKAYPTINHLIKAWIENKVKPDPRLLYLACHNIIKKRGHFLFEGDFDSENQFDTSIQALFEYLREDMEVDIDADSQKVKEILKDSSLKNSEKQSRLNKILGLKPSDKQKKAITNLISGNKINFADLYDNPDLKDAEKNSISFSKDDFDALSDDLASILGDSFELLLKAKAVYNCSVLSKVIGDEQYLSFAKVKIYEKHKTDLTKLKNVIKKHFPKDYKKVFGYNKNEKNNNNYSGYVGVCKTKSKKLIINNSVNQEDFYKFLKTILSAKSEIKEVNDILTEIETGTFLPKQISKSNAEIPYQLRKMELEKILSNAEKHFSFLKQKDEKGLSHSEKIIMLLTFKIPYYIGPINDNHKKFFPDRCWVVKKEKSPSGKTTPWNFFDHIDKEKTAEAFITSRTNFCTYLVGESVLPKSSLLYSEYTVLNEINNLQIIIDGKNICDIKLKQKIYEDLFKKYKKITQKQISTFIKHEGICNKTDEVIILGIDKECTSSLKSYIELKNIFGKQVDEISTKNMLEEIIRWATIYDEGEGKTILKTKIKAEYGKYCSDEQIKKILNLKFSGWGRLSRKFLETVTSEMPGFSEPVNIITAMRETQNNLMELLSSEFTFTENIKKINSGFEDAEKQFSYDGLVKPLFLSPSVKKMLWQTLKLVKEISHITQAPPKKIFIEMAKGAELEPARTKTRLKILQDLYNNCKNDADAFSSEIKDLSGKIENEDNLRLRSDKLYLYYTQLGKCMYCGKPIEIGHVFDTSNYDIDHIYPQSKIKDDSISNRVLVCSSCNKNKEDKYPLKSEIQSKQRGFWNFLQRNNFISLEKLNRLTRATPISDDETAKFIARQLVETRQATKVAAKVLEKMFPETKIVYSKAETVSMFRNKFDIVKCREINDFHHAHDAYLNIVVGNVYNTKFTNNPWNFIKEKRDNPKIADTYNYYKVFDYDVKRNNITAWEKGKTIITVKDMLKRNTPIYTRQAACKKGELFNQTIMKKGLGQHPLKKEGPFSNISKYGGYNKVSAAYYTLIEYEEKGNKIRSLETIPLYLVKDIQKDQDVLKSYLTDLLGKKEFKILVPKIKINSLLKINGFPCHITGKTNDSFLLRPAVQFCCSNNEVLYFKKIIRFSEIRSQREKIGKTISPYEDLSFRSYIKENLWKKTKNDEIGEKEFYDLLQKKNLEIYDMLLTKHKDTIYKKRPNSATIDILVKGKEKFKSLIIENQFEVILEILKLFSATRNVSDLQHIGGSKYSGVAKIGNKISSLDNCILIYQSITGIFEKRIDLLKV

SEQ ID NO: 605 - protein, 1395 aa, Treponema denticola
  REGION 1..1395: note = Treponema denticola H1-T
MKKEIKDYFLGLDVGTGSVGWAVTDTDYKLLKANRKDLWGMRCFETAETAEVRRLHRGARRRIERRKKRIKLLQELFSQEIAKIDEGFFQRMKESPFYAEDKTILQENALFNDKDFTDKTYHKAYPTINHLIKAWIENKVKPDPRLLYLACHNIIKKRGHFLFEGDFDSENQFDTSIQALFEYLREDMEVDIDADSQKVKEILKDSSLKNSEKQSRLNKILGLKPSDKQKKAITNLISGNKINFADLYDNPDLKDAEKNSISFSKDDFDALSDDLASILGDSFELLLKAKAVYNCSVLSKVIGDEQYLSFAKVKIYEKHKTDLTKLKAVIKKHFPNNYKKVFGYNQDNESKNNYSGYVGVCKTKNKKLVINNSVNQEDFYKFLKPILSAKSEIKEVNDILAEIETGNFLPKQISKSNAEIPYQLRKMELEKILSNAEKHFSFLKQKDEKGLSHSEKIIMLLTFKIPYYIGPINDNHKKSFPDRCWVVKKEKSPSGKTTPWNFFDHIDKEKTAEEFITSRTNFCTYLIGESVLPKNSLLYSEYTVLNEINNLQIIIDGKNICDTKLKQKIYEDLFKKYKKITQKQISTFIKHEGICNKTDEVIILGIDKECTSSLKSYIELKNIFGKQVDEISTKNMLEEIIRWATIYDEGEGKTILKTKIKAEYGKYCSDEQIKKILNLKFSGWGRLSRKFLETVTSEMPGFSEPVNIITAMRETQNNLMELLSSEFKFTENIKKINSGFEDAEKQFSYDGLVKPLFLSPSVKKMLWQTLKLVKEISHITQAPPKKIFIEMAKGAELEPARTKTRLKILQDLYSSCKNDADAFSSEIQYLSGKIENEDNLRLRSDKLYLYYTQLGKCMYCGKPIEIGHVFDTSNYDIDHIYPQSKIKDDSISNRVLVCSSCNKNKEDKYPLKSEIQSKQRGFWNFLQRNNFISLEKLNRLTRTTPISDDETAKFIARQLVETRQATKVAAKVLEKMFPETKIVYSKAETVSMFRNKFDIIKCREINDFHHAHDAYLNIVVGNVYNTKFTNNPWNFIKEKRDNPKIADTYNYYKVFDYDVKRNNITAWEKGKTIITVKDMLKRNTPIYTRQAACKKGELFNQTIMKKGLGQHPLKKEGPFSNISKYGGYNKVSAAYYTLIEYEEKVNKIRSLETIPLYLVKDIQKDQDVLKSYLTDLLGKKEIKILVPKIKINSLLKINGFPCHITGKTGDSFVLRPAVQFCCSNDEVLYFKKIIRFNEIRSQREKMGKTISPYEDLSFRSYIKENLCKKTKADEIGEKEFYDLLQKKNLEIYDMLLTKHKDTIYNKRPNSTTLGMLTKGRYEFINLKPKDQIIVMLEILKLFCTTREAIDLGLIKGKPAAGVATLGKKISNLDNCILIYQSITGIFEKRIDLLKV

SEQ ID NO: 606 - protein, 1395 aa, Treponema denticola
  REGION 1..1395: note = Treponema denticola H-22
MKKEIKDYFLGLDVGTGSVGWAVTDTDYKLLKANRKDLWGMRCFETAETAEVRRLHRGARRRIERRKKRIKLLQELFSQEIAKIDEGFFQRMKESPFYAEDKTILQENTLFNDKDFTDKTYHKAYPTINHLIKAWIENKVKPDPRLLYLACHNIIKKRGHFLFEGDFDSENQFDTSIQALFEYLREDMEVDIDADSQKVKEILKDSSLKNSEKQSRLNKILGLKPSDKQKKAITNLISGNKINFADLYDNPDLKDAEKNSISFSKDDFDALSDDLASILGDSFELLLKAKAVYNCSVLSKVIGDEQYLSFAKVKIYEKHKTDLTKLKNVIKKHFPKDYKKVFGYNKNEKNNNNYSGYVGVCKTKSKKLIINNSVNQEDFYKFLKTILSAKSEIKEVNDILTEIETGTFLPKQISKSNAEIPYQLRKMELEKILSNAEKHFSFLKQKDEKGLSHSEKIIMLLTFKIPYYIGPINDNHKKSFPDRCWVIKKEKSPSGKTTPWNFFDHIDKDKTAEAFITSRTNFCTYLVGESVLPKSSLLYSEYTVLNEINNLQIIIDGKNICDIKLKQKIYEELFKKYKKITQKQISTFIKHEGICNKTDEVIILGIDKECTSSLKSYIELKNIFGKQVDEISTKNMLEEIIRWATIYDEGEGKTILKTKIKAEYGKYCSDEQIKKILNLKFSGWGRLSRKFLETVTSEMPGFSEPVNIITAMRETQNNLMELLSSEFKFTENIKKINSGFEDAEKQFSYNGLVKPLFLSPSVKKMLWQTLKLVKEISHITQAPPKKIFIEMAKGAELEPARTKTRLKILQDLYNNCKNDADAFSSEIKDLSGKIENEDNLRLRSDKLYLYYTQLGKCMYCGKPIEIGHVFDTSNYDIDHIYPQSKIKDDSISNRVLVCSSCNKNKEDKYPLKSEIQSKQRGFWNFLQRNNFISLEKLNRLTRTTPISDDETAKFIARQLVETRQATKVAAKVLEKMFPETKIVYSKAETVSMFRNKFDIIKCREINDFHHAHDAYLNIVVGNVYNTKFTNNPWNFIKEKRDNPKIADTYNYYKVFDYDVKRNNITAWEKGKTIITVKDMLKRNTPIYTRQAACKKGGLFDQTIMKKGLGQHPLKKEGAFSNISKYGGYNKVSAAYYTLIEYEEKGNKIRSLETIPLYLVKDIQKDQDVLKSYLTDLLGKKEIKILVPKIKINSLLKINGFPCHITGKTGDSFVLRPAVQFCCSNDEVLYFKKIIRFNEIRSQREKMGKTISPYEDLSFRSYIKENLCKKTKADEIGEKEFYDLLQKKNLEIYDMLLTKHKDTIYNKRPNSTTLGMLTKGRYEFINLKPKDQIIVMLEILKLFCTTREAIDLGLIKGKPAAGVATLGKKISNPDNCILIYQSITGIFEKRIDLLKV

SEQ ID NO: 607 - protein, 1395 aa, Treponema denticola
  REGION 1..1395: note = Treponema denticola OTK
MKKEIKDYFLGLDVGTGSVGWAVTDTDYKLLKANRKDLWGMRCFETAETAEVRRLHRGARRRIERRKKRIKLLQELFSQEIAKIDEGFFQRMKESPLYAEDKTILQENTLFNDKDFTDKTYHKAYPTINHLIKAWIENKVKPDPRLLYLACHNIIKKRGHFLFEGDFDSENQFDTSIQALFEYLREDMELDIDADSQKVKEILKDSSLKNSEKQSRLNKMLGLKPSDKQKKAITNLISGNKINFADLYDNPDLKDAEKNSISFSKDDFDALSDDLASILGDSFELLLKAKAVYNCSVLSKVIGDEQYLSFAKVKIYEKHKTDLTKLKNVIKKHFPKDYKKVFGYNKNEKNNNNYSAYVGVCKITHKKLVIKNSASQEDFYKFLKTILSAKSEIKEVNDILTEIETGTFLPKQISKSNAEIPYQLRKMELEKILSNAEKHFSFLKQKDEKGLSHSEKIIMLLTFKIPYYIGPINDNHKKSFPDRCWVVKKEKSPSGKTTPWNFFDHIDKEKTAEEFITSRTNFCTYLIGESVLPKSSLLYSEYTVLNEINNLQIIIDGKNICDIKLKQKIYEELFKKYKKITQKQISTFIKHEGICNKTDEVIILGIDKECTSSLKSYIELKNIFGKQVDEISTKNMLEEIIRWATIYDEGEGKTILKTKIKAEYGKYCSDEQIKKILNLKFSGWGRLSRKFLETVTSEMPGFSEPVNIITAMRETQNNLMELLSSEFKFTENIKKINSGFEDAEKQFSYNGLVKPLFLSPSVKKMLWQTLKLVKEISHITQAPPKKIFIEMAKGAELEPARTKTRLKILQDLYSSCKNDADAFSSEIQYLSGKIENEDNLRLRSDKLYLYYTQLGKCMYCGKPIEIGHVFDTSNYDIDHIYPQSKIKDDSISNRVLVCSSCNKNKEDKYPLKAEIQSKQRGFWNFLQRNNFISLEKLNRLTRTSPISDDETAKFIARQLVETRQATKVAAKVLEKMFPETKIVYSKAETVSMFRNKFDIIKCREINDFHHAHDAYLNIVVGNVYNTKFTNNPWNFIKEKRDNPKIADTYNYYKVFDYDVKRNNITAWEKGKTIITVKDMLKRNTPIYTRQAACKKGELFNQTIMKKGLGQHPLKKEGPLSNISKYGGYNKVSAAYYTLIEYEEKGSKIRSLETIPLYLVKDIQKNKDGLKSYLTDQIGKKEIKILIPKIKINSLLKINGFPCHITGKMGEAFVLRPAVQFCCSNDEALYFKKIIRFNEIRKQREKMGKTISPYEDLSFRSYIKDNLCKKTKADEIEEKEFYDLLQKKNLEIYDMLLTKHKDTIYKKRPNSATIDILVKGKEKFKSLIIENQFEVILEILKLFSATRNVSDLQHIGGSKNAGNARVGNKISSLDNCILIYQSITGIFEKRIDLLKI

SEQ ID NO: 608 - protein, 1395 aa, Treponema denticola
  REGION 1..1395: note = Treponema denticola SP37
MKKEIKDYFLGLDVGTGSVGWAVTDTDYKLLKANRKDLWGMRCFETAETAEVRRLHRGARRRIERRKKRIKLLQELFSQEIAKTDEGFFQRMKESPFYAEDKTILQENALFNDRDFTDKTYHKAYPTINHLIKAWIENKVKPDPRLLYLACHNIIKKRGHFLFEGDFDSENQFDTSIQALFEYLREDMEVDIDADSQKVKEILKDSSLKNSEKQSRLNKMLGLKPSDKQKKAITNLISGNKINFADLYDNPDLKDAEKNSISFSKDDFDALSDDLASILGDSFELLLKAKAVYNCSVLSKVIGDEQYLSFAKVKIYEKHKTDLTKLKNVIKKHFPNDYKKVFGYNKNEKNNNNYSAYVGVCKTKSKKLVINNTVNQEDFYKFLKPILLAKSEIKEVNDILTEIETGTFLPKQISKSNAEIPYQLRKMELEKILSNAEKHFSFLKQKDEKGLSHSEKIIMLLTFKIPYYIGPINDNHKKSFPDRCWVIKKEKSPSGKTTPWNFFDHIDKDKTAEAFITSRTNFCTYLVGESVLPKNSLLYSEYTVLNEINNLQIIIDGKNICDIKLKQKIYEELFKKYKKITQKQISTFIKHEGICNKTDEVIILGIDKECTSSLKSYIELKNIFGKQVDEISTKNMLEEIIRWATIYDEGEGKTILKTKIKAEYGKYCSDEQIKKILNLKFSGWGRLSRKFLETVTSEMPGFSEPVNIITAMRETQNNLMELLSSEFKFTENIKKINSGFEDVEKQFSYDSLVKPLFLSPSVKKMLWQTLKLVKEISHITQAPPKKIFIEMAKGAELDPVRTKTRLKILQDLYNNCKNDADAFSSEIKDLSGKIENEDNLRLRSDKLYLYYTQLGKCMYCGKPIEIGHVFDTSNYDIDHIYPQSKIKDDSISNRVLVCSSCNKNKEDKYPLKAEIQSKQRGFWNFLQRNNFISLEKLNRLTRTSPISDDETAKFIARQLVETRQATKVAAKVLEKMFPETKIVYSKAETVSMFRNKFDIIKCREINDFHHAHDAYLNIVVGNVYNTKFTNNPWNFIKEKRDNPKIADTYNYYKVFDYDVKRNNITAWEKGKTIITVKDMLKRNTPIYTRQAACKKGELFNQTIMKKGLGQHPLKKEGPLSNISKYGGYNKVSAAYYTLIEYEEKGSKIRSLETIPLYLVKDIQKNKDGLKSYLTDQIGKKEIKILIPKIKINSLLKINGFPCHITGKMGEAFVLRPAVQFCCSNDEALYFKKIIRFNEIRKQREKMGKTISPYEDLSFRSYIKDNLCKKTKADEIEEKEFYDLLQKKNLEIYDMLLTKHKDTIYKKRPNSATIDILVKGKEKFKSLIIENQFEVILEILKLFSATRNVSDLQHIGGSKNAGNARVGNKISSLDNCILIYQSITGIFEKRIDLLKI

SEQ ID NO: 609 - protein, 1062 aa, Treponema sp.
  REGION 1..1062: note = Treponema sp. JC4
MIMKLEKWRLGLDLGTNSIGWSVFSLDKDNSVQDLIDMGVRIFSDGRDPKTKEPLAVARRTARSQRKLIYRRKLRRKQVFKFLQEQGLFPKTKEECMTLKSLNPYELRIKALDEKLEPYELGRALFNLAVRRGFKSNRKDGSREEVSEKKSPDEIKTQADMQTHLEKAIKENGCRTITEFLYKNQGENGGIRFAPGRMTYYPTRKMYEEEFNLIRSKQEKYYPQVDWDDIYKAIFYQRPLKPQQRGYCIYENDKERTFKAMPCSQKLRILQDIGNLAYYEGGSKKRVELNDNQDKVLYELLNSKDKVTFDQMRKALCLADSNSFNLEENRDFLIGNPTAVKMRSKNRFGKLWDEIPLEEQDLIIETIITADEDDAVYEVIKKYDLTQEQRDFIVKNTILQSGTSMLCKEVSEKLVKRLEEIADLKYHEAVESLGYKFADQTVEKYDLLPYYGKVLPGSTMEIDLSAPETNPEKHYGKISNPTVHVALNQTRVVVNALIKEYGKPSQIAIELSRDLKNNVEKKAEIARKQNQRAKENIAINDTISALYHTAFPGKSFYPNRNDRMKYRLWSELGLGNKCIYCGKGISGAELFTKEIEIEHILPFSRTLLDAESNLTVAHSSCNAFKAERSPFEAFGTNPSGYSWQEIIQRANQLKNTSKKNKFSPNAMDSFEKDSSFIARQLSDNQYIAKAALRYLKCLVENPSDVWTTNGSMTKLLRDKWEMDSILCRKFTEKEVALLGLKPEQIGNYKKNRFDHRHHAIDAVVIGLTDRSMVQKLATKNSHKGNRIEIPEFPILRSDLIEKVKNIVVSFKPDHGAEGKLSKETLLGKIKLHGKETFVCRENIVSLSEKNLDDIVDEKIKSKVKDYVAKHKGQKIEAVLSDFSKENGIKKVRCVNRVQTPIEITSGKISRYLSPEDYFAAVIWEIPGEKKTFKAQYIRRNEVEKNSKGLNVVKPAVLENGKPHPAAKQVCLLHKDDYLEFSDKGKMYFCRIAGYAATNNKLDIRPVYAVSYCADWINSTNETMLTGYWKPTPTQNWVSVNVLFDKQKARLVTVSPIGRVFRK

SEQ ID NO: 610 - protein, 1011 aa, unidentified
  REGION 1..1011: note = Description of Unknown: uncultured delta proteobacterium HF0070_07E19 polypeptide
MSSKAIDSLEQLDLFKPQEYTLGLDLGIKSIGWAILSGERIANAGVYLFETAEELNSTGNKLISKAAERGRKRRIRRMLDRKARRGRHIRYLLEREGLPTDELEEVVVHQSNRTLWDVRAEAVERKLTKQELAAVLFHLVRHRGYFPNTKKLPPDDESDSADEEQGKINRATSRLREELKASDCKTIGQFLAQNRDRQRNREGDYSNLMARKLVFEEALQILAFQRKQGHELSKDFEKTYLDVLMGQRSGRSPKLGNCSLIPSELRAPSSAPSTEWFKFLQNLGNLQISNAYREEWSIDAPRRAQIIDACSQRSTSSYWQIRRDFQIPDEYRFNLVNYERRDPDVDLQEYLQQQERKTLANFRNWKQLEKIIGTGHPIQTLDEAARLITLIKDDEKLSDQLADLLPEASDKAITQLCELDFTTAAKISLEAMYRILPHMNQGMGFFDACQQESLPEIGVPPAGDRVPPFDEMYNPVVNRVLSQSRKLINAVIDEYGMPAKIRVELARDLGKGRELRERIKLDQLDKSKQNDQRAEDFRAEFQQAPRGDQSLRYRLWKEQNCTCPYSGRMIPVNSVLSEDTQIDHILPISQSFDNSLSNKVLCFTEENAQKSNRTPFEYLDAADFQRLEAISGNWPEAKRNKLLHKSFGKVAEEWKSRALNDTRYLTSALADHLRHHLPDSKIQTVNGRITGYLRKQWGLEKDRDKHTHHAVDAIVVACTTPAIVQQVTLYHQDIRRYKKLGEKRPTPWPETFRQDVLDVEEEIFITRQPKKVSGGIQTKDTLRKHRSKPDRQRVALTKVKLADLERLVEKDASNRNLYEHLKQCLEESGDQPTKAFKAPFYMPSGPEAKQRPILSKVTLLREKPEPPKQLTELSGGRRYDSMAQGRLDIYRYKPGGKRKDEYRVVLQRMIDLMRGEENVHVFQKGVPYDQGPEIEQNYTFLFSLYFDDLVEFQRSADSEVIRGYYRTFNIANGQLKISTYLEGRQDFDFFGANRLAHFAKVQVNLLGKVIK

SEQ ID NO: 611 - protein, 1032 aa, unidentified
  REGION 1..1032: note = Description of Unknown: uncultured Termite group 1 bacterium phylotype Rs-D17 polypeptide
MLYHIANHRGTDSVRSFLEYDDDKIKENTLTAKIAKETKKVIDAKKYRTFGEYLYKGKIEKFQQNIRKKVSNRKTPANKNKEFAVTRDVIIKETEKILASQKQYYTYILTDEYIKKIKDAISYQTEKLIPESGYCPYFKDEKRLPRSHKLNEYRRMYEALNNAKYFDPVLDENTGEILSYQEKEFSREEKKILFDEVLLKGMELTESGAKKLLYHLPDGCEVQLQGRDKTTQKIKGYALVDLEASPFWLRLSQQQQDEFLYDWNSLPLEKLKPKLTNYYSLTESEVDETFQEIKLPSNYASVGKKAMEILLTYIKDGCSYTEALEKAVSEGKLKVDKQTMIYDSLPYYGKILKESTQKLIGKAFSKQFADRNYKEPDTNKNEREFGKIANPVVHQTLNELRKLINEIITVFGKKPLEIGLETTRELKKSKKNREYLSKQQNKNEYARNRIYKEYIEPHLSQIKSRQENPSKYISKFELLEEQNFICPFCSEKITPDDIINSKVDVEHIFPIEESEDITKNNLVIAHNECNADKGKKSPFDAFGDKTSGKYRWNCILHNAQKNLPHKVWRFYQGSLEKFLENKPMSRRFGTDNSYISKIAARYLACLFNDPYHSEIFCIKSSLIAQLRIAWDLNSIMVPLVKNILSEKELEEFKISKNKKIRIDNRHHALDAIVIAYANRGYHNFLNRIHAKEYKINYREKSWLSKILLPPLNRDLEDFKISVKDSIEKANVSIKHDHNTNGSLVKATAYKVYYSGAGEYIITTSKNVEEISFKEKEDPKDTLYRALCKFECRDIDIKDEKLIKKLKYNSTLYKKVQNNLSKAKQELEQDNKKTEEEGKKSQKITEVRIYKKACSLVKGQYIQCGSRLKDKFFAVKEPTEIKTGLGYDTGDNLFLDLYYDKTGKLCGEIIRKVNFNRNKPNYQKEGYTLFERIYQSDILEVDTSEDRISLKNKTGSAPSDRTFIKVNTFTEVNAYFDGKRDKIQIFFGNLLKSSFKNDSFFISSMQKYNVRKVILTSLGIIKYRSQILKNKEV

SEQ ID NO: 612 - protein, 1398 aa, Veillonella atypica
  REGION 1..1398: note = Veillonella atypica ACS-134-V-Col7a
METQTSNQLITSHLKDYPKQDYFVGLDIGTNSVGWAVTNTSYELLKFHSHKMWGSRLFEEGESAVTRRGFRSMRRRLERRKLRLKLLEELFADAMAQVDSTFFIRLHESKYHYEDKTTGHSSKHILFIDEDYTDQDYFTEYPTIYHLRKDLMENGTDDIRKLFLAVHHILKYRGNFLYEGATFNSNAFTFEDVLKQALVNITFNCFDTNSAISSISNILMESGKTKSDKAKAIERLVDTYTVFDEVNTPDKPQKEQVKEDKKTLKAFANLVLGLSANLIDLFGSVEDIDDDLKKLQIVGDTYDEKRDELAKVWGDEIHIIDDCKSVYDAIILMSIKEPGLTISQSKVKAFDKHKEDLVILKSLLKLDRNVYNEMFKSDKKGLHNYVHYIKQGRTEETSCSREDFYKYTKKIVEGLADSKDKEYILNEIELQTLLPLQRIKDNGVIPYQLHLEELKVILDKCGPKFPFLHTVSDGFSVTEKLIKMLEFRIPYYVGPLNTHHNIDNGGFSWAVRKQAGRVTPWNFEEKIDREKSAAAFIKNLTNKCTYLFGEDVLPKSSLLYSEFMLLNELNNVRIDGKALAQGVKQHLIDSIFKQDHKKMTKNRIELFLKDNNYITKKHKPEITGLDGEIKNDLTSYRDMVRILGNNFDVSMAEDIITDITIFGESKKMLRQTLRNKFGSQLNDETIKKLSKLRYRDWGRLSKKLLKGIDGCDKAGNGAPKTIIELMRNDSYNLMEILGDKFSFMECIEEENAKLAQGQVVNPHDIIDELALSPAVKRAVWQALRIVDEVAHIKKALPSRIFVEVARTNKSEKKKKDSRQKRLSDLYSAIKKDDVLQSGLQDKEFGALKSGLANYDDAALRSKKLYLYYTQMGRCAYTGNIIDLNQLNTDNYDIDHIYPRSLTKDDSFDNLVLCERTANAKKSDIYPIDNRIQTKQKPFWAFLKHQGLISERKYERLTRIAPLTADDLSGFIARQLVETNQSVKATTTLLRRLYPDIDVVFVKAENVSDFRHNNNFIKVRSLNHHHHAKDAYLNIVVGNVYHEKFTRNFRLFFKKNGANRTYNLAKMFNYDVICTNAQDGKAWDVKTSMNTVKKMMASNDVRVTRRLLEQSGALADATIYKASVAAKAKDGAYIGMKTKYSVFADVTKYGGMTKIKNAYSIIVQYTGKKGEEIKEIVPLPIYLINRNATDIELIDYVKSVIPKAKDISIKYRKLCINQLVKVNGFYYYLGGKTNDKIYIDNAIELVVPHDIATYIKLLDKYDLLRKENKTLKASSITTSIYNINTSTVVSLSNKVGIDVFDYFMSKLRTPLYMKMKGNKVDELSSTGRSKFIKMTLEEQSIYLLEVLNLLTNSKTTFDVKPLGITGSRSTIGVKIHNLDEFKIINESITGLYSNEVTIV

SEQ ID NO: 613 - protein, 1398 aa, Veillonella parvula
  REGION 1..1398: note = Veillonella parvula ATCC 17745
METQASNQLISSHLKGYPIKDYFVGLDIGTSSVGWAVTNKAYELLKFRSHKMWGSRLFDEGESAVARRGFRSMRRRLERRKLRLKLLEELFADAMAQVDPTFFMRLRESKYHYEDKTTGHSSKHILFIDKNYNDQDYFKEYPTVYHLRSELMKSGTDDIRKLFLAVHHILKYRGNFLYEGATFDSNASTLDDVIKQALENITFNCFDCNSAISSIGQILMEAGKTKSDKAKAIEHLVDTYIATDTVDTSSKTQKDQVKEDKKRLKAFANLVLGLNASLIDLFGSVEELEEDLKKLQITGDTYDDKRDELAKAWSDEIYIIDDCKSVYDAIILLSIKEPGLTISESKVKAFNKHKDDLAILKSLLKSDRSIYNTMFKVDEKGLHNYVHYIKQGRTEETSCNREDFYKYTKKIVEGLSDSKDKEYILSQIELQILLPLQRIKDNGVIPYQLHLEELKAILAKCGPKFPFLNEVADGFSVAEKLIKMLEFRIPYYVGPLNTHHNVDNGGFAWAVRKASGRVTPWNFDDKIDREKSAAAFIKNLTNKCTYLLGEDVLPKSSLLYSEFMLLNELNNVRIDGKPLEKVVKEHLIEAVFKQDHKKMTKNRIEQFLKDNGYISETHKHEITGLDGEIKNDLASYRDMVRILGDGFDRSMAEEIITDITIFGESKKMLRETLRKKFASCLDDEAIKKLTKLRYRDWGRLSQKLLNGIEGCDKAGDGTPETIIILMRNFSYNLMELLGDKFSFMERIQEINAKLTEGQIVNPHDIIDDLALSPAVKRAVWQALRIVDEVAHIKKALPARIFVEVTRSNKNEKKKKDSRQKRLSDLYAAIKKDDVLLNGLNNEIFGELKSSLAKYDDAALRSKKLYLYYTQMGRCAYTGEIIELSLLNTDNYDIDHIYPRSLTKDDSFDNLVLCKRTANAQKSDAYPISEEIQKTQKPFWTFLKQQGLISERKYERLTRITPLTADDLSGFIARQLVETNQSVKAATTLLRRLYPGVDVVFVKAENVTDFRHDNNFIKVRSLNHHHHAKDAYLNIVVGNVYHERFTRNFRAFFKKNGANRTYNLAKMFNYDVNCTNAKDGKAWDVKTSMDTVKKMMDSNDVRVTKRLLEQTGALADATIYKATVAGKAKDGAYIGMKTKSSVFADVSKYGGMTKIKNAYSIIVQYTGKKGEVIKEIVPLPIYLTNRNTTDQDLINYVASIIPQAKDISIIYGKLCINQLVKVNGFYYYLGGKTNSKFCIDNAIQVIVSNEWIPYLKVLEKFNNMRKDNKDLKANVVSTRALDNKHTIEVRIVEEKNIEFFDYLVSKLKMPIYQKMKGNKAAELSEKGYGLFKKMSLEEQSIHLIELLNLLTNQKTTFEVKPLGITASRSTVGSKISNQDEFKVINESITGLYSNEVTIV

SEQ ID NO: 614 - protein, 1395 aa, Veillonella sp.
  REGION 1..1395: note = Veillonella sp. 6_1_27
METQASNQLISSHLKGYPIKDYFVGLDIGTSSVGWAVTNKAYELLKFRSHKMWGSRLFDEGESAVARRGFRSMRRRLERRKLRLKLLEELFADAMAQVDPTFFMRLRESKYHYEDKTTGHSSKHILFIDKNYTDQDYYKEYPTIYHLRVALMKSGTDDIRKLFLAVHHILKYRGNFLYEGATFDSNASTLDDVLKQALENITFNCFDSSAAIGSIGQILMELGKTKSDKAKAIERLVDTYIITDEVDTSGKTQKEQVKEDKKRLKSFANLVLGLSASLTDLFGSVEDLDEDLKKLQIIGDTYDERRDDLAKVWGDEIHIIDDCKSVYDAIILMSIKEPGLTISESKVKAFKKHKDDLAILKSLLKSDRSIYNTMFKVDEKGLHNYVHYIKQGRTEETSCNREDFYKYTKKVVEGLPDSKDKEYILSEIELQTLLPLQRIKDNGVIPYQLHLEELKVILAKCGPKFPFLNEVADGFSVAEKLIKMLEFRIPYYVGPLNTHHNVDNGGFAWAVRKASGRVTPWNFDDKIDREKSAAAFIKNLTNKCTYLLGEDVLPKSSLLYSEFMLLNELNNVRIDGKPLEKAVKEHLIEAVFKQDHKKMTKNRIEQFLKDNNYIPEKHKPEITGLDGEIKNDLASYRDMVRILGNNFDLSMAEEIITDITIFGESKKMLRETLRNKFSSRLDDEAIKKLSKLRYRDWGRLSRKLLNVIEGCDKAGDGTPETIIILMRNFSYNLMELLGDKFSFMERIQEINAKLIEGQIVNPHDIIDDLALSPAVKRAVWQALRIVDEIVHIKKTLPARIFVEVTRSNKAEKKKKDSRQKRLSDLYAAIKKDDALLSGLTNEEFGGLKSGLAKYDDAALRSKKLYLYYTQMGRCAYTGEVIDLSQLNTDNYDIDHIYPRSLTKDDSFDNLVLCKRTANAQKSDTYPISKEIQKAQKAFWIFLKQQGLISERKYERLTRITPLTADDLSGFIARQLVETNQSVKAATTLLRRLYPGVDVVFVKAENVTDFRHDNDFIKVRSLNHHHHAKDAYLNIVVGNVYHERFTRNFRAFFKKNGANRTYNLAKMFNYDVKCTNAKDGKAWAVKTSMDTVKKMMDSNDVRVTKRVYEQKGQLSDINLTKASKVKADIYLPIKANDPIMSQNMKYGGYSDIKNAYYTIIEYSDKKNNSIKAFIPIPIFIATKTLTKQALLEYIKTVLPKANNLRIIYKKVYNDQLLKIDGFNYYLGGRSNDRFCIDNAIQLIVPLEIQFYIKLVEKFTAIISENKNIALKASSVKSRNPINNQVENITLEYTQKLFDYLVSKFNELIYLKMRGNKLTDVNNIGRKQFIKLSLEERCKALAELLNIFTNMNKKLSLSTINVSASRKVVNFKISSLDEFKIVNESITGLYSHEITIV

SEQ ID NO: 615 - protein, 1120 aa, Veillonella sp.
  REGION 1..1120: note = Veillonella sp. oral taxon 780 str. F0422
MGFKANLVNLFTDEDIEVILPEEKEFKSINLHEGIYEDVRDAYEDAWGDRFAIVDQCKVLHDIIVISSIIKPGQSLSEAKIESYNQHKEDLVLLKSVLKEDRKLYDDMFVVDTDKGTNYVKYTKQGVNGNTSATQEEFYKYVRKVVSVLPETEHTRRIVQKLEEGTFLPLQRISKNGVVPYQLHKEELVRILDKATVNFPFLNKVENGLTVADKIISILEFKIPYYVGPLNPTHSIENGGFAWVVRKEAGQVLPWNFEQKVDVQASAVKFIENLTNKCTYLIDQDVLPKYSLLYAEFSLLNELNNIRVNDKPLPADVKQAFIRDHFISLQDSKTATKKVVAKYLVDNNYVSQPPIITGMDQQIATKLTSHRDMTRILGEHFDHAMAEDIIRYITIFGESKDMLRQVLKNYYGDRLTTEQIKKLGKLTYTGWGRLSKKFLSDIWGMKKNDDDAEAGTIIEHMREGQENLMQLLSSSYSFIDVVQEYVTNVLGEKEKTAFEMLEDLSLSPMVKRSVWQTLRILDEIVSIRKELPKKIFVEVARTNKADKKRTQSRKALLEELYKQIKDEDVHVLQQELESKEDSALNSKKLYLYFTQMGRCMYSGRRIDIHELFTDKYDIDHIYPRSLTKDDSWHNIVLVEKQLNAEKTDRFPILSAIQSKQKGFWKLLWDRGFISEKKYDRLVRTTDLTDEELNQFINRQMVSTNQSVKAVTTLLHQLYPETEVVFSKAENVSDFRHDYDFVKVRSINHHHHAKDAYLNIVVGNVYHEKFTKNFLSFAKQKGTRRTYNLTKIFEYEIKLTEESKKVIWDPNIHMDIVKKMMKSNDVRVTQRAVPQKGGLSDETIYKKGIAKRGVYLPLKSSDERVRDVEKYGGRTSITISEYIILNIRDTSDQDRIEIFSLPLYIAGKKDIHKAIEEAYLSTCKKPASVVDIQILYRGLYIGSKVNINGFTYYMGGKTGSNVSIDSAVDVVMDITSSVYIKLLEKVAIKKIENPKTFRIENIKTSYNHKEVTVSKEQNIALYQELLKKLDTPLFSKMKGNKLEEFRTVGFDTFIALSLEEQASVLLEVLNVLTNFKTKRDITKIGMTSSRSTLGINISNTEQFSVITTSITGLYEQEIKIK

SEQ ID NO: 616 - protein, 1068 aa, Verminephrobacter eiseniae
MNKAVAYRLALDLGSTSLGWAIFRLNEAREPTAIIRAGVRIFSDGRNANSEPLAVHRRVARAMRRRRDRLLKRKKRMHDQLVQHGFFPAEVAERKELERLNPYQLRAKGLHEALTPGEFARALFHINQRRGFKSNRKTDRKDNDSGALKQAISELRKRIQDSDCATAGEWFWKERMQQKPEGVRGQWVRARYRKTPSTTDEGKKRIGYDLYVDRAMVEQEFDALWAAQAALQPGLFTEAARAELKDTLLYQRDLRPVKPGRCTLLPAEERAPLALPSTQRFRILQEVNNLRLLDEALREVPLNLAQRDAVVSALEGKKELSFAAIRKLLTLSGKFNLEDEKRAELKGNATSVILARKDLFGDAWAGFDAAVQDEIVWRLVSQESEGALIAWLQQHTGVDGVCAEAIVNTRLPDGYGRLSRKALERIVPALQREVCTYDKAVQAAGFAHHSDLGFDFDYAEDEVQQVGEHTIASTGEVQAQYAFKQLPYYGKALQRHVAFGSGDAKDHEEKCYGKIANPTVHIGLNQVRTVVNALIRRYGHPTEVVVELARDLKQSREQKQQTQREQADNQKRNEDIRKRIAPILETSPERVRDRDIKKWILWEELNKKDIADRHCPYSGERISATMLLSEAVEIEHILPFSRTLDDSLNNRTVAMRRANRIKGDRTPWEARADFEAQGWRYEAILQRAEGMPPRKRYRFAEDGYQRWLGKDRNFLARALNDTSYLSRLAANYLRLVCPQGVRVIPGQMTDKLRGKFGLNSVLGLDGKKNRNDHRHHAVDACVIGVTDQGLMQRFANASKQARENGLTRLVQDMLLPWWPSYYDHVERAVRHIRVSHRPDHGFEGAMMKGTAHGIREDGIREDGRIKQRPKAKGSADHKTITLIPIDEPRQLARHGVDAEGKPLPYKGYASGSNYCIEITKNGKGKWEGQVISTFDAYRIKAAADAAARAGQVISTVEADSIVRKSGWERLRGAQSQNGQPLVMRLVIGDSVRMEVDGRDEVMRVVKMSGKEMVFAPVREANVDKRNNMPDEQDPFTYTYKRADQLRKAKARQVTISPIGELRDPGFKG

SEQ ID NO: 617 - protein, 1440 aa, Weeksella virosa
MKTILGLDLGTNSIGWALVEQDFENKQGLILGMGSRIIPMDAGIIGKFAEGSSISQTAERTGYRSIRRLRERHLLRRERLHRVLNILKFLPEHYAAEIDFEKRFGQFLAETEPKLAWKKNAEGKFEFLFQRSFDEMVADFKANGQDIKIPYDWTIYYLRKKALTQKISPQELAWIILNFNQKRGYYQLRGEEEEENPNKKVEFYSLKIVDVVADEQPNKKGDTWYSLHLENGWVYRRSSKIPLYDWKDKVRDFIVTTDINEDGSEKLDKDGEVKRSFRAPKEDDWTLIKKKTEQEIEQFNQTVGSYIYEALLDNPTQKIRGKLVRTIERKFYKSELKKILEKQIELQPELFTEDLYNACARELYRRNVAHQQQLSSRDFVYLFLNDIIFYQRPLRSQKSLISNCSLEFRTIKDKDGNGQIIYLKAIPKSNPYYQEFRVWQWLYNLKIFTKEDDKDVTNQFINKVEDLEALFEFLMNQKEVNHTDILTYLIEPIVKSKYPNAKGKAFKDELKKELKKYRWNYVYDADKDESKSYPMNETRYELRKRLDKVENVPADFMTRKIEQHLWHIIYSVTDKIEFEKALKSFANKYDLHQESFVENFKRFKPFDSDYGTYSEKAIKKLLPLMRVGKYWSWDIIDDKTKTRIGKIITGEYDETIKNRVREKAIDLTEENHFQGLQLWLAQYIVYDRHSEADIAGKWNSVADLEQYLSEFKQHSLRNPIVEQVITETLRVVRDIWKQYGKGAKDYFDEIHIELGREMKNTAEERKRLSSIISENETTNLRIRAILEELMYDENMENVRPYSPMQQEALKIYEDGVLSSSVEIPEDIEKISKKSEPTKSEIQRYKLWLEQKYRSPYTGRPIPLSKLFTPAYQIEHIIPQARFFDDGFSNKVICESEVNALKDKMLGLEFIQNYYGQKVTTSFGEVTILTEDAYKAFVKEHYDKNRSKRNKLLLEEIPEKMIDRQMNDTRYISKYISKVLSNLVRGEKDDEGVNSKNIIPGNGKITGILKQDWGLNDVWNDLILPRFERMNQLTNSTDFTAWNEKHQKFLPSVPLELSKGFQKKRIDHRHHALDALIIACATRDHVNLLNNKHAKSRNERYDLQHKLRHTTPWQDKEGKVRTKFTEFKKPWETFTQDTKKELEKIVVNFKQNLRVINKATNYYEKIVDGKKVMFKQEGVNWAIRKPMHKETVSGKIDLPRVKVSKGKILTATRKSLDTSFNAKTILSITDTGIQKILLNYLKAKGNPELAFSPEGIEEMNQNISLYNDGKPHQPILKVRVFEQGSKFPLGETGNKTTKYVEAAKGTNLFFGVYEDNQGKRSYDTIPLNIVIERQKQGLNSVPETNEKGHRLLFSLSPNDLVYVPIEGEVFDETNPDVNRIYKVVSFSGSQMFCVRQDVATSIVYKLEFSSLNKMERTIDGIMIKEICIKLKVDRLGNISKA

SEQ ID NO: 618 - protein, 1409 aa, Wolinella succinogenes
MLVSPISVDLGGKNTGFFSFTDSLDNSQSGTVIYDESFVLSQVGRRSKRHSKRNNLRNKLVKRLFLLILQEHHGLSIDVLPDEIRGLFNKRGYTYAGFELDEKKKDALESDTLKEFLSEKLQSIDRDSDVEDFLNQIASNAESFKDYKKGFEAVFASATHSPNKKLELKDELKSEYGENAKELLAGLRVTKEILDEFDKQENQGNLPRAKYFEELGEYIATNEKVKSFFDSNSLKLTDMTKLIGNISNYQLKELRRYFNDKEMEKGDIWIPNKLHKITERFVRSWHPKNDADRQRRAELMKDLKSKEIMELLTTTEPVMTIPPYDDMNNRGAVKCQTLRLNEEYLDKHLPNWRDIAKRLNHGKFNDDLADSTVKGYSEDSTLLHRLLDTSKEIDIYELRGKKPNELLVKTLGQSDANRLYGFAQNYYELIRQKVRAGIWVPVKNKDDSLNLEDNSNMLKRCNHNPPHKKNQIHNLVAGILGVKLDEAKFAEFEKELWSAKVGNKKLSAYCKNIEELRKTHGNTFKIDIEELRKKDPAELSKEEKAKLRLTDDVILNEWSQKIANFFDIDDKHRQRFNNLFSMAQLHTVIDTPRSGFSSTCKRCTAENRFRSETAFYNDETGEFHKKATATCQRLPADTQRPFSGKIERYIDKLGYELAKIKAKELEGMEAKEIKVPIILEQNAFEYEESLRKSKTGSNDRVINSKKDRDGKKLAKAKENAEDRLKDKDKRIKAFSSGICPYCGDTIGDDGEIDHILPRSHTLKIYGTVFNPEGNLIYVHQKCNQAKADSIYKLSDIKAGVSAQWIEEQVANIKGYKTFSVLSAEQQKAFRYALFLQNDNEAYKKVVDWLRTDQSARVNGTQKYLAKKIQEKLTKMLPNKHLSFEFILADATEVSELRRQYARQNPLLAKAEKQAPSSHAIDAVMAFVARYQKVFKDGTPPNADEVAKLAMLDSWNPASNEPLTKGLSTNQKIEKMIKSGDYGQKNMREVFGKSIFGENAIGERYKPIVVQEGGYYIGYPATVKKGYELKNCKVVTSKNDIAKLEKIIKNQDLISLKENQYIKIFSINKQTISELSNRYFNMNYKNLVERDKEIVGLLEFIVENCRYYTKKVDVKFAPKYIHETKYPFYDDWRRFDEAWRYLQENQNKTSSKDRFVIDKSSLNEYYQPDKNEYKLDVDTQPIWDDFCRWYFLDRYKTANDKKSIRIKARKTFSLLAESGVQGKVFRAKRKIPTGYAYQALPMDNNVIAGDYANILLEANSKTLSLVPKSGISIEKQLDKKLDVIKKTDVRGLAIDNNSFFNADFDTHGIRLIVENTSVKVGNFPISAIDKSAKRMIFRALFEKEKGKRKKKTTISFKESGPVQDYLKVFLKKIVKIQLRTDGSISNIVVRKNAADFTLSFRSEHIQKLLK

SEQ ID NO: 619 - protein, 1059 aa, Wolinella succinogenes
MIERILGVDLGISSLGWAIVEYDKDDEAANRIIDCGVRLFTAAETPKKKESPNKARREARGIRRVLNRRRVRMNMIKKLFLRAGLIQDVDLDGEGGMFYSKANRADVWELRHDGLYRLLKGDELARVLIHIAKHRGYKFIGDDEADEESGKVKKAGVVLRQNFEAAGCRTVGEWLWRERGANGKKRNKHGDYEISIHRDLLVEEVEAIFVAQQEMRSTIATDALKAAYREIAFFVRPMQRIEKMVGHCTYFPEERRAPKSAPTAEKFIAISKFFSTVIIDNEGWEQKIIERKTLEELLDFAVSREKVEFRHLRKFLDLSDNEIFKGLHYKGKPKTAKKREATLFDPNEPTELEFDKVEAEKKAWISLRGAAKLREALGNEFYGRFVALGKHADEATKILTYYKDEGQKRRELTKLPLEAEMVERLVKIGFSDFLKLSLKAIRDILPAMESGARYDEAVLMLGVPHKEKSAILPPLNKTDIDILNPTVIRAFAQFRKVANALVRKYGAFDRVHFELAREINTKGEIEDIKESQRKNEKERKEAADWIAETSFQVPLTRKNILKKRLYIQQDGRCAYTGDVIELERLFDEGYCEIDHILPRSRSADDSFANKVLCLARANQQKTDRTPYEWFGHDAARWNAFETRTSAPSNRVRTGKGKIDRLLKKNFDENSEMAFKDRNLNDTRYMARAIKTYCEQYWVFKNSHTKAPVQVRSGKLTSVLRYQWGLESKDRESHTHHAVDAIIIAFSTQGMVQKLSEYYRFKETHREKERPKLAVPLANFRDAVEEATRIENTETVKEGVEVKRLLISRPPRARVTGQAHEQTAKPYPRIKQVKNKKKWRLAPIDEEKFESFKADRVASANQKNFYETSTIPRVDVYHKKGKFHLVPIYLHEMVLNELPNLSLGTNPEAMDENFFKFSIFKDDLISIQTQGTPKKPAKIIMGYFKNMHGANMVLSSINNSPCEGFTCTPVSMDKKHKDKCKLCPEENRIAGRCLQGFLDYWSQEGLRPPRKEFECDQGVKFALDVKKYQIDPLGYYYEVKQEKRLGTIPQMRSAKKLVKK

SEQ ID NO: 620 - protein, 1388 aa, Zunongwangia profunda
MKRILGLDLGTNSIGWALVNEAENEKEISKIIKLGVRVNPLTIDEKTNFEKGRPLSTNADRTLKRGARRNLQRYKLRRENLIEILIDNHIITKETPLTEIGKGTTYQTLSLRAKAVRERIDLEDFAKVLLAINKKRGYKSSRKASNDEEGQAIDGMAIAKELYERGITPGQYVLELLENDRKYIPDFYRSDLKQEFNKIWNNQKTFYPEILTDELFKELDGKNKSQTWAICQKPFNIKGIKRITKGREKTIENYHWRVKGLSGKLNLEKLAIILQEINNDINQSSGYLGGISDKSKKLYLNKETVGEFLYKQIAKNPHTSLKNQVFYRHDYLDEFEQIWKTQSNFNANLTDELKQEIRDVIIFYQRKIKSQKSLISFCQFESWEQEYFDKETGKTKTRTVGRRVIPKSSPLFQEFKIWQNLNHLVFTNSETDEKIEIKEVEQEIRKELFEELNLRGDLNPNDLLKILRSQFKIGKLSNWKCNFEKIEGNRTNAALFNIYQKISDFEGYGIDWNKSNAKKIRKELKATFPEIGIDASILEFDAYKKQLTNQSSYELWHLLYSAEEDFKISEQDKLIYGNSSVSLKKKLHLKFGFNPEYAKMLANLSLMSDYGNLSAKAIKKILPYLEDGHLYSEACRLAGYNHSKSLTAEELEKFEPKAKLDLLKKNSLRNPVVEKILNQMVNVVNQVIDTYGKPDGVRIELARELKKSAKERAEMTKGIADGTRRNEEIKKIITQKFGIPNPTKSDLVRYRLWQELESRGYKDIFTDKYISPDKIFSSEIDIEHIIPKALLFDDSFSNKTLSFRNVNLKKANRTALDFITQDYQSNVEAYKERVETWNKDNHISKGKRNKLLMSLKDIPDGFIERDLRNSQYIARKAKRMLYEVFPNEVLATSGSITDKLRSDWDLINVMKELNLPKYKALGLTEYEERLDKGTEELFKHEVIKDWTKRNDHRHHAMDALAVAFTTHNHIQYINNLNARKDITQDNHPIIKNIENLITEVNSKGKRVFKAPMSSFRESAKEQIEAILVSFKNKNKVVTKNINQTKKEGGFNYQNAKTPRGQLHKETIYGKSKQPLEKPVKINNRFCKKQVGLIINFKEQEAVLHHLKKYDNNEKIAFSNKTLKSDPIQVNGSPLREVKIFEEIFTIRKDINPDNFKTQKHLDKIIDKGIKEVMKKRLEEYNGDFKTAFSDLDKNPIWLNQSKGITIKRATISGVTNAEPLHQAKDHLGNIILDDNGKEIPIDYVSTGNNHHVAIYQDESGNLQEEVVSFYEAVIRKNQDQPIIKKRHPKGWKFLFTMKQNEMFVFSSENFNPSEIDLLDEKNAAIISPNLFRVQKIATKNYMFRHHLETEVTNNLDFTYRHFQATEWLRNLCKVRIDHIGRIVQIGEY

SEQ ID NO: 621-631 - skipped (11 entries)

SEQ ID NO: 632 - RNA, 22 nt, Homo sapiens
  source 1..22: mol_type = unassigned RNA
tgctcaggttgcacagctggga

SEQ ID NO: 633 - RNA, 22 nt, Homo sapiens
  source 1..22: mol_type = unassigned RNA
tcccagctgtgcaacctgagca

SEQ ID NO: 634 - RNA, 22 nt, Homo sapiens
  source 1..22: mol_type = unassigned RNA
tcaggtgtggaaactgaggcag

SEQ ID NO: 635 - RNA, 22 nt, Homo sapiens
  source 1..22: mol_type = unassigned RNA
ctgcctcagtttccacacctga

SEQ ID NO: 636 - RNA, 22 nt, Homo sapiens
  source 1..22: mol_type = unassigned RNA
caaaaccgcgattactcttgca

SEQ ID NO: 637 - RNA, 22 nt, Homo sapiens
  source 1..22: mol_type = unassigned RNA
tgcaagagtaatcgcggttttg

SEQ ID NO: 638 - RNA, 21 nt, Homo sapiens
  source 1..21: mol_type = unassigned RNA
aaaagtaattgtggtttttgc

SEQ ID NO: 639 - RNA, 21 nt, Homo sapiens
  source 1..21: mol_type = unassigned RNA
gcaaaaaccacaattactttt

SEQ ID NO: 640 - RNA, 21 nt, Homo sapiens
  source 1..21: mol_type = unassigned RNA
aaaaactgcaatcacttttgc

SEQ ID NO: 641 - RNA, 21 nt, Homo sapiens
  source 1..21: mol_type = unassigned RNA
gcaaaagtgattgcagttttt

SEQ ID NO: 642 - RNA, 22 nt, Homo sapiens
  source 1..22: mol_type = unassigned RNA
caaaagtgattgtggtttttgc

SEQ ID NO: 643 - RNA, 22 nt, Homo sapiens
  source 1..22: mol_type = unassigned RNA
gcaaaaaccacaatcacttttg

SEQ ID NO: 644 - RNA, 22 nt, Homo sapiens
  source 1..22: mol_type = unassigned RNA
agcagtgtttgttttgcccaca

SEQ ID NO: 645 - RNA, 22 nt, Homo sapiens
  source 1..22: mol_type = unassigned RNA
tgtgggcaaaacaaacactgct

SEQ ID NO: 646 - RNA, 22 nt, Homo sapiens
  source 1..22: mol_type = unassigned RNA
tcgggcgcaagagcactgcagt

SEQ ID NO: 647 - RNA, 22 nt, Homo sapiens
  source 1..22: mol_type = unassigned RNA
actgcagtgctcttgcgcccga

SEQ ID NO: 648 - RNA, 21 nt, Homo sapiens
  source 1..21: mol_type = unassigned RNA
acacttgttgggatgacctgc

SEQ ID NO: 649 - RNA, 21 nt, Homo sapiens
  source 1..21: mol_type = unassigned RNA
gcaggtcatcccaacaagtgt

SEQ ID NO: 650 - RNA, 24 nt, Homo sapiens
  source 1..24: mol_type = unassigned RNA
aggagctatccactccaggtgtcc

SEQ ID NO: 651 - RNA, 24 nt, Homo sapiens
  source 1..24: mol_type = unassigned RNA
ggacacctggagtggatagctcct

SEQ ID NO: 652 - RNA, 23 nt, Homo sapiens
  source 1..23: mol_type = unassigned RNA
ccagagcagcctgcggtaacagt

SEQ ID NO: 653 - RNA, 23 nt, Homo sapiens
  source 1..23: mol_type = unassigned RNA
actgttaccgcaggctgctctgg

SEQ ID NO: 654 - RNA, 22 nt, Homo sapiens
  source 1..22: mol_type = unassigned RNA
agttgccagggctgcctttggt

SEQ ID NO: 655 - RNA, 22 nt, Homo sapiens
  source 1..22: mol_type = unassigned RNA
accaaaggcagccctggcaact

SEQ ID NO: 656 - RNA, 21 nt, Homo sapiens
  source 1..21: mol_type = unassigned RNA
tagaccatctttctagagtat

SEQ ID NO: 657 - RNA, 21 nt, Homo sapiens
  source 1..21: mol_type = unassigned RNA
atactctagaaagatggtcta

SEQ ID NO: 658 - RNA, 22 nt, Homo sapiens
  source 1..22: mol_type = unassigned RNA
agctctagaaagattgttgacc

SEQ ID NO: 659 - RNA, 22 nt, Homo sapiens
  source 1..22: mol_type = unassigned RNA
ggtcaacaatctttctagagct

SEQ ID NO: 660 - RNA, 21 nt, Homo sapiens
  source 1..21: mol_type = unassigned RNA
gggactaggatgcagacctcc

SEQ ID NO: 661 - RNA, 21 nt, Homo sapiens
  source 1..21: mol_type = unassigned RNA
ggaggtctgcatcctagtccc

SEQ ID NO: 662 - RNA, 23 nt, Homo sapiens
  source 1..23: mol_type = unassigned RNA
aggtctgcattcaaatccccaga

SEQ ID NO: 663 - RNA, 23 nt, Homo sapiens
  source 1..23: mol_type = unassigned RNA
tctggggatttgaatgcagacct

SEQ ID NO: 664 - RNA, 20 nt, Homo sapiens
  source 1..20: mol_type = unassigned RNA
cattacagcacagccattct

SEQ ID NO: 665 - RNA, 20 nt, Homo sapiens
  source 1..20: mol_type = unassigned RNA
agaatggctgtgctgtaatg

SEQ ID NO: 666 - RNA, 21 nt, Homo sapiens
  source 1..21: mol_type = unassigned RNA
tctggctgtgctgtaatgcag

SEQ ID NO: 667 - RNA, 21 nt, Homo sapiens
  source 1..21: mol_type = unassigned RNA
ctgcattacagcacagccaga

SEQ ID NO: 668 - RNA, 21 nt, Homo sapiens
  source 1..21: mol_type = unassigned RNA
tgacttctacctcttccaaag

SEQ ID NO: 669 - RNA, 21 nt, Homo sapiens
  source 1..21: mol_type = unassigned RNA
ctttggaagaggtagaagtca

SEQ ID NO: 670 - RNA, 22 nt, Homo sapiens
  source 1..22: mol_type = unassigned RNA
ttggaataggggatatctcagc

SEQ ID NO: 671 - RNA, 22 nt, Homo sapiens
  source 1..22: mol_type = unassigned RNA
gctgagatatcccctattccaa

SEQ ID NO: 672 - RNA, 22 nt, Homo sapiens
  source 1..22: mol_type = unassigned RNA
tcgtatcagagattccagacac

SEQ ID NO: 673 - RNA, 22 nt, Homo sapiens
  source 1..22: mol_type = unassigned RNA
gtgtctggaatctctgatacga

SEQ ID NO: 674 - RNA, 23 nt, Homo sapiens
  source 1..23: mol_type = unassigned RNA
actgggatgtcactgaatatggt

SEQ ID NO: 675 - RNA, 23 nt, Homo sapiens
  source 1..23: mol_type = unassigned RNA
accatattcagtgacatcccagt

SEQ ID NO: 676 - RNA, 22 nt, Homo sapiens
  source 1..22: mol_type = unassigned RNA
caaagtccttcctatttttccc

SEQ ID NO: 677 - RNA, 22 nt, Homo sapiens
  source 1..22: mol_type = unassigned RNA
gggaaaaataggaaggactttg

SEQ ID NO: 678 - RNA, 21 nt, Homo sapiens
  source 1..21: mol_type = unassigned RNA
gaagaataggagggactttgt

SEQ ID NO: 679 - RNA, 21 nt, Homo sapiens
  source 1..21: mol_type = unassigned RNA
acaaagtccctcctattcttc

SEQ ID NO: 680 - RNA, 22 nt, Homo sapiens
  source 1..22: mol_type = unassigned RNA
tgggccatgcatttctagaact

SEQ ID NO: 681 - RNA, 22 nt, Homo sapiens
  source 1..22: mol_type = unassigned RNA
agttctagaaatgcatggccca

SEQ ID NO: 682 - RNA, 21 nt, Homo sapiens
  source 1..21: mol_type = unassigned RNA
tctagaaatgcatgacccacc

SEQ ID NO: 683 - RNA, 21 nt, Homo sapiens
  source 1..21: mol_type = unassigned RNA
ggtgggtcatgcatttctaga

SEQ ID NO: 684 - RNA, 22 nt, Homo sapiens
  source 1..22: mol_type = unassigned RNA
ttccactgccactacctaattt

SEQ ID NO: 685 - RNA, 22 nt, Homo sapiens
  source 1..22: mol_type = unassigned RNA
aaattaggtagtggcagtggaa

SEQ ID NO: 686 - RNA, 21 nt, Homo sapiens
  source 1..21: mol_type = unassigned RNA
attaggtagtggcagtggaac

SEQ ID NO: 687 - RNA, 21 nt, Homo sapiens
  source 1..21: mol_type = unassigned RNA
gttccactgccactacctaat

SEQ ID NO: 688 - RNA, 21 nt, Homo sapiens
  source 1..21: mol_type = unassigned RNA
caccgactctgtctcctgcag

SEQ ID NO: 689 - RNA, 21 nt, Homo sapiens
  source 1..21: mol_type = unassigned RNA
ctgcaggagacagagtcggtg

SEQ ID NO: 690 - RNA, 22 nt, Homo sapiens
  source 1..22: mol_type = unassigned RNA
cagcaggggagagagaggagtc

SEQ ID NO: 691 - RNA, 22 nt, Homo sapiens
  source 1..22: mol_type = unassigned RNA
gactcctctctctcccctgctg

SEQ ID NO: 692 - RNA, 22 nt, Homo sapiens
  source 1..22: mol_type = unassigned RNA
ttccagcccttctaatggtagg

SEQ ID NO: 693 - RNA, 22 nt, Homo sapiens
  source 1..22: mol_type = unassigned RNA
cctaccattagaagggctggaa

SEQ ID NO: 694 - RNA, 22 nt, Homo sapiens
  source 1..22: mol_type = unassigned RNA
taccattagaagagctggaaga

SEQ ID NO: 695 - RNA, 22 nt, Homo sapiens
  source 1..22: mol_type = unassigned RNA
tcttccagctcttctaatggta

SEQ ID NO: 696 - RNA, 21 nt, Homo sapiens
  source 1..21: mol_type = unassigned RNA
tcaagtgtcatctgtccctag

SEQ ID NO: 697 - RNA, 21 nt, Homo sapiens
  source 1..21: mol_type = unassigned RNA
ctagggacagatgacacttga

SEQ ID NO: 698 - RNA, 23 nt, Homo sapiens
  source 1..23: mol_type = unassigned RNA
tttgggattgacgccacatgtct

SEQ ID NO: 699 - RNA, 23 nt, Homo sapiens
  source 1..23: mol_type = unassigned RNA
agacatgtggcgtcaatcccaaa

SEQ ID NO: 700 - RNA, 21 nt, Homo sapiens
  source 1..21: mol_type = unassigned RNA
ctgcctgttcttccactccag

SEQ ID NO: 701 - RNA, 21 nt, Homo sapiens
  source 1..21: mol_type = unassigned RNA
ctggagtggaagaacaggcag

SEQ ID NO: 702 - RNA, 23 nt, Homo sapiens
  source 1..23: mol_type = unassigned RNA
tatggagtggactttcagctggc

SEQ ID NO: 703 - RNA, 23 nt, Homo sapiens
  source 1..23: mol_type = unassigned RNA
gccagctgaaagtccactccata

SEQ ID NO: 704 - RNA, 22 nt, Homo sapiens
  source 1..22: mol_type = unassigned RNA
cctcaccatcccttctgcctgc

SEQ ID NO: 705 - RNA, 22 nt, Homo sapiens
  source 1..22: mol_type = unassigned RNA
gcaggcagaagggatggtgagg

SEQ ID NO: 706 - RNA, 23 nt, Homo sapiens
  source 1..23: mol_type = unassigned RNA
caggcagaagtggggctgacagg

SEQ ID NO: 707 - RNA, 23 nt, Homo sapiens
  source 1..23: mol_type = unassigned RNA
cctgtcagccccacttctgcctg

SEQ ID NO: 708 - RNA, 20 nt, Homo sapiens
  source 1..20: mol_type = unassigned RNA
tctcttcatctaccccccag

SEQ ID NO: 709 - RNA, 20 nt, Homo sapiens
  source 1..20: mol_type = unassigned RNA
ctggggggtagatgaagaga

SEQ ID NO: 710 - RNA, 21 nt, Homo sapiens
  source 1..21: mol_type = unassigned RNA
ttggagggtgtggaagacatc

SEQ ID NO: 711 - RNA, 21 nt, Homo sapiens
  source 1..21: mol_type = unassigned RNA
gatgtcttccacaccctccaa

SEQ ID NO: 712 - RNA, 22 nt, Homo sapiens
  source 1..22: mol_type = unassigned RNA
ctgccagccccgttccagggca

SEQ ID NO: 713 - RNA, 22 nt, Homo sapiens
  source 1..22: mol_type = unassigned RNA
tgccctggaacggggctggcag

SEQ ID NO: 714 - RNA, 23 nt, Homo sapiens
  source 1..23: mol_type = unassigned RNA
acaaagtacagcattagccttag

SEQ ID NO: 715 - RNA, 23 nt, Homo sapiens
  source 1..23: mol_type = unassigned RNA
ctaaggctaatgctgtactttgt

SEQ ID NO: 716 - RNA, 23 nt, Homo sapiens
  source 1..23: mol_type = unassigned RNA
aaaggtcattgtaaggttaatgc

SEQ ID NO: 717 - RNA, 23 nt, Homo sapiens
  source 1..23: mol_type = unassigned RNA
gcattaaccttacaatgaccttt

SEQ ID NO: 718 - RNA, 22 nt, Homo sapiens
  source 1..22: mol_type = unassigned RNA
tgaggctaatgcactacttcac

SEQ ID NO: 719 - RNA, 22 nt, Homo sapiens
  source 1..22: mol_type = unassigned RNA
gtgaagtagtgcattagcctca

SEQ ID NO: 720 - RNA, 24 nt, Homo sapiens
  source 1..24: mol_type = unassigned RNA
tatagagagcaggaagattaatgt

SEQ ID NO: 721 - RNA, 24 nt, Homo sapiens
  source 1..24: mol_type = unassigned RNA
acattaatcttcctgctctctata

SEQ ID NO: 722 - RNA, 23 nt, Homo sapiens
  source 1..23: mol_type = unassigned RNA
gtgcttcatcgtaattaacctta

SEQ ID NO: 723 - RNA, 23 nt, Homo sapiens
  source 1..23: mol_type = unassigned RNA
taaggttaattacgatgaagcac

SEQ ID NO: 724 - RNA, 24 nt, Homo sapiens
  source 1..24: mol_type = unassigned RNA
gtggaaagcatgcatccagggtgt

SEQ ID NO: 725 - RNA, 24 nt, Homo sapiens
  source 1..24: mol_type = unassigned RNA
acaccctggatgcatgctttccac

SEQ ID NO: 726 - RNA, 22 nt, Homo sapiens
  source 1..22: mol_type = unassigned RNA
agacacatttggagagggaacc

SEQ ID NO: 727 - RNA, 22 nt, Homo sapiens
  source 1..22: mol_type = unassigned RNA
ggttccctctccaaatgtgtct

SEQ ID NO: 728 - RNA, 22 nt, Homo sapiens
  source 1..22: mol_type = unassigned RNA
ttccctttgtcatcctatgcct

SEQ ID NO: 729 - RNA, 22 nt, Homo sapiens
  source 1..22: mol_type = unassigned RNA
aggcataggatgacaaagggaa

SEQ ID NO: 730 - RNA, 21 nt, Homo sapiens
  source 1..21: mol_type = unassigned RNA
gctgggaaggcaaagggacgt

SEQ ID NO: 731 - RNA, 21 nt, Homo sapiens
  source 1..21: mol_type = unassigned RNA
acgtccctttgccttcccagc

SEQ ID NO: 732 - RNA, 21 nt, Homo sapiens
  source 1..21: mol_type = unassigned RNA
taccacagggtagaaccacgg

SEQ ID NO: 733 - RNA, 21 nt, Homo sapiens
  source 1..21: mol_type = unassigned RNA
ccgtggttctaccctgtggta

SEQ ID NO: 734 - RNA, 22 nt, Homo sapiens
  source 1..22: mol_type = unassigned RNA
ggctggagcgagtgcagtggtg

SEQ ID NO: 735 - RNA, 22 nt, Homo sapiens
  source 1..22: mol_type = unassigned RNA
caccactgcactcgctccagcc

SEQ ID NO: 736 - RNA, 18 nt, Homo sapiens
  source 1..18: mol_type = unassigned RNA
ccaggctctgcagtggga

SEQ ID NO: 737 - RNA, 18 nt, Homo sapiens
  source 1..18: mol_type = unassigned RNA
tcccactgcagagcctgg

SEQ ID NO: 738 - RNA, 22 nt, Homo sapiens
  source 1..22: mol_type = unassigned RNA
ctgggaggtgtgatattgtggt

SEQ ID NO: 739 - RNA, 22 nt, Homo sapiens
  source 1..22: mol_type = unassigned RNA
accacaatatcacacctcccag

SEQ ID NO: 740 - RNA, 22 nt, Homo sapiens
  source 1..22: mol_type = unassigned RNA
gggaggtgtgatctcacactcg

SEQ ID NO: 741 - RNA, 22 nt, Homo sapiens
  source 1..22: mol_type = unassigned RNA
cgagtgtgagatcacacctccc

SEQ ID NO: 742 - RNA, 22 nt, Homo sapiens
  source 1..22: mol_type = unassigned RNA
tgtgatatcatggttcctggga

SEQ ID NO: 743 - RNA, 22 nt, Homo sapiens
  source 1..22: mol_type = unassigned RNA
tcccaggaaccatgatatcaca

SEQ ID NO: 744 - RNA, 22 nt, Homo sapiens
  source 1..22: mol_type = unassigned RNA
tgtgatatcgtgcttcctggga

SEQ ID NO: 745 - RNA, 22 nt, Homo sapiens
  source 1..22: mol_type = unassigned RNA
tcccaggaagcacgatatcaca

SEQ ID NO: 746 - RNA, 18 nt, Homo sapiens
  source 1..18: mol_type = unassigned RNA
ggtgggcttcccggaggg

SEQ ID NO: 747 - RNA, 18 nt, Homo sapiens
  source 1..18: mol_type = unassigned RNA
ccctccgggaagcccacc

SEQ ID NO: 748 - RNA, 18 nt, Homo sapiens
  source 1..18: mol_type = unassigned RNA
cactgcaggactcagcag

SEQ ID NO: 749 - RNA, 18 nt, Homo sapiens
  source 1..18: mol_type = unassigned RNA
ctgctgagtcctgcagtg

SEQ ID NO: 750 - RNA, 17 nt, Homo sapiens
  source 1..17: mol_type = unassigned RNA
tgagggaggagactgca

SEQ ID NO: 751 - RNA, 17 nt, Homo sapiens
  source 1..17: mol_type = unassigned RNA
tgcagtctcctccctca

SEQ ID NO: 752 - RNA, 18 nt, Homo sapiens
  source 1..18: mol_type = unassigned RNA
gaggctgaaggaagatgg

SEQ ID NO: 753 - RNA, 18 nt, Homo sapiens
  source 1..18: mol_type = unassigned RNA
ccatcttccttcagcctc

SEQ ID NO: 754 - RNA, 22 nt, Homo sapiens
  source 1..22: mol_type = unassigned RNA
gtcactgatgtctgtagctgag

SEQ ID NO: 755 - RNA, 22 nt, Homo sapiens
  source 1..22: mol_type = unassigned RNA
ctcagctacagacatcagtgac

SEQ ID NO: 756 - RNA, 22 nt, Homo sapiens
  source 1..22: mol_type = unassigned RNA
acctgtctgtggaaaggagcta

SEQ ID NO: 757 - RNA, 22 nt, Homo sapiens
  source 1..22: mol_type = unassigned RNA
tagctcctttccacagacaggt

SEQ ID NO: 758 - RNA, 22 nt, Homo sapiens
  source 1..22: mol_type = unassigned RNA
agagttaactcaaaatggacta

SEQ ID NO: 759 - RNA, 22 nt, Homo sapiens
  source 1..22: mol_type = unassigned RNA
tagtccattttgagttaactct

SEQ ID NO: 760 - RNA, 22 nt, Homo sapiens
  source 1..22: mol_type = unassigned RNA
tgttgggattcagcaggaccat

SEQ ID NO: 761 - RNA, 22 nt, Homo sapiens
  source 1..22: mol_type = unassigned RNA
atggtcctgctgaatcccaaca

SEQ ID NO: 762 - RNA, 17 nt, Homo sapiens
  source 1..17: mol_type = unassigned RNA
gaagatggacgtacttt

SEQ ID NO: 763 - RNA, 17 nt, Homo sapiens
  source 1..17: mol_type = unassigned RNA
aaagtacgtccatcttc

SEQ ID NO: 764 - RNA, 21 nt, Homo sapiens
  source 1..21: mol_type = unassigned RNA
tctgaatagagtctgaagagt

SEQ ID NO: 765 - RNA, 21 nt, Homo sapiens
  source 1..21: mol_type = unassigned RNA
actcttcagactctattcaga

SEQ ID NO: 766 - RNA, 22 nt, Homo sapiens
  source 1..22: mol_type = unassigned RNA
caaggagacgggaacatggagc

SEQ ID NO: 767 - RNA, 22 nt, Homo sapiens
  source 1..22: mol_type = unassigned RNA
gctccatgttcccgtctccttg

SEQ ID NO: 768 - RNA, 20 nt, Homo sapiens
  source 1..20: mol_type = unassigned RNA
aaaagctgggctgagaggcg

SEQ ID NO: 769 - RNA, 20 nt, Homo sapiens
  source 1..20: mol_type = unassigned RNA
cgcctctcagcccagctttt

SEQ ID NO: 770 - RNA, 18 nt, Homo sapiens
  source 1..18: mol_type = unassigned RNA
aggctggagtgagcggag

SEQ ID NO: 771 - RNA, 18 nt, Homo sapiens
  source 1..18: mol_type = unassigned RNA
ctccgctcactccagcct

SEQ ID NO: 772 - RNA, 22 nt, Homo sapiens
  source 1..22: mol_type = unassigned RNA
gcgactctgaaaactagaaggt

SEQ ID NO: 773 - RNA, 22 nt, Homo sapiens
  source 1..22: mol_type = unassigned RNA
accttctagttttcagagtcgc

SEQ ID NO: 774 - RNA, 20 nt, Homo sapiens
  source 1..20: mol_type = unassigned RNA
aaagactctgcaagatgcct

SEQ ID NO: 775 - RNA, 20 nt, Homo sapiens
  source 1..20: mol_type = unassigned RNA
aggcatcttgcagagtcttt

SEQ ID NO: 776 - RNA, 21 nt, Homo sapiens
  source 1..21: mol_type = unassigned RNA
acaggagtgggggtgggacat

SEQ ID NO: 777 - RNA, 21 nt, Homo sapiens
  source 1..21: mol_type = unassigned RNA
atgtcccacccccactcctgt

SEQ ID NO: 778 - RNA, 21 nt, Homo sapiens
  source 1..21: mol_type = unassigned RNA
cgtcccaccccccactcctgt

SEQ ID NO: 779 - RNA, 21 nt, Homo sapiens
  source 1..21: mol_type = unassigned RNA
acaggagtggggggtgggacg

SEQ ID NO: 780 - RNA, 18 nt, Homo sapiens
  source 1..18: mol_type = unassigned RNA
aggagaagtaaagtagaa

SEQ ID NO: 781 - RNA, 18 nt, Homo sapiens
  source 1..18: mol_type = unassigned RNA
ttctactttacttctcct

SEQ ID NO: 782 - RNA, 22 nt, Homo sapiens
  source 1..22: mol_type = unassigned RNA
atggccagagctcacacagagg

SEQ ID NO: 783 - RNA, 22 nt, Homo sapiens
  source 1..22: mol_type = unassigned RNA
cctctgtgtgagctctggccat

SEQ ID NO: 784 - RNA, 21 nt, Homo sapiens
  source 1..21: mol_type = unassigned RNA
tgggctcagggtacaaaggtt

SEQ ID NO: 785 - RNA, 21 nt, Homo sapiens
  source 1..21: mol_type = unassigned RNA
aacctttgtaccctgagccca

SEQ ID NO: 786 - RNA, 21 nt, Homo sapiens
  source 1..21: mol_type = unassigned RNA
cacaggcttagaaaagacagt

SEQ ID NO: 787 - RNA, 21 nt, Homo sapiens
  source 1..21: mol_type = unassigned RNA
actgtcttttctaagcctgtg

SEQ ID NO: 788 - RNA, 22 nt, Homo sapiens
  source 1..22: mol_type = unassigned RNA
gtgactgataccttggaggcat

SEQ ID NO: 789 - RNA, 22 nt, Homo sapiens
  source 1..22: mol_type = unassigned RNA
atgcctccaaggtatcagtcac

SEQ ID NO: 790 - RNA, 22 nt, Homo sapiens
  source 1..22: mol_type = unassigned RNA
tgtcgtggggcttgctggcttg

SEQ ID NO: 791 - RNA, 22 nt, Homo sapiens
  source 1..22: mol_type = unassigned RNA
caagccagcaagccccacgaca

SEQ ID NO: 792 - RNA, 17 nt, Homo sapiens
  source 1..17: mol_type = unassigned RNA
acagggaggagattgta

SEQ ID NO: 793 - RNA, 17 nt, Homo sapiens
  source 1..17: mol_type = unassigned RNA
tacaatctcctccctgt

SEQ ID NO: 794 - RNA, 17 nt, Homo sapiens
  source 1..17: mol_type = unassigned RNA
gccggacaagagggagg

SEQ ID NO: 795 - RNA, 17 nt, Homo sapiens
  source 1..17: mol_type = unassigned RNA
cctccctcttgtccggc

SEQ ID NO: 796 - RNA, 17 nt, Homo sapiens
  source 1..17: mol_type = unassigned RNA
ttggaggcgtgggtttt

SEQ ID NO: 797 - RNA, 17 nt, Homo sapiens
  source 1..17: mol_type = unassigned RNA
aaaacccacgcctccaa

SEQ ID NO: 798 - RNA, 18 nt, Homo sapiens
  source 1..18: mol_type = unassigned RNA
ctcgagttggaagaggcg

SEQ ID NO: 799 - RNA, 18 nt, Homo sapiens
  source 1..18: mol_type = unassigned RNA
cgcctcttccaactcgag

SEQ ID NO: 800 - RNA, 21 nt, Homo sapiens
  source 1..21: mol_type = unassigned RNA
cacggcaaaagaaacaatcca

SEQ ID NO: 801 - RNA, 21 nt, Homo sapiens
  source 1..21: mol_type = unassigned RNA
tggattgtttcttttgccgtg

SEQ ID NO: 802 - RNA, 22 nt, Homo sapiens
  source 1..22: mol_type = unassigned RNA
agattgtttcttttgccgtgca

SEQ ID NO: 803 - RNA, 22 nt, Homo sapiens
  source 1..22: mol_type = unassigned RNA
tgcacggcaaaagaaacaatct

SEQ ID NO: 804 - RNA, 17 nt, Homo sapiens
  source 1..17: mol_type = unassigned RNA
ggtgggggctgttgttt

SEQ ID NO: 805 - RNA, 17 nt, Homo sapiens
  source 1..17: mol_type = unassigned RNA
aaacaacagcccccacc

SEQ ID NO: 806 - RNA, 20 nt, Homo sapiens
  source 1..20: mol_type = unassigned RNA
ggctccttggtctaggggta

SEQ ID NO: 807 - RNA, 20 nt, Homo sapiens
  source 1..20: mol_type = unassigned RNA
tacccctagaccaaggagcc

SEQ ID NO: 808 - RNA, 22 nt, Homo sapiens
  source 1..22: mol_type = unassigned RNA
cgtcccggggctgcgcgaggca

SEQ ID NO: 809 - RNA, 22 nt, Homo sapiens
  source 1..22: mol_type = unassigned RNA
tgcctcgcgcagccccgggacg

SEQ ID NO: 810 - RNA, 22 nt, Homo sapiens
  source 1..22: mol_type = unassigned RNA
tggggatttggagaagtggtga

SEQ ID NO: 811 - RNA, 22 nt, Homo sapiens
  source 1..22: mol_type = unassigned RNA
tcaccacttctccaaatcccca

SEQ ID NO: 812 - RNA, 17 nt, Homo sapiens
  source 1..17: mol_type = unassigned RNA
tggtagagctgaggaca

SEQ ID NO: 813 - RNA, 17 nt, Homo sapiens
  source 1..17: mol_type = unassigned RNA
tgtcctcagctctacca

SEQ ID NO: 814 - RNA, 23 nt, Homo sapiens
  source 1..23: mol_type = unassigned RNA
ttgaattcttggccttaagtgat

SEQ ID NO: 815 - RNA, 23 nt, Homo sapiens
  source 1..23: mol_type = unassigned RNA
atcacttaaggccaagaattcaa

SEQ ID NO: 816 - RNA, 20 nt, Homo sapiens
  source 1..20: mol_type = unassigned RNA
gagcttggtctgtagcggtt

SEQ ID NO: 817 - RNA, 20 nt, Homo sapiens
  source 1..20: mol_type = unassigned RNA
aaccgctacagaccaagctc

SEQ ID NO: 818 - RNA, 20 nt, Homo sapiens
  source 1..20: mol_type = unassigned RNA
ggatccgagtcacggcacca

SEQ ID NO: 819 - RNA, 20 nt, Homo sapiens
  source 1..20: mol_type = unassigned RNA
tggtgccgtgactcggatcc

SEQ ID NO: 820 - RNA, 17 nt, Homo sapiens
  source 1..17: mol_type = unassigned RNA
agggtgtgtgtgttttt

SEQ ID NO: 821 - RNA, 17 nt, Homo sapiens
  source 1..17: mol_type = unassigned RNA
aaaaacacacacaccct

SEQ ID NO: 822 - RNA, 17 nt, Homo sapiens
  source 1..17: mol_type = unassigned RNA
cctggtggcttcctttt

SEQ ID NO: 823 - RNA, 17 nt, Homo sapiens
  source 1..17: mol_type = unassigned RNA
aaaaggaagccaccagg

SEQ ID NO: 824 - RNA, 22 nt, Homo sapiens
  source 1..22: mol_type = unassigned RNA
tcacaaggtattgactggcgta

SEQ ID NO: 825 - RNA, 22 nt, Homo sapiens
  source 1..22: mol_type = unassigned RNA
tacgccagtcaataccttgtga

SEQ ID NO: 826 - RNA, 19 nt, Homo sapiens
  source 1..19: mol_type = unassigned RNA
agaggtaggtgtggaagaa

SEQ ID NO: 827 - RNA, 19 nt, Homo sapiens
  source 1..19: mol_type = unassigned RNA
ttcttccacacctacctct

SEQ ID NO: 828 - RNA, 22 nt, Homo sapiens
  source 1..22: mol_type = unassigned RNA
ccaggaggcggaggaggtggag

SEQ ID NO: 829 - RNA, 22 nt, Homo sapiens
  source 1..22: mol_type = unassigned RNA
ctccacctcctccgcctcctgg

SEQ ID NO: 830 - RNA, 22 nt, Homo sapiens
  source 1..22: mol_type = unassigned RNA
atagtggttgtgaatttacctt

SEQ ID NO: 831 - RNA, 22 nt, Homo sapiens
  source 1..22: mol_type = unassigned RNA
aaggtaaattcacaaccactat

SEQ ID NO: 832 - RNA, 23 nt, Homo sapiens
  source 1..23: mol_type = unassigned RNA
gattgagactagtagggctaggc

SEQ ID NO: 833 - RNA, 23 nt, Homo sapiens
  source 1..23: mol_type = unassigned RNA
gcctagccctactagtctcaatc

SEQ ID NO: 834 - RNA, 23 nt, Homo sapiens
  source 1..23: mol_type = unassigned RNA
tgacacggagggtggcttgggaa

SEQ ID NO: 835 - RNA, 23 nt, Homo sapiens
  source 1..23: mol_type = unassigned RNA
ttcccaagccaccctccgtgtca

SEQ ID NO: 836 - RNA, 17 nt, Homo sapiens
  source 1..17: mol_type = unassigned RNA
gagactggggtggggcc

SEQ ID NO: 837 - RNA, 17 nt, Homo sapiens
  source 1..17: mol_type = unassigned RNA
ggccccaccccagtctc

SEQ ID NO: 838 - RNA, 21 nt, Homo sapiens
  source 1..21: mol_type = unassigned RNA
aaggtttggatagatgcaata

SEQ ID NO: 839 - RNA, 21 nt, Homo sapiens
  source 1..21: mol_type = unassigned RNA
tattgcatctatccaaacctt

SEQ ID NO: 840 - RNA, 22 nt, Homo sapiens
  source 1..22: mol_type = unassigned RNA
ctcaagtagtctgaccagggga

SEQ ID NO: 841 - RNA, 22 nt, Homo sapiens
  source 1..22: mol_type = unassigned RNA
tcccctggtcagactacttgag

SEQ ID NO: 842 - RNA, 18 nt, Homo sapiens
  source 1..18: mol_type = unassigned RNA
gggtgcgggccggcgggg

SEQ ID NO: 843 - RNA, 18 nt, Homo sapiens
  source 1..18: mol_type = unassigned RNA
ccccgccggcccgcaccc

SEQ ID NO: 844 - RNA, 18 nt, Homo sapiens
  source 1..18: mol_type = unassigned RNA
agagcagaaggatgagat

SEQ ID NO: 845 - RNA, 18 nt, Homo sapiens
  source 1..18: mol_type = unassigned RNA
atctcatccttctgctct

SEQ ID NO: 846 - RNA, 21 nt, Homo sapiens
  source 1..21: mol_type = unassigned RNA
tggcaaacgtggaagccgaga

SEQ ID NO: 847 - RNA, 21 nt, Homo sapiens
  source 1..21: mol_type = unassigned RNA
tctcggcttccacgtttgcca

SEQ ID NO: 848 - RNA, 18 nt, Homo sapiens
  source 1..18: mol_type = unassigned RNA
ggtggggggtgttgtttt

SEQ ID NO: 849 - RNA, 18 nt, Homo sapiens
  source 1..18: mol_type = unassigned RNA
aaaacaacaccccccacc

SEQ ID NO: 850 - RNA, 22 nt, Homo sapiens
  source 1..22: mol_type = unassigned RNA
ctagtgctctccgttacaagta

SEQ ID NO: 851 - RNA, 22 nt, Homo sapiens
  source 1..22: mol_type = unassigned RNA
tacttgtaacggagagcactag

SEQ ID NO: 852 - RNA, 22 nt, Homo sapiens
  source 1..22: mol_type = unassigned RNA
caagggaccaagcattcattat

SEQ ID NO: 853 - RNA, 22 nt, Homo sapiens
  source 1..22: mol_type = unassigned RNA
ataatgaatgcttggtcccttg

SEQ ID NO: 854 - RNA, 22 nt, Homo sapiens
  source 1..22: mol_type = unassigned RNA
caggaaggatttagggacaggc

SEQ ID NO: 855 - RNA, 22 nt, Homo sapiens
  source 1..22: mol_type = unassigned RNA
gcctgtccctaaatccttcctg

SEQ ID NO: 856 - RNA, 22 nt, Homo sapiens
  source 1..22: mol_type = unassigned RNA
ctattaaggacatttgtgattc

SEQ ID NO: 857 - RNA, 22 nt, Homo sapiens
  source 1..22: mol_type = unassigned RNA
gaatcacaaatgtccttaatag

SEQ ID NO: 858 - RNA, 22 nt, Homo sapiens
  source 1..22: mol_type = unassigned RNA
attaaggacatttgtgattgat

SEQ ID NO: 859 - RNA, 22 nt, Homo sapiens
  source 1..22: mol_type = unassigned RNA
atcaatcacaaatgtccttaat

SEQ ID NO: 860 - RNA, 17 nt, Homo sapiens
  source 1..17: mol_type = unassigned RNA
gaggctgagctgaggag

SEQ ID NO: 861 - RNA, 17 nt, Homo sapiens
  source 1..17: mol_type = unassigned RNA
ctcctcagctcagcctc

SEQ ID NO: 862 - RNA, 22 nt, Homo sapiens
  source 1..22: mol_type = unassigned RNA
cgcgcggccgtgctcggagcag

SEQ ID NO: 863 - RNA, 22 nt, Homo sapiens
  source 1..22: mol_type = unassigned RNA
ctgctccgagcacggccgcgcg

SEQ ID NO: 864 - RNA, 21 nt, Homo sapiens
  source 1..21: mol_type = unassigned RNA
agccaagtggaagttacttta

SEQ ID NO: 865 - RNA, 21 nt, Homo sapiens
  source 1..21: mol_type = unassigned RNA
taaagtaacttccacttggct

SEQ ID NO: 866 - RNA, 17 nt, Homo sapiens
  source 1..17: mol_type = unassigned RNA
ggagtgggctggtggtt

SEQ ID NO: 867 - RNA, 17 nt, Homo sapiens
  source 1..17: mol_type = unassigned RNA
aaccaccagcccactcc

SEQ ID NO: 868 - RNA, 22 nt, Homo sapiens
  source 1..22: mol_type = unassigned RNA
tttctatttctcagtggggctc

SEQ ID NO: 869 - RNA, 22 nt, Homo sapiens
  source 1..22: mol_type = unassigned RNA
gagccccactgagaaatagaaa

SEQ ID NO: 870 - RNA, 22 nt, Homo sapiens
  source 1..22: mol_type = unassigned RNA
aacccagtgggctatggaaatg

SEQ ID NO: 871 - RNA, 22 nt, Homo sapiens
  source 1..22: mol_type = unassigned RNA
catttccatagcccactgggtt

SEQ ID NO: 872 - RNA, 17 nt, Homo sapiens
  source 1..17: mol_type = unassigned RNA
ggggtggtctgttgttg

SEQ ID NO: 873 - RNA, 17 nt, Homo sapiens
  source 1..17: mol_type = unassigned RNA
caacaacagaccacccc

SEQ ID NO: 874 - RNA, 20 nt, Homo sapiens
  source 1..20: mol_type = unassigned RNA
aaaaggcgggagaagcccca

SEQ ID NO: 875 - RNA, 20 nt, Homo sapiens
  source 1..20: mol_type = unassigned RNA
tggggcttctcccgcctttt

SEQ ID NO: 876 - RNA, 20 nt, Homo sapiens
  source 1..20: mol_type = unassigned RNA
taacggccgcggtaccctaa

SEQ ID NO: 877 - RNA, 20 nt, Homo sapiens
  source 1..20: mol_type = unassigned RNA
ttagggtaccgcggccgtta

SEQ ID NO: 878 - RNA, 17 nt, Homo sapiens
  source 1..17: mol_type = unassigned RNA
gctgggcgaggctggca

SEQ ID NO: 879 - RNA, 17 nt, Homo sapiens
  source 1..17: mol_type = unassigned RNA
tgccagcctcgcccagc

SEQ ID NO: 880 - RNA, 19 nt, Homo sapiens
  source 1..19: mol_type = unassigned RNA
agagctggctgaagggcag

SEQ ID NO: 881 - RNA, 19 nt, Homo sapiens
  source 1..19: mol_type = unassigned RNA
ctgcccttcagccagctct

SEQ ID NO: 882 - RNA, 18 nt, Homo sapiens
  source 1..18: mol_type = unassigned RNA
agggggcgggctccggcg

SEQ ID NO: 883 - RNA, 18 nt, Homo sapiens
  source 1..18: mol_type = unassigned RNA
cgccggagcccgccccct

SEQ ID NO: 884 - RNA, 22 nt, Homo sapiens
  source 1..22: mol_type = unassigned RNA
tctggtaagagatttgggcata

SEQ ID NO: 885 - RNA, 22 nt, Homo sapiens
  source 1..22: mol_type = unassigned RNA
tatgcccaaatctcttaccaga

SEQ ID NO: 886 - RNA, 22 nt, Homo sapiens
  source 1..22: mol_type = unassigned RNA
aatgtggactggtgtgaccaaa

SEQ ID NO: 887 - RNA, 22 nt, Homo sapiens
  source 1..22: mol_type = unassigned RNA
tttggtcacaccagtccacatt

SEQ ID NO: 888 - RNA, 17 nt, Homo sapiens
  source 1..17: mol_type = unassigned RNA
ggggctgggcgcgcgcc

SEQ ID NO: 889 - RNA, 17 nt, Homo sapiens
  source 1..17: mol_type = unassigned RNA
ggcgcgcgcccagcccc

SEQ ID NO: 890 - RNA, 21 nt, Homo sapiens
  source 1..21: mol_type = unassigned RNA
agaaggcctttccatctctgt

SEQ ID NO: 891 - RNA, 21 nt, Homo sapiens
  source 1..21: mol_type = unassigned RNA
acagagatggaaaggccttct

SEQ ID NO: 892 - RNA, 22 nt, Homo sapiens
  source 1..22: mol_type = unassigned RNA
ccagactgtggctgaccagagg

SEQ ID NO: 893 - RNA, 22 nt, Homo sapiens
  source 1..22: mol_type = unassigned RNA
cctctggtcagccacagtctgg

SEQ ID NO: 894 - RNA, 21 nt, Homo sapiens
  source 1..21: mol_type = unassigned RNA
aatgtaaacaggctttttgct

SEQ ID NO: 895 - RNA, 21 nt, Homo sapiens
  source 1..21: mol_type = unassigned RNA
agcaaaaagcctgtttacatt

SEQ ID NO: 896 - RNA, 22 nt, Homo sapiens
  source 1..22: mol_type = unassigned RNA
gaggaaactgaagctgagaggg

SEQ ID NO: 897 - RNA, 22 nt, Homo sapiens
  source 1..22: mol_type = unassigned RNA
ccctctcagcttcagtttcctc

SEQ ID NO: 898 - RNA, 17 nt, Homo sapiens
  source 1..17: mol_type = unassigned RNA
ctccgggacggctgggc

SEQ ID NO: 899 - RNA, 17 nt, Homo sapiens
  source 1..17: mol_type = unassigned RNA
gcccagccgtcccggag

SEQ ID NO: 900 - RNA, 22 nt, Homo sapiens
  source 1..22: mol_type = unassigned RNA
tgggctggcagggcaagtgctg

SEQ ID NO: 901 - RNA, 22 nt, Homo sapiens
  source 1..22: mol_type = unassigned RNA
cagcacttgccctgccagccca

SEQ ID NO: 902 - RNA, 17 nt, Homo sapiens
  source 1..17: mol_type = unassigned RNA
aagactgagaggaggga

SEQ ID NO: 903 - RNA, 17 nt, Homo sapiens
  source 1..17: mol_type = unassigned RNA
tccctcctctcagtctt

SEQ ID NO: 904 - RNA, 17 nt, Homo sapiens
  source 1..17: mol_type = unassigned RNA
tgaggtagtagtttctt

SEQ ID NO: 905 - RNA, 17 nt, Homo sapiens
  source 1..17: mol_type = unassigned RNA
aagaaactactacctca

SEQ ID NO: 906 - RNA, 21 nt, Homo sapiens
  source 1..21: mol_type = unassigned RNA
tatgtgacctcggatgaatca

SEQ ID NO: 907 - RNA, 21 nt, Homo sapiens
  source 1..21: mol_type = unassigned RNA
tgattcatccgaggtcacata

SEQ ID NO: 908 - RNA, 22 nt, Homo sapiens
  source 1..22: mol_type = unassigned RNA
gctgatgatgatggtgctgaag

SEQ ID NO: 909 - RNA, 22 nt, Homo sapiens
  source 1..22: mol_type = unassigned RNA
cttcagcaccatcatcatcagc

SEQ ID NO: 910 - RNA, 22 nt, Homo sapiens
  source 1..22: mol_type = unassigned RNA
tttaagcaggaaatagaattta

SEQ ID NO: 911 - RNA, 22 nt, Homo sapiens
  source 1..22: mol_type = unassigned RNA
taaattctatttcctgcttaaa

SEQ ID NO: 912 - RNA, 22 nt, Homo sapiens
  source 1..22: mol_type = unassigned RNA
tgtgacaatagagatgaacatg

SEQ ID NO: 913 - RNA, 22 nt, Homo sapiens
  source 1..22: mol_type = unassigned RNA
catgttcatctctattgtcaca

SEQ ID NO: 914 - RNA, 18 nt, Homo sapiens
  source 1..18: mol_type = unassigned RNA
aggctgggctgggacgga

SEQ ID NO: 915 - RNA, 18 nt, Homo sapiens
  source 1..18: mol_type = unassigned RNA
tccgtcccagcccagcct

SEQ ID NO: 916 - RNA, 20 nt, Homo sapiens
  source 1..20: mol_type = unassigned RNA
aaatgggtggtctgaggcaa

SEQ ID NO: 917 - RNA, 20 nt, Homo sapiens
  source 1..20: mol_type = unassigned RNA
ttgcctcagaccacccattt

SEQ ID NO: 918 - RNA, 20 nt, Homo sapiens
  source 1..20: mol_type = unassigned RNA
ctgggttgggctgggctggg

SEQ ID NO: 919 - RNA, 20 nt, Homo sapiens
  source 1..20: mol_type = unassigned RNA
cccagcccagcccaacccag

SEQ ID NO: 920 - RNA, 17 nt, Homo sapiens
  source 1..17: mol_type = unassigned RNA
gcggggctgggcgcgcg

SEQ ID NO: 921 - RNA, 17 nt, Homo sapiens
  source 1..17: mol_type = unassigned RNA
cgcgcgcccagccccgc

SEQ ID NO: 922 - RNA, 22 nt, Homo sapiens
  source 1..22: mol_type = unassigned RNA
actaaaggatatagaaggtttt

SEQ ID NO: 923 - RNA, 22 nt, Homo sapiens
  source 1..22: mol_type = unassigned RNA
aaaaccttctatatcctttagt

SEQ ID NO: 924 - RNA, 22 nt, Homo sapiens
  source 1..22: mol_type = unassigned RNA
tgagggagtaggatgtatggtt

SEQ ID NO: 925 - RNA, 22 nt, Homo sapiens
  source 1..22: mol_type = unassigned RNA
aaccatacatcctactccctca

SEQ ID NO: 926 - RNA, 22 nt, Homo sapiens
  source 1..22: mol_type = unassigned RNA
gaagaactgttgcatttgccct

SEQ ID NO: 927 - RNA, 22 nt, Homo sapiens
  source 1..22: mol_type = unassigned RNA
agggcaaatgcaacagttcttc

SEQ ID NO: 928 - RNA, 22 nt, Homo sapiens
  source 1..22: mol_type = unassigned RNA
cagggcctcactgtatcgccca

SEQ ID NO: 929 - RNA, 22 nt, Homo sapiens
  source 1..22: mol_type = unassigned RNA
tgggcgatacagtgaggccctg

SEQ ID NO: 930 - RNA, 22 nt, Homo sapiens
  source 1..22: mol_type = unassigned RNA
agactgacggctggaggcccat

SEQ ID NO: 931 - RNA, 22 nt, Homo sapiens
  source 1..22: mol_type = unassigned RNA
atgggcctccagccgtcagtct

SEQ ID NO: 932 - RNA, 18 nt, Homo sapiens
  source 1..18: mol_type = unassigned RNA
acaggcaggattggggaa

SEQ ID NO: 933 - RNA, 18 nt, Homo sapiens
  source 1..18: mol_type = unassigned RNA
ttccccaatcctgcctgt

SEQ ID NO: 934 - RNA, 22 nt, Homo sapiens
  source 1..22: mol_type = unassigned RNA
aggactggactcccggcagccc

SEQ ID NO: 935 - RNA, 22 nt, Homo sapiens
  source 1..22: mol_type = unassigned RNA
gggctgccgggagtccagtcct

SEQ ID NO: 936 - RNA, 17 nt, Homo sapiens
  source 1..17: mol_type = unassigned RNA
gggagaagggtcggggc

SEQ ID NO: 937 - RNA, 17 nt, Homo sapiens
  source 1..17: mol_type = unassigned RNA
gccccgacccttctccc

SEQ ID NO: 938 - RNA, 25 nt, Homo sapiens
  source 1..25: mol_type = unassigned RNA
aaatatgatgaaactcacagctgag

SEQ ID NO: 939 - RNA, 25 nt, Homo sapiens
  source 1..25: mol_type = unassigned RNA
ctcagctgtgagtttcatcatattt

SEQ ID NO: 940 - RNA, 26 nt, Homo sapiens
  source 1..26: mol_type = unassigned RNA
gctcagggatgataactgtgctgaga

SEQ ID NO: 941 - RNA, 26 nt, Homo sapiens
  source 1..26: mol_type = unassigned RNA
tctcagcacagttatcatccctgagc

SEQ ID NO: 942 - RNA, 18 nt, Homo sapiens
  source 1..18: mol_type = unassigned RNA
cagcagtgcgcagggctg

SEQ ID NO: 943 - RNA, 18 nt, Homo sapiens
  source 1..18: mol_type = unassigned RNA
cagccctgcgcactgctg

SEQ ID NO: 944 - RNA, 22 nt, Homo sapiens
  source 1..22: mol_type = unassigned RNA
gctaaggaagtcctgtgctcag

SEQ ID NO: 945 - RNA, 22 nt, Homo sapiens
  source 1..22: mol_type = unassigned RNA
ctgagcacaggacttccttagc

SEQ ID NO: 946 - RNA, 21 nt, Homo sapiens
  source 1..21: mol_type = unassigned RNA
tgactctgcctgtaggccggt

SEQ ID NO: 947 - RNA, 21 nt, Homo sapiens
  source 1..21: mol_type = unassigned RNA
accggcctacaggcagagtca

SEQ ID NO: 948 - RNA, 21 nt, Homo sapiens
  source 1..21: mol_type = unassigned RNA
gaccgagagggcctcggctgt

SEQ ID NO: 949 - RNA, 21 nt, Homo sapiens
  source 1..21: mol_type = unassigned RNA
acagccgaggccctctcggtc

SEQ ID NO: 950 - RNA, 21 nt, Homo sapiens
  source 1..21: mol_type = unassigned RNA
ggggggatgtgcatgctggtt

SEQ ID NO: 951 - RNA, 21 nt, Homo sapiens
  source 1..21: mol_type = unassigned RNA
aaccagcatgcacatcccccc

SEQ ID NO: 952 - RNA, 22 nt, Homo sapiens
  source 1..22: mol_type = unassigned RNA
tggtctgcaaagagatgactgt

SEQ ID NO: 953 - RNA, 22 nt, Homo sapiens
  source 1..22: mol_type = unassigned RNA
acagtcatctctttgcagacca

SEQ ID NO: 954 - RNA, 22 nt, Homo sapiens
  source 1..22: mol_type = unassigned RNA
tcattatatgtatgatctggac

SEQ ID NO: 955 - RNA, 22 nt, Homo sapiens
  source 1..22: mol_type = unassigned RNA
gtccagatcatacatataatga

SEQ ID NO: 956 - RNA, 18 nt, Homo sapiens
  source 1..18: mol_type = unassigned RNA
cccagcaggacgggagcg

SEQ ID NO: 957 - RNA, 18 nt, Homo sapiens
  source 1..18: mol_type = unassigned RNA
cgctcccgtcctgctggg

SEQ ID NO: 958 - RNA, 17 nt, Homo sapiens
  source 1..17: mol_type = unassigned RNA
atggagaaggcttctga

SEQ ID NO: 959 - RNA, 17 nt, Homo sapiens
  source 1..17: mol_type = unassigned RNA
tcagaagccttctccat

SEQ ID NO: 960 - RNA, 17 nt, Homo sapiens
  source 1..17: mol_type = unassigned RNA
ccccggggagcccggcg

SEQ ID NO: 961 - RNA, 17 nt, Homo sapiens
  source 1..17: mol_type = unassigned RNA
cgccgggctccccgggg

SEQ ID NO: 962 - RNA, 22 nt, Homo sapiens
  source 1..22: mol_type = unassigned RNA
tggaaggaggttgccggacgct

SEQ ID NO: 963 - RNA, 22 nt, Homo sapiens
  source 1..22: mol_type = unassigned RNA
agcgtccggcaacctccttcca

SEQ ID NO: 964 - RNA, 17 nt, Homo sapiens
  source 1..17: mol_type = unassigned RNA
ggatggaggaggggtct

SEQ ID NO: 965 - RNA, 17 nt, Homo sapiens
  source 1..17: mol_type = unassigned RNA
agacccctcctccatcc

SEQ ID NO: 966 - RNA, 17 nt, Homo sapiens
  source 1..17: mol_type = unassigned RNA
gtggacctggctgggac

SEQ ID NO: 967 - RNA, 17 nt, Homo sapiens
  source 1..17: mol_type = unassigned RNA
gtcccagccaggtccac

SEQ ID NO: 968 - RNA, 21 nt, Homo sapiens
  source 1..21: mol_type = unassigned RNA
tcgtgcatatatctaccacat

SEQ ID NO: 969 - RNA, 21 nt, Homo sapiens
  source 1..21: mol_type = unassigned RNA
atgtggtagatatatgcacga

SEQ ID NO: 970 - RNA, 21 nt, Homo sapiens
  source 1..21: mol_type = unassigned RNA
tgtggtagatatatgcacgat

SEQ ID NO: 971 - RNA, 21 nt, Homo sapiens
  source 1..21: mol_type = unassigned RNA
atcgtgcatatatctaccaca

SEQ ID NO: 972 - RNA, 22 nt, Homo sapiens
  source 1..22: mol_type = unassigned RNA
tgagccgagctgagcttagctg

SEQ ID NO: 973 - RNA, 22 nt, Homo sapiens
  source 1..22: mol_type = unassigned RNA
cagctaagctcagctcggctca

SEQ ID NO: 974 - RNA, 22 nt, Homo sapiens
  source 1..22: mol_type = unassigned RNA
gagcttggatgagctgggctga

SEQ ID NO: 975 - RNA, 22 nt, Homo sapiens
  source 1..22: mol_type = unassigned RNA
tcagcccagctcatccaagctc

SEQ ID NO: 976 - RNA, 22 nt, Homo sapiens
  source 1..22: mol_type = unassigned RNA
gctgaactgggctgagctgggc

SEQ ID NO: 977 - RNA, 22 nt, Homo sapiens
  source 1..22: mol_type = unassigned RNA
gcccagctcagcccagttcagc

SEQ ID NO: 978 - RNA, 21 nt, Homo sapiens
  source 1..21: mol_type = unassigned RNA
ttagtcctgcctgtaggttta

SEQ ID NO: 979 - RNA, 21 nt, Homo sapiens
  source 1..21: mol_type = unassigned RNA
taaacctacaggcaggactaa

SEQ ID NO: 980 - RNA, 20 nt, Homo sapiens
  source 1..20: mol_type = unassigned RNA
ttgggctgggctgggttggg

SEQ ID NO: 981 - RNA, 20 nt, Homo sapiens
  source 1..20: mol_type = unassigned RNA
cccaacccagcccagcccaa

SEQ ID NO: 982 - RNA, 20 nt, Homo sapiens
  source 1..20: mol_type = unassigned RNA
taggatgggggtgagaggtg

SEQ ID NO: 983 - RNA, 20 nt, Homo sapiens
  source 1..20: mol_type = unassigned RNA
cacctctcacccccatccta

SEQ ID NO: 984 - RNA, 22 nt, Homo sapiens
  source 1..22: mol_type = unassigned RNA
aaaagtaattgtggattttgct

SEQ ID NO: 985 - RNA, 22 nt, Homo sapiens
  source 1..22: mol_type = unassigned RNA
agcaaaatccacaattactttt

SEQ ID NO: 986 - RNA, 22 nt, Homo sapiens
  source 1..22: mol_type = unassigned RNA
caaaaaccggcaattacttttg

SEQ ID NO: 987 - RNA, 22 nt, Homo sapiens
  source 1..22: mol_type = unassigned RNA
caaaagtaattgccggtttttg

SEQ ID NO: 988 - RNA, 22 nt, Homo sapiens
  source 1..22: mol_type = unassigned RNA
gaaaacgacaatgacttttgca

SEQ ID NO: 989 - RNA, 22 nt, Homo sapiens
  source 1..22: mol_type = unassigned RNA
tgcaaaagtcattgtcgttttc

SEQ ID NO: 990 - RNA, 21 nt, Homo sapiens
  source 1..21: mol_type = unassigned RNA
caaaaactgcaattactttca

SEQ ID NO: 991 - RNA, 21 nt, Homo sapiens
  source 1..21: mol_type = unassigned RNA
tgaaagtaattgcagtttttg

SEQ ID NO: 992 - RNA, 21 nt, Homo sapiens
  source 1..21: mol_type = unassigned RNA
aaaggtaattgtggtttctgc

SEQ ID NO: 993 - RNA, 21 nt, Homo sapiens
  source 1..21: mol_type = unassigned RNA
gcagaaaccacaattaccttt

SEQ ID NO: 994 - RNA, 22 nt, Homo sapiens
  source 1..22: mol_type = unassigned RNA
caaaaactgcagttacttttgc

SEQ ID NO: 995 - RNA, 22 nt, Homo sapiens
  source 1..22: mol_type = unassigned RNA
gcaaaagtaactgcagtttttg

SEQ ID NO: 996 - RNA, 20 nt, Homo sapiens
  source 1..20: mol_type = unassigned RNA
aaaagtgattgcagtgtttg

SEQ ID NO: 997 - RNA, 20 nt, Homo sapiens
  source 1..20: mol_type = unassigned RNA
caaacactgcaatcactttt

SEQ ID NO: 998 - RNA, 22 nt, Homo sapiens
  source 1..22: mol_type = unassigned RNA
aaaggtaattgcagtttttccc

SEQ ID NO: 999 - RNA, 22 nt, Homo sapiens
  source 1..22: mol_type = unassigned RNA
gggaaaaactgcaattaccttt

SEQ ID NO: 1000 - RNA, 21 nt, Homo sapiens
  source 1..21: mol_type = unassigned RNA
taaaaactgcaattactttta

SEQ ID NO: 1001 - RNA, 21 nt, Homo sapiens
  source 1..21: mol_type = unassigned RNA
taaaagtaattgcagttttta

SEQ ID NO: 1002 - RNA, 23 nt, Homo sapiens
  source 1..23: mol_type = unassigned RNA
tgcaaaagtaattgcagtttttg

SEQ ID NO: 1003 - RNA, 23 nt, Homo sapiens
  source 1..23: mol_type = unassigned RNA
caaaaactgcaattacttttgca

SEQ ID NO: 1004 - RNA, 21 nt, Homo sapiens
  source 1..21: mol_type = unassigned RNA
aaaagtaactgcggtttttga

SEQ ID NO: 1005 - RNA, 21 nt, Homo sapiens
  source 1..21: mol_type = unassigned RNA
tcaaaaaccgcagttactttt

SEQ ID NO: 1006 - RNA, 22 nt, Homo sapiens
  source 1..22: mol_type = unassigned RNA
aacggcaatgacttttgtacca

SEQ ID NO: 1007 - RNA, 22 nt, Homo sapiens
  source 1..22: mol_type = unassigned RNA
tggtacaaaagtcattgccgtt

SEQ ID NO: 1008 - RNA, 22 nt, Homo sapiens
  source 1..22: mol_type = unassigned RNA
caaaaactgcagttacttttgt

SEQ ID NO: 1009 - RNA, 22 nt, Homo sapiens
  source 1..22: mol_type = unassigned RNA
acaaaagtaactgcagtttttg

SEQ ID NO: 1010 - RNA, 22 nt, Homo sapiens
  source 1..22: mol_type = unassigned RNA
aaaagtaattgcggtttttgcc

SEQ ID NO: 1011 - RNA, 22 nt, Homo sapiens
  source 1..22: mol_type = unassigned RNA
ggcaaaaaccgcaattactttt

SEQ ID NO: 1012 - RNA, 20 nt, Homo sapiens
  source 1..20: mol_type = unassigned RNA
aaaaggcattgtggtttttg

SEQ ID NO: 1013 - RNA, 20 nt, Homo sapiens
  source 1..20: mol_type = unassigned RNA
caaaaaccacaatgcctttt

SEQ ID NO: 1014 - RNA, 23 nt, Homo sapiens
  source 1..23: mol_type = unassigned RNA
cggcccgggctgctgctgttcct

SEQ ID NO: 1015 - RNA, 23 nt, Homo sapiens
  source 1..23: mol_type = unassigned RNA
aggaacagcagcagcccgggccg

SEQ ID NO: 1016 - RNA, 20 nt, Homo sapiens
  source 1..20: mol_type = unassigned RNA
agaggtatagggcatgggaa

SEQ ID NO: 1017 - RNA, 20 nt, Homo sapiens
  source 1..20: mol_type = unassigned RNA
ttcccatgccctatacctct

SEQ ID NO: 1018 - RNA, 22 nt, Homo sapiens
  source 1..22: mol_type = unassigned RNA
ttcctatgcatatacttctttg

SEQ ID NO: 1019 - RNA, 22 nt, Homo sapiens
  source 1..22: mol_type = unassigned RNA
caaagaagtatatgcataggaa

SEQ ID NO: 1020 - RNA, 22 nt, Homo sapiens
  source 1..22: mol_type = unassigned RNA
atcatagaggaaaatccatgtt

SEQ ID NO: 1021 - RNA, 22 nt, Homo sapiens
  source 1..22: mol_type = unassigned RNA
aacatggattttcctctatgat

SEQ ID NO: 1022 - RNA, 22 nt, Homo sapiens
  source 1..22: mol_type = unassigned RNA
cgtggatattccttctatgttt

SEQ ID NO: 1023 - RNA, 22 nt, Homo sapiens
  source 1..22: mol_type = unassigned RNA
aaacatagaaggaatatccacg

SEQ ID NO: 1024 - RNA, 22 nt, Homo sapiens
  source 1..22: mol_type = unassigned RNA
tgagtattacatggccaatctc

SEQ ID NO: 1025 - RNA, 22 nt, Homo sapiens
  source 1..22: mol_type = unassigned RNA
gagattggccatgtaatactca

SEQ ID NO: 1026 - RNA, 21 nt, Homo sapiens
  source 1..21: mol_type = unassigned RNA
cttccgccccgccgggcgtcg

SEQ ID NO: 1027 - RNA, 21 nt, Homo sapiens
  source 1..21: mol_type = unassigned RNA
cgacgcccggcggggcggaag

SEQ ID NO: 1028 - RNA, 22 nt, Homo sapiens
  source 1..22: mol_type = unassigned RNA
tagcttatcagactgatgttga

SEQ ID NO: 1029 - RNA, 22 nt, Homo sapiens
  source 1..22: mol_type = unassigned RNA
tcaacatcagtctgataagcta

SEQ ID NO: 1030 - RNA, 22 nt, Homo sapiens
  source 1..22: mol_type = unassigned RNA
cactagattgtgagctcctgga

SEQ ID NO: 1031 - RNA, 22 nt, Homo sapiens
  source 1..22: mol_type = unassigned RNA
tccaggagctcacaatctagtg

SEQ ID NO: 1032 - RNA, 22 nt, Homo sapiens
  source 1..22: mol_type = unassigned RNA
aaggagctcacagtctattgag

SEQ ID NO: 1033 - RNA, 22 nt, Homo sapiens
  source 1..22: mol_type = unassigned RNA
ctcaatagactgtgagctcctt

SEQ ID NO: 1034 - RNA, 22 nt, Homo sapiens
  source 1..22: mol_type = unassigned RNA
tacgtcatcgttgtcatcgtca

SEQ ID NO: 1035 - RNA, 22 nt, Homo sapiens
  source 1..22: mol_type = unassigned RNA
tgacgatgacaacgatgacgta

SEQ ID NO: 1036 - RNA, 22 nt, Homo sapiens
  source 1..22: mol_type = unassigned RNA
cacgctcatgcacacacccaca

SEQ ID NO: 1037 - RNA, 22 nt, Homo sapiens
  source 1..22: mol_type = unassigned RNA
tgtgggtgtgtgcatgagcgtg

SEQ ID NO: 1038 - RNA, 21 nt, Homo sapiens
  source 1..21: mol_type = unassigned RNA
caacaccagtcgatgggctgt

SEQ ID NO: 1039 - RNA, 21 nt, Homo sapiens
  source 1..21: mol_type = unassigned RNA
acagcccatcgactggtgttg

SEQ ID NO: 1040 - RNA, 22 nt, Homo sapiens
  source 1..22: mol_type = unassigned RNA
ttcaccaccttctccacccagc

SEQ ID NO: 1041 - RNA, 22 nt, Homo sapiens
  source 1..22: mol_type = unassigned RNA
gctgggtggagaaggtggtgaa

SEQ ID NO: 1042 - RNA, 23 nt, Homo sapiens
  source 1..23: mol_type = unassigned RNA
cgggtagagagggcagtgggagg

SEQ ID NO: 1043 - RNA, 23 nt, Homo sapiens
  source 1..23: mol_type = unassigned RNA
cctcccactgccctctctacccg

SEQ ID NO: 1044 - RNA, 18 nt, Homo sapiens
  source 1..18: mol_type = unassigned RNA
aatccttgctacctgggt

SEQ ID NO: 1045 - RNA, 18 nt, Homo sapiens
  source 1..18: mol_type = unassigned RNA
acccaggtagcaaggatt

SEQ ID NO: 1046 - RNA, 22 nt, Homo sapiens
  source 1..22: mol_type = unassigned RNA
caatttagtgtgtgtgatattt

SEQ ID NO: 1047 - RNA, 22 nt, Homo sapiens
  source 1..22: mol_type = unassigned RNA
aaatatcacacacactaaattg

SEQ ID NO: 1048 - RNA, 22 nt, Homo sapiens
  source 1..22: mol_type = unassigned RNA
tattgcacattactaagttgca

SEQ ID NO: 1049 - RNA, 22 nt, Homo sapiens
  source 1..22: mol_type = unassigned RNA
tgcaacttagtaatgtgcaata

SEQ ID NO: 1050 - RNA, 22 nt, Homo sapiens
  source 1..22: mol_type = unassigned RNA
cctattcttgattacttgtttc

SEQ ID NO: 1051 - RNA, 22 nt, Homo sapiens
  source 1..22: mol_type = unassigned RNA
gaaacaagtaatcaagaatagg

SEQ ID NO: 1052 - RNA, 22 nt, Homo sapiens
  source 1..22: mol_type = unassigned RNA
ttcaagtaatccaggataggct

SEQ ID NO: 1053 - RNA, 22 nt, Homo sapiens
  source 1..22: mol_type = unassigned RNA
agcctatcctggattacttgaa

SEQ ID NO: 1054 - RNA, 23 nt, Homo sapiens
  source 1..23: mol_type = unassigned RNA
ccagttaccgcttccgctaccgc

SEQ ID NO: 1055 - RNA, 23 nt, Homo sapiens
  source 1..23: mol_type = unassigned RNA
gcggtagcggaagcggtaactgg

SEQ ID NO: 1056 - RNA, 21 nt, Homo sapiens
  source 1..21: mol_type = unassigned RNA
gatttcagtggagtgaagttc

SEQ ID NO: 1057 - RNA, 21 nt, Homo sapiens
  source 1..21: mol_type = unassigned RNA
gaacttcactccactgaaatc

SEQ ID NO: 1058 - RNA, 22 nt, Homo sapiens
  source 1..22: mol_type = unassigned RNA
tccttcattccaccggagtctg

SEQ ID NO: 1059 - RNA, 22 nt, Homo sapiens
  source 1..22: mol_type = unassigned RNA
cagactccggtggaatgaagga

SEQ ID NO: 1060 - RNA, 23 nt, Homo sapiens
  source 1..23: mol_type = unassigned RNA
aaaatggtgccctagtgactaca

SEQ ID NO: 1061 - RNA, 23 nt, Homo sapiens
  source 1..23: mol_type = unassigned RNA
tgtagtcactagggcaccatttt

SEQ ID NO: 1062 - RNA, 21 nt, Homo sapiens
  source 1..21: mol_type = unassigned RNA
caagtcactagtggttccgtt

SEQ ID NO: 1063 - RNA, 21 nt, Homo sapiens
  source 1..21: mol_type = unassigned RNA
aacggaaccactagtgacttg

SEQ ID NO: 1064 - RNA, 22 nt, Homo sapiens
  source 1..22: mol_type = unassigned RNA
ccagtattaactgtgctgctga

SEQ ID NO: 1065 - RNA, 22 nt, Homo sapiens
  source 1..22: mol_type = unassigned RNA
tcagcagcacagttaatactgg

SEQ ID NO: 1066 - RNA, 23 nt, Homo sapiens
  source 1..23: mol_type = unassigned RNA
tcccccaggtgtgattctgattt

SEQ ID NO: 1067 - RNA, 23 nt, Homo sapiens
  source 1..23: mol_type = unassigned RNA
aaatcagaatcacacctggggga

SEQ ID NO: 1068 - RNA, 22 nt, Homo sapiens
  source 1..22: mol_type = unassigned RNA
aaaagctgggttgagagggcga

SEQ ID NO: 1069 - RNA, 22 nt, Homo sapiens
  source 1..22: mol_type = unassigned RNA
tcgccctctcaacccagctttt

SEQ ID NO: 1070 - RNA, 22 nt, Homo sapiens
  source 1..22: mol_type = unassigned RNA
tggacggagaactgataagggt

SEQ ID NO: 1071 - RNA, 22 nt, Homo sapiens
  source 1..22: mol_type = unassigned RNA
acccttatcagttctccgtcca

SEQ ID NO: 1072 - RNA, 22 nt, Homo sapiens
  source 1..22: mol_type = unassigned RNA
tggtgggccgcagaacatgtgc

SEQ ID NO: 1073 - RNA, 22 nt, Homo sapiens
  source 1..22: mol_type = unassigned RNA
gcacatgttctgcggcccacca

SEQ ID NO: 1074 - RNA, 22 nt, Homo sapiens
  source 1..22: mol_type = unassigned RNA
agtgcctgctatgtgccaggca

SEQ ID NO: 1075 - RNA, 22 nt, Homo sapiens
  source 1..22: mol_type = unassigned RNA
tgcctggcacatagcaggcact

SEQ ID NO: 1076 - RNA, 22 nt, Homo sapiens
  source 1..22: mol_type = unassigned RNA
cttggcacctagcaagcactca

SEQ ID NO: 1077 - RNA, 22 nt, Homo sapiens
  source 1..22: mol_type = unassigned RNA
tgagtgcttgctaggtgccaag

SEQ ID NO: 1078 - RNA, 23 nt, Homo sapiens
  source 1..23: mol_type = unassigned RNA
ttattgcttaagaatacgcgtag

SEQ ID NO: 1079 - RNA, 23 nt, Homo sapiens
  source 1..23: mol_type = unassigned RNA
ctacgcgtattcttaagcaataa

SEQ ID NO: 1080 - RNA, 22 nt, Homo sapiens
  source 1..22: mol_type = unassigned RNA
ttgcatagtcacaaaagtgatc

SEQ ID NO: 1081 - RNA, 22 nt, Homo sapiens
  source 1..22: mol_type = unassigned RNA
gatcacttttgtgactatgcaa

SEQ ID NO: 1082 - RNA, 22 nt, Homo sapiens
  source 1..22: mol_type = unassigned RNA
gtgaattaccgaagggccataa

SEQ ID NO: 1083 - RNA, 22 nt, Homo sapiens
  source 1..22: mol_type = unassigned RNA
ttatggcccttcggtaattcac

SEQ ID NO: 1084 - RNA, 22 nt, Homo sapiens
  source 1..22: mol_type = unassigned RNA
tatggcactggtagaattcact

SEQ ID NO: 1085 - RNA, 22 nt, Homo sapiens
  source 1..22: mol_type = unassigned RNA
agtgaattctaccagtgccata

SEQ ID NO: 1086 - RNA, 22 nt, Homo sapiens
  source 1..22: mol_type = unassigned RNA
tgatatgtttgatatattaggt

SEQ ID NO: 1087 - RNA, 22 nt, Homo sapiens
  source 1..22: mol_type = unassigned RNA
acctaatatatcaaacatatca

SEQ ID NO: 1088 - RNA, 21 nt, Homo sapiens
  source 1..21: mol_type = unassigned RNA
tgatatgtttgatattgggtt

SEQ ID NO: 1089 - RNA, 21 nt, Homo sapiens
  source 1..21: mol_type = unassigned RNA
aacccaatatcaaacatatca

SEQ ID NO: 1090 - RNA, 18 nt, Homo sapiens
  source 1..18: mol_type = unassigned RNA
agcaggtgcggggcggcg

SEQ ID NO: 1091 - RNA, 18 nt, Homo sapiens
  source 1..18: mol_type = unassigned RNA
cgccgccccgcacctgct

SEQ ID NO: 1092 - RNA, 21 nt, Homo sapiens
  source 1..21: mol_type = unassigned RNA
cagtgcaagtgtagatgccga

SEQ ID NO: 1093 - RNA, 21 nt, Homo sapiens
  source 1..21: mol_type = unassigned RNA
tcggcatctacacttgcactg

SEQ ID NO: 1094 - RNA, 22 nt, Homo sapiens
  source 1..22: mol_type = unassigned RNA
tatgtaatatggtccacatctt

SEQ ID NO: 1095 - RNA, 22 nt, Homo sapiens
  source 1..22: mol_type = unassigned RNA
aagatgtggaccatattacata

SEQ ID NO: 1096 - RNA, 21 nt, Homo sapiens
  source 1..21: mol_type = unassigned RNA
aatataacacagatggcctgt

SEQ ID NO: 1097 - RNA, 21 nt, Homo sapiens
  source 1..21: mol_type = unassigned RNA
acaggccatctgtgttatatt

SEQ ID NO: 1098 - RNA, 22 nt, Homo sapiens
  source 1..22: mol_type = unassigned RNA
atcgggaatgtcgtgtccgccc

SEQ ID NO: 1099 - RNA, 22 nt, Homo sapiens
  source 1..22: mol_type = unassigned RNA
gggcggacacgacattcccgat

SEQ ID NO: 1100 - RNA, 23 nt, Homo sapiens
  source 1..23: mol_type = unassigned RNA
aatgacacgatcactcccgttga

SEQ ID NO: 1101 - RNA, 23 nt, Homo sapiens
  source 1..23: mol_type = unassigned RNA
tcaacgggagtgatcgtgtcatt

SEQ ID NO: 1102 - RNA, 22 nt, Homo sapiens
  source 1..22: mol_type = unassigned RNA
tactcaggagagtggcaatcac

SEQ ID NO: 1103 - RNA, 22 nt, Homo sapiens
  source 1..22: mol_type = unassigned RNA
gtgattgccactctcctgagta

SEQ ID NO: 1104 - RNA, 23 nt, Homo sapiens
  source 1..23: mol_type = unassigned RNA
tggaagactagtgattttgttgt

SEQ ID NO: 1105 - RNA, 23 nt, Homo sapiens
  source 1..23: mol_type = unassigned RNA
acaacaaaatcactagtcttcca

SEQ ID NO: 1106 - RNA, 22 nt, Homo sapiens
  source 1..22: mol_type = unassigned RNA
ataaagctagataaccgaaagt

SEQ ID NO: 1107 - RNA, 22 nt, Homo sapiens
  source 1..22: mol_type = unassigned RNA
actttcggttatctagctttat

SEQ ID NO: 1108 - RNA, 23 nt, Homo sapiens
  source 1..23: mol_type = unassigned RNA
tctttggttatctagctgtatga

SEQ ID NO: 1109 - RNA, 23 nt, Homo sapiens
  source 1..23: mol_type = unassigned RNA
tcatacagctagataaccaaaga

SEQ ID NO: 1110 - RNA, 22 nt, Homo sapiens
  source 1..22: mol_type = unassigned RNA
acaggtgaggttcttgggagcc

SEQ ID NO: 1111 - RNA, 22 nt, Homo sapiens
  source 1..22: mol_type = unassigned RNA
ggctcccaagaacctcacctgt

SEQ ID NO: 1112 - RNA, 24 nt, Homo sapiens
  source 1..24: mol_type = unassigned RNA
tccctgagaccctttaacctgtga

SEQ ID NO: 1113 - RNA, 24 nt, Homo sapiens
  source 1..24: mol_type = unassigned RNA
tcacaggttaaagggtctcaggga

SEQ ID NO: 1114 - RNA, 22 nt, Homo sapiens
  source 1..22: mol_type = unassigned RNA
caacaaatcccagtctacctaa

SEQ ID NO: 1115 - RNA, 22 nt, Homo sapiens
  source 1..22: mol_type = unassigned RNA
ttaggtagactgggatttgttg

SEQ ID NO: 1116 - RNA, 22 nt, Homo sapiens
  source 1..22: mol_type = unassigned RNA
cgtgttcacagcggaccttgat

SEQ ID NO: 1117 - RNA, 22 nt, Homo sapiens
  source 1..22: mol_type = unassigned RNA
atcaaggtccgctgtgaacacg

SEQ ID NO: 1118 - RNA, 20 nt, Homo sapiens
  source 1..20: mol_type = unassigned RNA
taaggcacgcggtgaatgcc

SEQ ID NO: 1119 - RNA, 20 nt, Homo sapiens
  source 1..20: mol_type = unassigned RNA
ggcattcaccgcgtgcctta

SEQ ID NO: 1120 - RNA, 22 nt, Homo sapiens
  source 1..22: mol_type = unassigned RNA
aacacacctggttaacctcttt

SEQ ID NO: 1121 - RNA, 22 nt, Homo sapiens
  source 1..22: mol_type = unassigned RNA
aaagaggttaaccaggtgtgtt

SEQ ID NO: 1122 - RNA, 22 nt, Homo sapiens
  source 1..22: mol_type = unassigned RNA
taacagtctacagccatggtcg

SEQ ID NO: 1123 - RNA, 22 nt, Homo sapiens
  source 1..22: mol_type = unassigned RNA
cgaccatggctgtagactgtta

SEQ ID NO: 1124 - RNA, 22 nt, Homo sapiens
  source 1..22: mol_type = unassigned RNA
accgtggctttcgattgttact

SEQ ID NO: 1125 - RNA, 22 nt, Homo sapiens
  source 1..22: mol_type = unassigned RNA
agtaacaatcgaaagccacggt

SEQ ID NO: 1126 - RNA, 21 nt, Homo sapiens
  source 1..21: mol_type = unassigned RNA
taacagtctccagtcacggcc

SEQ ID NO: 1127 - RNA, 21 nt, Homo sapiens
  source 1..21: mol_type = unassigned RNA
ggccgtgactggagactgtta

SEQ ID NO: 1128 - RNA, 23 nt, Homo sapiens
  source 1..23: mol_type = unassigned RNA
accttggctctagactgcttact

SEQ ID NO: 1129 - RNA, 23 nt, Homo sapiens
  source 1..23: mol_type = unassigned RNA
agtaagcagtctagagccaaggt

SEQ ID NO: 1130 - RNA, 23 nt, Homo sapiens
  source 1..23: mol_type = unassigned RNA
tctcacacagaaatcgcacccgt

SEQ ID NO: 1131 - RNA, 23 nt, Homo sapiens
  source 1..23: mol_type = unassigned RNA
acgggtgcgatttctgtgtgaga

SEQ ID NO: 1132 - RNA, 22 nt, Homo sapiens
  source 1..22: mol_type = unassigned RNA
tggttgaccatagaacatgcgc

SEQ ID NO: 1133 - RNA, 22 nt, Homo sapiens
  source 1..22: mol_type = unassigned RNA
gcgcatgttctatggtcaacca

SEQ ID NO: 1134 - RNA, 23 nt, Homo sapiens
  source 1..23: mol_type = unassigned RNA
cagtaacaaagattcatccttgt

SEQ ID NO: 1135 - RNA, 23 nt, Homo sapiens
  source 1..23: mol_type = unassigned RNA
acaaggatgaatctttgttactg

SEQ ID NO: 1136 - RNA, 22 nt, Homo sapiens
  source 1..22: mol_type = unassigned RNA
agagttgagtctggacgtcccg

SEQ ID NO: 1137 - RNA, 22 nt, Homo sapiens
  source 1..22: mol_type = unassigned RNA
cgggacgtccagactcaactct

SEQ ID NO: 1138 - RNA, 22 nt, Homo sapiens
  source 1..22: mol_type = unassigned RNA
agaattgtggctggacatctgt

SEQ ID NO: 1139 - RNA, 22 nt, Homo sapiens
  source 1..22: mol_type = unassigned RNA
acagatgtccagccacaattct

SEQ ID NO: 1140 - RNA, 21 nt, Homo sapiens
  source 1..21: mol_type = unassigned RNA
tgattgtccaaacgcaattct

SEQ ID NO: 1141 - RNA, 21 nt, Homo sapiens
  source 1..21: mol_type = unassigned RNA
agaattgcgtttggacaatca

SEQ ID NO: 1142 - RNA, 22 nt, Homo sapiens
  source 1..22: mol_type = unassigned RNA
tatagggattggagccgtggcg

SEQ ID NO: 1143 - RNA, 22 nt, Homo sapiens
  source 1..22: mol_type = unassigned RNA
cgccacggctccaatccctata

SEQ ID NO: 1144 - RNA, 23 nt, Homo sapiens
  source 1..23: mol_type = unassigned RNA
tatggctttttattcctatgtga

SEQ ID NO: 1145 - RNA, 23 nt, Homo sapiens
  source 1..23: mol_type = unassigned RNA
tcacataggaataaaaagccata

SEQ ID NO: 1146 - RNA, 22 nt, Homo sapiens
  source 1..22: mol_type = unassigned RNA
atgtagggctaaaagccatggg

SEQ ID NO: 1147 - RNA, 22 nt, Homo sapiens
  source 1..22: mol_type = unassigned RNA
cccatggcttttagccctacat

SEQ ID NO: 1148 - RNA, 23 nt, Homo sapiens
  source 1..23: mol_type = unassigned RNA
tatggcttttcattcctatgtga

SEQ ID NO: 1149 - RNA, 23 nt, Homo sapiens
  source 1..23: mol_type = unassigned RNA
tcacataggaatgaaaagccata

SEQ ID NO: 1150 - RNA, 22 nt, Homo sapiens
  source 1..22: mol_type = unassigned RNA
aaccatcgaccgttgagtggac

SEQ ID NO: 1151 - RNA, 22 nt, Homo sapiens
  source 1..22: mol_type = unassigned RNA
gtccactcaacggtcgatggtt

SEQ ID NO: 1152 - RNA, 22 nt, Homo sapiens
  source 1..22: mol_type = unassigned RNA
aacattcaacctgtcggtgagt

SEQ ID NO: 1153 - RNA, 22 nt, Homo sapiens
  source 1..22: mol_type = unassigned RNA
actcaccgacaggttgaatgtt

SEQ ID NO: 1154 - RNA, 25 nt, Homo sapiens
  source 1..25: mol_type = unassigned RNA
cttccagacgctccgccccacgtcg

SEQ ID NO: 1155 - RNA, 25 nt, Homo sapiens
  source 1..25: mol_type = unassigned RNA
cgacgtggggcggagcgtctggaag

SEQ ID NO: 1156 - RNA, 24 nt, Homo sapiens
  source 1..24: mol_type = unassigned RNA
aacaacaaaatcactagtcttcca

SEQ ID NO: 1157 - RNA, 24 nt, Homo sapiens
  source 1..24: mol_type = unassigned RNA
tggaagactagtgattttgttgtt

SEQ ID NO: 1158 - RNA, 22 nt, Homo sapiens
  source 1..22: mol_type = unassigned RNA
aggtagactgggatttgttgtt

SEQ ID NO: 1159 - RNA, 22 nt, Homo sapiens
  source 1..22: mol_type = unassigned RNA
aacaacaaatcccagtctacct

SEQ ID NO: 1160 - RNA, 22 nt, Homo sapiens
  source 1..22: mol_type = unassigned RNA
aaacaccattgtcacactccac

SEQ ID NO: 1161 - RNA, 22 nt, Homo sapiens
  source 1..22: mol_type = unassigned RNA
gtggagtgtgacaatggtgttt

SEQ ID NO: 1162 - RNA, 23 nt, Homo sapiens
  source 1..23: mol_type = unassigned RNA
tttagtgtgataatggcgtttga

SEQ ID NO: 1163 - RNA, 23 nt, Homo sapiens
  source 1..23: mol_type = unassigned RNA
tcaaacgccattatcacactaaa

SEQ ID NO: 1164 - RNA, 22 nt, Homo sapiens
  source 1..22: mol_type = unassigned RNA
tatggaaagactttgccactct

SEQ ID NO: 1165 - RNA, 22 nt, Homo sapiens
  source 1..22: mol_type = unassigned RNA
agagtggcaaagtctttccata

SEQ ID NO: 1166 - RNA, 21 nt, Homo sapiens
  source 1..21: mol_type = unassigned RNA
agtggcaaagtctttccatat

SEQ ID NO: 1167 - RNA, 21 nt, Homo sapiens
  source 1..21: mol_type = unassigned RNA
atatggaaagactttgccact

SEQ ID NO: 1168 - RNA, 22 nt, Homo sapiens
  source 1..22: mol_type = unassigned RNA
cagcccggatcccagcccactt

SEQ ID NO: 1169 - RNA, 22 nt, Homo sapiens
  source 1..22: mol_type = unassigned RNA
aagtgggctgggatccgggctg

SEQ ID NO: 1170 - RNA, 20 nt, Homo sapiens
  source 1..20: mol_type = unassigned RNA
gtgggttggggcgggctctg

SEQ ID NO: 1171 - RNA, 20 nt, Homo sapiens
  source 1..20: mol_type = unassigned RNA
cagagcccgccccaacccac

SEQ ID NO: 1172 - RNA, 23 nt, Homo sapiens
  source 1..23: mol_type = unassigned RNA
ttcgggctggcctgctgctccgg

SEQ ID NO: 1173 - RNA, 23 nt, Homo sapiens
  source 1..23: mol_type = unassigned RNA
ccggagcagcaggccagcccgaa

SEQ ID NO: 1174 - RNA, 21 nt, Homo sapiens
  source 1..21: mol_type = unassigned RNA
tgtgcagcaggccaaccgaga

SEQ ID NO: 1175 - RNA, 21 nt, Homo sapiens
  source 1..21: mol_type = unassigned RNA
tctcggttggcctgctgcaca

SEQ ID NO: 1176 - RNA, 22 nt, Homo sapiens
  source 1..22: mol_type = unassigned RNA
cagggcaggaagaagtggacaa

SEQ ID NO: 1177 - RNA, 22 nt, Homo sapiens
  source 1..22: mol_type = unassigned RNA
ttgtccacttcttcctgccctg

SEQ ID NO: 1178 - RNA, 22 nt, Homo sapiens
  source 1..22: mol_type = unassigned RNA
gtccacttctgcctgccctgcc

SEQ ID NO: 1179 - RNA, 22 nt, Homo sapiens
  source 1..22: mol_type = unassigned RNA
ggcagggcaggcagaagtggac

SEQ ID NO: 1180 - RNA, 22 nt, Homo sapiens
  source 1..22: mol_type = unassigned RNA
tttggacagaaaacacgcaggt

SEQ ID NO: 1181 - RNA, 22 nt, Homo sapiens
  source 1..22: mol_type = unassigned RNA
acctgcgtgttttctgtccaaa

SEQ ID NO: 1182 - RNA, 20 nt, Homo sapiens
  source 1..20: mol_type = unassigned RNA
cctgcgtgttttctgtccaa

SEQ ID NO: 1183 - RNA, 20 nt, Homo sapiens
  source 1..20: mol_type = unassigned RNA
ttggacagaaaacacgcagg

SEQ ID NO: 1184 - RNA, 22 nt, Homo sapiens
  source 1..22: mol_type = unassigned RNA
tgccgccctctcgctgctctag

SEQ ID NO: 1185 - RNA, 22 nt, Homo sapiens
  source 1..22: mol_type = unassigned RNA
ctagagcagcgagagggcggca

SEQ ID NO: 1186 - RNA, 23 nt, Homo sapiens
  source 1..23: mol_type = unassigned RNA
gagggcagcgtgggtgtggcgga

SEQ ID NO: 1187 - RNA, 23 nt, Homo sapiens
  source 1..23: mol_type = unassigned RNA
tccgccacacccacgctgccctc

SEQ ID NO: 1188 - RNA, 22 nt, Homo sapiens
  source 1..22: mol_type = unassigned RNA
aggagctagccaggcatatgca

SEQ ID NO: 1189 - RNA, 22 nt, Homo sapiens
  source 1..22: mol_type = unassigned RNA
tgcatatgcctggctagctcct

SEQ ID NO: 1190 - RNA, 20 nt, Homo sapiens
  source 1..20: mol_type = unassigned RNA
atatgcctggctagctcctc

SEQ ID NO: 1191 - RNA, 20 nt, Homo sapiens
  source 1..20: mol_type = unassigned RNA
gaggagctagccaggcatat

SEQ ID NO: 1192 - RNA, 19 nt, Homo sapiens
  source 1..19: mol_type = unassigned RNA
cggcgcgaccggcccgggg

SEQ ID NO: 1193 - RNA, 19 nt, Homo sapiens
  source 1..19: mol_type = unassigned RNA
ccccgggccggtcgcgccg

SEQ ID NO: 1194 - RNA, 21 nt, Homo sapiens
  source 1..21: mol_type = unassigned RNA
tcttgaagtcagaacccgcaa

SEQ ID NO: 1195 - RNA, 21 nt, Homo sapiens
  source 1..21: mol_type = unassigned RNA
ttgcgggttctgacttcaaga

SEQ ID NO: 1196 - RNA, 22 nt, Homo sapiens
  source 1..22: mol_type = unassigned RNA
aactcgtgttcaaagcctttag

SEQ ID NO: 1197 - RNA, 22 nt, Homo sapiens
  source 1..22: mol_type = unassigned RNA
ctaaaggctttgaacacgagtt

SEQ ID NO: 1198 - RNA, 23 nt, Homo sapiens
  source 1..23: mol_type = unassigned RNA
cctggacaccgctcagccggccg

SEQ ID NO: 1199 - RNA, 23 nt, Homo sapiens
  source 1..23: mol_type = unassigned RNA
cggccggctgagcggtgtccagg

SEQ ID NO: 1200 - RNA, 21 nt, Homo sapiens
  source 1..21: mol_type = unassigned RNA
actcggctgcggtggacaagt

SEQ ID NO: 1201 - RNA, 21 nt, Homo sapiens
  source 1..21: mol_type = unassigned RNA
acttgtccaccgcagccgagt

SEQ ID NO: 1202 - RNA, 20 nt, Homo sapiens
  source 1..20: mol_type = unassigned RNA
tcactctcaccttgctttgc

SEQ ID NO: 1203 - RNA, 20 nt, Homo sapiens
  source 1..20: mol_type = unassigned RNA
gcaaagcaaggtgagagtga

SEQ ID NO: 1204 - RNA, 22 nt, Homo sapiens
  source 1..22: mol_type = unassigned RNA
ttgctaagtaggctgagattga

SEQ ID NO: 1205 - RNA, 22 nt, Homo sapiens
  source 1..22: mol_type = unassigned RNA
tcaatctcagcctacttagcaa

SEQ ID NO: 1206 - RNA, 22 nt, Homo sapiens
  source 1..22: mol_type = unassigned RNA
caccccctgtttcctggcccac

SEQ ID NO: 1207 - RNA, 22 nt, Homo sapiens
  source 1..22: mol_type = unassigned RNA
gtgggccaggaaacagggggtg

SEQ ID NO: 1208 - RNA, 23 nt, Homo sapiens
  source 1..23: mol_type = unassigned RNA
tgggccagggagcagctggtggg

SEQ ID NO: 1209 - RNA, 23 nt, Homo sapiens
  source 1..23: mol_type = unassigned RNA
cccaccagctgctccctggccca

SEQ ID NO: 1210 - RNA, 24 nt, Homo sapiens
  source 1..24: mol_type = unassigned RNA
tgcccatgccatacttttgcctca

SEQ ID NO: 1211 - RNA, 24 nt, Homo sapiens
  source 1..24: mol_type = unassigned RNA
tgaggcaaaagtatggcatgggca

SEQ ID NO: 1212 - RNA, 22 nt, Homo sapiens
  source 1..22: mol_type = unassigned RNA
atggcatcgtcccctggtggct

SEQ ID NO: 1213 - RNA, 22 nt, Homo sapiens
  source 1..22: mol_type = unassigned RNA
agccaccaggggacgatgccat

SEQ ID NO: 1214 - RNA, 22 nt, Homo sapiens
  source 1..22: mol_type = unassigned RNA
gacacatgaccataaatgctaa

SEQ ID NO: 1215 - RNA, 22 nt, Homo sapiens
  source 1..22: mol_type = unassigned RNA
ttagcatttatggtcatgtgtc

SEQ ID NO: 1216 - RNA, 23 nt, Homo sapiens
  source 1..23: mol_type = unassigned RNA
tggagagagaaaagagacagaag

SEQ ID NO: 1217 - RNA, 23 nt, Homo sapiens
  source 1..23: mol_type = unassigned RNA
cttctgtctcttttctctctcca

SEQ ID NO: 1218 - RNA, 22 nt, Homo sapiens
  source 1..22: mol_type = unassigned RNA
agacagtagttcttgcctggtt

SEQ ID NO: 1219 - RNA, 22 nt, Homo sapiens
  source 1..22: mol_type = unassigned RNA
aaccaggcaagaactactgtct

SEQ ID NO: 1220 - RNA, 19 nt, Homo sapiens
  source 1..19: mol_type = unassigned RNA
accaggcaagaaatattgt

SEQ ID NO: 1221 - RNA, 19 nt, Homo sapiens
  source 1..19: mol_type = unassigned RNA
acaatatttcttgcctggt

SEQ ID NO: 1222 - RNA, 21 nt, Homo sapiens
  source 1..21: mol_type = unassigned RNA
attgtccctctcccttcccag

SEQ ID NO: 1223 - RNA, 21 nt, Homo sapiens
  source 1..21: mol_type = unassigned RNA
ctgggaagggagagggacaat

SEQ ID NO: 1224 - RNA, 22 nt, Homo sapiens
  source 1..22: mol_type = unassigned RNA
actgggaagaggagctgaggga

SEQ ID NO: 1225 - RNA, 22 nt, Homo sapiens
  source 1..22: mol_type = unassigned RNA
tccctcagctcctcttcccagt

SEQ ID NO: 1226 - RNA, 23 nt, Homo sapiens
  source 1..23: mol_type = unassigned RNA
gaagatggtgctgtgctgaggaa

SEQ ID NO: 1227 - RNA, 23 nt, Homo sapiens
  source 1..23: mol_type = unassigned RNA
ttcctcagcacagcaccatcttc

SEQ ID NO: 1228 - RNA, 20 nt, Homo sapiens
  source 1..20: mol_type = unassigned RNA
tgtgggactgcaaatgggag

SEQ ID NO: 1229 - RNA, 20 nt, Homo sapiens
  source 1..20: mol_type = unassigned RNA
ctcccatttgcagtcccaca

SEQ ID NO: 1230 - RNA, 21 nt, Homo sapiens
  source 1..21: mol_type = unassigned RNA
tctgaggcctgcctctcccca

SEQ ID NO: 1231 - RNA, 21 nt, Homo sapiens
  source 1..21: mol_type = unassigned RNA
tggggagaggcaggcctcaga

SEQ ID NO: 1232 - RNA, 24 nt, Homo sapiens
  source 1..24: mol_type = unassigned RNA
tgggcgaggggtgggctctcagag

SEQ ID NO: 1233 - RNA, 24 nt, Homo sapiens
  source 1..24: mol_type = unassigned RNA
ctctgagagcccacccctcgccca

SEQ ID NO: 1234 - RNA, 21 nt, Homo sapiens
  source 1..21: mol_type = unassigned RNA
aggtagaatgaggcctgacat

SEQ ID NO: 1235 - RNA, 21 nt, Homo sapiens
  source 1..21: mol_type = unassigned RNA
atgtcaggcctcattctacct

SEQ ID NO: 1236 - RNA, 19 nt, Homo sapiens
  source 1..19: mol_type = unassigned RNA
tcaggcctctttctacctt

SEQ ID NO: 1237 - RNA, 19 nt, Homo sapiens
  source 1..19: mol_type = unassigned RNA
aaggtagaaagaggcctga

SEQ ID NO: 1238 - RNA, 20 nt, Homo sapiens
  source 1..20: mol_type = unassigned RNA
cggggtgggtgaggtcgggc

SEQ ID NO: 1239 - RNA, 20 nt, Homo sapiens
  source 1..20: mol_type = unassigned RNA
gcccgacctcacccaccccg

SEQ ID NO: 1240 - RNA, 22 nt, Homo sapiens
  source 1..22: mol_type = unassigned RNA
gttctgttaacccatcccctca

SEQ ID NO: 1241 - RNA, 22 nt, Homo sapiens
  source 1..22: mol_type = unassigned RNA
tgaggggatgggttaacagaac

SEQ ID NO: 1242 - RNA, 22 nt, Homo sapiens
  source 1..22: mol_type = unassigned RNA
aggggactggttaatagaacta

SEQ ID NO: 1243 - RNA, 22 nt, Homo sapiens
  source 1..22: mol_type = unassigned RNA
tagttctattaaccagtcccct

SEQ ID NO: 1244 - RNA, 23 nt, Homo sapiens
  source 1..23: mol_type = unassigned RNA
tggagttaagggttgcttggaga

SEQ ID NO: 1245 - RNA, 23 nt, Homo sapiens
  source 1..23: mol_type = unassigned RNA
tctccaagcaacccttaactcca

SEQ ID NO: 1246 - RNA, 22 nt, Homo sapiens
  source 1..22: mol_type = unassigned RNA
tctctgagcaaggcttaacacc

SEQ ID NO: 1247 - RNA, 22 nt, Homo sapiens
  source 1..22: mol_type = unassigned RNA
ggtgttaagccttgctcagaga

SEQ ID NO: 1248 - RNA, 22 nt, Homo sapiens
  source 1..22: mol_type = unassigned RNA
tgtgggatctggaggcatctgg

SEQ ID NO: 1249 - RNA, 22 nt, Homo sapiens
  source 1..22: mol_type = unassigned RNA
ccagatgcctccagatcccaca

SEQ ID NO: 1250 - RNA, 21 nt, Homo sapiens
  source 1..21: mol_type = unassigned RNA
accctcgtcaggtccccgggg

SEQ ID NO: 1251 - RNA, 21 nt, Homo sapiens
  source 1..21: mol_type = unassigned RNA
ccccggggacctgacgagggt

SEQ ID NO: 1252 - RNA, 22 nt, Homo sapiens
  source 1..22: mol_type = unassigned RNA
caccggggatggcagagggtcg

SEQ ID NO: 1253 - RNA, 22 nt, Homo sapiens
  source 1..22: mol_type = unassigned RNA
cgaccctctgccatccccggtg

SEQ ID NO: 1254 - RNA, 23 nt, Homo sapiens
  source 1..23: mol_type = unassigned RNA
tgggctgagggcaggaggcctgt

SEQ ID NO: 1255 - RNA, 23 nt, Homo sapiens
  source 1..23: mol_type = unassigned RNA
acaggcctcctgccctcagccca

SEQ ID NO: 1256 - RNA, 23 nt, Homo sapiens
  source 1..23: mol_type = unassigned RNA
aatgtggaagtggtctgaggcat

SEQ ID NO: 1257 - RNA, 23 nt, Homo sapiens
  source 1..23: mol_type = unassigned RNA
atgcctcagaccacttccacatt

SEQ ID NO: 1258 - RNA, 23 nt, Homo sapiens
  source 1..23: mol_type = unassigned RNA
gtgagtgtggatcctggaggaat

SEQ ID NO: 1259 - RNA, 23 nt, Homo sapiens
  source 1..23: mol_type = unassigned RNA
attcctccaggatccacactcac

SEQ ID NO: 1260 - RNA, 22 nt, Homo sapiens
  source 1..22: mol_type = unassigned RNA
tttcttcttagacatggcaacg

SEQ ID NO: 1261 - RNA, 22 nt, Homo sapiens
  source 1..22: mol_type = unassigned RNA
cgttgccatgtctaagaagaaa

SEQ ID NO: 1262 - RNA, 22 nt, Homo sapiens
  source 1..22: mol_type = unassigned RNA
ctgccatgtctaagaagaaaac

SEQ ID NO: 1263 - RNA, 22 nt, Homo sapiens
  source 1..22: mol_type = unassigned RNA
gttttcttcttagacatggcag

SEQ ID NO: 1264 - RNA, 22 nt, Homo sapiens
  source 1..22: mol_type = unassigned RNA
tttcttcttagacatggcagct

SEQ ID NO: 1265 - RNA, 22 nt, Homo sapiens
  source 1..22: mol_type = unassigned RNA
agctgccatgtctaagaagaaa

SEQ ID NO: 1266 - RNA, 19 nt, Homo sapiens
  source 1..19: mol_type = unassigned RNA
ttgccatgtctaagaagaa

SEQ ID NO: 1267 - RNA, 19 nt, Homo sapiens
  source 1..19: mol_type = unassigned RNA
ttcttcttagacatggcaa

SEQ ID NO: 1268 - RNA, 23 nt, Homo sapiens
  source 1..23: mol_type = unassigned RNA
tgcagctctggtggaaaatggag

SEQ ID NO: 1269 - RNA, 23 nt, Homo sapiens
  source 1..23: mol_type = unassigned RNA
ctccattttccaccagagctgca

SEQ ID NO: 1270 - RNA, 22 nt, Homo sapiens
  source 1..22: mol_type = unassigned RNA
caggatccacagagctagtcca

SEQ ID NO: 1271 - RNA, 22 nt, Homo sapiens
  source 1..22: mol_type = unassigned RNA
tggactagctctgtggatcctg

SEQ ID NO: 1272 - RNA, 22 nt, Homo sapiens
  source 1..22: mol_type = unassigned RNA
aactagctctgtggatcctgac

SEQ ID NO: 1273 - RNA, 22 nt, Homo sapiens
  source 1..22: mol_type = unassigned RNA
gtcaggatccacagagctagtt

SEQ ID NO: 1274 - RNA, 22 nt, Homo sapiens
  source 1..22: mol_type = unassigned RNA
aaagatggacaattggctaaat

SEQ ID NO: 1275 - RNA, 22 nt, Homo sapiens
  source 1..22: mol_type = unassigned RNA
atttagccaattgtccatcttt

SEQ ID NO: 1276 - RNA, 24 nt, Homo sapiens
  source 1..24: mol_type = unassigned RNA
agctgagctccatggacgtgcagt

SEQ ID NO: 1277 - RNA, 24 nt, Homo sapiens
  source 1..24: mol_type = unassigned RNA
actgcacgtccatggagctcagct

SEQ ID NO: 1278 - RNA, 22 nt, Homo sapiens
  source 1..22: mol_type = unassigned RNA
cttccggtctgtgagccccgtc

SEQ ID NO: 1279 - RNA, 22 nt, Homo sapiens
  source 1..22: mol_type = unassigned RNA
gacggggctcacagaccggaag

SEQ ID NO: 1280 - RNA, 22 nt, Homo sapiens
  source 1..22: mol_type = unassigned RNA
tggggtgcccactccgcaagtt

SEQ ID NO: 1281 - RNA, 22 nt, Homo sapiens
  source 1..22: mol_type = unassigned RNA
aacttgcggagtgggcacccca

SEQ ID NO: 1282 - RNA, 26 nt, Homo sapiens
  source 1..26: mol_type = unassigned RNA
ctcggccgcggcgcgtagcccccgcc

SEQ ID NO: 1283 - RNA, 26 nt, Homo sapiens
  source 1..26: mol_type = unassigned RNA
ggcgggggctacgcgccgcggccgag

SEQ ID NO: 1284 - RNA, 23 nt, Homo sapiens
  source 1..23: mol_type = unassigned RNA
ctgggggacgcgtgagcgcgagc

SEQ ID NO: 1285 - RNA, 23 nt, Homo sapiens
  source 1..23: mol_type = unassigned RNA
gctcgcgctcacgcgtcccccag

SEQ ID NO: 1286 - RNA, 21 nt, Homo sapiens
  source 1..21: mol_type = unassigned RNA
catacaatctgacatgtattt

SEQ ID NO: 1287 - RNA, 21 nt, Homo sapiens
  source 1..21: mol_type = unassigned RNA
aaatacatgtcagattgtatg

SEQ ID NO: 1288 - RNA, 21 nt, Homo sapiens
  source 1..21: mol_type = unassigned RNA
atacatgtcagattgtatgcc

SEQ ID NO: 1289 - RNA, 21 nt, Homo sapiens
  source 1..21: mol_type = unassigned RNA
ggcatacaatctgacatgtat

SEQ ID NO: 1290 - RNA, 21 nt, Homo sapiens
  source 1..21: mol_type = unassigned RNA
tccctccttctgtccccacag

SEQ ID NO: 1291 - RNA, 21 nt, Homo sapiens
  source 1..21: mol_type = unassigned RNA
ctgtggggacagaaggaggga

SEQ ID NO: 1292 - RNA, 22 nt, Homo sapiens
  source 1..22: mol_type = unassigned RNA
actggggagcagaaggagaacc

SEQ ID NO: 1293 - RNA, 22 nt, Homo sapiens
  source 1..22: mol_type = unassigned RNA
ggttctccttctgctccccagt

SEQ ID NO: 1294 - RNA, 23 nt, Homo sapiens
  source 1..23: mol_type = unassigned RNA
gaaaatcctttttgtttttccag

SEQ ID NO: 1295 - RNA, 23 nt, Homo sapiens
  source 1..23: mol_type = unassigned RNA
ctggaaaaacaaaaaggattttc

SEQ ID NO: 1296 - RNA, 23 nt, Homo sapiens
  source 1..23: mol_type = unassigned RNA
agggaaaaaaaaaaggatttgtc

SEQ ID NO: 1297 - RNA, 23 nt, Homo sapiens
  source 1..23: mol_type = unassigned RNA
gacaaatccttttttttttccct

SEQ ID NO: 1298 - RNA, 22 nt, Homo sapiens
  source 1..22: mol_type = unassigned RNA
tgtgtccgggaagtggaggagg

SEQ ID NO: 1299 - RNA, 22 nt, Homo sapiens
  source 1..22: mol_type = unassigned RNA
cctcctccacttcccggacaca

SEQ ID NO: 1300 - RNA, 22 nt, Homo sapiens
  source 1..22: mol_type = unassigned RNA
tgaagttacatcatggtcgctt

SEQ ID NO: 1301 - RNA, 22 nt, Homo sapiens
  source 1..22: mol_type = unassigned RNA
aagcgaccatgatgtaacttca

SEQ ID NO: 1302 - RNA, 22 nt, Homo sapiens
  source 1..22: mol_type = unassigned RNA
aagcgaccatgatgtaacttca

SEQ ID NO: 1303 - RNA, 22 nt, Homo sapiens
  source 1..22: mol_type = unassigned RNA
tgaagttacatcatggtcgctt

SEQ ID NO: 1304 - RNA, 21 nt, Homo sapiens
  source 1..21: mol_type = unassigned RNA
ttagtgcatagtctttggtct

SEQ ID NO: 1305 - RNA, 21 nt, Homo sapiens
  source 1..21: mol_type = unassigned RNA
agaccaaagactatgcactaa

SEQ ID NO: 1306 - RNA, 22 nt, Homo sapiens
  source 1..22: mol_type = unassigned RNA
accgaagactgtgcgctaatct

SEQ ID NO: 1307 - RNA, 22 nt, Homo sapiens
  source 1..22: mol_type = unassigned RNA
agattagcgcacagtcttcggt

SEQ ID NO: 1308 - RNA, 21 nt, Homo sapiens
  source 1..21: mol_type = unassigned RNA
ttacacagctggacagaggca

SEQ ID NO: 1309 - RNA, 21 nt, Homo sapiens
  source 1..21: mol_type = unassigned RNA
tgcctctgtccagctgtgtaa

SEQ ID NO: 1310 - RNA, 22 nt, Homo sapiens
  source 1..22: mol_type = unassigned RNA
tccaggcaggagccggactgga

SEQ ID NO: 1311 - RNA, 22 nt, Homo sapiens
  source 1..22: mol_type = unassigned RNA
tccagtccggctcctgcctgga

SEQ ID NO: 1312 - RNA, 21 nt, Homo sapiens
  source 1..21: mol_type = unassigned RNA
ctgggctcgggacgcgcggct

SEQ ID NO: 1313 - RNA, 21 nt, Homo sapiens
  source 1..21: mol_type = unassigned RNA
agccgcgcgtcccgagcccag

SEQ ID NO: 1314 - RNA, 22 nt, Homo sapiens
  source 1..22: mol_type = unassigned RNA
ggggctgtgattgaccagcagg

SEQ ID NO: 1315 - RNA, 22 nt, Homo sapiens
  source 1..22: mol_type = unassigned RNA
cctgctggtcaatcacagcccc

SEQ ID NO: 1316 - RNA, 22 nt, Homo sapiens
  source 1..22: mol_type = unassigned RNA
cactgtttcaccactggctctt

SEQ ID NO: 1317 - RNA, 22 nt, Homo sapiens
  source 1..22: mol_type = unassigned RNA
aagagccagtggtgaaacagtg

SEQ ID NO: 1318 - RNA, 21 nt, Homo sapiens
  source 1..21: mol_type = unassigned RNA
gagccagtggtgagacagtga

SEQ ID NO: 1319 - RNA, 21 nt, Homo sapiens
  source 1..21: mol_type = unassigned RNA
tcactgtctcaccactggctc

SEQ ID NO: 1320 - RNA, 22 nt, Homo sapiens
  source 1..22: mol_type = unassigned RNA
aaggtattgttcagacttatga

SEQ ID NO: 1321 - RNA, 22 nt, Homo sapiens
  source 1..22: mol_type = unassigned RNA
tcataagtctgaacaatacctt

SEQ ID NO: 1322 - RNA, 22 nt, Homo sapiens
  source 1..22: mol_type = unassigned RNA
tctgtgatagagattctttgct

SEQ ID NO: 1323 - RNA, 22 nt, Homo sapiens
  source 1..22: mol_type = unassigned RNA
agcaaagaatctctatcacaga

SEQ ID NO: 1324 - RNA, 21 nt, Homo sapiens
  source 1..21: mol_type = unassigned RNA
tctgaattgtaagagttgtta

SEQ ID NO: 1325 - RNA, 21 nt, Homo sapiens
  source 1..21: mol_type = unassigned RNA
taacaactcttacaattcaga

SEQ ID NO: 1326 - RNA, 23 nt, Homo sapiens
  source 1..23: mol_type = unassigned RNA
agaactcttgcagtcttagatgt

SEQ ID NO: 1327 - RNA, 23 nt, Homo sapiens
  source 1..23: mol_type = unassigned RNA
acatctaagactgcaagagttct

SEQ ID NO: 1328 - RNA, 22 nt, Homo sapiens
  source 1..22: mol_type = unassigned RNA
aacgggaatgcaggctgtatct

SEQ ID NO: 1329 - RNA, 22 nt, Homo sapiens
  source 1..22: mol_type = unassigned RNA
agatacagcctgcattcccgtt

SEQ ID NO: 1330 - RNA, 23 nt, Homo sapiens
  source 1..23: mol_type = unassigned RNA
tctgagttcctggagcctggtct

SEQ ID NO: 1331 - RNA, 23 nt, Homo sapiens
  source 1..23: mol_type = unassigned RNA
agaccaggctccaggaactcaga

SEQ ID NO: 1332 - RNA, 23 nt, Homo sapiens
  source 1..23: mol_type = unassigned RNA
tggagatccagtgctcgcccgat

SEQ ID NO: 1333 - RNA, 23 nt, Homo sapiens
  source 1..23: mol_type = unassigned RNA
atcgggcgagcactggatctcca

SEQ ID NO: 1334 - RNA, 22 nt, Homo sapiens
  source 1..22: mol_type = unassigned RNA
tgttgcaagtcggtggagacgt

SEQ ID NO: 1335 - RNA, 22 nt, Homo sapiens
  source 1..22: mol_type = unassigned RNA
acgtctccaccgacttgcaaca

SEQ ID NO: 1336 - RNA, 22 nt, Homo sapiens
  source 1..22: mol_type = unassigned RNA
ctctctactgacttgcaacata

SEQ ID NO: 1337 - RNA, 22 nt, Homo sapiens
  source 1..22: mol_type = unassigned RNA
tatgttgcaagtcagtagagag

SEQ ID NO: 1338 - RNA, 22 nt, Homo sapiens
  source 1..22: mol_type = unassigned RNA
tctcccttcctgccctggctag

SEQ ID NO: 1339 - RNA, 22 nt, Homo sapiens
  source 1..22: mol_type = unassigned RNA
ctagccagggcaggaagggaga

SEQ ID NO: 1340 - RNA, 26 nt, Homo sapiens
  source 1..26: mol_type = unassigned RNA
cccagggcttggagtggggcaaggtt

SEQ ID NO: 1341 - RNA, 26 nt, Homo sapiens
  source 1..26: mol_type = unassigned RNA
aaccttgccccactccaagccctggg

SEQ ID NO: 1342 - RNA, 23 nt, Homo sapiens
  source 1..23: mol_type = unassigned RNA
tatctgctgggctttctggtgtt

SEQ ID NO: 1343 - RNA, 23 nt, Homo sapiens
  source 1..23: mol_type = unassigned RNA
aacaccagaaagcccagcagata

SEQ ID NO: 1344 - RNA, 21 nt, Homo sapiens
  source 1..21: mol_type = unassigned RNA
tggctgttggagggggcaggc

SEQ ID NO: 1345 - RNA, 21 nt, Homo sapiens
  source 1..21: mol_type = unassigned RNA
gcctgccccctccaacagcca

SEQ ID NO: 1346 - RNA, 22 nt, Homo sapiens
  source 1..22: mol_type = unassigned RNA
cagccctcctcccgcacccaaa

SEQ ID NO: 1347 - RNA, 22 nt, Homo sapiens
  source 1..22: mol_type = unassigned RNA
tttgggtgcgggaggagggctg

SEQ ID NO: 1348 - RNA, 22 nt, Homo sapiens
  source 1..22: mol_type = unassigned RNA
taggggcagcagaggacctggg

SEQ ID NO: 1349 - RNA, 22 nt, Homo sapiens
  source 1..22: mol_type = unassigned RNA
cccaggtcctctgctgccccta

SEQ ID NO: 1350 - RNA, 22 nt, Homo sapiens
  source 1..22: mol_type = unassigned RNA
ttgaggagacatggtgggggcc

SEQ ID NO: 1351 - RNA, 22 nt, Homo sapiens
  source 1..22: mol_type = unassigned RNA
ggcccccaccatgtctcctcaa

SEQ ID NO: 1352 - RNA, 21 nt, Homo sapiens
  source 1..21: mol_type = unassigned RNA
gcagcccagctgaggcctctg

SEQ ID NO: 1353 - RNA, 21 nt, Homo sapiens
  source 1..21: mol_type = unassigned RNA
cagaggcctcagctgggctgc

SEQ ID NO: 1354 - RNA, 22 nt, Homo sapiens
  source 1..22: mol_type = unassigned RNA
gagcaggcgaggctgggctgaa

SEQ ID NO: 1355 - RNA, 22 nt, Homo sapiens
  source 1..22: mol_type = unassigned RNA
ttcagcccagcctcgcctgctc

SEQ ID NO: 1356 - RNA, 23 nt, Homo sapiens
  source 1..23: mol_type = unassigned RNA
ccagccacggactgagagtgcat

SEQ ID NO: 1357 - RNA, 23 nt, Homo sapiens
  source 1..23: mol_type = unassigned RNA
atgcactctcagtccgtggctgg

SEQ ID NO: 1358 - RNA, 23 nt, Homo sapiens
  source 1..23: mol_type = unassigned RNA
gtcctccaggccatgagctgcgg

SEQ ID NO: 1359 - RNA, 23 nt, Homo sapiens
  source 1..23: mol_type = unassigned RNA
ccgcagctcatggcctggaggac

SEQ ID NO: 1360 - RNA, 22 nt, Homo sapiens
  source 1..22: mol_type = unassigned RNA
tcaggcagtgtgggtatcagat

SEQ ID NO: 1361 - RNA, 22 nt, Homo sapiens
  source 1..22: mol_type = unassigned RNA
atctgatacccacactgcctga

SEQ ID NO: 1362 - RNA, 23 nt, Homo sapiens
  source 1..23: mol_type = unassigned RNA
tgagagtggaattcacagtattt

SEQ ID NO: 1363 - RNA, 23 nt, Homo sapiens
  source 1..23: mol_type = unassigned RNA
aaatactgtgaattccactctca

SEQ ID NO: 1364 - RNA, 23 nt, Homo sapiens
  source 1..23: mol_type = unassigned RNA
atactgtgaatttcactgtcaca

SEQ ID NO: 1365 - RNA, 23 nt, Homo sapiens
  source 1..23: mol_type = unassigned RNA
tgtgacagtgaaattcacagtat

SEQ ID NO: 1366 - RNA, 21 nt, Homo sapiens
  source 1..21: mol_type = unassigned RNA
caaatggacaggataacacct

SEQ ID NO: 1367 - RNA, 21 nt, Homo sapiens
  source 1..21: mol_type = unassigned RNA
aggtgttatcctgtccatttg

SEQ ID NO: 1368 - RNA, 22 nt, Homo sapiens
  source 1..22: mol_type = unassigned RNA
aggtgttatcctatccatttgc

SEQ ID NO: 1369 - RNA, 22 nt, Homo sapiens
  source 1..22: mol_type = unassigned RNA
gcaaatggataggataacacct

SEQ ID NO: 1370 - RNA, 22 nt, Homo sapiens
  source 1..22: mol_type = unassigned RNA
tgatctcaccgctgcctccttc

SEQ ID NO: 1371 - RNA, 22 nt, Homo sapiens
  source 1..22: mol_type = unassigned RNA
gaaggaggcagcggtgagatca

SEQ ID NO: 1372 - RNA, 22 nt, Homo sapiens
  source 1..22: mol_type = unassigned RNA
caggaggcagtgggcgagcagg

SEQ ID NO: 1373 - RNA, 22 nt, Homo sapiens
  source 1..22: mol_type = unassigned RNA
cctgctcgcccactgcctcctg

SEQ ID NO: 1374 - RNA, 22 nt, Homo sapiens
  source 1..22: mol_type = unassigned RNA
tgcaagacggatactgtcatct

SEQ ID NO: 1375 - RNA, 22 nt, Homo sapiens
  source 1..22: mol_type = unassigned RNA
agatgacagtatccgtcttgca

SEQ ID NO: 1376 - RNA, 24 nt, Homo sapiens
  source 1..24: mol_type = unassigned RNA
tgtcagtgactcctgccccttggt

SEQ ID NO: 1377 - RNA, 24 nt, Homo sapiens
  source 1..24: mol_type = unassigned RNA
accaaggggcaggagtcactgaca

SEQ ID NO: 1378 - RNA, 22 nt, Homo sapiens
  source 1..22: mol_type = unassigned RNA
agggggcgcagtcactgacgtg

SEQ ID NO: 1379 - RNA, 22 nt, Homo sapiens
  source 1..22: mol_type = unassigned RNA
cacgtcagtgactgcgccccct

SEQ ID NO: 1380 - RNA, 23 nt, Homo sapiens
  source 1..23: mol_type = unassigned RNA
tcaaaatgtagaggaagacccca

SEQ ID NO: 1381 - RNA, 23 nt, Homo sapiens
  source 1..23: mol_type = unassigned RNA
tggggtcttcctctacattttga

SEQ ID NO: 1382 - RNA, 22 nt, Homo sapiens
  source 1..22: mol_type = unassigned RNA
aatttactctgcaatcttctcc

SEQ ID NO: 1383 - RNA, 22 nt, Homo sapiens
  source 1..22: mol_type = unassigned RNA
ggagaagattgcagagtaaatt

SEQ ID NO: 1384 - RNA, 22 nt, Homo sapiens
  source 1..22: mol_type = unassigned RNA
agaagattgcagagtaagttcc

SEQ ID NO: 1385 - RNA, 22 nt, Homo sapiens
  source 1..22: mol_type = unassigned RNA
ggaacttactctgcaatcttct

SEQ ID NO: 1386 - RNA, 26 nt, Homo sapiens
  source 1..26: mol_type = unassigned RNA
cacaggactgactcctcaccccagtg

SEQ ID NO: 1387 - RNA, 26 nt, Homo sapiens
  source 1..26: mol_type = unassigned RNA
cactggggtgaggagtcagtcctgtg

SEQ ID NO: 1388 - RNA, 22 nt, Homo sapiens
  source 1..22: mol_type = unassigned RNA
tctggggatgaggacagtgtgt

SEQ ID NO: 1389 - RNA, 22 nt, Homo sapiens
  source 1..22: mol_type = unassigned RNA
acacactgtcctcatccccaga

SEQ ID NO: 1390 - RNA, 20 nt, Homo sapiens
  source 1..20: mol_type = unassigned RNA
atgggtgatgggtgtggtgt

SEQ ID NO: 1391 - RNA, 20 nt, Homo sapiens
  source 1..20: mol_type = unassigned RNA
acaccacacccatcacccat

SEQ ID NO: 1392 - RNA, 22 nt, Homo sapiens
  source 1..22: mol_type = unassigned RNA
ttggccaccacacctacccctt

SEQ ID NO: 1393 - RNA, 22 nt, Homo sapiens
  source 1..22: mol_type = unassigned RNA
aaggggtaggtgtggtggccaa

SEQ ID NO: 1394 - RNA, 22 nt, Homo sapiens
  source 1..22: mol_type = unassigned RNA
tgtagttgtattgtattgccac

SEQ ID NO: 1395 - RNA, 22 nt, Homo sapiens
  source 1..22: mol_type = unassigned RNA
gtggcaatacaatacaactaca

SEQ ID NO: 1396 - RNA, 23 nt, Homo sapiens
  source 1..23: mol_type = unassigned RNA
tagcaatacagtacaaatatagt

SEQ ID NO: 1397 - RNA, 23 nt, Homo sapiens
  source 1..23: mol_type = unassigned RNA
actatatttgtactgtattgcta

SEQ ID NO: 1398 - RNA, 22 nt, Homo sapiens
  source 1..22: mol_type = unassigned RNA
tcagtcacatatctagtgtcta

SEQ ID NO: 1399 - RNA, 22 nt, Homo sapiens
  source 1..22: mol_type = unassigned RNA
tagacactagatatgtgactga

SEQ ID NO: 1400 - RNA, 22 nt, Homo sapiens
  source 1..22: mol_type = unassigned RNA
gacactaggcatgtgagtgatt

SEQ ID NO: 1401 - RNA, 22 nt, Homo sapiens
  source 1..22: mol_type = unassigned RNA
aatcactcacatgcctagtgtc

SEQ ID NO: 1402 - RNA, 22 nt, Homo sapiens
  source 1..22: mol_type = unassigned RNA
tcaatcacttggtaattgctgt

SEQ ID NO: 1403 - RNA, 22 nt, Homo sapiens
  source 1..22: mol_type = unassigned RNA
acagcaattaccaagtgattga

SEQ ID NO: 1404 - RNA, 25 nt, Homo sapiens
  source 1..25: mol_type = unassigned RNA
agcggggaggaagtgggcgctgctt

SEQ ID NO: 1405 - RNA, 25 nt, Homo sapiens
  source 1..25: mol_type = unassigned RNA
aagcagcgcccacttcctccccgct

SEQ ID NO: 1406 - RNA, 22 nt, Homo sapiens
  source 1..22: mol_type = unassigned RNA
agcccgccccagccgaggttct

SEQ ID NO: 1407 - RNA, 22 nt, Homo sapiens
  source 1..22: mol_type = unassigned RNA
agaacctcggctggggcgggct

SEQ ID NO: 1408 - RNA, 23 nt, Homo sapiens
  source 1..23: mol_type = unassigned RNA
gccccggcgcgggcgggttctgg

SEQ ID NO: 1409 - RNA, 23 nt, Homo sapiens
  source 1..23: mol_type = unassigned RNA
ccagaacccgcccgcgccggggc

SEQ ID NO: 1410 - RNA, 22 nt, Homo sapiens
  source 1..22: mol_type = unassigned RNA
agcaaggcggcatctctctgat

SEQ ID NO: 1411 - RNA, 22 nt, Homo sapiens
  source 1..22: mol_type = unassigned RNA
atcagagagatgccgccttgct

SEQ ID NO: 1412 - RNA, 21 nt, Homo sapiens
  source 1..21: mol_type = unassigned RNA
agagatgccgccttgctcctt

SEQ ID NO: 1413 - RNA, 21 nt, Homo sapiens
  source 1..21: mol_type = unassigned RNA
aaggagcaaggcggcatctct

SEQ ID NO: 1414 - RNA, 23 nt, Homo sapiens
  source 1..23: mol_type = unassigned RNA
ttgaagaggaggtgctctgtagc

SEQ ID NO: 1415 - RNA, 23 nt, Homo sapiens
  source 1..23: mol_type = unassigned RNA
gctacagagcacctcctcttcaa

SEQ ID NO: 1416 - RNA, 22 nt, Homo sapiens
  source 1..22: mol_type = unassigned RNA
acaacagtgacttgctctccaa

SEQ ID NO: 1417 - RNA, 22 nt, Homo sapiens
  source 1..22: mol_type = unassigned RNA
ttggagagcaagtcactgttgt

SEQ ID NO: 1418 - RNA, 18 nt, Homo sapiens
  source 1..18: mol_type = unassigned RNA
gggtgagggcaggtggtt

SEQ ID NO: 1419 - RNA, 18 nt, Homo sapiens
  source 1..18: mol_type = unassigned RNA
aaccacctgccctcaccc

SEQ ID NO: 1420 - RNA, 18 nt, Homo sapiens
  source 1..18: mol_type = unassigned RNA
cgtgtcttctggcttgat

SEQ ID NO: 1421 - RNA, 18 nt, Homo sapiens
  source 1..18: mol_type = unassigned RNA
atcaagccagaagacacg

SEQ ID NO: 1422 - RNA, 23 nt, Homo sapiens
  source 1..23: mol_type = unassigned RNA
tgcatcaggccagaagacatgag

SEQ ID NO: 1423 - RNA, 23 nt, Homo sapiens
  source 1..23: mol_type = unassigned RNA
ctcatgtcttctggcctgatgca

SEQ ID NO: 1424 - RNA, 21 nt, Homo sapiens
  source 1..21: mol_type = unassigned RNA
aatgagagacctgtactgtat

SEQ ID NO: 1425 - RNA, 21 nt, Homo sapiens
  source 1..21: mol_type = unassigned RNA
atacagtacaggtctctcatt

SEQ ID NO: 1426 - RNA, 22 nt, Homo sapiens
  source 1..22: mol_type = unassigned RNA
tccagtacaggtctctcatttc

SEQ ID NO: 1427 - RNA, 22 nt, Homo sapiens
  source 1..22: mol_type = unassigned RNA
gaaatgagagacctgtactgga

SEQ ID NO: 1428 - RNA, 22 nt, Homo sapiens
  source 1..22: mol_type = unassigned RNA
tgggatccagacagtgggagaa

SEQ ID NO: 1429 - RNA, 22 nt, Homo sapiens
  source 1..22: mol_type = unassigned RNA
ttctcccactgtctggatccca

SEQ ID NO: 1430 - RNA, 22 nt, Homo sapiens
  source 1..22: mol_type = unassigned RNA
ttctcccactaccaggctccca

SEQ ID NO: 1431 - RNA, 22 nt, Homo sapiens
  source 1..22: mol_type = unassigned RNA
tgggagcctggtagtgggagaa

SEQ ID NO: 1432 - RNA, 22 nt, Homo sapiens
  source 1..22: mol_type = unassigned RNA
ccaacctaggtggtcagagttg

SEQ ID NO: 1433 - RNA, 22 nt, Homo sapiens
  source 1..22: mol_type = unassigned RNA
caactctgaccacctaggttgg

SEQ ID NO: 1434 - RNA, 22 nt, Homo sapiens
  source 1..22: mol_type = unassigned RNA
aactctgaccccttaggttgat

SEQ ID NO: 1435 - RNA, 22 nt, Homo sapiens
  source 1..22: mol_type = unassigned RNA
atcaacctaaggggtcagagtt

SEQ ID NO: 1436 - RNA, 23 nt, Homo sapiens
  source 1..23: mol_type = unassigned RNA
gtgccaccttaactgcagccaat

SEQ ID NO: 1437 - RNA, 23 nt, Homo sapiens
  source 1..23: mol_type = unassigned RNA
attggctgcagttaaggtggcac

SEQ ID NO: 1438 - RNA, 22 nt, Homo sapiens
  source 1..22: mol_type = unassigned RNA
aagttggctgcagttaaggtgg

SEQ ID NO: 1439 - RNA, 22 nt, Homo sapiens
  source 1..22: mol_type = unassigned RNA
ccaccttaactgcagccaactt

SEQ ID NO: 1440 - RNA, 22 nt, Homo sapiens
  source 1..22: mol_type = unassigned RNA
aagggggaaggaaacatggaga

SEQ ID NO: 1441 - RNA, 22 nt, Homo sapiens
  source 1..22: mol_type = unassigned RNA
tctccatgtttccttccccctt

SEQ ID NO: 1442 - RNA, 22 nt, Homo sapiens
  source 1..22: mol_type = unassigned RNA
tccatgtttccttcccccttct

SEQ ID NO: 1443 - RNA, 22 nt, Homo sapiens
  source 1..22: mol_type = unassigned RNA
agaagggggaaggaaacatgga

SEQ ID NO: 1444 - RNA, 21 nt, Homo sapiens
  source 1..21: mol_type = unassigned RNA
acacatgggtggctgtggcct

SEQ ID NO: 1445 - RNA, 21 nt, Homo sapiens
  source 1..21: mol_type = unassigned RNA
aggccacagccacccatgtgt

SEQ ID NO: 1446 - RNA, 22 nt, Homo sapiens
  source 1..22: mol_type = unassigned RNA
taggccacagccacccatgtgt

SEQ ID NO: 1447 - RNA, 22 nt, Homo sapiens
  source 1..22: mol_type = unassigned RNA
acacatgggtggctgtggccta

SEQ ID NO: 1448 - RNA, 21 nt, Homo sapiens
  source 1..21: mol_type = unassigned RNA
agctgtacctgaaaccaagca

SEQ ID NO: 1449 - RNA, 21 nt, Homo sapiens
  source 1..21: mol_type = unassigned RNA
tgcttggtttcaggtacagct

SEQ ID NO: 1450 - RNA, 22 nt, Homo sapiens
  source 1..22: mol_type = unassigned RNA
tcacaaatctataatatgcagg

SEQ ID NO: 1451 - RNA, 22 nt, Homo sapiens
  source 1..22: mol_type = unassigned RNA
cctgcatattatagatttgtga

SEQ ID NO: 1452 - RNA, 21 nt, Homo sapiens
  source 1..21: mol_type = unassigned RNA
tgcttaagttgtaccaagtat

SEQ ID NO: 1453 - RNA, 21 nt, Homo sapiens
  source 1..21: mol_type = unassigned RNA
atacttggtacaacttaagca

SEQ ID NO: 1454 - RNA, 22 nt, Homo sapiens
  source 1..22: mol_type = unassigned RNA
cctggcatatttggtataactt

SEQ ID NO: 1455 - RNA, 22 nt, Homo sapiens
  source 1..22: mol_type = unassigned RNA
aagttataccaaatatgccagg

SEQ ID NO: 1456 - RNA, 22 nt, Homo sapiens
  source 1..22: mol_type = unassigned RNA
tgagggctccaggtgacggtgg

SEQ ID NO: 1457 - RNA, 22 nt, Homo sapiens
  source 1..22: mol_type = unassigned RNA
ccaccgtcacctggagccctca

SEQ ID NO: 1458 - RNA, 22 nt, Homo sapiens
  source 1..22: mol_type = unassigned RNA
acctgccagcacctccctgcag

SEQ ID NO: 1459 - RNA, 22 nt, Homo sapiens
  source 1..22: mol_type = unassigned RNA
ctgcagggaggtgctggcaggt

SEQ ID NO: 1460 - RNA, 23 nt, Homo sapiens
  source 1..23: mol_type = unassigned RNA
ggcaggagggctgtgccaggttg

SEQ ID NO: 1461 - RNA, 23 nt, Homo sapiens
  source 1..23: mol_type = unassigned RNA
caacctggcacagccctcctgcc

SEQ ID NO: 1462 - RNA, 22 nt, Homo sapiens
  source 1..22: mol_type = unassigned RNA
ccctctctggctcctccccaaa

SEQ ID NO: 1463 - RNA, 22 nt, Homo sapiens
  source 1..22: mol_type = unassigned RNA
tttggggaggagccagagaggg

SEQ ID NO: 1464 - RNA, 24 nt, Homo sapiens
  source 1..24: mol_type = unassigned RNA
tgggggagccatgagataagagca

SEQ ID NO: 1465 - RNA, 24 nt, Homo sapiens
  source 1..24: mol_type = unassigned RNA
tgctcttatctcatggctccccca

SEQ ID NO: 1466 - RNA, 21 nt, Homo sapiens
  source 1..21: mol_type = unassigned RNA
gtaccttctggttcagctagt

SEQ ID NO: 1467 - RNA, 21 nt, Homo sapiens
  source 1..21: mol_type = unassigned RNA
actagctgaaccagaaggtac

SEQ ID NO: 1468 - RNA, 23 nt, Homo sapiens
  source 1..23: mol_type = unassigned RNA
aactgaaccaggagtgagcttcg

SEQ ID NO: 1469 - RNA, 23 nt, Homo sapiens
  source 1..23: mol_type = unassigned RNA
cgaagctcactcctggttcagtt

SEQ ID NO: 1470 - RNA, 22 nt, Homo sapiens
  source 1..22: mol_type = unassigned RNA
tggggaaggcgtcagtgtcggg

SEQ ID NO: 1471 - RNA, 22 nt, Homo sapiens
  source 1..22: mol_type = unassigned RNA
cccgacactgacgccttcccca

SEQ ID NO: 1472 - RNA, 21 nt, Homo sapiens
  source 1..21: mol_type = unassigned RNA
agaccctgcagccttcccacc

SEQ ID NO: 1473 - RNA, 21 nt, Homo sapiens
  source 1..21: mol_type = unassigned RNA
ggtgggaaggctgcagggtct

SEQ ID NO: 1474 - RNA, 22 nt, Homo sapiens
  source 1..22: mol_type = unassigned RNA
acccaggttccctctggccgca

SEQ ID NO: 1475 - RNA, 22 nt, Homo sapiens
  source 1..22: mol_type = unassigned RNA
tgcggccagagggaacctgggt

SEQ ID NO: 1476 - RNA, 23 nt, Homo sapiens
  source 1..23: mol_type = unassigned RNA
agggccagaggagcctggagtgg

SEQ ID NO: 1477 - RNA, 23 nt, Homo sapiens
  source 1..23: mol_type = unassigned RNA
ccactccaggctcctctggccct

SEQ ID NO: 1478 - RNA, 22 nt, Homo sapiens
  source 1..22: mol_type = unassigned RNA
atagtgggaagctggcagattc

SEQ ID NO: 1479 - RNA, 22 nt, Homo sapiens
  source 1..22: mol_type = unassigned RNA
gaatctgccagcttcccactat

SEQ ID NO: 1480 - RNA, 21 nt, Homo sapiens
  source 1..21: mol_type = unassigned RNA
atctgccagcttccacagtgg

SEQ ID NO: 1481 - RNA, 21 nt, Homo sapiens
  source 1..21: mol_type = unassigned RNA
ccactgtggaagctggcagat

SEQ ID NO: 1482 - RNA, 25 nt, Homo sapiens
  source 1..25: mol_type = unassigned RNA
catgctgacctccctcctgccccag

SEQ ID NO: 1483 - RNA, 25 nt, Homo sapiens
  source 1..25: mol_type = unassigned RNA
ctggggcaggagggaggtcagcatg

SEQ ID NO: 1484 - RNA, 23 nt, Homo sapiens
  source 1..23: mol_type = unassigned RNA
tgggaggggagaggcagcaagca

SEQ ID NO: 1485 - RNA, 23 nt, Homo sapiens
  source 1..23: mol_type = unassigned RNA
tgcttgctgcctctcccctccca

SEQ ID NO: 1486 - RNA, 22 nt, Homo sapiens
  source 1..22: mol_type = unassigned RNA
tcatttatctgttgggaagcta

SEQ ID NO: 1487 - RNA, 22 nt, Homo sapiens
  source 1..22: mol_type = unassigned RNA
tagcttcccaacagataaatga

SEQ ID NO: 1488 - RNA, 23 nt, Homo sapiens
  source 1..23: mol_type = unassigned RNA
ctggcggagcccattccatgcca

SEQ ID NO: 1489 - RNA, 23 nt, Homo sapiens
  source 1..23: mol_type = unassigned RNA
tggcatggaatgggctccgccag

SEQ ID NO: 1490 - RNA, 22 nt, Homo sapiens
  source 1..22: mol_type = unassigned RNA
cacacaagtggcccccaacact

SEQ ID NO: 1491 - RNA, 22 nt, Homo sapiens
  source 1..22: mol_type = unassigned RNA
agtgttgggggccacttgtgtg

SEQ ID NO: 1492 - RNA, 22 nt, Homo sapiens
  source 1..22: mol_type = unassigned RNA
tgctgggggccacatgagtgtg

SEQ ID NO: 1493 - RNA, 22 nt, Homo sapiens
  source 1..22: mol_type = unassigned RNA
cacactcatgtggcccccagca

SEQ ID NO: 1494 - RNA, 21 nt, Homo sapiens
  source 1..21: mol_type = unassigned RNA
gccctgacctgtcctgttctg

SEQ ID NO: 1495 - RNA, 21 nt, Homo sapiens
  source 1..21: mol_type = unassigned RNA
cagaacaggacaggtcagggc

SEQ ID NO: 1496 - RNA, 23 nt, Homo sapiens
  source 1..23: mol_type = unassigned RNA
tgtagagcagggagcaggaagct

SEQ ID NO: 1497 - RNA, 23 nt, Homo sapiens
  source 1..23: mol_type = unassigned RNA
agcttcctgctccctgctctaca

SEQ ID NO: 1498 - RNA, 22 nt, Homo sapiens
  source 1..22: mol_type = unassigned RNA
ccaccaggtctagcattgggat

SEQ ID NO: 1499 - RNA, 22 nt, Homo sapiens
  source 1..22: mol_type = unassigned RNA
atcccaatgctagacctggtgg

SEQ ID NO: 1500 - RNA, 22 nt, Homo sapiens
  source 1..22: mol_type = unassigned RNA
aatcccaatgctagacccggtg

SEQ ID NO: 1501 - RNA, 22 nt, Homo sapiens
  source 1..22: mol_type = unassigned RNA
caccgggtctagcattgggatt

SEQ ID NO: 1502 - RNA, 22 nt, Homo sapiens
  source 1..22: mol_type = unassigned RNA
gctgcgggctgcggtcagggcg

SEQ ID NO: 1503 - RNA, 22 nt, Homo sapiens
  source 1..22: mol_type = unassigned RNA
cgccctgaccgcagcccgcagc

SEQ ID NO: 1504 - RNA, 21 nt, Homo sapiens
  source 1..21: mol_type = unassigned RNA
aaaggtgctcaaattagacat

SEQ ID NO: 1505 - RNA, 21 nt, Homo sapiens
  source 1..21: mol_type = unassigned RNA
atgtctaatttgagcaccttt

SEQ ID NO: 1506 - RNA, 22 nt, Homo sapiens
  source 1..22: mol_type = unassigned RNA
cctaatttgaacaccttcggta

SEQ ID NO: 1507 - RNA, 22 nt, Homo sapiens
  source 1..22: mol_type = unassigned RNA
taccgaaggtgttcaaattagg

SEQ ID NO: 1508 - RNA, 19 nt, Homo sapiens
  source 1..19: mol_type = unassigned RNA
aggcaggttatctgggctg

SEQ ID NO: 1509 - RNA, 19 nt, Homo sapiens
  source 1..19: mol_type = unassigned RNA
cagcccagataacctgcct

SEQ ID NO: 1510 - RNA, 20 nt, Homo sapiens
  source 1..20: mol_type = unassigned RNA
atgcgaggatgctgacagtg

SEQ ID NO: 1511 - RNA, 20 nt, Homo sapiens
  source 1..20: mol_type = unassigned RNA
cactgtcagcatcctcgcat

SEQ ID NO: 1512 - RNA, 22 nt, Homo sapiens
  source 1..22: mol_type = unassigned RNA
tgaaactggagcgcctggagga

SEQ ID NO: 1513 - RNA, 22 nt, Homo sapiens
  source 1..22: mol_type = unassigned RNA
tcctccaggcgctccagtttca

SEQ ID NO: 1514 - RNA, 22 nt, Homo sapiens
  source 1..22: mol_type = unassigned RNA
accagcgcgttttcagtttcat

SEQ ID NO: 1515 - RNA, 22 nt, Homo sapiens
  source 1..22: mol_type = unassigned RNA
atgaaactgaaaacgcgctggt

SEQ ID NO: 1516 - RNA, 25 nt, Homo sapiens
  source 1..25: mol_type = unassigned RNA
aagggaggaggagcggaggggccct

SEQ ID NO: 1517 - RNA, 25 nt, Homo sapiens
  source 1..25: mol_type = unassigned RNA
agggcccctccgctcctcctccctt

SEQ ID NO: 1518 - RNA, 22 nt, Homo sapiens
  source 1..22: mol_type = unassigned RNA
gcccgagaggatccgtccctgc

SEQ ID NO: 1519 - RNA, 22 nt, Homo sapiens
  source 1..22: mol_type = unassigned RNA
gcagggacggatcctctcgggc

SEQ ID NO: 1520 - RNA, 22 nt, Homo sapiens
  source 1..22: mol_type = unassigned RNA
aggactgatcctctcgggcagg

SEQ ID NO: 1521 - RNA, 22 nt, Homo sapiens
  source 1..22: mol_type = unassigned RNA
cctgcccgagaggatcagtcct

SEQ ID NO: 1522 - RNA, 23 nt, Homo sapiens
  source 1..23: mol_type = unassigned RNA
tcaggcaaagggatatttacaga

SEQ ID NO: 1523 - RNA, 23 nt, Homo sapiens
  source 1..23: mol_type = unassigned RNA
tctgtaaatatccctttgcctga

SEQ ID NO: 1524 - RNA, 21 nt, Homo sapiens
  source 1..21: mol_type = unassigned RNA
tttctgtcttttctggtccag

SEQ ID NO: 1525 - RNA, 21 nt, Homo sapiens
  source 1..21: mol_type = unassigned RNA
ctggaccagaaaagacagaaa

SEQ ID NO: 1526 - RNA, 23 nt, Homo sapiens
  source 1..23: mol_type = unassigned RNA
tggccggatgggacaggaggcat

SEQ ID NO: 1527 - RNA, 23 nt, Homo sapiens
  source 1..23: mol_type = unassigned RNA
atgcctcctgtcccatccggcca

SEQ ID NO: 1528 - RNA, 23 nt, Homo sapiens
  source 1..23: mol_type = unassigned RNA
tctaaagactagacttcgctatg

SEQ ID NO: 1529 - RNA, 23 nt, Homo sapiens
  source 1..23: mol_type = unassigned RNA
catagcgaagtctagtctttaga

SEQ ID NO: 1530 - RNA, 23 nt, Homo sapiens
  source 1..23: mol_type = unassigned RNA
tggcccggcgacgtctcacggtc

SEQ ID NO: 1531 - RNA, 23 nt, Homo sapiens
  source 1..23: mol_type = unassigned RNA
gaccgtgagacgtcgccgggcca

SEQ ID NO: 1532 - RNA, 23 nt, Homo sapiens
  source 1..23: mol_type = unassigned RNA
tgagtggggctcccgggacggcg

SEQ ID NO: 1533 - RNA, 23 nt, Homo sapiens
  source 1..23: mol_type = unassigned RNA
cgccgtcccgggagccccactca

SEQ ID NO: 1534 - RNA, 21 nt, Homo sapiens
  source 1..21: mol_type = unassigned RNA
agcggtgctcctgcgggccga

SEQ ID NO: 1535 - RNA, 21 nt, Homo sapiens
  source 1..21: mol_type = unassigned RNA
tcggcccgcaggagcaccgct

SEQ ID NO: 1536 - RNA, 23 nt, Homo sapiens
  source 1..23: mol_type = unassigned RNA
ccggtcccaggagaacctgcaga

SEQ ID NO: 1537 - RNA, 23 nt, Homo sapiens
  source 1..23: mol_type = unassigned RNA
tctgcaggttctcctgggaccgg

SEQ ID NO: 1538 - RNA, 22 nt, Homo sapiens
  source 1..22: mol_type = unassigned RNA
aaggcccgggctttcctcccag

SEQ ID NO: 1539 - RNA, 22 nt, Homo sapiens
  source 1..22: mol_type = unassigned RNA
ctgggaggaaagcccgggcctt

SEQ ID NO: 1540 - RNA, 22 nt, Homo sapiens
  source 1..22: mol_type = unassigned RNA
agggaaggaggcttggtcttag

SEQ ID NO: 1541 - RNA, 22 nt, Homo sapiens
  source 1..22: mol_type = unassigned RNA
ctaagaccaagcctccttccct

SEQ ID NO: 1542 - RNA, 21 nt, Homo sapiens
  source 1..21: mol_type = unassigned RNA
gaggtttggggaggatttgct

SEQ ID NO: 1543 - RNA, 21 nt, Homo sapiens
  source 1..21: mol_type = unassigned RNA
agcaaatcctccccaaacctc

SEQ ID NO: 1544 - RNA, 20 nt, Homo sapiens
  source 1..20: mol_type = unassigned RNA
cgcccctcctgcccccacag

SEQ ID NO: 1545 - RNA, 20 nt, Homo sapiens
  source 1..20: mol_type = unassigned RNA
ctgtgggggcaggaggggcg

SEQ ID NO: 1546 - RNA, 22 nt, Homo sapiens
  source 1..22: mol_type = unassigned RNA
tgcggggacaggccagggcatc

SEQ ID NO: 1547 - RNA, 22 nt, Homo sapiens
  source 1..22: mol_type = unassigned RNA
gatgccctggcctgtccccgca

SEQ ID NO: 1548 - RNA, 22 nt, Homo sapiens
  source 1..22: mol_type = unassigned RNA
cctgacccaccccctcccgcag

SEQ ID NO: 1549 - RNA, 22 nt, Homo sapiens
  source 1..22: mol_type = unassigned RNA
ctgcgggagggggtgggtcagg

SEQ ID NO: 1550 - RNA, 22 nt, Homo sapiens
  source 1..22: mol_type = unassigned RNA
ctcgggcggaggtggttgagtg

SEQ ID NO: 1551 - RNA, 22 nt, Homo sapiens
  source 1..22: mol_type = unassigned RNA
cactcaaccacctccgcccgag

SEQ ID NO: 1552 - RNA, 24 nt, Homo sapiens
  source 1..24: mol_type = unassigned RNA
agaggacccgtagctgctagaagg

SEQ ID NO: 1553 - RNA, 24 nt, Homo sapiens
  source 1..24: mol_type = unassigned RNA
ccttctagcagctacgggtcctct

SEQ ID NO: 1554 - RNA, 22 nt, Homo sapiens
  source 1..22: mol_type = unassigned RNA
ttgtggatctcaaggatgtgct

SEQ ID NO: 1555 - RNA, 22 nt, Homo sapiens
  source 1..22: mol_type = unassigned RNA
agcacatccttgagatccacaa

SEQ ID NO: 1556 - RNA, 22 nt, Homo sapiens
  source 1..22: mol_type = unassigned RNA
ttctctttctttagccttgtgt

SEQ ID NO: 1557 - RNA, 22 nt, Homo sapiens
  source 1..22: mol_type = unassigned RNA
acacaaggctaaagaaagagaa

SEQ ID NO: 1558 - RNA, 22 nt, Homo sapiens
  source 1..22: mol_type = unassigned RNA
caaggccaaaggaagagaacag

SEQ ID NO: 1559 - RNA, 22 nt, Homo sapiens
  source 1..22: mol_type = unassigned RNA
ctgttctcttcctttggccttg

SEQ ID NO: 1560 - RNA, 23 nt, Homo sapiens
  source 1..23: mol_type = unassigned RNA
atgcggacctgggttagcggagt

SEQ ID NO: 1561 - RNA, 23 nt, Homo sapiens
  source 1..23: mol_type = unassigned RNA
actccgctaacccaggtccgcat

SEQ ID NO: 1562 - RNA, 22 nt, Homo sapiens
  source 1..22: mol_type = unassigned RNA
agccaggctctgaagggaaagt

SEQ ID NO: 1563 - RNA, 22 nt, Homo sapiens
  source 1..22: mol_type = unassigned RNA
actttcccttcagagcctggct

SEQ ID NO: 1564 - RNA, 22 nt, Homo sapiens
  source 1..22: mol_type = unassigned RNA
tttcccttcagagcctggcttt

SEQ ID NO: 1565 - RNA, 22 nt, Homo sapiens
  source 1..22: mol_type = unassigned RNA
aaagccaggctctgaagggaaa

SEQ ID NO: 1566 - RNA, 22 nt, Homo sapiens
  source 1..22: mol_type = unassigned RNA
ccagagatggttgccttcctat

SEQ ID NO: 1567 - RNA, 22 nt, Homo sapiens
  source 1..22: mol_type = unassigned RNA
ataggaaggcaaccatctctgg

SEQ ID NO: 1568 - RNA, 23 nt, Homo sapiens
  source 1..23: mol_type = unassigned RNA
cagggaggcgctcactctctgct

SEQ ID NO: 1569 - RNA, 23 nt, Homo sapiens
  source 1..23: mol_type = unassigned RNA
agcagagagtgagcgcctccctg

SEQ ID NO: 1570 - RNA, 22 nt, Homo sapiens
  source 1..22: mol_type = unassigned RNA
catgacgtcacagaggcttcgc

SEQ ID NO: 1571 - RNA, 22 nt, Homo sapiens
  source 1..22: mol_type = unassigned RNA
gcgaagcctctgtgacgtcatg

SEQ ID NO: 1572 - RNA, 23 nt, Homo sapiens
  source 1..23: mol_type = unassigned RNA
aggcctctgtgacgtcacggtgt

SEQ ID NO: 1573 - RNA, 23 nt, Homo sapiens
  source 1..23: mol_type = unassigned RNA
acaccgtgacgtcacagaggcct

SEQ ID NO: 1574 - RNA, 23 nt, Homo sapiens
  source 1..23: mol_type = unassigned RNA
tgccccacctgctgaccaccctc

SEQ ID NO: 1575 - RNA, 23 nt, Homo sapiens
  source 1..23: mol_type = unassigned RNA
gagggtggtcagcaggtggggca

SEQ ID NO: 1576 - RNA, 23 nt, Homo sapiens
  source 1..23: mol_type = unassigned RNA
gtgagtgggagccggtggggctg

SEQ ID NO: 1577 - RNA, 23 nt, Homo sapiens
  source 1..23: mol_type = unassigned RNA
cagccccaccggctcccactcac

SEQ ID NO: 1578 - RNA, 21 nt, Homo sapiens
  source 1..21: mol_type = unassigned RNA
taggactagatgttggaatta

SEQ ID NO: 1579 - RNA, 21 nt, Homo sapiens
  source 1..21: mol_type = unassigned RNA
taattccaacatctagtccta

SEQ ID NO: 1580 - RNA, 22 nt, Homo sapiens
  source 1..22: mol_type = unassigned RNA
aaattcatgttcaatctaaacc

SEQ ID NO: 1581 - RNA, 22 nt, Homo sapiens
  source 1..22: mol_type = unassigned RNA
ggtttagattgaacatgaattt

SEQ ID NO: 1582 - RNA, 22 nt, Homo sapiens
  source 1..22: mol_type = unassigned RNA
tttagattgaacatgaagttag

SEQ ID NO: 1583 - RNA, 22 nt, Homo sapiens
  source 1..22: mol_type = unassigned RNA
ctaacttcatgttcaatctaaa

SEQ ID NO: 1584 - RNA, 21 nt, Homo sapiens
  source 1..21: mol_type = unassigned RNA
gagggcatgcgcactttgtcc

SEQ ID NO: 1585 - RNA, 21 nt, Homo sapiens
  source 1..21: mol_type = unassigned RNA
ggacaaagtgcgcatgccctc

SEQ ID NO: 1586 - RNA, 21 nt, Homo sapiens
  source 1..21: mol_type = unassigned RNA
acaaggtgtgcatgcctgacc

SEQ ID NO: 1587 - RNA, 21 nt, Homo sapiens
  source 1..21: mol_type = unassigned RNA
ggtcaggcatgcacaccttgt

SEQ ID NO: 1588 - RNA, 22 nt, Homo sapiens
  source 1..22: mol_type = unassigned RNA
cttctgatcaagatttgtggtg

SEQ ID NO: 1589 - RNA, 22 nt, Homo sapiens
  source 1..22: mol_type = unassigned RNA
caccacaaatcttgatcagaag

SEQ ID NO: 1590 - RNA, 21 nt, Homo sapiens
  source 1..21: mol_type = unassigned RNA
ccaaatcttgatcagaagcct

SEQ ID NO: 1591 - RNA, 21 nt, Homo sapiens
  source 1..21: mol_type = unassigned RNA
aggcttctgatcaagatttgg

SEQ ID NO: 1592 - RNA, 24 nt, Homo sapiens
  source 1..24: mol_type = unassigned RNA
aggcaggggctggtgctgggcggg

SEQ ID NO: 1593 - RNA, 24 nt, Homo sapiens
  source 1..24: mol_type = unassigned RNA
cccgcccagcaccagcccctgcct

SEQ ID NO: 1594 - RNA, 21 nt, Homo sapiens
  source 1..21: mol_type = unassigned RNA
cgcctgcccagccctcctgct

SEQ ID NO: 1595 - RNA, 21 nt, Homo sapiens
  source 1..21: mol_type = unassigned RNA
agcaggagggctgggcaggcg

SEQ ID NO: 1596 - RNA, 22 nt, Homo sapiens
  source 1..22: mol_type = unassigned RNA
ttaactcctttcacacccatgg

SEQ ID NO: 1597 - RNA, 22 nt, Homo sapiens
  source 1..22: mol_type = unassigned RNA
ccatgggtgtgaaaggagttaa

SEQ ID NO: 1598 - RNA, 21 nt, Homo sapiens
  source 1..21: mol_type = unassigned RNA
tggatgtggaaggagttatct

SEQ ID NO: 1599 - RNA, 21 nt, Homo sapiens
  source 1..21: mol_type = unassigned RNA
agataactccttccacatcca

SEQ ID NO: 1600 - RNA, 22 nt, Homo sapiens
  source 1..22: mol_type = unassigned RNA
tgagtgattgatagctatgttc

SEQ ID NO: 1601 - RNA, 22 nt, Homo sapiens
  source 1..22: mol_type = unassigned RNA
gaacatagctatcaatcactca

SEQ ID NO: 1602 - RNA, 21 nt, Homo sapiens
  source 1..21: mol_type = unassigned RNA
atagcaattgctcttttggaa

SEQ ID NO: 1603 - RNA, 21 nt, Homo sapiens
  source 1..21: mol_type = unassigned RNA
ttccaaaagagcaattgctat

SEQ ID NO: 1604 - RNA, 21 nt, Homo sapiens
  source 1..21: mol_type = unassigned RNA
tctgaaagagcagttggtgtt

SEQ ID NO: 1605 - RNA, 21 nt, Homo sapiens
  source 1..21: mol_type = unassigned RNA
aacaccaactgctctttcaga

SEQ ID NO: 1606 - RNA, 23 nt, Homo sapiens
  source 1..23: mol_type = unassigned RNA
cgcgggcgctcctggccgccgcc

SEQ ID NO: 1607 - RNA, 23 nt, Homo sapiens
  source 1..23: mol_type = unassigned RNA
ggcggcggccaggagcgcccgcg

SEQ ID NO: 1608 - RNA, 20 nt, Homo sapiens
  source 1..20: mol_type = unassigned RNA
ccaggagatccagagagaat

SEQ ID NO: 1609 - RNA, 20 nt, Homo sapiens
  source 1..20: mol_type = unassigned RNA
attctctctggatctcctgg

SEQ ID NO: 1610 - RNA, 22 nt, Homo sapiens
  source 1..22: mol_type = unassigned RNA
attctctctggatcccatggat

SEQ ID NO: 1611 - RNA, 22 nt, Homo sapiens
  source 1..22: mol_type = unassigned RNA
atccatgggatccagagagaat

SEQ ID NO: 1612 - RNA, 22 nt, Homo sapiens
  source 1..22: mol_type = unassigned RNA
tctgccatcctccctcccctac

SEQ ID NO: 1613 - RNA, 22 nt, Homo sapiens
  source 1..22: mol_type = unassigned RNA
gtaggggagggaggatggcaga

SEQ ID NO: 1614 - RNA, 24 nt, Homo sapiens
  source 1..24: mol_type = unassigned RNA
ggtgggatggagagaaggtatgag

SEQ ID NO: 1615 - RNA, 24 nt, Homo sapiens
  source 1..24: mol_type = unassigned RNA
ctcataccttctctccatcccacc

SEQ ID NO: 1616 - RNA, 18 nt, Homo sapiens
  source 1..18: mol_type = unassigned RNA
tgagatgacactgtagct

SEQ ID NO: 1617 - RNA, 18 nt, Homo sapiens
  source 1..18: mol_type = unassigned RNA
agctacagtgtcatctca

SEQ ID NO: 1618 - RNA, 21 nt, Homo sapiens
  source 1..21: mol_type = unassigned RNA
agcagacttgacctacaatta

SEQ ID NO: 1619 - RNA, 21 nt, Homo sapiens
  source 1..21: mol_type = unassigned RNA
taattgtaggtcaagtctgct

SEQ ID NO: 1620 - RNA, 22 nt, Homo sapiens
  source 1..22: mol_type = unassigned RNA
cagaacaggagcatagaaaggc

SEQ ID NO: 1621 - RNA, 22 nt, Homo sapiens
  source 1..22: mol_type = unassigned RNA
gcctttctatgctcctgttctg

SEQ ID NO: 1622 - RNA, 22 nt, Homo sapiens
  source 1..22: mol_type = unassigned RNA
ttaattttttgtttcggtcact

SEQ ID NO: 1623 - RNA, 22 nt, Homo sapiens
  source 1..22: mol_type = unassigned RNA
agtgaccgaaacaaaaaattaa

SEQ ID NO: 1624 - RNA, 23 nt, Homo sapiens
  source 1..23: mol_type = unassigned RNA
cttgccatcctggtccactgcat

SEQ ID NO: 1625 - RNA, 23 nt, Homo sapiens
  source 1..23: mol_type = unassigned RNA
atgcagtggaccaggatggcaag

SEQ ID NO: 1626 - RNA, 22 nt, Homo sapiens
  source 1..22: mol_type = unassigned RNA
gtggaccaggatggcaagggct

SEQ ID NO: 1627 - RNA, 22 nt, Homo sapiens
  source 1..22: mol_type = unassigned RNA
agcccttgccatcctggtccac

SEQ ID NO: 1628 - RNA, 22 nt, Homo sapiens
  source 1..22: mol_type = unassigned RNA
atacctcatctagaatgctgta

SEQ ID NO: 1629 - RNA, 22 nt, Homo sapiens
  source 1..22: mol_type = unassigned RNA
tacagcattctagatgaggtat

SEQ ID NO: 1630 - RNA, 22 nt, Homo sapiens
  source 1..22: mol_type = unassigned RNA
ttctagatgagagatatatata

SEQ ID NO: 1631 - RNA, 22 nt, Homo sapiens
  source 1..22: mol_type = unassigned RNA
tatatatatctctcatctagaa

SEQ ID NO: 1632 - RNA, 22 nt, Homo sapiens
  source 1..22: mol_type = unassigned RNA
tcttcttcctttgcagagttga

SEQ ID NO: 1633 - RNA, 22 nt, Homo sapiens
  source 1..22: mol_type = unassigned RNA
tcaactctgcaaaggaagaaga

SEQ ID NO: 1634 - RNA, 22 nt, Homo sapiens
  source 1..22: mol_type = unassigned RNA
aattctgtaaaggaagaagagg

SEQ ID NO: 1635 - RNA, 22 nt, Homo sapiens
  source 1..22: mol_type = unassigned RNA
cctcttcttcctttacagaatt

SEQ ID NO: 1636 - RNA, 22 nt, Homo sapiens
  source 1..22: mol_type = unassigned RNA
taggagggaatagtaaaagcag

SEQ ID NO: 1637 - RNA, 22 nt, Homo sapiens
  source 1..22: mol_type = unassigned RNA
ctgcttttactattccctccta

SEQ ID NO: 1638 - RNA, 22 nt, Homo sapiens
  source 1..22: mol_type = unassigned RNA
acccttgagcctgatccctagc

SEQ ID NO: 1639 - RNA, 22 nt, Homo sapiens
  source 1..22: mol_type = unassigned RNA
gctagggatcaggctcaagggt

SEQ ID NO: 1640 - RNA, 22 nt, Homo sapiens
  source 1..22: mol_type = unassigned RNA
aatgttggaatcctcgctagag

SEQ ID NO: 1641 - RNA, 22 nt, Homo sapiens
  source 1..22: mol_type = unassigned RNA
ctctagcgaggattccaacatt

SEQ ID NO: 1642 - RNA, 21 nt, Homo sapiens
  source 1..21: mol_type = unassigned RNA
tagcggggattccaatattgg

SEQ ID NO: 1643 - RNA, 21 nt, Homo sapiens
  source 1..21: mol_type = unassigned RNA
ccaatattggaatccccgcta

SEQ ID NO: 1644 - RNA, 22 nt, Homo sapiens
  source 1..22: mol_type = unassigned RNA
tgattgtcttcatatctagaac

SEQ ID NO: 1645 - RNA, 22 nt, Homo sapiens
  source 1..22: mol_type = unassigned RNA
gttctagatatgaagacaatca

SEQ ID NO: 1646 - RNA, 22 nt, Homo sapiens
  source 1..22: mol_type = unassigned RNA
ttctggatatgaagacaatcaa

SEQ ID NO: 1647 - RNA, 22 nt, Homo sapiens
  source 1..22: mol_type = unassigned RNA
ttgattgtcttcatatccagaa

SEQ ID NO: 1648 - RNA, 23 nt, Homo sapiens
  source 1..23: mol_type = unassigned RNA
ccccggtgttggggcgcgtctgc

SEQ ID NO: 1649 - RNA, 23 nt, Homo sapiens
  source 1..23: mol_type = unassigned RNA
gcagacgcgccccaacaccgggg

SEQ ID NO: 1650 - RNA, 21 nt, Homo sapiens
  source 1..21: mol_type = unassigned RNA
ggcgcgcccagctcccgggct

SEQ ID NO: 1651 - RNA, 21 nt, Homo sapiens
  source 1..21: mol_type = unassigned RNA
agcccgggagctgggcgcgcc

SEQ ID NO: 1652 - RNA, 20 nt, Homo sapiens
  source 1..20: mol_type = unassigned RNA
tgaggagatgctgggactga

SEQ ID NO: 1653 - RNA, 20 nt, Homo sapiens
  source 1..20: mol_type = unassigned RNA
tcagtcccagcatctcctca

SEQ ID NO: 1654 - RNA, 21 nt, Homo sapiens
  source 1..21: mol_type = unassigned RNA
agagtcggcgacgccgccagc

SEQ ID NO: 1655 - RNA, 21 nt, Homo sapiens
  source 1..21: mol_type = unassigned RNA
gctggcggcgtcgccgactct

SEQ ID NO: 1656 - RNA, 22 nt, Homo sapiens
  source 1..22: mol_type = unassigned RNA
tgaagccagctctggtctgggc

SEQ ID NO: 1657 - RNA, 22 nt, Homo sapiens
  source 1..22: mol_type = unassigned RNA
gcccagaccagagctggcttca

SEQ ID NO: 1658 - RNA, 22 nt, Homo sapiens
  source 1..22: mol_type = unassigned RNA
tgagaccaggactggatgcacc

SEQ ID NO: 1659 - RNA, 22 nt, Homo sapiens
  source 1..22: mol_type = unassigned RNA
ggtgcatccagtcctggtctca

SEQ ID NO: 1660 - RNA, 24 nt, Homo sapiens
  source 1..24: mol_type = unassigned RNA
gatgcgccgcccactgccccgcgc

SEQ ID NO: 1661 - RNA, 24 nt, Homo sapiens
  source 1..24: mol_type = unassigned RNA
gcgcggggcagtgggcggcgcatc

SEQ ID NO: 1662 - RNA, 22 nt, Homo sapiens
  source 1..22: mol_type = unassigned RNA
gcgggggtggcggcggcatccc

SEQ ID NO: 1663 - RNA, 22 nt, Homo sapiens
  source 1..22: mol_type = unassigned RNA
gggatgccgccgccacccccgc

SEQ ID NO: 1664 - RNA, 22 nt, Homo sapiens
  source 1..22: mol_type = unassigned RNA
ttacggaccagctaagggaggc

SEQ ID NO: 1665 - RNA, 22 nt, Homo sapiens
  source 1..22: mol_type = unassigned RNA
gcctcccttagctggtccgtaa

SEQ ID NO: 1666 - RNA, 21 nt, Homo sapiens
  source 1..21: mol_type = unassigned RNA
cacacatagcaggtgtatata

SEQ ID NO: 1667 - RNA, 21 nt, Homo sapiens
  source 1..21: mol_type = unassigned RNA
tatatacacctgctatgtgtg

SEQ ID NO: 1668 - RNA, 22 nt, Homo sapiens
  source 1..22: mol_type = unassigned RNA
gtatacacctgatatgtgtatg

SEQ ID NO: 1669 - RNA, 22 nt, Homo sapiens
  source 1..22: mol_type = unassigned RNA
catacacatatcaggtgtatac

SEQ ID NO: 1670 - RNA, 22 nt, Homo sapiens
  source 1..22: mol_type = unassigned RNA
tgaatggtaaagcgatgtcaca

SEQ ID NO: 1671 - RNA, 22 nt, Homo sapiens
  source 1..22: mol_type = unassigned RNA
tgtgacatcgctttaccattca

SEQ ID NO: 1672 - RNA, 20 nt, Homo sapiens
  source 1..20: mol_type = unassigned RNA
atcgctttaccattcatgtt

SEQ ID NO: 1673 - RNA, 20 nt, Homo sapiens
  source 1..20: mol_type = unassigned RNA
aacatgaatggtaaagcgat

SEQ ID NO: 1674 - RNA, 18 nt, Homo sapiens
  source 1..18: mol_type = unassigned RNA
tggatatgatgactgaaa

SEQ ID NO: 1675 - RNA, 18 nt, Homo sapiens
  source 1..18: mol_type = unassigned RNA
tttcagtcatcatatcca

SEQ ID NO: 1676 - RNA, 18 nt, Homo sapiens
  source 1..18: mol_type = unassigned RNA
cggtgagcgctcgctggc

SEQ ID NO: 1677 - RNA, 18 nt, Homo sapiens
  source 1..18: mol_type = unassigned RNA
gccagcgagcgctcaccg

SEQ ID NO: 1678 - RNA, 23 nt, Homo sapiens
  source 1..23: mol_type = unassigned RNA
tctgcactgtgagttggctggct

SEQ ID NO: 1679 - RNA, 23 nt, Homo sapiens
  source 1..23: mol_type = unassigned RNA
agccagccaactcacagtgcaga

SEQ ID NO: 1680 - RNA, 24 nt, Homo sapiens
  source 1..24: mol_type = unassigned RNA
acatcctgctccacagggcagagg

SEQ ID NO: 1681 - RNA, 24 nt, Homo sapiens
  source 1..24: mol_type = unassigned RNA
cctctgccctgtggagcaggatgt

SEQ ID NO: 1682 - RNA, 22 nt, Homo sapiens
  source 1..22: mol_type = unassigned RNA
tctggctatctcacgagactgt

SEQ ID NO: 1683 - RNA, 22 nt, Homo sapiens
  source 1..22: mol_type = unassigned RNA
acagtctcgtgagatagccaga

SEQ ID NO: 1684 - RNA, 22 nt, Homo sapiens
  source 1..22: mol_type = unassigned RNA
atattattagccacttctggat

SEQ ID NO: 1685 - RNA, 22 nt, Homo sapiens
  source 1..22: mol_type = unassigned RNA
atccagaagtggctaataatat

SEQ ID NO: 1686 - RNA, 21 nt, Homo sapiens
  source 1..21: mol_type = unassigned RNA
agaagtggctaataatattga

SEQ ID NO: 1687 - RNA, 21 nt, Homo sapiens
  source 1..21: mol_type = unassigned RNA
tcaatattattagccacttct

SEQ ID NO: 1688 - RNA, 22 nt, Homo sapiens
  source 1..22: mol_type = unassigned RNA
taaagtggcagagtatagacac

SEQ ID NO: 1689 - RNA, 22 nt, Homo sapiens
  source 1..22: mol_type = unassigned RNA
gtgtctatactctgccacttta

SEQ ID NO: 1690 - RNA, 22 nt, Homo sapiens
  source 1..22: mol_type = unassigned RNA
tgtctatactctgtcactttac

SEQ ID NO: 1691 - RNA, 22 nt, Homo sapiens
  source 1..22: mol_type = unassigned RNA
gtaaagtgacagagtatagaca

SEQ ID NO: 1692 - RNA, 21 nt, Homo sapiens
  source 1..21: mol_type = unassigned RNA
tctcagtaagtggcactctgt

SEQ ID NO: 1693 - RNA, 21 nt, Homo sapiens
  source 1..21: mol_type = unassigned RNA
acagagtgccacttactgaga

SEQ ID NO: 1694 - RNA, 21 nt, Homo sapiens
  source 1..21: mol_type = unassigned RNA
gacagagtgccacttactgaa

SEQ ID NO: 1695 - RNA, 21 nt, Homo sapiens
  source 1..21: mol_type = unassigned RNA
ttcagtaagtggcactctgtc

SEQ ID NO: 1696 - RNA, 22 nt, Homo sapiens
  source 1..22: mol_type = unassigned RNA
aactcacgaagtataccgaagt

SEQ ID NO: 1697 - RNA, 22 nt, Homo sapiens
  source 1..22: mol_type = unassigned RNA
acttcggtatacttcgtgagtt

SEQ ID NO: 1698 - RNA, 22 nt, Homo sapiens
  source 1..22: mol_type = unassigned RNA
ttcggtatactttgtgaattgg

SEQ ID NO: 1699 - RNA, 22 nt, Homo sapiens
  source 1..22: mol_type = unassigned RNA
ccaattcacaaagtataccgaa

SEQ ID NO: 1700 - RNA, 22 nt, Homo sapiens
  source 1..22: mol_type = unassigned RNA
actggcatgctgcatttatata

SEQ ID NO: 1701 - RNA, 22 nt, Homo sapiens
  source 1..22: mol_type = unassigned RNA
tatataaatgcagcatgccagt

SEQ ID NO: 1702 - RNA, 22 nt, Homo sapiens
  source 1..22: mol_type = unassigned RNA
atctaaatgcagcatgccagtc

SEQ ID NO: 1703 - RNA, 22 nt, Homo sapiens
  source 1..22: mol_type = unassigned RNA
gactggcatgctgcatttagat

SEQ ID NO: 1704 - RNA, 19 nt, Homo sapiens
  source 1..19: mol_type = unassigned RNA
catccgtccgtctgtccac

SEQ ID NO: 1705 - RNA, 19 nt, Homo sapiens
  source 1..19: mol_type = unassigned RNA
gtggacagacggacggatg

SEQ ID NO: 1706 - RNA, 21 nt, Homo sapiens
  source 1..21: mol_type = unassigned RNA
agtggaccgaggaaggaagga

SEQ ID NO: 1707 - RNA, 21 nt, Homo sapiens
  source 1..21: mol_type = unassigned RNA
tccttccttcctcggtccact

SEQ ID NO: 1708 - RNA, 22 nt, Homo sapiens
  source 1..22: mol_type = unassigned RNA
tacacaagaaaaccaaggctca

SEQ ID NO: 1709 - RNA, 22 nt, Homo sapiens
  source 1..22: mol_type = unassigned RNA
tgagccttggttttcttgtgta

SEQ ID NO: 1710 - RNA, 21 nt, Homo sapiens
  source 1..21: mol_type = unassigned RNA
taacataatagtgtggattga

SEQ ID NO: 1711 - RNA, 21 nt, Homo sapiens
  source 1..21: mol_type = unassigned RNA
tcaatccacactattatgtta

SEQ ID NO: 1712 - RNA, 21 nt, Homo sapiens
  source 1..21: mol_type = unassigned RNA
tgcttaaccttgccctcgaaa

SEQ ID NO: 1713 - RNA, 21 nt, Homo sapiens
  source 1..21: mol_type = unassigned RNA
tttcgagggcaaggttaagca

SEQ ID NO: 1714 - RNA, 21 nt, Homo sapiens
  source 1..21: mol_type = unassigned RNA
ttggacggtaaggttaagcaa

SEQ ID NO: 1715 - RNA, 21 nt, Homo sapiens
  source 1..21: mol_type = unassigned RNA
ttgcttaaccttaccgtccaa

SEQ ID NO: 1716 - RNA, 21 nt, Homo sapiens
  source 1..21: mol_type = unassigned RNA
aaaagcatcaggaagtaccca

SEQ ID NO: 1717 - RNA, 21 nt, Homo sapiens
  source 1..21: mol_type = unassigned RNA
tgggtacttcctgatgctttt

SEQ ID NO: 1718 - RNA, 21 nt, Homo sapiens
  source 1..21: mol_type = unassigned RNA
gcaggacaggcagaagtggat

SEQ ID NO: 1719 - RNA, 21 nt, Homo sapiens
  source 1..21: mol_type = unassigned RNA
atccacttctgcctgtcctgc

SEQ ID NO: 1720 - RNA, 22 nt, Homo sapiens
  source 1..22: mol_type = unassigned RNA
cagggctggcagtgacatgggt

SEQ ID NO: 1721 - RNA, 22 nt, Homo sapiens
  source 1..22: mol_type = unassigned RNA
acccatgtcactgccagccctg

SEQ ID NO: 1722 - RNA, 22 nt, Homo sapiens
  source 1..22: mol_type = unassigned RNA
atttccctgccattcccttggc

SEQ ID NO: 1723 - RNA, 22 nt, Homo sapiens
  source 1..22: mol_type = unassigned RNA
gccaagggaatggcagggaaat

SEQ ID NO: 1724 - RNA, 22 nt, Homo sapiens
  source 1..22: mol_type = unassigned RNA
tggcggcggtagttatgggctt

SEQ ID NO: 1725 - RNA, 22 nt, Homo sapiens
  source 1..22: mol_type = unassigned RNA
aagcccataactaccgccgcca

SEQ ID NO: 1726 - RNA, 22 nt, Homo sapiens
  source 1..22: mol_type = unassigned RNA
gctccctctagggtcgctcgga

SEQ ID NO: 1727 - RNA, 22 nt, Homo sapiens
  source 1..22: mol_type = unassigned RNA
tccgagcgaccctagagggagc

SEQ ID NO: 1728 - RNA, 22 nt, Homo sapiens
  source 1..22: mol_type = unassigned RNA
tgggaacttagtagaggtttaa

SEQ ID NO: 1729 - RNA, 22 nt, Homo sapiens
  source 1..22: mol_type = unassigned RNA
ttaaacctctactaagttccca

SEQ ID NO: 1730 - RNA, 21 nt, Homo sapiens
  source 1..21: mol_type = unassigned RNA
tggggctagtgatgcaggacg

SEQ ID NO: 1731 - RNA, 21 nt, Homo sapiens
  source 1..21: mol_type = unassigned RNA
cgtcctgcatcactagcccca

SEQ ID NO: 1732 - RNA, 22 nt, Homo sapiens
  source 1..22: mol_type = unassigned RNA
gctgacagcagggctggccgct

SEQ ID NO: 1733 - RNA, 22 nt, Homo sapiens
  source 1..22: mol_type = unassigned RNA
agcggccagccctgctgtcagc

SEQ ID NO: 1734 - RNA, 21 nt, Homo sapiens
  source 1..21: mol_type = unassigned RNA
attggactgctgatggcccgt

SEQ ID NO: 1735 - RNA, 21 nt, Homo sapiens
  source 1..21: mol_type = unassigned RNA
acgggccatcagcagtccaat

SEQ ID NO: 1736 - RNA, 22 nt, Homo sapiens
  source 1..22: mol_type = unassigned RNA
aggccatcagcagtccaatgaa

SEQ ID NO: 1737 - RNA, 22 nt, Homo sapiens
  source 1..22: mol_type = unassigned RNA
ttcattggactgctgatggcct

SEQ ID NO: 1738 - RNA, 22 nt, Homo sapiens
  source 1..22: mol_type = unassigned RNA
ttggacagaaaacacgcaggaa

SEQ ID NO: 1739 - RNA, 22 nt, Homo sapiens
  source 1..22: mol_type = unassigned RNA
ttcctgcgtgttttctgtccaa

SEQ ID NO: 1740 - RNA, 20 nt, Homo sapiens
  source 1..20: mol_type = unassigned RNA
cctgcgtgttttctgtccaa

SEQ ID NO: 1741 - RNA, 20 nt, Homo sapiens
  source 1..20: mol_type = unassigned RNA
ttggacagaaaacacgcagg

SEQ ID NO: 1742 - RNA, 22 nt, Homo sapiens
  source 1..22: mol_type = unassigned RNA
tgagacaggcttatgctgctat

SEQ ID NO: 1743 - RNA, 22 nt, Homo sapiens
  source 1..22: mol_type = unassigned RNA
atagcagcataagcctgtctca

SEQ ID NO: 1744 - RNA, 22 nt, Homo sapiens
  source 1..22: mol_type = unassigned RNA
atagcagcatgaacctgtctca

SEQ ID NO: 1745 - RNA, 22 nt, Homo sapiens
  source 1..22: mol_type = unassigned RNA
tgagacaggttcatgctgctat

SEQ ID NO: 1746 - RNA, 20 nt, Homo sapiens
  source 1..20: mol_type = unassigned RNA
gagacaggttcatgctgcta

SEQ ID NO: 1747 - RNA, 20 nt, Homo sapiens
  source 1..20: mol_type = unassigned RNA
tagcagcatgaacctgtctc

SEQ ID NO: 1748 - RNA, 21 nt, Homo sapiens
  source 1..21: mol_type = unassigned RNA
atagcagcataagcctgtctc

SEQ ID NO: 1749 - RNA, 21 nt, Homo sapiens
  source 1..21: mol_type = unassigned RNA
gagacaggcttatgctgctat

SEQ ID NO: 1750 - RNA, 22 nt, Homo sapiens
  source 1..22: mol_type = unassigned RNA
tgtgtggatcctggaggaggca

SEQ ID NO: 1751 - RNA, 22 nt, Homo sapiens
  source 1..22: mol_type = unassigned RNA
tgcctcctccaggatccacaca

SEQ ID NO: 1752 - RNA, 22 nt, Homo sapiens
  source 1..22: mol_type = unassigned RNA
agacatcaagatcagtcccaaa

SEQ ID NO: 1753 - RNA, 22 nt, Homo sapiens
  source 1..22: mol_type = unassigned RNA
tttgggactgatcttgatgtct

SEQ ID NO: 1754 - RNA, 22 nt, Homo sapiens
  source 1..22: mol_type = unassigned RNA
tttgggactgatcttgatgtct

SEQ ID NO: 1755 - RNA, 22 nt, Homo sapiens
  source 1..22: mol_type = unassigned RNA
agacatcaagatcagtcccaaa

SEQ ID NO: 1756 - RNA, 22 nt, Homo sapiens
  source 1..22: mol_type = unassigned RNA
aaggaaccagaaaatgagaagt

SEQ ID NO: 1757 - RNA, 22 nt, Homo sapiens
  source 1..22: mol_type = unassigned RNA
acttctcattttctggttcctt

SEQ ID NO: 1758 - RNA, 22 nt, Homo sapiens
  source 1..22: mol_type = unassigned RNA
tctggccttgacttgactcttt

SEQ ID NO: 1759 - RNA, 22 nt, Homo sapiens
  source 1..22: mol_type = unassigned RNA
aaagagtcaagtcaaggccaga

SEQ ID NO: 1760 - RNA, 23 nt, Homo sapiens
  source 1..23: mol_type = unassigned RNA
tcaaggccagaggtcccacagca

SEQ ID NO: 1761 - RNA, 23 nt, Homo sapiens
  source 1..23: mol_type = unassigned RNA
tgctgtgggacctctggccttga

SEQ ID NO: 1762 - RNA, 21 nt, Homo sapiens
  source 1..21: mol_type = unassigned RNA
actccagttttagttctcttg

SEQ ID NO: 1763 - RNA, 21 nt, Homo sapiens
  source 1..21: mol_type = unassigned RNA
caagagaactaaaactggagt

SEQ ID NO: 1764 - RNA, 22 nt, Homo sapiens
  source 1..22: mol_type = unassigned RNA
aagagaactgaaagtggagcct

SEQ ID NO: 1765 - RNA, 22 nt, Homo sapiens
  source 1..22: mol_type = unassigned RNA
aggctccactttcagttctctt

SEQ ID NO: 1766 - RNA, 22 nt, Homo sapiens
  source 1..22: mol_type = unassigned RNA
taaggggtgtatggcagatgca

SEQ ID NO: 1767 - RNA, 22 nt, Homo sapiens
  source 1..22: mol_type = unassigned RNA
tgcatctgccatacacccctta

SEQ ID NO: 1768 - RNA, 21 nt, Homo sapiens
  source 1..21: mol_type = unassigned RNA
tttcagataacagtattacat

SEQ ID NO: 1769 - RNA, 21 nt, Homo sapiens
  source 1..21: mol_type = unassigned RNA
atgtaatactgttatctgaaa

SEQ ID NO: 1770 - RNA, 22 nt, Homo sapiens
  source 1..22: mol_type = unassigned RNA
aagcaatactgttacctgaaat

SEQ ID NO: 1771 - RNA, 22 nt, Homo sapiens
  source 1..22: mol_type = unassigned RNA
atttcaggtaacagtattgctt

SEQ ID NO: 1772 - RNA, 22 nt, Homo sapiens
  source 1..22: mol_type = unassigned RNA
tactaactgcagattcaagtga

SEQ ID NO: 1773 - RNA, 22 nt, Homo sapiens
  source 1..22: mol_type = unassigned RNA
tcacttgaatctgcagttagta

SEQ ID NO: 1774 - RNA, 21 nt, Homo sapiens
  source 1..21: mol_type = unassigned RNA
attgcctaacatgtgccagaa

SEQ ID NO: 1775 - RNA, 21 nt, Homo sapiens
  source 1..21: mol_type = unassigned RNA
ttctggcacatgttaggcaat

SEQ ID NO: 1776 - RNA, 22 nt, Homo sapiens
  source 1..22: mol_type = unassigned RNA
tctggtatgtagtaggtaataa

SEQ ID NO: 1777 - RNA, 22 nt, Homo sapiens
  source 1..22: mol_type = unassigned RNA
ttattacctactacataccaga

SEQ ID NO: 1778 - RNA, 22 nt, Homo sapiens
  source 1..22: mol_type = unassigned RNA
agttgcctttttgttcccatgc

SEQ ID NO: 1779 - RNA, 22 nt, Homo sapiens
  source 1..22: mol_type = unassigned RNA
gcatgggaacaaaaaggcaact

SEQ ID NO: 1780 - RNA, 21 nt, Homo sapiens
  source 1..21: mol_type = unassigned RNA
ataggcaccaaaaagcaacaa

SEQ ID NO: 1781 - RNA, 21 nt, Homo sapiens
  source 1..21: mol_type = unassigned RNA
ttgttgctttttggtgcctat

SEQ ID NO: 1782 - RNA, 22 nt, Homo sapiens
  source 1..22: mol_type = unassigned RNA
cctgcaactttgcctgatcaga

SEQ ID NO: 1783 - RNA, 22 nt, Homo sapiens
  source 1..22: mol_type = unassigned RNA
tctgatcaggcaaagttgcagg

SEQ ID NO: 1784 - RNA, 22 nt, Homo sapiens
  source 1..22: mol_type = unassigned RNA
tgatcaggcaaaattgcagact

SEQ ID NO: 1785 - RNA, 22 nt, Homo sapiens
  source 1..22: mol_type = unassigned RNA
agtctgcaattttgcctgatca

SEQ ID NO: 1786 - RNA, 22 nt, Homo sapiens
  source 1..22: mol_type = unassigned RNA
ttgtggctggtcatgaggctaa

SEQ ID NO: 1787 - RNA, 22 nt, Homo sapiens
  source 1..22: mol_type = unassigned RNA
ttagcctcatgaccagccacaa

SEQ ID NO: 1788 - RNA, 21 nt, Homo sapiens
  source 1..21: mol_type = unassigned RNA
ttagtctcatgatcagacaca

SEQ ID NO: 1789 - RNA, 21 nt, Homo sapiens
  source 1..21: mol_type = unassigned RNA
tgtgtctgatcatgagactaa

SEQ ID NO: 1790 - RNA, 22 nt, Homo sapiens
  source 1..22: mol_type = unassigned RNA
aaagatagacaattggctaaat

SEQ ID NO: 1791 - RNA, 22 nt, Homo sapiens
  source 1..22: mol_type = unassigned RNA
atttagccaattgtctatcttt

SEQ ID NO: 1792 - RNA, 22 nt, Homo sapiens
  source 1..22: mol_type = unassigned RNA
ttagccaattgtccatctttag

SEQ ID NO: 1793 - RNA, 22 nt, Homo sapiens
  source 1..22: mol_type = unassigned RNA
ctaaagatggacaattggctaa

SEQ ID NO: 1794 - RNA, 22 nt, Homo sapiens
  source 1..22: mol_type = unassigned RNA
tctgtgagaccaaagaactact

SEQ ID NO: 1795 - RNA, 22 nt, Homo sapiens
  source 1..22: mol_type = unassigned RNA
agtagttctttggtctcacaga

SEQ ID NO: 1796 - RNA, 22 nt, Homo sapiens
  source 1..22: mol_type = unassigned RNA
ttgttctttggtctttcagcca

SEQ ID NO: 1797 - RNA, 22 nt, Homo sapiens
  source 1..22: mol_type = unassigned RNA
tggctgaaagaccaaagaacaa

SEQ ID NO: 1798 - RNA, 23 nt, Homo sapiens
  source 1..23: mol_type = unassigned RNA
cgggctgtccggaggggtcggct

SEQ ID NO: 1799 - RNA, 23 nt, Homo sapiens
  source 1..23: mol_type = unassigned RNA
agccgacccctccggacagcccg

SEQ ID NO: 1800 - RNA, 23 nt, Homo sapiens
  source 1..23: mol_type = unassigned RNA
tctgtattctcctttgcctgcag

SEQ ID NO: 1801 - RNA, 23 nt, Homo sapiens
  source 1..23: mol_type = unassigned RNA
ctgcaggcaaaggagaatacaga

SEQ ID NO: 1802 - RNA, 23 nt, Homo sapiens
  source 1..23: mol_type = unassigned RNA
tacatggatggaaaccttcaagc

SEQ ID NO: 1803 - RNA, 23 nt, Homo sapiens
  source 1..23: mol_type = unassigned RNA
gcttgaaggtttccatccatgta

SEQ ID NO: 1804 - RNA, 22 nt, Homo sapiens
  source 1..22: mol_type = unassigned RNA
tatggaggttctagaccatgtt

SEQ ID NO: 1805 - RNA, 22 nt, Homo sapiens
  source 1..22: mol_type = unassigned RNA
aacatggtctagaacctccata

SEQ ID NO: 1806 - RNA, 22 nt, Homo sapiens
  source 1..22: mol_type = unassigned RNA
gggaccatcctgcctgctgtgg

SEQ ID NO: 1807 - RNA, 22 nt, Homo sapiens
  source 1..22: mol_type = unassigned RNA
ccacagcaggcaggatggtccc

SEQ ID NO: 1808 - RNA, 22 nt, Homo sapiens
  source 1..22: mol_type = unassigned RNA
tcagcaggcaggctggtgcagc

SEQ ID NO: 1809 - RNA, 22 nt, Homo sapiens
  source 1..22: mol_type = unassigned RNA
gctgcaccagcctgcctgctga

SEQ ID NO: 1810 - RNA, 22 nt, Homo sapiens
  source 1..22: mol_type = unassigned RNA
tcacctgacctcccatgcctgt

SEQ ID NO: 1811 - RNA, 22 nt, Homo sapiens
  source 1..22: mol_type = unassigned RNA
acaggcatgggaggtcaggtga

SEQ ID NO: 1812 - RNA, 22 nt, Homo sapiens
  source 1..22: mol_type = unassigned RNA
caggcacgggagctcaggtgag

SEQ ID NO: 1813 - RNA, 22 nt, Homo sapiens
  source 1..22: mol_type = unassigned RNA
ctcacctgagctcccgtgcctg

SEQ ID NO: 1814 - RNA, 21 nt, Homo sapiens
  source 1..21: mol_type = unassigned RNA
tgagtgttgtctacgagggca

SEQ ID NO: 1815 - RNA, 21 nt, Homo sapiens
  source 1..21: mol_type = unassigned RNA
tgccctcgtagacaacactca

SEQ ID NO: 1816 - RNA, 21 nt, Homo sapiens
  source 1..21: mol_type = unassigned RNA
actgacaggagagcattttga

SEQ ID NO: 1817 - RNA, 21 nt, Homo sapiens
  source 1..21: mol_type = unassigned RNA
tcaaaatgctctcctgtcagt

SEQ ID NO: 1818 - RNA, 22 nt, Homo sapiens
  source 1..22: mol_type = unassigned RNA
tgacctgggactcggacagctg

SEQ ID NO: 1819 - RNA, 22 nt, Homo sapiens
  source 1..22: mol_type = unassigned RNA
cagctgtccgagtcccaggtca

SEQ ID NO: 1820 - RNA, 22 nt, Homo sapiens
  source 1..22: mol_type = unassigned RNA
tctcaggagtaaagacagagtt

SEQ ID NO: 1821 - RNA, 22 nt, Homo sapiens
  source 1..22: mol_type = unassigned RNA
aactctgtctttactcctgaga

SEQ ID NO: 1822 - RNA, 22 nt, Homo sapiens
  source 1..22: mol_type = unassigned RNA
aactctgtcttcactcatgagt

SEQ ID NO: 1823 - RNA, 22 nt, Homo sapiens
  source 1..22: mol_type = unassigned RNA
actcatgagtgaagacagagtt

SEQ ID NO: 1824 - RNA, 22 nt, Homo sapiens
  source 1..22: mol_type = unassigned RNA
tggggcggagcttccggaggcc

SEQ ID NO: 1825 - RNA, 22 nt, Homo sapiens
  source 1..22: mol_type = unassigned RNA
ggcctccggaagctccgcccca

SEQ ID NO: 1826 - RNA, 22 nt, Homo sapiens
  source 1..22: mol_type = unassigned RNA
caatcagcaagtatactgccct

SEQ ID NO: 1827 - RNA, 22 nt, Homo sapiens
  source 1..22: mol_type = unassigned RNA
agggcagtatacttgctgattg

SEQ ID NO: 1828 - RNA, 22 nt, Homo sapiens
  source 1..22: mol_type = unassigned RNA
tggcagtgtcttagctggttgt

SEQ ID NO: 1829 - RNA, 22 nt, Homo sapiens
  source 1..22: mol_type = unassigned RNA
acaaccagctaagacactgcca

SEQ ID NO: 1830 - RNA, 22 nt, Homo sapiens
  source 1..22: mol_type = unassigned RNA
ccaatattggctgtgctgctcc

SEQ ID NO: 1831 - RNA, 22 nt, Homo sapiens
  source 1..22: mol_type = unassigned RNA
ggagcagcacagccaatattgg

SEQ ID NO: 1832 - RNA, 21 nt, Homo sapiens
  source 1..21: mol_type = unassigned RNA
tagcagcacagaaatattggc

SEQ ID NO: 1833 - RNA, 21 nt, Homo sapiens
  source 1..21: mol_type = unassigned RNA
gccaatatttctgtgctgcta

SEQ ID NO: 1834 - RNA, 21 nt, Homo sapiens
  source 1..21: mol_type = unassigned RNA
taattttatgtataagctagt

SEQ ID NO: 1835 - RNA, 21 nt, Homo sapiens
  source 1..21: mol_type = unassigned RNA
actagcttatacataaaatta

SEQ ID NO: 1836 - RNA, 22 nt, Homo sapiens
  source 1..22: mol_type = unassigned RNA
gagcttattcataaaagtgcag

SEQ ID NO: 1837 - RNA, 22 nt, Homo sapiens
  source 1..22: mol_type = unassigned RNA
ctgcacttttatgaataagctc

SEQ ID NO: 1838 - RNA, 22 nt, Homo sapiens
  source 1..22: mol_type = unassigned RNA
aagacgggaggaaagaagggag

SEQ ID NO: 1839 - RNA, 22 nt, Homo sapiens
  source 1..22: mol_type = unassigned RNA
ctcccttctttcctcccgtctt

SEQ ID NO: 1840 - RNA, 22 nt, Homo sapiens
  source 1..22: mol_type = unassigned RNA
cagtggttttaccctatggtag

SEQ ID NO: 1841 - RNA, 22 nt, Homo sapiens
  source 1..22: mol_type = unassigned RNA
ctaccatagggtaaaaccactg

SEQ ID NO: 1842 - RNA, 22 nt, Homo sapiens
  source 1..22: mol_type = unassigned RNA
attctaatttctccacgtcttt

SEQ ID NO: 1843 - RNA, 22 nt, Homo sapiens
  source 1..22: mol_type = unassigned RNA
aaagacgtggagaaattagaat

SEQ ID NO: 1844 - RNA, 22 nt, Homo sapiens
  source 1..22: mol_type = unassigned RNA
aaccagcaccccaactttggac

SEQ ID NO: 1845 - RNA, 22 nt, Homo sapiens
  source 1..22: mol_type = unassigned RNA
gtccaaagttggggtgctggtt

SEQ ID NO: 1846 - RNA, 24 nt, Homo sapiens
  source 1..24: mol_type = unassigned RNA
aaagacataggatagagtcacctc

SEQ ID NO: 1847 - RNA, 24 nt, Homo sapiens
  source 1..24: mol_type = unassigned RNA
gaggtgactctatcctatgtcttt

SEQ ID NO: 1848 - RNA, 22 nt, Homo sapiens
  source 1..22: mol_type = unassigned RNA
taactggttgaacaactgaacc

SEQ ID NO: 1849 - RNA, 22 nt, Homo sapiens
  source 1..22: mol_type = unassigned RNA
ggttcagttgttcaaccagtta

SEQ ID NO: 1850 - RNA, 20 nt, Homo sapiens
  source 1..20: mol_type = unassigned RNA
cgtgccacccttttccccag

SEQ ID NO: 1851 - RNA, 20 nt, Homo sapiens
  source 1..20: mol_type = unassigned RNA
ctggggaaaagggtggcacg

SEQ ID NO: 1852 - RNA, 17 nt, Homo sapiens
  source 1..17: mol_type = unassigned RNA
gtggggccaggcggtgg

SEQ ID NO: 1853 - RNA, 17 nt, Homo sapiens
  source 1..17: mol_type = unassigned RNA
ccaccgcctggccccac

SEQ ID NO: 1854 - RNA, 22 nt, Homo sapiens
  source 1..22: mol_type = unassigned RNA
aaaagctgggttgagagggcaa

SEQ ID NO: 1855 - RNA, 22 nt, Homo sapiens
  source 1..22: mol_type = unassigned RNA
ttgccctctcaacccagctttt

SEQ ID NO: 1856 - RNA, 22 nt, Homo sapiens
  source 1..22: mol_type = unassigned RNA
ggtccagaggggagataggttc

SEQ ID NO: 1857 - RNA, 22 nt, Homo sapiens
  source 1..22: mol_type = unassigned RNA
gaacctatctcccctctggacc

SEQ ID NO: 1858 - RNA, 23 nt, Homo sapiens
  source 1..23: mol_type = unassigned RNA
tagccttcagatcttggtgtttt

SEQ ID NO: 1859 - RNA, 23 nt, Homo sapiens
  source 1..23: mol_type = unassigned RNA
aaaacaccaagatctgaaggcta

SEQ ID NO: 1860 - RNA, 23 nt, Homo sapiens
  source 1..23: mol_type = unassigned RNA
ccacttggatctgaaggctgccc

SEQ ID NO: 1861 - RNA, 23 nt, Homo sapiens
  source 1..23: mol_type = unassigned RNA
gggcagccttcagatccaagtgg

SEQ ID NO: 1862 - RNA, 22 nt, Homo sapiens
  source 1..22: mol_type = unassigned RNA
tgtgcgcagggagacctctccc

SEQ ID NO: 1863 - RNA, 22 nt, Homo sapiens
  source 1..22: mol_type = unassigned RNA
gggagaggtctccctgcgcaca

SEQ ID NO: 1864 - RNA, 22 nt, Homo sapiens
  source 1..22: mol_type = unassigned RNA
tgtctactactggagacactgg

SEQ ID NO: 1865 - RNA, 22 nt, Homo sapiens
  source 1..22: mol_type = unassigned RNA
ccagtgtctccagtagtagaca

SEQ ID NO: 1866 - RNA, 21 nt, Homo sapiens
  source 1..21: mol_type = unassigned RNA
aaggcagggcccccgctcccc

SEQ ID NO: 1867 - RNA, 21 nt, Homo sapiens
  source 1..21: mol_type = unassigned RNA
ggggagcgggggccctgcctt

SEQ ID NO: 1868 - RNA, 21 nt, Homo sapiens
  source 1..21: mol_type = unassigned RNA
ctgactgttgccgtcctccag

SEQ ID NO: 1869 - RNA, 21 nt, Homo sapiens
  source 1..21: mol_type = unassigned RNA
ctggaggacggcaacagtcag

SEQ ID NO: 1870 - RNA, 25 nt, Homo sapiens
  source 1..25: mol_type = unassigned RNA
aaaaaccacaattacttttgcacca

SEQ ID NO: 1871 - RNA, 25 nt, Homo sapiens
  source 1..25: mol_type = unassigned RNA
tggtgcaaaagtaattgtggttttt

SEQ ID NO: 1872 - RNA, 23 nt, Homo sapiens
  source 1..23: mol_type = unassigned RNA
caaaaaccgcaattacttttgca

SEQ ID NO: 1873 - RNA, 23 nt, Homo sapiens
  source 1..23: mol_type = unassigned RNA
tgcaaaagtaattgcggtttttg

SEQ ID NO: 1874 - RNA, 22 nt, Homo sapiens
  source 1..22: mol_type = unassigned RNA
atgtgcctgagggagtaagaca

SEQ ID NO: 1875 - RNA, 22 nt, Homo sapiens
  source 1..22: mol_type = unassigned RNA
tgtcttactccctcaggcacat

SEQ ID NO: 1876 - RNA, 20 nt, Homo sapiens
  source 1..20: mol_type = unassigned RNA
tcttactccctcaggcactg

SEQ ID NO: 1877 - RNA, 20 nt, Homo sapiens
  source 1..20: mol_type = unassigned RNA
cagtgcctgagggagtaaga

SEQ ID NO: 1878 - RNA, 22 nt, Homo sapiens
  source 1..22: mol_type = unassigned RNA
agacacatttggagagggaccc

SEQ ID NO: 1879 - RNA, 22 nt, Homo sapiens
  source 1..22: mol_type = unassigned RNA
gggtccctctccaaatgtgtct

SEQ ID NO: 1880 - RNA, 22 nt, Homo sapiens
  source 1..22: mol_type = unassigned RNA
ggttccctctccaaatgtgtct

SEQ ID NO: 1881 - RNA, 22 nt, Homo sapiens
  source 1..22: mol_type = unassigned RNA
agacacatttggagagggaacc

SEQ ID NO: 1882 - RNA, 21 nt, Homo sapiens
  source 1..21: mol_type = unassigned RNA
aaaatttctttcactacttag

SEQ ID NO: 1883 - RNA, 21 nt, Homo sapiens
  source 1..21: mol_type = unassigned RNA
ctaagtagtgaaagaaatttt

SEQ ID NO: 1884 - RNA, 21 nt, Homo sapiens
  source 1..21: mol_type = unassigned RNA
ttagtgaaggctattttaatt

SEQ ID NO: 1885 - RNA, 21 nt, Homo sapiens
  source 1..21: mol_type = unassigned RNA
aattaaaatagccttcactaa

SEQ ID NO: 1886 - RNA, 20 nt, Homo sapiens
  source 1..20: mol_type = unassigned RNA
actgtaaacgctttctgatg

SEQ ID NO: 1887 - RNA, 20 nt, Homo sapiens
  source 1..20: mol_type = unassigned RNA
catcagaaagcgtttacagt

SEQ ID NO: 1888 - RNA, 22 nt, Homo sapiens
  source 1..22: mol_type = unassigned RNA
gcatgtgatgaagcaaatcagt

SEQ ID NO: 1889 - RNA, 22 nt, Homo sapiens
  source 1..22: mol_type = unassigned RNA
actgatttgcttcatcacatgc

SEQ ID NO: 1890 - RNA, 24 nt, Homo sapiens
  source 1..24: mol_type = unassigned RNA
caaagtgatgagtaatactggctg

SEQ ID NO: 1891 - RNA, 24 nt, Homo sapiens
  source 1..24: mol_type = unassigned RNA
cagccagtattactcatcactttg

SEQ ID NO: 1892 - RNA, 20 nt, Homo sapiens
  source 1..20: mol_type = unassigned RNA
gaatcggaaaggaggcgccg

SEQ ID NO: 1893 - RNA, 20 nt, Homo sapiens
  source 1..20: mol_type = unassigned RNA
cggcgcctcctttccgattc

SEQ ID NO: 1894 - RNA, 21 nt, Homo sapiens
  source 1..21: mol_type = unassigned RNA
ttgtgaagaaagaaattctta

SEQ ID NO: 1895 - RNA, 21 nt, Homo sapiens
  source 1..21: mol_type = unassigned RNA
taagaatttctttcttcacaa

SEQ ID NO: 1896 - RNA, 22 nt, Homo sapiens
  source 1..22: mol_type = unassigned RNA
aggaggcatcttgagaaatgga

SEQ ID NO: 1897 - RNA, 22 nt, Homo sapiens
  source 1..22: mol_type = unassigned RNA
tccatttctcaagatgcctcct

SEQ ID NO: 1898 - RNA, 24 nt, Homo sapiens
  source 1..24: mol_type = unassigned RNA
acaaaaaaaaaagcccaacccttc

SEQ ID NO: 1899 - RNA, 24 nt, Homo sapiens
  source 1..24: mol_type = unassigned RNA
gaagggttgggcttttttttttgt

SEQ ID NO: 1900 - RNA, 22 nt, Homo sapiens
  source 1..22: mol_type = unassigned RNA
tgttgtacttttttttttgttc

SEQ ID NO: 1901 - RNA, 22 nt, Homo sapiens
  source 1..22: mol_type = unassigned RNA
gaacaaaaaaaaaagtacaaca

SEQ ID NO: 1902 - RNA, 21 nt, Homo sapiens
  source 1..21: mol_type = unassigned RNA
tctctcggctcctcgcggctc

SEQ ID NO: 1903 - RNA, 21 nt, Homo sapiens
  source 1..21: mol_type = unassigned RNA
gagccgcgaggagccgagaga

SEQ ID NO: 1904 - RNA, 23 nt, Homo sapiens
  source 1..23: mol_type = unassigned RNA
cgagggcatttcatgatgcaggc

SEQ ID NO: 1905 - RNA, 23 nt, Homo sapiens
  source 1..23: mol_type = unassigned RNA
gcctgcatcatgaaatgccctcg

SEQ ID NO: 1906 - RNA, 22 nt, Homo sapiens
  source 1..22: mol_type = unassigned RNA
atgaagtgcactcatgatatgt

SEQ ID NO: 1907 - RNA, 22 nt, Homo sapiens
  source 1..22: mol_type = unassigned RNA
acatatcatgagtgcacttcat

SEQ ID NO: 1908 - RNA, 22 nt, Homo sapiens
  source 1..22: mol_type = unassigned RNA
tgtctacattaatgaaaagagc

SEQ ID NO: 1909 - RNA, 22 nt, Homo sapiens
  source 1..22: mol_type = unassigned RNA
gctcttttcattaatgtagaca

SEQ ID NO: 1910 - RNA, 22 nt, Homo sapiens
  source 1..22: mol_type = unassigned RNA
tcaccctgcatcccgcacccag

SEQ ID NO: 1911 - RNA, 22 nt, Homo sapiens
  source 1..22: mol_type = unassigned RNA
ctgggtgcgggatgcagggtga

SEQ ID NO: 1912 - RNA, 22 nt, Homo sapiens
  source 1..22: mol_type = unassigned RNA
gtgggctgggctgggctgggcc

SEQ ID NO: 1913 - RNA, 22 nt, Homo sapiens
  source 1..22: mol_type = unassigned RNA
ggcccagcccagcccagcccac

SEQ ID NO: 1914 - RNA, 20 nt, Homo sapiens
  source 1..20: mol_type = unassigned RNA
cgcgggtcggggtctgcagg

SEQ ID NO: 1915 - RNA, 20 nt, Homo sapiens
  source 1..20: mol_type = unassigned RNA
cctgcagaccccgacccgcg

SEQ ID NO: 1916 - RNA, 21 nt, Homo sapiens
  source 1..21: mol_type = unassigned RNA
tcacctgagctcccgtgcctg

SEQ ID NO: 1917 - RNA, 21 nt, Homo sapiens
  source 1..21: mol_type = unassigned RNA
caggcacgggagctcaggtga

SEQ ID NO: 1918 - RNA, 20 nt, Homo sapiens
  source 1..20: mol_type = unassigned RNA
aggcatgggaggtcaggtga

SEQ ID NO: 1919 - RNA, 20 nt, Homo sapiens
  source 1..20: mol_type = unassigned RNA
tcacctgacctcccatgcct

SEQ ID NO: 1920 - RNA, 23 nt, Homo sapiens
  source 1..23: mol_type = unassigned RNA
catcagcaccctatgtcctttct

SEQ ID NO: 1921 - RNA, 23 nt, Homo sapiens
  source 1..23: mol_type = unassigned RNA
agaaaggacatagggtgctgatg

SEQ ID NO: 1922 - RNA, 22 nt, Homo sapiens
  source 1..22: mol_type = unassigned RNA
aaagacatagttgcaagatggg

SEQ ID NO: 1923 - RNA, 22 nt, Homo sapiens
  source 1..22: mol_type = unassigned RNA
cccatcttgcaactatgtcttt

SEQ ID NO: 1924 - RNA, 22 nt, Homo sapiens
  source 1..22: mol_type = unassigned RNA
tttgtgacctggtccactaacc

SEQ ID NO: 1925 - RNA, 22 nt, Homo sapiens
  source 1..22: mol_type = unassigned RNA
ggttagtggaccaggtcacaaa

SEQ ID NO: 1926 - RNA, 22 nt, Homo sapiens
  source 1..22: mol_type = unassigned RNA
gatggttgaccagagagcacac

SEQ ID NO: 1927 - RNA, 22 nt, Homo sapiens
  source 1..22: mol_type = unassigned RNA
gtgtgctctctggtcaaccatc

SEQ ID NO: 1928 - RNA, 20 nt, Homo sapiens
  source 1..20: mol_type = unassigned RNA
aaaagctgggttgagagggt

SEQ ID NO: 1929 - RNA, 20 nt, Homo sapiens
  source 1..20: mol_type = unassigned RNA
accctctcaacccagctttt

SEQ ID NO: 1930 - RNA, 21 nt, Homo sapiens
  source 1..21: mol_type = unassigned RNA
cacaaggtattggtattacct

SEQ ID NO: 1931 - RNA, 21 nt, Homo sapiens
  source 1..21: mol_type = unassigned RNA
aggtaataccaataccttgtg

SEQ ID NO: 1932 - RNA, 22 nt, Homo sapiens
  source 1..22: mol_type = unassigned RNA
tagtaccagtaccttgtgttca

SEQ ID NO: 1933 - RNA, 22 nt, Homo sapiens
  source 1..22: mol_type = unassigned RNA
tgaacacaaggtactggtacta

SEQ ID NO: 1934 - RNA, 22 nt, Homo sapiens
  source 1..22: mol_type = unassigned RNA
agtattctgtaccagggaaggt

SEQ ID NO: 1935 - RNA, 22 nt, Homo sapiens
  source 1..22: mol_type = unassigned RNA
accttccctggtacagaatact

SEQ ID NO: 1936 - RNA, 22 nt, Homo sapiens
  source 1..22: mol_type = unassigned RNA
tggcagtgtattgttagctggt

SEQ ID NO: 1937 - RNA, 22 nt, Homo sapiens
  source 1..22: mol_type = unassigned RNA
accagctaacaatacactgcca

SEQ ID NO: 1938 - RNA, 22 nt, Homo sapiens
  source 1..22: mol_type = unassigned RNA
tatacaagggcaagctctctgt

SEQ ID NO: 1939 - RNA, 22 nt, Homo sapiens
  source 1..22: mol_type = unassigned RNA
acagagagcttgcccttgtata

SEQ ID NO: 1940 - RNA, 22 nt, Homo sapiens
  source 1..22: mol_type = unassigned RNA
agcgaggttgccctttgtatat

SEQ ID NO: 1941 - RNA, 22 nt, Homo sapiens
  source 1..22: mol_type = unassigned RNA
atatacaaagggcaacctcgct

SEQ ID NO: 1942 - RNA, 22 nt, Homo sapiens
  source 1..22: mol_type = unassigned RNA
caatcactaactccactgccat

SEQ ID NO: 1943 - RNA, 22 nt, Homo sapiens
  source 1..22: mol_type = unassigned RNA
atggcagtggagttagtgattg

SEQ ID NO: 1944 - RNA, 23 nt, Homo sapiens
  source 1..23: mol_type = unassigned RNA
taggcagtgtcattagctgattg

SEQ ID NO: 1945 - RNA, 23 nt, Homo sapiens
  source 1..23: mol_type = unassigned RNA
caatcagctaatgacactgccta

SEQ ID NO: 1946 - RNA, 22 nt, Homo sapiens
  source 1..22: mol_type = unassigned RNA
cagccacaactaccctgccact

SEQ ID NO: 1947 - RNA, 22 nt, Homo sapiens
  source 1..22: mol_type = unassigned RNA
agtggcagggtagttgtggctg

SEQ ID NO: 1948 - RNA, 22 nt, Homo sapiens
  source 1..22: mol_type = unassigned RNA
aggcagtgtattgttagctggc

SEQ ID NO: 1949 - RNA, 22 nt, Homo sapiens
  source 1..22: mol_type = unassigned RNA
gccagctaacaatacactgcct

SEQ ID NO: 1950 - RNA, 22 nt, Homo sapiens
  source 1..22: mol_type = unassigned RNA
aatcactaaccacacggccagg

SEQ ID NO: 1951 - RNA, 22 nt, Homo sapiens
  source 1..22: mol_type = unassigned RNA
cctggccgtgtggttagtgatt

SEQ ID NO: 1952 - RNA, 23 nt, Homo sapiens
  source 1..23: mol_type = unassigned RNA
aggcagtgtagttagctgattgc

SEQ ID NO: 1953 - RNA, 23 nt, Homo sapiens
  source 1..23: mol_type = unassigned RNA
gcaatcagctaactacactgcct

SEQ ID NO: 1954 - RNA, 20 nt, Homo sapiens
  source 1..20: mol_type = unassigned RNA
gtccgctcggcggtggccca

SEQ ID NO: 1955 - RNA, 20 nt, Homo sapiens
  source 1..20: mol_type = unassigned RNA
tgggccaccgccgagcggac

SEQ ID NO: 1956 - RNA, 23 nt, Homo sapiens
  source 1..23: mol_type = unassigned RNA
gaacgcctgttcttgccaggtgg

SEQ ID NO: 1957 - RNA, 23 nt, Homo sapiens
  source 1..23: mol_type = unassigned RNA
ccacctggcaagaacaggcgttc

SEQ ID NO: 1958 - RNA, 19 nt, Homo sapiens
  source 1..19: mol_type = unassigned RNA
aagtgtgcagggcactggt

SEQ ID NO: 1959 - RNA, 19 nt, Homo sapiens
  source 1..19: mol_type = unassigned RNA
accagtgccctgcacactt

SEQ ID NO: 1960 - RNA, 21 nt, Homo sapiens
  source 1..21: mol_type = unassigned RNA
aggggtgctatctgtgattga

SEQ ID NO: 1961 - RNA, 21 nt, Homo sapiens
  source 1..21: mol_type = unassigned RNA
tcaatcacagatagcacccct

SEQ ID NO: 1962 - RNA, 22 nt, Homo sapiens
  source 1..22: mol_type = unassigned RNA
ctttcagtcagatgtttgctgc

SEQ ID NO: 1963 - RNA, 22 nt, Homo sapiens
  source 1..22: mol_type = unassigned RNA
gcagcaaacatctgactgaaag

SEQ ID NO: 1964 - RNA, 22 nt, Homo sapiens
  source 1..22: mol_type = unassigned RNA
tgtaaacatccccgactggaag

SEQ ID NO: 1965 - RNA, 22 nt, Homo sapiens
  source 1..22: mol_type = unassigned RNA
cttccagtcggggatgtttaca

SEQ ID NO: 1966 - RNA, 22 nt, Homo sapiens
  source 1..22: mol_type = unassigned RNA
tgtaaacatcctcgactggaag

SEQ ID NO: 1967 - RNA, 22 nt, Homo sapiens
  source 1..22: mol_type = unassigned RNA
cttccagtcgaggatgtttaca

SEQ ID NO: 1968 - RNA, 22 nt, Homo sapiens
  source 1..22: mol_type = unassigned RNA
agaagtaattgcggttttgcca

SEQ ID NO: 1969 - RNA, 22 nt, Homo sapiens
  source 1..22: mol_type = unassigned RNA
tggcaaaaccgcaattacttct

SEQ ID NO: 1970 - RNA, 22 nt, Homo sapiens
  source 1..22: mol_type = unassigned RNA
caaaactggcaattacttttgc

SEQ ID NO: 1971 - RNA, 22 nt, Homo sapiens
  source 1..22: mol_type = unassigned RNA
gcaaaagtaattgccagttttg

SEQ ID NO: 1972 - RNA, 22 nt, Homo sapiens
  source 1..22: mol_type = unassigned RNA
aaaagtaattgcgagttttacc

SEQ ID NO: 1973 - RNA, 22 nt, Homo sapiens
  source 1..22: mol_type = unassigned RNA
ggtaaaactcgcaattactttt

SEQ ID NO: 1974 - RNA, 22 nt, Homo sapiens
  source 1..22: mol_type = unassigned RNA
caagaacctcagttgcttttgt

SEQ ID NO: 1975 - RNA, 22 nt, Homo sapiens
  source 1..22: mol_type = unassigned RNA
acaaaagcaactgaggttcttg

SEQ ID NO: 1976 - RNA, 22 nt, Homo sapiens
  source 1..22: mol_type = unassigned RNA
caaaaatctcaattacttttgc

SEQ ID NO: 1977 - RNA, 22 nt, Homo sapiens
  source 1..22: mol_type = unassigned RNA
gcaaaagtaattgagatttttg

SEQ ID NO: 1978 - RNA, 22 nt, Homo sapiens
  source 1..22: mol_type = unassigned RNA
caaaaaccacagtttcttttgc

SEQ ID NO: 1979 - RNA, 22 nt, Homo sapiens
  source 1..22: mol_type = unassigned RNA
gcaaaagaaactgtggtttttg

SEQ ID NO: 1980 - RNA, 22 nt, Homo sapiens
  source 1..22: mol_type = unassigned RNA
aaaagtaattgtggtttttgcc

SEQ ID NO: 1981 - RNA, 22 nt, Homo sapiens
  source 1..22: mol_type = unassigned RNA
ggcaaaaaccacaattactttt

SEQ ID NO: 1982 - RNA, 21 nt, Homo sapiens
  source 1..21: mol_type = unassigned RNA
tgacaactatggatgagctct

SEQ ID NO: 1983 - RNA, 21 nt, Homo sapiens
  source 1..21: mol_type = unassigned RNA
agagctcatccatagttgtca

SEQ ID NO: 1984 - RNA, 21 nt, Homo sapiens
  source 1..21: mol_type = unassigned RNA
aacaggtgactggttagacaa

SEQ ID NO: 1985 - RNA, 21 nt, Homo sapiens
  source 1..21: mol_type = unassigned RNA
ttgtctaaccagtcacctgtt

SEQ ID NO: 1986 - RNA, 21 nt, Homo sapiens
  source 1..21: mol_type = unassigned RNA
aaaacggtgagattttgtttt

SEQ ID NO: 1987 - RNA, 21 nt, Homo sapiens
  source 1..21: mol_type = unassigned RNA
aaaacaaaatctcaccgtttt

SEQ ID NO: 1988 - RNA, 21 nt, Homo sapiens
  source 1..21: mol_type = unassigned RNA
gctagtcctgactcagccagt

SEQ ID NO: 1989 - RNA, 21 nt, Homo sapiens
  source 1..21: mol_type = unassigned RNA
actggctgagtcaggactagc

SEQ ID NO: 1990 - RNA, 21 nt, Homo sapiens
  source 1..21: mol_type = unassigned RNA
agggtaagctgaacctctgat

SEQ ID NO: 1991 - RNA, 21 nt, Homo sapiens
  source 1..21: mol_type = unassigned RNA
atcagaggttcagcttaccct

SEQ ID NO: 1992 - RNA, 22 nt, Homo sapiens
  source 1..22: mol_type = unassigned RNA
atattaccattagctcatcttt

SEQ ID NO: 1993 - RNA, 22 nt, Homo sapiens
  source 1..22: mol_type = unassigned RNA
aaagatgagctaatggtaatat

SEQ ID NO: 1994 - RNA, 22 nt, Homo sapiens
  source 1..22: mol_type = unassigned RNA
gatgagctcattgtaatatgag

SEQ ID NO: 1995 - RNA, 22 nt, Homo sapiens
  source 1..22: mol_type = unassigned RNA
ctcatattacaatgagctcatc

SEQ ID NO: 1996 - RNA, 19 nt, Homo sapiens
  source 1..19: mol_type = unassigned RNA
aggttgacatacgtttccc

SEQ ID NO: 1997 - RNA, 19 nt, Homo sapiens
  source 1..19: mol_type = unassigned RNA
gggaaacgtatgtcaacct

SEQ ID NO: 1998 - RNA, 20 nt, Homo sapiens
  source 1..20: mol_type = unassigned RNA
atgtataaatgtatacacac

SEQ ID NO: 1999 - RNA, 20 nt, Homo sapiens
  source 1..20: mol_type = unassigned RNA
gtgtgtatacatttatacat

SEQ ID NO: 2000 - RNA, 24 nt, Homo sapiens
  source 1..24: mol_type = unassigned RNA
ctgaagtgatgtgtaactgatcag

SEQ ID NO: 2001 - RNA, 24 nt, Homo sapiens
  source 1..24: mol_type = unassigned RNA
ctgatcagttacacatcacttcag

SEQ ID NO: 2002 - RNA, 22 nt, Homo sapiens
  source 1..22: mol_type = unassigned RNA
aagatgtggaaaaattggaatc

SEQ ID NO: 2003 - RNA, 22 nt, Homo sapiens
  source 1..22: mol_type = unassigned RNA
gattccaatttttccacatctt

SEQ ID NO: 2004 - RNA, 21 nt, Homo sapiens
  source 1..21: mol_type = unassigned RNA
tagataaaatattggtacctg

SEQ ID NO: 2005 - RNA, 21 nt, Homo sapiens
  source 1..21: mol_type = unassigned RNA
caggtaccaatattttatcta

SEQ ID NO: 2006 - RNA, 21 nt, Homo sapiens
  source 1..21: mol_type = unassigned RNA
cttcttgtgctctaggattgt

SEQ ID NO: 2007 - RNA, 21 nt, Homo sapiens
  source 1..21: mol_type = unassigned RNA
acaatcctagagcacaagaag

SEQ ID NO: 2008 - RNA, 22 nt, Homo sapiens
  source 1..22: mol_type = unassigned RNA
tatgcattgtatttttaggtcc

SEQ ID NO: 2009 - RNA, 22 nt, Homo sapiens
  source 1..22: mol_type = unassigned RNA
ggacctaaaaatacaatgcata

SEQ ID NO: 2010 - RNA, 21 nt, Homo sapiens
  source 1..21: mol_type = unassigned RNA
tttccataggtgatgagtcac

SEQ ID NO: 2011 - RNA, 21 nt, Homo sapiens
  source 1..21: mol_type = unassigned RNA
gtgactcatcacctatggaaa

SEQ ID NO: 2012 - RNA, 21 nt, Homo sapiens
  source 1..21: mol_type = unassigned RNA
ttggccacaatgggttagaac

SEQ ID NO: 2013 - RNA, 21 nt, Homo sapiens
  source 1..21: mol_type = unassigned RNA
gttctaacccattgtggccaa

SEQ ID NO: 2014 - RNA, 22 nt, Homo sapiens
  source 1..22: mol_type = unassigned RNA
tgtgtcactcgatgaccactgt

SEQ ID NO: 2015 - RNA, 22 nt, Homo sapiens
  source 1..22: mol_type = unassigned RNA
acagtggtcatcgagtgacaca

SEQ ID NO: 2016 - RNA, 23 nt, Homo sapiens
  source 1..23: mol_type = unassigned RNA
acttacagacaagagccttgctc

SEQ ID NO: 2017 - RNA, 23 nt, Homo sapiens
  source 1..23: mol_type = unassigned RNA
gagcaaggctcttgtctgtaagt

SEQ ID NO: 2018 - RNA, 19 nt, Homo sapiens
  source 1..19: mol_type = unassigned RNA
aggctgcggaattcaggac

SEQ ID NO: 2019 - RNA, 19 nt, Homo sapiens
  source 1..19: mol_type = unassigned RNA
gtcctgaattccgcagcct

SEQ ID NO: 2020 - RNA, 23 nt, Homo sapiens
  source 1..23: mol_type = unassigned RNA
taaatcccatggtgccttctcct

SEQ ID NO: 2021 - RNA, 23 nt, Homo sapiens
  source 1..23: mol_type = unassigned RNA
aggagaaggcaccatgggattta

SEQ ID NO: 2022 - RNA, 21 nt, Homo sapiens
  source 1..21: mol_type = unassigned RNA
aaactactgaaaatcaaagat

SEQ ID NO: 2023 - RNA, 21 nt, Homo sapiens
  source 1..21: mol_type = unassigned RNA
atctttgattttcagtagttt

SEQ ID NO: 2024 - RNA, 21 nt, Homo sapiens
  source 1..21: mol_type = unassigned RNA
gttcaaatccagatctataac

SEQ ID NO: 2025 - RNA, 21 nt, Homo sapiens
  source 1..21: mol_type = unassigned RNA
gttatagatctggatttgaac

SEQ ID NO: 2026 - RNA, 19 nt, Homo sapiens
  source 1..19: mol_type = unassigned RNA
ccggttccagtccctggag

SEQ ID NO: 2027 - RNA, 19 nt, Homo sapiens
  source 1..19: mol_type = unassigned RNA
ctccagggactggaaccgg

SEQ ID NO: 2028 - RNA, 20 nt, Homo sapiens
  source 1..20: mol_type = unassigned RNA
agggtgtttctctcatctct

SEQ ID NO: 2029 - RNA, 20 nt, Homo sapiens
  source 1..20: mol_type = unassigned RNA
agagatgagagaaacaccct

SEQ ID NO: 2030 - RNA, 24 nt, Homo sapiens
  source 1..24: mol_type = unassigned RNA
gacctggacatgtttgtgcccagt

SEQ ID NO: 2031 - RNA, 24 nt, Homo sapiens
  source 1..24: mol_type = unassigned RNA
actgggcacaaacatgtccaggtc

SEQ ID NO: 2032 - RNA, 20 nt, Homo sapiens
  source 1..20: mol_type = unassigned RNA
atggagatagatatagaaat

SEQ ID NO: 2033 - RNA, 20 nt, Homo sapiens
  source 1..20: mol_type = unassigned RNA
atttctatatctatctccat

SEQ ID NO: 2034 - RNA, 19 nt, Homo sapiens
  source 1..19: mol_type = unassigned RNA
agctgtctgaaaatgtctt

SEQ ID NO: 2035 - RNA, 19 nt, Homo sapiens
  source 1..19: mol_type = unassigned RNA
aagacattttcagacagct

SEQ ID NO: 2036 - RNA, 21 nt, Homo sapiens
  source 1..21: mol_type = unassigned RNA
agacctggcccagacctcagc

SEQ ID NO: 2037 - RNA, 21 nt, Homo sapiens
  source 1..21: mol_type = unassigned RNA
gctgaggtctgggccaggtct

SEQ ID NO: 2038 - RNA, 23 nt, Homo sapiens
  source 1..23: mol_type = unassigned RNA
acttgggcactgaaacaatgtcc

SEQ ID NO: 2039 - RNA, 23 nt, Homo sapiens
  source 1..23: mol_type = unassigned RNA
ggacattgtttcagtgcccaagt

SEQ ID NO: 2040 - RNA, 24 nt, Homo sapiens
  source 1..24: mol_type = unassigned RNA
actgggggctttcgggctctgcgt

SEQ ID NO: 2041 - RNA, 24 nt, Homo sapiens
  source 1..24: mol_type = unassigned RNA
acgcagagcccgaaagcccccagt

SEQ ID NO: 2042 - RNA, 23 nt, Homo sapiens
  source 1..23: mol_type = unassigned RNA
atcgctgcggttgcgagcgctgt

SEQ ID NO: 2043 - RNA, 23 nt, Homo sapiens
  source 1..23: mol_type = unassigned RNA
acagcgctcgcaaccgcagcgat

SEQ ID NO: 2044 - RNA, 22 nt, Homo sapiens
  source 1..22: mol_type = unassigned RNA
gtccctctccaaatgtgtcttg

SEQ ID NO: 2045 - RNA, 22 nt, Homo sapiens
  source 1..22: mol_type = unassigned RNA
caagacacatttggagagggac

SEQ ID NO: 2046 - RNA, 22 nt, Homo sapiens
  source 1..22: mol_type = unassigned RNA
acttgtatgctagctcaggtag

SEQ ID NO: 2047 - RNA, 22 nt, Homo sapiens
  source 1..22: mol_type = unassigned RNA
ctacctgagctagcatacaagt

SEQ ID NO: 2048 - RNA, 22 nt, Homo sapiens
  source 1..22: mol_type = unassigned RNA
tttaggataagcttgacttttg

SEQ ID NO: 2049 - RNA, 22 nt, Homo sapiens
  source 1..22: mol_type = unassigned RNA
caaaagtcaagcttatcctaaa

SEQ ID NO: 2050 - RNA, 21 nt, Homo sapiens
  source 1..21: mol_type = unassigned RNA
gtgttgaaacaatctctactg

SEQ ID NO: 2051 - RNA, 21 nt, Homo sapiens
  source 1..21: mol_type = unassigned RNA
cagtagagattgtttcaacac

SEQ ID NO: 2052 - RNA, 22 nt, Homo sapiens
  source 1..22: mol_type = unassigned RNA
tatgtctgctgaccatcacctt

SEQ ID NO: 2053 - RNA, 22 nt, Homo sapiens
  source 1..22: mol_type = unassigned RNA
aaggtgatggtcagcagacata

SEQ ID NO: 2054 - RNA, 22 nt, Homo sapiens
  source 1..22: mol_type = unassigned RNA
ggggctggggccggggccgagc

SEQ ID NO: 2055 - RNA, 22 nt, Homo sapiens
  source 1..22: mol_type = unassigned RNA
gctcggccccggccccagcccc

SEQ ID NO: 2056 - RNA, 22 nt, Homo sapiens
  source 1..22: mol_type = unassigned RNA
tgaggtagtaggttgtatggtt

SEQ ID NO: 2057 - RNA, 22 nt, Homo sapiens
  source 1..22: mol_type = unassigned RNA
aaccatacaacctactacctca

SEQ ID NO: 2058 - RNA, 21 nt, Homo sapiens
  source 1..21: mol_type = unassigned RNA
gtgtcttttgctctgcagtca

SEQ ID NO: 2059 - RNA, 21 nt, Homo sapiens
  source 1..21: mol_type = unassigned RNA
tgactgcagagcaaaagacac

SEQ ID NO: 2060 - RNA, 24 nt, Homo sapiens
  source 1..24: mol_type = unassigned RNA
ccccgggaacgtcgagactggagc

SEQ ID NO: 2061 - RNA, 24 nt, Homo sapiens
  source 1..24: mol_type = unassigned RNA
gctccagtctcgacgttcccgggg

SEQ ID NO: 2062 - RNA, 22 nt, Homo sapiens
  source 1..22: mol_type = unassigned RNA
acccgtcccgttcgtccccgga

SEQ ID NO: 2063 - RNA, 22 nt, Homo sapiens
  source 1..22: mol_type = unassigned RNA
tccggggacgaacgggacgggt

SEQ ID NO: 2064 - RNA, 22 nt, Homo sapiens
  source 1..22: mol_type = unassigned RNA
atgggtgaatttgtagaaggat

SEQ ID NO: 2065 - RNA, 22 nt, Homo sapiens
  source 1..22: mol_type = unassigned RNA
atccttctacaaattcacccat

SEQ ID NO: 2066 - RNA, 22 nt, Homo sapiens
  source 1..22: mol_type = unassigned RNA
ctggactgagccgtgctactgg

SEQ ID NO: 2067 - RNA, 22 nt, Homo sapiens
  source 1..22: mol_type = unassigned RNA
ccagtagcacggctcagtccag

SEQ ID NO: 2068 - RNA, 22 nt, Homo sapiens
  source 1..22: mol_type = unassigned RNA
ctggactgagccatgctactgg

SEQ ID NO: 2069 - RNA, 22 nt, Homo sapiens
  source 1..22: mol_type = unassigned RNA
ccagtagcatggctcagtccag

SEQ ID NO: 2070 - RNA, 22 nt, Homo sapiens
  source 1..22: mol_type = unassigned RNA
tacgtagatatatatgtatttt

SEQ ID NO: 2071 - RNA, 22 nt, Homo sapiens
  source 1..22: mol_type = unassigned RNA
aaaatacatatatatctacgta

SEQ ID NO: 2072 - RNA, 24 nt, Homo sapiens
  source 1..24: mol_type = unassigned RNA
aaatatatatatatatgtacgtat

SEQ ID NO: 2073 - RNA, 22 nt, Homo sapiens
  source 1..22: mol_type = unassigned RNA
gctcttttcattaatgtagaca

SEQ ID NO: 2074 - RNA, 22 nt, Homo sapiens
  source 1..22: mol_type = unassigned RNA
tgctggatcagtggttcgagtc

SEQ ID NO: 2075 - RNA, 22 nt, Homo sapiens
  source 1..22: mol_type = unassigned RNA
gactcgaaccactgatccagca

SEQ ID NO: 2076 - RNA, 19 nt, Homo sapiens
  source 1..19: mol_type = unassigned RNA
tggatttttggatcaggga

SEQ ID NO: 2077 - RNA, 19 nt, Homo sapiens
  source 1..19: mol_type = unassigned RNA
tccctgatccaaaaatcca

SEQ ID NO: 2078 - RNA, 22 nt, Homo sapiens
  source 1..22: mol_type = unassigned RNA
ttataaagcaatgagactgatt

SEQ ID NO: 2079 - RNA, 22 nt, Homo sapiens
  source 1..22: mol_type = unassigned RNA
aatcagtctcattgctttataa

SEQ ID NO: 2080 - RNA, 23 nt, Homo sapiens
  source 1..23: mol_type = unassigned RNA
tagtgcaatattgcttatagggt

SEQ ID NO: 2081 - RNA, 23 nt, Homo sapiens
  source 1..23: mol_type = unassigned RNA
accctataagcaatattgcacta

SEQ ID NO: 2082 - RNA, 22 nt, Homo sapiens
  source 1..22: mol_type = unassigned RNA
accctatcaatattgtctctgc

SEQ ID NO: 2083 - RNA, 22 nt, Homo sapiens
  source 1..22: mol_type = unassigned RNA
gcagagacaatattgatagggt

SEQ ID NO: 2084 - RNA, 17 nt, Homo sapiens
  source 1..17: mol_type = unassigned RNA
taagtgcttccatgctt

SEQ ID NO: 2085 - RNA, 17 nt, Homo sapiens
  source 1..17: mol_type = unassigned RNA
aagcatggaagcactta

SEQ ID NO: 2086 - RNA, 22 nt, Homo sapiens
  source 1..22: mol_type = unassigned RNA
tcggcctgaccacccaccccac

SEQ ID NO: 2087 - RNA, 22 nt, Homo sapiens
  source 1..22: mol_type = unassigned RNA
gtggggtgggtggtcaggccga

SEQ ID NO: 2088 - RNA, 21 nt, Homo sapiens
  source 1..21: mol_type = unassigned RNA
ggggggggggggggggggccg

SEQ ID NO: 2089 - RNA, 21 nt, Homo sapiens
  source 1..21: mol_type = unassigned RNA
cggcccccccccccccccccc

SEQ ID NO: 2090 - RNA, 22 nt, Homo sapiens
  source 1..22: mol_type = unassigned RNA
ctatacgacctgctgcctttct

SEQ ID NO: 2091 - RNA, 22 nt, Homo sapiens
  source 1..22: mol_type = unassigned RNA
agaaaggcagcaggtcgtatag

SEQ ID NO: 2092 - RNA, 22 nt, Homo sapiens
  source 1..22: mol_type = unassigned RNA
agaggtagtaggttgcatagtt

SEQ ID NO: 2093 - RNA, 22 nt, Homo sapiens
  source 1..22: mol_type = unassigned RNA
aactatgcaacctactacctct

SEQ ID NO: 2094 - RNA, 22 nt, Homo sapiens
  source 1..22: mol_type = unassigned RNA
ccgcactgtgggtacttgctgc

SEQ ID NO: 2095 - RNA, 22 nt, Homo sapiens
  source 1..22: mol_type = unassigned RNA
gcagcaagtacccacagtgcgg

SEQ ID NO: 2096 - RNA, 21 nt, Homo sapiens
  source 1..21: mol_type = unassigned RNA
taaagtgctgacagtgcagat

SEQ ID NO: 2097 - RNA, 21 nt, Homo sapiens
  source 1..21: mol_type = unassigned RNA
atctgcactgtcagcacttta

SEQ ID NO: 2098 - RNA, 22 nt, Homo sapiens
  source 1..22: mol_type = unassigned RNA
aactggatcaattataggagtg

SEQ ID NO: 2099 - RNA, 22 nt, Homo sapiens
  source 1..22: mol_type = unassigned RNA
cactcctataattgatccagtt

SEQ ID NO: 2100 - RNA, 26 nt, Homo sapiens
  source 1..26: mol_type = unassigned RNA
aagtagttggtttgtatgagatggtt

SEQ ID NO: 2101 - RNA, 26 nt, Homo sapiens
  source 1..26: mol_type = unassigned RNA
aaccatctcatacaaaccaactactt

SEQ ID NO: 2102 - RNA, 21 nt, Homo sapiens
  source 1..21: mol_type = unassigned RNA
aagtgatctaaaggcctacat

SEQ ID NO: 2103 - RNA, 21 nt, Homo sapiens
  source 1..21: mol_type = unassigned RNA
atgtaggcctttagatcactt

SEQ ID NO: 2104 - RNA, 22 nt, Homo sapiens
  source 1..22: mol_type = unassigned RNA
tcagatgatctaaaggcctata

SEQ ID NO: 2105 - RNA, 22 nt, Homo sapiens
  source 1..22: mol_type = unassigned RNA
tataggcctttagatcatctga

SEQ ID NO: 2106 - RNA, 21 nt, Homo sapiens
  source 1..21: mol_type = unassigned RNA
taggcctttagatcacttaaa

SEQ ID NO: 2107 - RNA, 21 nt, Homo sapiens
  source 1..21: mol_type = unassigned RNA
tttaagtgatctaaaggccta

SEQ ID NO: 2108 - RNA, 21 nt, Homo sapiens
  source 1..21: mol_type = unassigned RNA
actctagctgccaaaggcgct

SEQ ID NO: 2109 - RNA, 21 nt, Homo sapiens
  source 1..21: mol_type = unassigned RNA
agcgcctttggcagctagagt

SEQ ID NO: 2110 - RNA, 22 nt, Homo sapiens
  source 1..22: mol_type = unassigned RNA
agaaggaaattgaattcattta

SEQ ID NO: 2111 - RNA, 22 nt, Homo sapiens
  source 1..22: mol_type = unassigned RNA
taaatgaattcaatttccttct

SEQ ID NO: 2112 - RNA, 21 nt, Homo sapiens
  source 1..21: mol_type = unassigned RNA
agagaagaagatcagcctgca

SEQ ID NO: 2113 - RNA, 21 nt, Homo sapiens
  source 1..21: mol_type = unassigned RNA
tgcaggctgatcttcttctct

SEQ ID NO: 2114 - RNA, 24 nt, Homo sapiens
  source 1..24: mol_type = unassigned RNA
agcctggaagctggagcctgcagt

SEQ ID NO: 2115 - RNA, 24 nt, Homo sapiens
  source 1..24: mol_type = unassigned RNA
actgcaggctccagcttccaggct

SEQ ID NO: 2116 - RNA, 23 nt, Homo sapiens
  source 1..23: mol_type = unassigned RNA
aggatgagcaaagaaagtagatt

SEQ ID NO: 2117 - RNA, 23 nt, Homo sapiens
  source 1..23: mol_type = unassigned RNA
aatctactttctttgctcatcct

SEQ ID NO: 2118 - RNA, 22 nt, Homo sapiens
  source 1..22: mol_type = unassigned RNA
aaccactttctttgctcatcca

SEQ ID NO: 2119 - RNA, 22 nt, Homo sapiens
  source 1..22: mol_type = unassigned RNA
tggatgagcaaagaaagtggtt

SEQ ID NO: 2120 - RNA, 22 nt, Homo sapiens
  source 1..22: mol_type = unassigned RNA
cggatgagcaaagaaagtggtt

SEQ ID NO: 2121 - RNA, 22 nt, Homo sapiens
  source 1..22: mol_type = unassigned RNA
aaccactttctttgctcatccg

SEQ ID NO: 2122 - RNA, 22 nt, Homo sapiens
  source 1..22: mol_type = unassigned RNA
aggcattgacttctcactagct

SEQ ID NO: 2123 - RNA, 22 nt, Homo sapiens
  source 1..22: mol_type = unassigned RNA
agctagtgagaagtcaatgcct

SEQ ID NO: 2124 - RNA, 21 nt, Homo sapiens
  source 1..21: mol_type = unassigned RNA
agtgaatgatgggttctgacc

SEQ ID NO: 2125 - RNA, 21 nt, Homo sapiens
  source 1..21: mol_type = unassigned RNA
ggtcagaacccatcattcact

SEQ ID NO: 2126 - RNA, 21 nt, Homo sapiens
  source 1..21: mol_type = unassigned RNA
agttaggattaggtcgtggaa

SEQ ID NO: 2127 - RNA, 21 nt, Homo sapiens
  source 1..21: mol_type = unassigned RNA
ttccacgacctaatcctaact

SEQ ID NO: 2128 - RNA, 19 nt, Homo sapiens
  source 1..19: mol_type = unassigned RNA
atggataaggctttggctt

SEQ ID NO: 2129 - RNA, 19 nt, Homo sapiens
  source 1..19: mol_type = unassigned RNA
aagccaaagccttatccat

SEQ ID NO: 2130 - RNA, 22 nt, Homo sapiens
  source 1..22: mol_type = unassigned RNA
atggtaccctggcatactgagt

SEQ ID NO: 2131 - RNA, 22 nt, Homo sapiens
  source 1..22: mol_type = unassigned RNA
actcagtatgccagggtaccat

SEQ ID NO: 2132 - RNA, 23 nt, Homo sapiens
  source 1..23: mol_type = unassigned RNA
caagtcttatttgagcacctgtt

SEQ ID NO: 2133 - RNA, 23 nt, Homo sapiens
  source 1..23: mol_type = unassigned RNA
aacaggtgctcaaataagacttg

SEQ ID NO: 2134 - RNA, 22 nt, Homo sapiens
  source 1..22: mol_type = unassigned RNA
caggatgtggtcaagtgttgtt

SEQ ID NO: 2135 - RNA, 22 nt, Homo sapiens
  source 1..22: mol_type = unassigned RNA
aacaacacttgaccacatcctg

SEQ ID NO: 2136 - RNA, 23 nt, Homo sapiens
  source 1..23: mol_type = unassigned RNA
cctcagggctgtagaacagggct

SEQ ID NO: 2137 - RNA, 23 nt, Homo sapiens
  source 1..23: mol_type = unassigned RNA
agccctgttctacagccctgagg

SEQ ID NO: 2138 - RNA, 21 nt, Homo sapiens
  source 1..21: mol_type = unassigned RNA
cctgttgaagtgtaatcccca

SEQ ID NO: 2139 - RNA, 21 nt, Homo sapiens
  source 1..21: mol_type = unassigned RNA
tggggattacacttcaacagg

SEQ ID NO: 2140 - RNA, 18 nt, Homo sapiens
  source 1..18: mol_type = unassigned RNA
cgggcgtggtggtggggg

SEQ ID NO: 2141 - RNA, 18 nt, Homo sapiens
  source 1..18: mol_type = unassigned RNA
cccccaccaccacgcccg

SEQ ID NO: 2142 - RNA, 20 nt, Homo sapiens
  source 1..20: mol_type = unassigned RNA
cgggcgtggtggtgggggtg

SEQ ID NO: 2143 - RNA, 20 nt, Homo sapiens
  source 1..20: mol_type = unassigned RNA
cacccccaccaccacgcccg

SEQ ID NO: 2144 - RNA, 23 nt, Homo sapiens
  source 1..23: mol_type = unassigned RNA
ctggagatatggaagagctgtgt

SEQ ID NO: 2145 - RNA, 23 nt, Homo sapiens
  source 1..23: mol_type = unassigned RNA
acacagctcttccatatctccag

SEQ ID NO: 2146 - RNA, 26 nt, Homo sapiens
  source 1..26: mol_type = unassigned RNA
gatgatgatggcagcaaattctgaaa

SEQ ID NO: 2147 - RNA, 26 nt, Homo sapiens
  source 1..26: mol_type = unassigned RNA
tttcagaatttgctgccatcatcatc

SEQ ID NO: 2148 - RNA, 25 nt, Homo sapiens
  source 1..25: mol_type = unassigned RNA
gggcgacaaagcaagactctttctt

SEQ ID NO: 2149 - RNA, 25 nt, Homo sapiens
  source 1..25: mol_type = unassigned RNA
aagaaagagtcttgctttgtcgccc

SEQ ID NO: 2150 - RNA, 25 nt, Homo sapiens
  source 1..25: mol_type = unassigned RNA
gaacccatgaggttgaggctgcagt

SEQ ID NO: 2151 - RNA, 25 nt, Homo sapiens
  source 1..25: mol_type = unassigned RNA
actgcagcctcaacctcatgggttc

SEQ ID NO: 2152 - RNA, 17 nt, Homo sapiens
  source 1..17: mol_type = unassigned RNA
gtgggggagaggctgtc

SEQ ID NO: 2153 - RNA, 17 nt, Homo sapiens
  source 1..17: mol_type = unassigned RNA
gacagcctctcccccac

SEQ ID NO: 2154 - RNA, 20 nt, Homo sapiens
  source 1..20: mol_type = unassigned RNA
taaagagccctgtggagaca

SEQ ID NO: 2155 - RNA, 20 nt, Homo sapiens
  source 1..20: mol_type = unassigned RNA
tgtctccacagggctcttta

SEQ ID NO: 2156 - RNA, 22 nt, Homo sapiens
  source 1..22: mol_type = unassigned RNA
tagtactgtgcatatcatctat

SEQ ID NO: 2157 - RNA, 22 nt, Homo sapiens
  source 1..22: mol_type = unassigned RNA
atagatgatatgcacagtacta

SEQ ID NO: 2158 - RNA, 20 nt, Homo sapiens
  source 1..20: mol_type = unassigned RNA
tcgtttgcctttttctgctt

SEQ ID NO: 2159 - RNA, 20 nt, Homo sapiens
  source 1..20: mol_type = unassigned RNA
aagcagaaaaaggcaaacga

SEQ ID NO: 2160 - RNA, 21 nt, Homo sapiens
  source 1..21: mol_type = unassigned RNA
tggactgccctgatctggaga

SEQ ID NO: 2161 - RNA, 21 nt, Homo sapiens
  source 1..21: mol_type = unassigned RNA
tctccagatcagggcagtcca

SEQ ID NO: 2162 - RNA, 22 nt, Homo sapiens
  source 1..22: mol_type = unassigned RNA
tgggtggtctggagatttgtgc

SEQ ID NO: 2163 - RNA, 22 nt, Homo sapiens
  source 1..22: mol_type = unassigned RNA
gcacaaatctccagaccaccca

SEQ ID NO: 2164 - RNA, 22 nt, Homo sapiens
  source 1..22: mol_type = unassigned RNA
tgtgaggttggcattgttgtct

SEQ ID NO: 2165 - RNA, 22 nt, Homo sapiens
  source 1..22: mol_type = unassigned RNA
agacaacaatgccaacctcaca

SEQ ID NO: 2166 - RNA, 17 nt, Homo sapiens
  source 1..17: mol_type = unassigned RNA
ttcaagtaattcaggtg

SEQ ID NO: 2167 - RNA, 17 nt, Homo sapiens
  source 1..17: mol_type = unassigned RNA
cacctgaattacttgaa

SEQ ID NO: 2168 - RNA, 22 nt, Homo sapiens
  source 1..22: mol_type = unassigned RNA
ttctggaattctgtgtgaggga

SEQ ID NO: 2169 - RNA, 22 nt, Homo sapiens
  source 1..22: mol_type = unassigned RNA
tccctcacacagaattccagaa

SEQ ID NO: 2170 - RNA, 22 nt, Homo sapiens
  source 1..22: mol_type = unassigned RNA
ttttcaactctaatgggagaga

SEQ ID NO: 2171 - RNA, 22 nt, Homo sapiens
  source 1..22: mol_type = unassigned RNA
tctctcccattagagttgaaaa

SEQ ID NO: 2172 - RNA, 18 nt, Homo sapiens
  source 1..18: mol_type = unassigned RNA
acgttggctctggtggtg

SEQ ID NO: 2173 - RNA, 18 nt, Homo sapiens
  source 1..18: mol_type = unassigned RNA
caccaccagagccaacgt

SEQ ID NO: 2174 - RNA, 22 nt, Homo sapiens
  source 1..22: mol_type = unassigned RNA
ccacctcccctgcaaacgtcca

SEQ ID NO: 2175 - RNA, 22 nt, Homo sapiens
  source 1..22: mol_type = unassigned RNA
tggacgtttgcaggggaggtgg

SEQ ID NO: 2176 - RNA, 22 nt, Homo sapiens
  source 1..22: mol_type = unassigned RNA
actcggcgtggcgtcggtcgtg

SEQ ID NO: 2177 - RNA, 22 nt, Homo sapiens
  source 1..22: mol_type = unassigned RNA
cacgaccgacgccacgccgagt

SEQ ID NO: 2178 - RNA, 21 nt, Homo sapiens
  source 1..21: mol_type = unassigned RNA
tcgaccggacctcgaccggct

SEQ ID NO: 2179 - RNA, 21 nt, Homo sapiens
  source 1..21: mol_type = unassigned RNA
agccggtcgaggtccggtcga

SEQ ID NO: 2180 - RNA, 22 nt, Homo sapiens
  source 1..22: mol_type = unassigned RNA
tgagaactgaattccataggct

SEQ ID NO: 2181 - RNA, 22 nt, Homo sapiens
  source 1..22: mol_type = unassigned RNA
agcctatggaattcagttctca

SEQ ID NO: 2182 - RNA, 22 nt, Homo sapiens
  source 1..22: mol_type = unassigned RNA
aatcatacacggttgacctatt

SEQ ID NO: 2183 - RNA, 22 nt, Homo sapiens
  source 1..22: mol_type = unassigned RNA
aataggtcaaccgtgtatgatt

SEQ ID NO: 2184 - RNA, 22 nt, Homo sapiens
  source 1..22: mol_type = unassigned RNA
taggttatccgtgttgccttcg

SEQ ID NO: 2185 - RNA, 22 nt, Homo sapiens
  source 1..22: mol_type = unassigned RNA
cgaaggcaacacggataaccta

SEQ ID NO: 2186 - RNA, 21 nt, Homo sapiens
  source 1..21: mol_type = unassigned RNA
ccagtcctgtgcctgccgcct

SEQ ID NO: 2187 - RNA, 21 nt, Homo sapiens
  source 1..21: mol_type = unassigned RNA
aggcggcaggcacaggactgg

SEQ ID NO: 2188 - RNA, 22 nt, Homo sapiens
  source 1..22: mol_type = unassigned RNA
tctgccccctccgctgctgcca

SEQ ID NO: 2189 - RNA, 22 nt, Homo sapiens
  source 1..22: mol_type = unassigned RNA
tggcagcagcggagggggcaga

SEQ ID NO: 2190 - RNA, 22 nt, Homo sapiens
  source 1..22: mol_type = unassigned RNA
ggaggggtcccgcactgggagg

SEQ ID NO: 2191 - RNA, 22 nt, Homo sapiens
  source 1..22: mol_type = unassigned RNA
cctcccagtgcgggacccctcc

SEQ ID NO: 2192 - RNA, 22 nt, Homo sapiens
  source 1..22: mol_type = unassigned RNA
ccctgtgcccggcccacttctg

SEQ ID NO: 2193 - RNA, 22 nt, Homo sapiens
  source 1..22: mol_type = unassigned RNA
cagaagtgggccgggcacaggg

SEQ ID NO: 2194 - RNA, 20 nt, Homo sapiens
  source 1..20: mol_type = unassigned RNA
ccccagggcgacgcggcggg

SEQ ID NO: 2195 - RNA, 20 nt, Homo sapiens
  source 1..20: mol_type = unassigned RNA
cccgccgcgtcgccctgggg

SEQ ID NO: 2196 - RNA, 22 nt, Homo sapiens
  source 1..22: mol_type = unassigned RNA
accttgccttgctgcccgggcc

SEQ ID NO: 2197 - RNA, 22 nt, Homo sapiens
  source 1..22: mol_type = unassigned RNA
ggcccgggcagcaaggcaaggt

SEQ ID NO: 2198 - RNA, 21 nt, Homo sapiens
  source 1..21: mol_type = unassigned RNA
atttgtgcttggctctgtcac

SEQ ID NO: 2199 - RNA, 21 nt, Homo sapiens
  source 1..21: mol_type = unassigned RNA
gtgacagagccaagcacaaat

SEQ ID NO: 2200 - RNA, 22 nt, Homo sapiens
  source 1..22: mol_type = unassigned RNA
attgtccttgctgtttggagat

SEQ ID NO: 2201 - RNA, 22 nt, Homo sapiens
  source 1..22: mol_type = unassigned RNA
atctccaaacagcaaggacaat

SEQ ID NO: 2202 - RNA, 21 nt, Homo sapiens
  source 1..21: mol_type = unassigned RNA
atccccagatacaatggacaa

SEQ ID NO: 2203 - RNA, 21 nt, Homo sapiens
  source 1..21: mol_type = unassigned RNA
ttgtccattgtatctggggat

SEQ ID NO: 2204 - RNA, 23 nt, Homo sapiens
  source 1..23: mol_type = unassigned RNA
cagtgcaatagtattgtcaaagc

SEQ ID NO: 2205 - RNA, 23 nt, Homo sapiens
  source 1..23: mol_type = unassigned RNA
gctttgacaatactattgcactg

SEQ ID NO: 2206 - RNA, 22 nt, Homo sapiens
  source 1..22: mol_type = unassigned RNA
gctctgactttattgcactact

SEQ ID NO: 2207 - RNA, 22 nt, Homo sapiens
  source 1..22: mol_type = unassigned RNA
agtagtgcaataaagtcagagc

SEQ ID NO: 2208 - RNA, 23 nt, Homo sapiens
  source 1..23: mol_type = unassigned RNA
taagtgcttccatgttttagtag

SEQ ID NO: 2209 - RNA, 23 nt, Homo sapiens
  source 1..23: mol_type = unassigned RNA
ctactaaaacatggaagcactta

SEQ ID NO: 2210 - RNA, 22 nt, Homo sapiens
  source 1..22: mol_type = unassigned RNA
actttaacatggaagtgctttc

SEQ ID NO: 2211 - RNA, 22 nt, Homo sapiens
  source 1..22: mol_type = unassigned RNA
gaaagcacttccatgttaaagt

SEQ ID NO: 2212 - RNA, 23 nt, Homo sapiens
  source 1..23: mol_type = unassigned RNA
taagtgcttccatgtttcagtgg

SEQ ID NO: 2213 - RNA, 23 nt, Homo sapiens
  source 1..23: mol_type = unassigned RNA
ccactgaaacatggaagcactta

SEQ ID NO: 2214 - RNA, 22 nt, Homo sapiens
  source 1..22: mol_type = unassigned RNA
tttaacatgggggtacctgctg

SEQ ID NO: 2215 - RNA, 22 nt, Homo sapiens
  source 1..22: mol_type = unassigned RNA
cagcaggtacccccatgttaaa

SEQ ID NO: 2216 - RNA, 23 nt, Homo sapiens
  source 1..23: mol_type = unassigned RNA
taagtgcttccatgtttgagtgt

SEQ ID NO: 2217 - RNA, 23 nt, Homo sapiens
  source 1..23: mol_type = unassigned RNA
acactcaaacatggaagcactta

SEQ ID NO: 2218 - RNA, 22 nt, Homo sapiens
  source 1..22: mol_type = unassigned RNA
actttaacatggaggcacttgc

SEQ ID NO: 2219 - RNA, 22 nt, Homo sapiens
  source 1..22: mol_type = unassigned RNA
gcaagtgcctccatgttaaagt

SEQ ID NO: 2220 - RNA, 22 nt, Homo sapiens
  source 1..22: mol_type = unassigned RNA
aattgcactttagcaatggtga

SEQ ID NO: 2221 - RNA, 22 nt, Homo sapiens
  source 1..22: mol_type = unassigned RNA
tcaccattgctaaagtgcaatt

SEQ ID NO: 2222 - RNA, 22 nt, Homo sapiens
  source 1..22: mol_type = unassigned RNA
actgttgctaatatgcaactct

SEQ ID NO: 2223 - RNA, 22 nt, Homo sapiens
  source 1..22: mol_type = unassigned RNA
agagttgcatattagcaacagt

SEQ ID NO: 2224 - RNA, 23 nt, Homo sapiens
  source 1..23: mol_type = unassigned RNA
agctcggtctgaggcccctcagt

SEQ ID NO: 2225 - RNA, 23 nt, Homo sapiens
  source 1..23: mol_type = unassigned RNA
actgaggggcctcagaccgagct

SEQ ID NO: 2226 - RNA, 22 nt, Homo sapiens
  source 1..22: mol_type = unassigned RNA
aaaaactgagactacttttgca

SEQ ID NO: 2227 - RNA, 22 nt, Homo sapiens
  source 1..22: mol_type = unassigned RNA
tgcaaaagtagtctcagttttt

SEQ ID NO: 2228 - RNA, 19 nt, Homo sapiens
  source 1..19: mol_type = unassigned RNA
aaaaactgtaattactttt

SEQ ID NO: 2229 - RNA, 19 nt, Homo sapiens
  source 1..19: mol_type = unassigned RNA
aaaagtaattacagttttt

SEQ ID NO: 2230 - RNA, 22 nt, Homo sapiens
  source 1..22: mol_type = unassigned RNA
aaaactgtaattacttttgtac

SEQ ID NO: 2231 - RNA, 22 nt, Homo sapiens
  source 1..22: mol_type = unassigned RNA
gtacaaaagtaattacagtttt

SEQ ID NO: 2232 - RNA, 23 nt, Homo sapiens
  source 1..23: mol_type = unassigned RNA
tgcaaaagtaattgcagtttttg

SEQ ID NO: 2233 - RNA, 23 nt, Homo sapiens
  source 1..23: mol_type = unassigned RNA
caaaaactgcaattacttttgca

SEQ ID NO: 2234 - RNA, 23 nt, Homo sapiens
  source 1..23: mol_type = unassigned RNA
caaaaaccgcaattacttttgca

SEQ ID NO: 2235 - RNA, 23 nt, Homo sapiens
  source 1..23: mol_type = unassigned RNA
tgcaaaagtaattgcggtttttg

SEQ ID NO: 2236 - RNA, 22 nt, Homo sapiens
  source 1..22: mol_type = unassigned RNA
aaaagtaatcgcggtttttgtc

SEQ ID NO: 2237 - RNA, 22 nt, Homo sapiens
  source 1..22: mol_type = unassigned RNA
gacaaaaaccgcgattactttt

SEQ ID NO: 2238 - RNA, 22 nt, Homo sapiens
  source 1..22: mol_type = unassigned RNA
aaaagtacttgcggattttgct

SEQ ID NO: 2239 - RNA, 22 nt, Homo sapiens
  source 1..22: mol_type = unassigned RNA
agcaaaatccgcaagtactttt

SEQ ID NO: 2240 - RNA, 22 nt, Homo sapiens
  source 1..22: mol_type = unassigned RNA
aaaagtatttgcgggttttgtc

SEQ ID NO: 2241 - RNA, 22 nt, Homo sapiens
  source 1..22: mol_type = unassigned RNA
gacaaaacccgcaaatactttt

SEQ ID NO: 2242 - RNA, 21 nt, Homo sapiens
  source 1..21: mol_type = unassigned RNA
caaaggtatttgtggtttttg

SEQ ID NO: 2243 - RNA, 21 nt, Homo sapiens
  source 1..21: mol_type = unassigned RNA
caaaaaccacaaatacctttg

SEQ ID NO: 2244 - RNA, 22 nt, Homo sapiens
  source 1..22: mol_type = unassigned RNA
ccaaaactgcagttacttttgc

SEQ ID NO: 2245 - RNA, 22 nt, Homo sapiens
  source 1..22: mol_type = unassigned RNA
gcaaaagtaactgcagttttgg

SEQ ID NO: 2246 - RNA, 22 nt, Homo sapiens
  source 1..22: mol_type = unassigned RNA
aaaagtaattgcggtttttgcc

SEQ ID NO: 2247 - RNA, 22 nt, Homo sapiens
  source 1..22: mol_type = unassigned RNA
ggcaaaaaccgcaattactttt

SEQ ID NO: 2248 - RNA, 22 nt, Homo sapiens
  source 1..22: mol_type = unassigned RNA
tagcaaaaactgcagttacttt

SEQ ID NO: 2249 - RNA, 22 nt, Homo sapiens
  source 1..22: mol_type = unassigned RNA
aaagtaactgcagtttttgcta

SEQ ID NO: 2250 - RNA, 20 nt, Homo sapiens
  source 1..20: mol_type = unassigned RNA
ggaggttgggaagggcagag

SEQ ID NO: 2251 - RNA, 20 nt, Homo sapiens
  source 1..20: mol_type = unassigned RNA
ctctgcccttcccaacctcc

SEQ ID NO: 2252 - RNA, 18 nt, Homo sapiens
  source 1..18: mol_type = unassigned RNA
tgaggcgggggggcgagc

SEQ ID NO: 2253 - RNA, 18 nt, Homo sapiens
  source 1..18: mol_type = unassigned RNA
gctcgcccccccgcctca

SEQ ID NO: 2254 - RNA, 20 nt, Homo sapiens
  source 1..20: mol_type = unassigned RNA
agagatgaagcgggggggcg

SEQ ID NO: 2255 - RNA, 20 nt, Homo sapiens
  source 1..20: mol_type = unassigned RNA
cgcccccccgcttcatctct

SEQ ID NO: 2256 - RNA, 24 nt, Homo sapiens
  source 1..24: mol_type = unassigned RNA
ggaggccggggtggggcggggcgg

SEQ ID NO: 2257 - RNA, 24 nt, Homo sapiens
  source 1..24: mol_type = unassigned RNA
ccgccccgccccaccccggcctcc

SEQ ID NO: 2258 - RNA, 19 nt, Homo sapiens
  source 1..19: mol_type = unassigned RNA
ggggagcgaggggcggggc

SEQ ID NO: 2259 - RNA, 19 nt, Homo sapiens
  source 1..19: mol_type = unassigned RNA
gccccgcccctcgctcccc

SEQ ID NO: 2260 - RNA, 23 nt, Homo sapiens
  source 1..23: mol_type = unassigned RNA
tattcatttatccccagcctaca

SEQ ID NO: 2261 - RNA, 23 nt, Homo sapiens
  source 1..23: mol_type = unassigned RNA
tgtaggctggggataaatgaata

SEQ ID NO: 2262 - RNA, 24 nt, Homo sapiens
  source 1..24: mol_type = unassigned RNA
actggctagggaaaatgattggat

SEQ ID NO: 2263 - RNA, 24 nt, Homo sapiens
  source 1..24: mol_type = unassigned RNA
atccaatcattttccctagccagt

SEQ ID NO: 2264 - RNA, 22 nt, Homo sapiens
  source 1..22: mol_type = unassigned RNA
ttcatttgcctcccagcctaca

SEQ ID NO: 2265 - RNA, 22 nt, Homo sapiens
  source 1..22: mol_type = unassigned RNA
tgtaggctgggaggcaaatgaa

SEQ ID NO: 2266 - RNA, 24 nt, Homo sapiens
  source 1..24: mol_type = unassigned RNA
tgggctaagggagatgattgggta

SEQ ID NO: 2267 - RNA, 24 nt, Homo sapiens
  source 1..24: mol_type = unassigned RNA
tacccaatcatctcccttagccca

SEQ ID NO: 2268 - RNA, 22 nt, Homo sapiens
  source 1..22: mol_type = unassigned RNA
actccagccccacagcctcagc

SEQ ID NO: 2269 - RNA, 22 nt, Homo sapiens
  source 1..22: mol_type = unassigned RNA
gctgaggctgtggggctggagt

SEQ ID NO: 2270 - RNA, 22 nt, Homo sapiens
  source 1..22: mol_type = unassigned RNA
aggaggaattggtgctggtctt

SEQ ID NO: 2271 - RNA, 22 nt, Homo sapiens
  source 1..22: mol_type = unassigned RNA
aagaccagcaccaattcctcct

SEQ ID NO: 2272 - RNA, 22 nt, Homo sapiens
  source 1..22: mol_type = unassigned RNA
aggcagcggggtgtagtggata

SEQ ID NO: 2273 - RNA, 22 nt, Homo sapiens
  source 1..22: mol_type = unassigned RNA
tatccactacaccccgctgcct

SEQ ID NO: 2274 - RNA, 22 nt, Homo sapiens
  source 1..22: mol_type = unassigned RNA
tccattacactaccctgcctct

SEQ ID NO: 2275 - RNA, 22 nt, Homo sapiens
  source 1..22: mol_type = unassigned RNA
agaggcagggtagtgtaatgga

SEQ ID NO: 2276 - RNA, 22 nt, Homo sapiens
  source 1..22: mol_type = unassigned RNA
actgctgagctagcacttcccg

SEQ ID NO: 2277 - RNA, 22 nt, Homo sapiens
  source 1..22: mol_type = unassigned RNA
cgggaagtgctagctcagcagt

SEQ ID NO: 2278 - RNA, 23 nt, Homo sapiens
  source 1..23: mol_type = unassigned RNA
caaagtgctgttcgtgcaggtag

SEQ ID NO: 2279 - RNA, 23 nt, Homo sapiens
  source 1..23: mol_type = unassigned RNA
ctacctgcacgaacagcactttg

SEQ ID NO: 2280 - RNA, 23 nt, Homo sapiens
  source 1..23: mol_type = unassigned RNA
cacccggctgtgtgcacatgtgc

SEQ ID NO: 2281 - RNA, 23 nt, Homo sapiens
  source 1..23: mol_type = unassigned RNA
gcacatgtgcacacagccgggtg

SEQ ID NO: 2282 - RNA, 23 nt, Homo sapiens
  source 1..23: mol_type = unassigned RNA
agcttctttacagtgctgccttg

SEQ ID NO: 2283 - RNA, 23 nt, Homo sapiens
  source 1..23: mol_type = unassigned RNA
caaggcagcactgtaaagaagct

SEQ ID NO: 2284 - RNA, 23 nt, Homo sapiens
  source 1..23: mol_type = unassigned RNA
agcagcattgtacagggctatga

SEQ ID NO: 2285 - RNA, 23 nt, Homo sapiens
  source 1..23: mol_type = unassigned RNA
tcatagccctgtacaatgctgct

SEQ ID NO: 2286 - RNA, 17 nt, Homo sapiens
  source 1..17: mol_type = unassigned RNA
cctgagaaaagggccaa

SEQ ID NO: 2287 - RNA, 17 nt, Homo sapiens
  source 1..17: mol_type = unassigned RNA
ttggcccttttctcagg

SEQ ID NO: 2288 - RNA, 19 nt, Homo sapiens
  source 1..19: mol_type = unassigned RNA
ggccactgagtcagcacca

SEQ ID NO: 2289 - RNA, 19 nt, Homo sapiens
  source 1..19: mol_type = unassigned RNA
tggtgctgactcagtggcc

SEQ ID NO: 2290 - RNA, 18 nt, Homo sapiens
  source 1..18: mol_type = unassigned RNA
agggcatgtccagggggt

SEQ ID NO: 2291 - RNA, 18 nt, Homo sapiens
  source 1..18: mol_type = unassigned RNA
accccctggacatgccct

SEQ ID NO: 2292 - RNA, 23 nt, Homo sapiens
  source 1..23: mol_type = unassigned RNA
gcctggagctactccaccatctc

SEQ ID NO: 2293 - RNA, 23 nt, Homo sapiens
  source 1..23: mol_type = unassigned RNA
gagatggtggagtagctccaggc

SEQ ID NO: 2294 - RNA, 17 nt, Homo sapiens
  source 1..17: mol_type = unassigned RNA
cagtgttcagagatgga

SEQ ID NO: 2295 - RNA, 17 nt, Homo sapiens
  source 1..17: mol_type = unassigned RNA
tccatctctgaacactg

SEQ ID NO: 2296 - RNA, 18 nt, Homo sapiens
  source 1..18: mol_type = unassigned RNA
atctgacctgatgaaggt

SEQ ID NO: 2297 - RNA, 18 nt, Homo sapiens
  source 1..18: mol_type = unassigned RNA
accttcatcaggtcagat

SEQ ID NO: 2298 - RNA, 18 nt, Homo sapiens
  source 1..18: mol_type = unassigned RNA
ccagaggtggggactgag

SEQ ID NO: 2299 - RNA, 18 nt, Homo sapiens
  source 1..18: mol_type = unassigned RNA
ctcagtccccacctctgg

SEQ ID NO: 2300 - RNA, 17 nt, Homo sapiens
  source 1..17: mol_type = unassigned RNA
ccccgccaccgccttgg

SEQ ID NO: 2301 - RNA, 17 nt, Homo sapiens
  source 1..17: mol_type = unassigned RNA
ccaaggcggtggcgggg

SEQ ID NO: 2302 - RNA, 22 nt, Homo sapiens
  source 1..22: mol_type = unassigned RNA
cagttgggtctaggggtcagga

SEQ ID NO: 2303 - RNA, 22 nt, Homo sapiens
  source 1..22: mol_type = unassigned RNA
tcctgacccctagacccaactg

SEQ ID NO: 2304 - RNA, 19 nt, Homo sapiens
  source 1..19: mol_type = unassigned RNA
cttggggcatggagtccca

SEQ ID NO: 2305 - RNA, 19 nt, Homo sapiens
  source 1..19: mol_type = unassigned RNA
tgggactccatgccccaag

SEQ ID NO: 2306 - RNA, 16 nt, Homo sapiens
  source 1..16: mol_type = unassigned RNA
aggaaacagggaccca

SEQ ID NO: 2307 - RNA, 16 nt, Homo sapiens
  source 1..16: mol_type = unassigned RNA
tgggtccctgtttcct

SEQ ID NO: 2308 - RNA, 17 nt, Homo sapiens
  source 1..17: mol_type = unassigned RNA
gacattcagactacctg

SEQ ID NO: 2309 - RNA, 17 nt, Homo sapiens
  source 1..17: mol_type = unassigned RNA
caggtagtctgaatgtc

SEQ ID NO: 2310 - RNA, 18 nt, Homo sapiens
  source 1..18: mol_type = unassigned RNA
attctaagtgccttggcc

SEQ ID NO: 2311 - RNA, 18 nt, Homo sapiens
  source 1..18: mol_type = unassigned RNA
ggccaaggcacttagaat

SEQ ID NO: 2312 - RNA, 17 nt, Homo sapiens
  source 1..17: mol_type = unassigned RNA
actcagtcatggtcatt

SEQ ID NO: 2313 - RNA, 17 nt, Homo sapiens
  source 1..17: mol_type = unassigned RNA
aatgaccatgactgagt

SEQ ID NO: 2314 - RNA, 19 nt, Homo sapiens
  source 1..19: mol_type = unassigned RNA
ctgtgggctcagctctggg

SEQ ID NO: 2315 - RNA, 19 nt, Homo sapiens
  source 1..19: mol_type = unassigned RNA
cccagagctgagcccacag

SEQ ID NO: 2316 - RNA, 16 nt, Homo sapiens
  source 1..16: mol_type = unassigned RNA
ctaggaggccttggcc

SEQ ID NO: 2317 - RNA, 16 nt, Homo sapiens
  source 1..16: mol_type = unassigned RNA
ggccaaggcctcctag

SEQ ID NO: 2318 - RNA, 16 nt, Homo sapiens
  source 1..16: mol_type = unassigned RNA
tccagctcggtggcac

SEQ ID NO: 2319 - RNA, 16 nt, Homo sapiens
  source 1..16: mol_type = unassigned RNA
gtgccaccgagctgga

SEQ ID NO: 2320 - RNA, 21 nt, Homo sapiens
  source 1..21: mol_type = unassigned RNA
ggctcctcctctcaggatgtg

SEQ ID NO: 2321 - RNA, 21 nt, Homo sapiens
  source 1..21: mol_type = unassigned RNA
cacatcctgagaggaggagcc

SEQ ID NO: 2322 - RNA, 21 nt, Homo sapiens
  source 1..21: mol_type = unassigned RNA
gcaggcacagacagccctggc

SEQ ID NO: 2323 - RNA, 21 nt, Homo sapiens
  source 1..21: mol_type = unassigned RNA
gccagggctgtctgtgcctgc

SEQ ID NO: 2324 - RNA, 20 nt, Homo sapiens
  source 1..20: mol_type = unassigned RNA
tcagggagtcaggggagggc

SEQ ID NO: 2325 - RNA, 20 nt, Homo sapiens
  source 1..20: mol_type = unassigned RNA
gccctcccctgactccctga

SEQ ID NO: 2326 - RNA, 19 nt, Homo sapiens
  source 1..19: mol_type = unassigned RNA
gggggaagaaaaggtgggg

SEQ ID NO: 2327 - RNA, 19 nt, Homo sapiens
  source 1..19: mol_type = unassigned RNA
ccccaccttttcttccccc

SEQ ID NO: 2328 - RNA, 18 nt, Homo sapiens
  source 1..18: mol_type = unassigned RNA
cattcaactagtgattgt

SEQ ID NO: 2329 - RNA, 18 nt, Homo sapiens
  source 1..18: mol_type = unassigned RNA
acaatcactagttgaatg

SEQ ID NO: 2330 - RNA, 18 nt, Homo sapiens
  source 1..18: mol_type = unassigned RNA
cagcagtccctccccctg

SEQ ID NO: 2331 - RNA, 18 nt, Homo sapiens
  source 1..18: mol_type = unassigned RNA
cagggggagggactgctg

SEQ ID NO: 2332 - RNA, 17 nt, Homo sapiens
  source 1..17: mol_type = unassigned RNA
ccaattaccacttcttt

SEQ ID NO: 2333 - RNA, 17 nt, Homo sapiens
  source 1..17: mol_type = unassigned RNA
aaagaagtggtaattgg

SEQ ID NO: 2334 - RNA, 17 nt, Homo sapiens
  source 1..17: mol_type = unassigned RNA
ctcagtgactcatgtgc

SEQ ID NO: 2335 - RNA, 17 nt, Homo sapiens
  source 1..17: mol_type = unassigned RNA
gcacatgagtcactgag

SEQ ID NO: 2336 - RNA, 21 nt, Homo sapiens
  source 1..21: mol_type = unassigned RNA
gcagttctgagcacagtacac

SEQ ID NO: 2337 - RNA, 21 nt, Homo sapiens
  source 1..21: mol_type = unassigned RNA
gtgtactgtgctcagaactgc

SEQ ID NO: 2338 - RNA, 18 nt, Homo sapiens
  source 1..18: mol_type = unassigned RNA
ctagggggtttgcccttg

SEQ ID NO: 2339 - RNA, 18 nt, Homo sapiens
  source 1..18: mol_type = unassigned RNA
caagggcaaaccccctag

SEQ ID NO: 2340 - RNA, 16 nt, Homo sapiens
  source 1..16: mol_type = unassigned RNA
ctctcctcccggcttc

SEQ ID NO: 2341 - RNA, 16 nt, Homo sapiens
  source 1..16: mol_type = unassigned RNA
gaagccgggaggagag

SEQ ID NO: 2342 - RNA, 21 nt, Homo sapiens
  source 1..21: mol_type = unassigned RNA
gagtgtagttctgagcagagc

SEQ ID NO: 2343 - RNA, 21 nt, Homo sapiens
  source 1..21: mol_type = unassigned RNA
gctctgctcagaactacactc

SEQ ID NO: 2344 - RNA, 18 nt, Homo sapiens
  source 1..18: mol_type = unassigned RNA
gggtcccggggagggggg

SEQ ID NO: 2345 - RNA, 18 nt, Homo sapiens
  source 1..18: mol_type = unassigned RNA
cccccctccccgggaccc

SEQ ID NO: 2346 - RNA, 18 nt, Homo sapiens
  source 1..18: mol_type = unassigned RNA
taaaatttgcatccagga

SEQ ID NO: 2347 - RNA, 18 nt, Homo sapiens
  source 1..18: mol_type = unassigned RNA
tcctggatgcaaatttta

SEQ ID NO: 2348 - RNA, 17 nt, Homo sapiens
  source 1..17: mol_type = unassigned RNA
tggggctcagcgagttt

SEQ ID NO: 2349 - RNA, 17 nt, Homo sapiens
  source 1..17: mol_type = unassigned RNA
aaactcgctgagcccca

SEQ ID NO: 2350 - RNA, 18 nt, Homo sapiens
  source 1..18: mol_type = unassigned RNA
gggctcacatcaccccat

SEQ ID NO: 2351 - RNA, 18 nt, Homo sapiens
  source 1..18: mol_type = unassigned RNA
atggggtgatgtgagccc

SEQ ID NO: 2352 - RNA, 18 nt, Homo sapiens
  source 1..18: mol_type = unassigned RNA
gcggcgagtccgactcat

SEQ ID NO: 2353 - RNA, 18 nt, Homo sapiens
  source 1..18: mol_type = unassigned RNA
atgagtcggactcgccgc

SEQ ID NO: 2354 - RNA, 17 nt, Homo sapiens
  source 1..17: mol_type = unassigned RNA
accccactcctggtacc

SEQ ID NO: 2355 - RNA, 17 nt, Homo sapiens
  source 1..17: mol_type = unassigned RNA
ggtaccaggagtggggt

SEQ ID NO: 2356 - RNA, 19 nt, Homo sapiens
  source 1..19: mol_type = unassigned RNA
tctcccttgagggcacttt

SEQ ID NO: 2357 - RNA, 19 nt, Homo sapiens
  source 1..19: mol_type = unassigned RNA
aaagtgccctcaagggaga

SEQ ID NO: 2358 - RNA, 17 nt, Homo sapiens
  source 1..17: mol_type = unassigned RNA
ttgtctgctgagtttcc

SEQ ID NO: 2359 - RNA, 17 nt, Homo sapiens
  source 1..17: mol_type = unassigned RNA
ggaaactcagcagacaa

SEQ ID NO: 2360 - RNA, 19 nt, Homo sapiens
  source 1..19: mol_type = unassigned RNA
gcattgtgcagggctatca

SEQ ID NO: 2361 - RNA, 19 nt, Homo sapiens
  source 1..19: mol_type = unassigned RNA
tgatagccctgcacaatgc

SEQ ID NO: 2362 - RNA, 19 nt, Homo sapiens
  source 1..19: mol_type = unassigned RNA
tgccctcctttcttccctc

SEQ ID NO: 2363 - RNA, 19 nt, Homo sapiens
  source 1..19: mol_type = unassigned RNA
gagggaagaaaggagggca

SEQ ID NO: 2364 - RNA, 16 nt, Homo sapiens
  source 1..16: mol_type = unassigned RNA
ttcagcaggaacagct

SEQ ID NO: 2365 - RNA, 16 nt, Homo sapiens
  source 1..16: mol_type = unassigned RNA
agctgttcctgctgaa

SEQ ID NO: 2366 - RNA, 18 nt, Homo sapiens
  source 1..18: mol_type = unassigned RNA
cccctgggccggccttgg

SEQ ID NO: 2367 - RNA, 18 nt, Homo sapiens
  source 1..18: mol_type = unassigned RNA
ccaaggccggcccagggg

SEQ ID NO: 2368 - RNA, 17 nt, Homo sapiens
  source 1..17: mol_type = unassigned RNA
cagcctgacaggaacag

SEQ ID NO: 2369 - RNA, 17 nt, Homo sapiens
  source 1..17: mol_type = unassigned RNA
ctgttcctgtcaggctg

SEQ ID NO: 2370 - RNA, 17 nt, Homo sapiens
  source 1..17: mol_type = unassigned RNA
gggagtctacagcaggg

SEQ ID NO: 2371 - RNA, 17 nt, Homo sapiens
  source 1..17: mol_type = unassigned RNA
ccctgctgtagactccc

SEQ ID NO: 2372 - RNA, 18 nt, Homo sapiens
  source 1..18: mol_type = unassigned RNA
cagtgcaatgttttcctt

SEQ ID NO: 2373 - RNA, 18 nt, Homo sapiens
  source 1..18: mol_type = unassigned RNA
aaggaaaacattgcactg

SEQ ID NO: 2374 - RNA, 17 nt, Homo sapiens
  source 1..17: mol_type = unassigned RNA
atgtgggctcaggctca

SEQ ID NO: 2375 - RNA, 17 nt, Homo sapiens
  source 1..17: mol_type = unassigned RNA
tgagcctgagcccacat

SEQ ID NO: 2376 - RNA, 16 nt, Homo sapiens
  source 1..16: mol_type = unassigned RNA
tgccttcctgtctgtg

SEQ ID NO: 2377 - RNA, 16 nt, Homo sapiens
  source 1..16: mol_type = unassigned RNA
cacagacaggaaggca

SEQ ID NO: 2378 - RNA, 22 nt, Homo sapiens
  source 1..22: mol_type = unassigned RNA
ctgggacaggaggaggaggcag

SEQ ID NO: 2379 - RNA, 22 nt, Homo sapiens
  source 1..22: mol_type = unassigned RNA
ctgcctcctcctcctgtcccag

SEQ ID NO: 2380 - RNA, 18 nt, Homo sapiens
  source 1..18: mol_type = unassigned RNA
gctggtgacatgagaggc

SEQ ID NO: 2381 - RNA, 18 nt, Homo sapiens
  source 1..18: mol_type = unassigned RNA
gcctctcatgtcaccagc

SEQ ID NO: 2382 - RNA, 18 nt, Homo sapiens
  source 1..18: mol_type = unassigned RNA
tgggagctggactacttc

SEQ ID NO: 2383 - RNA, 18 nt, Homo sapiens
  source 1..18: mol_type = unassigned RNA
gaagtagtccagctccca

SEQ ID NO: 2384 - RNA, 20 nt, Homo sapiens
  source 1..20: mol_type = unassigned RNA
tcccactacttcacttgtga

SEQ ID NO: 2385 - RNA, 20 nt, Homo sapiens
  source 1..20: mol_type = unassigned RNA
tcacaagtgaagtagtggga

SEQ ID NO: 2386 - RNA, 18 nt, Homo sapiens
  source 1..18: mol_type = unassigned RNA
ccagtgtggctcagcgag

SEQ ID NO: 2387 - RNA, 18 nt, Homo sapiens
  source 1..18: mol_type = unassigned RNA
ctcgctgagccacactgg

SEQ ID NO: 2388 - RNA, 17 nt, Homo sapiens
  source 1..17: mol_type = unassigned RNA
ttctgagctgaggacag

SEQ ID NO: 2389 - RNA, 17 nt, Homo sapiens
  source 1..17: mol_type = unassigned RNA
ctgtcctcagctcagaa

SEQ ID NO: 2390 - RNA, 17 nt, Homo sapiens
  source 1..17: mol_type = unassigned RNA
ccggcatgtccagggca

SEQ ID NO: 2391 - RNA, 17 nt, Homo sapiens
  source 1..17: mol_type = unassigned RNA
tgccctggacatgccgg

SEQ ID NO: 2392 - RNA, 18 nt, Homo sapiens
  source 1..18: mol_type = unassigned RNA
cctagacacctccagttc

SEQ ID NO: 2393 - RNA, 18 nt, Homo sapiens
  source 1..18: mol_type = unassigned RNA
gaactggaggtgtctagg

SEQ ID NO: 2394 - RNA, 17 nt, Homo sapiens
  source 1..17: mol_type = unassigned RNA
tggagagaaaggcagta

SEQ ID NO: 2395 - RNA, 17 nt, Homo sapiens
  source 1..17: mol_type = unassigned RNA
tactgcctttctctcca

SEQ ID NO: 2396 - RNA, 19 nt, Homo sapiens
  source 1..19: mol_type = unassigned RNA
aatgttttttcctgtttcc

SEQ ID NO: 2397 - RNA, 19 nt, Homo sapiens
  source 1..19: mol_type = unassigned RNA
ggaaacaggaaaaaacatt

SEQ ID NO: 2398 - RNA, 18 nt, Homo sapiens
  source 1..18: mol_type = unassigned RNA
tccctggagtttcttctt

SEQ ID NO: 2399 - RNA, 18 nt, Homo sapiens
  source 1..18: mol_type = unassigned RNA
aagaagaaactccaggga

SEQ ID NO: 2400 - RNA, 18 nt, Homo sapiens
  source 1..18: mol_type = unassigned RNA
ctggagtctaggattcca

SEQ ID NO: 2401 - RNA, 18 nt, Homo sapiens
  source 1..18: mol_type = unassigned RNA
tggaatcctagactccag

SEQ ID NO: 2402 - RNA, 16 nt, Homo sapiens
  source 1..16: mol_type = unassigned RNA
gcagcattcatgtccc

SEQ ID NO: 2403 - RNA, 16 nt, Homo sapiens
  source 1..16: mol_type = unassigned RNA
gggacatgaatgctgc

SEQ ID NO: 2404 - RNA, 18 nt, Homo sapiens
  source 1..18: mol_type = unassigned RNA
gaaagagagctgagtgtg

SEQ ID NO: 2405 - RNA, 18 nt, Homo sapiens
  source 1..18: mol_type = unassigned RNA
cacactcagctctctttc

SEQ ID NO: 2406 - RNA, 19 nt, Homo sapiens
  source 1..19: mol_type = unassigned RNA
ggccttgttcctgtcccca

SEQ ID NO: 2407 - RNA, 19 nt, Homo sapiens
  source 1..19: mol_type = unassigned RNA
tggggacaggaacaaggcc

SEQ ID NO: 2408 - RNA, 20 nt, Homo sapiens
  source 1..20: mol_type = unassigned RNA
agccccctggccccaaaccc

SEQ ID NO: 2409 - RNA, 20 nt, Homo sapiens
  source 1..20: mol_type = unassigned RNA
gggtttggggccagggggct

SEQ ID NO: 2410 - RNA, 18 nt, Homo sapiens
  source 1..18: mol_type = unassigned RNA
ctctgggaaatgggacag

SEQ ID NO: 2411 - RNA, 18 nt, Homo sapiens
  source 1..18: mol_type = unassigned RNA
ctgtcccatttcccagag

SEQ ID NO: 2412 - RNA, 18 nt, Homo sapiens
  source 1..18: mol_type = unassigned RNA
ccgctttctgagctggac

SEQ ID NO: 2413 - RNA, 18 nt, Homo sapiens
  source 1..18: mol_type = unassigned RNA
gtccagctcagaaagcgg

SEQ ID NO: 2414 - RNA, 17 nt, Homo sapiens
  source 1..17: mol_type = unassigned RNA
ggtgaggctagctggtg

SEQ ID NO: 2415 - RNA, 17 nt, Homo sapiens
  source 1..17: mol_type = unassigned RNA
caccagctagcctcacc

SEQ ID NO: 2416 - RNA, 17 nt, Homo sapiens
  source 1..17: mol_type = unassigned RNA
acattgccagggagttt

SEQ ID NO: 2417 - RNA, 17 nt, Homo sapiens
  source 1..17: mol_type = unassigned RNA
aaactccctggcaatgt

SEQ ID NO: 2418 - RNA, 17 nt, Homo sapiens
  source 1..17: mol_type = unassigned RNA
cactgtgggtacatgct

SEQ ID NO: 2419 - RNA, 17 nt, Homo sapiens
  source 1..17: mol_type = unassigned RNA
agcatgtacccacagtg

SEQ ID NO: 2420 - RNA, 17 nt, Homo sapiens
  source 1..17: mol_type = unassigned RNA
tccctgagcaaagccac

SEQ ID NO: 2421 - RNA, 17 nt, Homo sapiens
  source 1..17: mol_type = unassigned RNA
gtggctttgctcaggga

SEQ ID NO: 2422 - RNA, 18 nt, Homo sapiens
  source 1..18: mol_type = unassigned RNA
gggattctgtagcttcct

SEQ ID NO: 2423 - RNA, 18 nt, Homo sapiens
  source 1..18: mol_type = unassigned RNA
aggaagctacagaatccc

SEQ ID NO: 2424 - RNA, 21 nt, Homo sapiens
  source 1..21: mol_type = unassigned RNA
ttagcggtggaccgccctgcg

SEQ ID NO: 2425 - RNA, 21 nt, Homo sapiens
  source 1..21: mol_type = unassigned RNA
cgcagggcggtccaccgctaa

SEQ ID NO: 2426 - RNA, 21 nt, Homo sapiens
  source 1..21: mol_type = unassigned RNA
ctgtgggctcagcgcgtgggg

SEQ ID NO: 2427 - RNA, 21 nt, Homo sapiens
  source 1..21: mol_type = unassigned RNA
ccccacgcgctgagcccacag

SEQ ID NO: 2428 - RNA, 18 nt, Homo sapiens
  source 1..18: mol_type = unassigned RNA
cagccccacagcctcaga

SEQ ID NO: 2429 - RNA, 18 nt, Homo sapiens
  source 1..18: mol_type = unassigned RNA
tctgaggctgtggggctg

SEQ ID NO: 2430 - RNA, 20 nt, Homo sapiens
  source 1..20: mol_type = unassigned RNA
ccctgagaccctaaccttaa

SEQ ID NO: 2431 - RNA, 20 nt, Homo sapiens
  source 1..20: mol_type = unassigned RNA
ttaaggttagggtctcaggg

SEQ ID NO: 2432 - RNA, 18 nt, Homo sapiens
  source 1..18: mol_type = unassigned RNA
ttgcacttgtctcagtga

SEQ ID NO: 2433 - RNA, 18 nt, Homo sapiens
  source 1..18: mol_type = unassigned RNA
tcactgagacaagtgcaa

SEQ ID NO: 2434 - RNA, 20 nt, Homo sapiens
  source 1..20: mol_type = unassigned RNA
tgttcctctgtctcccagac

SEQ ID NO: 2435 - RNA, 20 nt, Homo sapiens
  source 1..20: mol_type = unassigned RNA
gtctgggagacagaggaaca

SEQ ID NO: 2436 - RNA, 19 nt, Homo sapiens
  source 1..19: mol_type = unassigned RNA
ggcttgcatgggggactgg

SEQ ID NO: 2437 - RNA, 19 nt, Homo sapiens
  source 1..19: mol_type = unassigned RNA
ccagtcccccatgcaagcc

SEQ ID NO: 2438 - RNA, 17 nt, Homo sapiens
  source 1..17: mol_type = unassigned RNA
ccagttttcccaggatt

SEQ ID NO: 2439 - RNA, 17 nt, Homo sapiens
  source 1..17: mol_type = unassigned RNA
aatcctgggaaaactgg

SEQ ID NO: 2440 - RNA, 19 nt, Homo sapiens
  source 1..19: mol_type = unassigned RNA
cctgagaccctagttccac

SEQ ID NO: 2441 - RNA, 19 nt, Homo sapiens
  source 1..19: mol_type = unassigned RNA
gtggaactagggtctcagg

SEQ ID NO: 2442 - RNA, 19 nt, Homo sapiens
  source 1..19: mol_type = unassigned RNA
cctcagatcagagccttgc

SEQ ID NO: 2443 - RNA, 19 nt, Homo sapiens
  source 1..19: mol_type = unassigned RNA
gcaaggctctgatctgagg

SEQ ID NO: 2444 - RNA, 22 nt, Homo sapiens
  source 1..22: mol_type = unassigned RNA
cattgcacttgtctcggtctga

SEQ ID NO: 2445 - RNA, 22 nt, Homo sapiens
  source 1..22: mol_type = unassigned RNA
tcagaccgagacaagtgcaatg

SEQ ID NO: 2446 - RNA, 21 nt, Homo sapiens
  source 1..21: mol_type = unassigned RNA
aggcggagacttgggcaattg

SEQ ID NO: 2447 - RNA, 21 nt, Homo sapiens
  source 1..21: mol_type = unassigned RNA
caattgcccaagtctccgcct

SEQ ID NO: 2448 - RNA, 22 nt, Homo sapiens
  source 1..22: mol_type = unassigned RNA
cctattcttggttacttgcacg

SEQ ID NO: 2449 - RNA, 22 nt, Homo sapiens
  source 1..22: mol_type = unassigned RNA
cgtgcaagtaaccaagaatagg

SEQ ID NO: 2450 - RNA, 19 nt, Homo sapiens
  source 1..19: mol_type = unassigned RNA
aatggatttttggagcagg

SEQ ID NO: 2451 - RNA, 19 nt, Homo sapiens
  source 1..19: mol_type = unassigned RNA
cctgctccaaaaatccatt

SEQ ID NO: 2452 - RNA, 22 nt, Homo sapiens
  source 1..22: mol_type = unassigned RNA
tgcggggctagggctaacagca

SEQ ID NO: 2453 - RNA, 22 nt, Homo sapiens
  source 1..22: mol_type = unassigned RNA
tgctgttagccctagccccgca

SEQ ID NO: 2454 - RNA, 22 nt, Homo sapiens
  source 1..22: mol_type = unassigned RNA
aaaagtaattgcggattttgcc

SEQ ID NO: 2455 - RNA, 22 nt, Homo sapiens
  source 1..22: mol_type = unassigned RNA
ggcaaaatccgcaattactttt

SEQ ID NO: 2456 - RNA, 22 nt, Homo sapiens
  source 1..22: mol_type = unassigned RNA
caaaagtaattgtggattttgt

SEQ ID NO: 2457 - RNA, 22 nt, Homo sapiens
  source 1..22: mol_type = unassigned RNA
acaaaatccacaattacttttg

SEQ ID NO: 2458 - RNA, 23 nt, Homo sapiens
  source 1..23: mol_type = unassigned RNA
taagtgcttccatgttttggtga

SEQ ID NO: 2459 - RNA, 23 nt, Homo sapiens
  source 1..23: mol_type = unassigned RNA
tcaccaaaacatggaagcactta

SEQ ID NO: 2460 - RNA, 23 nt, Homo sapiens
  source 1..23: mol_type = unassigned RNA
acttaaacgtggatgtacttgct

SEQ ID NO: 2461 - RNA, 23 nt, Homo sapiens
  source 1..23: mol_type = unassigned RNA
agcaagtacatccacgtttaagt

SEQ ID NO: 2462 - RNA, 21 nt, Homo sapiens
  source 1..21: mol_type = unassigned RNA
ctatacaatctactgtctttc

SEQ ID NO: 2463 - RNA, 21 nt, Homo sapiens
  source 1..21: mol_type = unassigned RNA
gaaagacagtagattgtatag

SEQ ID NO: 2464 - RNA, 22 nt, Homo sapiens
  source 1..22: mol_type = unassigned RNA
tgaggtagtaggttgtatagtt

SEQ ID NO: 2465 - RNA, 22 nt, Homo sapiens
  source 1..22: mol_type = unassigned RNA
aactatacaacctactacctca

SEQ ID NO: 2466 - RNA, 22 nt, Homo sapiens
  source 1..22: mol_type = unassigned RNA
ctgtacagcctcctagctttcc

SEQ ID NO: 2467 - RNA, 22 nt, Homo sapiens
  source 1..22: mol_type = unassigned RNA
ggaaagctaggaggctgtacag

SEQ ID NO: 2468 - RNA, 20 nt, Homo sapiens
  source 1..20: mol_type = unassigned RNA
caccaggcattgtggtctcc

SEQ ID NO: 2469 - RNA, 20 nt, Homo sapiens
  source 1..20: mol_type = unassigned RNA
ggagaccacaatgcctggtg

SEQ ID NO: 2470 - RNA, 23 nt, Homo sapiens
  source 1..23: mol_type = unassigned RNA
tgagtaccgccatgtctgttggg

SEQ ID NO: 2471 - RNA, 23 nt, Homo sapiens
  source 1..23: mol_type = unassigned RNA
cccaacagacatggcggtactca

SEQ ID NO: 2472 - RNA, 22 nt, Homo sapiens
  source 1..22: mol_type = unassigned RNA
tacccagagcatgcagtgtgaa

SEQ ID NO: 2473 - RNA, 22 nt, Homo sapiens
  source 1..22: mol_type = unassigned RNA
ttcacactgcatgctctgggta

SEQ ID NO: 2474 - RNA, 22 nt, Homo sapiens
  source 1..22: mol_type = unassigned RNA
aagtgctgtcatagctgaggtc

SEQ ID NO: 2475 - RNA, 22 nt, Homo sapiens
  source 1..22: mol_type = unassigned RNA
gacctcagctatgacagcactt

SEQ ID NO: 2476 - RNA, 23 nt, Homo sapiens
  source 1..23: mol_type = unassigned RNA
cactcagccttgagggcactttc

SEQ ID NO: 2477 - RNA, 23 nt, Homo sapiens
  source 1..23: mol_type = unassigned RNA
gaaagtgccctcaaggctgagtg

SEQ ID NO: 2478 - RNA, 22 nt, Homo sapiens
  source 1..22: mol_type = unassigned RNA
tcgacagcacgacactgccttc

SEQ ID NO: 2479 - RNA, 22 nt, Homo sapiens
  source 1..22: mol_type = unassigned RNA
gaaggcagtgtcgtgctgtcga

SEQ ID NO: 2480 - RNA, 22 nt, Homo sapiens
  source 1..22: mol_type = unassigned RNA
taggtagtttcctgttgttggg

SEQ ID NO: 2481 - RNA, 22 nt, Homo sapiens
  source 1..22: mol_type = unassigned RNA
cccaacaacaggaaactaccta

SEQ ID NO: 2482 - RNA, 21 nt, Homo sapiens
  source 1..21: mol_type = unassigned RNA
tacagtactgtgataactgaa

SEQ ID NO: 2483 - RNA, 21 nt, Homo sapiens
  source 1..21: mol_type = unassigned RNA
ttcagttatcacagtactgta

SEQ ID NO: 2484 - RNA, 22 nt, Homo sapiens
  source 1..22: mol_type = unassigned RNA
cagttatcacagtgctgatgct

SEQ ID NO: 2485 - RNA, 22 nt, Homo sapiens
  source 1..22: mol_type = unassigned RNA
agcatcagcactgtgataactg

SEQ ID NO: 2486 - RNA, 23 nt, Homo sapiens
  source 1..23: mol_type = unassigned RNA
tgtgcaaatctatgcaaaactga

SEQ ID NO: 2487 - RNA, 23 nt, Homo sapiens
  source 1..23: mol_type = unassigned RNA
tcagttttgcatagatttgcaca

SEQ ID NO: 2488 - RNA, 22 nt, Homo sapiens
  source 1..22: mol_type = unassigned RNA
agttttgcatagttgcactaca

SEQ ID NO: 2489 - RNA, 22 nt, Homo sapiens
  source 1..22: mol_type = unassigned RNA
tgtagtgcaactatgcaaaact

SEQ ID NO: 2490 - RNA, 23 nt, Homo sapiens
  source 1..23: mol_type = unassigned RNA
agttttgcaggtttgcatccagc

SEQ ID NO: 2491 - RNA, 23 nt, Homo sapiens
  source 1..23: mol_type = unassigned RNA
gctggatgcaaacctgcaaaact

SEQ ID NO: 2492 - RNA, 22 nt, Homo sapiens
  source 1..22: mol_type = unassigned RNA
agttttgcaggtttgcatttca

SEQ ID NO: 2493 - RNA, 22 nt, Homo sapiens
  source 1..22: mol_type = unassigned RNA
tgaaatgcaaacctgcaaaact

SEQ ID NO: 2494 - RNA, 23 nt, Homo sapiens
  source 1..23: mol_type = unassigned RNA
tgtgcaaatccatgcaaaactga

SEQ ID NO: 2495 - RNA, 23 nt, Homo sapiens
  source 1..23: mol_type = unassigned RNA
tcagttttgcatggatttgcaca

SEQ ID NO: 2496 - RNA, 23 nt, Homo sapiens
  source 1..23: mol_type = unassigned RNA
tactgcatcaggaactgattgga

SEQ ID NO: 2497 - RNA, 23 nt, Homo sapiens
  source 1..23: mol_type = unassigned RNA
tccaatcagttcctgatgcagta

SEQ ID NO: 2498 - RNA, 22 nt, Homo sapiens
  source 1..22: mol_type = unassigned RNA
atggttccgtcaagcaccatgg

SEQ ID NO: 2499 - RNA, 22 nt, Homo sapiens
  source 1..22: mol_type = unassigned RNA
ccatggtgcttgacggaaccat

SEQ ID NO: 2500 - RNA, 21 nt, Homo sapiens
  source 1..21: mol_type = unassigned RNA
agctacatctggctactgggt

SEQ ID NO: 2501 - RNA, 21 nt, Homo sapiens
  source 1..21: mol_type = unassigned RNA
acccagtagccagatgtagct

SEQ ID NO: 2502 - RNA, 22 nt, Homo sapiens
  source 1..22: mol_type = unassigned RNA
ctcagtagccagtgtagatcct

SEQ ID NO: 2503 - RNA, 22 nt, Homo sapiens
  source 1..22: mol_type = unassigned RNA
aggatctacactggctactgag

SEQ ID NO: 2504 - RNA, 22 nt, Homo sapiens
  source 1..22: mol_type = unassigned RNA
ttatcagaatctccaggggtac

SEQ ID NO: 2505 - RNA, 22 nt, Homo sapiens
  source 1..22: mol_type = unassigned RNA
gtacccctggagattctgataa

SEQ ID NO: 2506 - RNA, 23 nt, Homo sapiens
  source 1..23: mol_type = unassigned RNA
atcaacagacattaattgggcgc

SEQ ID NO: 2507 - RNA, 23 nt, Homo sapiens
  source 1..23: mol_type = unassigned RNA
gcgcccaattaatgtctgttgat

SEQ ID NO: 2508 - RNA, 21 nt, Homo sapiens
  source 1..21: mol_type = unassigned RNA
caaaacgtgaggcgctgctat

SEQ ID NO: 2509 - RNA, 21 nt, Homo sapiens
  source 1..21: mol_type = unassigned RNA
atagcagcgcctcacgttttg

SEQ ID NO: 2510 - RNA, 22 nt, Homo sapiens
  source 1..22: mol_type = unassigned RNA
cagcagcaattcatgttttgaa

SEQ ID NO: 2511 - RNA, 22 nt, Homo sapiens
  source 1..22: mol_type = unassigned RNA
ttcaaaacatgaattgctgctg

SEQ ID NO: 2512 - RNA, 18 nt, Homo sapiens
  source 1..18: mol_type = unassigned RNA
ttcacagggaggtgtcat

SEQ ID NO: 2513 - RNA, 18 nt, Homo sapiens
  source 1..18: mol_type = unassigned RNA
atgacacctccctgtgaa

SEQ ID NO: 2514 - RNA, 20 nt, Homo sapiens
  source 1..20: mol_type = unassigned RNA
gcggagagagaatggggagc

SEQ ID NO: 2515 - RNA, 20 nt, Homo sapiens
  source 1..20: mol_type = unassigned RNA
gctccccattctctctccgc

SEQ ID NO: 2516 - RNA, 21 nt, Homo sapiens
  source 1..21: mol_type = unassigned RNA
cctgcgagtctccggcggtgg

SEQ ID NO: 2517 - RNA, 21 nt, Homo sapiens
  source 1..21: mol_type = unassigned RNA
ccaccgccggagactcgcagg

SEQ ID NO: 2518 - RNA, 21 nt, Homo sapiens
  source 1..21: mol_type = unassigned RNA
gggctagggcctgctgccccc

SEQ ID NO: 2519 - RNA, 21 nt, Homo sapiens
  source 1..21: mol_type = unassigned RNA
gggggcagcaggccctagccc

SEQ ID NO: 2520 - RNA, 19 nt, Homo sapiens
  source 1..19: mol_type = unassigned RNA
ttctgctgccggccaaggc

SEQ ID NO: 2521 - RNA, 19 nt, Homo sapiens
  source 1..19: mol_type = unassigned RNA
gccttggccggcagcagaa

SEQ ID NO: 2522 - RNA, 22 nt, Homo sapiens
  source 1..22: mol_type = unassigned RNA
tcctcatcacactgcaccttag

SEQ ID NO: 2523 - RNA, 22 nt, Homo sapiens
  source 1..22: mol_type = unassigned RNA
ctaaggtgcagtgtgatgagga

SEQ ID NO: 2524 - RNA, 20 nt, Homo sapiens
  source 1..20: mol_type = unassigned RNA
ggtagtgagttatcagctac

SEQ ID NO: 2525 - RNA, 20 nt, Homo sapiens
  source 1..20: mol_type = unassigned RNA
gtagctgataactcactacc

SEQ ID NO: 2526 - RNA, 20 nt, Homo sapiens
  source 1..20: mol_type = unassigned RNA
gatattcagaggctaggtgg

SEQ ID NO: 2527 - RNA, 20 nt, Homo sapiens
  source 1..20: mol_type = unassigned RNA
ccacctagcctctgaatatc

SEQ ID NO: 2528 - RNA, 21 nt, Homo sapiens
  source 1..21: mol_type = unassigned RNA
acggcccaggcggcattggtg

SEQ ID NO: 2529 - RNA, 21 nt, Homo sapiens
  source 1..21: mol_type = unassigned RNA
caccaatgccgcctgggccgt

SEQ ID NO: 2530 - RNA, 21 nt, Homo sapiens
  source 1..21: mol_type = unassigned RNA
agcatgacagaggagaggtgg

SEQ ID NO: 2531 - RNA, 21 nt, Homo sapiens
  source 1..21: mol_type = unassigned RNA
ccacctctcctctgtcatgct

SEQ ID NO: 2532 - RNA, 21 nt, Homo sapiens
  source 1..21: mol_type = unassigned RNA
gggaagagctgtacggccttc

SEQ ID NO: 2533 - RNA, 21 nt, Homo sapiens
  source 1..21: mol_type = unassigned RNA
gaaggccgtacagctcttccc

SEQ ID NO: 2534 - RNA, 19 nt, Homo sapiens
  source 1..19: mol_type = unassigned RNA
ccgcctgagctagctgtgg

SEQ ID NO: 2535 - RNA, 19 nt, Homo sapiens
  source 1..19: mol_type = unassigned RNA
ccacagctagctcaggcgg

SEQ ID NO: 2536 - RNA, 24 nt, Homo sapiens
  source 1..24: mol_type = unassigned RNA
ttggaagcttggaccaactagctg

SEQ ID NO: 2537 - RNA, 24 nt, Homo sapiens
  source 1..24: mol_type = unassigned RNA
cagctagttggtccaagcttccaa

SEQ ID NO: 2538 - RNA, 19 nt, Homo sapiens
  source 1..19: mol_type = unassigned RNA
tctagtgcgggcgttcccg

SEQ ID NO: 2539 - RNA, 19 nt, Homo sapiens
  source 1..19: mol_type = unassigned RNA
cgggaacgcccgcactaga

SEQ ID NO: 2540 - RNA, 24 nt, Homo sapiens
  source 1..24: mol_type = unassigned RNA
aggagcagtgccggccaaggcgcc

SEQ ID NO: 2541 - RNA, 24 nt, Homo sapiens
  source 1..24: mol_type = unassigned RNA
ggcgccttggccggcactgctcct

SEQ ID NO: 2542 - RNA, 19 nt, Homo sapiens
  source 1..19: mol_type = unassigned RNA
gaatacgtctggttgatcc

SEQ ID NO: 2543 - RNA, 19 nt, Homo sapiens
  source 1..19: mol_type = unassigned RNA
ggatcaaccagacgtattc

SEQ ID NO: 2544 - RNA, 20 nt, Homo sapiens
  source 1..20: mol_type = unassigned RNA
cttatatcagaggctgtggg

SEQ ID NO: 2545 - RNA, 20 nt, Homo sapiens
  source 1..20: mol_type = unassigned RNA
cccacagcctctgatataag

SEQ ID NO: 2546 - RNA, 20 nt, Homo sapiens
  source 1..20: mol_type = unassigned RNA
ttccgccagtcggtggccgg

SEQ ID NO: 2547 - RNA, 20 nt, Homo sapiens
  source 1..20: mol_type = unassigned RNA
ccggccaccgactggcggaa

SEQ ID NO: 2548 - RNA, 19 nt, Homo sapiens
  source 1..19: mol_type = unassigned RNA
aaggggctgggggagcaca

SEQ ID NO: 2549 - RNA, 19 nt, Homo sapiens
  source 1..19: mol_type = unassigned RNA
tgtgctcccccagcccctt

SEQ ID NO: 2550 - RNA, 23 nt, Homo sapiens
  source 1..23: mol_type = unassigned RNA
aggttgggatcggttgcaatgct

SEQ ID NO: 2551 - RNA, 23 nt, Homo sapiens
  source 1..23: mol_type = unassigned RNA
agcattgcaaccgatcccaacct

SEQ ID NO: 2552 - RNA, 22 nt, Homo sapiens
  source 1..22: mol_type = unassigned RNA
gggtggggatttgttgcattac

SEQ ID NO: 2553 - RNA, 22 nt, Homo sapiens
  source 1..22: mol_type = unassigned RNA
gtaatgcaacaaatccccaccc

SEQ ID NO: 2554 - RNA, 22 nt, Homo sapiens
  source 1..22: mol_type = unassigned RNA
tattgcacttgtcccggcctgt

SEQ ID NO: 2555 - RNA, 22 nt, Homo sapiens
  source 1..22: mol_type = unassigned RNA
acaggccgggacaagtgcaata

SEQ ID NO: 2556 - RNA, 22 nt, Homo sapiens
  source 1..22: mol_type = unassigned RNA
tattgcactcgtcccggcctcc

SEQ ID NO: 2557 - RNA, 22 nt, Homo sapiens
  source 1..22: mol_type = unassigned RNA
ggaggccgggacgagtgcaata

SEQ ID NO: 2558 - RNA, 22 nt, Homo sapiens
  source 1..22: mol_type = unassigned RNA
agggacgggacgcggtgcagtg

SEQ ID NO: 2559 - RNA, 22 nt, Homo sapiens
  source 1..22: mol_type = unassigned RNA
cactgcaccgcgtcccgtccct

SEQ ID NO: 2560 - RNA, 21 nt, Homo sapiens
  source 1..21: mol_type = unassigned RNA
atcacattgccagggatttcc

SEQ ID NO: 2561 - RNA, 21 nt, Homo sapiens
  source 1..21: mol_type = unassigned RNA
ggaaatccctggcaatgtgat

SEQ ID NO: 2562 - RNA, 22 nt, Homo sapiens
  source 1..22: mol_type = unassigned RNA
ggggttcctggggatgggattt

SEQ ID NO: 2563 - RNA, 22 nt, Homo sapiens
  source 1..22: mol_type = unassigned RNA
aaatcccatccccaggaacccc

SEQ ID NO: 2564 - RNA, 22 nt, Homo sapiens
  source 1..22: mol_type = unassigned RNA
actgcagtgaaggcacttgtag

SEQ ID NO: 2565 - RNA, 22 nt, Homo sapiens
  source 1..22: mol_type = unassigned RNA
ctacaagtgccttcactgcagt

SEQ ID NO: 2566 - RNA, 23 nt, Homo sapiens
  source 1..23: mol_type = unassigned RNA
agctacattgtctgctgggtttc

SEQ ID NO: 2567 - RNA, 23 nt, Homo sapiens
  source 1..23: mol_type = unassigned RNA
gaaacccagcagacaatgtagct

SEQ ID NO: 2568 - RNA, 22 nt, Homo sapiens
  source 1..22: mol_type = unassigned RNA
acctggcatacaatgtagattt

SEQ ID NO: 2569 - RNA, 22 nt, Homo sapiens
  source 1..22: mol_type = unassigned RNA
aaatctacattgtatgccaggt

SEQ ID NO: 2570 - RNA, 22 nt, Homo sapiens
  source 1..22: mol_type = unassigned RNA
tcgtaccgtgagtaataatgcg

SEQ ID NO: 2571 - RNA, 22 nt, Homo sapiens
  source 1..22: mol_type = unassigned RNA
cgcattattactcacggtacga

SEQ ID NO: 2572 - RNA, 21 nt, Homo sapiens
  source 1..21: mol_type = unassigned RNA
cattattacttttggtacgcg

SEQ ID NO: 2573 - RNA, 21 nt, Homo sapiens
  source 1..21: mol_type = unassigned RNA
cgcgtaccaaaagtaataatg

SEQ ID NO: 2574 - RNA, 23 nt, Homo sapiens
  source 1..23: mol_type = unassigned RNA
tactccagagggcgtcactcatg

SEQ ID NO: 2575 - RNA, 23 nt, Homo sapiens
  source 1..23: mol_type = unassigned RNA
catgagtgacgccctctggagta

SEQ ID NO: 2576 - RNA, 21 nt, Homo sapiens
  source 1..21: mol_type = unassigned RNA
tcccacgttgtggcccagcag

SEQ ID NO: 2577 - RNA, 21 nt, Homo sapiens
  source 1..21: mol_type = unassigned RNA
ctgctgggccacaacgtggga

SEQ ID NO: 2578 - RNA, 23 nt, Homo sapiens
  source 1..23: mol_type = unassigned RNA
cctcaccaccccttctgcctgca

SEQ ID NO: 2579 - RNA, 23 nt, Homo sapiens
  source 1..23: mol_type = unassigned RNA
tgcaggcagaaggggtggtgagg

SEQ ID NO: 2580 - RNA, 24 nt, Homo sapiens
  source 1..24: mol_type = unassigned RNA
ctgcaggcagaagtggggctgaca

SEQ ID NO: 2581 - RNA, 24 nt, Homo sapiens
  source 1..24: mol_type = unassigned RNA
tgtcagccccacttctgcctgcag

SEQ ID NO: 2582 - RNA, 21 nt, Homo sapiens
  source 1..21: mol_type = unassigned RNA
ccaaaccagtcgtgcctgtgg

SEQ ID NO: 2583 - RNA, 21 nt, Homo sapiens
  source 1..21: mol_type = unassigned RNA
ccacaggcacgactggtttgg

SEQ ID NO: 2584 - RNA, 22 nt, Homo sapiens
  source 1..22: mol_type = unassigned RNA
ctcaaaccggctgtgcctgtgg

SEQ ID NO: 2585 - RNA, 22 nt, Homo sapiens
  source 1..22: mol_type = unassigned RNA
ccacaggcacagccggtttgag

SEQ ID NO: 2586 - RNA, 21 nt, Homo sapiens
  source 1..21: mol_type = unassigned RNA
acaggcacgactggtttggca

SEQ ID NO: 2587 - RNA, 21 nt, Homo sapiens
  source 1..21: mol_type = unassigned RNA
tgccaaaccagtcgtgcctgt

SEQ ID NO: 2588 - RNA, 22 nt, Homo sapiens
  source 1..22: mol_type = unassigned RNA
tccgaactctccattcctctgc

SEQ ID NO: 2589 - RNA, 22 nt, Homo sapiens
  source 1..22: mol_type = unassigned RNA
gcagaggaatggagagttcgga

SEQ ID NO: 2590 - RNA, 20 nt, Homo sapiens
  source 1..20: mol_type = unassigned RNA
tgggaatgggggtaagggcc

SEQ ID NO: 2591 - RNA, 20 nt, Homo sapiens
  source 1..20: mol_type = unassigned RNA
ggcccttacccccattccca

SEQ ID NO: 2592 - RNA, 22 nt, Homo sapiens
  source 1..22: mol_type = unassigned RNA
aggcgatgtggggatgtagaga

SEQ ID NO: 2593 - RNA, 22 nt, Homo sapiens
  source 1..22: mol_type = unassigned RNA
tctctacatccccacatcgcct

SEQ ID NO: 2594 - RNA, 21 nt, Homo sapiens
  source 1..21: mol_type = unassigned RNA
tagtggtcagagggcttatga

SEQ ID NO: 2595 - RNA, 21 nt, Homo sapiens
  source 1..21: mol_type = unassigned RNA
tcataagccctctgaccacta

SEQ ID NO: 2596 - RNA, 22 nt, Homo sapiens
  source 1..22: mol_type = unassigned RNA
tctgacatcagtgattctcctg

SEQ ID NO: 2597 - RNA, 22 nt, Homo sapiens
  source 1..22: mol_type = unassigned RNA
caggagaatcactgatgtcaga

SEQ ID NO: 2598 - RNA, 22 nt, Homo sapiens
  source 1..22: mol_type = unassigned RNA
cgcgcctgcaggaactggtaga

SEQ ID NO: 2599 - RNA, 22 nt, Homo sapiens
  source 1..22: mol_type = unassigned RNA
tctaccagttcctgcaggcgcg

SEQ ID NO: 2600 - RNA, 23 nt, Homo sapiens
  source 1..23: mol_type = unassigned RNA
tgggcaggggcttattgtaggag

SEQ ID NO: 2601 - RNA, 23 nt, Homo sapiens
  source 1..23: mol_type = unassigned RNA
ctcctacaataagcccctgccca

SEQ ID NO: 2602 - RNA, 22 nt, Homo sapiens
  source 1..22: mol_type = unassigned RNA
tgcaggggtcgggtgggccagg

SEQ ID NO: 2603 - RNA, 22 nt, Homo sapiens
  source 1..22: mol_type = unassigned RNA
cctggcccacccgacccctgca

SEQ ID NO: 2604 - RNA, 20 nt, Homo sapiens
  source 1..20: mol_type = unassigned RNA
aggcgcacccgaccacatgc

SEQ ID NO: 2605 - RNA, 20 nt, Homo sapiens
  source 1..20: mol_type = unassigned RNA
gcatgtggtcgggtgcgcct

SEQ ID NO: 2606 - RNA, 22 nt, Homo sapiens
  source 1..22: mol_type = unassigned RNA
atagtccgagtaacgtcggggc

SEQ ID NO: 2607 - RNA, 22 nt, Homo sapiens
  source 1..22: mol_type = unassigned RNA
gccccgacgttactcggactat

SEQ ID NO: 2608 - RNA, 23 nt, Homo sapiens
  source 1..23: mol_type = unassigned RNA
ctgggcccgcggcgggcgtgggg

SEQ ID NO: 2609 - RNA, 23 nt, Homo sapiens
  source 1..23: mol_type = unassigned RNA
ccccacgcccgccgcgggcccag

SEQ ID NO: 2610 - RNA, 21 nt, Homo sapiens
  source 1..21: mol_type = unassigned RNA
tacttggaaaggcatcagttg

SEQ ID NO: 2611 - RNA, 21 nt, Homo sapiens
  source 1..21: mol_type = unassigned RNA
caactgatgcctttccaagta

SEQ ID NO: 2612 - RNA, 22 nt, Homo sapiens
  source 1..22: mol_type = unassigned RNA
tgcaacgaacctgagccactga

SEQ ID NO: 2613 - RNA, 22 nt, Homo sapiens
  source 1..22: mol_type = unassigned RNA
tcagtggctcaggttcgttgca

SEQ ID NO: 2614 - RNA, 22 nt, Homo sapiens
  source 1..22: mol_type = unassigned RNA
tgcaacttacctgagtcattga

SEQ ID NO: 2615 - RNA, 22 nt, Homo sapiens
  source 1..22: mol_type = unassigned RNA
tcaatgactcaggtaagttgca

SEQ ID NO: 2616 - RNA, 21 nt, Homo sapiens
  source 1..21: mol_type = unassigned RNA
cactgtgtcctttctgcgtag

SEQ ID NO: 2617 - RNA, 21 nt, Homo sapiens
  source 1..21: mol_type = unassigned RNA
ctacgcagaaaggacacagtg

SEQ ID NO: 2618 - RNA, 22 nt, Homo sapiens
  source 1..22: mol_type = unassigned RNA
cactggctcctttctgggtaga

SEQ ID NO: 2619 - RNA, 22 nt, Homo sapiens
  source 1..22: mol_type = unassigned RNA
tctacccagaaaggagccagtg

SEQ ID NO: 2620 - RNA, 22 nt, Homo sapiens
  source 1..22: mol_type = unassigned RNA
cactgtttcctttctgagtgga

SEQ ID NO: 2621 - RNA, 22 nt, Homo sapiens
  source 1..22: mol_type = unassigned RNA
tccactcagaaaggaaacagtg

SEQ ID NO: 2622 - RNA, 21 nt, Homo sapiens
  source 1..21: mol_type = unassigned RNA
tattcagaaaggtgccagtca

SEQ ID NO: 2623 - RNA, 21 nt, Homo sapiens
  source 1..21: mol_type = unassigned RNA
tgactggcacctttctgaata

SEQ ID NO: 2624 - RNA, 20 nt, Homo sapiens
  source 1..20: mol_type = unassigned RNA
attcctagaaattgttcata

SEQ ID NO: 2625 - RNA, 20 nt, Homo sapiens
  source 1..20: mol_type = unassigned RNA
tatgaacaatttctaggaat

SEQ ID NO: 2626 - RNA, 22 nt, Homo sapiens
  source 1..22: mol_type = unassigned RNA
taatactgtctggtaaaaccgt

SEQ ID NO: 2627 - RNA, 22 nt, Homo sapiens
  source 1..22: mol_type = unassigned RNA
acggttttaccagacagtatta

SEQ ID NO: 2628 - RNA, 22 nt, Homo sapiens
  source 1..22: mol_type = unassigned RNA
tgaaacatacacgggaaacctc

SEQ ID NO: 2629 - RNA, 22 nt, Homo sapiens
  source 1..22: mol_type = unassigned RNA
gaggtttcccgtgtatgtttca

SEQ ID NO: 2630 - RNA, 22 nt, Homo sapiens
  source 1..22: mol_type = unassigned RNA
ctatacaacctactgccttccc

SEQ ID NO: 2631 - RNA, 22 nt, Homo sapiens
  source 1..22: mol_type = unassigned RNA
gggaaggcagtaggttgtatag

SEQ ID NO: 2632 - RNA, 22 nt, Homo sapiens
  source 1..22: mol_type = unassigned RNA
tgaggtagtaggttgtgtggtt

SEQ ID NO: 2633 - RNA, 22 nt, Homo sapiens
  source 1..22: mol_type = unassigned RNA
aaccacacaacctactacctca

SEQ ID NO: 2634 - RNA, 22 nt, Homo sapiens
  source 1..22: mol_type = unassigned RNA
taacactgtctggtaacgatgt

SEQ ID NO: 2635 - RNA, 22 nt, Homo sapiens
  source 1..22: mol_type = unassigned RNA
acatcgttaccagacagtgtta

SEQ ID NO: 2636 - RNA, 22 nt, Homo sapiens
  source 1..22: mol_type = unassigned RNA
catcttaccggacagtgctgga

SEQ ID NO: 2637 - RNA, 22 nt, Homo sapiens
  source 1..22: mol_type = unassigned RNA
tccagcactgtccggtaagatg

SEQ ID NO: 2638 - RNA, 22 nt, Homo sapiens
  source 1..22: mol_type = unassigned RNA
taatactgcctggtaatgatga

SEQ ID NO: 2639 - RNA, 22 nt, Homo sapiens
  source 1..22: mol_type = unassigned RNA
tcatcattaccaggcagtatta

SEQ ID NO: 2640 - RNA, 22 nt, Homo sapiens
  source 1..22: mol_type = unassigned RNA
catcttactgggcagcattgga

SEQ ID NO: 2641 - RNA, 22 nt, Homo sapiens
  source 1..22: mol_type = unassigned RNA
tccaatgctgcccagtaagatg

SEQ ID NO: 2642 - RNA, 23 nt, Homo sapiens
  source 1..23: mol_type = unassigned RNA
taatactgccgggtaatgatgga

SEQ ID NO: 2643 - RNA, 23 nt, Homo sapiens
  source 1..23: mol_type = unassigned RNA
tccatcattacccggcagtatta

SEQ ID NO: 2644 - RNA, 22 nt, Homo sapiens
  source 1..22: mol_type = unassigned RNA
cgtcttacccagcagtgtttgg

SEQ ID NO: 2645 - RNA, 22 nt, Homo sapiens
  source 1..22: mol_type = unassigned RNA
ccaaacactgctgggtaagacg

SEQ ID NO: 2646 - RNA, 22 nt, Homo sapiens
  source 1..22: mol_type = unassigned RNA
tccagcatcagtgattttgttg

SEQ ID NO: 2647 - RNA, 22 nt, Homo sapiens
  source 1..22: mol_type = unassigned RNA
caacaaaatcactgatgctgga

SEQ ID NO: 2648 - RNA, 20 nt, Homo sapiens
  source 1..20: mol_type = unassigned RNA
tacagtatagatgatgtact

SEQ ID NO: 2649 - RNA, 20 nt, Homo sapiens
  source 1..20: mol_type = unassigned RNA
agtacatcatctatactgta

SEQ ID NO: 2650 - RNA, 22 nt, Homo sapiens
  source 1..22: mol_type = unassigned RNA
ggatatcatcatatactgtaag

SEQ ID NO: 2651 - RNA, 22 nt, Homo sapiens
  source 1..22: mol_type = unassigned RNA
cttacagtatatgatgatatcc

SEQ ID NO: 2652 - RNA, 21 nt, Homo sapiens
  source 1..21: mol_type = unassigned RNA
cggggcagctcagtacaggat

SEQ ID NO: 2653 - RNA, 21 nt, Homo sapiens
  source 1..21: mol_type = unassigned RNA
atcctgtactgagctgccccg

SEQ ID NO: 2654 - RNA, 21 nt, Homo sapiens
  source 1..21: mol_type = unassigned RNA
tccttctgctccgtcccccag

SEQ ID NO: 2655 - RNA, 21 nt, Homo sapiens
  source 1..21: mol_type = unassigned RNA
ctgggggacggagcagaagga

SEQ ID NO: 2656 - RNA, 21 nt, Homo sapiens
  source 1..21: mol_type = unassigned RNA
cgggggcggggccgaagcgcg

SEQ ID NO: 2657 - RNA, 21 nt, Homo sapiens
  source 1..21: mol_type = unassigned RNA
cgcgcttcggccccgcccccg

SEQ ID NO: 2658 - RNA, 21 nt, Homo sapiens
  source 1..21: mol_type = unassigned RNA
tcctgcgcgtcccagatgccc

SEQ ID NO: 2659 - RNA, 21 nt, Homo sapiens
  source 1..21: mol_type = unassigned RNA
gggcatctgggacgcgcagga

SEQ ID NO: 2660 - RNA, 22 nt, Homo sapiens
  source 1..22: mol_type = unassigned RNA
catcagaattcatggaggctag

SEQ ID NO: 2661 - RNA, 22 nt, Homo sapiens
  source 1..22: mol_type = unassigned RNA
ctagcctccatgaattctgatg

SEQ ID NO: 2662 - RNA, 22 nt, Homo sapiens
  source 1..22: mol_type = unassigned RNA
agcttccatgactcctgatgga

SEQ ID NO: 2663 - RNA, 22 nt, Homo sapiens
  source 1..22: mol_type = unassigned RNA
tccatcaggagtcatggaagct

SEQ ID NO: 2664 - RNA, 21 nt, Homo sapiens
  source 1..21: mol_type = unassigned RNA
tgacagcgccctgcctggctc

SEQ ID NO: 2665 - RNA, 21 nt, Homo sapiens
  source 1..21: mol_type = unassigned RNA
gagccaggcagggcgctgtca

SEQ ID NO: 2666 - RNA, 24 nt, Homo sapiens
  source 1..24: mol_type = unassigned RNA
agcgcgggctgagcgctgccagtc

SEQ ID NO: 2667 - RNA, 24 nt, Homo sapiens
  source 1..24: mol_type = unassigned RNA
gactggcagcgctcagcccgcgct

SEQ ID NO: 2668 - RNA, 22 nt, Homo sapiens
  source 1..22: mol_type = unassigned RNA
ctgggaggtgtgatatcgtggt

SEQ ID NO: 2669 - RNA, 22 nt, Homo sapiens
  source 1..22: mol_type = unassigned RNA
accacgatatcacacctcccag

SEQ ID NO: 2670 - RNA, 22 nt, Homo sapiens
  source 1..22: mol_type = unassigned RNA
tgtgatatcatggttcctggga

SEQ ID NO: 2671 - RNA, 22 nt, Homo sapiens
  source 1..22: mol_type = unassigned RNA
tcccaggaaccatgatatcaca

SEQ ID NO: 2672 - RNA, 22 nt, Homo sapiens
  source 1..22: mol_type = unassigned RNA
aggtgctccaggctggctcaca

SEQ ID NO: 2673 - RNA, 22 nt, Homo sapiens
  source 1..22: mol_type = unassigned RNA
tgtgagccagcctggagcacct

SEQ ID NO: 2674 - RNA, 22 nt, Homo sapiens
  source 1..22: mol_type = unassigned RNA
gagcaatgtaggtagactgttt

SEQ ID NO: 2675 - RNA, 22 nt, Homo sapiens
  source 1..22: mol_type = unassigned RNA
aaacagtctacctacattgctc

SEQ ID NO: 2676 - RNA, 22 nt, Homo sapiens
  source 1..22: mol_type = unassigned RNA
tgtcctctagggcctgcagtct

SEQ ID NO: 2677 - RNA, 22 nt, Homo sapiens
  source 1..22: mol_type = unassigned RNA
agactgcaggccctagaggaca

SEQ ID NO: 2678 - RNA, 20 nt, Homo sapiens
  source 1..20: mol_type = unassigned RNA
aaaggcataaaaccaagaca

SEQ ID NO: 2679 - RNA, 20 nt, Homo sapiens
  source 1..20: mol_type = unassigned RNA
tgtcttggttttatgccttt

SEQ ID NO: 2680 - RNA, 21 nt, Homo sapiens
  source 1..21: mol_type = unassigned RNA
taacgcataatatggacatgt

SEQ ID NO: 2681 - RNA, 21 nt, Homo sapiens
  source 1..21: mol_type = unassigned RNA
acatgtccatattatgcgtta

SEQ ID NO: 2682 - RNA, 22 nt, Homo sapiens
  source 1..22: mol_type = unassigned RNA
ttgaggaaaagatggtcttatt

SEQ ID NO: 2683 - RNA, 22 nt, Homo sapiens
  source 1..22: mol_type = unassigned RNA
aataagaccatcttttcctcaa

SEQ ID NO: 2684 - RNA, 26 nt, Homo sapiens
  source 1..26: mol_type = unassigned RNA
aagaggaagaaatggctggttctcag

SEQ ID NO: 2685 - RNA, 26 nt, Homo sapiens
  source 1..26: mol_type = unassigned RNA
ctgagaaccagccatttcttcctctt

SEQ ID NO: 2686 - RNA, 20 nt, Homo sapiens
  source 1..20: mol_type = unassigned RNA
gctcggactgagcaggtggg

SEQ ID NO: 2687 - RNA, 20 nt, Homo sapiens
  source 1..20: mol_type = unassigned RNA
cccacctgctcagtccgagc

SEQ ID NO: 2688 - RNA, 21 nt, Homo sapiens
  source 1..21: mol_type = unassigned RNA
acagggccgcagatggagact

SEQ ID NO: 2689 - RNA, 21 nt, Homo sapiens
  source 1..21: mol_type = unassigned RNA
agtctccatctgcggccctgt

SEQ ID NO: 2690 - RNA, 21 nt, Homo sapiens
  source 1..21: mol_type = unassigned RNA
gcagagaacaaaggactcagt

SEQ ID NO: 2691 - RNA, 21 nt, Homo sapiens
  source 1..21: mol_type = unassigned RNA
actgagtcctttgttctctgc

SEQ ID NO: 2692 - RNA, 22 nt, Homo sapiens
  source 1..22: mol_type = unassigned RNA
actgattatcttaactctctga

SEQ ID NO: 2693 - RNA, 22 nt, Homo sapiens
  source 1..22: mol_type = unassigned RNA
tcagagagttaagataatcagt

SEQ ID NO: 2694 - RNA, 23 nt, Homo sapiens
  source 1..23: mol_type = unassigned RNA
tctctgagtaccatatgccttgt

SEQ ID NO: 2695 - RNA, 23 nt, Homo sapiens
  source 1..23: mol_type = unassigned RNA
acaaggcatatggtactcagaga

SEQ ID NO: 2696 - RNA, 22 nt, Homo sapiens
  source 1..22: mol_type = unassigned RNA
aactagtaatgttggattaggg

SEQ ID NO: 2697 - RNA, 22 nt, Homo sapiens
  source 1..22: mol_type = unassigned RNA
ccctaatccaacattactagtt

SEQ ID NO: 2698 - RNA, 22 nt, Homo sapiens
  source 1..22: mol_type = unassigned RNA
atatgtatatgtgactgctact

SEQ ID NO: 2699 - RNA, 22 nt, Homo sapiens
  source 1..22: mol_type = unassigned RNA
agtagcagtcacatatacatat

SEQ ID NO: 2700 - RNA, 21 nt, Homo sapiens
  source 1..21: mol_type = unassigned RNA
tggccaaaaagcaggcagaga

SEQ ID NO: 2701 - RNA, 21 nt, Homo sapiens
  source 1..21: mol_type = unassigned RNA
tctctgcctgctttttggcca

SEQ ID NO: 2702 - RNA, 22 nt, Homo sapiens
  source 1..22: mol_type = unassigned RNA
ggaggaaccttggagcttcggc

SEQ ID NO: 2703 - RNA, 22 nt, Homo sapiens
  source 1..22: mol_type = unassigned RNA
gccgaagctccaaggttcctcc

SEQ ID NO: 2704 - RNA, 23 nt, Homo sapiens
  source 1..23: mol_type = unassigned RNA
gaggctgatgtgagtagaccact

SEQ ID NO: 2705 - RNA, 23 nt, Homo sapiens
  source 1..23: mol_type = unassigned RNA
agtggtctactcacatcagcctc

SEQ ID NO: 2706 - RNA, 21 nt, Homo sapiens
  source 1..21: mol_type = unassigned RNA
ctgtcctaaggttgttgagtt

SEQ ID NO: 2707 - RNA, 21 nt, Homo sapiens
  source 1..21: mol_type = unassigned RNA
aactcaacaaccttaggacag

SEQ ID NO: 2708 - RNA, 21 nt, Homo sapiens
  source 1..21: mol_type = unassigned RNA
tcttcaacctcaggacttgca

SEQ ID NO: 2709 - RNA, 21 nt, Homo sapiens
  source 1..21: mol_type = unassigned RNA
tgcaagtcctgaggttgaaga

SEQ ID NO: 2710 - RNA, 22 nt, Homo sapiens
  source 1..22: mol_type = unassigned RNA
tgtgatatcatggttcctggga

SEQ ID NO: 2711 - RNA, 22 nt, Homo sapiens
  source 1..22: mol_type = unassigned RNA
tcccaggaaccatgatatcaca

SEQ ID NO: 2712 - RNA, 22 nt, Homo sapiens
  source 1..22: mol_type = unassigned RNA
ctgggaggtgtgatattgtggt

SEQ ID NO: 2713 - RNA, 22 nt, Homo sapiens
  source 1..22: mol_type = unassigned RNA
accacaatatcacacctcccag

SEQ ID NO: 2714 - RNA, 22 nt, Homo sapiens
  source 1..22: mol_type = unassigned RNA
caggtagatatttgataggcat

SEQ ID NO: 2715 - RNA, 22 nt, Homo sapiens
  source 1..22: mol_type = unassigned RNA
atgcctatcaaatatctacctg

SEQ ID NO: 2716 - RNA, 21 nt, Homo sapiens
  source 1..21: mol_type = unassigned RNA
gcctatcacatatctgcctgt

SEQ ID NO: 2717 - RNA, 21 nt, Homo sapiens
  source 1..21: mol_type = unassigned RNA
acaggcagatatgtgataggc

SEQ ID NO: 2718 - RNA, 20 nt, Homo sapiens
  source 1..20: mol_type = unassigned RNA
gggctggggcgcggggaggt

SEQ ID NO: 2719 - RNA, 20 nt, Homo sapiens
  source 1..20: mol_type = unassigned RNA
acctccccgcgccccagccc

SEQ ID NO: 2720 - RNA, 18 nt, Homo sapiens
  source 1..18: mol_type = unassigned RNA
tgcttcctttcagagggt

SEQ ID NO: 2721 - RNA, 18 nt, Homo sapiens
  source 1..18: mol_type = unassigned RNA
accctctgaaaggaagca

SEQ ID NO: 2722 - RNA, 21 nt, Homo sapiens
  source 1..21: mol_type = unassigned RNA
tgagttggccatctgagtgag

SEQ ID NO: 2723 - RNA, 21 nt, Homo sapiens
  source 1..21: mol_type = unassigned RNA
ctcactcagatggccaactca

SEQ ID NO: 2724 - RNA, 23 nt, Homo sapiens
  source 1..23: mol_type = unassigned RNA
aacattcattgttgtcggtgggt

SEQ ID NO: 2725 - RNA, 23 nt, Homo sapiens
  source 1..23: mol_type = unassigned RNA
acccaccgacaacaatgaatgtt

SEQ ID NO: 2726 - RNA, 21 nt, Homo sapiens
  source 1..21: mol_type = unassigned RNA
tcacagtgaaccggtctcttt

SEQ ID NO: 2727 - RNA, 21 nt, Homo sapiens
  source 1..21: mol_type = unassigned RNA
aaagagaccggttcactgtga

SEQ ID NO: 2728 - RNA, 22 nt, Homo sapiens
  source 1..22: mol_type = unassigned RNA
caacaaatcacagtctgccata

SEQ ID NO: 2729 - RNA, 22 nt, Homo sapiens
  source 1..22: mol_type = unassigned RNA
tatggcagactgtgatttgttg

SEQ ID NO: 2730 - RNA, 21 nt, Homo sapiens
  source 1..21: mol_type = unassigned RNA
ctcactgaacaatgaatgcaa

SEQ ID NO: 2731 - RNA, 21 nt, Homo sapiens
  source 1..21: mol_type = unassigned RNA
ttgcattcattgttcagtgag

SEQ ID NO: 2732 - RNA, 23 nt, Homo sapiens
  source 1..23: mol_type = unassigned RNA
aacattcattgctgtcggtgggt

SEQ ID NO: 2733 - RNA, 23 nt, Homo sapiens
  source 1..23: mol_type = unassigned RNA
acccaccgacagcaatgaatgtt

SEQ ID NO: 2734 - RNA, 22 nt, Homo sapiens
  source 1..22: mol_type = unassigned RNA
accatcgaccgttgattgtacc

SEQ ID NO: 2735 - RNA, 22 nt, Homo sapiens
  source 1..22: mol_type = unassigned RNA
ggtacaatcaacggtcgatggt

SEQ ID NO: 2736 - RNA, 23 nt, Homo sapiens
  source 1..23: mol_type = unassigned RNA
aacattcaacgctgtcggtgagt

SEQ ID NO: 2737 - RNA, 23 nt, Homo sapiens
  source 1..23: mol_type = unassigned RNA
actcaccgacagcgttgaatgtt

SEQ ID NO: 2738 - RNA, 22 nt, Homo sapiens
  source 1..22: mol_type = unassigned RNA
accactgaccgttgactgtacc

SEQ ID NO: 2739 - RNA, 22 nt, Homo sapiens
  source 1..22: mol_type = unassigned RNA
ggtacagtcaacggtcagtggt

SEQ ID NO: 2740 - RNA, 22 nt, Homo sapiens
  source 1..22: mol_type = unassigned RNA
ctgttgccactaacctcaacct

SEQ ID NO: 2741 - RNA, 22 nt, Homo sapiens
  source 1..22: mol_type = unassigned RNA
aggttgaggttagtggcaacag

SEQ ID NO: 2742 - RNA, 22 nt, Homo sapiens
  source 1..22: mol_type = unassigned RNA
ataagacgagcaaaaagcttgt

SEQ ID NO: 2743 - RNA, 22 nt, Homo sapiens
  source 1..22: mol_type = unassigned RNA
acaagctttttgctcgtcttat

SEQ ID NO: 2744 - RNA, 22 nt, Homo sapiens
  source 1..22: mol_type = unassigned RNA
ataagacgaacaaaaggtttgt

SEQ ID NO: 2745 - RNA, 22 nt, Homo sapiens
  source 1..22: mol_type = unassigned RNA
acaaaccttttgttcgtcttat

SEQ ID NO: 2746 - RNA, 21 nt, Homo sapiens
  source 1..21: mol_type = unassigned RNA
agggagggacgggggctgtgc

SEQ ID NO: 2747 - RNA, 21 nt, Homo sapiens
  source 1..21: mol_type = unassigned RNA
gcacagcccccgtccctccct

SEQ ID NO: 2748 - RNA, 23 nt, Homo sapiens
  source 1..23: mol_type = unassigned RNA
tctggctccgtgtcttcactccc

SEQ ID NO: 2749 - RNA, 23 nt, Homo sapiens
  source 1..23: mol_type = unassigned RNA
gggagtgaagacacggagccaga

SEQ ID NO: 2750 - RNA, 22 nt, Homo sapiens
  source 1..22: mol_type = unassigned RNA
tggaatgtaaagaagtatgtat

SEQ ID NO: 2751 - RNA, 22 nt, Homo sapiens
  source 1..22: mol_type = unassigned RNA
atacatacttctttacattcca

SEQ ID NO: 2752 - RNA, 22 nt, Homo sapiens
  source 1..22: mol_type = unassigned RNA
aacatcacagcaagtctgtgct

SEQ ID NO: 2753 - RNA, 22 nt, Homo sapiens
  source 1..22: mol_type = unassigned RNA
agcacagacttgctgtgatgtt

SEQ ID NO: 2754 - RNA, 21 nt, Homo sapiens
  source 1..21: mol_type = unassigned RNA
ttaagacttgcagtgatgttt

SEQ ID NO: 2755 - RNA, 21 nt, Homo sapiens
  source 1..21: mol_type = unassigned RNA
aaacatcactgcaagtcttaa

SEQ ID NO: 2756 - RNA, 22 nt, Homo sapiens
  source 1..22: mol_type = unassigned RNA
aacatcactgcaagtcttaaca

SEQ ID NO: 2757 - RNA, 22 nt, Homo sapiens
  source 1..22: mol_type = unassigned RNA
tgttaagacttgcagtgatgtt

SEQ ID NO: 2758 - RNA, 21 nt, Homo sapiens
  source 1..21: mol_type = unassigned RNA
acagacttgctgtgatgttca

SEQ ID NO: 2759 - RNA, 21 nt, Homo sapiens
  source 1..21: mol_type = unassigned RNA
tgaacatcacagcaagtctgt

SEQ ID NO: 2760 - RNA, 22 nt, Homo sapiens
  source 1..22: mol_type = unassigned RNA
aaaccgttaccattactgagtt

SEQ ID NO: 2761 - RNA, 22 nt, Homo sapiens
  source 1..22: mol_type = unassigned RNA
aactcagtaatggtaacggttt

SEQ ID NO: 2762 - RNA, 22 nt, Homo sapiens
  source 1..22: mol_type = unassigned RNA
tagcaagagaaccattaccatt

SEQ ID NO: 2763 - RNA, 22 nt, Homo sapiens
  source 1..22: mol_type = unassigned RNA
aatggtaatggttctcttgcta

SEQ ID NO: 2764 - RNA, 23 nt, Homo sapiens
  source 1..23: mol_type = unassigned RNA
tgaggggcagagagcgagacttt

SEQ ID NO: 2765 - RNA, 23 nt, Homo sapiens
  source 1..23: mol_type = unassigned RNA
aaagtctcgctctctgcccctca

SEQ ID NO: 2766 - RNA, 22 nt, Homo sapiens
  source 1..22: mol_type = unassigned RNA
caagctcgcttctatgggtctg

SEQ ID NO: 2767 - RNA, 22 nt, Homo sapiens
  source 1..22: mol_type = unassigned RNA
cagacccatagaagcgagcttg

SEQ ID NO: 2768 - RNA, 22 nt, Homo sapiens
  source 1..22: mol_type = unassigned RNA
aacccgtagatccgatcttgtg

SEQ ID NO: 2769 - RNA, 22 nt, Homo sapiens
  source 1..22: mol_type = unassigned RNA
cacaagatcggatctacgggtt

SEQ ID NO: 2770 - RNA, 22 nt, Homo sapiens
  source 1..22: mol_type = unassigned RNA
caagctcgtgtctgtgggtccg

SEQ ID NO: 2771 - RNA, 22 nt, Homo sapiens
  source 1..22: mol_type = unassigned RNA
cggacccacagacacgagcttg

SEQ ID NO: 2772 - RNA, 22 nt, Homo sapiens
  source 1..22: mol_type = unassigned RNA
cacccgtagaaccgaccttgcg

SEQ ID NO: 2773 - RNA, 22 nt, Homo sapiens
  source 1..22: mol_type = unassigned RNA
cgcaaggtcggttctacgggtg

SEQ ID NO: 2774 - RNA, 23 nt, Homo sapiens
  source 1..23: mol_type = unassigned RNA
tggagacgcggccctgttggagt

SEQ ID NO: 2775 - RNA, 23 nt, Homo sapiens
  source 1..23: mol_type = unassigned RNA
actccaacagggccgcgtctcca

SEQ ID NO: 2776 - RNA, 23 nt, Homo sapiens
  source 1..23: mol_type = unassigned RNA
tctacagtgcacgtgtctccagt

SEQ ID NO: 2777 - RNA, 23 nt, Homo sapiens
  source 1..23: mol_type = unassigned RNA
actggagacacgtgcactgtaga

SEQ ID NO: 2778 - RNA, 22 nt, Homo sapiens
  source 1..22: mol_type = unassigned RNA
caaattcgtatctaggggaata

SEQ ID NO: 2779 - RNA, 22 nt, Homo sapiens
  source 1..22: mol_type = unassigned RNA
tattcccctagatacgaatttg

SEQ ID NO: 2780 - RNA, 23 nt, Homo sapiens
  source 1..23: mol_type = unassigned RNA
taccctgtagatccgaatttgtg

SEQ ID NO: 2781 - RNA, 23 nt, Homo sapiens
  source 1..23: mol_type = unassigned RNA
cacaaattcggatctacagggta

SEQ ID NO: 2782 - RNA, 23 nt, Homo sapiens
  source 1..23: mol_type = unassigned RNA
cctgcagcgacttgatggcttcc

SEQ ID NO: 2783 - RNA, 23 nt, Homo sapiens
  source 1..23: mol_type = unassigned RNA
ggaagccatcaagtcgctgcagg

SEQ ID NO: 2784 - RNA, 22 nt, Homo sapiens
  source 1..22: mol_type = unassigned RNA
tcagtgcactacagaactttgt

SEQ ID NO: 2785 - RNA, 22 nt, Homo sapiens
  source 1..22: mol_type = unassigned RNA
acaaagttctgtagtgcactga

SEQ ID NO: 2786 - RNA, 22 nt, Homo sapiens
  source 1..22: mol_type = unassigned RNA
aaagttctgagacactccgact

SEQ ID NO: 2787 - RNA, 22 nt, Homo sapiens
  source 1..22: mol_type = unassigned RNA
agtcggagtgtctcagaacttt

SEQ ID NO: 2788 - RNA, 22 nt, Homo sapiens
  source 1..22: mol_type = unassigned RNA
cctgttctccattacttggctc

SEQ ID NO: 2789 - RNA, 22 nt, Homo sapiens
  source 1..22: mol_type = unassigned RNA
gagccaagtaatggagaacagg

SEQ ID NO: 2790 - RNA, 21 nt, Homo sapiens
  source 1..21: mol_type = unassigned RNA
ttcaagtaattcaggataggt

SEQ ID NO: 2791 - RNA, 21 nt, Homo sapiens
  source 1..21: mol_type = unassigned RNA
acctatcctgaattacttgaa

SEQ ID NO: 2792 - RNA, 22 nt, Homo sapiens
  source 1..22: mol_type = unassigned RNA
gccctgaacgaggggtctggag

SEQ ID NO: 2793 - RNA, 22 nt, Homo sapiens
  source 1..22: mol_type = unassigned RNA
ctccagacccctcgttcagggc

SEQ ID NO: 2794 - RNA, 22 nt, Homo sapiens
  source 1..22: mol_type = unassigned RNA
gctgactcctagtccagggctc

SEQ ID NO: 2795 - RNA, 22 nt, Homo sapiens
  source 1..22: mol_type = unassigned RNA
gagccctggactaggagtcagc

SEQ ID NO: 2796 - RNA, 22 nt, Homo sapiens
  source 1..22: mol_type = unassigned RNA
atcacacaaaggcaacttttgt

SEQ ID NO: 2797 - RNA, 22 nt, Homo sapiens
  source 1..22: mol_type = unassigned RNA
acaaaagttgcctttgtgtgat

SEQ ID NO: 2798 - RNA, 22 nt, Homo sapiens
  source 1..22: mol_type = unassigned RNA
agaggttgcccttggtgaattc

SEQ ID NO: 2799 - RNA, 22 nt, Homo sapiens
  source 1..22: mol_type = unassigned RNA
gaattcaccaagggcaacctct

SEQ ID NO: 2800 - RNA, 21 nt, Homo sapiens
  source 1..21: mol_type = unassigned RNA
ggtagattttccttctatggt

SEQ ID NO: 2801 - RNA, 21 nt, Homo sapiens
  source 1..21: mol_type = unassigned RNA
accatagaaggaaaatctacc

SEQ ID NO: 2802 - RNA, 21 nt, Homo sapiens
  source 1..21: mol_type = unassigned RNA
atcatagaggaaaatccacgt

SEQ ID NO: 2803 - RNA, 21 nt, Homo sapiens
  source 1..21: mol_type = unassigned RNA
acgtggattttcctctatgat

SEQ ID NO: 2804 - RNA, 22 nt, Homo sapiens
  source 1..22: mol_type = unassigned RNA
gtagattctccttctatgagta

SEQ ID NO: 2805 - RNA, 22 nt, Homo sapiens
  source 1..22: mol_type = unassigned RNA
tactcatagaaggagaatctac

SEQ ID NO: 2806 - RNA, 22 nt, Homo sapiens
  source 1..22: mol_type = unassigned RNA
ctggtacaggcctgggggacag

SEQ ID NO: 2807 - RNA, 22 nt, Homo sapiens
  source 1..22: mol_type = unassigned RNA
ctgtcccccaggcctgtaccag

SEQ ID NO: 2808 - RNA, 22 nt, Homo sapiens
  source 1..22: mol_type = unassigned RNA
tctcccaacccttgtaccagtg

SEQ ID NO: 2809 - RNA, 22 nt, Homo sapiens
  source 1..22: mol_type = unassigned RNA
cactggtacaagggttgggaga

SEQ ID NO: 2810 - RNA, 22 nt, Homo sapiens
  source 1..22: mol_type = unassigned RNA
acgggttaggctcttgggagct

SEQ ID NO: 2811 - RNA, 22 nt, Homo sapiens
  source 1..22: mol_type = unassigned RNA
agctcccaagagcctaacccgt

SEQ ID NO: 2812 - RNA, 22 nt, Homo sapiens
  source 1..22: mol_type = unassigned RNA
tcacaagtcaggctcttgggac

SEQ ID NO: 2813 - RNA, 22 nt, Homo sapiens
  source 1..22: mol_type = unassigned RNA
gtcccaagagcctgacttgtga

SEQ ID NO: 2814 - RNA, 22 nt, Homo sapiens
  source 1..22: mol_type = unassigned RNA
aacccgtagatccgaacttgtg

SEQ ID NO: 2815 - RNA, 22 nt, Homo sapiens
  source 1..22: mol_type = unassigned RNA
cacaagttcggatctacgggtt

SEQ ID NO: 2816 - RNA, 21 nt, Homo sapiens
  source 1..21: mol_type = unassigned RNA
ctgtacaggccactgccttgc

SEQ ID NO: 2817 - RNA, 21 nt, Homo sapiens
  source 1..21: mol_type = unassigned RNA
gcaaggcagtggcctgtacag

SEQ ID NO: 2818 - RNA, 22 nt, Homo sapiens
  source 1..22: mol_type = unassigned RNA
tgaggtagtagtttgtacagtt

SEQ ID NO: 2819 - RNA, 22 nt, Homo sapiens
  source 1..22: mol_type = unassigned RNA
aactgtacaaactactacctca

SEQ ID NO: 2820 - RNA, 22 nt, Homo sapiens
  source 1..22: mol_type = unassigned RNA
tccctgagaccctaacttgtga

SEQ ID NO: 2821 - RNA, 22 nt, Homo sapiens
  source 1..22: mol_type = unassigned RNA
tcacaagttagggtctcaggga

SEQ ID NO: 2822 - RNA, 22 nt, Homo sapiens
  source 1..22: mol_type = unassigned RNA
caagcttgtatctataggtatg

SEQ ID NO: 2823 - RNA, 22 nt, Homo sapiens
  source 1..22: mol_type = unassigned RNA
catacctatagatacaagcttg

SEQ ID NO: 2824 - RNA, 23 nt, Homo sapiens
  source 1..23: mol_type = unassigned RNA
aaagtgctgcgacatttgagcgt

SEQ ID NO: 2825 - RNA, 23 nt, Homo sapiens
  source 1..23: mol_type = unassigned RNA
acgctcaaatgtcgcagcacttt

SEQ ID NO: 2826 - RNA, 22 nt, Homo sapiens
  source 1..22: mol_type = unassigned RNA
tttagagacggggtcttgctct

SEQ ID NO: 2827 - RNA, 22 nt, Homo sapiens
  source 1..22: mol_type = unassigned RNA
agagcaagaccccgtctctaaa

SEQ ID NO: 2828 - RNA, 24 nt, Homo sapiens
  source 1..24: mol_type = unassigned RNA
tggccctgactgaagaccagcagt

SEQ ID NO: 2829 - RNA, 24 nt, Homo sapiens
  source 1..24: mol_type = unassigned RNA
actgctggtcttcagtcagggcca

SEQ ID NO: 2830 - RNA, 21 nt, Homo sapiens
  source 1..21: mol_type = unassigned RNA
gcgacccatacttggtttcag

SEQ ID NO: 2831 - RNA, 21 nt, Homo sapiens
  source 1..21: mol_type = unassigned RNA
ctgaaaccaagtatgggtcgc

SEQ ID NO: 2832 - RNA, 22 nt, Homo sapiens
  source 1..22: mol_type = unassigned RNA
gaaatcaagcgtgggtgagacc

SEQ ID NO: 2833 - RNA, 22 nt, Homo sapiens
  source 1..22: mol_type = unassigned RNA
ggtctcacccacgcttgatttc

SEQ ID NO: 2834 - RNA, 21 nt, Homo sapiens
  source 1..21: mol_type = unassigned RNA
ccctgggcctctgctccccag

SEQ ID NO: 2835 - RNA, 21 nt, Homo sapiens
  source 1..21: mol_type = unassigned RNA
ctggggagcagaggcccaggg

SEQ ID NO: 2836 - RNA, 24 nt, Homo sapiens
  source 1..24: mol_type = unassigned RNA
tggggagctgaggctctgggggtg

SEQ ID NO: 2837 - RNA, 24 nt, Homo sapiens
  source 1..24: mol_type = unassigned RNA
cacccccagagcctcagctcccca

SEQ ID NO: 2838 - RNA, 20 nt, Homo sapiens
  source 1..20: mol_type = unassigned RNA
ggggagctgtggaagcagta

SEQ ID NO: 2839 - RNA, 20 nt, Homo sapiens
  source 1..20: mol_type = unassigned RNA
tactgcttccacagctcccc

SEQ ID NO: 2840 - RNA, 25 nt, Homo sapiens
  source 1..25: mol_type = unassigned RNA
ctagtgagggacagaaccaggattc

SEQ ID NO: 2841 - RNA, 25 nt, Homo sapiens
  source 1..25: mol_type = unassigned RNA
gaatcctggttctgtccctcactag

SEQ ID NO: 2842 - RNA, 20 nt, Homo sapiens
  source 1..20: mol_type = unassigned RNA
agagtcttgtgatgtcttgc

SEQ ID NO: 2843 - RNA, 20 nt, Homo sapiens
  source 1..20: mol_type = unassigned RNA
gcaagacatcacaagactct

SEQ ID NO: 2844 - RNA, 23 nt, Homo sapiens
  source 1..23: mol_type = unassigned RNA
gcagcagagaataggactacgtc

SEQ ID NO: 2845 - RNA, 23 nt, Homo sapiens
  source 1..23: mol_type = unassigned RNA
gacgtagtcctattctctgctgc

SEQ ID NO: 2846 - RNA, 23 nt, Homo sapiens
  source 1..23: mol_type = unassigned RNA
tgagcgcctcgacgacagagccg

SEQ ID NO: 2847 - RNA, 23 nt, Homo sapiens
  source 1..23: mol_type = unassigned RNA
cggctctgtcgtcgaggcgctca

SEQ ID NO: 2848 - RNA, 23 nt, Homo sapiens
  source 1..23: mol_type = unassigned RNA
tccctgtcctccaggagctcacg

SEQ ID NO: 2849 - RNA, 23 nt, Homo sapiens
  source 1..23: mol_type = unassigned RNA
cgtgagctcctggaggacaggga

SEQ ID NO: 2850 - RNA, 22 nt, Homo sapiens
  source 1..22: mol_type = unassigned RNA
ctatacggcctcctagctttcc

SEQ ID NO: 2851 - RNA, 22 nt, Homo sapiens
  source 1..22: mol_type = unassigned RNA
ggaaagctaggaggccgtatag

SEQ ID NO: 2852 - RNA, 22 nt, Homo sapiens
  source 1..22: mol_type = unassigned RNA
tgaggtaggaggttgtatagtt

SEQ ID NO: 2853 - RNA, 22 nt, Homo sapiens
  source 1..22: mol_type = unassigned RNA
aactatacaacctcctacctca

SEQ ID NO: 2854 - RNA, 22 nt, Homo sapiens
  source 1..22: mol_type = unassigned RNA
ctgcgcaagctactgccttgct

SEQ ID NO: 2855 - RNA, 22 nt, Homo sapiens
  source 1..22: mol_type = unassigned RNA
agcaaggcagtagcttgcgcag

SEQ ID NO: 2856 - RNA, 22 nt, Homo sapiens
  source 1..22: mol_type = unassigned RNA
tgaggtagtagtttgtgctgtt

SEQ ID NO: 2857 - RNA, 22 nt, Homo sapiens
  source 1..22: mol_type = unassigned RNA
aacagcacaaactactacctca

SEQ ID NO: 2858 - RNA, 22 nt, Homo sapiens
  source 1..22: mol_type = unassigned RNA
tgccctgtggactcagttctgg

SEQ ID NO: 2859 - RNA, 22 nt, Homo sapiens
  source 1..22: mol_type = unassigned RNA
ccagaactgagtccacagggca

SEQ ID NO: 2860 - RNA, 21 nt, Homo sapiens
  source 1..21: mol_type = unassigned RNA
tggttctagacttgccaacta

SEQ ID NO: 2861 - RNA, 21 nt, Homo sapiens
  source 1..21: mol_type = unassigned RNA
tagttggcaagtctagaacca

SEQ ID NO: 2862 - RNA, 23 nt, Homo sapiens
  source 1..23: mol_type = unassigned RNA
tgtctgcccgcatgcctgcctct

SEQ ID NO: 2863 - RNA, 23 nt, Homo sapiens
  source 1..23: mol_type = unassigned RNA
agaggcaggcatgcgggcagaca

SEQ ID NO: 2864 - RNA, 22 nt, Homo sapiens
  source 1..22: mol_type = unassigned RNA
aaaagtaattgcggtctttggt

SEQ ID NO: 2865 - RNA, 22 nt, Homo sapiens
  source 1..22: mol_type = unassigned RNA
accaaagaccgcaattactttt

SEQ ID NO: 2866 - RNA, 18 nt, Homo sapiens
  source 1..18: mol_type = unassigned RNA
tcgaggagctcacagtct

SEQ ID NO: 2867 - RNA, 18 nt, Homo sapiens
  source 1..18: mol_type = unassigned RNA
agactgtgagctcctcga

SEQ ID NO: 2868 - RNA, 22 nt, Homo sapiens
  source 1..22: mol_type = unassigned RNA
ctatacaatctattgccttccc

SEQ ID NO: 2869 - RNA, 22 nt, Homo sapiens
  source 1..22: mol_type = unassigned RNA
gggaaggcaatagattgtatag

SEQ ID NO: 2870 - RNA, 22 nt, Homo sapiens
  source 1..22: mol_type = unassigned RNA
ctatacagtctactgtctttcc

SEQ ID NO: 2871 - RNA, 22 nt, Homo sapiens
  source 1..22: mol_type = unassigned RNA
ggaaagacagtagactgtatag

SEQ ID NO: 2872 - RNA, 22 nt, Homo sapiens
  source 1..22: mol_type = unassigned RNA
tgaggtagtagattgtatagtt

SEQ ID NO: 2873 - RNA, 22 nt, Homo sapiens
  source 1..22: mol_type = unassigned RNA
aactatacaatctactacctca

SEQ ID NO: 2874 - RNA, 22 nt, Homo sapiens
  source 1..22: mol_type = unassigned RNA
aaaagtaattgtggttttggcc

SEQ ID NO: 2875 - RNA, 22 nt, Homo sapiens
  source 1..22: mol_type = unassigned RNA
ggccaaaaccacaattactttt

SEQ ID NO: 2876 - RNA, 22 nt, Homo sapiens
  source 1..22: mol_type = unassigned RNA
aaaagtaattgcggtttttgcc

SEQ ID NO: 2877 - RNA, 22 nt, Homo sapiens
  source 1..22: mol_type = unassigned RNA
ggcaaaaaccgcaattactttt

SEQ ID NO: 2878 - RNA, 22 nt, Homo sapiens
  source 1..22: mol_type = unassigned RNA
cctctgaaattcagttcttcag

SEQ ID NO: 2879 - RNA, 22 nt, Homo sapiens
  source 1..22: mol_type = unassigned RNA
ctgaagaactgaatttcagagg

SEQ ID NO: 2880 - RNA, 22 nt, Homo sapiens
  source 1..22: mol_type = unassigned RNA
tgagaactgaattccatgggtt

SEQ ID NO: 2881 - RNA, 22 nt, Homo sapiens
  source 1..22: mol_type = unassigned RNA
aacccatggaattcagttctca

SEQ ID NO: 2882 - RNA, 22 nt, Homo sapiens
  source 1..22: mol_type = unassigned RNA
acagcaggcacagacaggcagt

SEQ ID NO: 2883 - RNA, 22 nt, Homo sapiens
  source 1..22: mol_type = unassigned RNA
actgcctgtctgtgcctgctgt

SEQ ID NO: 2884 - RNA, 22 nt, Homo sapiens
  source 1..22: mol_type = unassigned RNA
tgcctgtctacacttgctgtgc

SEQ ID NO: 2885 - RNA, 22 nt, Homo sapiens
  source 1..22: mol_type = unassigned RNA
gcacagcaagtgtagacaggca

SEQ ID NO: 2886 - RNA, 22 nt, Homo sapiens
  source 1..22: mol_type = unassigned RNA
tagcaccatctgaaatcggtta

SEQ ID NO: 2887 - RNA, 22 nt, Homo sapiens
  source 1..22: mol_type = unassigned RNA
taaccgatttcagatggtgcta

SEQ ID NO: 2888 - RNA, 22 nt, Homo sapiens
  source 1..22: mol_type = unassigned RNA
actgatttcttttggtgttcag

SEQ ID NO: 2889 - RNA, 22 nt, Homo sapiens
  source 1..22: mol_type = unassigned RNA
ctgaacaccaaaagaaatcagt

SEQ ID NO: 2890 - RNA, 24 nt, Homo sapiens
  source 1..24: mol_type = unassigned RNA
gctggtttcatatggtggtttaga

SEQ ID NO: 2891 - RNA, 24 nt, Homo sapiens
  source 1..24: mol_type = unassigned RNA
tctaaaccaccatatgaaaccagc

SEQ ID NO: 2892 - RNA, 22 nt, Homo sapiens
  source 1..22: mol_type = unassigned RNA
ctggtttcacatggtggcttag

SEQ ID NO: 2893 - RNA, 22 nt, Homo sapiens
  source 1..22: mol_type = unassigned RNA
ctaagccaccatgtgaaaccag

SEQ ID NO: 2894 - RNA, 23 nt, Homo sapiens
  source 1..23: mol_type = unassigned RNA
tagcaccatttgaaatcagtgtt

SEQ ID NO: 2895 - RNA, 23 nt, Homo sapiens
  source 1..23: mol_type = unassigned RNA
aacactgatttcaaatggtgcta

SEQ ID NO: 2896 - RNA, 22 nt, Homo sapiens
  source 1..22: mol_type = unassigned RNA
tagcaccatttgaaatcggtta

SEQ ID NO: 2897 - RNA, 22 nt, Homo sapiens
  source 1..22: mol_type = unassigned RNA
taaccgatttcaaatggtgcta

SEQ ID NO: 2898 - RNA, 22 nt, Homo sapiens
  source 1..22: mol_type = unassigned RNA
tgaccgatttctcctggtgttc

SEQ ID NO: 2899 - RNA, 22 nt, Homo sapiens
  source 1..22: mol_type = unassigned RNA
gaacaccaggagaaatcggtca

SEQ ID NO: 2900 - RNA, 23 nt, Homo sapiens
  source 1..23: mol_type = unassigned RNA
tgtcactcggctcggcccactac

SEQ ID NO: 2901 - RNA, 23 nt, Homo sapiens
  source 1..23: mol_type = unassigned RNA
gtagtgggccgagccgagtgaca

SEQ ID NO: 2902 - RNA, 22 nt, Homo sapiens
  source 1..22: mol_type = unassigned RNA
ctgccaattccataggtcacag

SEQ ID NO: 2903 - RNA, 22 nt, Homo sapiens
  source 1..22: mol_type = unassigned RNA
ctgtgacctatggaattggcag

SEQ ID NO: 2904 - RNA, 21 nt, Homo sapiens
  source 1..21: mol_type = unassigned RNA
ctgacctatgaattgacagcc

SEQ ID NO: 2905 - RNA, 21 nt, Homo sapiens
  source 1..21: mol_type = unassigned RNA
ggctgtcaattcataggtcag

SEQ ID NO: 2906 - RNA, 20 nt, Homo sapiens
  source 1..20: mol_type = unassigned RNA
actgccccaggtgctgctgg

SEQ ID NO: 2907 - RNA, 20 nt, Homo sapiens
  source 1..20: mol_type = unassigned RNA
ccagcagcacctggggcagt

SEQ ID NO: 2908 - RNA, 22 nt, Homo sapiens
  source 1..22: mol_type = unassigned RNA
aacgccattatcacactaaata

SEQ ID NO: 2909 - RNA, 22 nt, Homo sapiens
  source 1..22: mol_type = unassigned RNA
tatttagtgtgataatggcgtt

SEQ ID NO: 2910 - RNA, 22 nt, Homo sapiens
  source 1..22: mol_type = unassigned RNA
ctttcagtcggatgtttgcagc

SEQ ID NO: 2911 - RNA, 22 nt, Homo sapiens
  source 1..22: mol_type = unassigned RNA
gctgcaaacatccgactgaaag

SEQ ID NO: 2912 - RNA, 22 nt, Homo sapiens
  source 1..22: mol_type = unassigned RNA
aattgcacggtatccatctgta

SEQ ID NO: 2913 - RNA, 22 nt, Homo sapiens
  source 1..22: mol_type = unassigned RNA
tacagatggataccgtgcaatt

SEQ ID NO: 2914 - RNA, 22 nt, Homo sapiens
  source 1..22: mol_type = unassigned RNA
cgggtggatcacgatgcaattt

SEQ ID NO: 2915 - RNA, 22 nt, Homo sapiens
  source 1..22: mol_type = unassigned RNA
aaattgcatcgtgatccacccg

SEQ ID NO: 2916 - RNA, 22 nt, Homo sapiens
  source 1..22: mol_type = unassigned RNA
ctgggaggtggatgtttacttc

SEQ ID NO: 2917 - RNA, 22 nt, Homo sapiens
  source 1..22: mol_type = unassigned RNA
gaagtaaacatccacctcccag

SEQ ID NO: 2918 - RNA, 22 nt, Homo sapiens
  source 1..22: mol_type = unassigned RNA
tgtaaacatcctacactcagct

SEQ ID NO: 2919 - RNA, 22 nt, Homo sapiens
  source 1..22: mol_type = unassigned RNA
agctgagtgtaggatgtttaca

SEQ ID NO: 2920 - RNA, 22 nt, Homo sapiens
  source 1..22: mol_type = unassigned RNA
ctgggagagggttgtttactcc

SEQ ID NO: 2921 - RNA, 22 nt, Homo sapiens
  source 1..22: mol_type = unassigned RNA
ggagtaaacaaccctctcccag

SEQ ID NO: 2922 - RNA, 22 nt, Homo sapiens
  source 1..22: mol_type = unassigned RNA
ctgggagaaggctgtttactct

SEQ ID NO: 2923 - RNA, 22 nt, Homo sapiens
  source 1..22: mol_type = unassigned RNA
agagtaaacagccttctcccag

SEQ ID NO: 2924 - RNA, 23 nt, Homo sapiens
  source 1..23: mol_type = unassigned RNA
tgtaaacatcctacactctcagc

SEQ ID NO: 2925 - RNA, 23 nt, Homo sapiens
  source 1..23: mol_type = unassigned RNA
gctgagagtgtaggatgtttaca

SEQ ID NO: 2926 - RNA, 22 nt, Homo sapiens
  source 1..22: mol_type = unassigned RNA
tttttcattattgctcctgacc

SEQ ID NO: 2927 - RNA, 22 nt, Homo sapiens
  source 1..22: mol_type = unassigned RNA
ggtcaggagcaataatgaaaaa

SEQ ID NO: 2928 - RNA, 23 nt, Homo sapiens
  source 1..23: mol_type = unassigned RNA
tcaagagcaataacgaaaaatgt

SEQ ID NO: 2929 - RNA, 23 nt, Homo sapiens
  source 1..23: mol_type = unassigned RNA
acatttttcgttattgctcttga

SEQ ID NO: 2930 - RNA, 23 nt, Homo sapiens
  source 1..23: mol_type = unassigned RNA
caaagtgcttacagtgcaggtag

SEQ ID NO: 2931 - RNA, 23 nt, Homo sapiens
  source 1..23: mol_type = unassigned RNA
ctacctgcactgtaagcactttg

SEQ ID NO: 2932 - RNA, 22 nt, Homo sapiens
  source 1..22: mol_type = unassigned RNA
ggattcctggaaatactgttct

SEQ ID NO: 2933 - RNA, 22 nt, Homo sapiens
  source 1..22: mol_type = unassigned RNA
agaacagtatttccaggaatcc

SEQ ID NO: 2934 - RNA, 23 nt, Homo sapiens
  source 1..23: mol_type = unassigned RNA
gtccagttttcccaggaatccct

SEQ ID NO: 2935 - RNA, 23 nt, Homo sapiens
  source 1..23: mol_type = unassigned RNA
agggattcctgggaaaactggac

SEQ ID NO: 2936 - RNA, 22 nt, Homo sapiens
  source 1..22: mol_type = unassigned RNA
actgcattatgagcacttaaag

SEQ ID NO: 2937 - RNA, 22 nt, Homo sapiens
  source 1..22: mol_type = unassigned RNA
ctttaagtgctcataatgcagt

SEQ ID NO: 2938 - RNA, 23 nt, Homo sapiens
  source 1..23: mol_type = unassigned RNA
taaagtgcttatagtgcaggtag

SEQ ID NO: 2939 - RNA, 23 nt, Homo sapiens
  source 1..23: mol_type = unassigned RNA
ctacctgcactataagcacttta

SEQ ID NO: 2940 - RNA, 22 nt, Homo sapiens
  source 1..22: mol_type = unassigned RNA
gagggttgggtggaggctctcc

SEQ ID NO: 2941 - RNA, 22 nt, Homo sapiens
  source 1..22: mol_type = unassigned RNA
ggagagcctccacccaaccctc

SEQ ID NO: 2942 - RNA, 22 nt, Homo sapiens
  source 1..22: mol_type = unassigned RNA
ctgtgcgtgtgacagcggctga

SEQ ID NO: 2943 - RNA, 22 nt, Homo sapiens
  source 1..22: mol_type = unassigned RNA
tcagccgctgtcacacgcacag

SEQ ID NO: 2944 - RNA, 22 nt, Homo sapiens
  source 1..22: mol_type = unassigned RNA
ccagtggggctgctgttatctg

SEQ ID NO: 2945 - RNA, 22 nt, Homo sapiens
  source 1..22: mol_type = unassigned RNA
cagataacagcagccccactgg

SEQ ID NO: 2946 - RNA, 22 nt, Homo sapiens
  source 1..22: mol_type = unassigned RNA
tgtaacagcaactccatgtgga

SEQ ID NO: 2947 - RNA, 22 nt, Homo sapiens
  source 1..22: mol_type = unassigned RNA
tccacatggagttgctgttaca

SEQ ID NO: 2948 - RNA, 22 nt, Homo sapiens
  source 1..22: mol_type = unassigned RNA
tcacagtggtctctgggattat

SEQ ID NO: 2949 - RNA, 22 nt, Homo sapiens
  source 1..22: mol_type = unassigned RNA
ataatcccagagaccactgtga

SEQ ID NO: 2950 - RNA, 22 nt, Homo sapiens
  source 1..22: mol_type = unassigned RNA
taatctcagctggcaactgtga

SEQ ID NO: 2951 - RNA, 22 nt, Homo sapiens
  source 1..22: mol_type = unassigned RNA
tcacagttgccagctgagatta

SEQ ID NO: 2952 - RNA, 22 nt, Homo sapiens
  source 1..22: mol_type = unassigned RNA
cagtgcctcggcagtgcagccc

SEQ ID NO: 2953 - RNA, 22 nt, Homo sapiens
  source 1..22: mol_type = unassigned RNA
gggctgcactgccgaggcactg

SEQ ID NO: 2954 - RNA, 20 nt, Homo sapiens
  source 1..20: mol_type = unassigned RNA
gtgcattgctgttgcattgc

SEQ ID NO: 2955 - RNA, 20 nt, Homo sapiens
  source 1..20: mol_type = unassigned RNA
gcaatgcaacagcaatgcac

SEQ ID NO: 2956 - RNA, 19 nt, Homo sapiens
  source 1..19: mol_type = unassigned RNA
actggacttggaggcagaa

SEQ ID NO: 2957 - RNA, 19 nt, Homo sapiens
  source 1..19: mol_type = unassigned RNA
ttctgcctccaagtccagt

SEQ ID NO: 2958 - RNA, 25 nt, Homo sapiens
  source 1..25: mol_type = unassigned RNA
actggacttggagtcagaagagtgg

SEQ ID NO: 2959 - RNA, 25 nt, Homo sapiens
  source 1..25: mol_type = unassigned RNA
ccactcttctgactccaagtccagt

SEQ ID NO: 2960 - RNA, 20 nt, Homo sapiens
  source 1..20: mol_type = unassigned RNA
actggacttggagtcagaaa

SEQ ID NO: 2961 - RNA, 20 nt, Homo sapiens
  source 1..20: mol_type = unassigned RNA
tttctgactccaagtccagt

SEQ ID NO: 2962 - RNA, 19 nt, Homo sapiens
  source 1..19: mol_type = unassigned RNA
actggacttggagtcagga

SEQ ID NO: 2963 - RNA, 19 nt, Homo sapiens
  source 1..19: mol_type = unassigned RNA
tcctgactccaagtccagt

SEQ ID NO: 2964 - RNA, 20 nt, Homo sapiens
  source 1..20: mol_type = unassigned RNA
actggacttggagccagaag

SEQ ID NO: 2965 - RNA, 20 nt, Homo sapiens
  source 1..20: mol_type = unassigned RNA
cttctggctccaagtccagt

SEQ ID NO: 2966 - RNA, 20 nt, Homo sapiens
  source 1..20: mol_type = unassigned RNA
actgggcttggagtcagaag

SEQ ID NO: 2967 - RNA, 20 nt, Homo sapiens
  source 1..20: mol_type = unassigned RNA
cttctgactccaagcccagt

SEQ ID NO: 2968 - RNA, 21 nt, Homo sapiens
  source 1..21: mol_type = unassigned RNA
actggacttggtgtcagatgg

SEQ ID NO: 2969 - RNA, 21 nt, Homo sapiens
  source 1..21: mol_type = unassigned RNA
ccatctgacaccaagtccagt

SEQ ID NO: 2970 - RNA, 21 nt, Homo sapiens
  source 1..21: mol_type = unassigned RNA
actggactaggagtcagaagg

SEQ ID NO: 2971 - RNA, 21 nt, Homo sapiens
  source 1..21: mol_type = unassigned RNA
ccttctgactcctagtccagt

SEQ ID NO: 2972 - RNA, 19 nt, Homo sapiens
  source 1..19: mol_type = unassigned RNA
actggatttggagccagaa

SEQ ID NO: 2973 - RNA, 19 nt, Homo sapiens
  source 1..19: mol_type = unassigned RNA
ttctggctccaaatccagt

SEQ ID NO: 2974 - RNA, 20 nt, Homo sapiens
  source 1..20: mol_type = unassigned RNA
aggaatgttccttctttgcc

SEQ ID NO: 2975 - RNA, 20 nt, Homo sapiens
  source 1..20: mol_type = unassigned RNA
ggcaaagaaggaacattcct

SEQ ID NO: 2976 - RNA, 21 nt, Homo sapiens
  source 1..21: mol_type = unassigned RNA
tcagtgcatgacagaacttgg

SEQ ID NO: 2977 - RNA, 21 nt, Homo sapiens
  source 1..21: mol_type = unassigned RNA
ccaagttctgtcatgcactga

SEQ ID NO: 2978 - RNA, 20 nt, Homo sapiens
  source 1..20: mol_type = unassigned RNA
tcacacctgcctcgcccccc

SEQ ID NO: 2979 - RNA, 20 nt, Homo sapiens
  source 1..20: mol_type = unassigned RNA
ggggggcgaggcaggtgtga

SEQ ID NO: 2980 - RNA, 21 nt, Homo sapiens
  source 1..21: mol_type = unassigned RNA
gtgggcgggggcaggtgtgtg

SEQ ID NO: 2981 - RNA, 21 nt, Homo sapiens
  source 1..21: mol_type = unassigned RNA
cacacacctgcccccgcccac

SEQ ID NO: 2982 - RNA, 22 nt, Homo sapiens
  source 1..22: mol_type = unassigned RNA
acgcccttcccccccttcttca

SEQ ID NO: 2983 - RNA, 22 nt, Homo sapiens
  source 1..22: mol_type = unassigned RNA
tgaagaagggggggaagggcgt

SEQ ID NO: 2984 - RNA, 22 nt, Homo sapiens
  source 1..22: mol_type = unassigned RNA
ttgcatatgtaggatgtcccat

SEQ ID NO: 2985 - RNA, 22 nt, Homo sapiens
  source 1..22: mol_type = unassigned RNA
atgggacatcctacatatgcaa

SEQ ID NO: 2986 - RNA, 23 nt, Homo sapiens
  source 1..23: mol_type = unassigned RNA
gtttgcacgggtgggccttgtct

SEQ ID NO: 2987 - RNA, 23 nt, Homo sapiens
  source 1..23: mol_type = unassigned RNA
agacaaggcccacccgtgcaaac

SEQ ID NO: 2988 - RNA, 22 nt, Homo sapiens
  source 1..22: mol_type = unassigned RNA
gactatagaactttccccctca

SEQ ID NO: 2989 - RNA, 22 nt, Homo sapiens
  source 1..22: mol_type = unassigned RNA
tgagggggaaagttctatagtc

SEQ ID NO: 2990 - RNA, 21 nt, Homo sapiens
  source 1..21: mol_type = unassigned RNA
agggggaaagttctatagtcc

SEQ ID NO: 2991 - RNA, 21 nt, Homo sapiens
  source 1..21: mol_type = unassigned RNA
ggactatagaactttccccct

SEQ ID NO: 2992 - RNA, 21 nt, Homo sapiens
  source 1..21: mol_type = unassigned RNA
ctttttgcggtctgggcttgc

SEQ ID NO: 2993 - RNA, 21 nt, Homo sapiens
  source 1..21: mol_type = unassigned RNA
gcaagcccagaccgcaaaaag

SEQ ID NO: 2994 - RNA, 21 nt, Homo sapiens
  source 1..21: mol_type = unassigned RNA
tcttgtgttctctagatcagt

SEQ ID NO: 2995 - RNA, 21 nt, Homo sapiens
  source 1..21: mol_type = unassigned RNA
actgatctagagaacacaaga

SEQ ID NO: 2996 - RNA, 23 nt, Homo sapiens
  source 1..23: mol_type = unassigned RNA
cccagtgttcagactacctgttc

SEQ ID NO: 2997 - RNA, 23 nt, Homo sapiens
  source 1..23: mol_type = unassigned RNA
gaacaggtagtctgaacactggg

SEQ ID NO: 2998 - RNA, 22 nt, Homo sapiens
  source 1..22: mol_type = unassigned RNA
acagtagtctgcacattggtta

SEQ ID NO: 2999 - RNA, 22 nt, Homo sapiens
  source 1..22: mol_type = unassigned RNA
taaccaatgtgcagactactgt

SEQ ID NO: 3000 - RNA, 22 nt, Homo sapiens
  source 1..22: mol_type = unassigned RNA
acagtagtctgcacattggtta

SEQ ID NO: 3001 - RNA, 22 nt, Homo sapiens
  source 1..22: mol_type = unassigned RNA
taaccaatgtgcagactactgt

SEQ ID NO: 3002 - RNA, 23 nt, Homo sapiens
  source 1..23: mol_type = unassigned RNA
cccagtgtttagactatctgttc

SEQ ID NO: 3003 - RNA, 23 nt, Homo sapiens
  source 1..23: mol_type = unassigned RNA
gaacagatagtctaaacactggg

SEQ ID NO: 3004 - RNA, 22 nt, Homo sapiens
  source 1..22: mol_type = unassigned RNA
tggagtgtgacaatggtgtttg

SEQ ID NO: 3005 - RNA, 22 nt, Homo sapiens
  source 1..22: mol_type = unassigned RNA
caaacaccattgtcacactcca

SEQ ID NO: 3006 - RNA, 22 nt, Homo sapiens
  source 1..22: mol_type = unassigned RNA
tgccctaaatgccccttctggc

SEQ ID NO: 3007 - RNA, 22 nt, Homo sapiens
  source 1..22: mol_type = unassigned RNA
gccagaaggggcatttagggca

SEQ ID NO: 3008 - RNA, 23 nt, Homo sapiens
  source 1..23: mol_type = unassigned RNA
taaggtgcatctagtgcagttag

SEQ ID NO: 3009 - RNA, 23 nt, Homo sapiens
  source 1..23: mol_type = unassigned RNA
ctaactgcactagatgcacctta

SEQ ID NO: 3010 - RNA, 22 nt, Homo sapiens
  source 1..22: mol_type = unassigned RNA
ctcctatatgatgcctttcttc

SEQ ID NO: 3011 - RNA, 22 nt, Homo sapiens
  source 1..22: mol_type = unassigned RNA
gaagaaaggcatcatataggag

SEQ ID NO: 3012 - RNA, 21 nt, Homo sapiens
  source 1..21: mol_type = unassigned RNA
gaacggcttcatacaggagtt

SEQ ID NO: 3013 - RNA, 21 nt, Homo sapiens
  source 1..21: mol_type = unassigned RNA
aactcctgtatgaagccgttc

SEQ ID NO: 3014 - RNA, 22 nt, Homo sapiens
  source 1..22: mol_type = unassigned RNA
tgtgactggttgaccagagggg

SEQ ID NO: 3015 - RNA, 22 nt, Homo sapiens
  source 1..22: mol_type = unassigned RNA
cccctctggtcaaccagtcaca

SEQ ID NO: 3016 - RNA, 23 nt, Homo sapiens
  source 1..23: mol_type = unassigned RNA
actgccctaagtgctccttctgg

SEQ ID NO: 3017 - RNA, 23 nt, Homo sapiens
  source 1..23: mol_type = unassigned RNA
ccagaaggagcacttagggcagt

SEQ ID NO: 3018 - RNA, 23 nt, Homo sapiens
  source 1..23: mol_type = unassigned RNA
taaggtgcatctagtgcagatag

SEQ ID NO: 3019 - RNA, 23 nt, Homo sapiens
  source 1..23: mol_type = unassigned RNA
ctatctgcactagatgcacctta

SEQ ID NO: 3020 - RNA, 22 nt, Homo sapiens
  source 1..22: mol_type = unassigned RNA
cagtgcaatgatgaaagggcat

SEQ ID NO: 3021 - RNA, 22 nt, Homo sapiens
  source 1..22: mol_type = unassigned RNA
atgccctttcatcattgcactg

SEQ ID NO: 3022 - RNA, 21 nt, Homo sapiens
  source 1..21: mol_type = unassigned RNA
actctttccctgttgcactac

SEQ ID NO: 3023 - RNA, 21 nt, Homo sapiens
  source 1..21: mol_type = unassigned RNA
gtagtgcaacagggaaagagt

SEQ ID NO: 3024 - RNA, 24 nt, Homo sapiens
  source 1..24: mol_type = unassigned RNA
tttggcaatggtagaactcacact

SEQ ID NO: 3025 - RNA, 24 nt, Homo sapiens
  source 1..24: mol_type = unassigned RNA
agtgtgagttctaccattgccaaa

SEQ ID NO: 3026 - RNA, 21 nt, Homo sapiens
  source 1..21: mol_type = unassigned RNA
agggccccccctcaatcctgt

SEQ ID NO: 3027 - RNA, 21 nt, Homo sapiens
  source 1..21: mol_type = unassigned RNA
acaggattgagggggggccct

SEQ ID NO: 3028 - RNA, 22 nt, Homo sapiens
  source 1..22: mol_type = unassigned RNA
cagtgcaatgttaaaagggcat

SEQ ID NO: 3029 - RNA, 22 nt, Homo sapiens
  source 1..22: mol_type = unassigned RNA
atgcccttttaacattgcactg

SEQ ID NO: 3030 - RNA, 22 nt, Homo sapiens
  source 1..22: mol_type = unassigned RNA
ttcacattgtgctactgtctgc

SEQ ID NO: 3031 - RNA, 22 nt, Homo sapiens
  source 1..22: mol_type = unassigned RNA
gcagacagtagcacaatgtgaa

SEQ ID NO: 3032 - RNA, 22 nt, Homo sapiens
  source 1..22: mol_type = unassigned RNA
tcggatccgtctgagcttggct

SEQ ID NO: 3033 - RNA, 22 nt, Homo sapiens
  source 1..22: mol_type = unassigned RNA
agccaagctcagacggatccga

SEQ ID NO: 3034 - RNA, 22 nt, Homo sapiens
  source 1..22: mol_type = unassigned RNA
ctgaagctcagagggctctgat

SEQ ID NO: 3035 - RNA, 22 nt, Homo sapiens
  source 1..22: mol_type = unassigned RNA
atcagagccctctgagcttcag

SEQ ID NO: 3036 - RNA, 22 nt, Homo sapiens
  source 1..22: mol_type = unassigned RNA
cctcttccccttgtctctccag

SEQ ID NO: 3037 - RNA, 22 nt, Homo sapiens
  source 1..22: mol_type = unassigned RNA
ctggagagacaaggggaagagg

SEQ ID NO: 3038 - RNA, 22 nt, Homo sapiens
  source 1..22: mol_type = unassigned RNA
tgagtgacaggggaaatgggga

SEQ ID NO: 3039 - RNA, 22 nt, Homo sapiens
  source 1..22: mol_type = unassigned RNA
tccccatttcccctgtcactca

SEQ ID NO: 3040 - RNA, 22 nt, Homo sapiens
  source 1..22: mol_type = unassigned RNA
tcaggacacttctgaacttgga

SEQ ID NO: 3041 - RNA, 22 nt, Homo sapiens
  source 1..22: mol_type = unassigned RNA
tccaagttcagaagtgtcctga

SEQ ID NO: 3042 - RNA, 22 nt, Homo sapiens
  source 1..22: mol_type = unassigned RNA
cagttcagaagtgttcctgagt

SEQ ID NO: 3043 - RNA, 22 nt, Homo sapiens
  source 1..22: mol_type = unassigned RNA
actcaggaacacttctgaactg

SEQ ID NO: 3044 - RNA, 21 nt, Homo sapiens
  source 1..21: mol_type = unassigned RNA
tttccctttccatcctggcag

SEQ ID NO: 3045 - RNA, 21 nt, Homo sapiens
  source 1..21: mol_type = unassigned RNA
ctgccaggatggaaagggaaa

SEQ ID NO: 3046 - RNA, 21 nt, Homo sapiens
  source 1..21: mol_type = unassigned RNA
ttgccagggcaggaggtggaa

SEQ ID NO: 3047 - RNA, 21 nt, Homo sapiens
  source 1..21: mol_type = unassigned RNA
ttccacctcctgccctggcaa

SEQ ID NO: 3048 - RNA, 21 nt, Homo sapiens
  source 1..21: mol_type = unassigned RNA
agagattggtagaaatcaggt

SEQ ID NO: 3049 - RNA, 21 nt, Homo sapiens
  source 1..21: mol_type = unassigned RNA
acctgatttctaccaatctct

SEQ ID NO: 3050 - RNA, 23 nt, Homo sapiens
  source 1..23: mol_type = unassigned RNA
aatcggacccatttaaaccggag

SEQ ID NO: 3051 - RNA, 23 nt, Homo sapiens
  source 1..23: mol_type = unassigned RNA
ctccggtttaaatgggtccgatt

SEQ ID NO: 3052 - RNA, 24 nt, Homo sapiens
  source 1..24: mol_type = unassigned RNA
tctgggcacaggcggatggacagg

SEQ ID NO: 3053 - RNA, 24 nt, Homo sapiens
  source 1..24: mol_type = unassigned RNA
cctgtccatccgcctgtgcccaga

SEQ ID NO: 3054 - RNA, 21 nt, Homo sapiens
  source 1..21: mol_type = unassigned RNA
ccagtgactgagctggagcca

SEQ ID NO: 3055 - RNA, 21 nt, Homo sapiens
  source 1..21: mol_type = unassigned RNA
tggctccagctcagtcactgg

SEQ ID NO: 3056 - RNA, 22 nt, Homo sapiens
  source 1..22: mol_type = unassigned RNA
aggataggaagaatgaagtgct

SEQ ID NO: 3057 - RNA, 22 nt, Homo sapiens
  source 1..22: mol_type = unassigned RNA
agcacttcattcttcctatcct

SEQ ID NO: 3058 - RNA, 22 nt, Homo sapiens
  source 1..22: mol_type = unassigned RNA
aggagagtggattccaggtggt

SEQ ID NO: 3059 - RNA, 22 nt, Homo sapiens
  source 1..22: mol_type = unassigned RNA
accacctggaatccactctcct

SEQ ID NO: 3060 - RNA, 22 nt, Homo sapiens
  source 1..22: mol_type = unassigned RNA
tcctcctctacctcatcccagt

SEQ ID NO: 3061 - RNA, 22 nt, Homo sapiens
  source 1..22: mol_type = unassigned RNA
actgggatgaggtagaggagga

SEQ ID NO: 3062 - RNA, 22 nt, Homo sapiens
  source 1..22: mol_type = unassigned RNA
tgaggggtttggaatgggatgg

SEQ ID NO: 3063 - RNA, 22 nt, Homo sapiens
  source 1..22: mol_type = unassigned RNA
ccatcccattccaaacccctca

SEQ ID NO: 3064 - RNA, 21 nt, Homo sapiens
  source 1..21: mol_type = unassigned RNA
atccagttctctgagggggct

SEQ ID NO: 3065 - RNA, 21 nt, Homo sapiens
  source 1..21: mol_type = unassigned RNA
agccccctcagagaactggat

SEQ ID NO: 3066 - RNA, 22 nt, Homo sapiens
  source 1..22: mol_type = unassigned RNA
aacccctaaggcaactggatgg

SEQ ID NO: 3067 - RNA, 22 nt, Homo sapiens
  source 1..22: mol_type = unassigned RNA
ccatccagttgccttaggggtt

SEQ ID NO: 3068 - RNA, 21 nt, Homo sapiens
  source 1..21: mol_type = unassigned RNA
tcatcctcgtctccctcccag

SEQ ID NO: 3069 - RNA, 21 nt, Homo sapiens
  source 1..21: mol_type = unassigned RNA
ctgggagggagacgaggatga

SEQ ID NO: 3070 - RNA, 22 nt, Homo sapiens
  source 1..22: mol_type = unassigned RNA
agggaaggggacgagggttggg

SEQ ID NO: 3071 - RNA, 22 nt, Homo sapiens
  source 1..22: mol_type = unassigned RNA
cccaaccctcgtccccttccct

SEQ ID NO: 3072 - RNA, 23 nt, Homo sapiens
  source 1..23: mol_type = unassigned RNA
aagaagagactgagtcatcgaat

SEQ ID NO: 3073 - RNA, 23 nt, Homo sapiens
  source 1..23: mol_type = unassigned RNA
attcgatgactcagtctcttctt

SEQ ID NO: 3074 - RNA, 23 nt, Homo sapiens
  source 1..23: mol_type = unassigned RNA
caatggcacaaactcattcttga

SEQ ID NO: 3075 - RNA, 23 nt, Homo sapiens
  source 1..23: mol_type = unassigned RNA
tcaagaatgagtttgtgccattg

SEQ ID NO: 3076 - RNA, 21 nt, Homo sapiens
  source 1..21: mol_type = unassigned RNA
actgaatcctcttttcctcag

SEQ ID NO: 3077 - RNA, 21 nt, Homo sapiens
  source 1..21: mol_type = unassigned RNA
ctgaggaaaagaggattcagt

SEQ ID NO: 3078 - RNA, 22 nt, Homo sapiens
  source 1..22: mol_type = unassigned RNA
tgggatgagggattgaagtgga

SEQ ID NO: 3079 - RNA, 22 nt, Homo sapiens
  source 1..22: mol_type = unassigned RNA
tccacttcaatccctcatccca

SEQ ID NO: 3080 - RNA, 22 nt, Homo sapiens
  source 1..22: mol_type = unassigned RNA
caggccatattgtgctgcctca

SEQ ID NO: 3081 - RNA, 22 nt, Homo sapiens
  source 1..22: mol_type = unassigned RNA
tgaggcagcacaatatggcctg

SEQ ID NO: 3082 - RNA, 22 nt, Homo sapiens
  source 1..22: mol_type = unassigned RNA
tagcagcacataatggtttgtg

SEQ ID NO: 3083 - RNA, 22 nt, Homo sapiens
  source 1..22: mol_type = unassigned RNA
cacaaaccattatgtgctgcta

SEQ ID NO: 3084 - RNA, 22 nt, Homo sapiens
  source 1..22: mol_type = unassigned RNA
cgaatcattatttgctgctcta

SEQ ID NO: 3085 - RNA, 22 nt, Homo sapiens
  source 1..22: mol_type = unassigned RNA
tagagcagcaaataatgattcg

SEQ ID NO: 3086 - RNA, 22 nt, Homo sapiens
  source 1..22: mol_type = unassigned RNA
tagcagcacatcatggtttaca

SEQ ID NO: 3087 - RNA, 22 nt, Homo sapiens
  source 1..22: mol_type = unassigned RNA
tgtaaaccatgatgtgctgcta

SEQ ID NO: 3088 - RNA, 22 nt, Homo sapiens
  source 1..22: mol_type = unassigned RNA
ccaatattactgtgctgcttta

SEQ ID NO: 3089 - RNA, 22 nt, Homo sapiens
  source 1..22: mol_type = unassigned RNA
taaagcagcacagtaatattgg

SEQ ID NO: 3090 - RNA, 22 nt, Homo sapiens
  source 1..22: mol_type = unassigned RNA
ctaggtatggtcccagggatcc

SEQ ID NO: 3091 - RNA, 22 nt, Homo sapiens
  source 1..22: mol_type = unassigned RNA
ggatccctgggaccatacctag

SEQ ID NO: 3092 - RNA, 20 nt, Homo sapiens
  source 1..20: mol_type = unassigned RNA
gtgtgtggaaatgcttctgc

SEQ ID NO: 3093 - RNA, 20 nt, Homo sapiens
  source 1..20: mol_type = unassigned RNA
gcagaagcatttccacacac

SEQ ID NO: 3094 - RNA, 22 nt, Homo sapiens
  source 1..22: mol_type = unassigned RNA
gtgtgcggaaatgcttctgcta

SEQ ID NO: 3095 - RNA, 22 nt, Homo sapiens
  source 1..22: mol_type = unassigned RNA
tagcagaagcatttccgcacac

SEQ ID NO: 3096 - RNA, 23 nt, Homo sapiens
  source 1..23: mol_type = unassigned RNA
agcagcattgtacagggctatca

SEQ ID NO: 3097 - RNA, 23 nt, Homo sapiens
  source 1..23: mol_type = unassigned RNA
tgatagccctgtacaatgctgct

SEQ ID NO: 3098 - RNA, 22 nt, Homo sapiens
  source 1..22: mol_type = unassigned RNA
aactggccctcaaagtcccgct

SEQ ID NO: 3099 - RNA, 22 nt, Homo sapiens
  source 1..22: mol_type = unassigned RNA
agcgggactttgagggccagtt

SEQ ID NO: 3100 - RNA, 22 nt, Homo sapiens
  source 1..22: mol_type = unassigned RNA
cggggttttgagggcgagatga

SEQ ID NO: 3101 - RNA, 22 nt, Homo sapiens
  source 1..22: mol_type = unassigned RNA
tcatctcgccctcaaaaccccg

SEQ ID NO: 3102 - RNA, 21 nt, Homo sapiens
  source 1..21: mol_type = unassigned RNA
gcagggacagcaaaggggtgc

SEQ ID NO: 3103 - RNA, 21 nt, Homo sapiens
  source 1..21: mol_type = unassigned RNA
gcacccctttgctgtccctgc

SEQ ID NO: 3104 - RNA, 22 nt, Homo sapiens
  source 1..22: mol_type = unassigned RNA
ttccctttgtcatccttcgcct

SEQ ID NO: 3105 - RNA, 22 nt, Homo sapiens
  source 1..22: mol_type = unassigned RNA
aggcgaaggatgacaaagggaa

SEQ ID NO: 3106 - RNA, 23 nt, Homo sapiens
  source 1..23: mol_type = unassigned RNA
atggccaaaactgcagttatttt

SEQ ID NO: 3107 - RNA, 23 nt, Homo sapiens
  source 1..23: mol_type = unassigned RNA
aaaataactgcagttttggccat

SEQ ID NO: 3108 - RNA, 25 nt, Homo sapiens
  source 1..25: mol_type = unassigned RNA
aaaaaccacaattacttttgcacca

SEQ ID NO: 3109 - RNA, 25 nt, Homo sapiens
  source 1..25: mol_type = unassigned RNA
tggtgcaaaagtaattgtggttttt

SEQ ID NO: 3110 - RNA, 21 nt, Homo sapiens
  source 1..21: mol_type = unassigned RNA
caaaagtgatcgtggtttttg

SEQ ID NO: 3111 - RNA, 21 nt, Homo sapiens
  source 1..21: mol_type = unassigned RNA
caaaaaccacgatcacttttg

SEQ ID NO: 3112 - RNA, 23 nt, Homo sapiens
  source 1..23: mol_type = unassigned RNA
caaagactgcaattacttttgcg

SEQ ID NO: 3113 - RNA, 23 nt, Homo sapiens
  source 1..23: mol_type = unassigned RNA
cgcaaaagtaattgcagtctttg

SEQ ID NO: 3114 - RNA, 23 nt, Homo sapiens
  source 1..23: mol_type = unassigned RNA
aaaagtaactgcggtttttgcct

SEQ ID NO: 3115 - RNA, 23 nt, Homo sapiens
  source 1..23: mol_type = unassigned RNA
aggcaaaaaccgcagttactttt

SEQ ID NO: 3116 - RNA, 22 nt, Homo sapiens
  source 1..22: mol_type = unassigned RNA
tgcctggaacatagtagggact

SEQ ID NO: 3117 - RNA, 22 nt, Homo sapiens
  source 1..22: mol_type = unassigned RNA
agtccctactatgttccaggca

SEQ ID NO: 3118 - RNA, 21 nt, Homo sapiens
  source 1..21: mol_type = unassigned RNA
ataggactcatatagtgccag

SEQ ID NO: 3119 - RNA, 21 nt, Homo sapiens
  source 1..21: mol_type = unassigned RNA
ctggcactatatgagtcctat

SEQ ID NO: 3120 - RNA, 20 nt, Homo sapiens
  source 1..20: mol_type = unassigned RNA
agacactatacgagtcatat

SEQ ID NO: 3121 - RNA, 20 nt, Homo sapiens
  source 1..20: mol_type = unassigned RNA
atatgactcgtatagtgtct

SEQ ID NO: 3122 - RNA, 23 nt, Homo sapiens
  source 1..23: mol_type = unassigned RNA
tgtgactgcattatgaaaattct

SEQ ID NO: 3123 - RNA, 23 nt, Homo sapiens
  source 1..23: mol_type = unassigned RNA
agaattttcataatgcagtcaca

SEQ ID NO: 3124 - RNA, 20 nt, Homo sapiens
  source 1..20: mol_type = unassigned RNA
tggcttttaactttgatggc

SEQ ID NO: 3125 - RNA, 20 nt, Homo sapiens
  source 1..20: mol_type = unassigned RNA
gccatcaaagttaaaagcca

SEQ ID NO: 3126 - RNA, 21 nt, Homo sapiens
  source 1..21: mol_type = unassigned RNA
cacagcaagtgtagacaggca

SEQ ID NO: 3127 - RNA, 21 nt, Homo sapiens
  source 1..21: mol_type = unassigned RNA
tgcctgtctacacttgctgtg

SEQ ID NO: 3128 - RNA, 21 nt, Homo sapiens
  source 1..21: mol_type = unassigned RNA
cctgtctgtgcctgctgtaca

SEQ ID NO: 3129 - RNA, 21 nt, Homo sapiens
  source 1..21: mol_type = unassigned RNA
tgtacagcaggcacagacagg

SEQ ID NO: 3130 - RNA, 22 nt, Homo sapiens
  source 1..22: mol_type = unassigned RNA
taaatagagtaggcaaaggaca

SEQ ID NO: 3131 - RNA, 22 nt, Homo sapiens
  source 1..22: mol_type = unassigned RNA
tgtcctttgcctactctattta

SEQ ID NO: 3132 - RNA, 22 nt, Homo sapiens
  source 1..22: mol_type = unassigned RNA
tcctttgcctattctatttaag

SEQ ID NO: 3133 - RNA, 22 nt, Homo sapiens
  source 1..22: mol_type = unassigned RNA
cttaaatagaataggcaaagga

SEQ ID NO: 3134 - RNA, 22 nt, Homo sapiens
  source 1..22: mol_type = unassigned RNA
gttgggacaagaggacggtctt

SEQ ID NO: 3135 - RNA, 22 nt, Homo sapiens
  source 1..22: mol_type = unassigned RNA
aagaccgtcctcttgtcccaac

SEQ ID NO: 3136 - RNA, 17 nt, Homo sapiens
  source 1..17: mol_type = unassigned RNA
cagagaattgtttaatc

SEQ ID NO: 3137 - RNA, 17 nt, Homo sapiens
  source 1..17: mol_type = unassigned RNA
gattaaacaattctctg

SEQ ID NO: 3138 - RNA, 20 nt, Homo sapiens
  source 1..20: mol_type = unassigned RNA
tagaggaagctgtggagaga

SEQ ID NO: 3139 - RNA, 20 nt, Homo sapiens
  source 1..20: mol_type = unassigned RNA
tctctccacagcttcctcta

SEQ ID NO: 3140 - RNA, 22 nt, Homo sapiens
  source 1..22: mol_type = unassigned RNA
tccccttctgcaggcctgctgg

SEQ ID NO: 3141 - RNA, 22 nt, Homo sapiens
  source 1..22: mol_type = unassigned RNA
ccagcaggcctgcagaagggga

SEQ ID NO: 3142 - RNA, 23 nt, Homo sapiens
  source 1..23: mol_type = unassigned RNA
atcagggcttgtggaatgggaag

SEQ ID NO: 3143 - RNA, 23 nt, Homo sapiens
  source 1..23: mol_type = unassigned RNA
cttcccattccacaagccctgat

SEQ ID NO: 3144 - RNA, 23 nt, Homo sapiens
  source 1..23: mol_type = unassigned RNA
tctggcaagtaaaaaactctcat

SEQ ID NO: 3145 - RNA, 23 nt, Homo sapiens
  source 1..23: mol_type = unassigned RNA
atgagagttttttacttgccaga

SEQ ID NO: 3146 - RNA, 23 nt, Homo sapiens
  source 1..23: mol_type = unassigned RNA
tcgaggactggtggaagggcctt

SEQ ID NO: 3147 - RNA, 23 nt, Homo sapiens
  source 1..23: mol_type = unassigned RNA
aaggcccttccaccagtcctcga

SEQ ID NO: 3148 - RNA, 24 nt, Homo sapiens
  source 1..24: mol_type = unassigned RNA
tgggtagagaaggagctcagagga

SEQ ID NO: 3149 - RNA, 24 nt, Homo sapiens
  source 1..24: mol_type = unassigned RNA
tcctctgagctccttctctaccca

SEQ ID NO: 3150 - RNA, 22 nt, Homo sapiens
  source 1..22: mol_type = unassigned RNA
taaagaactcttaaaacccaat

SEQ ID NO: 3151 - RNA, 22 nt, Homo sapiens
  source 1..22: mol_type = unassigned RNA
attgggttttaagagttcttta

SEQ ID NO: 3152 - RNA, 23 nt, Homo sapiens
  source 1..23: mol_type = unassigned RNA
tgatggataaaagactacatatt

SEQ ID NO: 3153 - RNA, 23 nt, Homo sapiens
  source 1..23: mol_type = unassigned RNA
aatatgtagtcttttatccatca

SEQ ID NO: 3154 - RNA, 22 nt, Homo sapiens
  source 1..22: mol_type = unassigned RNA
tgcctaggctgagactgcagtg

SEQ ID NO: 3155 - RNA, 22 nt, Homo sapiens
  source 1..22: mol_type = unassigned RNA
cactgcagtctcagcctaggca

SEQ ID NO: 3156 - RNA, 22 nt, Homo sapiens
  source 1..22: mol_type = unassigned RNA
tggcccaacctattcagttagt

SEQ ID NO: 3157 - RNA, 22 nt, Homo sapiens
  source 1..22: mol_type = unassigned RNA
actaactgaataggttgggcca

SEQ ID NO: 3158 - RNA, 23 nt, Homo sapiens
  source 1..23: mol_type = unassigned RNA
ctgactgaataggtagggtcatt

SEQ ID NO: 3159 - RNA, 23 nt, Homo sapiens
  source 1..23: mol_type = unassigned RNA
aatgaccctacctattcagtcag

SEQ ID NO: 3160 - RNA, 24 nt, Homo sapiens
  source 1..24: mol_type = unassigned RNA
tctgtagcctgggagcaatggggt

SEQ ID NO: 3161 - RNA, 24 nt, Homo sapiens
  source 1..24: mol_type = unassigned RNA
accccattgctcccaggctacaga

SEQ ID NO: 3162 - RNA, 23 nt, Homo sapiens
  source 1..23: mol_type = unassigned RNA
taggagctcaacagatgcctgtt

SEQ ID NO: 3163 - RNA, 23 nt, Homo sapiens
  source 1..23: mol_type = unassigned RNA
aacaggcatctgttgagctccta

SEQ ID NO: 3164 - RNA, 19 nt, Homo sapiens
  source 1..19: mol_type = unassigned RNA
gagggcgggtggaggagga

SEQ ID NO: 3165 - RNA, 19 nt, Homo sapiens
  source 1..19: mol_type = unassigned RNA
tcctcctccacccgccctc

SEQ ID NO: 3166 - RNA, 25 nt, Homo sapiens
  source 1..25: mol_type = unassigned RNA
ataacattgtaaagcgcttctttcg

SEQ ID NO: 3167 - RNA, 25 nt, Homo sapiens
  source 1..25: mol_type = unassigned RNA
cgaaagaagcgctttacaatgttat

SEQ ID NO: 3168 - RNA, 24 nt, Homo sapiens
  source 1..24: mol_type = unassigned RNA
agatattttgagtgtttggaattg

SEQ ID NO: 3169 - RNA, 24 nt, Homo sapiens
  source 1..24: mol_type = unassigned RNA
caattccaaacactcaaaatatct

SEQ ID NO: 3170 - RNA, 22 nt, Homo sapiens
  source 1..22: mol_type = unassigned RNA
aactccaaacactcaaaactca

SEQ ID NO: 3171 - RNA, 22 nt, Homo sapiens
  source 1..22: mol_type = unassigned RNA
tgagttttgagtgtttggagtt

SEQ ID NO: 3172 - RNA, 22 nt, Homo sapiens
  source 1..22: mol_type = unassigned RNA
catgctaggatagaaagaatgg

SEQ ID NO: 3173 - RNA, 22 nt, Homo sapiens
  source 1..22: mol_type = unassigned RNA
ccattctttctatcctagcatg

SEQ ID NO: 3174 - RNA, 24 nt, Homo sapiens
  source 1..24: mol_type = unassigned RNA
ggttgggcagtgaggagggtgtga

SEQ ID NO: 3175 - RNA, 24 nt, Homo sapiens
  source 1..24: mol_type = unassigned RNA
tcacaccctcctcactgcccaacc

SEQ ID NO: 3176 - RNA, 22 nt, Homo sapiens
  source 1..22: mol_type = unassigned RNA
tggaaaaaactggtgtgtgctt

SEQ ID NO: 3177 - RNA, 22 nt, Homo sapiens
  source 1..22: mol_type = unassigned RNA
aagcacacaccagttttttcca

SEQ ID NO: 3178 - RNA, 22 nt, Homo sapiens
  source 1..22: mol_type = unassigned RNA
ctggggagatcctcgaggttgg

SEQ ID NO: 3179 - RNA, 22 nt, Homo sapiens
  source 1..22: mol_type = unassigned RNA
ccaacctcgaggatctccccag

SEQ ID NO: 3180 - RNA, 22 nt, Homo sapiens
  source 1..22: mol_type = unassigned RNA
caacctcgacgatctcctcagc

SEQ ID NO: 3181 - RNA, 22 nt, Homo sapiens
  source 1..22: mol_type = unassigned RNA
gctgaggagatcgtcgaggttg

SEQ ID NO: 3182 - RNA, 21 nt, Homo sapiens
  source 1..21: mol_type = unassigned RNA
tgaggagatcgtcgaggttgg

SEQ ID NO: 3183 - RNA, 21 nt, Homo sapiens
  source 1..21: mol_type = unassigned RNA
ccaacctcgacgatctcctca

SEQ ID NO: 3184 - RNA, 22 nt, Homo sapiens
  source 1..22: mol_type = unassigned RNA
caacctcgaggatctccccagc

SEQ ID NO: 3185 - RNA, 22 nt, Homo sapiens
  source 1..22: mol_type = unassigned RNA
gctggggagatcctcgaggttg

SEQ ID NO: 3186 - RNA, 21 nt, Homo sapiens
  source 1..21: mol_type = unassigned RNA
ggtggggcaatgggatcaggt

SEQ ID NO: 3187 - RNA, 21 nt, Homo sapiens
  source 1..21: mol_type = unassigned RNA
acctgatcccattgccccacc

SEQ ID NO: 3188 - RNA, 23 nt, Homo sapiens
  source 1..23: mol_type = unassigned RNA
ggggaaagcgagtagggacattt

SEQ ID NO: 3189 - RNA, 23 nt, Homo sapiens
  source 1..23: mol_type = unassigned RNA
aaatgtccctactcgctttcccc

SEQ ID NO: 3190 - RNA, 22 nt, Homo sapiens
  source 1..22: mol_type = unassigned RNA
cagaaggggagttgggagcaga

SEQ ID NO: 3191 - RNA, 22 nt, Homo sapiens
  source 1..22: mol_type = unassigned RNA
tctgctcccaactccccttctg

SEQ ID NO: 3192 - RNA, 21 nt, Homo sapiens
  source 1..21: mol_type = unassigned RNA
ccaggctctgcagtgggaact

SEQ ID NO: 3193 - RNA, 21 nt, Homo sapiens
  source 1..21: mol_type = unassigned RNA
agttcccactgcagagcctgg

SEQ ID NO: 3194 - RNA, 21 nt, Homo sapiens
  source 1..21: mol_type = unassigned RNA
ctcccacttccagatctttct

SEQ ID NO: 3195 - RNA, 21 nt, Homo sapiens
  source 1..21: mol_type = unassigned RNA
agaaagatctggaagtgggag

SEQ ID NO: 3196 - RNA, 22 nt, Homo sapiens
  source 1..22: mol_type = unassigned RNA
aaagatctggaagtgggagaca

SEQ ID NO: 3197 - RNA, 22 nt, Homo sapiens
  source 1..22: mol_type = unassigned RNA
tgtctcccacttccagatcttt

SEQ ID NO: 3198 - RNA, 22 nt, Homo sapiens
  source 1..22: mol_type = unassigned RNA
ctgccctagtctagctgaagct

SEQ ID NO: 3199 - RNA, 22 nt, Homo sapiens
  source 1..22: mol_type = unassigned RNA
agcttcagctagactagggcag

SEQ ID NO: 3200 - RNA, 22 nt, Homo sapiens
  source 1..22: mol_type = unassigned RNA
ttcagccaggctagtgcagtct

SEQ ID NO: 3201 - RNA, 22 nt, Homo sapiens
  source 1..22: mol_type = unassigned RNA
agactgcactagcctggctgaa

SEQ ID NO: 3202 - RNA, 22 nt, Homo sapiens
  source 1..22: mol_type = unassigned RNA
taggattacaagtgtcggccac

SEQ ID NO: 3203 - RNA, 22 nt, Homo sapiens
  source 1..22: mol_type = unassigned RNA
gtggccgacacttgtaatccta

SEQ ID NO: 3204 - RNA, 22 nt, Homo sapiens
  source 1..22: mol_type = unassigned RNA
agagctgagactagaaagccca

SEQ ID NO: 3205 - RNA, 22 nt, Homo sapiens
  source 1..22: mol_type = unassigned RNA
tgggctttctagtctcagctct

SEQ ID NO: 3206 - RNA, 22 nt, Homo sapiens
  source 1..22: mol_type = unassigned RNA
ggctttctagtctcagctctcc

SEQ ID NO: 3207 - RNA, 22 nt, Homo sapiens
  source 1..22: mol_type = unassigned RNA
ggagagctgagactagaaagcc

SEQ ID NO: 3208 - RNA, 23 nt, Homo sapiens
  source 1..23: mol_type = unassigned RNA
ctgataagaacagaggcccagat

SEQ ID NO: 3209 - RNA, 23 nt, Homo sapiens
  source 1..23: mol_type = unassigned RNA
atctgggcctctgttcttatcag

SEQ ID NO: 3210 - RNA, 21 nt, Homo sapiens
  source 1..21: mol_type = unassigned RNA
tccctacccctccactcccca

SEQ ID NO: 3211 - RNA, 21 nt, Homo sapiens
  source 1..21: mol_type = unassigned RNA
tggggagtggaggggtaggga

SEQ ID NO: 3212 - RNA, 23 nt, Homo sapiens
  source 1..23: mol_type = unassigned RNA
ttagggagtagaagggtggggag

SEQ ID NO: 3213 - RNA, 23 nt, Homo sapiens
  source 1..23: mol_type = unassigned RNA
ctccccacccttctactccctaa

SEQ ID NO: 3214 - RNA, 22 nt, Homo sapiens
  source 1..22: mol_type = unassigned RNA
tataaaatgagggcagtaagac

SEQ ID NO: 3215 - RNA, 22 nt, Homo sapiens
  source 1..22: mol_type = unassigned RNA
gtcttactgccctcattttata

SEQ ID NO: 3216 - RNA, 22 nt, Homo sapiens
  source 1..22: mol_type = unassigned RNA
tgtgactttaagggaaatggcg

SEQ ID NO: 3217 - RNA, 22 nt, Homo sapiens
  source 1..22: mol_type = unassigned RNA
cgccatttcccttaaagtcaca

SEQ ID NO: 3218 - RNA, 22 nt, Homo sapiens
  source 1..22: mol_type = unassigned RNA
aggtggatgcaatgtgacctca

SEQ ID NO: 3219 - RNA, 22 nt, Homo sapiens
  source 1..22: mol_type = unassigned RNA
tgaggtcacattgcatccacct

SEQ ID NO: 3220 - RNA, 23 nt, Homo sapiens
  source 1..23: mol_type = unassigned RNA
cgcagacaatgcctactggccta

SEQ ID NO: 3221 - RNA, 23 nt, Homo sapiens
  source 1..23: mol_type = unassigned RNA
taggccagtaggcattgtctgcg

SEQ ID NO: 3222 - RNA, 17 nt, Homo sapiens
  source 1..17: mol_type = unassigned RNA
gagttctacagtcagac

SEQ ID NO: 3223 - RNA, 17 nt, Homo sapiens
  source 1..17: mol_type = unassigned RNA
gtctgactgtagaactc

SEQ ID NO: 3224 - RNA, 22 nt, Homo sapiens
  source 1..22: mol_type = unassigned RNA
taggactgtgcttggcacatag

SEQ ID NO: 3225 - RNA, 22 nt, Homo sapiens
  source 1..22: mol_type = unassigned RNA
ctatgtgccaagcacagtccta

SEQ ID NO: 3226 - RNA, 22 nt, Homo sapiens
  source 1..22: mol_type = unassigned RNA
ctggggttctgagacagacagt

SEQ ID NO: 3227 - RNA, 22 nt, Homo sapiens
  source 1..22: mol_type = unassigned RNA
actgtctgtctcagaaccccag

SEQ ID NO: 3228 - RNA, 22 nt, Homo sapiens
  source 1..22: mol_type = unassigned RNA
aaaggaggaaataggcaggcca

SEQ ID NO: 3229 - RNA, 22 nt, Homo sapiens
  source 1..22: mol_type = unassigned RNA
tggcctgcctatttcctccttt

SEQ ID NO: 3230 - RNA, 22 nt, Homo sapiens
  source 1..22: mol_type = unassigned RNA
tgccctgcctgttttctccttt

SEQ ID NO: 3231 - RNA, 22 nt, Homo sapiens
  source 1..22: mol_type = unassigned RNA
aaaggagaaaacaggcagggca

SEQ ID NO: 3232 - RNA, 23 nt, Homo sapiens
  source 1..23: mol_type = unassigned RNA
tagtgagttagagatgcagagcc

SEQ ID NO: 3233 - RNA, 23 nt, Homo sapiens
  source 1..23: mol_type = unassigned RNA
ggctctgcatctctaactcacta

SEQ ID NO: 3234 - RNA, 19 nt, Homo sapiens
  source 1..19: mol_type = unassigned RNA
actggcctgggactaccgg

SEQ ID NO: 3235 - RNA, 19 nt, Homo sapiens
  source 1..19: mol_type = unassigned RNA
ccggtagtcccaggccagt

SEQ ID NO: 3236 - RNA, 21 nt, Homo sapiens
  source 1..21: mol_type = unassigned RNA
tgcacggcactggggacacgt

SEQ ID NO: 3237 - RNA, 21 nt, Homo sapiens
  source 1..21: mol_type = unassigned RNA
acgtgtccccagtgccgtgca

SEQ ID NO: 3238 - RNA, 23 nt, Homo sapiens
  source 1..23: mol_type = unassigned RNA
tgtgtacacacgtgccaggcgct

SEQ ID NO: 3239 - RNA, 23 nt, Homo sapiens
  source 1..23: mol_type = unassigned RNA
agcgcctggcacgtgtgtacaca

SEQ ID NO: 3240 - RNA, 17 nt, Homo sapiens
  source 1..17: mol_type = unassigned RNA
ggggcgcggccggatcg

SEQ ID NO: 3241 - RNA, 17 nt, Homo sapiens
  source 1..17: mol_type = unassigned RNA
cgatccggccgcgcccc

SEQ ID NO: 3242 - RNA, 22 nt, Homo sapiens
  source 1..22: mol_type = unassigned RNA
agaaggggtgaaatttaaacgt

SEQ ID NO: 3243 - RNA, 22 nt, Homo sapiens
  source 1..22: mol_type = unassigned RNA
acgtttaaatttcaccccttct

SEQ ID NO: 3244 - RNA, 19 nt, Homo sapiens
  source 1..19: mol_type = unassigned RNA
atcgggccctcggcgccgg

SEQ ID NO: 3245 - RNA, 19 nt, Homo sapiens
  source 1..19: mol_type = unassigned RNA
ccggcgccgagggcccgat

SEQ ID NO: 3246 - RNA, 17 nt, Homo sapiens
  source 1..17: mol_type = unassigned RNA
gcttctgtagtgtagtc

SEQ ID NO: 3247 - RNA, 17 nt, Homo sapiens
  source 1..17: mol_type = unassigned RNA
gactacactacagaagc

SEQ ID NO: 3248 - RNA, 22 nt, Homo sapiens
  source 1..22: mol_type = unassigned RNA
gcctctctcggagtcgctcgga

SEQ ID NO: 3249 - RNA, 22 nt, Homo sapiens
  source 1..22: mol_type = unassigned RNA
tccgagcgactccgagagaggc

SEQ ID NO: 3250 - RNA, 23 nt, Homo sapiens
  source 1..23: mol_type = unassigned RNA
aaagtctcgctctctgcccctca

SEQ ID NO: 3251 - RNA, 23 nt, Homo sapiens
  source 1..23: mol_type = unassigned RNA
tgaggggcagagagcgagacttt

SEQ ID NO: 3252 - RNA, 24 nt, Homo sapiens
  source 1..24: mol_type = unassigned RNA
tgaggggcctcagaccgagctttt

SEQ ID NO: 3253 - RNA, 24 nt, Homo sapiens
  source 1..24: mol_type = unassigned RNA
aaaagctcggtctgaggcccctca

SEQ ID NO: 3254 - RNA, 23 nt, Homo sapiens
  source 1..23: mol_type = unassigned RNA
agaagaaggcggtcggtctgcgg

SEQ ID NO: 3255 - RNA, 23 nt, Homo sapiens
  source 1..23: mol_type = unassigned RNA
ccgcagaccgaccgccttcttct

SEQ ID NO: 3256 - RNA, 20 nt, Homo sapiens
  source 1..20: mol_type = unassigned RNA
ttggccatggggctgcgcgg

SEQ ID NO: 3257 - RNA, 20 nt, Homo sapiens
  source 1..20: mol_type = unassigned RNA
ccgcgcagccccatggccaa

SEQ ID NO: 3258 - RNA, 23 nt, Homo sapiens
  source 1..23: mol_type = unassigned RNA
cctgggcagcgtgtggctgaagg

SEQ ID NO: 3259 - RNA, 23 nt, Homo sapiens
  source 1..23: mol_type = unassigned RNA
ccttcagccacacgctgcccagg

SEQ ID NO: 3260 - RNA, 23 nt, Homo sapiens
  source 1..23: mol_type = unassigned RNA
agaggctttgtgcggatacgggg

SEQ ID NO: 3261 - RNA, 23 nt, Homo sapiens
  source 1..23: mol_type = unassigned RNA
ccccgtatccgcacaaagcctct

SEQ ID NO: 3262 - RNA, 21 nt, Homo sapiens
  source 1..21: mol_type = unassigned RNA
cccttgggtctgatggggtag

SEQ ID NO: 3263 - RNA, 21 nt, Homo sapiens
  source 1..21: mol_type = unassigned RNA
ctaccccatcagacccaaggg

SEQ ID NO: 3264 - RNA, 25 nt, Homo sapiens
  source 1..25: mol_type = unassigned RNA
tgccccatctgtgccctgggtagga

SEQ ID NO: 3265 - RNA, 25 nt, Homo sapiens
  source 1..25: mol_type = unassigned RNA
tcctacccagggcacagatggggca

SEQ ID NO: 3266 - RNA, 23 nt, Homo sapiens
  source 1..23: mol_type = unassigned RNA
tgtggaaggtagacggccagaga

SEQ ID NO: 3267 - RNA, 23 nt, Homo sapiens
  source 1..23: mol_type = unassigned RNA
tctctggccgtctaccttccaca

SEQ ID NO: 3268 - RNA, 20 nt, Homo sapiens
  source 1..20: mol_type = unassigned RNA
tctggccagctacgtcccca

SEQ ID NO: 3269 - RNA, 20 nt, Homo sapiens
  source 1..20: mol_type = unassigned RNA
tggggacgtagctggccaga

SEQ ID NO: 3270 - RNA, 23 nt, Homo sapiens
  source 1..23: mol_type = unassigned RNA
tggggacgtagctggccagacag

SEQ ID NO: 3271 - RNA, 23 nt, Homo sapiens
  source 1..23: mol_type = unassigned RNA
ctgtctggccagctacgtcccca

SEQ ID NO: 3272 - RNA, 22 nt, Homo sapiens
  source 1..22: mol_type = unassigned RNA
ctctctggccgtctaccttcca

SEQ ID NO: 3273 - RNA, 22 nt, Homo sapiens
  source 1..22: mol_type = unassigned RNA
tggaaggtagacggccagagag

SEQ ID NO: 3274 - RNA, 23 nt, Homo sapiens
  source 1..23: mol_type = unassigned RNA
tctgggaggttgtagcagtggaa

SEQ ID NO: 3275 - RNA, 23 nt, Homo sapiens
  source 1..23: mol_type = unassigned RNA
ttccactgctacaacctcccaga

SEQ ID NO: 3276 - RNA, 22 nt, Homo sapiens
  source 1..22: mol_type = unassigned RNA
tcctgcgtaggatctgaggagt

SEQ ID NO: 3277 - RNA, 22 nt, Homo sapiens
  source 1..22: mol_type = unassigned RNA
actcctcagatcctacgcagga

SEQ ID NO: 3278 - RNA, 22 nt, Homo sapiens
  source 1..22: mol_type = unassigned RNA
agctctgctgctcactggcagt

SEQ ID NO: 3279 - RNA, 22 nt, Homo sapiens
  source 1..22: mol_type = unassigned RNA
actgccagtgagcagcagagct

SEQ ID NO: 3280 - RNA, 21 nt, Homo sapiens
  source 1..21: mol_type = unassigned RNA
ggccagccaccaggagggctg

SEQ ID NO: 3281 - RNA, 21 nt, Homo sapiens
  source 1..21: mol_type = unassigned RNA
cagccctcctggtggctggcc

SEQ ID NO: 3282 - RNA, 17 nt, Homo sapiens
  source 1..17: mol_type = unassigned RNA
cgcgccgggcccgggtt

SEQ ID NO: 3283 - RNA, 17 nt, Homo sapiens
  source 1..17: mol_type = unassigned RNA
aacccgggcccggcgcg

SEQ ID NO: 3284 - RNA, 23 nt, Homo sapiens
  source 1..23: mol_type = unassigned RNA
ggaggcgcaggctcggaaaggcg

SEQ ID NO: 3285 - RNA, 23 nt, Homo sapiens
  source 1..23: mol_type = unassigned RNA
cgcctttccgagcctgcgcctcc

SEQ ID NO: 3286 - RNA, 22 nt, Homo sapiens
  source 1..22: mol_type = unassigned RNA
gtggagtcctggggaatggaga

SEQ ID NO: 3287 - RNA, 22 nt, Homo sapiens
  source 1..22: mol_type = unassigned RNA
tctccattccccaggactccac

SEQ ID NO: 3288 - RNA, 23 nt, Homo sapiens
  source 1..23: mol_type = unassigned RNA
agggactgccttaggagaaagtt

SEQ ID NO: 3289 - RNA, 23 nt, Homo sapiens
  source 1..23: mol_type = unassigned RNA
aactttctcctaaggcagtccct

SEQ ID NO: 3290 - RNA, 17 nt, Homo sapiens
  source 1..17: mol_type = unassigned RNA
gggatatgaagaaaaat

SEQ ID NO: 3291 - RNA, 17 nt, Homo sapiens
  source 1..17: mol_type = unassigned RNA
atttttcttcatatccc

SEQ ID NO: 3292 - RNA, 22 nt, Homo sapiens
  source 1..22: mol_type = unassigned RNA
tggaagggagaagagctttaat

SEQ ID NO: 3293 - RNA, 22 nt, Homo sapiens
  source 1..22: mol_type = unassigned RNA
attaaagctcttctcccttcca

SEQ ID NO: 3294 - RNA, 22 nt, Homo sapiens
  source 1..22: mol_type = unassigned RNA
actttcctcactcccgtgaagt

SEQ ID NO: 3295 - RNA, 22 nt, Homo sapiens
  source 1..22: mol_type = unassigned RNA
acttcacgggagtgaggaaagt

SEQ ID NO: 3296 - RNA, 21 nt, Homo sapiens
  source 1..21: mol_type = unassigned RNA
ttcgcgggcgaaggcaaagtc

SEQ ID NO: 3297 - RNA, 21 nt, Homo sapiens
  source 1..21: mol_type = unassigned RNA
gactttgccttcgcccgcgaa

SEQ ID NO: 3298 - RNA, 22 nt, Homo sapiens
  source 1..22: mol_type = unassigned RNA
catctggcatccgtcacacaga

SEQ ID NO: 3299 - RNA, 22 nt, Homo sapiens
  source 1..22: mol_type = unassigned RNA
tctgtgtgacggatgccagatg

SEQ ID NO: 3300 - RNA, 22 nt, Homo sapiens
  source 1..22: mol_type = unassigned RNA
tgagggacagatgccagaagca

SEQ ID NO: 3301 - RNA, 22 nt, Homo sapiens
  source 1..22: mol_type = unassigned RNA
tgcttctggcatctgtccctca

SEQ ID NO: 3302 - RNA, 22 nt, Homo sapiens
  source 1..22: mol_type = unassigned RNA
aaactaatctctacactgctgc

SEQ ID NO: 3303 - RNA, 22 nt, Homo sapiens
  source 1..22: mol_type = unassigned RNA
gcagcagtgtagagattagttt

SEQ ID NO: 3304 - RNA, 22 nt, Homo sapiens
  source 1..22: mol_type = unassigned RNA
gcagtagtgtagagattggttt

SEQ ID NO: 3305 - RNA, 22 nt, Homo sapiens
  source 1..22: mol_type = unassigned RNA
aaaccaatctctacactactgc

SEQ ID NO: 3306 - RNA, 21 nt, Homo sapiens
  source 1..21: mol_type = unassigned RNA
gctgcaccggagactgggtaa

SEQ ID NO: 3307 - RNA, 21 nt, Homo sapiens
  source 1..21: mol_type = unassigned RNA
ttacccagtctccggtgcagc

SEQ ID NO: 3308 - RNA, 21 nt, Homo sapiens
  source 1..21: mol_type = unassigned RNA
tacccagtctccggtgcagcc

SEQ ID NO: 3309 - RNA, 21 nt, Homo sapiens
  source 1..21: mol_type = unassigned RNA
ggctgcaccggagactgggta

SEQ ID NO: 3310 - RNA, 24 nt, Homo sapiens
  source 1..24: mol_type = unassigned RNA
tgtggacagtgaggtagagggagt

SEQ ID NO: 3311 - RNA, 24 nt, Homo sapiens
  source 1..24: mol_type = unassigned RNA
actccctctacctcactgtccaca

SEQ ID NO: 3312 - RNA, 22 nt, Homo sapiens
  source 1..22: mol_type = unassigned RNA
agcttttgggaattcaggtagt

SEQ ID NO: 3313 - RNA, 22 nt, Homo sapiens
  source 1..22: mol_type = unassigned RNA
actacctgaattcccaaaagct

SEQ ID NO: 3314 - RNA, 21 nt, Homo sapiens
  source 1..21: mol_type = unassigned RNA
acctgaattaccaaaagcttt

SEQ ID NO: 3315 - RNA, 21 nt, Homo sapiens
  source 1..21: mol_type = unassigned RNA
aaagcttttggtaattcaggt

SEQ ID NO: 3316 - RNA, 22 nt, Homo sapiens
  source 1..22: mol_type = unassigned RNA
atatacctgttcggtctcttta

SEQ ID NO: 3317 - RNA, 22 nt, Homo sapiens
  source 1..22: mol_type = unassigned RNA
taaagagaccgaacaggtatat

SEQ ID NO: 3318 - RNA, 22 nt, Homo sapiens
  source 1..22: mol_type = unassigned RNA
aggggaccaaagagatatatag

SEQ ID NO: 3319 - RNA, 22 nt, Homo sapiens
  source 1..22: mol_type = unassigned RNA
ctatatatctctttggtcccct

SEQ ID NO: 3320 - RNA, 23 nt, Homo sapiens
  source 1..23: mol_type = unassigned RNA
tttgtatggatatgtgtgtgtat

SEQ ID NO: 3321 - RNA, 23 nt, Homo sapiens
  source 1..23: mol_type = unassigned RNA
atacacacacatatccatacaaa

SEQ ID NO: 3322 - RNA, 22 nt, Homo sapiens
  source 1..22: mol_type = unassigned RNA
tgtgttagaataggggcaataa

SEQ ID NO: 3323 - RNA, 22 nt, Homo sapiens
  source 1..22: mol_type = unassigned RNA
ttattgcccctattctaacaca

SEQ ID NO: 3324 - RNA, 22 nt, Homo sapiens
  source 1..22: mol_type = unassigned RNA
attgcctctgttctaacacaag

SEQ ID NO: 3325 - RNA, 22 nt, Homo sapiens
  source 1..22: mol_type = unassigned RNA
cttgtgttagaacagaggcaat

SEQ ID NO: 3326 - RNA, 22 nt, Homo sapiens
  source 1..22: mol_type = unassigned RNA
aagggcttcctctctgcaggac

SEQ ID NO: 3327 - RNA, 22 nt, Homo sapiens
  source 1..22: mol_type = unassigned RNA
gtcctgcagagaggaagccctt

SEQ ID NO: 3328 - RNA, 21 nt, Homo sapiens
  source 1..21: mol_type = unassigned RNA
cctgcagagaggaagcccttc

SEQ ID NO: 3329 - RNA, 21 nt, Homo sapiens
  source 1..21: mol_type = unassigned RNA
gaagggcttcctctctgcagg

SEQ ID NO: 3330 - RNA, 22 nt, Homo sapiens
  source 1..22: mol_type = unassigned RNA
aggatttcagaaatactggtgt

SEQ ID NO: 3331 - RNA, 22 nt, Homo sapiens
  source 1..22: mol_type = unassigned RNA
acaccagtatttctgaaatcct

SEQ ID NO: 3332 - RNA, 24 nt, Homo sapiens
  source 1..24: mol_type = unassigned RNA
agatgtatggaatctgtatatatc

SEQ ID NO: 3333 - RNA, 24 nt, Homo sapiens
  source 1..24: mol_type = unassigned RNA
gatatatacagattccatacatct

SEQ ID NO: 3334 - RNA, 22 nt, Homo sapiens
  source 1..22: mol_type = unassigned RNA
cggggagagaacgcagtgacgt

SEQ ID NO: 3335 - RNA, 22 nt, Homo sapiens
  source 1..22: mol_type = unassigned RNA
acgtcactgcgttctctccccg

SEQ ID NO: 3336 - RNA, 19 nt, Homo sapiens
  source 1..19: mol_type = unassigned RNA
tggggcggagcttccggag

SEQ ID NO: 3337 - RNA, 19 nt, Homo sapiens
  source 1..19: mol_type = unassigned RNA
ctccggaagctccgcccca

SEQ ID NO: 3338 - RNA, 21 nt, Homo sapiens
  source 1..21: mol_type = unassigned RNA
tcacgcggagagatggctttg

SEQ ID NO: 3339 - RNA, 21 nt, Homo sapiens
  source 1..21: mol_type = unassigned RNA
caaagccatctctccgcgtga

SEQ ID NO: 3340 - RNA, 22 nt, Homo sapiens
  source 1..22: mol_type = unassigned RNA
caggcgtctgtctacgtggctt

SEQ ID NO: 3341 - RNA, 22 nt, Homo sapiens
  source 1..22: mol_type = unassigned RNA
aagccacgtagacagacgcctg

SEQ ID NO: 3342 - RNA, 22 nt, Homo sapiens
  source 1..22: mol_type = unassigned RNA
caccttgcgctactcaggtctg

SEQ ID NO: 3343 - RNA, 22 nt, Homo sapiens
  source 1..22: mol_type = unassigned RNA
cagacctgagtagcgcaaggtg

SEQ ID NO: 3344 - RNA, 22 nt, Homo sapiens
  source 1..22: mol_type = unassigned RNA
aatctgagaaggcgcacaaggt

SEQ ID NO: 3345 - RNA, 22 nt, Homo sapiens
  source 1..22: mol_type = unassigned RNA
accttgtgcgccttctcagatt

SEQ ID NO: 3346 - RNA, 22 nt, Homo sapiens
  source 1..22: mol_type = unassigned RNA
aaggcctttctgaaccttcaga

SEQ ID NO: 3347 - RNA, 22 nt, Homo sapiens
  source 1..22: mol_type = unassigned RNA
tctgaaggttcagaaaggcctt

SEQ ID NO: 3348 - RNA, 22 nt, Homo sapiens
  source 1..22: mol_type = unassigned RNA
gtgacatcacatatacggcagc

SEQ ID NO: 3349 - RNA, 22 nt, Homo sapiens
  source 1..22: mol_type = unassigned RNA
gctgccgtatatgtgatgtcac

SEQ ID NO: 3350 - RNA, 24 nt, Homo sapiens
  source 1..24: mol_type = unassigned RNA
tcagaacaaatgccggttcccaga

SEQ ID NO: 3351 - RNA, 24 nt, Homo sapiens
  source 1..24: mol_type = unassigned RNA
tctgggaaccggcatttgttctga

SEQ ID NO: 3352 - RNA, 22 nt, Homo sapiens
  source 1..22: mol_type = unassigned RNA
tgagaaccacgtctgctctgag

SEQ ID NO: 3353 - RNA, 22 nt, Homo sapiens
  source 1..22: mol_type = unassigned RNA
ctcagagcagacgtggttctca

SEQ ID NO: 3354 - RNA, 17 nt, Homo sapiens
  source 1..17: mol_type = unassigned RNA
tcatattgcttctttct

SEQ ID NO: 3355 - RNA, 17 nt, Homo sapiens
  source 1..17: mol_type = unassigned RNA
agaaagaagcaatatga

SEQ ID NO: 3356 - RNA, 22 nt, Homo sapiens
  source 1..22: mol_type = unassigned RNA
tgtgacagattgataactgaaa

SEQ ID NO: 3357 - RNA, 22 nt, Homo sapiens
  source 1..22: mol_type = unassigned RNA
tttcagttatcaatctgtcaca

SEQ ID NO: 3358 - RNA, 23 nt, Homo sapiens
  source 1..23: mol_type = unassigned RNA
tggagtccaggaatctgcatttt

SEQ ID NO: 3359 - RNA, 23 nt, Homo sapiens
  source 1..23: mol_type = unassigned RNA
aaaatgcagattcctggactcca

SEQ ID NO: 3360 - RNA, 22 nt, Homo sapiens
  source 1..22: mol_type = unassigned RNA
aagcccttaccccaaaaagtat

SEQ ID NO: 3361 - RNA, 22 nt, Homo sapiens
  source 1..22: mol_type = unassigned RNA
atactttttggggtaagggctt

SEQ ID NO: 3362 - RNA, 22 nt, Homo sapiens
  source 1..22: mol_type = unassigned RNA
aagcccttaccccaaaaagcat

SEQ ID NO: 3363 - RNA, 22 nt, Homo sapiens
  source 1..22: mol_type = unassigned RNA
atgctttttggggtaagggctt

SEQ ID NO: 3364 - RNA, 22 nt, Homo sapiens
  source 1..22: mol_type = unassigned RNA
tggaatgtaaggaagtgtgtgg

SEQ ID NO: 3365 - RNA, 22 nt, Homo sapiens
  source 1..22: mol_type = unassigned RNA
ccacacacttccttacattcca

SEQ ID NO: 3366 - RNA, 22 nt, Homo sapiens
  source 1..22: mol_type = unassigned RNA
cttatcagattgtattgtaatt

SEQ ID NO: 3367 - RNA, 22 nt, Homo sapiens
  source 1..22: mol_type = unassigned RNA
aattacaatacaatctgataag

SEQ ID NO: 3368 - RNA, 22 nt, Homo sapiens
  source 1..22: mol_type = unassigned RNA
ttataatacaacctgataagtg

SEQ ID NO: 3369 - RNA, 22 nt, Homo sapiens
  source 1..22: mol_type = unassigned RNA
cacttatcaggttgtattataa

SEQ ID NO: 3370 - RNA, 22 nt, Homo sapiens
  source 1..22: mol_type = unassigned RNA
cttagcaggttgtattatcatt

SEQ ID NO: 3371 - RNA, 22 nt, Homo sapiens
  source 1..22: mol_type = unassigned RNA
aatgataatacaacctgctaag

SEQ ID NO: 3372 - RNA, 22 nt, Homo sapiens
  source 1..22: mol_type = unassigned RNA
atataatacaacctgctaagtg

SEQ ID NO: 3373 - RNA, 22 nt, Homo sapiens
  source 1..22: mol_type = unassigned RNA
cacttagcaggttgtattatat

SEQ ID NO: 3374 - RNA, 22 nt, Homo sapiens
  source 1..22: mol_type = unassigned RNA
cacttagcaggttgtattatat

SEQ ID NO: 3375 - RNA, 22 nt, Homo sapiens
  source 1..22: mol_type = unassigned RNA
atataatacaacctgctaagtg

SEQ ID NO: 3376 - RNA, 22 nt, Homo sapiens
  source 1..22: mol_type = unassigned RNA
ataatacaacctgctaagtgct

SEQ ID NO: 3377 - RNA, 22 nt, Homo sapiens
  source 1..22: mol_type = unassigned RNA
agcacttagcaggttgtattat

SEQ ID NO: 3378 - RNA, 22 nt, Homo sapiens
  source 1..22: mol_type = unassigned RNA
tttggtccccttcaaccagctg

SEQ ID NO: 3379 - RNA, 22 nt, Homo sapiens
  source 1..22: mol_type = unassigned RNA
cagctggttgaaggggaccaaa

SEQ ID NO: 3380 - RNA, 22 nt, Homo sapiens
  source 1..22: mol_type = unassigned RNA
tttggtccccttcaaccagcta

SEQ ID NO: 3381 - RNA, 22 nt, Homo sapiens
  source 1..22: mol_type = unassigned RNA
tagctggttgaaggggaccaaa

SEQ ID NO: 3382 - RNA, 22 nt, Homo sapiens
  source 1..22: mol_type = unassigned RNA
tgtaaacatccttgactggaag

SEQ ID NO: 3383 - RNA, 22 nt, Homo sapiens
  source 1..22: mol_type = unassigned RNA
cttccagtcaaggatgtttaca

SEQ ID NO: 3384 - RNA, 22 nt, Homo sapiens
  source 1..22: mol_type = unassigned RNA
tgtcagtttgtcaaatacccca

SEQ ID NO: 3385 - RNA, 22 nt, Homo sapiens
  source 1..22: mol_type = unassigned RNA
tggggtatttgacaaactgaca

SEQ ID NO: 3386 - RNA, 22 nt, Homo sapiens
  source 1..22: mol_type = unassigned RNA
cgtgtatttgacaagctgagtt

SEQ ID NO: 3387 - RNA, 22 nt, Homo sapiens
  source 1..22: mol_type = unassigned RNA
aactcagcttgtcaaatacacg

SEQ ID NO: 3388 - RNA, 21 nt, Homo sapiens
  source 1..21: mol_type = unassigned RNA
ttcacagtggctaagttccgc

SEQ ID NO: 3389 - RNA, 21 nt, Homo sapiens
  source 1..21: mol_type = unassigned RNA
gcggaacttagccactgtgaa

SEQ ID NO: 3390 - RNA, 22 nt, Homo sapiens
  source 1..22: mol_type = unassigned RNA
agggcttagctgcttgtgagca

SEQ ID NO: 3391 - RNA, 22 nt, Homo sapiens
  source 1..22: mol_type = unassigned RNA
tgctcacaagcagctaagccct

SEQ ID NO: 3392 - RNA, 21 nt, Homo sapiens
  source 1..21: mol_type = unassigned RNA
atcacattgccagggattacc

SEQ ID NO: 3393 - RNA, 21 nt, Homo sapiens
  source 1..21: mol_type = unassigned RNA
ggtaatccctggcaatgtgat

SEQ ID NO: 3394 - RNA, 22 nt, Homo sapiens
  source 1..22: mol_type = unassigned RNA
tgggttcctggcatgctgattt

SEQ ID NO: 3395 - RNA, 22 nt, Homo sapiens
  source 1..22: mol_type = unassigned RNA
aaatcagcatgccaggaaccca

SEQ ID NO: 3396 - RNA, 22 nt, Homo sapiens
  source 1..22: mol_type = unassigned RNA
ctttcagtcggatgtttacagc

SEQ ID NO: 3397 - RNA, 22 nt, Homo sapiens
  source 1..22: mol_type = unassigned RNA
gctgtaaacatccgactgaaag

SEQ ID NO: 3398 - RNA, 22 nt, Homo sapiens
  source 1..22: mol_type = unassigned RNA
tgcctactgagctgatatcagt

SEQ ID NO: 3399 - RNA, 22 nt, Homo sapiens
  source 1..22: mol_type = unassigned RNA
actgatatcagctcagtaggca

SEQ ID NO: 3400 - RNA, 22 nt, Homo sapiens
  source 1..22: mol_type = unassigned RNA
tgcctactgagctgaaacacag

SEQ ID NO: 3401 - RNA, 22 nt, Homo sapiens
  source 1..22: mol_type = unassigned RNA
ctgtgtttcagctcagtaggca

SEQ ID NO: 3402 - RNA, 22 nt, Homo sapiens
  source 1..22: mol_type = unassigned RNA
tggctcagttcagcaggaacag

SEQ ID NO: 3403 - RNA, 22 nt, Homo sapiens
  source 1..22: mol_type = unassigned RNA
ctgttcctgctgaactgagcca

SEQ ID NO: 3404 - RNA, 21 nt, Homo sapiens
  source 1..21: mol_type = unassigned RNA
ttcacagtggctaagttctgc

SEQ ID NO: 3405 - RNA, 21 nt, Homo sapiens
  source 1..21: mol_type = unassigned RNA
gcagaacttagccactgtgaa

SEQ ID NO: 3406 - RNA, 22 nt, Homo sapiens
  source 1..22: mol_type = unassigned RNA
agagcttagctgattggtgaac

SEQ ID NO: 3407 - RNA, 22 nt, Homo sapiens
  source 1..22: mol_type = unassigned RNA
gttcaccaatcagctaagctct

SEQ ID NO: 3408 - RNA, 23 nt, Homo sapiens
  source 1..23: mol_type = unassigned RNA
tgtagtgtttcctactttatgga

SEQ ID NO: 3409 - RNA, 23 nt, Homo sapiens
  source 1..23: mol_type = unassigned RNA
tccataaagtaggaaacactaca

SEQ ID NO: 3410 - RNA, 21 nt, Homo sapiens
  source 1..21: mol_type = unassigned RNA
cataaagtagaaagcactact

SEQ ID NO: 3411 - RNA, 21 nt, Homo sapiens
  source 1..21: mol_type = unassigned RNA
agtagtgctttctactttatg

SEQ ID NO: 3412 - RNA, 22 nt, Homo sapiens
  source 1..22: mol_type = unassigned RNA
tgaaggtctactgtgtgccagg

SEQ ID NO: 3413 - RNA, 22 nt, Homo sapiens
  source 1..22: mol_type = unassigned RNA
cctggcacacagtagaccttca

SEQ ID NO: 3414 - RNA, 22 nt, Homo sapiens
  source 1..22: mol_type = unassigned RNA
ttgtacatggtaggctttcatt

SEQ ID NO: 3415 - RNA, 22 nt, Homo sapiens
  source 1..22: mol_type = unassigned RNA
aatgaaagcctaccatgtacaa

SEQ ID NO: 3416 - RNA, 21 nt, Homo sapiens
  source 1..21: mol_type = unassigned RNA
ctggatggctcctccatgtct

SEQ ID NO: 3417 - RNA, 21 nt, Homo sapiens
  source 1..21: mol_type = unassigned RNA
agacatggaggagccatccag

SEQ ID NO: 3418 - RNA, 23 nt, Homo sapiens
  source 1..23: mol_type = unassigned RNA
tcttggagtaggtcattgggtgg

SEQ ID NO: 3419 - RNA, 23 nt, Homo sapiens
  source 1..23: mol_type = unassigned RNA
ccacccaatgacctactccaaga

SEQ ID NO: 3420 - RNA, 22 nt, Homo sapiens
  source 1..22: mol_type = unassigned RNA
ctcatctgcaaagaagtaagtg

SEQ ID NO: 3421 - RNA, 22 nt, Homo sapiens
  source 1..22: mol_type = unassigned RNA
cacttacttctttgcagatgag

SEQ ID NO: 3422 - RNA, 22 nt, Homo sapiens
  source 1..22: mol_type = unassigned RNA
aactgtttgcagaggaaactga

SEQ ID NO: 3423 - RNA, 22 nt, Homo sapiens
  source 1..22: mol_type = unassigned RNA
tcagtttcctctgcaaacagtt

SEQ ID NO: 3424 - RNA, 22 nt, Homo sapiens
  source 1..22: mol_type = unassigned RNA
cttggttcagggagggtcccca

SEQ ID NO: 3425 - RNA, 22 nt, Homo sapiens
  source 1..22: mol_type = unassigned RNA
tggggaccctccctgaaccaag

SEQ ID NO: 3426 - RNA, 22 nt, Homo sapiens
  source 1..22: mol_type = unassigned RNA
aggaccttccctgaaccaagga

SEQ ID NO: 3427 - RNA, 22 nt, Homo sapiens
  source 1..22: mol_type = unassigned RNA
tccttggttcagggaaggtcct

SEQ ID NO: 3428 - RNA, 21 nt, Homo sapiens
  source 1..21: mol_type = unassigned RNA
acctcctgtgtgcatggatta

SEQ ID NO: 3429 - RNA, 21 nt, Homo sapiens
  source 1..21: mol_type = unassigned RNA
taatccatgcacacaggaggt

SEQ ID NO: 3430 - RNA, 22 nt, Homo sapiens
  source 1..22: mol_type = unassigned RNA
tacccattgcatatcggagttg

SEQ ID NO: 3431 - RNA, 22 nt, Homo sapiens
  source 1..22: mol_type = unassigned RNA
caactccgatatgcaatgggta

SEQ ID NO: 3432 - RNA, 18 nt, Homo sapiens
  source 1..18: mol_type = unassigned RNA
aaagctgggttgagaagg

SEQ ID NO: 3433 - RNA, 18 nt, Homo sapiens
  source 1..18: mol_type = unassigned RNA
ccttctcaacccagcttt

SEQ ID NO: 3434 - RNA, 20 nt, Homo sapiens
  source 1..20: mol_type = unassigned RNA
ggtatccgtttggggatggt

SEQ ID NO: 3435 - RNA, 20 nt, Homo sapiens
  source 1..20: mol_type = unassigned RNA
accatccccaaacggatacc

SEQ ID NO: 3436 - RNA, 22 nt, Homo sapiens
  source 1..22: mol_type = unassigned RNA
gaaggcagcagtgctcccctgt

SEQ ID NO: 3437 - RNA, 22 nt, Homo sapiens
  source 1..22: mol_type = unassigned RNA
acaggggagcactgctgccttc

SEQ ID NO: 3438 - RNA, 22 nt, Homo sapiens
  source 1..22: mol_type = unassigned RNA
tcagtgcatcacagaactttgt

SEQ ID NO: 3439 - RNA, 22 nt, Homo sapiens
  source 1..22: mol_type = unassigned RNA
acaaagttctgtgatgcactga

SEQ ID NO: 3440 - RNA, 22 nt, Homo sapiens
  source 1..22: mol_type = unassigned RNA
aagttctgttatacactcaggc

SEQ ID NO: 3441 - RNA, 22 nt, Homo sapiens
  source 1..22: mol_type = unassigned RNA
gcctgagtgtataacagaactt

SEQ ID NO: 3442 - RNA, 22 nt, Homo sapiens
  source 1..22: mol_type = unassigned RNA
ctggccctctctgcccttccgt

SEQ ID NO: 3443 - RNA, 22 nt, Homo sapiens
  source 1..22: mol_type = unassigned RNA
acggaagggcagagagggccag

SEQ ID NO: 3444 - RNA, 21 nt, Homo sapiens
  source 1..21: mol_type = unassigned RNA
ctagactgaagctccttgagg

SEQ ID NO: 3445 - RNA, 21 nt, Homo sapiens
  source 1..21: mol_type = unassigned RNA
cctcaaggagcttcagtctag

SEQ ID NO: 3446 - RNA, 21 nt, Homo sapiens
  source 1..21: mol_type = unassigned RNA
tcgaggagctcacagtctagt

SEQ ID NO: 3447 - RNA, 21 nt, Homo sapiens
  source 1..21: mol_type = unassigned RNA
actagactgtgagctcctcga

SEQ ID NO: 3448 - RNA, 21 nt, Homo sapiens
  source 1..21: mol_type = unassigned RNA
cacattacacggtcgacctct

SEQ ID NO: 3449 - RNA, 21 nt, Homo sapiens
  source 1..21: mol_type = unassigned RNA
agaggtcgaccgtgtaatgtg

SEQ ID NO: 3450 - RNA, 22 nt, Homo sapiens
  source 1..22: mol_type = unassigned RNA
aggtggtccgtggcgcgttcgc

SEQ ID NO: 3451 - RNA, 22 nt, Homo sapiens
  source 1..22: mol_type = unassigned RNA
gcgaacgcgccacggaccacct

SEQ ID NO: 3452 - RNA, 23 nt, Homo sapiens
  source 1..23: mol_type = unassigned RNA
cgcatcccctagggcattggtgt

SEQ ID NO: 3453 - RNA, 23 nt, Homo sapiens
  source 1..23: mol_type = unassigned RNA
acaccaatgccctaggggatgcg

SEQ ID NO: 3454 - RNA, 20 nt, Homo sapiens
  source 1..20: mol_type = unassigned RNA
cctctgggcccttcctccag

SEQ ID NO: 3455 - RNA, 20 nt, Homo sapiens
  source 1..20: mol_type = unassigned RNA
ctggaggaagggcccagagg

SEQ ID NO: 3456 - RNA, 23 nt, Homo sapiens
  source 1..23: mol_type = unassigned RNA
cctagtaggtgtccagtaagtgt

SEQ ID NO: 3457 - RNA, 23 nt, Homo sapiens
  source 1..23: mol_type = unassigned RNA
acacttactggacacctactagg

SEQ ID NO: 3458 - RNA, 21 nt, Homo sapiens
  source 1..21: mol_type = unassigned RNA
acggtgctggatgtggccttt

SEQ ID NO: 3459 - RNA, 21 nt, Homo sapiens
  source 1..21: mol_type = unassigned RNA
aaaggccacatccagcaccgt

SEQ ID NO: 3460 - RNA, 23 nt, Homo sapiens
  source 1..23: mol_type = unassigned RNA
tcagcaccaggatattgttggag

SEQ ID NO: 3461 - RNA, 23 nt, Homo sapiens
  source 1..23: mol_type = unassigned RNA
ctccaacaatatcctggtgctga

SEQ ID NO: 3462 - RNA, 23 nt, Homo sapiens
  source 1..23: mol_type = unassigned RNA
tcaacaaaatcactgatgctgga

SEQ ID NO: 3463 - RNA, 23 nt, Homo sapiens
  source 1..23: mol_type = unassigned RNA
tccagcatcagtgattttgttga

SEQ ID NO: 3464 - RNA, 22 nt, Homo sapiens
  source 1..22: mol_type = unassigned RNA
aacaatatcctggtgctgagtg

SEQ ID NO: 3465 - RNA, 22 nt, Homo sapiens
  source 1..22: mol_type = unassigned RNA
cactcagcaccaggatattgtt

SEQ ID NO: 3466 - RNA, 23 nt, Homo sapiens
  source 1..23: mol_type = unassigned RNA
ggcaggttctcaccctctctagg

SEQ ID NO: 3467 - RNA, 23 nt, Homo sapiens
  source 1..23: mol_type = unassigned RNA
cctagagagggtgagaacctgcc

SEQ ID NO: 3468 - RNA, 23 nt, Homo sapiens
  source 1..23: mol_type = unassigned RNA
gacacgggcgacagctgcggccc

SEQ ID NO: 3469 - RNA, 23 nt, Homo sapiens
  source 1..23: mol_type = unassigned RNA
gggccgcagctgtcgcccgtgtc

SEQ ID NO: 3470 - RNA, 21 nt, Homo sapiens
  source 1..21: mol_type = unassigned RNA
atgtatgtgtgcatgtgcatg

SEQ ID NO: 3471 - RNA, 21 nt, Homo sapiens
  source 1..21: mol_type = unassigned RNA
catgcacatgcacacatacat

SEQ ID NO: 3472 - RNA, 22 nt, Homo sapiens
  source 1..22: mol_type = unassigned RNA
tatacaagggcagactctctct

SEQ ID NO: 3473 - RNA, 22 nt, Homo sapiens
  source 1..22: mol_type = unassigned RNA
agagagagtctgcccttgtata

SEQ ID NO: 3474 - RNA, 20 nt, Homo sapiens
  source 1..20: mol_type = unassigned RNA
ggcggcggcggaggcggggg

SEQ ID NO: 3475 - RNA, 20 nt, Homo sapiens
  source 1..20: mol_type = unassigned RNA
cccccgcctccgccgccgcc

SEQ ID NO: 3476 - RNA, 22 nt, Homo sapiens
  source 1..22: mol_type = unassigned RNA
gcaggtgctcacttgtcctcct

SEQ ID NO: 3477 - RNA, 22 nt, Homo sapiens
  source 1..22: mol_type = unassigned RNA
aggaggacaagtgagcacctgc

SEQ ID NO: 3478 - RNA, 19 nt, Homo sapiens
  source 1..19: mol_type = unassigned RNA
ggggcctggcggtgggcgg

SEQ ID NO: 3479 - RNA, 19 nt, Homo sapiens
  source 1..19: mol_type = unassigned RNA
ccgcccaccgccaggcccc

SEQ ID NO: 3480 - RNA, 22 nt, Homo sapiens
  source 1..22: mol_type = unassigned RNA
gcccaaaggtgaattttttggg

SEQ ID NO: 3481 - RNA, 22 nt, Homo sapiens
  source 1..22: mol_type = unassigned RNA
cccaaaaaattcacctttgggc

SEQ ID NO: 3482 - RNA, 22 nt, Homo sapiens
  source 1..22: mol_type = unassigned RNA
caaagaattctccttttgggct

SEQ ID NO: 3483 - RNA, 22 nt, Homo sapiens
  source 1..22: mol_type = unassigned RNA
agcccaaaaggagaattctttg

SEQ ID NO: 3484 - RNA, 22 nt, Homo sapiens
  source 1..22: mol_type = unassigned RNA
ctgcaatgtaagcacttcttac

SEQ ID NO: 3485 - RNA, 22 nt, Homo sapiens
  source 1..22: mol_type = unassigned RNA
gtaagaagtgcttacattgcag

SEQ ID NO: 3486 - RNA, 23 nt, Homo sapiens
  source 1..23: mol_type = unassigned RNA
aaaagtgcttacagtgcaggtag

SEQ ID NO: 3487 - RNA, 23 nt, Homo sapiens
  source 1..23: mol_type = unassigned RNA
ctacctgcactgtaagcactttt

SEQ ID NO: 3488 - RNA, 22 nt, Homo sapiens
  source 1..22: mol_type = unassigned RNA
actgtagtatgggcacttccag

SEQ ID NO: 3489 - RNA, 22 nt, Homo sapiens
  source 1..22: mol_type = unassigned RNA
ctggaagtgcccatactacagt

SEQ ID NO: 3490 - RNA, 23 nt, Homo sapiens
  source 1..23: mol_type = unassigned RNA
caaagtgctcatagtgcaggtag

SEQ ID NO: 3491 - RNA, 23 nt, Homo sapiens
  source 1..23: mol_type = unassigned RNA
ctacctgcactatgagcactttg

SEQ ID NO: 3492 - RNA, 23 nt, Homo sapiens
  source 1..23: mol_type = unassigned RNA
ggggtattgtttccgctgccagg

SEQ ID NO: 3493 - RNA, 23 nt, Homo sapiens
  source 1..23: mol_type = unassigned RNA
cctggcagcggaaacaatacccc

SEQ ID NO: 3494 - RNA, 23 nt, Homo sapiens
  source 1..23: mol_type = unassigned RNA
tagcagcgggaacagttctgcag

SEQ ID NO: 3495 - RNA, 23 nt, Homo sapiens
  source 1..23: mol_type = unassigned RNA
ctgcagaactgttcccgctgcta

SEQ ID NO: 3496 - RNA, 21 nt, Homo sapiens
  source 1..21: mol_type = unassigned RNA
cgagcctcaagcaagggactt

SEQ ID NO: 3497 - RNA, 21 nt, Homo sapiens
  source 1..21: mol_type = unassigned RNA
aagtcccttgcttgaggctcg

SEQ ID NO: 3498 - RNA, 22 nt, Homo sapiens
  source 1..22: mol_type = unassigned RNA
tagtcccttccttgaagcggtc

SEQ ID NO: 3499 - RNA, 22 nt, Homo sapiens
  source 1..22: mol_type = unassigned RNA
gaccgcttcaaggaagggacta

SEQ ID NO: 3500 - RNA, 21 nt, Homo sapiens
  source 1..21: mol_type = unassigned RNA
actggacttggagtcagaagg

SEQ ID NO: 3501 - RNA, 21 nt, Homo sapiens
  source 1..21: mol_type = unassigned RNA
ccttctgactccaagtccagt

SEQ ID NO: 3502 - RNA, 22 nt, Homo sapiens
  source 1..22: mol_type = unassigned RNA
ctcctgactccaggtcctgtgt

SEQ ID NO: 3503 - RNA, 22 nt, Homo sapiens
  source 1..22: mol_type = unassigned RNA
acacaggacctggagtcaggag

SEQ ID NO: 3504 - RNA, 22 nt, Homo sapiens
  source 1..22: mol_type = unassigned RNA
tttgttcgttcggctcgcgtga

SEQ ID NO: 3505 - RNA, 22 nt, Homo sapiens
  source 1..22: mol_type = unassigned RNA
tcacgcgagccgaacgaacaaa

SEQ ID NO: 3506 - RNA, 22 nt, Homo sapiens
  source 1..22: mol_type = unassigned RNA
acggatgtttgagcatgtgcta

SEQ ID NO: 3507 - RNA, 22 nt, Homo sapiens
  source 1..22: mol_type = unassigned RNA
tagcacatgctcaaacatccgt

SEQ ID NO: 3508 - RNA, 23 nt, Homo sapiens
  source 1..23: mol_type = unassigned RNA
tcaaatgctcagactcctgtggt

SEQ ID NO: 3509 - RNA, 23 nt, Homo sapiens
  source 1..23: mol_type = unassigned RNA
accacaggagtctgagcatttga

SEQ ID NO: 3510 - RNA, 22 nt, Homo sapiens
  source 1..22: mol_type = unassigned RNA
cggcaacaagaaactgcctgag

SEQ ID NO: 3511 - RNA, 22 nt, Homo sapiens
  source 1..22: mol_type = unassigned RNA
ctcaggcagtttcttgttgccg

SEQ ID NO: 3512 - RNA, 22 nt, Homo sapiens
  source 1..22: mol_type = unassigned RNA
taggtagtttcatgttgttggg

SEQ ID NO: 3513 - RNA, 22 nt, Homo sapiens
  source 1..22: mol_type = unassigned RNA
cccaacaacatgaaactaccta

SEQ ID NO: 3514 - RNA, 22 nt, Homo sapiens
  source 1..22: mol_type = unassigned RNA
caatgtttccacagtgcatcac

SEQ ID NO: 3515 - RNA, 22 nt, Homo sapiens
  source 1..22: mol_type = unassigned RNA
gtgatgcactgtggaaacattg

SEQ ID NO: 3516 - RNA, 21 nt, Homo sapiens
  source 1..21: mol_type = unassigned RNA
gtgcattgtagttgcattgca

SEQ ID NO: 3517 - RNA, 21 nt, Homo sapiens
  source 1..21: mol_type = unassigned RNA
tgcaatgcaactacaatgcac

SEQ ID NO: 3518 - RNA, 18 nt, Homo sapiens
  source 1..18: mol_type = unassigned RNA
atcccacctctgccacca

SEQ ID NO: 3519 - RNA, 18 nt, Homo sapiens
  source 1..18: mol_type = unassigned RNA
tggtggcagaggtgggat

SEQ ID NO: 3520 - RNA, 19 nt, Homo sapiens
  source 1..19: mol_type = unassigned RNA
atcccaccactgccaccat

SEQ ID NO: 3521 - RNA, 19 nt, Homo sapiens
  source 1..19: mol_type = unassigned RNA
atggtggcagtggtgggat

SEQ ID NO: 3522 - RNA, 22 nt, Homo sapiens
  source 1..22: mol_type = unassigned RNA
accttcctctccatgggtcttt

SEQ ID NO: 3523 - RNA, 22 nt, Homo sapiens
  source 1..22: mol_type = unassigned RNA
aaagacccatggagaggaaggt

SEQ ID NO: 3524 - RNA, 22 nt, Homo sapiens
  source 1..22: mol_type = unassigned RNA
aaagacccattgaggagaaggt

SEQ ID NO: 3525 - RNA, 22 nt, Homo sapiens
  source 1..22: mol_type = unassigned RNA
accttctcctcaatgggtcttt

SEQ ID NO: 3526 - RNA, 21 nt, Homo sapiens
  source 1..21: mol_type = unassigned RNA
aatgtagagattgatcaaaat

SEQ ID NO: 3527 - RNA, 21 nt, Homo sapiens
  source 1..21: mol_type = unassigned RNA
attttgatcaatctctacatt

SEQ ID NO: 3528 - RNA, 23 nt, Homo sapiens
  source 1..23: mol_type = unassigned RNA
acggaatatgtatacggaatata

SEQ ID NO: 3529 - RNA, 23 nt, Homo sapiens
  source 1..23: mol_type = unassigned RNA
tatattccgtatacatattccgt

SEQ ID NO: 3530 - RNA, 24 nt, Homo sapiens
  source 1..24: mol_type = unassigned RNA
agagctcacagctgtccttctcta

SEQ ID NO: 3531 - RNA, 24 nt, Homo sapiens
  source 1..24: mol_type = unassigned RNA
tagagaaggacagctgtgagctct

SEQ ID NO: 3532 - RNA, 22 nt, Homo sapiens
  source 1..22: mol_type = unassigned RNA
atcaaataaggactagtctgca

SEQ ID NO: 3533 - RNA, 22 nt, Homo sapiens
  source 1..22: mol_type = unassigned RNA
tgcagactagtccttatttgat

SEQ ID NO: 3534 - RNA, 23 nt, Homo sapiens
  source 1..23: mol_type = unassigned RNA
atgagactcatgtaaaacatctt

SEQ ID NO: 3535 - RNA, 23 nt, Homo sapiens
  source 1..23: mol_type = unassigned RNA
aagatgttttacatgagtctcat

SEQ ID NO: 3536 - RNA, 21 nt, Homo sapiens
  source 1..21: mol_type = unassigned RNA
atggaatgtatatacggaata

SEQ ID NO: 3537 - RNA, 21 nt, Homo sapiens
  source 1..21: mol_type = unassigned RNA
tattccgtatatacattccat

SEQ ID NO: 3538 - RNA, 22 nt, Homo sapiens
  source 1..22: mol_type = unassigned RNA
attgtagaacctaagattggcc

SEQ ID NO: 3539 - RNA, 22 nt, Homo sapiens
  source 1..22: mol_type = unassigned RNA
ggccaatcttaggttctacaat

SEQ ID NO: 3540 - RNA, 22 nt, Homo sapiens
  source 1..22: mol_type = unassigned RNA
catctctaaggaactcccccaa

SEQ ID NO: 3541 - RNA, 22 nt, Homo sapiens
  source 1..22: mol_type = unassigned RNA
ttgggggagttccttagagatg

SEQ ID NO: 3542 - RNA, 23 nt, Homo sapiens
  source 1..23: mol_type = unassigned RNA
tatggggcttctgtagagatttc

SEQ ID NO: 3543 - RNA, 23 nt, Homo sapiens
  source 1..23: mol_type = unassigned RNA
gaaatctctacagaagccccata

SEQ ID NO: 3544 - RNA, 20 nt, Homo sapiens
  source 1..20: mol_type = unassigned RNA
ccgtgtttcccccacgcttt

SEQ ID NO: 3545 - RNA, 20 nt, Homo sapiens
  source 1..20: mol_type = unassigned RNA
aaagcgtgggggaaacacgg

SEQ ID NO: 3546 - RNA, 15 nt, Homo sapiens
  source 1..15: mol_type = unassigned RNA
aggagatcctgggtt

SEQ ID NO: 3547 - RNA, 15 nt, Homo sapiens
  source 1..15: mol_type = unassigned RNA
aacccaggatctcct

SEQ ID NO: 3548 - RNA, 22 nt, Homo sapiens
  source 1..22: mol_type = unassigned RNA
ctcgtgggctctggccacggcc

SEQ ID NO: 3549 - RNA, 22 nt, Homo sapiens
  source 1..22: mol_type = unassigned RNA
ggccgtggccagagcccacgag

SEQ ID NO: 3550 - RNA, 22 nt, Homo sapiens
  source 1..22: mol_type = unassigned RNA
cagtggccagagccctgcagtg

SEQ ID NO: 3551 - RNA, 22 nt, Homo sapiens
  source 1..22: mol_type = unassigned RNA
cactgcagggctctggccactg

SEQ ID NO: 3552 - RNA, 22 nt, Homo sapiens
  source 1..22: mol_type = unassigned RNA
ctgcagagtttgtacggaccgg

SEQ ID NO: 3553 - RNA, 22 nt, Homo sapiens
  source 1..22: mol_type = unassigned RNA
ccggtccgtacaaactctgcag

SEQ ID NO: 3554 - RNA, 20 nt, Homo sapiens
  source 1..20: mol_type = unassigned RNA
tccgtacaaactctgctgtg

SEQ ID NO: 3555 - RNA, 20 nt, Homo sapiens
  source 1..20: mol_type = unassigned RNA
cacagcagagtttgtacgga

SEQ ID NO: 3556 - RNA, 22 nt, Homo sapiens
  source 1..22: mol_type = unassigned RNA
cttccccccagtaatcttcatc

SEQ ID NO: 3557 - RNA, 22 nt, Homo sapiens
  source 1..22: mol_type = unassigned RNA
gatgaagattactggggggaag

SEQ ID NO: 3558 - RNA, 23 nt, Homo sapiens
  source 1..23: mol_type = unassigned RNA
tgaggatatggcagggaagggga

SEQ ID NO: 3559 - RNA, 23 nt, Homo sapiens
  source 1..23: mol_type = unassigned RNA
tccccttccctgccatatcctca

SEQ ID NO: 3560 - RNA, 23 nt, Homo sapiens
  source 1..23: mol_type = unassigned RNA
ttttgcatgaccctgggagtagg

SEQ ID NO: 3561 - RNA, 23 nt, Homo sapiens
  source 1..23: mol_type = unassigned RNA
cctactcccagggtcatgcaaaa

SEQ ID NO: 3562 - RNA, 22 nt, Homo sapiens
  source 1..22: mol_type = unassigned RNA
gactcactcacaggattgtgca

SEQ ID NO: 3563 - RNA, 22 nt, Homo sapiens
  source 1..22: mol_type = unassigned RNA
tgcacaatcctgtgagtgagtc

SEQ ID NO: 3564 - RNA, 22 nt, Homo sapiens
  source 1..22: mol_type = unassigned RNA
acacagtgcttcatccactact

SEQ ID NO: 3565 - RNA, 22 nt, Homo sapiens
  source 1..22: mol_type = unassigned RNA
agtagtggatgaagcactgtgt

SEQ ID NO: 3566 - RNA, 22 nt, Homo sapiens
  source 1..22: mol_type = unassigned RNA
tagtggatgatgcactctgtgc

SEQ ID NO: 3567 - RNA, 22 nt, Homo sapiens
  source 1..22: mol_type = unassigned RNA
gcacagagtgcatcatccacta

SEQ ID NO: 3568 - RNA, 21 nt, Homo sapiens
  source 1..21: mol_type = unassigned RNA
tgatgatacaggtggaggtag

SEQ ID NO: 3569 - RNA, 21 nt, Homo sapiens
  source 1..21: mol_type = unassigned RNA
ctacctccacctgtatcatca

SEQ ID NO: 3570 - RNA, 22 nt, Homo sapiens
  source 1..22: mol_type = unassigned RNA
ctacttctacctgtgttatcat

SEQ ID NO: 3571 - RNA, 22 nt, Homo sapiens
  source 1..22: mol_type = unassigned RNA
atgataacacaggtagaagtag

SEQ ID NO: 3572 - RNA, 22 nt, Homo sapiens
  source 1..22: mol_type = unassigned RNA
tgcgacattggaagtagtatca

SEQ ID NO: 3573 - RNA, 22 nt, Homo sapiens
  source 1..22: mol_type = unassigned RNA
tgatactacttccaatgtcgca

SEQ ID NO: 3574 - RNA, 21 nt, Homo sapiens
  source 1..21: mol_type = unassigned RNA
ttagacctagtacacgtcctt

SEQ ID NO: 3575 - RNA, 21 nt, Homo sapiens
  source 1..21: mol_type = unassigned RNA
aaggacgtgtactaggtctaa

SEQ ID NO: 3576 - RNA, 22 nt, Homo sapiens
  source 1..22: mol_type = unassigned RNA
tttcctaccctacctgaagact

SEQ ID NO: 3577 - RNA, 22 nt, Homo sapiens
  source 1..22: mol_type = unassigned RNA
agtcttcaggtagggtaggaaa

SEQ ID NO: 3578 - RNA, 22 nt, Homo sapiens
  source 1..22: mol_type = unassigned RNA
atctgtaagagaaagtaaatga

SEQ ID NO: 3579 - RNA, 22 nt, Homo sapiens
  source 1..22: mol_type = unassigned RNA
tcatttactttctcttacagat

SEQ ID NO: 3580 - RNA, 24 nt, Homo sapiens
  source 1..24: mol_type = unassigned RNA
cccggacaggcgttcgtgcgacgt

SEQ ID NO: 3581 - RNA, 24 nt, Homo sapiens
  source 1..24: mol_type = unassigned RNA
acgtcgcacgaacgcctgtccggg

SEQ ID NO: 3582 - RNA, 23 nt, Homo sapiens
  source 1..23: mol_type = unassigned RNA
acctggacccagcgtagacaaag

SEQ ID NO: 3583 - RNA, 23 nt, Homo sapiens
  source 1..23: mol_type = unassigned RNA
ctttgtctacgctgggtccaggt

SEQ ID NO: 3584 - RNA, 22 nt, Homo sapiens
  source 1..22: mol_type = unassigned RNA
accaagtctgcgtcatcctctc

SEQ ID NO: 3585 - RNA, 22 nt, Homo sapiens
  source 1..22: mol_type = unassigned RNA
gagaggatgacgcagacttggt

SEQ ID NO: 3586 - RNA, 23 nt, Homo sapiens
  source 1..23: mol_type = unassigned RNA
agtggatgatggagactcggtac

SEQ ID NO: 3587 - RNA, 23 nt, Homo sapiens
  source 1..23: mol_type = unassigned RNA
gtaccgagtctccatcatccact

SEQ ID NO: 3588 - RNA, 24 nt, Homo sapiens
  source 1..24: mol_type = unassigned RNA
gttccacactgacactgcagaagt

SEQ ID NO: 3589 - RNA, 24 nt, Homo sapiens
  source 1..24: mol_type = unassigned RNA
acttctgcagtgtcagtgtggaac

SEQ ID NO: 3590 - RNA, 24 nt, Homo sapiens
  source 1..24: mol_type = unassigned RNA
cctgctggtcaggagtggatactg

SEQ ID NO: 3591 - RNA, 24 nt, Homo sapiens
  source 1..24: mol_type = unassigned RNA
cagtatccactcctgaccagcagg

SEQ ID NO: 3592 - RNA, 23 nt, Homo sapiens
  source 1..23: mol_type = unassigned RNA
gagggtcttgggagggatgtgac

SEQ ID NO: 3593 - RNA, 23 nt, Homo sapiens
  source 1..23: mol_type = unassigned RNA
gtcacatccctcccaagaccctc

SEQ ID NO: 3594 - RNA, 22 nt, Homo sapiens
  source 1..22: mol_type = unassigned RNA
atatacagggggagactcttat

SEQ ID NO: 3595 - RNA, 22 nt, Homo sapiens
  source 1..22: mol_type = unassigned RNA
ataagagtctccccctgtatat

SEQ ID NO: 3596 - RNA, 22 nt, Homo sapiens
  source 1..22: mol_type = unassigned RNA
atatacagggggagactctcat

SEQ ID NO: 3597 - RNA, 22 nt, Homo sapiens
  source 1..22: mol_type = unassigned RNA
atgagagtctccccctgtatat

SEQ ID NO: 3598 - RNA, 21 nt, Homo sapiens
  source 1..21: mol_type = unassigned RNA
agaggataccctttgtatgtt

SEQ ID NO: 3599 - RNA, 21 nt, Homo sapiens
  source 1..21: mol_type = unassigned RNA
aacatacaaagggtatcctct

SEQ ID NO: 3600 - RNA, 22 nt, Homo sapiens
  source 1..22: mol_type = unassigned RNA
tctacaaaggaaagcgctttct

SEQ ID NO: 3601 - RNA, 22 nt, Homo sapiens
  source 1..22: mol_type = unassigned RNA
agaaagcgctttcctttgtaga

SEQ ID NO: 3602 - RNA, 22 nt, Homo sapiens
  source 1..22: mol_type = unassigned RNA
tcaaaactgaggggcattttct

SEQ ID NO: 3603 - RNA, 22 nt, Homo sapiens
  source 1..22: mol_type = unassigned RNA
agaaaatgcccctcagttttga

SEQ ID NO: 3604 - RNA, 24 nt, Homo sapiens
  source 1..24: mol_type = unassigned RNA
ttctccaaaagaaagcactttctg

SEQ ID NO: 3605 - RNA, 24 nt, Homo sapiens
  source 1..24: mol_type = unassigned RNA
cagaaagtgctttcttttggagaa

SEQ ID NO: 3606 - RNA, 23 nt, Homo sapiens
  source 1..23: mol_type = unassigned RNA
ttctcgaggaaagaagcactttc

SEQ ID NO: 3607 - RNA, 23 nt, Homo sapiens
  source 1..23: mol_type = unassigned RNA
gaaagtgcttctttcctcgagaa

SEQ ID NO: 3608 - RNA, 22 nt, Homo sapiens
  source 1..22: mol_type = unassigned RNA
cctctagatggaagcactgtct

SEQ ID NO: 3609 - RNA, 22 nt, Homo sapiens
  source 1..22: mol_type = unassigned RNA
agacagtgcttccatctagagg

SEQ ID NO: 3610 - RNA, 22 nt, Homo sapiens
  source 1..22: mol_type = unassigned RNA
atcgtgcatccctttagagtgt

SEQ ID NO: 3611 - RNA, 22 nt, Homo sapiens
  source 1..22: mol_type = unassigned RNA
acactctaaagggatgcacgat

SEQ ID NO: 3612 - RNA, 22 nt, Homo sapiens
  source 1..22: mol_type = unassigned RNA
atcgtgcatccctttagagtgt

SEQ ID NO: 3613 - RNA, 22 nt, Homo sapiens
  source 1..22: mol_type = unassigned RNA
acactctaaagggatgcacgat

SEQ ID NO: 3614 - RNA, 22 nt, Homo sapiens
  source 1..22: mol_type = unassigned RNA
atcgtgcatccttttagagtgt

SEQ ID NO: 3615 - RNA, 22 nt, Homo sapiens
  source 1..22: mol_type = unassigned RNA
acactctaaaaggatgcacgat

SEQ ID NO: 3616 - RNA, 22 nt, Homo sapiens
  source 1..22: mol_type = unassigned RNA
caaagcgctcccctttagaggt

SEQ ID NO: 3617 - RNA, 22 nt, Homo sapiens
  source 1..22: mol_type = unassigned RNA
acctctaaaggggagcgctttg

SEQ ID NO: 3618 - RNA, 23 nt, Homo sapiens
  source 1..23: mol_type = unassigned RNA
caaagcgcttctctttagagtgt

SEQ ID NO: 3619 - RNA, 23 nt, Homo sapiens
  source 1..23: mol_type = unassigned RNA
acactctaaagagaagcgctttg

SEQ ID NO: 3620 - RNA, 23 nt, Homo sapiens
  source 1..23: mol_type = unassigned RNA
tctctggagggaagcactttctg

SEQ ID NO: 3621 - RNA, 23 nt, Homo sapiens
  source 1..23: mol_type = unassigned RNA
cagaaagtgcttccctccagaga

SEQ ID NO: 3622 - RNA, 21 nt, Homo sapiens
  source 1..21: mol_type = unassigned RNA
gaaagcgcttctctttagagg

SEQ ID NO: 3623 - RNA, 21 nt, Homo sapiens
  source 1..21: mol_type = unassigned RNA
cctctaaagagaagcgctttc

SEQ ID NO: 3624 - RNA, 22 nt, Homo sapiens
  source 1..22: mol_type = unassigned RNA
ctctagagggaagcactttctc

SEQ ID NO: 3625 - RNA, 22 nt, Homo sapiens
  source 1..22: mol_type = unassigned RNA
gagaaagtgcttccctctagag

SEQ ID NO: 3626 - RNA, 22 nt, Homo sapiens
  source 1..22: mol_type = unassigned RNA
aaagtgcatccttttagagtgt

SEQ ID NO: 3627 - RNA, 22 nt, Homo sapiens
  source 1..22: mol_type = unassigned RNA
acactctaaaaggatgcacttt

SEQ ID NO: 3628 - RNA, 22 nt, Homo sapiens
  source 1..22: mol_type = unassigned RNA
ctctagagggaagcgctttctg

SEQ ID NO: 3629 - RNA, 22 nt, Homo sapiens
  source 1..22: mol_type = unassigned RNA
cagaaagcgcttccctctagag

SEQ ID NO: 3630 - RNA, 22 nt, Homo sapiens
  source 1..22: mol_type = unassigned RNA
caaagtgcctccctttagagtg

SEQ ID NO: 3631 - RNA, 22 nt, Homo sapiens
  source 1..22: mol_type = unassigned RNA
cactctaaagggaggcactttg

SEQ ID NO: 3632 - RNA, 22 nt, Homo sapiens
  source 1..22: mol_type = unassigned RNA
aagtgcctccttttagagtgtt

SEQ ID NO: 3633 - RNA, 22 nt, Homo sapiens
  source 1..22: mol_type = unassigned RNA
aacactctaaaaggaggcactt

SEQ ID NO: 3634 - RNA, 22 nt, Homo sapiens
  source 1..22: mol_type = unassigned RNA
ttctccaaaagggagcactttc

SEQ ID NO: 3635 - RNA, 22 nt, Homo sapiens
  source 1..22: mol_type = unassigned RNA
gaaagtgctcccttttggagaa

SEQ ID NO: 3636 - RNA, 22 nt, Homo sapiens
  source 1..22: mol_type = unassigned RNA
aaagtgcttccctttggactgt

SEQ ID NO: 3637 - RNA, 22 nt, Homo sapiens
  source 1..22: mol_type = unassigned RNA
acagtccaaagggaagcacttt

SEQ ID NO: 3638 - RNA, 21 nt, Homo sapiens
  source 1..21: mol_type = unassigned RNA
ctccagagggaagtactttct

SEQ ID NO: 3639 - RNA, 21 nt, Homo sapiens
  source 1..21: mol_type = unassigned RNA
agaaagtacttccctctggag

SEQ ID NO: 3640 - RNA, 22 nt, Homo sapiens
  source 1..22: mol_type = unassigned RNA
acaaagtgcttccctttagagt

SEQ ID NO: 3641 - RNA, 22 nt, Homo sapiens
  source 1..22: mol_type = unassigned RNA
actctaaagggaagcactttgt

SEQ ID NO: 3642 - RNA, 22 nt, Homo sapiens
  source 1..22: mol_type = unassigned RNA
ctacaaagggaagcactttctc

SEQ ID NO: 3643 - RNA, 22 nt, Homo sapiens
  source 1..22: mol_type = unassigned RNA
gagaaagtgcttccctttgtag

SEQ ID NO: 3644 - RNA, 22 nt, Homo sapiens
  source 1..22: mol_type = unassigned RNA
gaaggcgcttccctttagagcg

SEQ ID NO: 3645 - RNA, 22 nt, Homo sapiens
  source 1..22: mol_type = unassigned RNA
cgctctaaagggaagcgccttc

SEQ ID NO: 3646 - RNA, 21 nt, Homo sapiens
  source 1..21: mol_type = unassigned RNA
ctccagagggatgcactttct

SEQ ID NO: 3647 - RNA, 21 nt, Homo sapiens
  source 1..21: mol_type = unassigned RNA
agaaagtgcatccctctggag

SEQ ID NO: 3648 - RNA, 22 nt, Homo sapiens
  source 1..22: mol_type = unassigned RNA
ctctagagggaagcactttctg

SEQ ID NO: 3649 - RNA, 22 nt, Homo sapiens
  source 1..22: mol_type = unassigned RNA
cagaaagtgcttccctctagag

SEQ ID NO: 3650 - RNA, 22 nt, Homo sapiens
  source 1..22: mol_type = unassigned RNA
gaaagtgcttccttttagaggc

SEQ ID NO: 3651 - RNA, 22 nt, Homo sapiens
  source 1..22: mol_type = unassigned RNA
gcctctaaaaggaagcactttc

SEQ ID NO: 3652 - RNA, 23 nt, Homo sapiens
  source 1..23: mol_type = unassigned RNA
ctcttgagggaagcactttctgt

SEQ ID NO: 3653 - RNA, 23 nt, Homo sapiens
  source 1..23: mol_type = unassigned RNA
acagaaagtgcttccctcaagag

SEQ ID NO: 3654 - RNA, 22 nt, Homo sapiens
  source 1..22: mol_type = unassigned RNA
actggacttagggtcagaaggc

SEQ ID NO: 3655 - RNA, 22 nt, Homo sapiens
  source 1..22: mol_type = unassigned RNA
gccttctgaccctaagtccagt

SEQ ID NO: 3656 - RNA, 22 nt, Homo sapiens
  source 1..22: mol_type = unassigned RNA
aaacaaacatggtgcacttctt

SEQ ID NO: 3657 - RNA, 22 nt, Homo sapiens
  source 1..22: mol_type = unassigned RNA
aagaagtgcaccatgtttgttt

SEQ ID NO: 3658 - RNA, 22 nt, Homo sapiens
  source 1..22: mol_type = unassigned RNA
gaagttgcccatgttattttcg

SEQ ID NO: 3659 - RNA, 22 nt, Homo sapiens
  source 1..22: mol_type = unassigned RNA
cgaaaataacatgggcaacttc

SEQ ID NO: 3660 - RNA, 21 nt, Homo sapiens
  source 1..21: mol_type = unassigned RNA
aatcattcacggacaacactt

SEQ ID NO: 3661 - RNA, 21 nt, Homo sapiens
  source 1..21: mol_type = unassigned RNA
aagtgttgtccgtgaatgatt

SEQ ID NO: 3662 - RNA, 22 nt, Homo sapiens
  source 1..22: mol_type = unassigned RNA
gaagttgttcgtggtggattcg

SEQ ID NO: 3663 - RNA, 22 nt, Homo sapiens
  source 1..22: mol_type = unassigned RNA
cgaatccaccacgaacaacttc

SEQ ID NO: 3664 - RNA, 23 nt, Homo sapiens
  source 1..23: mol_type = unassigned RNA
cctccgtgttacctgtcctctag

SEQ ID NO: 3665 - RNA, 23 nt, Homo sapiens
  source 1..23: mol_type = unassigned RNA
ctagaggacaggtaacacggagg

SEQ ID NO: 3666 - RNA, 23 nt, Homo sapiens
  source 1..23: mol_type = unassigned RNA
tgaggatggatagcaaggaagcc

SEQ ID NO: 3667 - RNA, 23 nt, Homo sapiens
  source 1..23: mol_type = unassigned RNA
ggcttccttgctatccatcctca

SEQ ID NO: 3668 - RNA, 22 nt, Homo sapiens
  source 1..22: mol_type = unassigned RNA
ttcagatcccagcggtgcctct

SEQ ID NO: 3669 - RNA, 22 nt, Homo sapiens
  source 1..22: mol_type = unassigned RNA
agaggcaccgctgggatctgaa

SEQ ID NO: 3670 - RNA, 19 nt, Homo sapiens
  source 1..19: mol_type = unassigned RNA
gtcctaggaggctcctctg

SEQ ID NO: 3671 - RNA, 19 nt, Homo sapiens
  source 1..19: mol_type = unassigned RNA
cagaggagcctcctaggac

SEQ ID NO: 3672 - RNA, 21 nt, Homo sapiens
  source 1..21: mol_type = unassigned RNA
caattctcaaaggagcctccc

SEQ ID NO: 3673 - RNA, 21 nt, Homo sapiens
  source 1..21: mol_type = unassigned RNA
gggaggctcctttgagaattg

SEQ ID NO: 3674 - RNA, 21 nt, Homo sapiens
  source 1..21: mol_type = unassigned RNA
gttggggtgcaggggtctgct

SEQ ID NO: 3675 - RNA, 21 nt, Homo sapiens
  source 1..21: mol_type = unassigned RNA
agcagacccctgcaccccaac

SEQ ID NO: 3676 - RNA, 22 nt, Homo sapiens
  source 1..22: mol_type = unassigned RNA
tttccggctcgcgtgggtgtgt

SEQ ID NO: 3677 - RNA, 22 nt, Homo sapiens
  source 1..22: mol_type = unassigned RNA
acacacccacgcgagccggaaa

SEQ ID NO: 3678 - RNA, 23 nt, Homo sapiens
  source 1..23: mol_type = unassigned RNA
tgagtgtgtgtgtgtgagtgtgt

SEQ ID NO: 3679 - RNA, 23 nt, Homo sapiens
  source 1..23: mol_type = unassigned RNA
acacactcacacacacacactca

SEQ ID NO: 3680 - RNA, 22 nt, Homo sapiens
  source 1..22: mol_type = unassigned RNA
agtgggaggccagggcacggca

SEQ ID NO: 3681 - RNA, 22 nt, Homo sapiens
  source 1..22: mol_type = unassigned RNA
tgccgtgccctggcctcccact

SEQ ID NO: 3682 - RNA, 20 nt, Homo sapiens
  source 1..20: mol_type = unassigned RNA
tgagccctgtcctcccgcag

SEQ ID NO: 3683 - RNA, 20 nt, Homo sapiens
  source 1..20: mol_type = unassigned RNA
ctgcgggaggacagggctca

SEQ ID NO: 3684 - RNA, 23 nt, Homo sapiens
  source 1..23: mol_type = unassigned RNA
aagtgccgccatcttttgagtgt

SEQ ID NO: 3685 - RNA, 23 nt, Homo sapiens
  source 1..23: mol_type = unassigned RNA
acactcaaaagatggcggcactt

SEQ ID NO: 3686 - RNA, 20 nt, Homo sapiens
  source 1..20: mol_type = unassigned RNA
actcaaactgtgggggcact

SEQ ID NO: 3687 - RNA, 20 nt, Homo sapiens
  source 1..20: mol_type = unassigned RNA
agtgcccccacagtttgagt

SEQ ID NO: 3688 - RNA, 23 nt, Homo sapiens
  source 1..23: mol_type = unassigned RNA
aagtgcccccacagtttgagtgc

SEQ ID NO: 3689 - RNA, 23 nt, Homo sapiens
  source 1..23: mol_type = unassigned RNA
gcactcaaactgtgggggcactt

SEQ ID NO: 3690 - RNA, 22 nt, Homo sapiens
  source 1..22: mol_type = unassigned RNA
actcaaaagatggcggcacttt

SEQ ID NO: 3691 - RNA, 22 nt, Homo sapiens
  source 1..22: mol_type = unassigned RNA
aaagtgccgccatcttttgagt

SEQ ID NO: 3692 - RNA, 22 nt, Homo sapiens
  source 1..22: mol_type = unassigned RNA
aaacctgtgttgttcaagagtc

SEQ ID NO: 3693 - RNA, 22 nt, Homo sapiens
  source 1..22: mol_type = unassigned RNA
gactcttgaacaacacaggttt

SEQ ID NO: 3694 - RNA, 22 nt, Homo sapiens
  source 1..22: mol_type = unassigned RNA
acagtagagggaggaatcgcag

SEQ ID NO: 3695 - RNA, 22 nt, Homo sapiens
  source 1..22: mol_type = unassigned RNA
ctgcgattcctccctctactgt

SEQ ID NO: 3696 - RNA, 22 nt, Homo sapiens
  source 1..22: mol_type = unassigned RNA
gtgaaatgtttaggaccactag

SEQ ID NO: 3697 - RNA, 22 nt, Homo sapiens
  source 1..22: mol_type = unassigned RNA
ctagtggtcctaaacatttcac

SEQ ID NO: 3698 - RNA, 23 nt, Homo sapiens
  source 1..23: mol_type = unassigned RNA
ttgaactgttaagaaccactgga

SEQ ID NO: 3699 - RNA, 23 nt, Homo sapiens
  source 1..23: mol_type = unassigned RNA
tccagtggttcttaacagttcaa

SEQ ID NO: 3700 - RNA, 22 nt, Homo sapiens
  source 1..22: mol_type = unassigned RNA
tagtggtcctaaacatttcaca

SEQ ID NO: 3701 - RNA, 22 nt, Homo sapiens
  source 1..22: mol_type = unassigned RNA
tgtgaaatgtttaggaccacta

SEQ ID NO: 3702 - RNA, 21 nt, Homo sapiens
  source 1..21: mol_type = unassigned RNA
tgcaggaccaagatgagccct

SEQ ID NO: 3703 - RNA, 21 nt, Homo sapiens
  source 1..21: mol_type = unassigned RNA
agggctcatcttggtcctgca

SEQ ID NO: 3704 - RNA, 21 nt, Homo sapiens
  source 1..21: mol_type = unassigned RNA
ctcccacatgcagggtttgca

SEQ ID NO: 3705 - RNA, 21 nt, Homo sapiens
  source 1..21: mol_type = unassigned RNA
tgcaaaccctgcatgtgggag

SEQ ID NO: 3706 - RNA, 21 nt, Homo sapiens
  source 1..21: mol_type = unassigned RNA
catcccttgcatggtggaggg

SEQ ID NO: 3707 - RNA, 21 nt, Homo sapiens
  source 1..21: mol_type = unassigned RNA
ccctccaccatgcaagggatg

SEQ ID NO: 3708 - RNA, 22 nt, Homo sapiens
  source 1..22: mol_type = unassigned RNA
aaaatgaaatgagcccagccca

SEQ ID NO: 3709 - RNA, 22 nt, Homo sapiens
  source 1..22: mol_type = unassigned RNA
tgggctgggctcatttcatttt

SEQ ID NO: 3710 - RNA, 21 nt, Homo sapiens
  source 1..21: mol_type = unassigned RNA
agccgcggggatcgccgaggg

SEQ ID NO: 3711 - RNA, 21 nt, Homo sapiens
  source 1..21: mol_type = unassigned RNA
ccctcggcgatccccgcggct

SEQ ID NO: 3712 - RNA, 19 nt, Homo sapiens
  source 1..19: mol_type = unassigned RNA
agggacctgagtgtctaag

SEQ ID NO: 3713 - RNA, 19 nt, Homo sapiens
  source 1..19: mol_type = unassigned RNA
cttagacactcaggtccct

SEQ ID NO: 3714 - RNA, 19 nt, Homo sapiens
  source 1..19: mol_type = unassigned RNA
aggtgtgtctgtagagtcc

SEQ ID NO: 3715 - RNA, 19 nt, Homo sapiens
  source 1..19: mol_type = unassigned RNA
ggactctacagacacacct

SEQ ID NO: 3716 - RNA, 24 nt, Homo sapiens
  source 1..24: mol_type = unassigned RNA
catagcccggtcgctggtacatga

SEQ ID NO: 3717 - RNA, 24 nt, Homo sapiens
  source 1..24: mol_type = unassigned RNA
tcatgtaccagcgaccgggctatg

SEQ ID NO: 3718 - RNA, 18 nt, Homo sapiens
  source 1..18: mol_type = unassigned RNA
cggctggaggtgtgagga

SEQ ID NO: 3719 - RNA, 18 nt, Homo sapiens
  source 1..18: mol_type = unassigned RNA
tcctcacacctccagccg

SEQ ID NO: 3720 - RNA, 18 nt, Homo sapiens
  source 1..18: mol_type = unassigned RNA
ctaagaagttgactgaag

SEQ ID NO: 3721 - RNA, 18 nt, Homo sapiens
  source 1..18: mol_type = unassigned RNA
cttcagtcaacttcttag

SEQ ID NO: 3722 - RNA, 19 nt, Homo sapiens
  source 1..19: mol_type = unassigned RNA
gactggacaagctgaggaa

SEQ ID NO: 3723 - RNA, 19 nt, Homo sapiens
  source 1..19: mol_type = unassigned RNA
ttcctcagcttgtccagtc

SEQ ID NO: 3724 - RNA, 21 nt, Homo sapiens
  source 1..21: mol_type = unassigned RNA
gcttgtcgctgcggtgttgct

SEQ ID NO: 3725 - RNA, 21 nt, Homo sapiens
  source 1..21: mol_type = unassigned RNA
agcaacaccgcagcgacaagc

SEQ ID NO: 3726 - RNA, 17 nt, Homo sapiens
  source 1..17: mol_type = unassigned RNA
ggcgggtgcgggggtgg

SEQ ID NO: 3727 - RNA, 17 nt, Homo sapiens
  source 1..17: mol_type = unassigned RNA
ccacccccgcacccgcc

SEQ ID NO: 3728 - RNA, 21 nt, Homo sapiens
  source 1..21: mol_type = unassigned RNA
tgtgtcccattattggtgatt

SEQ ID NO: 3729 - RNA, 21 nt, Homo sapiens
  source 1..21: mol_type = unassigned RNA
aatcaccaataatgggacaca

SEQ ID NO: 3730 - RNA, 22 nt, Homo sapiens
  source 1..22: mol_type = unassigned RNA
tttaagaaaacaccatggagat

SEQ ID NO: 3731 - RNA, 22 nt, Homo sapiens
  source 1..22: mol_type = unassigned RNA
atctccatggtgttttcttaaa

SEQ ID NO: 3732 - RNA, 22 nt, Homo sapiens
  source 1..22: mol_type = unassigned RNA
gctatttcacgacaccagggtt

SEQ ID NO: 3733 - RNA, 22 nt, Homo sapiens
  source 1..22: mol_type = unassigned RNA
aaccctggtgtcgtgaaatagc

SEQ ID NO: 3734 - RNA, 23 nt, Homo sapiens
  source 1..23: mol_type = unassigned RNA
agctggtgttgtgaatcaggccg

SEQ ID NO: 3735 - RNA, 23 nt, Homo sapiens
  source 1..23: mol_type = unassigned RNA
cggcctgattcacaacaccagct

SEQ ID NO: 3736 - RNA, 21 nt, Homo sapiens
  source 1..21: mol_type = unassigned RNA
aataatacatggttgatcttt

SEQ ID NO: 3737 - RNA, 21 nt, Homo sapiens
  source 1..21: mol_type = unassigned RNA
aaagatcaaccatgtattatt

SEQ ID NO: 3738 - RNA, 22 nt, Homo sapiens
  source 1..22: mol_type = unassigned RNA
agatcgaccgtgttatattcgc

SEQ ID NO: 3739 - RNA, 22 nt, Homo sapiens
  source 1..22: mol_type = unassigned RNA
gcgaatataacacggtcgatct

SEQ ID NO: 3740 - RNA, 22 nt, Homo sapiens
  source 1..22: mol_type = unassigned RNA
aatcatgtgcagtgccaatatg

SEQ ID NO: 3741 - RNA, 22 nt, Homo sapiens
  source 1..22: mol_type = unassigned RNA
catattggcactgcacatgatt

SEQ ID NO: 3742 - RNA, 23 nt, Homo sapiens
  source 1..23: mol_type = unassigned RNA
tttggcactagcacatttttgct

SEQ ID NO: 3743 - RNA, 23 nt, Homo sapiens
  source 1..23: mol_type = unassigned RNA
agcaaaaatgtgctagtgccaaa

SEQ ID NO: 3744 - RNA, 22 nt, Homo sapiens
  source 1..22: mol_type = unassigned RNA
tcctgtactgagctgccccgag

SEQ ID NO: 3745 - RNA, 22 nt, Homo sapiens
  source 1..22: mol_type = unassigned RNA
ctcggggcagctcagtacagga

SEQ ID NO: 3746 - RNA, 22 nt, Homo sapiens
  source 1..22: mol_type = unassigned RNA
gctacttcacaacaccagggcc

SEQ ID NO: 3747 - RNA, 22 nt, Homo sapiens
  source 1..22: mol_type = unassigned RNA
ggccctggtgttgtgaagtagc

SEQ ID NO: 3748 - RNA, 22 nt, Homo sapiens
  source 1..22: mol_type = unassigned RNA
catcatcgtctcaaatgagtct

SEQ ID NO: 3749 - RNA, 22 nt, Homo sapiens
  source 1..22: mol_type = unassigned RNA
agactcatttgagacgatgatg

SEQ ID NO: 3750 - RNA, 23 nt, Homo sapiens
  source 1..23: mol_type = unassigned RNA
actccatttgttttgatgatgga

SEQ ID NO: 3751 - RNA, 23 nt, Homo sapiens
  source 1..23: mol_type = unassigned RNA
tccatcatcaaaacaaatggagt

SEQ ID NO: 3752 - RNA, 22 nt, Homo sapiens
  source 1..22: mol_type = unassigned RNA
ctcctacatattagcattaaca

SEQ ID NO: 3753 - RNA, 22 nt, Homo sapiens
  source 1..22: mol_type = unassigned RNA
tgttaatgctaatatgtaggag

SEQ ID NO: 3754 - RNA, 23 nt, Homo sapiens
  source 1..23: mol_type = unassigned RNA
ttaatgctaatcgtgataggggt

SEQ ID NO: 3755 - RNA, 23 nt, Homo sapiens
  source 1..23: mol_type = unassigned RNA
acccctatcacgattagcattaa

SEQ ID NO: 3756 - RNA, 22 nt, Homo sapiens
  source 1..22: mol_type = unassigned RNA
agatcagaaggtgattgtggct

SEQ ID NO: 3757 - RNA, 22 nt, Homo sapiens
  source 1..22: mol_type = unassigned RNA
agccacaatcaccttctgatct

SEQ ID NO: 3758 - RNA, 22 nt, Homo sapiens
  source 1..22: mol_type = unassigned RNA
tactgcagacgtggcaatcatg

SEQ ID NO: 3759 - RNA, 22 nt, Homo sapiens
  source 1..22: mol_type = unassigned RNA
catgattgccacgtctgcagta

SEQ ID NO: 3760 - RNA, 21 nt, Homo sapiens
  source 1..21: mol_type = unassigned RNA
gttagggccaacatctcttgg

SEQ ID NO: 3761 - RNA, 21 nt, Homo sapiens
  source 1..21: mol_type = unassigned RNA
ccaagagatgttggccctaac

SEQ ID NO: 3762 - RNA, 21 nt, Homo sapiens
  source 1..21: mol_type = unassigned RNA
aacatagaggaaattccacgt

SEQ ID NO: 3763 - RNA, 21 nt, Homo sapiens
  source 1..21: mol_type = unassigned RNA
acgtggaatttcctctatgtt

SEQ ID NO: 3764 - RNA, 21 nt, Homo sapiens
  source 1..21: mol_type = unassigned RNA
ggtggatattccttctatgtt

SEQ ID NO: 3765 - RNA, 21 nt, Homo sapiens
  source 1..21: mol_type = unassigned RNA
aacatagaaggaatatccacc

SEQ ID NO: 3766 - RNA, 23 nt, Homo sapiens
  source 1..23: mol_type = unassigned RNA
tcatagccctgtacaatgctgct

SEQ ID NO: 3767 - RNA, 23 nt, Homo sapiens
  source 1..23: mol_type = unassigned RNA
agcagcattgtacagggctatga

SEQ ID NO: 3768 - RNA, 22 nt, Homo sapiens
  source 1..22: mol_type = unassigned RNA
taacactgtctggtaaagatgg

SEQ ID NO: 3769 - RNA, 22 nt, Homo sapiens
  source 1..22: mol_type = unassigned RNA
ccatctttaccagacagtgtta

SEQ ID NO: 3770 - RNA, 22 nt, Homo sapiens
  source 1..22: mol_type = unassigned RNA
catcttccagtacagtgttgga

SEQ ID NO: 3771 - RNA, 22 nt, Homo sapiens
  source 1..22: mol_type = unassigned RNA
tccaacactgtactggaagatg

SEQ ID NO: 3772 - RNA, 22 nt, Homo sapiens
  source 1..22: mol_type = unassigned RNA
aactggcctacaaagtcccagt

SEQ ID NO: 3773 - RNA, 22 nt, Homo sapiens
  source 1..22: mol_type = unassigned RNA
actgggactttgtaggccagtt

SEQ ID NO: 3774 - RNA, 22 nt, Homo sapiens
  source 1..22: mol_type = unassigned RNA
tgggtctttgcgggcgagatga

SEQ ID NO: 3775 - RNA, 22 nt, Homo sapiens
  source 1..22: mol_type = unassigned RNA
tcatctcgcccgcaaagaccca

SEQ ID NO: 3776 - RNA, 21 nt, Homo sapiens
  source 1..21: mol_type = unassigned RNA
atgacctatgaattgacagac

SEQ ID NO: 3777 - RNA, 21 nt, Homo sapiens
  source 1..21: mol_type = unassigned RNA
gtctgtcaattcataggtcat

SEQ ID NO: 3778 - RNA, 22 nt, Homo sapiens
  source 1..22: mol_type = unassigned RNA
aagctgccagttgaagaactgt

SEQ ID NO: 3779 - RNA, 22 nt, Homo sapiens
  source 1..22: mol_type = unassigned RNA
acagttcttcaactggcagctt

SEQ ID NO: 3780 - RNA, 22 nt, Homo sapiens
  source 1..22: mol_type = unassigned RNA
agttcttcagtggcaagcttta

SEQ ID NO: 3781 - RNA, 22 nt, Homo sapiens
  source 1..22: mol_type = unassigned RNA
taaagcttgccactgaagaact

SEQ ID NO: 3782 - RNA, 22 nt, Homo sapiens
  source 1..22: mol_type = unassigned RNA
acagattcgattctaggggaat

SEQ ID NO: 3783 - RNA, 22 nt, Homo sapiens
  source 1..22: mol_type = unassigned RNA
attcccctagaatcgaatctgt

SEQ ID NO: 3784 - RNA, 23 nt, Homo sapiens
  source 1..23: mol_type = unassigned RNA
taccctgtagaaccgaatttgtg

SEQ ID NO: 3785 - RNA, 23 nt, Homo sapiens
  source 1..23: mol_type = unassigned RNA
cacaaattcggttctacagggta

SEQ ID NO: 3786 - RNA, 22 nt, Homo sapiens
  source 1..22: mol_type = unassigned RNA
tagcagcacgtaaatattggcg

SEQ ID NO: 3787 - RNA, 22 nt, Homo sapiens
  source 1..22: mol_type = unassigned RNA
cgccaatatttacgtgctgcta

SEQ ID NO: 3788 - RNA, 21 nt, Homo sapiens
  source 1..21: mol_type = unassigned RNA
tgagatgaagcactgtagctc

SEQ ID NO: 3789 - RNA, 21 nt, Homo sapiens
  source 1..21: mol_type = unassigned RNA
gagctacagtgcttcatctca

SEQ ID NO: 3790 - RNA, 22 nt, Homo sapiens
  source 1..22: mol_type = unassigned RNA
ggtgcagtgctgcatctctggt

SEQ ID NO: 3791 - RNA, 22 nt, Homo sapiens
  source 1..22: mol_type = unassigned RNA
accagagatgcagcactgcacc

SEQ ID NO: 3792 - RNA, 21 nt, Homo sapiens
  source 1..21: mol_type = unassigned RNA
ttgctcactgttcttccctag

SEQ ID NO: 3793 - RNA, 21 nt, Homo sapiens
  source 1..21: mol_type = unassigned RNA
ctagggaagaacagtgagcaa

SEQ ID NO: 3794 - RNA, 18 nt, Homo sapiens
  source 1..18: mol_type = unassigned RNA
cagggtcagctgagcatg

SEQ ID NO: 3795 - RNA, 18 nt, Homo sapiens
  source 1..18: mol_type = unassigned RNA
catgctcagctgaccctg

SEQ ID NO: 3796 - RNA, 21 nt, Homo sapiens
  source 1..21: mol_type = unassigned RNA
aagcattctttcattggttgg

SEQ ID NO: 3797 - RNA, 21 nt, Homo sapiens
  source 1..21: mol_type = unassigned RNA
ccaaccaatgaaagaatgctt

SEQ ID NO: 3798 - RNA, 21 nt, Homo sapiens
  source 1..21: mol_type = unassigned RNA
ccgtcgccgccacccgagccg

SEQ ID NO: 3799 - RNA, 21 nt, Homo sapiens
  source 1..21: mol_type = unassigned RNA
cggctcgggtggcggcgacgg

SEQ ID NO: 3800 - RNA, 27 nt, Homo sapiens
  source 1..27: mol_type = unassigned RNA
cactgtaggtgatggtgagagtgggca

SEQ ID NO: 3801 - RNA, 27 nt, Homo sapiens
  source 1..27: mol_type = unassigned RNA
tgcccactctcaccatcacctacagtg

SEQ ID NO: 3802 - RNA, 23 nt, Homo sapiens
  source 1..23: mol_type = unassigned RNA
gggatggtagaccggtgacgtgc

SEQ ID NO: 3803 - RNA, 23 nt, Homo sapiens
  source 1..23: mol_type = unassigned RNA
gcacgtcaccggtctaccatccc

SEQ ID NO: 3804 - RNA, 21 nt, Homo sapiens
  source 1..21: mol_type = unassigned RNA
taggacacatggtctacttct

SEQ ID NO: 3805 - RNA, 21 nt, Homo sapiens
  source 1..21: mol_type = unassigned RNA
agaagtagaccatgtgtccta

SEQ ID NO: 3806 - RNA, 22 nt, Homo sapiens
  source 1..22: mol_type = unassigned RNA
ctcctgagccattctgagcctc

SEQ ID NO: 3807 - RNA, 22 nt, Homo sapiens
  source 1..22: mol_type = unassigned RNA
gaggctcagaatggctcaggag

SEQ ID NO: 3808 - RNA, 21 nt, Homo sapiens
  source 1..21: mol_type = unassigned RNA
gtgccagctgcagtgggggag

SEQ ID NO: 3809 - RNA, 21 nt, Homo sapiens
  source 1..21: mol_type = unassigned RNA
ctcccccactgcagctggcac

SEQ ID NO: 3810 - RNA, 21 nt, Homo sapiens
  source 1..21: mol_type = unassigned RNA
cccggagccaggatgcagctc

SEQ ID NO: 3811 - RNA, 21 nt, Homo sapiens
  source 1..21: mol_type = unassigned RNA
gagctgcatcctggctccggg

SEQ ID NO: 3812 - RNA, 21 nt, Homo sapiens
  source 1..21: mol_type = unassigned RNA
tcgtggcctggtctccattat

SEQ ID NO: 3813 - RNA, 21 nt, Homo sapiens
  source 1..21: mol_type = unassigned RNA
ataatggagaccaggccacga

SEQ ID NO: 3814 - RNA, 20 nt, Homo sapiens
  source 1..20: mol_type = unassigned RNA
tctgcagggtttgctttgag

SEQ ID NO: 3815 - RNA, 20 nt, Homo sapiens
  source 1..20: mol_type = unassigned RNA
ctcaaagcaaaccctgcaga

SEQ ID NO: 3816 - RNA, 21 nt, Homo sapiens
  source 1..21: mol_type = unassigned RNA
tgttcatgtagatgtttaagc

SEQ ID NO: 3817 - RNA, 21 nt, Homo sapiens
  source 1..21: mol_type = unassigned RNA
gcttaaacatctacatgaaca

SEQ ID NO: 3818 - RNA, 18 nt, Homo sapiens
  source 1..18: mol_type = unassigned RNA
tcagctggccctcatttc

SEQ ID NO: 3819 - RNA, 18 nt, Homo sapiens
  source 1..18: mol_type = unassigned RNA
gaaatgagggccagctga

SEQ ID NO: 3820 - RNA, 21 nt, Homo sapiens
  source 1..21: mol_type = unassigned RNA
tggcagggaggctgggagggg

SEQ ID NO: 3821 - RNA, 21 nt, Homo sapiens
  source 1..21: mol_type = unassigned RNA
cccctcccagcctccctgcca

SEQ ID NO: 3822 - RNA, 20 nt, Homo sapiens
  source 1..20: mol_type = unassigned RNA
tcactgttcagacaggcgga

SEQ ID NO: 3823 - RNA, 20 nt, Homo sapiens
  source 1..20: mol_type = unassigned RNA
tccgcctgtctgaacagtga

SEQ ID NO: 3824 - RNA, 21 nt, Homo sapiens
  source 1..21: mol_type = unassigned RNA
ccccacctcctctctcctcag

SEQ ID NO: 3825 - RNA, 21 nt, Homo sapiens
  source 1..21: mol_type = unassigned RNA
ctgaggagagaggaggtgggg

SEQ ID NO: 3826 - RNA, 19 nt, Homo sapiens
  source 1..19: mol_type = unassigned RNA
gtgaggactcgggaggtgg

SEQ ID NO: 3827 - RNA, 19 nt, Homo sapiens
  source 1..19: mol_type = unassigned RNA
ccacctcccgagtcctcac

SEQ ID NO: 3828 - RNA, 22 nt, Homo sapiens
  source 1..22: mol_type = unassigned RNA
tgagcccctgtgccgcccccag

SEQ ID NO: 3829 - RNA, 22 nt, Homo sapiens
  source 1..22: mol_type = unassigned RNA
ctgggggcggcacaggggctca

SEQ ID NO: 3830 - RNA, 22 nt, Homo sapiens
  source 1..22: mol_type = unassigned RNA
gtgggtacggcccagtgggggg

SEQ ID NO: 3831 - RNA, 22 nt, Homo sapiens
  source 1..22: mol_type = unassigned RNA
ccccccactgggccgtacccac

SEQ ID NO: 3832 - RNA, 22 nt, Homo sapiens
  source 1..22: mol_type = unassigned RNA
tcaccagccctgtgttccctag

SEQ ID NO: 3833 - RNA, 22 nt, Homo sapiens
  source 1..22: mol_type = unassigned RNA
ctagggaacacagggctggtga

SEQ ID NO: 3834 - RNA, 26 nt, Homo sapiens
  source 1..26: mol_type = unassigned RNA
gtgagggcatgcaggcctggatgggg

SEQ ID NO: 3835 - RNA, 26 nt, Homo sapiens
  source 1..26: mol_type = unassigned RNA
ccccatccaggcctgcatgccctcac

SEQ ID NO: 3836 - RNA, 23 nt, Homo sapiens
  source 1..23: mol_type = unassigned RNA
ctctcaccactgccctcccacag

SEQ ID NO: 3837 - RNA, 23 nt, Homo sapiens
  source 1..23: mol_type = unassigned RNA
ctgtgggagggcagtggtgagag

SEQ ID NO: 3838 - RNA, 24 nt, Homo sapiens
  source 1..24: mol_type = unassigned RNA
gtgggtagggtttgggggagagcg

SEQ ID NO: 3839 - RNA, 24 nt, Homo sapiens
  source 1..24: mol_type = unassigned RNA
cgctctcccccaaaccctacccac

SEQ ID NO: 3840 - RNA, 20 nt, Homo sapiens
  source 1..20: mol_type = unassigned RNA
gtgtctgggcggacagctgc

SEQ ID NO: 3841 - RNA, 20 nt, Homo sapiens
  source 1..20: mol_type = unassigned RNA
gcagctgtccgcccagacac

SEQ ID NO: 3842 - RNA, 20 nt, Homo sapiens
  source 1..20: mol_type = unassigned RNA
cttcctcgtctgtctgcccc

SEQ ID NO: 3843 - RNA, 20 nt, Homo sapiens
  source 1..20: mol_type = unassigned RNA
ggggcagacagacgaggaag

SEQ ID NO: 3844 - RNA, 23 nt, Homo sapiens
  source 1..23: mol_type = unassigned RNA
gtgagtgggagccccagtgtgtg

SEQ ID NO: 3845 - RNA, 23 nt, Homo sapiens
  source 1..23: mol_type = unassigned RNA
cacacactggggctcccactcac

SEQ ID NO: 3846 - RNA, 27 nt, Homo sapiens
  source 1..27: mol_type = unassigned RNA
accttcttgtataagcactgtgctaaa

SEQ ID NO: 3847 - RNA, 27 nt, Homo sapiens
  source 1..27: mol_type = unassigned RNA
tttagcacagtgcttatacaagaaggt

SEQ ID NO: 3848 - RNA, 22 nt, Homo sapiens
  source 1..22: mol_type = unassigned RNA
ggcgacaaaacgagaccctgtc

SEQ ID NO: 3849 - RNA, 22 nt, Homo sapiens
  source 1..22: mol_type = unassigned RNA
gacagggtctcgttttgtcgcc

SEQ ID NO: 3850 - RNA, 22 nt, Homo sapiens
  source 1..22: mol_type = unassigned RNA
ttgcttgaacccaggaagtgga

SEQ ID NO: 3851 - RNA, 22 nt, Homo sapiens
  source 1..22: mol_type = unassigned RNA
tccacttcctgggttcaagcaa

SEQ ID NO: 3852 - RNA, 19 nt, Homo sapiens
  source 1..19: mol_type = unassigned RNA
ggagatggaggttgcagtg

SEQ ID NO: 3853 - RNA, 19 nt, Homo sapiens
  source 1..19: mol_type = unassigned RNA
cactgcaacctccatctcc

SEQ ID NO: 3854 - RNA, 21 nt, Homo sapiens
  source 1..21: mol_type = unassigned RNA
accactgcactccagcctgag

SEQ ID NO: 3855 - RNA, 21 nt, Homo sapiens
  source 1..21: mol_type = unassigned RNA
ctcaggctggagtgcagtggt

SEQ ID NO: 3856 - RNA, 22 nt, Homo sapiens
  source 1..22: mol_type = unassigned RNA
ggtggttgaggctgcagtaagt

SEQ ID NO: 3857 - RNA, 22 nt, Homo sapiens
  source 1..22: mol_type = unassigned RNA
acttactgcagcctcaaccacc

SEQ ID NO: 3858 - RNA, 17 nt, Homo sapiens
  source 1..17: mol_type = unassigned RNA
tcgcctcctcctctccc

SEQ ID NO: 3859 - RNA, 17 nt, Homo sapiens
  source 1..17: mol_type = unassigned RNA
gggagaggaggaggcga

SEQ ID NO: 3860 - RNA, 22 nt, Homo sapiens
  source 1..22: mol_type = unassigned RNA
tctatacagaccctggcttttc

SEQ ID NO: 3861 - RNA, 22 nt, Homo sapiens
  source 1..22: mol_type = unassigned RNA
gaaaagccagggtctgtataga

SEQ ID NO: 3862 - RNA, 22 nt, Homo sapiens
  source 1..22: mol_type = unassigned RNA
tctgggcaacaaagtgagacct

SEQ ID NO: 3863 - RNA, 22 nt, Homo sapiens
  source 1..22: mol_type = unassigned RNA
aggtctcactttgttgcccaga

SEQ ID NO: 3864 - RNA, 21 nt, Homo sapiens
  source 1..21: mol_type = unassigned RNA
gatctcactttgttgcccagg

SEQ ID NO: 3865 - RNA, 21 nt, Homo sapiens
  source 1..21: mol_type = unassigned RNA
cctgggcaacaaagtgagatc

SEQ ID NO: 3866 - RNA, 20 nt, Homo sapiens
  source 1..20: mol_type = unassigned RNA
tcgcgccccggctcccgttc

SEQ ID NO: 3867 - RNA, 20 nt, Homo sapiens
  source 1..20: mol_type = unassigned RNA
gaacgggagccggggcgcga

SEQ ID NO: 3868 - RNA, 25 nt, Homo sapiens
  source 1..25: mol_type = unassigned RNA
tgggaacgggttccggcagacgctg

SEQ ID NO: 3869 - RNA, 25 nt, Homo sapiens
  source 1..25: mol_type = unassigned RNA
cagcgtctgccggaacccgttccca

SEQ ID NO: 3870 - RNA, 21 nt, Homo sapiens
  source 1..21: mol_type = unassigned RNA
ttaggccgcagatctgggtga

SEQ ID NO: 3871 - RNA, 21 nt, Homo sapiens
  source 1..21: mol_type = unassigned RNA
tcacccagatctgcggcctaa

SEQ ID NO: 3872 - RNA, 22 nt, Homo sapiens
  source 1..22: mol_type = unassigned RNA
aataggccacggatctgggcaa

SEQ ID NO: 3873 - RNA, 22 nt, Homo sapiens
  source 1..22: mol_type = unassigned RNA
ttgcccagatccgtggcctatt

SEQ ID NO: 3874 - RNA, 21 nt, Homo sapiens
  source 1..21: mol_type = unassigned RNA
cacccagatctgcggcctaat

SEQ ID NO: 3875 - RNA, 21 nt, Homo sapiens
  source 1..21: mol_type = unassigned RNA
attaggccgcagatctgggtg

SEQ ID NO: 3876 - RNA, 22 nt, Homo sapiens
  source 1..22: mol_type = unassigned RNA
ttagggccctggctccatctcc

SEQ ID NO: 3877 - RNA, 22 nt, Homo sapiens
  source 1..22: mol_type = unassigned RNA
ggagatggagccagggccctaa

SEQ ID NO: 3878 - RNA, 22 nt, Homo sapiens
  source 1..22: mol_type = unassigned RNA
ttcattcggctgtccagatgta

SEQ ID NO: 3879 - RNA, 22 nt, Homo sapiens
  source 1..22: mol_type = unassigned RNA
tacatctggacagccgaatgaa

SEQ ID NO: 3880 - RNA, 24 nt, Homo sapiens
  source 1..24: mol_type = unassigned RNA
ttgcagctgcctgggagtgacttc

SEQ ID NO: 3881 - RNA, 24 nt, Homo sapiens
  source 1..24: mol_type = unassigned RNA
gaagtcactcccaggcagctgcaa

SEQ ID NO: 3882 - RNA, 21 nt, Homo sapiens
  source 1..21: mol_type = unassigned RNA
ttgggacatacttatgctaaa

SEQ ID NO: 3883 - RNA, 21 nt, Homo sapiens
  source 1..21: mol_type = unassigned RNA
tttagcataagtatgtcccaa

SEQ ID NO: 3884 - RNA, 22 nt, Homo sapiens
  source 1..22: mol_type = unassigned RNA
tctcactgtagcctcgaacccc

SEQ ID NO: 3885 - RNA, 22 nt, Homo sapiens
  source 1..22: mol_type = unassigned RNA
ggggttcgaggctacagtgaga

SEQ ID NO: 3886 - RNA, 22 nt, Homo sapiens
  source 1..22: mol_type = unassigned RNA
tttgaggctacagtgagatgtg

SEQ ID NO: 3887 - RNA, 22 nt, Homo sapiens
  source 1..22: mol_type = unassigned RNA
cacatctcactgtagcctcaaa

SEQ ID NO: 3888 - RNA, 18 nt, Homo sapiens
  source 1..18: mol_type = unassigned RNA
cagggaggtgaatgtgat

SEQ ID NO: 3889 - RNA, 18 nt, Homo sapiens
  source 1..18: mol_type = unassigned RNA
atcacattcacctccctg

SEQ ID NO: 3890 - RNA, 19 nt, Homo sapiens
  source 1..19: mol_type = unassigned RNA
gatgatgctgctgatgctg

SEQ ID NO: 3891 - RNA, 19 nt, Homo sapiens
  source 1..19: mol_type = unassigned RNA
cagcatcagcagcatcatc

SEQ ID NO: 3892 - RNA, 24 nt, Homo sapiens
  source 1..24: mol_type = unassigned RNA
ccagacagaattctatgcactttc

SEQ ID NO: 3893 - RNA, 24 nt, Homo sapiens
  source 1..24: mol_type = unassigned RNA
gaaagtgcatagaattctgtctgg

SEQ ID NO: 3894 - RNA, 22 nt, Homo sapiens
  source 1..22: mol_type = unassigned RNA
ctcctggggcccgcactctcgc

SEQ ID NO: 3895 - RNA, 22 nt, Homo sapiens
  source 1..22: mol_type = unassigned RNA
gcgagagtgcgggccccaggag

SEQ ID NO: 3896 - RNA, 21 nt, Homo sapiens
  source 1..21: mol_type = unassigned RNA
ctccgtttgcctgtttcgctg

SEQ ID NO: 3897 - RNA, 21 nt, Homo sapiens
  source 1..21: mol_type = unassigned RNA
cagcgaaacaggcaaacggag

SEQ ID NO: 3898 - RNA, 22 nt, Homo sapiens
  source 1..22: mol_type = unassigned RNA
ctcggcgcggggcgcgggctcc

SEQ ID NO: 3899 - RNA, 22 nt, Homo sapiens
  source 1..22: mol_type = unassigned RNA
ggagcccgcgccccgcgccgag

SEQ ID NO: 3900 - RNA, 21 nt, Homo sapiens
  source 1..21: mol_type = unassigned RNA
gccctccgcccgtgcaccccg

SEQ ID NO: 3901 - RNA, 21 nt, Homo sapiens
  source 1..21: mol_type = unassigned RNA
cggggtgcacgggcggagggc

SEQ ID NO: 3902 - RNA, 22 nt, Homo sapiens
  source 1..22: mol_type = unassigned RNA
gcccgcgtgtggagccaggtgt

SEQ ID NO: 3903 - RNA, 22 nt, Homo sapiens
  source 1..22: mol_type = unassigned RNA
acacctggctccacacgcgggc

SEQ ID NO: 3904 - RNA, 22 nt, Homo sapiens
  source 1..22: mol_type = unassigned RNA
aaaaccgtctagttacagttgt

SEQ ID NO: 3905 - RNA, 22 nt, Homo sapiens
  source 1..22: mol_type = unassigned RNA
acaactgtaactagacggtttt

SEQ ID NO: 3906 - RNA, 18 nt, Homo sapiens
  source 1..18: mol_type = unassigned RNA
tccagtgccctcctctcc

SEQ ID NO: 3907 - RNA, 18 nt, Homo sapiens
  source 1..18: mol_type = unassigned RNA
ggagaggagggcactgga

SEQ ID NO: 3908 - RNA, 18 nt, Homo sapiens
  source 1..18: mol_type = unassigned RNA
tgaggcagtagattgaat

SEQ ID NO: 3909 - RNA, 18 nt, Homo sapiens
  source 1..18: mol_type = unassigned RNA
attcaatctactgcctca

SEQ ID NO: 3910 - RNA, 22 nt, Homo sapiens
  source 1..22: mol_type = unassigned RNA
aggggctggctttcctctggtc

SEQ ID NO: 3911 - RNA, 22 nt, Homo sapiens
  source 1..22: mol_type = unassigned RNA
gaccagaggaaagccagcccct

SEQ ID NO: 3912 - RNA, 22 nt, Homo sapiens
  source 1..22: mol_type = unassigned RNA
tggagagaaaggcagttcctga

SEQ ID NO: 3913 - RNA, 22 nt, Homo sapiens
  source 1..22: mol_type = unassigned RNA
tcaggaactgcctttctctcca

SEQ ID NO: 3914 - RNA, 22 nt, Homo sapiens
  source 1..22: mol_type = unassigned RNA
tcgtgtcttgtgttgcagccgg

SEQ ID NO: 3915 - RNA, 22 nt, Homo sapiens
  source 1..22: mol_type = unassigned RNA
ccggctgcaacacaagacacga

SEQ ID NO: 3916 - RNA, 22 nt, Homo sapiens
  source 1..22: mol_type = unassigned RNA
ggctacaacacaggacccgggc

SEQ ID NO: 3917 - RNA, 22 nt, Homo sapiens
  source 1..22: mol_type = unassigned RNA
gcccgggtcctgtgttgtagcc

SEQ ID NO: 3918 - RNA, 21 nt, Homo sapiens
  source 1..21: mol_type = unassigned RNA
cggcggggacggcgattggtc

SEQ ID NO: 3919 - RNA, 21 nt, Homo sapiens
  source 1..21: mol_type = unassigned RNA
gaccaatcgccgtccccgccg

SEQ ID NO: 3920 - RNA, 22 nt, Homo sapiens
  source 1..22: mol_type = unassigned RNA
cgcaggggccgggtgctcaccg

SEQ ID NO: 3921 - RNA, 22 nt, Homo sapiens
  source 1..22: mol_type = unassigned RNA
cggtgagcacccggcccctgcg

SEQ ID NO: 3922 - RNA, 21 nt, Homo sapiens
  source 1..21: mol_type = unassigned RNA
tgagtgccggtgcctgccctg

SEQ ID NO: 3923 - RNA, 21 nt, Homo sapiens
  source 1..21: mol_type = unassigned RNA
cagggcaggcaccggcactca

SEQ ID NO: 3924 - RNA, 22 nt, Homo sapiens
  source 1..22: mol_type = unassigned RNA
gctgcgcttggatttcgtcccc

SEQ ID NO: 3925 - RNA, 22 nt, Homo sapiens
  source 1..22: mol_type = unassigned RNA
ggggacgaaatccaagcgcagc

SEQ ID NO: 3926 - RNA, 23 nt, Homo sapiens
  source 1..23: mol_type = unassigned RNA
caacggaatcccaaaagcagctg

SEQ ID NO: 3927 - RNA, 23 nt, Homo sapiens
  source 1..23: mol_type = unassigned RNA
cagctgcttttgggattccgttg

SEQ ID NO: 3928 - RNA, 22 nt, Homo sapiens
  source 1..22: mol_type = unassigned RNA
tcaggccaggcacagtggctca

SEQ ID NO: 3929 - RNA, 22 nt, Homo sapiens
  source 1..22: mol_type = unassigned RNA
tgagccactgtgcctggcctga

SEQ ID NO: 3930 - RNA, 19 nt, Homo sapiens
  source 1..19: mol_type = unassigned RNA
accgtgcaaaggtagcata

SEQ ID NO: 3931 - RNA, 19 nt, Homo sapiens
  source 1..19: mol_type = unassigned RNA
tatgctacctttgcacggt

SEQ ID NO: 3932 - RNA, 20 nt, Homo sapiens
  source 1..20: mol_type = unassigned RNA
cctcctgccctccttgctgt

SEQ ID NO: 3933 - RNA, 20 nt, Homo sapiens
  source 1..20: mol_type = unassigned RNA
acagcaaggagggcaggagg

SEQ ID NO: 3934 - RNA, 20 nt, Homo sapiens
  source 1..20: mol_type = unassigned RNA
tgttttgataacagtaatgt

SEQ ID NO: 3935 - RNA, 20 nt, Homo sapiens
  source 1..20: mol_type = unassigned RNA
acattactgttatcaaaaca

SEQ ID NO: 3936 - RNA, 23 nt, Homo sapiens
  source 1..23: mol_type = unassigned RNA
gtgttaattaaacctctatttac

SEQ ID NO: 3937 - RNA, 23 nt, Homo sapiens
  source 1..23: mol_type = unassigned RNA
gtaaatagaggtttaattaacac

SEQ ID NO: 3938 - RNA, 23 nt, Homo sapiens
  source 1..23: mol_type = unassigned RNA
ctgtaatataaatttaatttatt

SEQ ID NO: 3939 - RNA, 23 nt, Homo sapiens
  source 1..23: mol_type = unassigned RNA
aataaattaaatttatattacag

SEQ ID NO: 3940 - RNA, 22 nt, Homo sapiens
  source 1..22: mol_type = unassigned RNA
ttggggaaacggccgctgagtg

SEQ ID NO: 3941 - RNA, 22 nt, Homo sapiens
  source 1..22: mol_type = unassigned RNA
cactcagcggccgtttccccaa

SEQ ID NO: 3942 - RNA, 21 nt, Homo sapiens
  source 1..21: mol_type = unassigned RNA
cctcccatgccaagaactccc

SEQ ID NO: 3943 - RNA, 21 nt, Homo sapiens
  source 1..21: mol_type = unassigned RNA
gggagttcttggcatgggagg

SEQ ID NO: 3944 - RNA, 21 nt, Homo sapiens
  source 1..21: mol_type = unassigned RNA
ggttcttagcataggaggtct

SEQ ID NO: 3945 - RNA, 21 nt, Homo sapiens
  source 1..21: mol_type = unassigned RNA
agacctcctatgctaagaacc

SEQ ID NO: 3946 - RNA, 21 nt, Homo sapiens
  source 1..21: mol_type = unassigned RNA
tgttctctttgccaaggacag

SEQ ID NO: 3947 - RNA, 21 nt, Homo sapiens
  source 1..21: mol_type = unassigned RNA
ctgtccttggcaaagagaaca

SEQ ID NO: 3948 - RNA, 22 nt, Homo sapiens
  source 1..22: mol_type = unassigned RNA
aaatctctgcaggcaaatgtga

SEQ ID NO: 3949 - RNA, 22 nt, Homo sapiens
  source 1..22: mol_type = unassigned RNA
tcacatttgcctgcagagattt

SEQ ID NO: 3950 - RNA, 22 nt, Homo sapiens
  source 1..22: mol_type = unassigned RNA
catggttctgtcaagcaccgcg

SEQ ID NO: 3951 - RNA, 22 nt, Homo sapiens
  source 1..22: mol_type = unassigned RNA
cgcggtgcttgacagaaccatg

SEQ ID NO: 3952 - RNA, 21 nt, Homo sapiens
  source 1..21: mol_type = unassigned RNA
ttgtgcttgatctaaccatgt

SEQ ID NO: 3953 - RNA, 21 nt, Homo sapiens
  source 1..21: mol_type = unassigned RNA
acatggttagatcaagcacaa

SEQ ID NO: 3954 - RNA, 22 nt, Homo sapiens
  source 1..22: mol_type = unassigned RNA
tctgcaagtgtcagaggcgagg

SEQ ID NO: 3955 - RNA, 22 nt, Homo sapiens
  source 1..22: mol_type = unassigned RNA
cctcgcctctgacacttgcaga

SEQ ID NO: 3956 - RNA, 22 nt, Homo sapiens
  source 1..22: mol_type = unassigned RNA
gagagcagtgtgtgttgcctgg

SEQ ID NO: 3957 - RNA, 22 nt, Homo sapiens
  source 1..22: mol_type = unassigned RNA
ccaggcaacacacactgctctc

SEQ ID NO: 3958 - RNA, 22 nt, Homo sapiens
  source 1..22: mol_type = unassigned RNA
atcacattgccagtgattaccc

SEQ ID NO: 3959 - RNA, 22 nt, Homo sapiens
  source 1..22: mol_type = unassigned RNA
gggtaatcactggcaatgtgat

SEQ ID NO: 3960 - RNA, 22 nt, Homo sapiens
  source 1..22: mol_type = unassigned RNA
agcagaggcagagaggctcagg

SEQ ID NO: 3961 - RNA, 22 nt, Homo sapiens
  source 1..22: mol_type = unassigned RNA
cctgagcctctctgcctctgct

SEQ ID NO: 3962 - RNA, 23 nt, Homo sapiens
  source 1..23: mol_type = unassigned RNA
tgaggctctgttagccttggctc

SEQ ID NO: 3963 - RNA, 23 nt, Homo sapiens
  source 1..23: mol_type = unassigned RNA
gagccaaggctaacagagcctca

SEQ ID NO: 3964 - RNA, 22 nt, Homo sapiens
  source 1..22: mol_type = unassigned RNA
tatcatggagttggtaaagcac

SEQ ID NO: 3965 - RNA, 22 nt, Homo sapiens
  source 1..22: mol_type = unassigned RNA
gtgctttaccaactccatgata

SEQ ID NO: 3966 - RNA, 22 nt, Homo sapiens
  source 1..22: mol_type = unassigned RNA
gttttaccacctccaggagact

SEQ ID NO: 3967 - RNA, 22 nt, Homo sapiens
  source 1..22: mol_type = unassigned RNA
agtctcctggaggtggtaaaac

SEQ ID NO: 3968 - RNA, 22 nt, Homo sapiens
  source 1..22: mol_type = unassigned RNA
cgcctcttcagcgctgtcttcc

SEQ ID NO: 3969 - RNA, 22 nt, Homo sapiens
  source 1..22: mol_type = unassigned RNA
ggaagacagcgctgaagaggcg

SEQ ID NO: 3970 - RNA, 23 nt, Homo sapiens
  source 1..23: mol_type = unassigned RNA
caggcagtgactgttcagacgtc

SEQ ID NO: 3971 - RNA, 23 nt, Homo sapiens
  source 1..23: mol_type = unassigned RNA
gacgtctgaacagtcactgcctg

SEQ ID NO: 3972 - RNA, 23 nt, Homo sapiens
  source 1..23: mol_type = unassigned RNA
agaattgcgtttggacaatcagt

SEQ ID NO: 3973 - RNA, 23 nt, Homo sapiens
  source 1..23: mol_type = unassigned RNA
actgattgtccaaacgcaattct

SEQ ID NO: 3974 - RNA, 22 nt, Homo sapiens
  source 1..22: mol_type = unassigned RNA
agatgtccagccacaattctcg

SEQ ID NO: 3975 - RNA, 22 nt, Homo sapiens
  source 1..22: mol_type = unassigned RNA
cgagaattgtggctggacatct

SEQ ID NO: 3976 - RNA, 24 nt, Homo sapiens
  source 1..24: mol_type = unassigned RNA
agcagaagcagggaggttctccca

SEQ ID NO: 3977 - RNA, 24 nt, Homo sapiens
  source 1..24: mol_type = unassigned RNA
tgggagaacctccctgcttctgct

SEQ ID NO: 3978 - RNA, 22 nt, Homo sapiens
  source 1..22: mol_type = unassigned RNA
tatgtgggatggtaaaccgctt

SEQ ID NO: 3979 - RNA, 22 nt, Homo sapiens
  source 1..22: mol_type = unassigned RNA
aagcggtttaccatcccacata

SEQ ID NO: 3980 - RNA, 22 nt, Homo sapiens
  source 1..22: mol_type = unassigned RNA
tggtttaccgtcccacatacat

SEQ ID NO: 3981 - RNA, 22 nt, Homo sapiens
  source 1..22: mol_type = unassigned RNA
atgtatgtgggacggtaaacca

SEQ ID NO: 3982 - RNA, 23 nt, Homo sapiens
  source 1..23: mol_type = unassigned RNA
cagtgcaatgatattgtcaaagc

SEQ ID NO: 3983 - RNA, 23 nt, Homo sapiens
  source 1..23: mol_type = unassigned RNA
gctttgacaatatcattgcactg

SEQ ID NO: 3984 - RNA, 17 nt, Homo sapiens
  source 1..17: mol_type = unassigned RNA
taattgcttccatgttt

SEQ ID NO: 3985 - RNA, 17 nt, Homo sapiens
  source 1..17: mol_type = unassigned RNA
aaacatggaagcaatta

SEQ ID NO: 3986 - RNA, 23 nt, Homo sapiens
  source 1..23: mol_type = unassigned RNA
ttgccacactgcaacaccttaca

SEQ ID NO: 3987 - RNA, 23 nt, Homo sapiens
  source 1..23: mol_type = unassigned RNA
tgtaaggtgttgcagtgtggcaa

SEQ ID NO: 3988 - RNA, 21 nt, Homo sapiens
  source 1..21: mol_type = unassigned RNA
tctggctgttgtggtgtgcaa

SEQ ID NO: 3989 - RNA, 21 nt, Homo sapiens
  source 1..21: mol_type = unassigned RNA
ttgcacaccacaacagccaga

SEQ ID NO: 3990 - RNA, 22 nt, Homo sapiens
  source 1..22: mol_type = unassigned RNA
gatatcagctcagtaggcaccg

SEQ ID NO: 3991 - RNA, 22 nt, Homo sapiens
  source 1..22: mol_type = unassigned RNA
cggtgcctactgagctgatatc

SEQ ID NO: 3992 - RNA, 21 nt, Homo sapiens
  source 1..21: mol_type = unassigned RNA
gttcctgctgaactgagccag

SEQ ID NO: 3993 - RNA, 21 nt, Homo sapiens
  source 1..21: mol_type = unassigned RNA
ctggctcagttcagcaggaac

SEQ ID NO: 3994 - RNA, 20 nt, Homo sapiens
  source 1..20: mol_type = unassigned RNA
atatgggtttactagttggt

SEQ ID NO: 3995 - RNA, 20 nt, Homo sapiens
  source 1..20: mol_type = unassigned RNA
accaactagtaaacccatat

SEQ ID NO: 3996 - RNA, 22 nt, Homo sapiens
  source 1..22: mol_type = unassigned RNA
tgctatgccaacatattgccat

SEQ ID NO: 3997 - RNA, 22 nt, Homo sapiens
  source 1..22: mol_type = unassigned RNA
atggcaatatgttggcatagca

SEQ ID NO: 3998 - RNA, 21 nt, Homo sapiens
  source 1..21: mol_type = unassigned RNA
aggcaagatgctggcatagct

SEQ ID NO: 3999 - RNA, 21 nt, Homo sapiens
  source 1..21: mol_type = unassigned RNA
agctatgccagcatcttgcct

SEQ ID NO: 4000 - RNA, 18 nt, Homo sapiens
  source 1..18: mol_type = unassigned RNA
cggggcggcaggggcctc

SEQ ID NO: 4001 - RNA, 18 nt, Homo sapiens
  source 1..18: mol_type = unassigned RNA
gaggcccctgccgccccg

SEQ ID NO: 4002 - RNA, 19 nt, Homo sapiens
  source 1..19: mol_type = unassigned RNA
aaaagctgggttgagagga

SEQ ID NO: 4003 - RNA, 19 nt, Homo sapiens
  source 1..19: mol_type = unassigned RNA
tcctctcaacccagctttt

SEQ ID NO: 4004 - RNA, 22 nt, Homo sapiens
  source 1..22: mol_type = unassigned RNA
cccaatacacggtcgacctctt

SEQ ID NO: 4005 - RNA, 22 nt, Homo sapiens
  source 1..22: mol_type = unassigned RNA
aagaggtcgaccgtgtattggg

SEQ ID NO: 4006 - RNA, 23 nt, Homo sapiens
  source 1..23: mol_type = unassigned RNA
aggttgtccgtggtgagttcgca

SEQ ID NO: 4007 - RNA, 23 nt, Homo sapiens
  source 1..23: mol_type = unassigned RNA
tgcgaactcaccacggacaacct

SEQ ID NO: 4008 - RNA, 23 nt, Homo sapiens
  source 1..23: mol_type = unassigned RNA
gcaaagcacacggcctgcagaga

SEQ ID NO: 4009 - RNA, 23 nt, Homo sapiens
  source 1..23: mol_type = unassigned RNA
tctctgcaggccgtgtgctttgc

SEQ ID NO: 4010 - RNA, 22 nt, Homo sapiens
  source 1..22: mol_type = unassigned RNA
tctctgggcctgtgtcttaggc

SEQ ID NO: 4011 - RNA, 22 nt, Homo sapiens
  source 1..22: mol_type = unassigned RNA
gcctaagacacaggcccagaga

SEQ ID NO: 4012 - RNA, 21 nt, Homo sapiens
  source 1..21: mol_type = unassigned RNA
gcccctgggcctatcctagaa

SEQ ID NO: 4013 - RNA, 21 nt, Homo sapiens
  source 1..21: mol_type = unassigned RNA
ttctaggataggcccaggggc

SEQ ID NO: 4014 - RNA, 22 nt, Homo sapiens
  source 1..22: mol_type = unassigned RNA
tccgtctcagttactttatagc

SEQ ID NO: 4015 - RNA, 22 nt, Homo sapiens
  source 1..22: mol_type = unassigned RNA
gctataaagtaactgagacgga

SEQ ID NO: 4016 - RNA, 22 nt, Homo sapiens
  source 1..22: mol_type = unassigned RNA
aacacacctattcaaggattca

SEQ ID NO: 4017 - RNA, 22 nt, Homo sapiens
  source 1..22: mol_type = unassigned RNA
tgaatccttgaataggtgtgtt

SEQ ID NO: 4018 - RNA, 24 nt, Homo sapiens
  source 1..24: mol_type = unassigned RNA
aatccttggaacctaggtgtgagt

SEQ ID NO: 4019 - RNA, 24 nt, Homo sapiens
  source 1..24: mol_type = unassigned RNA
actcacacctaggttccaaggatt

SEQ ID NO: 4020 - RNA, 22 nt, Homo sapiens
  source 1..22: mol_type = unassigned RNA
taatgcccctaaaaatccttat

SEQ ID NO: 4021 - RNA, 22 nt, Homo sapiens
  source 1..22: mol_type = unassigned RNA
ataaggatttttaggggcatta

SEQ ID NO: 4022 - RNA, 23 nt, Homo sapiens
  source 1..23: mol_type = unassigned RNA
agggacttttgggggcagatgtg

SEQ ID NO: 4023 - RNA, 23 nt, Homo sapiens
  source 1..23: mol_type = unassigned RNA
cacatctgcccccaaaagtccct

SEQ ID NO: 4024 - RNA, 22 nt, Homo sapiens
  source 1..22: mol_type = unassigned RNA
taatgcccctaaaaatccttat

SEQ ID NO: 4025 - RNA, 22 nt, Homo sapiens
  source 1..22: mol_type = unassigned RNA
ataaggatttttaggggcatta

SEQ ID NO: 4026 - RNA, 22 nt, Homo sapiens
  source 1..22: mol_type = unassigned RNA
agggactttcaggggcagctgt

SEQ ID NO: 4027 - RNA, 22 nt, Homo sapiens
  source 1..22: mol_type = unassigned RNA
acagctgcccctgaaagtccct

SEQ ID NO: 4028 - RNA, 24 nt, Homo sapiens
  source 1..24: mol_type = unassigned RNA
gaaaatgatgagtagtgactgatg

SEQ ID NO: 4029 - RNA, 24 nt, Homo sapiens
  source 1..24: mol_type = unassigned RNA
catcagtcactactcatcattttc

SEQ ID NO: 4030 - RNA, 23 nt, Homo sapiens
  source 1..23: mol_type = unassigned RNA
tgagcaccacacaggccgggcgc

SEQ ID NO: 4031 - RNA, 23 nt, Homo sapiens
  source 1..23: mol_type = unassigned RNA
gcgcccggcctgtgtggtgctca

SEQ ID NO: 4032 - RNA, 21 nt, Homo sapiens
  source 1..21: mol_type = unassigned RNA
gctggtctgcgtggtgctcgg

SEQ ID NO: 4033 - RNA, 21 nt, Homo sapiens
  source 1..21: mol_type = unassigned RNA
ccgagcaccacgcagaccagc

SEQ ID NO: 4034 - RNA, 22 nt, Homo sapiens
  source 1..22: mol_type = unassigned RNA
gcctgctggggtggaacctggt

SEQ ID NO: 4035 - RNA, 22 nt, Homo sapiens
  source 1..22: mol_type = unassigned RNA
accaggttccaccccagcaggc

SEQ ID NO: 4036 - RNA, 23 nt, Homo sapiens
  source 1..23: mol_type = unassigned RNA
gaagtgcttcgattttggggtgt

SEQ ID NO: 4037 - RNA, 23 nt, Homo sapiens
  source 1..23: mol_type = unassigned RNA
acaccccaaaatcgaagcacttc

SEQ ID NO: 4038 - RNA, 22 nt, Homo sapiens
  source 1..22: mol_type = unassigned RNA
actcaaaatgggggcgctttcc

SEQ ID NO: 4039 - RNA, 22 nt, Homo sapiens
  source 1..22: mol_type = unassigned RNA
ggaaagcgcccccattttgagt

SEQ ID NO: 4040 - RNA, 22 nt, Homo sapiens
  source 1..22: mol_type = unassigned RNA
tatgtaacatggtccactaact

SEQ ID NO: 4041 - RNA, 22 nt, Homo sapiens
  source 1..22: mol_type = unassigned RNA
agttagtggaccatgttacata

SEQ ID NO: 4042 - RNA, 21 nt, Homo sapiens
  source 1..21: mol_type = unassigned RNA
tggtagactatggaacgtagg

SEQ ID NO: 4043 - RNA, 21 nt, Homo sapiens
  source 1..21: mol_type = unassigned RNA
cctacgttccatagtctacca

SEQ ID NO: 4044 - RNA, 22 nt, Homo sapiens
  source 1..22: mol_type = unassigned RNA
tgtagatacgagcaccagccac

SEQ ID NO: 4045 - RNA, 22 nt, Homo sapiens
  source 1..22: mol_type = unassigned RNA
gtggctggtgctcgtatctaca

SEQ ID NO: 4046 - RNA, 23 nt, Homo sapiens
  source 1..23: mol_type = unassigned RNA
acaggcggctgtagcaatggggg

SEQ ID NO: 4047 - RNA, 23 nt, Homo sapiens
  source 1..23: mol_type = unassigned RNA
cccccattgctacagccgcctgt

SEQ ID NO: 4048 - RNA, 22 nt, Homo sapiens
  source 1..22: mol_type = unassigned RNA
aattcccttgtagataacccgg

SEQ ID NO: 4049 - RNA, 22 nt, Homo sapiens
  source 1..22: mol_type = unassigned RNA
ccgggttatctacaagggaatt

SEQ ID NO: 4050 - RNA, 22 nt, Homo sapiens
  source 1..22: mol_type = unassigned RNA
tacgcgcagaccacaggatgtc

SEQ ID NO: 4051 - RNA, 22 nt, Homo sapiens
  source 1..22: mol_type = unassigned RNA
gacatcctgtggtctgcgcgta

SEQ ID NO: 4052 - RNA, 22 nt, Homo sapiens
  source 1..22: mol_type = unassigned RNA
ttacacacaactgaggatcata

SEQ ID NO: 4053 - RNA, 22 nt, Homo sapiens
  source 1..22: mol_type = unassigned RNA
tatgatcctcagttgtgtgtaa

SEQ ID NO: 4054 - RNA, 23 nt, Homo sapiens
  source 1..23: mol_type = unassigned RNA
tagcccccaggcttcacttggcg

SEQ ID NO: 4055 - RNA, 23 nt, Homo sapiens
  source 1..23: mol_type = unassigned RNA
cgccaagtgaagcctgggggcta

SEQ ID NO: 4056 - RNA, 23 nt, Homo sapiens
  source 1..23: mol_type = unassigned RNA
agggcataggagagggttgatat

SEQ ID NO: 4057 - RNA, 23 nt, Homo sapiens
  source 1..23: mol_type = unassigned RNA
atatcaaccctctcctatgccct

SEQ ID NO: 4058 - RNA, 22 nt, Homo sapiens
  source 1..22: mol_type = unassigned RNA
gaatgttgctcggtgaacccct

SEQ ID NO: 4059 - RNA, 22 nt, Homo sapiens
  source 1..22: mol_type = unassigned RNA
aggggttcaccgagcaacattc

SEQ ID NO: 4060 - RNA, 23 nt, Homo sapiens
  source 1..23: mol_type = unassigned RNA
aggttacccgagcaactttgcat

SEQ ID NO: 4061 - RNA, 23 nt, Homo sapiens
  source 1..23: mol_type = unassigned RNA
atgcaaagttgctcgggtaacct

SEQ ID NO: 4062 - RNA, 22 nt, Homo sapiens
  source 1..22: mol_type = unassigned RNA
tatgtaacacggtccactaacc

SEQ ID NO: 4063 - RNA, 22 nt, Homo sapiens
  source 1..22: mol_type = unassigned RNA
ggttagtggaccgtgttacata

SEQ ID NO: 4064 - RNA, 21 nt, Homo sapiens
  source 1..21: mol_type = unassigned RNA
tagtagaccgtatagcgtacg

SEQ ID NO: 4065 - RNA, 21 nt, Homo sapiens
  source 1..21: mol_type = unassigned RNA
cgtacgctatacggtctacta

SEQ ID NO: 4066 - RNA, 23 nt, Homo sapiens
  source 1..23: mol_type = unassigned RNA
acttcacctggtccactagccgt

SEQ ID NO: 4067 - RNA, 23 nt, Homo sapiens
  source 1..23: mol_type = unassigned RNA
acggctagtggaccaggtgaagt

SEQ ID NO: 4068 - RNA, 18 nt, Homo sapiens
  source 1..18: mol_type = unassigned RNA
gtgttctctgatggacag

SEQ ID NO: 4069 - RNA, 18 nt, Homo sapiens
  source 1..18: mol_type = unassigned RNA
ctgtccatcagagaacac

SEQ ID NO: 4070 - RNA, 22 nt, Homo sapiens
  source 1..22: mol_type = unassigned RNA
caggtcgtcttgcagggcttct

SEQ ID NO: 4071 - RNA, 22 nt, Homo sapiens
  source 1..22: mol_type = unassigned RNA
agaagccctgcaagacgacctg

SEQ ID NO: 4072 - RNA, 21 nt, Homo sapiens
  source 1..21: mol_type = unassigned RNA
tgtcttgcaggccgtcatgca

SEQ ID NO: 4073 - RNA, 21 nt, Homo sapiens
  source 1..21: mol_type = unassigned RNA
tgcatgacggcctgcaagaca

SEQ ID NO: 4074 - RNA, 22 nt, Homo sapiens
  source 1..22: mol_type = unassigned RNA
atcatgatgggctcctcggtgt

SEQ ID NO: 4075 - RNA, 22 nt, Homo sapiens
  source 1..22: mol_type = unassigned RNA
acaccgaggagcccatcatgat

SEQ ID NO: 4076 - RNA, 23 nt, Homo sapiens
  source 1..23: mol_type = unassigned RNA
ttgctagttgcactcctctctgt

SEQ ID NO: 4077 - RNA, 23 nt, Homo sapiens
  source 1..23: mol_type = unassigned RNA
acagagaggagtgcaactagcaa

SEQ ID NO: 4078 - RNA, 25 nt, Homo sapiens
  source 1..25: mol_type = unassigned RNA
taggcagtgtattgctagcggctgt

SEQ ID NO: 4079 - RNA, 25 nt, Homo sapiens
  source 1..25: mol_type = unassigned RNA
acagccgctagcaatacactgccta

SEQ ID NO: 4080 - RNA, 22 nt, Homo sapiens
  source 1..22: mol_type = unassigned RNA
attggggacattttgcattcat

SEQ ID NO: 4081 - RNA, 22 nt, Homo sapiens
  source 1..22: mol_type = unassigned RNA
atgaatgcaaaatgtccccaat

SEQ ID NO: 4082 - RNA, 22 nt, Homo sapiens
  source 1..22: mol_type = unassigned RNA
ttttgcgatgtgttcctaatat

SEQ ID NO: 4083 - RNA, 22 nt, Homo sapiens
  source 1..22: mol_type = unassigned RNA
atattaggaacacatcgcaaaa

SEQ ID NO: 4084 - RNA, 22 nt, Homo sapiens
  source 1..22: mol_type = unassigned RNA
ttgggatcattttgcatccata

SEQ ID NO: 4085 - RNA, 22 nt, Homo sapiens
  source 1..22: mol_type = unassigned RNA
tatggatgcaaaatgatcccaa

SEQ ID NO: 4086 - RNA, 22 nt, Homo sapiens
  source 1..22: mol_type = unassigned RNA
ttttgcaatatgttcctgaata

SEQ ID NO: 4087 - RNA, 22 nt, Homo sapiens
  source 1..22: mol_type = unassigned RNA
tattcaggaacatattgcaaaa

SEQ ID NO: 4088 - RNA, 21 nt, Homo sapiens
  source 1..21: mol_type = unassigned RNA
gcagtccatgggcatatacac

SEQ ID NO: 4089 - RNA, 21 nt, Homo sapiens
  source 1..21: mol_type = unassigned RNA
gtgtatatgcccatggactgc

SEQ ID NO: 4090 - RNA, 22 nt, Homo sapiens
  source 1..22: mol_type = unassigned RNA
tatgtgcctttggactacatcg

SEQ ID NO: 4091 - RNA, 22 nt, Homo sapiens
  source 1..22: mol_type = unassigned RNA
cgatgtagtccaaaggcacata

SEQ ID NO: 4092 - RNA, 23 nt, Homo sapiens
  source 1..23: mol_type = unassigned RNA
atacacatacacgcaacacacat

SEQ ID NO: 4093 - RNA, 23 nt, Homo sapiens
  source 1..23: mol_type = unassigned RNA
atgtgtgttgcgtgtatgtgtat

SEQ ID NO: 4094 - RNA, 23 nt, Homo sapiens
  source 1..23: mol_type = unassigned RNA
ttgcatgtcagattgtaattccc

SEQ ID NO: 4095 - RNA, 23 nt, Homo sapiens
  source 1..23: mol_type = unassigned RNA
gggaattacaatctgacatgcaa

SEQ ID NO: 4096 - RNA, 21 nt, Homo sapiens
  source 1..21: mol_type = unassigned RNA
tcactcctctcctcccgtctt

SEQ ID NO: 4097 - RNA, 21 nt, Homo sapiens
  source 1..21: mol_type = unassigned RNA
aagacgggaggagaggagtga

SEQ ID NO: 4098 - RNA, 22 nt, Homo sapiens
  source 1..22: mol_type = unassigned RNA
tcaggctcagtcccctcccgat

SEQ ID NO: 4099 - RNA, 22 nt, Homo sapiens
  source 1..22: mol_type = unassigned RNA
atcgggaggggactgagcctga

SEQ ID NO: 4100 - RNA, 22 nt, Homo sapiens
  source 1..22: mol_type = unassigned RNA
gtcatacacggctctcctctct

SEQ ID NO: 4101 - RNA, 22 nt, Homo sapiens
  source 1..22: mol_type = unassigned RNA
agagaggagagccgtgtatgac

SEQ ID NO: 4102 - RNA, 22 nt, Homo sapiens
  source 1..22: mol_type = unassigned RNA
agaggctggccgtgatgaattc

SEQ ID NO: 4103 - RNA, 22 nt, Homo sapiens
  source 1..22: mol_type = unassigned RNA
gaattcatcacggccagcctct

SEQ ID NO: 4104 - RNA, 22 nt, Homo sapiens
  source 1..22: mol_type = unassigned RNA
aatcatacagggacatccagtt

SEQ ID NO: 4105 - RNA, 22 nt, Homo sapiens
  source 1..22: mol_type = unassigned RNA
aactggatgtccctgtatgatt

SEQ ID NO: 4106 - RNA, 22 nt, Homo sapiens
  source 1..22: mol_type = unassigned RNA
aatcgtacagggtcatccactt

SEQ ID NO: 4107 - RNA, 22 nt, Homo sapiens
  source 1..22: mol_type = unassigned RNA
aagtggatgaccctgtacgatt

SEQ ID NO: 4108 - RNA, 21 nt, Homo sapiens
  source 1..21: mol_type = unassigned RNA
ttgaaaggctatttcttggtc

SEQ ID NO: 4109 - RNA, 21 nt, Homo sapiens
  source 1..21: mol_type = unassigned RNA
gaccaagaaatagcctttcaa

SEQ ID NO: 4110 - RNA, 21 nt, Homo sapiens
  source 1..21: mol_type = unassigned RNA
cccagataatggcactctcaa

SEQ ID NO: 4111 - RNA, 21 nt, Homo sapiens
  source 1..21: mol_type = unassigned RNA
ttgagagtgccattatctggg

SEQ ID NO: 4112 - RNA, 22 nt, Homo sapiens
  source 1..22: mol_type = unassigned RNA
caacctggaggactccatgctg

SEQ ID NO: 4113 - RNA, 22 nt, Homo sapiens
  source 1..22: mol_type = unassigned RNA
cagcatggagtcctccaggttg

SEQ ID NO: 4114 - RNA, 20 nt, Homo sapiens
  source 1..20: mol_type = unassigned RNA
ccatggatctccaggtgggt

SEQ ID NO: 4115 - RNA, 20 nt, Homo sapiens
  source 1..20: mol_type = unassigned RNA
acccacctggagatccatgg

SEQ ID NO: 4116 - RNA, 22 nt, Homo sapiens
  source 1..22: mol_type = unassigned RNA
cttatgcaagattcccttctac

SEQ ID NO: 4117 - RNA, 22 nt, Homo sapiens
  source 1..22: mol_type = unassigned RNA
gtagaagggaatcttgcataag

SEQ ID NO: 4118 - RNA, 22 nt, Homo sapiens
  source 1..22: mol_type = unassigned RNA
agtggggaacccttccatgagg

SEQ ID NO: 4119 - RNA, 22 nt, Homo sapiens
  source 1..22: mol_type = unassigned RNA
cctcatggaagggttccccact

SEQ ID NO: 4120 - RNA, 23 nt, Homo sapiens
  source 1..23: mol_type = unassigned RNA
aggacctgcgggacaagattctt

SEQ ID NO: 4121 - RNA, 23 nt, Homo sapiens
  source 1..23: mol_type = unassigned RNA
aagaatcttgtcccgcaggtcct

SEQ ID NO: 4122 - RNA, 22 nt, Homo sapiens
  source 1..22: mol_type = unassigned RNA
caaaccacactgtggtgttaga

SEQ ID NO: 4123 - RNA, 22 nt, Homo sapiens
  source 1..22: mol_type = unassigned RNA
tctaacaccacagtgtggtttg

SEQ ID NO: 4124 - RNA, 21 nt, Homo sapiens
  source 1..21: mol_type = unassigned RNA
cagcagcacactgtggtttgt

SEQ ID NO: 4125 - RNA, 21 nt, Homo sapiens
  source 1..21: mol_type = unassigned RNA
acaaaccacagtgtgctgctg

SEQ ID NO: 4126 - RNA, 23 nt, Homo sapiens
  source 1..23: mol_type = unassigned RNA
tttcaagccagggggcgtttttc

SEQ ID NO: 4127 - RNA, 23 nt, Homo sapiens
  source 1..23: mol_type = unassigned RNA
gaaaaacgccccctggcttgaaa

SEQ ID NO: 4128 - RNA, 20 nt, Homo sapiens
  source 1..20: mol_type = unassigned RNA
tcactacctgacaatacagt

SEQ ID NO: 4129 - RNA, 20 nt, Homo sapiens
  source 1..20: mol_type = unassigned RNA
actgtattgtcaggtagtga

SEQ ID NO: 4130 - RNA, 21 nt, Homo sapiens
  source 1..21: mol_type = unassigned RNA
tgctgtattgtcaggtagtga

SEQ ID NO: 4131 - RNA, 21 nt, Homo sapiens
  source 1..21: mol_type = unassigned RNA
tcactacctgacaatacagca

SEQ ID NO: 4132 - RNA, 22 nt, Homo sapiens
  source 1..22: mol_type = unassigned RNA
ttctgcctctgtccaggtcctt

SEQ ID NO: 4133 - RNA, 22 nt, Homo sapiens
  source 1..22: mol_type = unassigned RNA
aaggacctggacagaggcagaa

SEQ ID NO: 4134 - RNA, 24 nt, Homo sapiens
  source 1..24: mol_type = unassigned RNA
agggctggactcagcggcggagct

SEQ ID NO: 4135 - RNA, 24 nt, Homo sapiens
  source 1..24: mol_type = unassigned RNA
agctccgccgctgagtccagccct

SEQ ID NO: 4136 - RNA, 21 nt, Homo sapiens
  source 1..21: mol_type = unassigned RNA
tgactgcctcactgaccactt

SEQ ID NO: 4137 - RNA, 21 nt, Homo sapiens
  source 1..21: mol_type = unassigned RNA
aagtggtcagtgaggcagtca

SEQ ID NO: 4138 - RNA, 24 nt, Homo sapiens
  source 1..24: mol_type = unassigned RNA
aatttggtttctgaggcacttagt

SEQ ID NO: 4139 - RNA, 24 nt, Homo sapiens
  source 1..24: mol_type = unassigned RNA
actaagtgcctcagaaaccaaatt

SEQ ID NO: 4140 - RNA, 21 nt, Homo sapiens
  source 1..21: mol_type = unassigned RNA
tacttttctaggttgttgggg

SEQ ID NO: 4141 - RNA, 21 nt, Homo sapiens
  source 1..21: mol_type = unassigned RNA
ccccaacaacctagaaaagta

SEQ ID NO: 4142 - RNA, 23 nt, Homo sapiens
  source 1..23: mol_type = unassigned RNA
tcacaacaaccttgcagggtaga

SEQ ID NO: 4143 - RNA, 23 nt, Homo sapiens
  source 1..23: mol_type = unassigned RNA
tctaccctgcaaggttgttgtga

SEQ ID NO: 4144 - RNA, 22 nt, Homo sapiens
  source 1..22: mol_type = unassigned RNA
cttggattttcctgggcctcag

SEQ ID NO: 4145 - RNA, 22 nt, Homo sapiens
  source 1..22: mol_type = unassigned RNA
ctgaggcccaggaaaatccaag

SEQ ID NO: 4146 - RNA, 22 nt, Homo sapiens
  source 1..22: mol_type = unassigned RNA
tgaggacagggcaaattcacga

SEQ ID NO: 4147 - RNA, 22 nt, Homo sapiens
  source 1..22: mol_type = unassigned RNA
tcgtgaatttgccctgtcctca

SEQ ID NO: 4148 - RNA, 22 nt, Homo sapiens
  source 1..22: mol_type = unassigned RNA
atcatatgaaccaaactctaat

SEQ ID NO: 4149 - RNA, 22 nt, Homo sapiens
  source 1..22: mol_type = unassigned RNA
attagagtttggttcatatgat

SEQ ID NO: 4150 - RNA, 22 nt, Homo sapiens
  source 1..22: mol_type = unassigned RNA
tagagtctggctgatatggttt

SEQ ID NO: 4151 - RNA, 22 nt, Homo sapiens
  source 1..22: mol_type = unassigned RNA
aaaccatatcagccagactcta

SEQ ID NO: 4152 - RNA, 21 nt, Homo sapiens
  source 1..21: mol_type = unassigned RNA
cctgtgctcccagggcctcgc

SEQ ID NO: 4153 - RNA, 21 nt, Homo sapiens
  source 1..21: mol_type = unassigned RNA
gcgaggccctgggagcacagg

SEQ ID NO: 4154 - RNA, 22 nt, Homo sapiens
  source 1..22: mol_type = unassigned RNA
tgaggcccttggggcacagtgg

SEQ ID NO: 4155 - RNA, 22 nt, Homo sapiens
  source 1..22: mol_type = unassigned RNA
ccactgtgccccaagggcctca

SEQ ID NO: 4156 - RNA, 22 nt, Homo sapiens
  source 1..22: mol_type = unassigned RNA
tcctaaatctgaaagtccaaaa

SEQ ID NO: 4157 - RNA, 22 nt, Homo sapiens
  source 1..22: mol_type = unassigned RNA
ttttggactttcagatttagga

SEQ ID NO: 4158 - RNA, 24 nt, Homo sapiens
  source 1..24: mol_type = unassigned RNA
ttggactttttcagatttggggat

SEQ ID NO: 4159 - RNA, 24 nt, Homo sapiens
  source 1..24: mol_type = unassigned RNA
atccccaaatctgaaaaagtccaa

SEQ ID NO: 4160 - RNA, 22 nt, Homo sapiens
  source 1..22: mol_type = unassigned RNA
atgcacctgggcaaggattctg

SEQ ID NO: 4161 - RNA, 22 nt, Homo sapiens
  source 1..22: mol_type = unassigned RNA
cagaatccttgcccaggtgcat

SEQ ID NO: 4162 - RNA, 23 nt, Homo sapiens
  source 1..23: mol_type = unassigned RNA
taatccttgctacctgggtgaga

SEQ ID NO: 4163 - RNA, 23 nt, Homo sapiens
  source 1..23: mol_type = unassigned RNA
tctcacccaggtagcaaggatta

SEQ ID NO: 4164 - RNA, 22 nt, Homo sapiens
  source 1..22: mol_type = unassigned RNA
ttttgtgtctcccattccccag

SEQ ID NO: 4165 - RNA, 22 nt, Homo sapiens
  source 1..22: mol_type = unassigned RNA
ctggggaatgggagacacaaaa

SEQ ID NO: 4166 - RNA, 22 nt, Homo sapiens
  source 1..22: mol_type = unassigned RNA
agggggatggcagagcaaaatt

SEQ ID NO: 4167 - RNA, 22 nt, Homo sapiens
  source 1..22: mol_type = unassigned RNA
aattttgctctgccatccccct

SEQ ID NO: 4168 - RNA, 22 nt, Homo sapiens
  source 1..22: mol_type = unassigned RNA
gtgcatggctgtatatataaca

SEQ ID NO: 4169 - RNA, 22 nt, Homo sapiens
  source 1..22: mol_type = unassigned RNA
tgttatatatacagccatgcac

SEQ ID NO: 4170 - RNA, 21 nt, Homo sapiens
  source 1..21: mol_type = unassigned RNA
tatatatacagccatgcactc

SEQ ID NO: 4171 - RNA, 21 nt, Homo sapiens
  source 1..21: mol_type = unassigned RNA
gagtgcatggctgtatatata

SEQ ID NO: 4172 - RNA, 22 nt, Homo sapiens
  source 1..22: mol_type = unassigned RNA
aatgcacccgggcaaggattct

SEQ ID NO: 4173 - RNA, 22 nt, Homo sapiens
  source 1..22: mol_type = unassigned RNA
agaatccttgcccgggtgcatt

SEQ ID NO: 4174 - RNA, 22 nt, Homo sapiens
  source 1..22: mol_type = unassigned RNA
aatcctttgtccctgggtgaga

SEQ ID NO: 4175 - RNA, 22 nt, Homo sapiens
  source 1..22: mol_type = unassigned RNA
tctcacccagggacaaaggatt

SEQ ID NO: 4176 - RNA, 22 nt, Homo sapiens
  source 1..22: mol_type = unassigned RNA
aatgcacctgggcaaggattca

SEQ ID NO: 4177 - RNA, 22 nt, Homo sapiens
  source 1..22: mol_type = unassigned RNA
tgaatccttgcccaggtgcatt

SEQ ID NO: 4178 - RNA, 21 nt, Homo sapiens
  source 1..21: mol_type = unassigned RNA
atccttgctatctgggtgcta

SEQ ID NO: 4179 - RNA, 21 nt, Homo sapiens
  source 1..21: mol_type = unassigned RNA
tagcacccagatagcaaggat

SEQ ID NO: 4180 - RNA, 22 nt, Homo sapiens
  source 1..22: mol_type = unassigned RNA
agaccctggtctgcactctatc

SEQ ID NO: 4181 - RNA, 22 nt, Homo sapiens
  source 1..22: mol_type = unassigned RNA
gatagagtgcagaccagggtct

SEQ ID NO: 4182 - RNA, 21 nt, Homo sapiens
  source 1..21: mol_type = unassigned RNA
ttgcagctgcggttgtaaggt

SEQ ID NO: 4183 - RNA, 21 nt, Homo sapiens
  source 1..21: mol_type = unassigned RNA
accttacaaccgcagctgcaa

SEQ ID NO: 4184 - RNA, 22 nt, Homo sapiens
  source 1..22: mol_type = unassigned RNA
cgtcaacacttgctggtttcct

SEQ ID NO: 4185 - RNA, 22 nt, Homo sapiens
  source 1..22: mol_type = unassigned RNA
aggaaaccagcaagtgttgacg

SEQ ID NO: 4186 - RNA, 22 nt, Homo sapiens
  source 1..22: mol_type = unassigned RNA
gggagccaggaagtattgatgt

SEQ ID NO: 4187 - RNA, 22 nt, Homo sapiens
  source 1..22: mol_type = unassigned RNA
acatcaatacttcctggctccc

SEQ ID NO: 4188 - RNA, 21 nt, Homo sapiens
  source 1..21: mol_type = unassigned RNA
taaggcacccttctgagtaga

SEQ ID NO: 4189 - RNA, 21 nt, Homo sapiens
  source 1..21: mol_type = unassigned RNA
tctactcagaagggtgcctta

SEQ ID NO: 4190 - RNA, 22 nt, Homo sapiens
  source 1..22: mol_type = unassigned RNA
tattcaggaaggtgttacttaa

SEQ ID NO: 4191 - RNA, 22 nt, Homo sapiens
  source 1..22: mol_type = unassigned RNA
ttaagtaacaccttcctgaata

SEQ ID NO: 4192 - RNA, 21 nt, Homo sapiens
  source 1..21: mol_type = unassigned RNA
ttttgcaccttttggagtgaa

SEQ ID NO: 4193 - RNA, 21 nt, Homo sapiens
  source 1..21: mol_type = unassigned RNA
ttcactccaaaaggtgcaaaa

SEQ ID NO: 4194 - RNA, 23 nt, Homo sapiens
  source 1..23: mol_type = unassigned RNA
tgattgtagccttttggagtaga

SEQ ID NO: 4195 - RNA, 23 nt, Homo sapiens
  source 1..23: mol_type = unassigned RNA
tctactccaaaaggctacaatca

SEQ ID NO: 4196 - RNA, 23 nt, Homo sapiens
  source 1..23: mol_type = unassigned RNA
gggtttgtagctttgctggcatg

SEQ ID NO: 4197 - RNA, 23 nt, Homo sapiens
  source 1..23: mol_type = unassigned RNA
catgccagcaaagctacaaaccc

SEQ ID NO: 4198 - RNA, 23 nt, Homo sapiens
  source 1..23: mol_type = unassigned RNA
cagggctcagggattggatggag

SEQ ID NO: 4199 - RNA, 23 nt, Homo sapiens
  source 1..23: mol_type = unassigned RNA
ctccatccaatccctgagccctg

SEQ ID NO: 4200 - RNA, 23 nt, Homo sapiens
  source 1..23: mol_type = unassigned RNA
atgctactcggaaatcccactga

SEQ ID NO: 4201 - RNA, 23 nt, Homo sapiens
  source 1..23: mol_type = unassigned RNA
tcagtgggatttccgagtagcat

SEQ ID NO: 4202 - RNA, 21 nt, Homo sapiens
  source 1..21: mol_type = unassigned RNA
gtgggatttctgagtagcatc

SEQ ID NO: 4203 - RNA, 21 nt, Homo sapiens
  source 1..21: mol_type = unassigned RNA
gatgctactcagaaatcccac

SEQ ID NO: 4204 - RNA, 23 nt, Homo sapiens
  source 1..23: mol_type = unassigned RNA
ccggggcagattggtgtagggtg

SEQ ID NO: 4205 - RNA, 23 nt, Homo sapiens
  source 1..23: mol_type = unassigned RNA
caccctacaccaatctgccccgg

SEQ ID NO: 4206 - RNA, 23 nt, Homo sapiens
  source 1..23: mol_type = unassigned RNA
acggagacgacaagactgtgctg

SEQ ID NO: 4207 - RNA, 23 nt, Homo sapiens
  source 1..23: mol_type = unassigned RNA
cagcacagtcttgtcgtctccgt

SEQ ID NO: 4208 - RNA, 22 nt, Homo sapiens
  source 1..22: mol_type = unassigned RNA
aatccacgctgagcttggcatc

SEQ ID NO: 4209 - RNA, 22 nt, Homo sapiens
  source 1..22: mol_type = unassigned RNA
gatgccaagctcagcgtggatt

SEQ ID NO: 4210 - RNA, 23 nt, Homo sapiens
  source 1..23: mol_type = unassigned RNA
aggaaatgaggctggctaggagc

SEQ ID NO: 4211 - RNA, 23 nt, Homo sapiens
  source 1..23: mol_type = unassigned RNA
gctcctagccagcctcatttcct

SEQ ID NO: 4212 - RNA, 22 nt, Homo sapiens
  source 1..22: mol_type = unassigned RNA
tgattggtacgtctgtgggtag

SEQ ID NO: 4213 - RNA, 22 nt, Homo sapiens
  source 1..22: mol_type = unassigned RNA
ctacccacagacgtaccaatca

SEQ ID NO: 4214 - RNA, 22 nt, Homo sapiens
  source 1..22: mol_type = unassigned RNA
aatcagtgaatgccttgaacct

SEQ ID NO: 4215 - RNA, 22 nt, Homo sapiens
  source 1..22: mol_type = unassigned RNA
aggttcaaggcattcactgatt

SEQ ID NO: 4216 - RNA, 21 nt, Homo sapiens
  source 1..21: mol_type = unassigned RNA
ttacaggcgtgaaccaccgcg

SEQ ID NO: 4217 - RNA, 21 nt, Homo sapiens
  source 1..21: mol_type = unassigned RNA
cgcggtggttcacgcctgtaa

SEQ ID NO: 4218 - RNA, 21 nt, Homo sapiens
  source 1..21: mol_type = unassigned RNA
tactgcagacagtggcaatca

SEQ ID NO: 4219 - RNA, 21 nt, Homo sapiens
  source 1..21: mol_type = unassigned RNA
tgattgccactgtctgcagta

SEQ ID NO: 4220 - RNA, 21 nt, Homo sapiens
  source 1..21: mol_type = unassigned RNA
gtttcaccatgttggtcaggc

SEQ ID NO: 4221 - RNA, 21 nt, Homo sapiens
  source 1..21: mol_type = unassigned RNA
gcctgaccaacatggtgaaac

SEQ ID NO: 4222 - RNA, 23 nt, Homo sapiens
  source 1..23: mol_type = unassigned RNA
taaatttcacctttctgagaagg

SEQ ID NO: 4223 - RNA, 23 nt, Homo sapiens
  source 1..23: mol_type = unassigned RNA
ccttctcagaaaggtgaaattta

SEQ ID NO: 4224 - RNA, 22 nt, Homo sapiens
  source 1..22: mol_type = unassigned RNA
ttcacaaggaggtgtcatttat

SEQ ID NO: 4225 - RNA, 22 nt, Homo sapiens
  source 1..22: mol_type = unassigned RNA
ataaatgacacctccttgtgaa

SEQ ID NO: 4226 - RNA, 23 nt, Homo sapiens
  source 1..23: mol_type = unassigned RNA
taaatttcacctttctgagaaga

SEQ ID NO: 4227 - RNA, 23 nt, Homo sapiens
  source 1..23: mol_type = unassigned RNA
tcttctcagaaaggtgaaattta

SEQ ID NO: 4228 - RNA, 22 nt, Homo sapiens
  source 1..22: mol_type = unassigned RNA
ttctcaaggaggtgtcgtttat

SEQ ID NO: 4229 - RNA, 22 nt, Homo sapiens
  source 1..22: mol_type = unassigned RNA
ataaacgacacctccttgagaa

SEQ ID NO: 4230 - RNA, 21 nt, Homo sapiens
  source 1..21: mol_type = unassigned RNA
attgacacttctgtgagtaga

SEQ ID NO: 4231 - RNA, 21 nt, Homo sapiens
  source 1..21: mol_type = unassigned RNA
tctactcacagaagtgtcaat

SEQ ID NO: 4232 - RNA, 23 nt, Homo sapiens
  source 1..23: mol_type = unassigned RNA
tactctggagagtgacaatcatg

SEQ ID NO: 4233 - RNA, 23 nt, Homo sapiens
  source 1..23: mol_type = unassigned RNA
catgattgtcactctccagagta

SEQ ID NO: 4234 - RNA, 21 nt, Homo sapiens
  source 1..21: mol_type = unassigned RNA
attgacacctctgtgagtgga

SEQ ID NO: 4235 - RNA, 21 nt, Homo sapiens
  source 1..21: mol_type = unassigned RNA
tccactcacagaggtgtcaat

SEQ ID NO: 4236 - RNA, 22 nt, Homo sapiens
  source 1..22: mol_type = unassigned RNA
ttctcaagagggaggcaatcat

SEQ ID NO: 4237 - RNA, 22 nt, Homo sapiens
  source 1..22: mol_type = unassigned RNA
atgattgcctccctcttgagaa

SEQ ID NO: 4238 - RNA, 22 nt, Homo sapiens
  source 1..22: mol_type = unassigned RNA
gagtgccttcttttggagcgtt

SEQ ID NO: 4239 - RNA, 22 nt, Homo sapiens
  source 1..22: mol_type = unassigned RNA
aacgctccaaaagaaggcactc

SEQ ID NO: 4240 - RNA, 18 nt, Homo sapiens
  source 1..18: mol_type = unassigned RNA
tgcttcctttcagagggt

SEQ ID NO: 4241 - RNA, 18 nt, Homo sapiens
  source 1..18: mol_type = unassigned RNA
accctctgaaaggaagca

SEQ ID NO: 4242 - RNA, 22 nt, Homo sapiens
  source 1..22: mol_type = unassigned RNA
atctggaggtaagaagcacttt

SEQ ID NO: 4243 - RNA, 22 nt, Homo sapiens
  source 1..22: mol_type = unassigned RNA
aaagtgcttcttacctccagat

SEQ ID NO: 4244 - RNA, 22 nt, Homo sapiens
  source 1..22: mol_type = unassigned RNA
gaaagcgcttccctttgctgga

SEQ ID NO: 4245 - RNA, 22 nt, Homo sapiens
  source 1..22: mol_type = unassigned RNA
tccagcaaagggaagcgctttc

SEQ ID NO: 4246 - RNA, 20 nt, Homo sapiens
  source 1..20: mol_type = unassigned RNA
ctgcaaagggaagccctttc

SEQ ID NO: 4247 - RNA, 20 nt, Homo sapiens
  source 1..20: mol_type = unassigned RNA
gaaagggcttccctttgcag

SEQ ID NO: 4248 - RNA, 21 nt, Homo sapiens
  source 1..21: mol_type = unassigned RNA
caaagcgcttccctttggagc

SEQ ID NO: 4249 - RNA, 21 nt, Homo sapiens
  source 1..21: mol_type = unassigned RNA
gctccaaagggaagcgctttg

SEQ ID NO: 4250 - RNA, 22 nt, Homo sapiens
  source 1..22: mol_type = unassigned RNA
ctctagagggaagcactttctg

SEQ ID NO: 4251 - RNA, 22 nt, Homo sapiens
  source 1..22: mol_type = unassigned RNA
cagaaagtgcttccctctagag

SEQ ID NO: 4252 - RNA, 21 nt, Homo sapiens
  source 1..21: mol_type = unassigned RNA
aaagcgcttcccttcagagtg

SEQ ID NO: 4253 - RNA, 21 nt, Homo sapiens
  source 1..21: mol_type = unassigned RNA
cactctgaagggaagcgcttt

SEQ ID NO: 4254 - RNA, 22 nt, Homo sapiens
  source 1..22: mol_type = unassigned RNA
ctctagagggaagcgctttctg

SEQ ID NO: 4255 - RNA, 22 nt, Homo sapiens
  source 1..22: mol_type = unassigned RNA
cagaaagcgcttccctctagag

SEQ ID NO: 4256 - RNA, 22 nt, Homo sapiens
  source 1..22: mol_type = unassigned RNA
aaagtgcatccttttagaggtt

SEQ ID NO: 4257 - RNA, 22 nt, Homo sapiens
  source 1..22: mol_type = unassigned RNA
aacctctaaaaggatgcacttt

SEQ ID NO: 4258 - RNA, 22 nt, Homo sapiens
  source 1..22: mol_type = unassigned RNA
ctctagagggaagcgctttctg

SEQ ID NO: 4259 - RNA, 22 nt, Homo sapiens
  source 1..22: mol_type = unassigned RNA
cagaaagcgcttccctctagag

SEQ ID NO: 4260 - RNA, 22 nt, Homo sapiens
  source 1..22: mol_type = unassigned RNA
aaagtgcatctttttagaggat

SEQ ID NO: 4261 - RNA, 22 nt, Homo sapiens
  source 1..22: mol_type = unassigned RNA
atcctctaaaaagatgcacttt

SEQ ID NO: 4262 - RNA, 22 nt, Homo sapiens
  source 1..22: mol_type = unassigned RNA
ctctagagggaagcgctttctg

SEQ ID NO: 4263 - RNA, 22 nt, Homo sapiens
  source 1..22: mol_type = unassigned RNA
cagaaagcgcttccctctagag

SEQ ID NO: 4264 - RNA, 21 nt, Homo sapiens
  source 1..21: mol_type = unassigned RNA
aaagtgcttccttttagaggg

SEQ ID NO: 4265 - RNA, 21 nt, Homo sapiens
  source 1..21: mol_type = unassigned RNA
ccctctaaaaggaagcacttt

SEQ ID NO: 4266 - RNA, 22 nt, Homo sapiens
  source 1..22: mol_type = unassigned RNA
aaagtgcttccttttagagggt

SEQ ID NO: 4267 - RNA, 22 nt, Homo sapiens
  source 1..22: mol_type = unassigned RNA
accctctaaaaggaagcacttt

SEQ ID NO: 4268 - RNA, 22 nt, Homo sapiens
  source 1..22: mol_type = unassigned RNA
ctctagagggaagcactttctg

SEQ ID NO: 4269 - RNA, 22 nt, Homo sapiens
  source 1..22: mol_type = unassigned RNA
cagaaagtgcttccctctagag

SEQ ID NO: 4270 - RNA, 22 nt, Homo sapiens
  source 1..22: mol_type = unassigned RNA
aaagtgcttctctttggtgggt

SEQ ID NO: 4271 - RNA, 22 nt, Homo sapiens
  source 1..22: mol_type = unassigned RNA
acccaccaaagagaagcacttt

SEQ ID NO: 4272 - RNA, 20 nt, Homo sapiens
  source 1..20: mol_type = unassigned RNA
ctacaaagggaagccctttc

SEQ ID NO: 4273 - RNA, 20 nt, Homo sapiens
  source 1..20: mol_type = unassigned RNA
gaaagggcttccctttgtag

SEQ ID NO: 4274 - RNA, 21 nt, Homo sapiens
  source 1..21: mol_type = unassigned RNA
aaagtgcttcctttttgaggg

SEQ ID NO: 4275 - RNA, 21 nt, Homo sapiens
  source 1..21: mol_type = unassigned RNA
ccctcaaaaaggaagcacttt

SEQ ID NO: 4276 - RNA, 22 nt, Homo sapiens
  source 1..22: mol_type = unassigned RNA
aagtgcttccttttagagggtt

SEQ ID NO: 4277 - RNA, 22 nt, Homo sapiens
  source 1..22: mol_type = unassigned RNA
aaccctctaaaaggaagcactt

SEQ ID NO: 4278 - RNA, 24 nt, Homo sapiens
  source 1..24: mol_type = unassigned RNA
acaaagtgcttccctttagagtgt

SEQ ID NO: 4279 - RNA, 24 nt, Homo sapiens
  source 1..24: mol_type = unassigned RNA
acactctaaagggaagcactttgt

SEQ ID NO: 4280 - RNA, 22 nt, Homo sapiens
  source 1..22: mol_type = unassigned RNA
aacgcacttccctttagagtgt

SEQ ID NO: 4281 - RNA, 22 nt, Homo sapiens
  source 1..22: mol_type = unassigned RNA
acactctaaagggaagtgcgtt

SEQ ID NO: 4282 - RNA, 22 nt, Homo sapiens
  source 1..22: mol_type = unassigned RNA
aaaatggttccctttagagtgt

SEQ ID NO: 4283 - RNA, 22 nt, Homo sapiens
  source 1..22: mol_type = unassigned RNA
acactctaaagggaaccatttt

SEQ ID NO: 4284 - RNA, 22 nt, Homo sapiens
  source 1..22: mol_type = unassigned RNA
ctctagagggaagcgctttctg

SEQ ID NO: 4285 - RNA, 22 nt, Homo sapiens
  source 1..22: mol_type = unassigned RNA
cagaaagcgcttccctctagag

SEQ ID NO: 4286 - RNA, 23 nt, Homo sapiens
  source 1..23: mol_type = unassigned RNA
gaacgcgcttccctatagagggt

SEQ ID NO: 4287 - RNA, 23 nt, Homo sapiens
  source 1..23: mol_type = unassigned RNA
accctctatagggaagcgcgttc

SEQ ID NO: 4288 - RNA, 22 nt, Homo sapiens
  source 1..22: mol_type = unassigned RNA
ctctagagggaagcgctttctg

SEQ ID NO: 4289 - RNA, 22 nt, Homo sapiens
  source 1..22: mol_type = unassigned RNA
cagaaagcgcttccctctagag

SEQ ID NO: 4290 - RNA, 21 nt, Homo sapiens
  source 1..21: mol_type = unassigned RNA
gaaggcgcttccctttggagt

SEQ ID NO: 4291 - RNA, 21 nt, Homo sapiens
  source 1..21: mol_type = unassigned RNA
actccaaagggaagcgccttc

SEQ ID NO: 4292 - RNA, 20 nt, Homo sapiens
  source 1..20: mol_type = unassigned RNA
ctgcaaagggaagccctttc

SEQ ID NO: 4293 - RNA, 20 nt, Homo sapiens
  source 1..20: mol_type = unassigned RNA
gaaagggcttccctttgcag

SEQ ID NO: 4294 - RNA, 22 nt, Homo sapiens
  source 1..22: mol_type = unassigned RNA
cctcccacacccaaggcttgca

SEQ ID NO: 4295 - RNA, 22 nt, Homo sapiens
  source 1..22: mol_type = unassigned RNA
tgcaagccttgggtgtgggagg

SEQ ID NO: 4296 - RNA, 22 nt, Homo sapiens
  source 1..22: mol_type = unassigned RNA
catgccttgagtgtaggaccgt

SEQ ID NO: 4297 - RNA, 22 nt, Homo sapiens
  source 1..22: mol_type = unassigned RNA
acggtcctacactcaaggcatg

SEQ ID NO: 4298 - RNA, 22 nt, Homo sapiens
  source 1..22: mol_type = unassigned RNA
atcatacaaggacaatttcttt

SEQ ID NO: 4299 - RNA, 22 nt, Homo sapiens
  source 1..22: mol_type = unassigned RNA
aaagaaattgtccttgtatgat

SEQ ID NO: 4300 - RNA, 22 nt, Homo sapiens
  source 1..22: mol_type = unassigned RNA
ggagaaattatccttggtgtgt

SEQ ID NO: 4301 - RNA, 22 nt, Homo sapiens
  source 1..22: mol_type = unassigned RNA
acacaccaaggataatttctcc

SEQ ID NO: 4302 - RNA, 22 nt, Homo sapiens
  source 1..22: mol_type = unassigned RNA
tggtgggcacagaatctggact

SEQ ID NO: 4303 - RNA, 22 nt, Homo sapiens
  source 1..22: mol_type = unassigned RNA
agtccagattctgtgcccacca

SEQ ID NO: 4304 - RNA, 25 nt, Homo sapiens
  source 1..25: mol_type = unassigned RNA
aaaggattctgctgtcggtcccact

SEQ ID NO: 4305 - RNA, 25 nt, Homo sapiens
  source 1..25: mol_type = unassigned RNA
agtgggaccgacagcagaatccttt

SEQ ID NO: 4306 - RNA, 23 nt, Homo sapiens
  source 1..23: mol_type = unassigned RNA
tcggggatcatcatgtcacgaga

SEQ ID NO: 4307 - RNA, 23 nt, Homo sapiens
  source 1..23: mol_type = unassigned RNA
tctcgtgacatgatgatccccga

SEQ ID NO: 4308 - RNA, 22 nt, Homo sapiens
  source 1..22: mol_type = unassigned RNA
aaacattcgcggtgcacttctt

SEQ ID NO: 4309 - RNA, 22 nt, Homo sapiens
  source 1..22: mol_type = unassigned RNA
aagaagtgcaccgcgaatgttt

SEQ ID NO: 4310 - RNA, 22 nt, Homo sapiens
  source 1..22: mol_type = unassigned RNA
attctgcatttttagcaagttc

SEQ ID NO: 4311 - RNA, 22 nt, Homo sapiens
  source 1..22: mol_type = unassigned RNA
gaacttgctaaaaatgcagaat

SEQ ID NO: 4312 - RNA, 22 nt, Homo sapiens
  source 1..22: mol_type = unassigned RNA
acctgaggttgtgcatttctaa

SEQ ID NO: 4313 - RNA, 22 nt, Homo sapiens
  source 1..22: mol_type = unassigned RNA
ttagaaatgcacaacctcaggt

SEQ ID NO: 4314 - RNA, 22 nt, Homo sapiens
  source 1..22: mol_type = unassigned RNA
tcagcaaacatttattgtgtgc

SEQ ID NO: 4315 - RNA, 22 nt, Homo sapiens
  source 1..22: mol_type = unassigned RNA
gcacacaataaatgtttgctga

SEQ ID NO: 4316 - RNA, 22 nt, Homo sapiens
  source 1..22: mol_type = unassigned RNA
tcagtaaatgtttattagatga

SEQ ID NO: 4317 - RNA, 22 nt, Homo sapiens
  source 1..22: mol_type = unassigned RNA
tcatctaataaacatttactga

SEQ ID NO: 4318 - RNA, 22 nt, Homo sapiens
  source 1..22: mol_type = unassigned RNA
agctacagttacttttgcacca

SEQ ID NO: 4319 - RNA, 22 nt, Homo sapiens
  source 1..22: mol_type = unassigned RNA
tggtgcaaaagtaactgtagct

SEQ ID NO: 4320 - RNA, 20 nt, Homo sapiens
  source 1..20: mol_type = unassigned RNA
taaaaactgcaattactttc

SEQ ID NO: 4321 - RNA, 20 nt, Homo sapiens
  source 1..20: mol_type = unassigned RNA
gaaagtaattgcagttttta

SEQ ID NO: 4322 - RNA, 23 nt, Homo sapiens
  source 1..23: mol_type = unassigned RNA
tgcaaaagtaattgcagtttttg

SEQ ID NO: 4323 - RNA, 23 nt, Homo sapiens
  source 1..23: mol_type = unassigned RNA
caaaaactgcaattacttttgca

SEQ ID NO: 4324 - RNA, 22 nt, Homo sapiens
  source 1..22: mol_type = unassigned RNA
aaagaccgtgactacttttgca

SEQ ID NO: 4325 - RNA, 22 nt, Homo sapiens
  source 1..22: mol_type = unassigned RNA
tgcaaaagtagtcacggtcttt

SEQ ID NO: 4326 - RNA, 22 nt, Homo sapiens
  source 1..22: mol_type = unassigned RNA
agaagtaactacggtttttgca

SEQ ID NO: 4327 - RNA, 22 nt, Homo sapiens
  source 1..22: mol_type = unassigned RNA
tgcaaaaaccgtagttacttct

SEQ ID NO: 4328 - RNA, 19 nt, Homo sapiens
  source 1..19: mol_type = unassigned RNA
aaaaaccacaattactttt

SEQ ID NO: 4329 - RNA, 19 nt, Homo sapiens
  source 1..19: mol_type = unassigned RNA
aaaagtaattgtggttttt

SEQ ID NO: 4330 - RNA, 19 nt, Homo sapiens
  source 1..19: mol_type = unassigned RNA
aaaagtaattgcggtcttt

SEQ ID NO: 4331 - RNA, 19 nt, Homo sapiens
  source 1..19: mol_type = unassigned RNA
aaagaccgcaattactttt

SEQ ID NO: 4332 - RNA, 22 nt, Homo sapiens
  source 1..22: mol_type = unassigned RNA
caaaaactgcaattacttttgc

SEQ ID NO: 4333 - RNA, 22 nt, Homo sapiens
  source 1..22: mol_type = unassigned RNA
gcaaaagtaattgcagtttttg

SEQ ID NO: 4334 - RNA, 22 nt, Homo sapiens
  source 1..22: mol_type = unassigned RNA
gaaagtaattgctgtttttgcc

SEQ ID NO: 4335 - RNA, 22 nt, Homo sapiens
  source 1..22: mol_type = unassigned RNA
ggcaaaaacagcaattactttc

SEQ ID NO: 4336 - RNA, 21 nt, Homo sapiens
  source 1..21: mol_type = unassigned RNA
taaaactgcagttatttttgc

SEQ ID NO: 4337 - RNA, 21 nt, Homo sapiens
  source 1..21: mol_type = unassigned RNA
gcaaaaataactgcagtttta

SEQ ID NO: 4338 - RNA, 21 nt, Homo sapiens
  source 1..21: mol_type = unassigned RNA
aaaagtaattgcagtttttgc

SEQ ID NO: 4339 - RNA, 21 nt, Homo sapiens
  source 1..21: mol_type = unassigned RNA
gcaaaaactgcaattactttt

SEQ ID NO: 4340 - RNA, 22 nt, Homo sapiens
  source 1..22: mol_type = unassigned RNA
taaaacccacaattatgtttgt

SEQ ID NO: 4341 - RNA, 22 nt, Homo sapiens
  source 1..22: mol_type = unassigned RNA
acaaacataattgtgggtttta

SEQ ID NO: 4342 - RNA, 22 nt, Homo sapiens
  source 1..22: mol_type = unassigned RNA
aaaagtaattgcgggttttgcc

SEQ ID NO: 4343 - RNA, 22 nt, Homo sapiens
  source 1..22: mol_type = unassigned RNA
ggcaaaacccgcaattactttt

SEQ ID NO: 4344 - RNA, 21 nt, Homo sapiens
  source 1..21: mol_type = unassigned RNA
caaaaccgcagtaacttttgt

SEQ ID NO: 4345 - RNA, 21 nt, Homo sapiens
  source 1..21: mol_type = unassigned RNA
acaaaagttactgcggttttg

SEQ ID NO: 4346 - RNA, 22 nt, Homo sapiens
  source 1..22: mol_type = unassigned RNA
aaaagttattgcggttttggct

SEQ ID NO: 4347 - RNA, 22 nt, Homo sapiens
  source 1..22: mol_type = unassigned RNA
agccaaaaccgcaataactttt

SEQ ID NO: 4348 - RNA, 21 nt, Homo sapiens
  source 1..21: mol_type = unassigned RNA
tggcagttacttttgcaccag

SEQ ID NO: 4349 - RNA, 21 nt, Homo sapiens
  source 1..21: mol_type = unassigned RNA
ctggtgcaaaagtaactgcca

SEQ ID NO: 4350 - RNA, 21 nt, Homo sapiens
  source 1..21: mol_type = unassigned RNA
aaaagtaattgcggtttttgc

SEQ ID NO: 4351 - RNA, 21 nt, Homo sapiens
  source 1..21: mol_type = unassigned RNA
gcaaaaaccgcaattactttt

SEQ ID NO: 4352 - RNA, 20 nt, Homo sapiens
  source 1..20: mol_type = unassigned RNA
aaaactgcagttacttttgc

SEQ ID NO: 4353 - RNA, 20 nt, Homo sapiens
  source 1..20: mol_type = unassigned RNA
gcaaaagtaactgcagtttt

SEQ ID NO: 4354 - RNA, 18 nt, Homo sapiens
  source 1..18: mol_type = unassigned RNA
aaaagtacttgcggattt

SEQ ID NO: 4355 - RNA, 18 nt, Homo sapiens
  source 1..18: mol_type = unassigned RNA
aaatccgcaagtactttt

SEQ ID NO: 4356 - RNA, 20 nt, Homo sapiens
  source 1..20: mol_type = unassigned RNA
gtgcaaaagtcatcacggtt

SEQ ID NO: 4357 - RNA, 20 nt, Homo sapiens
  source 1..20: mol_type = unassigned RNA
aaccgtgatgacttttgcac

SEQ ID NO: 4358 - RNA, 22 nt, Homo sapiens
  source 1..22: mol_type = unassigned RNA
gctggtgcaaaagtaatggcgg

SEQ ID NO: 4359 - RNA, 22 nt, Homo sapiens
  source 1..22: mol_type = unassigned RNA
ccgccattacttttgcaccagc

SEQ ID NO: 4360 - RNA, 22 nt, Homo sapiens
  source 1..22: mol_type = unassigned RNA
aaaagtaatcactgtttttgcc

SEQ ID NO: 4361 - RNA, 22 nt, Homo sapiens
  source 1..22: mol_type = unassigned RNA
ggcaaaaacagtgattactttt

SEQ ID NO: 4362 - RNA, 20 nt, Homo sapiens
  source 1..20: mol_type = unassigned RNA
agtgcctgagggagtaagag

SEQ ID NO: 4363 - RNA, 20 nt, Homo sapiens
  source 1..20: mol_type = unassigned RNA
ctcttactccctcaggcact

SEQ ID NO: 4364 - RNA, 22 nt, Homo sapiens
  source 1..22: mol_type = unassigned RNA
tgtcttactccctcaggcacat

SEQ ID NO: 4365 - RNA, 22 nt, Homo sapiens
  source 1..22: mol_type = unassigned RNA
atgtgcctgagggagtaagaca

SEQ ID NO: 4366 - RNA, 23 nt, Homo sapiens
  source 1..23: mol_type = unassigned RNA
agtgcctgagggagtaagagccc

SEQ ID NO: 4367 - RNA, 23 nt, Homo sapiens
  source 1..23: mol_type = unassigned RNA
gggctcttactccctcaggcact

SEQ ID NO: 4368 - RNA, 21 nt, Homo sapiens
  source 1..21: mol_type = unassigned RNA
gcgacccactcttggtttcca

SEQ ID NO: 4369 - RNA, 21 nt, Homo sapiens
  source 1..21: mol_type = unassigned RNA
tggaaaccaagagtgggtcgc

SEQ ID NO: 4370 - RNA, 22 nt, Homo sapiens
  source 1..22: mol_type = unassigned RNA
ttagcttaaggagtaccagatc

SEQ ID NO: 4371 - RNA, 22 nt, Homo sapiens
  source 1..22: mol_type = unassigned RNA
gatctggtactccttaagctaa

SEQ ID NO: 4372 - RNA, 21 nt, Homo sapiens
  source 1..21: mol_type = unassigned RNA
tatggtactccttaagctaac

SEQ ID NO: 4373 - RNA, 21 nt, Homo sapiens
  source 1..21: mol_type = unassigned RNA
gttagcttaaggagtaccata

SEQ ID NO: 4374 - RNA, 19 nt, Homo sapiens
  source 1..19: mol_type = unassigned RNA
tgagctgctgtaccaaaat

SEQ ID NO: 4375 - RNA, 19 nt, Homo sapiens
  source 1..19: mol_type = unassigned RNA
attttggtacagcagctca

SEQ ID NO: 4376 - RNA, 22 nt, Homo sapiens
  source 1..22: mol_type = unassigned RNA
cacatatgaagtgagccagcac

SEQ ID NO: 4377 - RNA, 22 nt, Homo sapiens
  source 1..22: mol_type = unassigned RNA
gtgctggctcacttcatatgtg

SEQ ID NO: 4378 - RNA, 22 nt, Homo sapiens
  source 1..22: mol_type = unassigned RNA
tgctggctcatttcatatgtgt

SEQ ID NO: 4379 - RNA, 22 nt, Homo sapiens
  source 1..22: mol_type = unassigned RNA
acacatatgaaatgagccagca

SEQ ID NO: 4380 - RNA, 22 nt, Homo sapiens
  source 1..22: mol_type = unassigned RNA
ttccatgcctcctagaagttcc

SEQ ID NO: 4381 - RNA, 22 nt, Homo sapiens
  source 1..22: mol_type = unassigned RNA
ggaacttctaggaggcatggaa

SEQ ID NO: 4382 - RNA, 22 nt, Homo sapiens
  source 1..22: mol_type = unassigned RNA
agccttccaggagaaatggaga

SEQ ID NO: 4383 - RNA, 22 nt, Homo sapiens
  source 1..22: mol_type = unassigned RNA
tctccatttctcctggaaggct

SEQ ID NO: 4384 - RNA, 22 nt, Homo sapiens
  source 1..22: mol_type = unassigned RNA
taaaactttaagtgtgcctagg

SEQ ID NO: 4385 - RNA, 22 nt, Homo sapiens
  source 1..22: mol_type = unassigned RNA
cctaggcacacttaaagtttta

SEQ ID NO: 4386 - RNA, 22 nt, Homo sapiens
  source 1..22: mol_type = unassigned RNA
taggcacacttaaagttatagc

SEQ ID NO: 4387 - RNA, 22 nt, Homo sapiens
  source 1..22: mol_type = unassigned RNA
gctataactttaagtgtgccta

SEQ ID NO: 4388 - RNA, 22 nt, Homo sapiens
  source 1..22: mol_type = unassigned RNA
gaatatgggtatattagtttgg

SEQ ID NO: 4389 - RNA, 22 nt, Homo sapiens
  source 1..22: mol_type = unassigned RNA
ccaaactaatatacccatattc

SEQ ID NO: 4390 - RNA, 22 nt, Homo sapiens
  source 1..22: mol_type = unassigned RNA
aaactaatatacccatattctg

SEQ ID NO: 4391 - RNA, 22 nt, Homo sapiens
  source 1..22: mol_type = unassigned RNA
cagaatatgggtatattagttt

SEQ ID NO: 4392 - RNA, 22 nt, Homo sapiens
  source 1..22: mol_type = unassigned RNA
tagttcttccctttgcccaatt

SEQ ID NO: 4393 - RNA, 22 nt, Homo sapiens
  source 1..22: mol_type = unassigned RNA
aattgggcaaagggaagaacta

SEQ ID NO: 4394 - RNA, 22 nt, Homo sapiens
  source 1..22: mol_type = unassigned RNA
cagggaaatgggaagaactaga

SEQ ID NO: 4395 - RNA, 22 nt, Homo sapiens
  source 1..22: mol_type = unassigned RNA
tctagttcttcccatttccctg

SEQ ID NO: 4396 - RNA, 22 nt, Homo sapiens
  source 1..22: mol_type = unassigned RNA
ctgaatagctgggactacaggt

SEQ ID NO: 4397 - RNA, 22 nt, Homo sapiens
  source 1..22: mol_type = unassigned RNA
acctgtagtcccagctattcag

SEQ ID NO: 4398 - RNA, 22 nt, Homo sapiens
  source 1..22: mol_type = unassigned RNA
tgaagtaccagctactcgagag

SEQ ID NO: 4399 - RNA, 22 nt, Homo sapiens
  source 1..22: mol_type = unassigned RNA
ctctcgagtagctggtacttca

SEQ ID NO: 4400 - RNA, 22 nt, Homo sapiens
  source 1..22: mol_type = unassigned RNA
cagagtgacaagctggttaaag

SEQ ID NO: 4401 - RNA, 22 nt, Homo sapiens
  source 1..22: mol_type = unassigned RNA
ctttaaccagcttgtcactctg

SEQ ID NO: 4402 - RNA, 22 nt, Homo sapiens
  source 1..22: mol_type = unassigned RNA
tatccagcttgttactatatgc

SEQ ID NO: 4403 - RNA, 22 nt, Homo sapiens
  source 1..22: mol_type = unassigned RNA
gcatatagtaacaagctggata

SEQ ID NO: 4404 - RNA, 21 nt, Homo sapiens
  source 1..21: mol_type = unassigned RNA
gccccgggcagtgtgatcatc

SEQ ID NO: 4405 - RNA, 21 nt, Homo sapiens
  source 1..21: mol_type = unassigned RNA
gatgatcacactgcccggggc

SEQ ID NO: 4406 - RNA, 18 nt, Homo sapiens
  source 1..18: mol_type = unassigned RNA
atggtcacctccgggact

SEQ ID NO: 4407 - RNA, 18 nt, Homo sapiens
  source 1..18: mol_type = unassigned RNA
agtcccggaggtgaccat

SEQ ID NO: 4408 - RNA, 19 nt, Homo sapiens
  source 1..19: mol_type = unassigned RNA
aagtcccactaatgccagc

SEQ ID NO: 4409 - RNA, 19 nt, Homo sapiens
  source 1..19: mol_type = unassigned RNA
gctggcattagtgggactt

SEQ ID NO: 4410 - RNA, 21 nt, Homo sapiens
  source 1..21: mol_type = unassigned RNA
actggcattagtgggactttt

SEQ ID NO: 4411 - RNA, 21 nt, Homo sapiens
  source 1..21: mol_type = unassigned RNA
aaaagtcccactaatgccagt

SEQ ID NO: 4412 - RNA, 23 nt, Homo sapiens
  source 1..23: mol_type = unassigned RNA
tgcacatggcaacctagctccca

SEQ ID NO: 4413 - RNA, 23 nt, Homo sapiens
  source 1..23: mol_type = unassigned RNA
tgggagctaggttgccatgtgca

SEQ ID NO: 4414 - RNA, 21 nt, Homo sapiens
  source 1..21: mol_type = unassigned RNA
ggctgggtgctcttgtgcagt

SEQ ID NO: 4415 - RNA, 21 nt, Homo sapiens
  source 1..21: mol_type = unassigned RNA
actgcacaagagcacccagcc

SEQ ID NO: 4416 - RNA, 21 nt, Homo sapiens
  source 1..21: mol_type = unassigned RNA
taaagtaaatatgcaccaaaa

SEQ ID NO: 4417 - RNA, 21 nt, Homo sapiens
  source 1..21: mol_type = unassigned RNA
ttttggtgcatatttacttta

SEQ ID NO: 4418 - RNA, 21 nt, Homo sapiens
  source 1..21: mol_type = unassigned RNA
aataaagttcatgtatggcaa

SEQ ID NO: 4419 - RNA, 21 nt, Homo sapiens
  source 1..21: mol_type = unassigned RNA
ttgccatacatgaactttatt

SEQ ID NO: 4420 - RNA, 21 nt, Homo sapiens
  source 1..21: mol_type = unassigned RNA
ttgccatacatagactttatt

SEQ ID NO: 4421 - RNA, 21 nt, Homo sapiens
  source 1..21: mol_type = unassigned RNA
aataaagtctatgtatggcaa

SEQ ID NO: 4422 - RNA, 21 nt, Homo sapiens
  source 1..21: mol_type = unassigned RNA
atacccatagcttagctccca

SEQ ID NO: 4423 - RNA, 21 nt, Homo sapiens
  source 1..21: mol_type = unassigned RNA
tgggagctaagctatgggtat

SEQ ID NO: 4424 - RNA, 21 nt, Homo sapiens
  source 1..21: mol_type = unassigned RNA
tgggagctaagctatgggtat

SEQ ID NO: 4425 - RNA, 21 nt, Homo sapiens
  source 1..21: mol_type = unassigned RNA
atacccatagcttagctccca

SEQ ID NO: 4426 - RNA, 22 nt, Homo sapiens
  source 1..22: mol_type = unassigned RNA
caaagtttaagatccttgaagt

SEQ ID NO: 4427 - RNA, 22 nt, Homo sapiens
  source 1..22: mol_type = unassigned RNA
acttcaaggatcttaaactttg

SEQ ID NO: 4428 - RNA, 22 nt, Homo sapiens
  source 1..22: mol_type = unassigned RNA
atcaaggatcttaaactttgcc

SEQ ID NO: 4429 - RNA, 22 nt, Homo sapiens
  source 1..22: mol_type = unassigned RNA
ggcaaagtttaagatccttgat

SEQ ID NO: 4430 - RNA, 20 nt, Homo sapiens
  source 1..20: mol_type = unassigned RNA
aaagtagctgtaccatttgc

SEQ ID NO: 4431 - RNA, 20 nt, Homo sapiens
  source 1..20: mol_type = unassigned RNA
gcaaatggtacagctacttt

SEQ ID NO: 4432 - RNA, 19 nt, Homo sapiens
  source 1..19: mol_type = unassigned RNA
aggcacggtgtcagcaggc

SEQ ID NO: 4433 - RNA, 19 nt, Homo sapiens
  source 1..19: mol_type = unassigned RNA
gcctgctgacaccgtgcct

SEQ ID NO: 4434 - RNA, 19 nt, Homo sapiens
  source 1..19: mol_type = unassigned RNA
gggcgcctgtgatcccaac

SEQ ID NO: 4435 - RNA, 19 nt, Homo sapiens
  source 1..19: mol_type = unassigned RNA
gttgggatcacaggcgccc

SEQ ID NO: 4436 - RNA, 23 nt, Homo sapiens
  source 1..23: mol_type = unassigned RNA
agtatgttcttccaggacagaac

SEQ ID NO: 4437 - RNA, 23 nt, Homo sapiens
  source 1..23: mol_type = unassigned RNA
gttctgtcctggaagaacatact

SEQ ID NO: 4438 - RNA, 22 nt, Homo sapiens
  source 1..22: mol_type = unassigned RNA
gagaaatgctggactaatctgc

SEQ ID NO: 4439 - RNA, 22 nt, Homo sapiens
  source 1..22: mol_type = unassigned RNA
gcagattagtccagcatttctc

SEQ ID NO: 4440 - RNA, 22 nt, Homo sapiens
  source 1..22: mol_type = unassigned RNA
agaaagggtggcaatacctctt

SEQ ID NO: 4441 - RNA, 22 nt, Homo sapiens
  source 1..22: mol_type = unassigned RNA
aagaggtattgccaccctttct

SEQ ID NO: 4442 - RNA, 22 nt, Homo sapiens
  source 1..22: mol_type = unassigned RNA
aggtattgccaccctttctagt

SEQ ID NO: 4443 - RNA, 22 nt, Homo sapiens
  source 1..22: mol_type = unassigned RNA
actagaaagggtggcaatacct

SEQ ID NO: 4444 - RNA, 22 nt, Homo sapiens
  source 1..22: mol_type = unassigned RNA
gtagcaccttgcaggataaggt

SEQ ID NO: 4445 - RNA, 22 nt, Homo sapiens
  source 1..22: mol_type = unassigned RNA
accttatcctgcaaggtgctac

SEQ ID NO: 4446 - RNA, 24 nt, Homo sapiens
  source 1..24: mol_type = unassigned RNA
tacagatgcagattctctgacttc

SEQ ID NO: 4447 - RNA, 24 nt, Homo sapiens
  source 1..24: mol_type = unassigned RNA
gaagtcagagaatctgcatctgta

SEQ ID NO: 4448 - RNA, 20 nt, Homo sapiens
  source 1..20: mol_type = unassigned RNA
aactctagcctgagcaacag

SEQ ID NO: 4449 - RNA, 20 nt, Homo sapiens
  source 1..20: mol_type = unassigned RNA
ctgttgctcaggctagagtt

SEQ ID NO: 4450 - RNA, 22 nt, Homo sapiens
  source 1..22: mol_type = unassigned RNA
acagcccagcagttatcacggg

SEQ ID NO: 4451 - RNA, 22 nt, Homo sapiens
  source 1..22: mol_type = unassigned RNA
cccgtgataactgctgggctgt

SEQ ID NO: 4452 - RNA, 21 nt, Homo sapiens
  source 1..21: mol_type = unassigned RNA
tatcgtatcgtattgtattgt

SEQ ID NO: 4453 - RNA, 21 nt, Homo sapiens
  source 1..21: mol_type = unassigned RNA
acaatacaatacgatacgata

SEQ ID NO: 4454 - RNA, 22 nt, Homo sapiens
  source 1..22: mol_type = unassigned RNA
ttagaacgttttagggtcaaat

SEQ ID NO: 4455 - RNA, 22 nt, Homo sapiens
  source 1..22: mol_type = unassigned RNA
atttgaccctaaaacgttctaa

SEQ ID NO: 4456 - RNA, 22 nt, Homo sapiens
  source 1..22: mol_type = unassigned RNA
taacaaacacctgtaaaacagc

SEQ ID NO: 4457 - RNA, 22 nt, Homo sapiens
  source 1..22: mol_type = unassigned RNA
gctgttttacaggtgtttgtta

SEQ ID NO: 4458 - RNA, 22 nt, Homo sapiens
  source 1..22: mol_type = unassigned RNA
agcatacacctgtagtcctaga

SEQ ID NO: 4459 - RNA, 22 nt, Homo sapiens
  source 1..22: mol_type = unassigned RNA
tctaggactacaggtgtatgct

SEQ ID NO: 4460 - RNA, 21 nt, Homo sapiens
  source 1..21: mol_type = unassigned RNA
agttaatgaatcctggaaagt

SEQ ID NO: 4461 - RNA, 21 nt, Homo sapiens
  source 1..21: mol_type = unassigned RNA
actttccaggattcattaact

SEQ ID NO: 4462 - RNA, 21 nt, Homo sapiens
  source 1..21: mol_type = unassigned RNA
tcagctactacctctattagg

SEQ ID NO: 4463 - RNA, 21 nt, Homo sapiens
  source 1..21: mol_type = unassigned RNA
cctaatagaggtagtagctga

SEQ ID NO: 4464 - RNA, 22 nt, Homo sapiens
  source 1..22: mol_type = unassigned RNA
ttgctctgagctccgagaaagc

SEQ ID NO: 4465 - RNA, 22 nt, Homo sapiens
  source 1..22: mol_type = unassigned RNA
gctttctcggagctcagagcaa

SEQ ID NO: 4466 - RNA, 22 nt, Homo sapiens
  source 1..22: mol_type = unassigned RNA
caaataataccacagtgggtgt

SEQ ID NO: 4467 - RNA, 22 nt, Homo sapiens
  source 1..22: mol_type = unassigned RNA
acacccactgtggtattatttg

SEQ ID NO: 4468 - RNA, 20 nt, Homo sapiens
  source 1..20: mol_type = unassigned RNA
aataatatcacagtaggtgt

SEQ ID NO: 4469 - RNA, 20 nt, Homo sapiens
  source 1..20: mol_type = unassigned RNA
acacctactgtgatattatt

SEQ ID NO: 4470 - RNA, 22 nt, Homo sapiens
  source 1..22: mol_type = unassigned RNA
aataatatcacagtaggtgtac

SEQ ID NO: 4471 - RNA, 22 nt, Homo sapiens
  source 1..22: mol_type = unassigned RNA
gtacacctactgtgatattatt

SEQ ID NO: 4472 - RNA, 22 nt, Homo sapiens
  source 1..22: mol_type = unassigned RNA
gcagtggctctgaaatgaactc

SEQ ID NO: 4473 - RNA, 22 nt, Homo sapiens
  source 1..22: mol_type = unassigned RNA
gagttcatttcagagccactgc

SEQ ID NO: 4474 - RNA, 21 nt, Homo sapiens
  source 1..21: mol_type = unassigned RNA
cagatcatgggactgtctcag

SEQ ID NO: 4475 - RNA, 21 nt, Homo sapiens
  source 1..21: mol_type = unassigned RNA
ctgagacagtcccatgatctg

SEQ ID NO: 4476 - RNA, 22 nt, Homo sapiens
  source 1..22: mol_type = unassigned RNA
actccaagaagaatctagacag

SEQ ID NO: 4477 - RNA, 22 nt, Homo sapiens
  source 1..22: mol_type = unassigned RNA
ctgtctagattcttcttggagt

SEQ ID NO: 4478 - RNA, 22 nt, Homo sapiens
  source 1..22: mol_type = unassigned RNA
ctcatttaagtagtctgatgcc

SEQ ID NO: 4479 - RNA, 22 nt, Homo sapiens
  source 1..22: mol_type = unassigned RNA
ggcatcagactacttaaatgag

SEQ ID NO: 4480 - RNA, 22 nt, Homo sapiens
  source 1..22: mol_type = unassigned RNA
tcaagtagtttcatgataaagg

SEQ ID NO: 4481 - RNA, 22 nt, Homo sapiens
  source 1..22: mol_type = unassigned RNA
cctttatcatgaaactacttga

SEQ ID NO: 4482 - RNA, 22 nt, Homo sapiens
  source 1..22: mol_type = unassigned RNA
tgggggagtgcagtgattgtgg

SEQ ID NO: 4483 - RNA, 22 nt, Homo sapiens
  source 1..22: mol_type = unassigned RNA
ccacaatcactgcactccccca

SEQ ID NO: 4484 - RNA, 22 nt, Homo sapiens
  source 1..22: mol_type = unassigned RNA
tcctgtctttccttgttggagc

SEQ ID NO: 4485 - RNA, 22 nt, Homo sapiens
  source 1..22: mol_type = unassigned RNA
gctccaacaaggaaagacagga

SEQ ID NO: 4486 - RNA, 22 nt, Homo sapiens
  source 1..22: mol_type = unassigned RNA
taatgcattaaattattgaagg

SEQ ID NO: 4487 - RNA, 22 nt, Homo sapiens
  source 1..22: mol_type = unassigned RNA
ccttcaataatttaatgcatta

SEQ ID NO: 4488 - RNA, 19 nt, Homo sapiens
  source 1..19: mol_type = unassigned RNA
ttattgtcacgttctgatt

SEQ ID NO: 4489 - RNA, 19 nt, Homo sapiens
  source 1..19: mol_type = unassigned RNA
aatcagaacgtgacaataa

SEQ ID NO: 4490 - RNA, 22 nt, Homo sapiens
  source 1..22: mol_type = unassigned RNA
tgagtcagcaacatatcccatg

SEQ ID NO: 4491 - RNA, 22 nt, Homo sapiens
  source 1..22: mol_type = unassigned RNA
catgggatatgttgctgactca

SEQ ID NO: 4492 - RNA, 18 nt, Homo sapiens
  source 1..18: mol_type = unassigned RNA
aggagaagtcgggaaggt

SEQ ID NO: 4493 - RNA, 18 nt, Homo sapiens
  source 1..18: mol_type = unassigned RNA
accttcccgacttctcct

SEQ ID NO: 4494 - RNA, 22 nt, Homo sapiens
  source 1..22: mol_type = unassigned RNA
cgaaaacagcaattacctttgc

SEQ ID NO: 4495 - RNA, 22 nt, Homo sapiens
  source 1..22: mol_type = unassigned RNA
gcaaaggtaattgctgttttcg

SEQ ID NO: 4496 - RNA, 22 nt, Homo sapiens
  source 1..22: mol_type = unassigned RNA
ttaggccatcatcccattatgc

SEQ ID NO: 4497 - RNA, 22 nt, Homo sapiens
  source 1..22: mol_type = unassigned RNA
gcataatgggatgatggcctaa

SEQ ID NO: 4498 - RNA, 23 nt, Homo sapiens
  source 1..23: mol_type = unassigned RNA
tgtttcggggctcatggcctgtg

SEQ ID NO: 4499 - RNA, 23 nt, Homo sapiens
  source 1..23: mol_type = unassigned RNA
cacaggccatgagccccgaaaca

SEQ ID NO: 4500 - RNA, 22 nt, Homo sapiens
  source 1..22: mol_type = unassigned RNA
aaaggtaattgcagtttttccc

SEQ ID NO: 4501 - RNA, 22 nt, Homo sapiens
  source 1..22: mol_type = unassigned RNA
gggaaaaactgcaattaccttt

SEQ ID NO: 4502 - RNA, 22 nt, Homo sapiens
  source 1..22: mol_type = unassigned RNA
ttctggataacatgctgaagct

SEQ ID NO: 4503 - RNA, 22 nt, Homo sapiens
  source 1..22: mol_type = unassigned RNA
agcttcagcatgttatccagaa

SEQ ID NO: 4504 - RNA, 22 nt, Homo sapiens
  source 1..22: mol_type = unassigned RNA
acgtttgaatgctgtacaaggc

SEQ ID NO: 4505 - RNA, 22 nt, Homo sapiens
  source 1..22: mol_type = unassigned RNA
gccttgtacagcattcaaacgt

SEQ ID NO: 4506 - RNA, 20 nt, Homo sapiens
  source 1..20: mol_type = unassigned RNA
atgagcgactgtgcctgacc

SEQ ID NO: 4507 - RNA, 20 nt, Homo sapiens
  source 1..20: mol_type = unassigned RNA
ggtcaggcacagtcgctcat

SEQ ID NO: 4508 - RNA, 19 nt, Homo sapiens
  source 1..19: mol_type = unassigned RNA
gagccagttggacaggagc

SEQ ID NO: 4509 - RNA, 19 nt, Homo sapiens
  source 1..19: mol_type = unassigned RNA
gctcctgtccaactggctc

SEQ ID NO: 4510 - RNA, 23 nt, Homo sapiens
  source 1..23: mol_type = unassigned RNA
ttcatttggtataaaccgcgatt

SEQ ID NO: 4511 - RNA, 23 nt, Homo sapiens
  source 1..23: mol_type = unassigned RNA
aatcgcggtttataccaaatgaa

SEQ ID NO: 4512 - RNA, 22 nt, Homo sapiens
  source 1..22: mol_type = unassigned RNA
ttgagaatgatgaatcattagg

SEQ ID NO: 4513 - RNA, 22 nt, Homo sapiens
  source 1..22: mol_type = unassigned RNA
cctaatgattcatcattctcaa

SEQ ID NO: 4514 - RNA, 23 nt, Homo sapiens
  source 1..23: mol_type = unassigned RNA
ttacagttgttcaaccagttact

SEQ ID NO: 4515 - RNA, 23 nt, Homo sapiens
  source 1..23: mol_type = unassigned RNA
agtaactggttgaacaactgtaa

SEQ ID NO: 4516 - RNA, 21 nt, Homo sapiens
  source 1..21: mol_type = unassigned RNA
caaagaggaaggtcccattac

SEQ ID NO: 4517 - RNA, 21 nt, Homo sapiens
  source 1..21: mol_type = unassigned RNA
gtaatgggaccttcctctttg

SEQ ID NO: 4518 - RNA, 22 nt, Homo sapiens
  source 1..22: mol_type = unassigned RNA
tcagttccaggccaaccaggct

SEQ ID NO: 4519 - RNA, 22 nt, Homo sapiens
  source 1..22: mol_type = unassigned RNA
agcctggttggcctggaactga

SEQ ID NO: 4520 - RNA, 22 nt, Homo sapiens
  source 1..22: mol_type = unassigned RNA
ttatggtttgcctgggactgag

SEQ ID NO: 4521 - RNA, 22 nt, Homo sapiens
  source 1..22: mol_type = unassigned RNA
ctcagtcccaggcaaaccataa

SEQ ID NO: 4522 - RNA, 19 nt, Homo sapiens
  source 1..19: mol_type = unassigned RNA
tgggcgtatctgtatgcta

SEQ ID NO: 4523 - RNA, 19 nt, Homo sapiens
  source 1..19: mol_type = unassigned RNA
tagcatacagatacgccca

SEQ ID NO: 4524 - RNA, 20 nt, Homo sapiens
  source 1..20: mol_type = unassigned RNA
agaccatgggttctcattgt

SEQ ID NO: 4525 - RNA, 20 nt, Homo sapiens
  source 1..20: mol_type = unassigned RNA
acaatgagaacccatggtct

SEQ ID NO: 4526 - RNA, 22 nt, Homo sapiens
  source 1..22: mol_type = unassigned RNA
ttgtgtcaatatgcgatgatgt

SEQ ID NO: 4527 - RNA, 22 nt, Homo sapiens
  source 1..22: mol_type = unassigned RNA
acatcatcgcatattgacacaa

SEQ ID NO: 4528 - RNA, 19 nt, Homo sapiens
  source 1..19: mol_type = unassigned RNA
tgtctctgctggggtttct

SEQ ID NO: 4529 - RNA, 19 nt, Homo sapiens
  source 1..19: mol_type = unassigned RNA
agaaaccccagcagagaca

SEQ ID NO: 4530 - RNA, 25 nt, Homo sapiens
  source 1..25: mol_type = unassigned RNA
aggcaccagccaggcattgctcagc

SEQ ID NO: 4531 - RNA, 25 nt, Homo sapiens
  source 1..25: mol_type = unassigned RNA
gctgagcaatgcctggctggtgcct

SEQ ID NO: 4532 - RNA, 21 nt, Homo sapiens
  source 1..21: mol_type = unassigned RNA
gaagtgtgccgtggtgtgtct

SEQ ID NO: 4533 - RNA, 21 nt, Homo sapiens
  source 1..21: mol_type = unassigned RNA
agacacaccacggcacacttc

SEQ ID NO: 4534 - RNA, 21 nt, Homo sapiens
  source 1..21: mol_type = unassigned RNA
aagcctgcccggctcctcggg

SEQ ID NO: 4535 - RNA, 21 nt, Homo sapiens
  source 1..21: mol_type = unassigned RNA
cccgaggagccgggcaggctt

SEQ ID NO: 4536 - RNA, 20 nt, Homo sapiens
  source 1..20: mol_type = unassigned RNA
gttgtgtcagtttatcaaac

SEQ ID NO: 4537 - RNA, 20 nt, Homo sapiens
  source 1..20: mol_type = unassigned RNA
gtttgataaactgacacaac

SEQ ID NO: 4538 - RNA, 22 nt, Homo sapiens
  source 1..22: mol_type = unassigned RNA
tggtctaggattgttggaggag

SEQ ID NO: 4539 - RNA, 22 nt, Homo sapiens
  source 1..22: mol_type = unassigned RNA
ctcctccaacaatcctagacca

SEQ ID NO: 4540 - RNA, 22 nt, Homo sapiens
  source 1..22: mol_type = unassigned RNA
cacacactgcaattacttttgc

SEQ ID NO: 4541 - RNA, 22 nt, Homo sapiens
  source 1..22: mol_type = unassigned RNA
gcaaaagtaattgcagtgtgtg

SEQ ID NO: 4542 - RNA, 25 nt, Homo sapiens
  source 1..25: mol_type = unassigned RNA
aggggtggtgttgggacagctccgt

SEQ ID NO: 4543 - RNA, 25 nt, Homo sapiens
  source 1..25: mol_type = unassigned RNA
acggagctgtcccaacaccacccct

SEQ ID NO: 4544 - RNA, 21 nt, Homo sapiens
  source 1..21: mol_type = unassigned RNA
tgagctaaatgtgtgctggga

SEQ ID NO: 4545 - RNA, 21 nt, Homo sapiens
  source 1..21: mol_type = unassigned RNA
tcccagcacacatttagctca

SEQ ID NO: 4546 - RNA, 23 nt, Homo sapiens
  source 1..23: mol_type = unassigned RNA
gcgaggacccctcggggtctgac

SEQ ID NO: 4547 - RNA, 23 nt, Homo sapiens
  source 1..23: mol_type = unassigned RNA
gtcagaccccgaggggtcctcgc

SEQ ID NO: 4548 - RNA, 25 nt, Homo sapiens
  source 1..25: mol_type = unassigned RNA
gctgggcagggcttctgagctcctt

SEQ ID NO: 4549 - RNA, 25 nt, Homo sapiens
  source 1..25: mol_type = unassigned RNA
aaggagctcagaagccctgcccagc

SEQ ID NO: 4550 - RNA, 20 nt, Homo sapiens
  source 1..20: mol_type = unassigned RNA
gggaaaaggaagggggagga

SEQ ID NO: 4551 - RNA, 20 nt, Homo sapiens
  source 1..20: mol_type = unassigned RNA
tcctcccccttccttttccc

SEQ ID NO: 4552 - RNA, 20 nt, Homo sapiens
  source 1..20: mol_type = unassigned RNA
gcggaaggcggagcggcgga

SEQ ID NO: 4553 - RNA, 20 nt, Homo sapiens
  source 1..20: mol_type = unassigned RNA
tccgccgctccgccttccgc

SEQ ID NO: 4554 - RNA, 18 nt, Homo sapiens
  source 1..18: mol_type = unassigned RNA
gtgaaggcccggcggaga

SEQ ID NO: 4555 - RNA, 18 nt, Homo sapiens
  source 1..18: mol_type = unassigned RNA
tctccgccgggccttcac

SEQ ID NO: 4556 - RNA, 19 nt, Homo sapiens
  source 1..19: mol_type = unassigned RNA
tgagggagtgggtgggagg

SEQ ID NO: 4557 - RNA, 19 nt, Homo sapiens
  source 1..19: mol_type = unassigned RNA
cctcccacccactccctca

SEQ ID NO: 4558 - RNA, 19 nt, Homo sapiens
  source 1..19: mol_type = unassigned RNA
actggaattggagtcaaaa

SEQ ID NO: 4559 - RNA, 19 nt, Homo sapiens
  source 1..19: mol_type = unassigned RNA
ttttgactccaattccagt

SEQ ID NO: 4560 - RNA, 19 nt, Homo sapiens
  source 1..19: mol_type = unassigned RNA
tgagggagttgggtgtata

SEQ ID NO: 4561 - RNA, 19 nt, Homo sapiens
  source 1..19: mol_type = unassigned RNA
tatacacccaactccctca

SEQ ID NO: 4562 - RNA, 19 nt, Homo sapiens
  source 1..19: mol_type = unassigned RNA
tgagggagtggattgtatg

SEQ ID NO: 4563 - RNA, 19 nt, Homo sapiens
  source 1..19: mol_type = unassigned RNA
catacaatccactccctca

SEQ ID NO: 4564 - RNA, 19 nt, Homo sapiens
  source 1..19: mol_type = unassigned RNA
ggctggtcagatgggagtg

SEQ ID NO: 4565 - RNA, 19 nt, Homo sapiens
  source 1..19: mol_type = unassigned RNA
cactcccatctgaccagcc

SEQ ID NO: 4566 - RNA, 19 nt, Homo sapiens
  source 1..19: mol_type = unassigned RNA
agcagggctggggattgca

SEQ ID NO: 4567 - RNA, 19 nt, Homo sapiens
  source 1..19: mol_type = unassigned RNA
tgcaatccccagccctgct

SEQ ID NO: 4568 - RNA, 19 nt, Homo sapiens
  source 1..19: mol_type = unassigned RNA
tgagggaggaggttgggta

SEQ ID NO: 4569 - RNA, 19 nt, Homo sapiens
  source 1..19: mol_type = unassigned RNA
tacccaacctcctccctca

SEQ ID NO: 4570 - RNA, 19 nt, Homo sapiens
  source 1..19: mol_type = unassigned RNA
tgaggtggtaggatgtaga

SEQ ID NO: 4571 - RNA, 19 nt, Homo sapiens
  source 1..19: mol_type = unassigned RNA
tctacatcctaccacctca

SEQ ID NO: 4572 - RNA, 22 nt, Homo sapiens
  source 1..22: mol_type = unassigned RNA
tccgagcctgggtctccctctt

SEQ ID NO: 4573 - RNA, 22 nt, Homo sapiens
  source 1..22: mol_type = unassigned RNA
aagagggagacccaggctcgga

SEQ ID NO: 4574 - RNA, 22 nt, Homo sapiens
  source 1..22: mol_type = unassigned RNA
gggggtccccggtgctcggatc

SEQ ID NO: 4575 - RNA, 22 nt, Homo sapiens
  source 1..22: mol_type = unassigned RNA
gatccgagcaccggggaccccc

SEQ ID NO: 4576 - RNA, 22 nt, Homo sapiens
  source 1..22: mol_type = unassigned RNA
agtcattggagggtttgagcag

SEQ ID NO: 4577 - RNA, 22 nt, Homo sapiens
  source 1..22: mol_type = unassigned RNA
ctgctcaaaccctccaatgact

SEQ ID NO: 4578 - RNA, 19 nt, Homo sapiens
  source 1..19: mol_type = unassigned RNA
cagcaggaggtgaggggag

SEQ ID NO: 4579 - RNA, 19 nt, Homo sapiens
  source 1..19: mol_type = unassigned RNA
ctcccctcacctcctgctg

SEQ ID NO: 4580 - RNA, 22 nt, Homo sapiens
  source 1..22: mol_type = unassigned RNA
actcaaaacccttcagtgactt

SEQ ID NO: 4581 - RNA, 22 nt, Homo sapiens
  source 1..22: mol_type = unassigned RNA
aagtcactgaagggttttgagt

SEQ ID NO: 4582 - RNA, 22 nt, Homo sapiens
  source 1..22: mol_type = unassigned RNA
agacttcccatttgaaggtggc

SEQ ID NO: 4583 - RNA, 22 nt, Homo sapiens
  source 1..22: mol_type = unassigned RNA
gccaccttcaaatgggaagtct

SEQ ID NO: 4584 - RNA, 23 nt, Homo sapiens
  source 1..23: mol_type = unassigned RNA
aaactctacttgtccttctgagt

SEQ ID NO: 4585 - RNA, 23 nt, Homo sapiens
  source 1..23: mol_type = unassigned RNA
actcagaaggacaagtagagttt

SEQ ID NO: 4586 - RNA, 21 nt, Homo sapiens
  source 1..21: mol_type = unassigned RNA
ggctagcaacagcgcttacct

SEQ ID NO: 4587 - RNA, 21 nt, Homo sapiens
  source 1..21: mol_type = unassigned RNA
aggtaagcgctgttgctagcc

SEQ ID NO: 4588 - RNA, 21 nt, Homo sapiens
  source 1..21: mol_type = unassigned RNA
acagtctgctgaggttggagc

SEQ ID NO: 4589 - RNA, 21 nt, Homo sapiens
  source 1..21: mol_type = unassigned RNA
gctccaacctcagcagactgt

SEQ ID NO: 4590 - RNA, 23 nt, Homo sapiens
  source 1..23: mol_type = unassigned RNA
atcccttgcaggggctgttgggt

SEQ ID NO: 4591 - RNA, 23 nt, Homo sapiens
  source 1..23: mol_type = unassigned RNA
acccaacagcccctgcaagggat

SEQ ID NO: 4592 - RNA, 22 nt, Homo sapiens
  source 1..22: mol_type = unassigned RNA
gtgagtctctaagaaaagagga

SEQ ID NO: 4593 - RNA, 22 nt, Homo sapiens
  source 1..22: mol_type = unassigned RNA
tcctcttttcttagagactcac

SEQ ID NO: 4594 - RNA, 21 nt, Homo sapiens
  source 1..21: mol_type = unassigned RNA
tctagtaagagtggcagtcga

SEQ ID NO: 4595 - RNA, 21 nt, Homo sapiens
  source 1..21: mol_type = unassigned RNA
tcgactgccactcttactaga

SEQ ID NO: 4596 - RNA, 22 nt, Homo sapiens
  source 1..22: mol_type = unassigned RNA
atgctgacatatttactagagg

SEQ ID NO: 4597 - RNA, 22 nt, Homo sapiens
  source 1..22: mol_type = unassigned RNA
cctctagtaaatatgtcagcat

SEQ ID NO: 4598 - RNA, 22 nt, Homo sapiens
  source 1..22: mol_type = unassigned RNA
gttctcccaacgtaagcccagc

SEQ ID NO: 4599 - RNA, 22 nt, Homo sapiens
  source 1..22: mol_type = unassigned RNA
gctgggcttacgttgggagaac

SEQ ID NO: 4600 - RNA, 21 nt, Homo sapiens
  source 1..21: mol_type = unassigned RNA
tgggtttacgttgggagaact

SEQ ID NO: 4601 - RNA, 21 nt, Homo sapiens
  source 1..21: mol_type = unassigned RNA
agttctcccaacgtaaaccca

SEQ ID NO: 4602 - RNA, 19 nt, Homo sapiens
  source 1..19: mol_type = unassigned RNA
gtgtctgcttcctgtggga

SEQ ID NO: 4603 - RNA, 19 nt, Homo sapiens
  source 1..19: mol_type = unassigned RNA
tcccacaggaagcagacac

SEQ ID NO: 4604 - RNA, 23 nt, Homo sapiens
  source 1..23: mol_type = unassigned RNA
ctaatagtatctaccacaataaa

SEQ ID NO: 4605 - RNA, 23 nt, Homo sapiens
  source 1..23: mol_type = unassigned RNA
tttattgtggtagatactattag

SEQ ID NO: 4606 - RNA, 23 nt, Homo sapiens
  source 1..23: mol_type = unassigned RNA
tgtgcttgctcgtcccgcccgca

SEQ ID NO: 4607 - RNA, 23 nt, Homo sapiens
  source 1..23: mol_type = unassigned RNA
tgcgggcgggacgagcaagcaca

SEQ ID NO: 4608 - RNA, 25 nt, Homo sapiens
  source 1..25: mol_type = unassigned RNA
agggatcgcgggcgggtggcggcct

SEQ ID NO: 4609 - RNA, 25 nt, Homo sapiens
  source 1..25: mol_type = unassigned RNA
aggccgccacccgcccgcgatccct

SEQ ID NO: 4610 - RNA, 21 nt, Homo sapiens
  source 1..21: mol_type = unassigned RNA
atgatccaggaacctgcctct

SEQ ID NO: 4611 - RNA, 21 nt, Homo sapiens
  source 1..21: mol_type = unassigned RNA
agaggcaggttcctggatcat

SEQ ID NO: 4612 - RNA, 19 nt, Homo sapiens
  source 1..19: mol_type = unassigned RNA
agtgtggctttcttagagc

SEQ ID NO: 4613 - RNA, 19 nt, Homo sapiens
  source 1..19: mol_type = unassigned RNA
gctctaagaaagccacact

SEQ ID NO: 4614 - RNA, 19 nt, Homo sapiens
  source 1..19: mol_type = unassigned RNA
tctaggctggtactgctga

SEQ ID NO: 4615 - RNA, 19 nt, Homo sapiens
  source 1..19: mol_type = unassigned RNA
tcagcagtaccagcctaga

SEQ ID NO: 4616 - RNA, 19 nt, Homo sapiens
  source 1..19: mol_type = unassigned RNA
aagcagctgcctctgaggc

SEQ ID NO: 4617 - RNA, 19 nt, Homo sapiens
  source 1..19: mol_type = unassigned RNA
gcctcagaggcagctgctt

SEQ ID NO: 4618 - RNA, 21 nt, Homo sapiens
  source 1..21: mol_type = unassigned RNA
gtggctgcactcacttccttc

SEQ ID NO: 4619 - RNA, 21 nt, Homo sapiens
  source 1..21: mol_type = unassigned RNA
gaaggaagtgagtgcagccac

SEQ ID NO: 4620 - RNA, 21 nt, Homo sapiens
  source 1..21: mol_type = unassigned RNA
aggaggcagcgctctcaggac

SEQ ID NO: 4621 - RNA, 21 nt, Homo sapiens
  source 1..21: mol_type = unassigned RNA
gtcctgagagcgctgcctcct

SEQ ID NO: 4622 - RNA, 21 nt, Homo sapiens
  source 1..21: mol_type = unassigned RNA
aatggcgccactagggttgtg

SEQ ID NO: 4623 - RNA, 21 nt, Homo sapiens
  source 1..21: mol_type = unassigned RNA
cacaaccctagtggcgccatt

SEQ ID NO: 4624 - RNA, 25 nt, Homo sapiens
  source 1..25: mol_type = unassigned RNA
caaccctaggagagggtgccattca

SEQ ID NO: 4625 - RNA, 25 nt, Homo sapiens
  source 1..25: mol_type = unassigned RNA
tgaatggcaccctctcctagggttg

SEQ ID NO: 4626 - RNA, 22 nt, Homo sapiens
  source 1..22: mol_type = unassigned RNA
ataatacatggttaacctcttt

SEQ ID NO: 4627 - RNA, 22 nt, Homo sapiens
  source 1..22: mol_type = unassigned RNA
aaagaggttaaccatgtattat

SEQ ID NO: 4628 - RNA, 21 nt, Homo sapiens
  source 1..21: mol_type = unassigned RNA
aatattatacagtcaacctct

SEQ ID NO: 4629 - RNA, 21 nt, Homo sapiens
  source 1..21: mol_type = unassigned RNA
agaggttgactgtataatatt

SEQ ID NO: 4630 - RNA, 25 nt, Homo sapiens
  source 1..25: mol_type = unassigned RNA
ggcggagggaagtaggtccgttggt

SEQ ID NO: 4631 - RNA, 25 nt, Homo sapiens
  source 1..25: mol_type = unassigned RNA
accaacggacctacttccctccgcc

SEQ ID NO: 4632 - RNA, 24 nt, Homo sapiens
  source 1..24: mol_type = unassigned RNA
tgcctgggtctctggcctgcgcgt

SEQ ID NO: 4633 - RNA, 24 nt, Homo sapiens
  source 1..24: mol_type = unassigned RNA
acgcgcaggccagagacccaggca

SEQ ID NO: 4634 - RNA, 22 nt, Homo sapiens
  source 1..22: mol_type = unassigned RNA
aggcggggcgccgcgggaccgc

SEQ ID NO: 4635 - RNA, 22 nt, Homo sapiens
  source 1..22: mol_type = unassigned RNA
gcggtcccgcggcgccccgcct

SEQ ID NO: 4636 - RNA, 22 nt, Homo sapiens
  source 1..22: mol_type = unassigned RNA
ggtggcccggccgtgcctgagg

SEQ ID NO: 4637 - RNA, 22 nt, Homo sapiens
  source 1..22: mol_type = unassigned RNA
cctcaggcacggccgggccacc

SEQ ID NO: 4638 - RNA, 20 nt, Homo sapiens
  source 1..20: mol_type = unassigned RNA
accaggaggctgaggcccct

SEQ ID NO: 4639 - RNA, 20 nt, Homo sapiens
  source 1..20: mol_type = unassigned RNA
aggggcctcagcctcctggt

SEQ ID NO: 4640 - RNA, 20 nt, Homo sapiens
  source 1..20: mol_type = unassigned RNA
gtccctgagtgtatgtggtg

SEQ ID NO: 4641 - RNA, 20 nt, Homo sapiens
  source 1..20: mol_type = unassigned RNA
caccacatacactcagggac

SEQ ID NO: 4642 - RNA, 21 nt, Homo sapiens
  source 1..21: mol_type = unassigned RNA
tccggttctcagggctccacc

SEQ ID NO: 4643 - RNA, 21 nt, Homo sapiens
  source 1..21: mol_type = unassigned RNA
ggtggagccctgagaaccgga

SEQ ID NO: 4644 - RNA, 23 nt, Homo sapiens
  source 1..23: mol_type = unassigned RNA
aggaagccctggaggggctggag

SEQ ID NO: 4645 - RNA, 23 nt, Homo sapiens
  source 1..23: mol_type = unassigned RNA
ctccagcccctccagggcttcct

SEQ ID NO: 4646 - RNA, 20 nt, Homo sapiens
  source 1..20: mol_type = unassigned RNA
ctgtatgccctcaccgctca

SEQ ID NO: 4647 - RNA, 20 nt, Homo sapiens
  source 1..20: mol_type = unassigned RNA
tgagcggtgagggcatacag

SEQ ID NO: 4648 - RNA, 23 nt, Homo sapiens
  source 1..23: mol_type = unassigned RNA
tggtgcggagagggcccacagtg

SEQ ID NO: 4649 - RNA, 23 nt, Homo sapiens
  source 1..23: mol_type = unassigned RNA
cactgtgggccctctccgcacca

SEQ ID NO: 4650 - RNA, 22 nt, Homo sapiens
  source 1..22: mol_type = unassigned RNA
caactagactgtgagcttctag

SEQ ID NO: 4651 - RNA, 22 nt, Homo sapiens
  source 1..22: mol_type = unassigned RNA
ctagaagctcacagtctagttg

SEQ ID NO: 4652 - RNA, 23 nt, Homo sapiens
  source 1..23: mol_type = unassigned RNA
aaggagcttacaatctagctggg

SEQ ID NO: 4653 - RNA, 23 nt, Homo sapiens
  source 1..23: mol_type = unassigned RNA
cccagctagattgtaagctcctt

SEQ ID NO: 4654 - RNA, 22 nt, Homo sapiens
  source 1..22: mol_type = unassigned RNA
gggacccagggagagacgtaag

SEQ ID NO: 4655 - RNA, 22 nt, Homo sapiens
  source 1..22: mol_type = unassigned RNA
cttacgtctctccctgggtccc

SEQ ID NO: 4656 - RNA, 22 nt, Homo sapiens
  source 1..22: mol_type = unassigned RNA
gcagagtgcaaacaattttgac

SEQ ID NO: 4657 - RNA, 22 nt, Homo sapiens
  source 1..22: mol_type = unassigned RNA
gtcaaaattgtttgcactctgc

SEQ ID NO: 4658 - RNA, 20 nt, Homo sapiens
  source 1..20: mol_type = unassigned RNA
cggctctgggtctgtgggga

SEQ ID NO: 4659 - RNA, 20 nt, Homo sapiens
  source 1..20: mol_type = unassigned RNA
tccccacagacccagagccg

SEQ ID NO: 4660 - RNA, 22 nt, Homo sapiens
  source 1..22: mol_type = unassigned RNA
gcagcagggtgaaactgacaca

SEQ ID NO: 4661 - RNA, 22 nt, Homo sapiens
  source 1..22: mol_type = unassigned RNA
tgtgtcagtttcaccctgctgc

SEQ ID NO: 4662 - RNA, 21 nt, Homo sapiens
  source 1..21: mol_type = unassigned RNA
tggaggagaaggaaggtgatg

SEQ ID NO: 4663 - RNA, 21 nt, Homo sapiens
  source 1..21: mol_type = unassigned RNA
catcaccttccttctcctcca

SEQ ID NO: 4664 - RNA, 23 nt, Homo sapiens
  source 1..23: mol_type = unassigned RNA
tctgctcataccccatggtttct

SEQ ID NO: 4665 - RNA, 23 nt, Homo sapiens
  source 1..23: mol_type = unassigned RNA
agaaaccatggggtatgagcaga

SEQ ID NO: 4666 - RNA, 23 nt, Homo sapiens
  source 1..23: mol_type = unassigned RNA
tgcaccatggttgtctgagcatg

SEQ ID NO: 4667 - RNA, 23 nt, Homo sapiens
  source 1..23: mol_type = unassigned RNA
catgctcagacaaccatggtgca

SEQ ID NO: 4668 - RNA, 23 nt, Homo sapiens
  source 1..23: mol_type = unassigned RNA
ctgggatctccggggtcttggtt

SEQ ID NO: 4669 - RNA, 23 nt, Homo sapiens
  source 1..23: mol_type = unassigned RNA
aaccaagaccccggagatcccag

SEQ ID NO: 4670 - RNA, 22 nt, Homo sapiens
  source 1..22: mol_type = unassigned RNA
tgagacctctgggttctgagct

SEQ ID NO: 4671 - RNA, 22 nt, Homo sapiens
  source 1..22: mol_type = unassigned RNA
agctcagaacccagaggtctca

SEQ ID NO: 4672 - RNA, 23 nt, Homo sapiens
  source 1..23: mol_type = unassigned RNA
tccagtaccacgtgtcagggcca

SEQ ID NO: 4673 - RNA, 23 nt, Homo sapiens
  source 1..23: mol_type = unassigned RNA
tggccctgacacgtggtactgga

SEQ ID NO: 4674 - RNA, 22 nt, Homo sapiens
  source 1..22: mol_type = unassigned RNA
ggagactgatgagttcccggga

SEQ ID NO: 4675 - RNA, 22 nt, Homo sapiens
  source 1..22: mol_type = unassigned RNA
tcccgggaactcatcagtctcc

SEQ ID NO: 4676 - RNA, 21 nt, Homo sapiens
  source 1..21: mol_type = unassigned RNA
gcaggaacttgtgagtctcct

SEQ ID NO: 4677 - RNA, 21 nt, Homo sapiens
  source 1..21: mol_type = unassigned RNA
aggagactcacaagttcctgc

SEQ ID NO: 4678 - RNA, 22 nt, Homo sapiens
  source 1..22: mol_type = unassigned RNA
ctgccctggcccgagggaccga

SEQ ID NO: 4679 - RNA, 22 nt, Homo sapiens
  source 1..22: mol_type = unassigned RNA
tcggtccctcgggccagggcag

SEQ ID NO: 4680 - RNA, 21 nt, Homo sapiens
  source 1..21: mol_type = unassigned RNA
cctggaaacactgaggttgtg

SEQ ID NO: 4681 - RNA, 21 nt, Homo sapiens
  source 1..21: mol_type = unassigned RNA
cacaacctcagtgtttccagg

SEQ ID NO: 4682 - RNA, 22 nt, Homo sapiens
  source 1..22: mol_type = unassigned RNA
tatacctcagttttatcaggtg

SEQ ID NO: 4683 - RNA, 22 nt, Homo sapiens
  source 1..22: mol_type = unassigned RNA
cacctgataaaactgaggtata

SEQ ID NO: 4684 - RNA, 22 nt, Homo sapiens
  source 1..22: mol_type = unassigned RNA
tggtggtttacaaagtaattca

SEQ ID NO: 4685 - RNA, 22 nt, Homo sapiens
  source 1..22: mol_type = unassigned RNA
tgaattactttgtaaaccacca

SEQ ID NO: 4686 - RNA, 22 nt, Homo sapiens
  source 1..22: mol_type = unassigned RNA
tggatttctttgtgaatcacca

SEQ ID NO: 4687 - RNA, 22 nt, Homo sapiens
  source 1..22: mol_type = unassigned RNA
tggtgattcacaaagaaatcca

SEQ ID NO: 4688 - RNA, 21 nt, Homo sapiens
  source 1..21: mol_type = unassigned RNA
tcctcttctccctcctcccag

SEQ ID NO: 4689 - RNA, 21 nt, Homo sapiens
  source 1..21: mol_type = unassigned RNA
ctgggaggagggagaagagga

SEQ ID NO: 4690 - RNA, 20 nt, Homo sapiens
  source 1..20: mol_type = unassigned RNA
gtagaggagatggcgcaggg

SEQ ID NO: 4691 - RNA, 20 nt, Homo sapiens
  source 1..20: mol_type = unassigned RNA
ccctgcgccatctcctctac

SEQ ID NO: 4692 - RNA, 22 nt, Homo sapiens
  source 1..22: mol_type = unassigned RNA
gtgaacgggcgccatcccgagg

SEQ ID NO: 4693 - RNA, 22 nt, Homo sapiens
  source 1..22: mol_type = unassigned RNA
cctcgggatggcgcccgttcac

SEQ ID NO: 4694 - RNA, 22 nt, Homo sapiens
  source 1..22: mol_type = unassigned RNA
gactgacacctctttgggtgaa

SEQ ID NO: 4695 - RNA, 22 nt, Homo sapiens
  source 1..22: mol_type = unassigned RNA
ttcacccaaagaggtgtcagtc

SEQ ID NO: 4696 - RNA, 21 nt, Homo sapiens
  source 1..21: mol_type = unassigned RNA
tactcaaaaagctgtcagtca

SEQ ID NO: 4697 - RNA, 21 nt, Homo sapiens
  source 1..21: mol_type = unassigned RNA
tgactgacagctttttgagta

SEQ ID NO: 4698 - RNA, 21 nt, Homo sapiens
  source 1..21: mol_type = unassigned RNA
ttaatatcggacaaccattgt

SEQ ID NO: 4699 - RNA, 21 nt, Homo sapiens
  source 1..21: mol_type = unassigned RNA
acaatggttgtccgatattaa

SEQ ID NO: 4700 - RNA, 22 nt, Homo sapiens
  source 1..22: mol_type = unassigned RNA
atccgcgctctgactctctgcc

SEQ ID NO: 4701 - RNA, 22 nt, Homo sapiens
  source 1..22: mol_type = unassigned RNA
ggcagagagtcagagcgcggat

SEQ ID NO: 4702 - RNA, 20 nt, Homo sapiens
  source 1..20: mol_type = unassigned RNA
gtgagtcagggtggggctgg

SEQ ID NO: 4703 - RNA, 20 nt, Homo sapiens
  source 1..20: mol_type = unassigned RNA
ccagccccaccctgactcac

SEQ ID NO: 4704 - RNA, 22 nt, Homo sapiens
  source 1..22: mol_type = unassigned RNA
tgcccttaaaggtgaacccagt

SEQ ID NO: 4705 - RNA, 22 nt, Homo sapiens
  source 1..22: mol_type = unassigned RNA
actgggttcacctttaagggca

SEQ ID NO: 4706 - RNA, 22 nt, Homo sapiens
  source 1..22: mol_type = unassigned RNA
tcttctctgttttggccatgtg

SEQ ID NO: 4707 - RNA, 22 nt, Homo sapiens
  source 1..22: mol_type = unassigned RNA
cacatggccaaaacagagaaga

SEQ ID NO: 4708 - RNA, 22 nt, Homo sapiens
  source 1..22: mol_type = unassigned RNA
aaattattgtacatcggatgag

SEQ ID NO: 4709 - RNA, 22 nt, Homo sapiens
  source 1..22: mol_type = unassigned RNA
ctcatccgatgtacaataattt

SEQ ID NO: 4710 - RNA, 22 nt, Homo sapiens
  source 1..22: mol_type = unassigned RNA
ttcaacgggtatttattgagca

SEQ ID NO: 4711 - RNA, 22 nt, Homo sapiens
  source 1..22: mol_type = unassigned RNA
tgctcaataaatacccgttgaa

SEQ ID NO: 4712 - RNA, 22 nt, Homo sapiens
  source 1..22: mol_type = unassigned RNA
ctatacaacttactactttccc

SEQ ID NO: 4713 - RNA, 22 nt, Homo sapiens
  source 1..22: mol_type = unassigned RNA
gggaaagtagtaagttgtatag

SEQ ID NO: 4714 - RNA, 22 nt, Homo sapiens
  source 1..22: mol_type = unassigned RNA
tgaggtagtaagttgtattgtt

SEQ ID NO: 4715 - RNA, 22 nt, Homo sapiens
  source 1..22: mol_type = unassigned RNA
aacaatacaacttactacctca

SEQ ID NO: 4716-4733 - skipped (18 entries)

SEQ ID NO: 4734 - DNA, 3131 bp, Adeno-associated virus
  source 1..3131: mol_type = unassigned DNA
gcggccgcgaattcgcccttggctgcgtcaactggaccaatgagaactttcccttcaatgattgcgtcgacaagatggtgatctggtgggaggagggcaagatgacggccaaggtcgtggagtccgccaaggccattctcggcggcagcaaggtgcgcgtggaccaaaagtgcaagtcgtccgcccagatcgaccccacccccgtgatcgtcacctccaacaccaacatgtgcgccgtgattgacgggaacagcaccaccttcgagcaccagcagcctctccaggaccggatgtttaagttcgaactcacccgccgtctggagcacgactttggcaaggtgacaaagcaggaagtcaaagagttcttccgctgggccagtgatcacgtgaccgaggtggcgcatgagttttacgtcagaaagggcggagccagcaaaagacccgcccccgatgacgcggataaaagcgagcccaagcgggcctgcccctcagtcgcggatccatcgacgtcagacgcggaaggagctccggtggactttgccgacaggtaccaaaacaaatgttctcgtcacgcgggcatgcttcagatgctgtttccctgcaaaacgtgcgagagaatgaatcggaatttcaacatttgcttcacacacggggtcagagactgctcagagtgtttccccggcgtgtcagaatctcaaccggtcgtcagaaagaggacgtatcggaaactccgtgcgattcatcatctgctggggcgggctcccgagattgcttgctcggcctgcgatctggtcaacgtggacctggatgactgtgtttctgagcaataaatgacttaaaccaggtatggctgccgatggttatcttccagattggctcgaggacaacctctctgagggcattcgcgagtggtgggcgctgaaacctggagccccgaagcccaaagccaaccagcaaaagcaggacgacggccggggtctggtgcttcctggctacaagtacctcggacccttcaacggactcgacaagggggagcccgtcaacgcggcggacgcagcggccctcgagcacgacaaggcttacgaccagcagctgcaggcgggtgacaatccgtacctgcggtataaccacgccgacgccgagtttcaggagcgtctgcaagaagatacgtcttttgggggcaacctcgggcgagcagtcttccaggccaagaagcgggttctcgaacctctcggtctggttgaggaaggcgctaagacggctcctggaaagaagagaccggtagagccatcaccccagcgttctccagactcctctacgggcatcggcaagaaaggccaacagcccgccagaaaaagactcaattttggtcagactggcgactcagagtcagttccagaccctcaacctctcggagaacctccagcagcgccctctggtgtgggacctaatacaatggctgcaggcggtggcgcaccaatggcagacaataacgaaggcgccgacggagtgggtagttcctcgggaaattggcattgcgattccacatggctgggcgacagagtcatcaccaccagcacccgaacctgggccctgcccacctacaacaaccacctctacaagcaaatctccaacgggacatcgggaggagccaccaacgacaacacctacttcggctacagcaccccctgggggtattttgactttaacagattccactgccacctttcaccacgtgactggcagcgactcatcaacaacaactggggattccgacccaagagactcagcttcaagctcttcaacatccaggtcaaggaggtcacgcagaatgaaggcaccaagaccatcgccaataacctcaccagcaccatccaggtgtttacggactcggagtaccagctgccgtacgttctcggctctgtccaccagggctgcctgcctccgttcccggcggacgtgttcatgattccccagtacggctacctaacactcaacaacggtagtcaggccgtgggacgctcctccttctactgcctggaatactttccttcgcagatgctgagaaccggcaacaacttccagtttacttacaccttcgaggacgtgcctttccacagcagctacgcccacagctagagcttggaccggctgatgaatcctctgattgaccagtacctgtactacttgtctcggactcaaacaacaggaggcacggcaaatacgcagactctgggcttcagccaaggtgggcctaatacaatggccaatcaggcaaagaactggctgccaggaccctgttaccgccaacaacgcgtctcaacgacaaccgggcaaaacaacaatagcaactttgcctggactgctgggaccaaataccatctgaatggaagaaattcattggctaatcctggcatcgctatggcaacacacaaagacgacgaggagcgtttttttcccagtaacgggatcctgatttttggcaaacaaaatgctgccagagacaatgcggattacagcgatgtcatgctcaccagcgaggaagaaatcaaaaccactaaccctgtggctacagaggaatacggtatcgtggcagataacttgcagcagcaaaacacggctcctcaaattggaactgtcaacagccagggggccttacccggtatggtctggcagaaccgggacgtgtacctgcagggtcccatctgggccaagattcctcacacggacggcaacttccacccgtctccgctgatgggcggctttggcctgaaacatcctccgcctcagatcctgatcaagaacacgcctgtacctgcggatcctccgaccaccttcaaccagtcaaagctgaactctttcatcacgcaatacagcaccggacaggtcagcgtggaaattgaatgggagctgcagaaggaaaacagcaagcgctggaaccccgagatccagtacacctccaactactacaaatctataagtgtggactttgctgttaatacagaaggcgtgtactctgaaccccgccccattggcacccgttacctcacccgtaatctgtaattgcctgttaatcaataaaccggttgattcgtttcagttgaactttggtctctgcgaagggcgaattc

SEQ ID NO: 4735 - protein, 728 aa, Adeno-associated virus
MAADGYLPDWLEDNLSEGIREWWDLKPGAPKPKANQQKQDDGRGLVLPGYKYLGPFNGLDKGEPVNEADAAALEHDKAYDKQLEQGDNPYLKYNHADAEFQERLQEDTSFGGNLGRAVFQAKKRVLEPLGLVEEGAKTAPGKKRPIESPDSSTGIGKKGQQPAKKKLNFGQTGDSESVPDPQPLGEPPAAPSGLGSGTMAAGGGAPMADNNEGADGVGNASGNWHCDSTWLGDRVITTSTRTWALPTYNNHLYKQISSQSGATNDNHFFGYSTPWGYFDFNRFHCHFSPRDWQRLINNNWGFRPRKLRFKLFNIQVKEVTTNDGVTTIANNLTSTIQVFSDSEYQLPYVLGSAHQGCLPPFPADVFMIPQYGYLTLNNGSQSMGRSSFYCLEYFPSQMLRTGNNFEFSYTFEEVPFHSSYAHSQSLDRLMNPLIDQYLYYLARTQSTTGSTRELQFHQAGPNTMAEQSKNWLPGPCYRQQRLSKNIDSNNNSNFAWTGATKYHLNGRNSLTNPGVAMATNKDDEGQFFPINGVLVFGKTGAANKTTLENVLMTSEEEIKTTNPVATEEYGVVSSNLQSSTAGPQTQTVNSQGALPGMVWQNRDVYLQGPIWAKIPHTDGNFHPSPLMGGFGLKHPPPQILIKNTPVPANPPGVFTPALFASFITQYSTGQVSVEIEWELQKENSKRWNPEIQYTSNYAKSNNVEFAVNNEGVYTEPRPIGTRYLTRNL

SEQ ID NO: 4736 - protein, 644 aa, Adeno-associated virus
  VARIANT 434: note = MOD_RES - Any amino acid
KAYDQQLKAGDNPYLRYNHADAEFQERLQEDTSFGGNLGRAVFQAKKRVLEPLGLVETPAKTAPGKKRPVDSPDSTSGIGKKGQQPAKKRLNFGQTGDSESVPDPQPIGEPPAGPSGLGSGTMAAGGGAPMADNNEGADGVGNASGNWHCDSTWLGDRVITTSTRTWALPTYNNHLYKQISSQSAGSTNDNVYFGYSTPWGYFDFNRFHCHFSPRDWQRLINNNWGFRPKKLNFKLFNIQVKEVTTNDGVTTIANNLTSTVQVFSDSEYQLPYVLGSAHQGCLPPFPADVFMIPQYGYLTLNNGSQSVGRSSFYCLEYFPSQMLRTGNNFTFSYTFEDVPFHSSYAHSQSLDRLMNPLIDQYLYYLARTQSNAGGTAGNRELQFYQGGPTTMAEQAKNWLPGPCFRQQRVSKTLDQNNNSNFAWTGATKYHLNXRNSLVNPGVAMATHKDDEERFFPSSGVLIFGKTGAANKTTLENVLMTNEEEIRPTNPVATEEYGIVSSNLQAASTAAQTQVVNNQGALPGMVWQNRDVYLQGPIWAKIPHTDGNFHPSPLMGGFGLKHPPPQILIKNTPVPANPPEVFTPAKFASFITQYSTGQVSVEIEWELQKENSKRWNPEIQYTSNFDKQTGVDFAVDSQGVYSEP

SEQ ID NO: 4737 - DNA, 1933 bp, Adeno-associated virus
  source 1..1933: mol_type = unassigned DNA
caaggcctacgaccagcagctcaaagcgggtgacaatccgtacctgcggtataaccacgccgacgccgagtttcaggagtgtcttcaagaagatacgtcttttgggggcaacctcgggcgagcagtcttccaggccaaaaagcgggttctcgaacctcttggtctggttgagacgccagctaagacggcacctggaaagaagcgaccggtagactcgccagactccacctcgggcatcggcaagaaaggccagcagcccgcgaaaaagagactcaactttgggcagactggcgactcagagtcagtccccgaccctcaaccaatcggagaaccaccagcaggcccctctggtctgggatctggtacaatggttgcaggcggtggcgcaccaatggctgacaataacgagggcgccgacggagtgggtaatgcctcaggaaattggcattgcgattccacatggctgggcgacagagtcatcaccaccagcacccgaacctgggccctgcccacctacaacaaccacctctacaagcaaatctccagtcagtcagcagggagcaccaacgataacgtctatttcggctacagcaccccctgggggtattttgacttcaacagattccattgccacttctcaccacgtgactggcagcgacttatcaacaacaactggggattccggcccaagaagctcaacttcaagctcttcaacatccaggtcaaggaggtcacgacgaatgacggtgtcacaaccatcgctaataaccttaccagcacggttcaggtcttttcggactcggaatatcaactgccgtacgtcctcggctccgcgcaccagggctgcctgcctccgttcccggcagacgtgttcatgattccgcagtacggatacctgactctgaacaatggcagccaatcggtaggccgttcctccttctactgcctggagtactttccttctcagatgctgagaacgggcaacaacttcacctttagctacaccttcgaggacgtgcctttccacagcagctacgcgcacagccagagtctggaccggctgatgaatcccctcatcgaccagtacctgtactacttggccagaacacagagcaacgcaggaggtactgctggcaatcgggaactgcagttttatcagggcggacctaccaccatggccgaacaagcaaagaactggctgcccggaccttgcttccggcaacagagagtatccaagacgctggatcaaaataacaacagcaactttgcctggactggtgccacaaaataccatttaaatggaagaaattcattggttaatcccggtgtcgccatggcaacccacaaggacgacgaggaacgcttctccccttcgagcggagttctaatttttggcaaaactggagcagctaataaaactacattagaaaacgtgctcatgacaaatgaagaagaaattcgtcctaccaacccggtagctaccgaggaatacgggattgtaagcagcaacttgcaggcggctagcaccgcagcccagacacaagttgttaacaaccagggagccttacctggcatggtctggcagaaccgggacgtgtacctgcaaggtcccatttgggccaagattcctcacacggacggcaactttcacccgtctcctctaatgggtggctttggactgaaacacccgcctccccagatcctgatcaaaaacacgccggtacctgctaatcctccagaagtgtttactcctgccaagtttgcttccttcatcacgcagtacagcaccgggcaagtcagcgttgagatcgagtgggagctgcagaaagagaacagcaagcgctggaacccagagattcagtacacctccaactttgacaaacagactggagtggactttgctgttgacagccagggtgtttactctgagcct

SEQ ID NO: 4738 - protein, 644 aa, Adeno-associated virus
KAYDQQLKAGDNPYLRYNHADAEFQECLQEDTSFGGNLGRAVFQAKKRVLEPLGLVETPAKTAPGKKRPVDSPDSTSGIGKKGQQPAKKRLNFGQTGDSESVPDPQPIGEPPAGPSGLGSGTMVAGGGAPMADNNEGADGVGNASGNWHCDSTWLGDRVITTSTRTWALPTYNNHLYKQISSQSAGSTNDNVYFGYSTPWGYFDFNRFHCHFSPRDWQRLINNNWGFRPKKLNFKLFNIQVKEVTTNDGVTTIANNLTSTVQVFSDSEYQLPYVLGSAHQGCLPPFPADVFMIPQYGYLTLNNGSQSVGRSSFYCLEYFPSQMLRTGNNFTFSYTFEDVPFHSSYAHSQSLDRLMNPLIDQYLYYLARTQSNAGGTAGNRELQFYQGGPTTMAEQAKNWLPGPCFRQQRVSKTLDQNNNSNFAWTGATKYHLNGRNSLVNPGVAMATHKDDEERFSPSSGVLIFGKTGAANKTTLENVLMTNEEEIRPTNPVATEEYGIVSSNLQAASTAAQTQVVNNQGALPGMVWQNRDVYLQGPIWAKIPHTDGNFHPSPLMGGFGLKHPPPQILIKNTPVPANPPEVFTPAKFASFITQYSTGQVSVEIEWELQKENSKRWNPEIQYTSNFDKQTGVDFAVDSQGVYSEP

SEQ ID NO: 4739 - DNA, 1933 bp, Adeno-associated virus
  source 1..1933: mol_type = unassigned DNA
caaggcctacgaccagcagctcaaagcgggtgacaatccgtacctgcggtataaccacgccgacgccgagtttcaggagcgtcttcaagaagatacgtcttttgggggcaacctcgggcgagcagtcttccaggccaaaaagcgggttctcgaacctcttggtctggttgagacgccagctaagacggcacctggaaagaagcgaccggtagactcgccagactccacctcgggcatcggcaagaaaggccagcagcccgcgaaaaagagactcaactttgggcagactggcgactcagagccagtccccgaccctcaaccaatcggagaaccaccagcaggcccctctggtctgggatctggtacaatggctgcaggcggtggcgcaccaatggctgacaataacgagggcgccgacggagtgggtaatgcctcaggaaattggcattgcgattccacacggctgggcgacagagtcatcaccaccagcacccgaacctgggccctgcccacctacaacaaccacctctacaagcaaatctccagtcagtcagcagggagcaccaacgataacgtctatttcggctacagcaccccctgggggtattttgacttcaacagattccattgccacttctcaccacgtgactggcagcgacttatcaacaacaactggggattccggcccaagaagctcaacttcaagctcttcaacatccaggtcaaggaggtcacgacgaatgacggcgtcacaaccatcgctaataaccttaccagcacggttcaggtcttttcggactcggaatatcaactgccgtacgtcctcggctccgcgcaccagggctgcctgcctccgttcccggcagacgtgttcatgattccgcagtacggatacctgactctgaacaatggcagccaatcggtaggccgttcctccttctactgcctggagtactttccttctcagatgctgagaacgggcaacaacttcacctttagctacaccttcgaggacgtgcctttccacagcagctacgcgcacagccagagtctgggccggctgatgaatcccctcatcgaccagtacctgtactacttggccagaacacagagcaacgcaggaggtactgctggcaatcgggaactgcagttttatcagggcggacctaccaccatggccgaacaagcaaagaactggctgcccggaccttgcttccggcaacagagagtatccaagacgctggatcaaaataacaacagcaactttgcctggactggtgccacaaaataccatttaaatggaagaaattcattggttaatcccggtgtcgccatggcaacccacaaggacgacgaggaacgcttcttcccttcgagcggagttctaatttttggcaaaactggagcagctaataaaactacattagaaaacgtgctcatgacaaatgaagaagaaattcgtcctaccaacccggtagctaccgaggaatacgggattgtaagcagcaacttgcaggcggctagcaccgcagcccagacacaagttgttaacaaccagggagccttacctggcatggtctggcagaaccgggacgtgtacctgcaaggtcccatttgggccaagattcctcacacggacggcaactttcacccgtctcctctaatgggtggctttggactgaaacacccgcctccccagatcctgatcaaaaacacaccggtacctgctaatcctccagaagtgtttactcctgccaagtttgcttccttcatcacgcagtacagcaccgggcaagtcagcgttgagatcgaatgggagctgcagaaagagaacagcaagcgctggaacccagagattcagtacacctccaactttgacaaacagactggagtggactttgctgttgacagccagggtgtttactctgagcct

SEQ ID NO: 4740 - protein, 644 aa, Adeno-associated virus
KAYDQQLKAGDNPYLRYNHADAEFQERLQEDTSFGGNLGRAVFQAKKRVLEPLGLVETPAKTAPGKKRPVDSPDSTSGIGKKGQQPAKKRLNFGQTGDSEPVPDPQPIGEPPAGPSGLGSGTMAAGGGAPMADNNEGADGVGNASGNWHCDSTRLGDRVITTSTRTWALPTYNNHLYKQISSQSAGSTNDNVYFGYSTPWGYFDFNRFHCHFSPRDWQRLINNNWGFRPKKLNFKLFNIQVKEVTTNDGVTTIANNLTSTVQVFSDSEYQLPYVLGSAHQGCLPPFPADVFMIPQYGYLTLNNGSQSVGRSSFYCLEYFPSQMLRTGNNFTFSYTFEDVPFHSSYAHSQSLGRLMNPLIDQYLYYLARTQSNAGGTAGNRELQFYQGGPTTMAEQAKNWLPGPCFRQQRVSKTLDQNNNSNFAWTGATKYHLNGRNSLVNPGVAMATHKDDEERFFPSSGVLIFGKTGAANKTTLENVLMTNEEEIRPTNPVATEEYGIVSSNLQAASTAAQTQVVNNQGALPGMVWQNRDVYLQGPIWAKIPHTDGNFHPSPLMGGFGLKHPPPQILIKNTPVPANPPEVFTPAKFASFITQYSTGQVSVEIEWELQKENSKRWNPEIQYTSNFDKQTGVDFAVDSQGVYSEP

SEQ ID NO: 4741 - DNA, 1933 bp, Adeno-associated virus; identical to SEQ ID NO: 4739
  source 1..1933: mol_type = unassigned DNA

SEQ ID NO: 4742 - protein, 644 aa, Adeno-associated virus; identical to SEQ ID NO: 4740

SEQ ID NO: 4743 - DNA, 1933 bp, Adeno-associated virus
  source 1..1933: mol_type = unassigned DNA
caaggcctacgaccagcagctcaaagcgggtgacaatccgtacctgcggtataaccacgccgacgccgagtttcaggagcgtcttcaagaagatacgtcttttgggggcaacctcgggcgagcagtcttccaggccaaaaagcgggttctcgaacctcttggtctggttgagacgccagctaagacggcacctggaaagaagcgaccggtagactcgccagactccacctcgggcatcggcaagaaaggccagcagcccgcgaaaaagagactcaactttgggcagactggcgactcagagtcagtccccgaccctcaaccaatcggagaaccaccagcaggcccctctggtctgggatctggtacaatggctgcaggcggtggcgcaccaatggctgacaatagcgagggcgccgacggagtgggtaatgcctcaggaaattggcattgcgattccacatggctgggcgacagagtcatcaccaccagcacccgaacctgggccctgcccacctacaacaaccacctctacaagcaaatctccagtcagtcagcagggagcaccaacgataacgtctatttcggctacagcaccccctgggggtattttgacttcaacagattccattgccacttctcaccacgtgactggcagcgacttatcaacaacaactggggattccggcccaagaagctcaacttcaagctcttcaacatccaggtcaaggaggtcacgacgaatgacggtgtcacaaccatcgctaataaccttaccagcacggttcaggtcttttcggactcggaatatcaactgccgtacgtcctcggctccgcgcaccagggctgcctgcctccgttcccggcagacgtgttcatgattccgcagtacggatacctgactctgaacaatggcagccaatcggtaggccgttcctccttctactgcctggagtactttccttctcagatgctgagaacgggcaacaacttcacctttagctacaccttcgaggacgtgcctttccacagcagctacgcgcacagccagagtctggaccggctgatgaatcccctcatcgaccagtacctgtactacttggccagaacacagagcaacgcaggaggtactgctggcaatcgggaactgcagttttatcagggcggacctaccaccatggccgaacaagcaaagaactggctgcccggaccttgcttccggcaacagagagtatccaagacgctggatcaaaataacaacagcaactttgcctggactggtgccacaaaataccatttaaatggaagaaattcattggttaatcccggtgtcgccatggcaacccacaaggacgacgaggaacgcttcttcccttcgagcggagttctaatttttggcaaaactggagcagctaataaaactacattagaaaacgtgctcatgacaaatgaagaagaaattcgtcctaccaacccggtagctaccgaggaatacgggattgtaagcagcaacttgcaggcggctagcaccgcagcccagacacaagttgttaacaaccagggagccttacctggcatggtctggcagaaccgggacgtgtacctgcaaggtcccatttgggccaagattcctcacacggacggcaactttcacccgtctcctctaatgggtggctttggactgaaacacccgcctccccagatcctgatcaaaaacacaccggtacctgctaatcctccagaagtgtttactcctgccaagcttgcttccttcatcacgcagtacagcaccgggcaagtcagcgttgagatcgagtgggagctgcagaaagagaacagcaagcgctggaacccagagattcagtacacctccaactttgacaaacagactggagtggactttgctgttgacagccagggtgtttactctgagcct

SEQ ID NO: 4744 - protein, 644 aa, Adeno-associated virus
KAYDQQLKAGDNPYLRYNHADAEFQERLQEDTSFGGNLGRAVFQAKKRVLEPLGLVETPAKTAPGKKRPVDSPDSTSGIGKKGQQPAKKRLNFGQTGDSESVPDPQPIGEPPAGPSGLGSGTMAAGGGAPMADNSEGADGVGNASGNWHCDSTWLGDRVITTSTRTWALPTYNNHLYKQISSQSAGSTNDNVYFGYSTPWGYFDFNRFHCHFSPRDWQRLINNNWGFRPKKLNFKLFNIQVKEVTTNDGVTTIANNLTSTVQVFSDSEYQLPYVLGSAHQGCLPPFPADVFMIPQYGYLTLNNGSQSVGRSSFYCLEYFPSQMLRTGNNFTFSYTFEDVPFHSSYAHSQSLDRLMNPLIDQYLYYLARTQSNAGGTAGNRELQFYQGGPTTMAEQAKNWLPGPCFRQQRVSKTLDQNNNSNFAWTGATKYHLNGRNSLVNPGVAMATHKDDEERFFPSSGVLIFGKTGAANKTTLENVLMTNEEEIRPTNPVATEEYGIVSSNLQAASTAAQTQVVNNQGALPGMVWQNRDVYLQGPIWAKIPHTDGNFHPSPLMGGFGLKHPPPQILIKNTPVPANPPEVFTPAKLASFITQYSTGQVSVEIEWELQKENSKRWNPEIQYTSNFDKQTGVDFAVDSQGVYSEP

SEQ ID NO: 4745 - DNA, 1933 bp, Adeno-associated virus
  source 1..1933: mol_type = unassigned DNA
caaggcctacgaccagcagctcaaagcgggtgacaatccgtacctgcggtataaccacgccgacgccgagtttcaggagcgtcttcaagaagatacgtcttttgggggcaacctcgggcgagcagtcttccaggccaaaaagcgggttctcgaacctcttggtctggttgagacgccagctaagacggcacctggaaagaagcgaccggtagactcgccagactccacctcgggcatcggcaagaaaggccagcagcccgcgaaaaagagactcaactttgggcagactggcgactcagagtcagtccccgaccctcaaccaatcggagaaccaccagcaggcccctctggtctgggatctggtacaatggctgcaggcggtggcgcaccaatggctgacaataacgagggcgccgacggagtgggtaatgcctcaggaaattggcattgcgattccacatggctgggcgacagagtcatcaccaccagcacccgaacctgggccctgcccacctacaacaaccacctctacaagcaaatctccagtcagtcagcagggagcaccaacgataacgtctatttcggctacagcaccccctgggggtattttgacttcaacagattccattgccacttctcaccacgtgactggcagcgacttatcaacaacaactggggattccggcccaagaagctcaacttcaagctcttcaacatccaggtcaaggaggtcacgacgaatgacggcgtcacaaccatcgctaataaccttaccagcacggttcaggtcttttcggacccggaatatcaactgccgtacgtcctcggctccgcgcaccagggctgcctgcctccgttcccggcagacgtgttcatgattccgcagtacggatacctgactctgaacaatggcagccaatcggtaggccgttcctccttctactgcctggagtactttccttctcagatgctgagaacgggcaacaacttcacctttagctacaccttcgaggacgtgcctttccacagcagctacgcgcacagccagagtctggaccggctgatgaatcccctcatcgaccagtacctgtactacttggccagaacacagagcaacgcaggaggtactgctggcaatcgggaactgcagttttatcagggcggacctaccaccatggccgaacaagcaaagaactggctgcccggaccttgcttccggcaacagagagtatccaagacgctggatcaaaataacaacagcaactttgcctggactggtgccacaaaataccatttaaatggaagaaattcattggttaatcccggtgtcgccatggcaacccacaaggacgacgaggaacgcttcttcccttcgagcggagttctaatttttggcaaaactggagcagctaataaaactacattagaaaacgtgctcatgacaaatgaagaagaaattcgtcctaccaacccggtagctaccgaggaatacgggattgtaagcagcaacttgcaggcggctagcaccgcagcccagacacaagttgttaacaaccagggagccttacctggcatggtctggcagaaccgggacgtgtacctgcaaggtcccatttgggccaagattcctcacacggacggcaactttcacccgtctcctctaatgggtggctttggactgaaacacccgcctccccagatcctgatcaaaaacacaccggtacctgctaatcctccagaagtgtttactcctgccaagattgcttccttcatcacgcagtacagcaccgggcaagtcagcgttgagatcgagtgggagctgcagaaagagaacagcaagcgctggaacccagagattcagtacacctccaactttgacaaacagactggagtggactttgctgttgacagccagggtgtttactctgagcct

SEQ ID NO: 4746 - protein, 644 aa, Adeno-associated virus
KAYDQQLKAGDNPYLRYNHADAEFQERLQEDTSFGGNLGRAVFQAKKRVLEPLGLVETPAKTAPGKKRPVDSPDSTSGIGKKGQQPAKKRLNFGQTGDSESVPDPQPIGEPPAGPSGLGSGTMAAGGGAPMADNNEGADGVGNASGNWHCDSTWLGDRVITTSTRTWALPTYNNHLYKQISSQSAGSTNDNVYFGYSTPWGYFDFNRFHCHFSPRDWQRLINNNWGFRPKKLNFKLFNIQVKEVTTNDGVTTIANNLTSTVQVFSDPEYQLPYVLGSAHQGCLPPFPADVFMIPQYGYLTLNNGSQSVGRSSFYCLEYFPSQMLRTGNNFTFSYTFEDVPFHSSYAHSQSLDRLMNPLIDQYLYYLARTQSNAGGTAGNRELQFYQGGPTTMAEQAKNWLPGPCFRQQRVSKTLDQNNNSNFAWTGATKYHLNGRNSLVNPGVAMATHKDDEERFFPSSGVLIFGKTGAANKTTLENVLMTNEEEIRPTNPVATEEYGIVSSNLQAASTAAQTQVVNNQGALPGMVWQNRDVYLQGPIWAKIPHTDGNFHPSPLMGGFGLKHPPPQILIKNTPVPANPPEVFTPAKIASFITQYSTGQVSVEIEWELQKENSKRWNPEIQYTSNFDKQTGVDFAVDSQGVYSEP

SEQ ID NO: 4747 - protein, 728 aa, Adeno-associated virus
MAADGYLPDWLEDNLSEGIREWWDLKPGAPKPKANQQKQDDGRGLVLPGYKYLRPFNGLDKGEPVNEADAAALEHDKAYDKQLEQGDNPYLKYNHADAEFQERLQEDTSFGGNLGRAVFQAKKRVLEPLGLVEEVAKTAPGKKRPIESPDSSTGIGKKGQQPAKKKLNFGQTGDSESVPDPQPLGEPPAAPSGLGSGTMAAGGGAPMADNNEGADGVGNASGNWHCDSTWLGDRVITTSTRTWALPTYNNHLYKQISSQSGATNDNHFFSYSTPWGYFDFNRFHCHFSPRDWQRLINNNWGFRPRKLRFKLFNIQVKEVTTNDGVTTIANNLTSTIQVFSDSEYQLPYVLGSAHQGCLPPFPADVFMIPQYGYLTLNNGSQSVGRSSFYCLEYFPSQMLRTGNNFEFSYTFEEVPFHSSYVHSQSLDRLMNPLIDQYLYYLARTQSTTGSTRELQFHQAGPNTMAEQSKNWLPGPCYRQQRLSKNIDSNNNSNFAWTGATKYHLNGRNSLTNPGVAMATNKDDEDQFFPINGVLVFGKTGAANKTTLENVLMTSEEEIKTTNPVATEEYGVVSSNLQSSTAGPQTQTVNSQGALPGMVWQNRDVCLQGPIWAKIPHTDGNFHPSPLMGGFGLKHPPPQILIKNTPVPANPPEVFTPAKFASFITQYSTGQVSVEIEWELQKENSKRWNPEIQYTSNYAKSNNVEFAVNNEGVYTEPRPIGTRYLTRNL

SEQ ID NO: 4748 - protein, 728 aa, Adeno-associated virus
MAADGYLPDWLEDNLSEGIREWWDLKPGAPKPKANQQKQDDGRGLVLPGYKYLGPFNGLDKGEPVNEADAAALEHDKAYDKQLEQGDNPYLKYNHADAEFQERLQEDTSFGGNLGRAVFQAKKRVLEPLGLVEEGAKTASGKKRPIESPDSSTGIGKKGQQPAKKKLNFGQTGDSESVPDPQPLGEPPAAPSGLGSGTMAAGGGAPMADNNEGADGVGNASGNWHCDSTWLGDRVITTSTRTWALPTYNNHLYKQISSQSGATNDNHFFGYSTPWGYFDFNRFHCHFSPRDWQRLINNNWGFRPRKLRFKLFNIQVKEVTTNDGVTTIANNLTSTIQVFSDSEYQLPYVLGSAHQGCLPPFPADVFMIPQYGYLTLNNGSQSVGRSSFCCLEYFPSQMLRTGNNFEFSYTFEEVPFHSSYAHSQSLDRLMNPLIDQYLYYLARTQSTTGSTRELQFHQAGPNTVAEQSKNWLPGPCYRQQRLSKNIDSNNNSNFAWTGATKYHLNGRNSLTNPGVAMATNKDDEDQFLPINGVLVFGKTGAANKTTLENVLMTSEEEIKTTNPVATEEYGVVSSNLQSSTAGPRTQTVNSQGALPGMVWQNRDVYLQGPIWAEIPHTDGNFHPSPLMGGFGLKHPPPQILIKNTPVPANPPEVFTPAKFASFITQYSTGQVSVEIEWELQKENSKRWNPEIQYTSNYAKSNNVEFAVNNEGVYTEPRPIGTRYLTRNL

SEQ ID NO: 4749 - protein, 738 aa, Adeno-associated virus
MAADGYLPDWLEDNLSEGIREWWALKPGAPKPKANQQKQDDGRGLVLPGYKYLGPFNGLDKGEPVNAADAAALEHDKAYDQQLKAGDNPYLRYNHADAEFQERLQEDTSFGGNLGRAVFQAKKRVLEPLGLVEEGAKTAPGKKRPVEPSPQRSPDSTTGIGKKGQQPAKKRLNFGQTGDSESVPDPQPIGEPPAGPSGLGSGTMAAGGGAPMADNNEGADGVGSSSGNWHCDSTWLGDRVITTSTRTWALPTYNNHLYKQISNGTSGGSTNDNTYFGYSTPWGYFDFNRFHCHFSPRDWQRLINNNWGFRPKRLNFKLFNIQVKEVTQNEGTKTIANNLTSTIQVFTDSEYQLPYVLGSARQGCLPPFPADVFMIPQYGYLTLNNGSQAVGRSSFYCLEYFPSQMLRTGNNFEFSYQFEDVPFHSSYAHSQSLDRLMNPLIDQYLYYLSRTQSTGGTAGTQQLLFSQAGPNNMSAQAKNWLPGPCYRQQRVSTTLSQNNNSNFAWTGATKYHLNGRDSLVNPGVAMATHKDDEERFFPSSGVLMFGKQGAGKGNVDYSSVMLTSEEEIKTTNPVATEQYGVVADNLQQQNAAPIVGAVNSQGALPGMVWQNRDVYLQGPIWAKIPHTDGNFHPSPLMGGFGLKHPPPQILIKNTPVPADPPTTFSQAKLASFITQYSTGQVSVEIEWELQKENSKRWNPEIQYTSNYYKSTNVDFAVNTDGTYSEPRPIGTRYLTRNL

SEQ ID NO: 4750 - DNA, 3121 bp, Adeno-associated virus
  source 1..3121: mol_type = unassigned DNA
gaattcgcccttcgcagagaccaaagttcaactgaaacgaatcaaccggtttattgattaacaagcaattacagattacgggtgaggtaacgggtgccgatggggcgaggctcagaataagtgccatctgtgttaacagcaaagtccacatttgtagatttgtagtagttggaagtgtattgaatctctgggttccagcgtttgctgttttctttctgcagctcccattcaatttccacgctgacctgtccggtgctgtactgcgtgatgaacgacgccagcttagcttgactgaaggtagttggaggatccgcgggaacaggtgtattcttaatcaggatctgaggaggcgggtgtttcagtccaaagccccccatcagcggcgagggatgaaagtttccgtccgtgtgaggaatcttggcccagataggaccctgcaggtacacgtcccggttctgccagaccatgccaggtaaggctccttgactgttgacggcccctacaataggagcggcgttttgctgttgcaggttatcggccaccacgccgtactgttctgtggccactgggttggtggttttaatttcttcctcactggttagcataacgctgctatagtccacgttgccttttccagctccctgtttcccaaacattaagactccgctggacggaaaaaatcgctcttcgtcgtccttgtgggttgccatagcgacaccgggatttaccagagagtctctgccattcagatgatacttggtggcaccggtccaggcaaagttgctgttgttattttgcgacagtgtcgtggagacgcgttgctgccggtagcagggcccgggtagccagtttttggcctgagccgacatgttattaggcccggcctgagaaaatagcaactgctgagttcctgcggtacctcccgtggactgagtccgagacaggtagtacaggtactggtcgatgagggggttcatcagccggtccaggctttggctgtgcgcgtagctgctgtgaaaaggcacgtcctcaaactggtagctgaactcaaagttgttgcccgttctcagcatttgagaaggaaagtactccaggcagtagaaggaggaacggcccacggcctgactgccattgttcagagtcaggtacccgtactgaggaatcatgaagacgtccgccgggaacggaggcaggcagccctggcgcgcagagccgaggacgtacgggagctggtattccgagtccgtaaagacctgaatcgtgctggtaaggttattggcgatggtcttggtgccttcattctgcgtgacctccttgacctggatgttgaagagcttgaagttgagtctcttgggccggaatccccagttgttgttgatgagtcgctgccagtcacgtggtgagaagtggcagtggaatctgttaaagtcaaaatacccccagggggtgctgtagccgaagtaggtgttgtcgttggtgcttcctcccgaagtcccgttggagatttgcttgtagaggtggttgttgtaggtggggagggcccaggttcgggtgctggtggtgatgactctgtcgcccagccatgtggaatcgcaatgccaatttcctgaggaactacccactccgtcggcgccttcgttattgtctgccattggagcgccaccgcctgcagccattgtaccagatcccagaccagaggggcctgcggggggttctccgattggttgagggtcgggcactgactctgagtcgccagtctgcccaaagttgagtctctttttcgcgggctgctggcctttcttgccgatgcccgtagtggagtctggagaacgctggggtgatggctctaccggtctcttctttccaggagccgtcttagcgccttcctcaaccagaccgagaggttcgagaacccgcttcttggcctggaagactgctcgtccgaggttgcccccaaaagacgtatcttcttgcagacgctcctgaaactcggcgtcggcgtggttataccgcaggtacggattgtcacccgctttgagctgctggtcgtaggccttgtcgtgctcgagggccgctgcgtccgccgcgttgacgggctcccccttgtcgagtccgttgaagggtccgaggtacttgtagccaggaagcaccagaccccggccgtcgtcctgcttttgctggttggctttgggcttcggggctccaggtttcagcgcccaccactcgcgaatgccctcagagaggttgtcctcgagccaatctggaagataaccatcggcagccatacctgatctaaatcatttattgttcaaagatgcagtcatccaaatccacattgaccagatcgcaggcagtgcaagcgtctggcacctttcccatgatatgatgaatgtagcacagtttctgatacgcctttttgacgacagaaacgggttgagattctgacacgggaaagcactctaaacagtctttctgtccgtgagtgaagcagatatttgaattctgattcattctctcgcattgtctgcagggaaacagcatcagattcatgcccacgtgacgagaacatttgttttggtacctgtccgcgtagttgatcgaagcttccgcgtctgacgtcgatggctgcgcaactgactcgcgcacccgtttgggctcacttatatctgcgtcactgggggcgggtcttttcttggctccaccctttttgacgtagaattcatgctccacctcaaccacgtgatcctttgcccaccggaaaaagtctttgacttcctgcttggtgaccttcccaaagtcatgatccagacggcgggtgagttcaaatttgaacatccggtcttgcaacggctgctggtgttcgaaggtcgttgagttcccgtcaatcacggcgcacatgttggtgttggaggtgacgatcacgggagtcgggtctatctgggccgaggacttgcatttctggtccacgcgcaccttgcttcctccgagaatggctttggccgactccacgaccttggcggtcatcttcccctcctcccaccagatcaccatcttgtcgacacagtcgttgaagggaaagttctcattggtccagttgacgcagccgtagaagggcgaattc

SEQ ID NO: 4751 - DNA, 3121 bp, Adeno-associated virus
  source 1..3121: mol_type = unassigned DNA
gaattcgcccttctacggctgcgtcaactggaccaatgagaactttcccttcaacgactgtgtcgacaagatggtgatctggtgggaggaggggaagatgaccgccaaggtcgtggagtcggccaaagccattctcggaggaagcaaggtgcgcgtggaccagaaatgcaagtcctcggcccagatagacccgactcccgtgatcgtcacctccaacaccaacatgtgcgccgtgattgacgggaactcaacgaccttcgaacaccagcagccgttgcaagaccggatgttcaaatttgaactcacccgccgtctggatcatgactttgggaaggtcaccaagcaggaagtcaaagactttttccggtgggcaaaggatcacgtggttgaggtggagcacgaattctacgtcaaaaagggtggagccaagaaaagacccgcccccagtgacgcagatataagtgagcccaaacgggtgcgcgagtcagttgcgcagccatcgacgtcagacgcggaagcttcgatcaactacgcagacaggtaccaaaacaaatgttctcgtcacgcgggcatgaatctgatgctgtttccctgcagacaatgcgagagaatgaatcagaattcaaatatctgcttcactcacggacagaaagactgtttagagtgctttcccgtgtcagaatctcaacccgtttctgtcgtcaaaaaggcgtatcagaaactgtgctacattcatcatatcatgggaaaggtgccagacgcttgcactgcctgcgatctggtcgatgtggatttggatgactgcatctttgaacaataaatgatttaaatcaggtatggctgccgatggttatcttccagattggctcgaggacaacctctctgagggcattcgcgagtggtgggcgctgaaacctggagccccgaagcccaaagccaaccagcaaaagcaggacggcggccggggtctggtgcttcctggctacaagtacctcggacccttcaacggactcgacaagggggagcccgtcaacgcggcggacgcagcggccctcgagcacgacaaggcctacgaccagcagctcaaagcgggtgacaatccgtacctgcggtataaccacgccgacgccgagtttcaggagcgtctgcaagaagatacgtcttttgggggcaacctcgggcgagcagtcttccaggccaagaagcgggttctcgaacctctcggtctggttgaggaaggcgctaagacggctcctggaaagaagagaccggtagagccatcaccccagcgttctccagactcctctacgggcatcggcaagaaaggccagcagcccgcgaaaaagagactcaactttgggcagactggcgactcagagtcagtgcccgaccctcaaccaatcggagaaccccccgcaggcccctctggtctgggatctggtacaatggctgcaggcggtggcgctccaatggcagacaataacgaaggcgccgacggagtgggtagttcctcaggaaattggcattgcgattccacatggctgggcgactgagtcatcaccaccagcacccgaacctgggccctccccacctacaacaaccacctctacaagcaaatctccaacgggacttcgggaggaagcaccaacgacaacacctacttcggctacagcaccccctgggggtattttgactttaacagattccactgccacttctcaccacgtgactggcagcgactcatcaacaacaactggggattccggcccaagagactcaacttcaagctcttcaacatccaggtcaaggaggtcacgcagaatgaaggcaccaagaccatcgccaataaccttaccagcacgattcaggtctttacggactcggaataccagctcccgtacgtcctcggctctgcgcaccagggctgcctgcctccgttcccggcggacgtcttcatgattcctcagtacgggtacctgactctgaacaatggcagtcaggccgtgggccgttcctccttctactgcctggagtactttccttctcaaatgctgagaacgggcaacaactttgagttcagctaccagtttgaggacgtgccttttcacagcagctacgcgcacagccaaagcctggaccggctgatgaaccccctcatcgaccagtacctgtactacctgtctcggactcagtccacgggaggtaccgcaggaactcagcagttgctattttctcaggccgggcctaataacatgtcggctcaggccaaaaactggctacccgggccctgctaccggcagtaacgcgtctccacgacactgtcgcaaaataacaacagcaactttgtctggaccggtgccaccaagtatcatctgaatggcagagactctctggtagatcccggtgtcgctatggcaacccacaaggacgacgaagagcgattttttccgtccagcggagtcataatgtttgggaaacagggagctggaaaagacaacgtggactatagcagcgtcatgctaaccagtgaggaagaaattaaaaccaccaacccagtggccacagaacagtacggcgtggtggccgataacctgcaacagcaaaacgccgctcctattgtaggggccgtcaacagtcaaggagccttacctggcatggtctggcagaaccgggacgtgtacctgcagggtcctacctgggccaagattcctcacacggacggaaactttcatccctcgccgctgatgggaggctttggactgaaacacccgcctcctcagatcctgattaagaatacacctgttcccgcggatcctccaactaccttcagtcaagctaagctggcgtcgttcatcacgcagtacagcaccggacaggtcagcgtggaaattgaatgggagctgcaggaagaaaacagcaaacgctggaacccagagattcaatacacttccaactactacaaatctacaaatgtggactttgctgttaacacagatggcacttattctgagcctcgccccatcggcacccgttacctcacccgtaatctgtaattgcttgttaatcaataaaccggttgattcgtttcagttgaactttggtctctgcgaagggcgaattc

SEQ ID NO: 4752 - protein, 738 aa, Adeno-associated virus
MAADGYLPDWLEDNLSEGIREWWALKPGAPKPKANQQKQDDGRGLVLPGYKYLGPFNGLDKGEPVNAADAAALEHDKAYDQQLKAGDNPYLRYNHADAEFQERLQEDTSFGGNLGRAVFQAKKRVLEPLGLVEEGAKTAPGKKRPVEPSPQRSPDSSTGIGKKGQQPAKKRLNFGQTGDSESVPDPQPIGEPPAGPSGLGSGTMAAGGGAPMADNNEGADGVGSSSGNWHCDSTWLGDGVITTSTRTWALPTYNNHLYKQISNGTSGGSTNDNTYFGYSTPWGYFDFNRFHCHFSPRDWQRLINNNWGFRPKSLNFKLFNIQVKEVTQNEGTKTIANNLTSTIQVFTDSEYQLPYVLGSAHQGCLPPFPADVFMIPQYGYLTLNNGSQAVGRSSFYCLEYFPSQMLRTGNNFEFSYQFEDVPFHSSYAHSQSLDRLMNPLIDQYLYYLSRTQSTGGTAGTQQLLFSQAGPNNMSAQAKNWLPGPCYRQQRVSTTLSQNDNSNFAWTGATKYHLNGRDSLVNPGVAMATHKDDEERFFPSSGVLMFGKQGAGKDNVDYSSVMLTSEEEIKTTNPVATEQYGVVADNLQQQNAAPIVGAVNSQGALPGMVWQNRDVYLQGPIWAKIPHTDGNFHPSPLMGGFGLKHPPPQILIKNTPVPADPPTTFSQAKLASFITQYSTGQVSVEIEWELQKENSKRWNPEIQYTSNYYKSTNVDFAVNTDGTYSEPRPIGTRYLTRNL

SEQ ID NO: 4753 - DNA, 3121 bp, Adeno-associated virus
  source 1..3121: mol_type = unassigned DNA
gaattcgcccttcgcgagaccaaagttcaactgaaacgaatcaaccggtttattgattaacaagcaattacagattacgggtgaggtaacgggtgccgatggggcgaggctcagaataagtgccatctgtgttaacagcaaagtccacatttgtagatttgtagtagttggaagtgtattgaatctctgggttccagcgtttgctgttttctttctgcagctcccattcaatttccacgctgacctgtccggtgctgtactgcgtgatgaacgacgccagcttagcttgactgaaggtagttggaggatccgcgggaacaggtgtattcttaatcaggatctgaggaggcgggtgtttcagtccaaagcctcccatcagcggcgagggatgaaagtttccgtccgtgtgaggaatcttggcccagataggaccctgcaggtacacgtcccggttctgccagaccatgccaggtaaggctccttgactgttgacggcccctacaataggagcggcgttttgctgttgcaggttatcggccaccacgccgtactgttctgtggccactgggttggtggttttaatttcttcctcactggttagcataacgctgctatagtccacgttgtcttttccagctccctgtttcccaaacattaagactccgctggacggaaaaaatcgctcttcgtcgtccttgtgggttgccatagcgacaccgggatttaccagagagtctctgccattcagatgatacttggtggcaccggtccaggcaaagttgctgttgtcattttgcgacagtgtcgtggagacgcgttgctgccggtagcagggcccgggtagccagtttttggcctgagccgacatgttattaggcccggcctgagaaaatagcaactgctgagttcctgcggtacctcccgtggactgagtccgagacaggtagtacaggtactggtcgatgagggggttcatcagccggtccaggctttggctgtgcgcgtagctgctgtgaaaaggcacgtcctcaaactggtagctgaactcaaagttgttgcccgttctcagcatttgagaaggaaagtactccaggcagtagaaggaggaacggcccacggcctgactgccattgttcagagtcaggtacccgtactgaggaatcatgaagacgtccgccgggaacggaggcaggcagccctggtgcgcagagccgaggacgtacgggagctggtattccgagtccgtaaagacctgaatcgtgctggtaaggttattggcgatggtcttggtgccttcattctgcgtgacctccttgacctggatgttgaagagcttgaagttgaggctcttgggccggaatccccagttgttgttgatgagtcgctgccagtcacgtggtgagaagtggcagtggaatctgttaaagtcaaaatacccccagggggtgctgtagccgaagtaggtgttgtcgttggtgcttcctcccgaagtcccgttggagatttgcttgtagaggtggttgttgtaggtggggagggcccaggttcgggtgctggtggtgatgactccgtcgcccagccatgtggaatcgcaatgccaatttcctgaggaactacccactccgtcggcgccttcgttattgtctgccattggagcgccaccgcctgcagccattgtaccagatcccagaccagaggggcctgcggggggttctccgattggttgagggtcgggcactgactctgagtcgccagtctgcccaaagttgagtctctttttcgcgggctgctggcctttcttgccgatgcccgtagaggagtctggagaacgctggggtgatggctctaccggtctcttctttccaggagccgtcttagcgccttcctcaaccagaccgagaggttcgagaacccgcttcttggcctggaagactgctcgcccgaggttgcccccaaaagacgtatcttcttgcagacgctcctgaaactcggcgtcggcgtggttataccgcaggtacggattgtcacccgctttgagctgctggtcgtaggccttgtcgtgctcgagggccgctgcgtccgccgcgttgacgggctcccccttgtcgagtccgttgaagggtccgaggtacttgtagccaggaagcaccagaccccggccgtcgtcctgcttttgctggttggctttgggcttcggggctccaggtttcagcgcccaccactcgcgaatgccctcagagaggttgtcctcgagccaatctggaagataaccatcggcagccatacctgatttaaatcatttattgttcaaagatgcagtcatccaaatccacattgaccagatcgcaggcagtgcaagcgtctggcacctttcccatgatatgatgaatgtagcacagtttctgatacgcctttttgacgacagaaacgggttgagattctgacacgggaaagcactctaaacagtctttctgtccgtgagtgaagcagatatttgaattctgattcattctctcgcattgtctgcagggaaacagcatcagattcatgcccacgtgacgagaacatttgttttggtacctgtctgcgtagttgatcgaagcttccgcgtctgacgtcgatggctgcgcaactgactcgcgcacccgtttgggctcacttatatctgcgtcactgggggcgggtcttttcttggctccaccctttttgacgtagaattcatgctccacctcaaccacgtgatcctttgcccaccggaaaaagtctttgacttcctgcttggtgaccttcccaaagtcatgatccagacggcgggtgagttcaaatttgaacatccggtcttgcaacggctgctggtgttcgaaggtcgttgagttcccgtcaatcacggcgcacatgttggtgttggaggtgacgatcacgggagtcgggtctatctgggccgaggacttgcatttctggtccacgcgcaccttgcttcctccgagaatggctttggccgactccacgaccttggcggtcatcttcccctcctcccaccagatcaccatcttgtcgacacagtcgttgaagggaaagttctcattggtccagttgacgcagccgtagaaagggcgaattc

SEQ ID NO: 4754 - DNA, 2211 bp, Adeno-associated virus
  source 1..2211: mol_type = unassigned DNA
atggctgctgacggttatcttccagattggctcgaggacaacctttctgaaggcattcgtgagtggtgggctctgaaacctggagtccctcaacccaaagcgaaccaacaacaccaggacaaccgtcggggtcttgtgcttccgggttacaaatacctcggacccggtaacggactcgacaaaggagagccggtcaacgaggcggacgcggcagccctcgaacacgacaaagcttacgaccagcagctcaaggccggtgacaacccgtacctcaagtacaaccacgccgacgccgagtttcaggagcgtcttcaagaagatacgtcttttgggggcaaccttggcagagcagtcttccaggccaaaaagaggatccttgagcctcttggtctggttgaggaagcagctaaaacggctcctggaaagaagggggctgtagatcagtctcctcaggaaccggactcatcatctggtgttggcaaatcgggcaaacagcctgccagaaaaagactaaatttcggtcagactggagactcagagtcagtcccagaccctcaacctctcggagaaccaccagcagcccccacaagtttgggatctaatacaatggcttcaggcggtggcgcaccaatggcagacaataacgagggtgccgatggagtgggtaattcctcaggaaattggcattgcgattcccaatggctgggcgacagagtcatcaccaccagcaccagaacctgggccctgcccacttacaacaaccatctctacaagcaaatctccagccaatcaggagcttcaaacgacaaccactactttggctacagcaccccttgggggtattttgactttaacagattccactgccacttctcaccacgtgactggcagcgactcattaacaacaactggggattccggcccaagaaactcagcttcaagctcttcaacatccaagttagaggggtcacgcagaacgatggcacgacgactattgccaataaccttaccagcacggttcaagtgtttacggactcggagtatcagctcccgtacgtgctcgggtcggcgcaccaaggctgtctcccgccgtttccagcggacgtcttcatggtccctcagtatggatacctcaccctgaacaacggaagtcaagcggtgggacgctcatccttttactgcctggagtacttcccttcgcagatgctaaggactggaaataacttccaattcagctataccttcgaggatgtaccttttcacagcagctacgctcacagccagagtttggatcgcttgatgaatcctcttattgatcagtatctgtactacctgaacagaacgcaaggaacaacctctggaacaaccaaccaatcacggctgctttttagccaggctgggcctcagtctatgtctttgcaggccagaaattggctacctgggccctgctaccggcaacagagactttcaaagactgctaacgacaacaacaacagtaactttccttggacagcggccagcaaatatcatctcaatggccgcgactcgctggtgaatccaggaccagctatggccagtcacaaggacgatgaagaaaaatttttccctatgcacggcaatctaatatttggcaaagaagggacaacggcaagtaacgcagaattagataatgtaatgattacggatgaagaagagattcgtaccaccaatcctgtggcaacagagcagtatggaactgtggcaaataacttgcagagctcaaatacagctcccacgactggaactgtcaatcatcagggggccttacctggcatggtgtggcaagatcgtgacgtgtaccttcaaggacctatctgggcaaagattcctcacacggatggacactttcatccttctcctctgatgggaggctttggactgaaacatccgcctcctcaaatcatgatcaaaaatactccggtaccggcaaatcctccgacgactttcagcccggccaagtttgcttcatttatcactcagtactccactggacaggtcagcgtggaaattgagtgggagctacagaaagaaaacagcaaacgttggaatccagagattcagtacacttccaactacaacaagtctgttaatgtggactttactgtagacactaatggtgtttatagtgaacctcgccctattggaacccggtatctcacacgaaacttgtga

SEQ ID NO: 4755 - protein, 737 aa, Adeno-associated virus
MAADGYLPDWLEDNLSEGIREWWDLKPGAPKPKANQQKQDNGRGLVLPGYKYLGPFNGLDKGEPVNAADAAALEHDKAYDQQLNAGDNPYLRYNHADAEFQERLQEDTSFGGNLGRAVFQAKKRVLEPLGLVEEGAKTAPAKKRPVEPSPQRSPDSSTGIGKKGQQPARKRLNFGQTGDSESVPDPQPLGEPPAAPSSVGSGTVAAGGGAPMADNNEGADGVGNASGNWHCDSTWLGDRVITTSTRTWALPTYNNHLYEQISSETAGSTNDNTYFGYSTPWGYFDFNRFHCHFSPRDWQRLINNNWGFRPKKLRFKLFNIQVKEVTTNDGVTTIANNLTSTIQVFSDSEYQLPYVLGSAHQGCLPPFPADVFMIPQYGYLTLNNGSQSVGRSSFYCLEYFPSQMLRTGNNFEFSYSFEDVPFHSSYAHSQSLDRLMNPLIDQYLYYLARTQSDPGGTAGNRELQFYQGGPSTMAEQAKNWLPGPCFRQQRVSKTLDQNNNSNFAWTGATKYHLNGRNSLVNPGVAMATHKDDEDRFFPSSGVLIFGKTGATNKTTLENVLMTNEEEIRPTNPVATEEYGIVSSNLQAANTAAQTQVVNNQGALPGMVWQNRDVYLQGPIWAKIPHTDGNFHPSPLMGGFGLKHPPPQILIKNTPVPANPPEVFTPAKFASFITQYSTGQVSVEIEWELQKENSKRWDPEIQYTSNFEKQTGVDFAVDSQGVYSEPRPIGTRYLTRNL

SEQ ID NO: 4756 - DNA, 2211 bp, Adeno-associated virus
  source 1..2211: mol_type = unassigned DNA
atggctgctgacggttatcttccagattggctcgaggacaacctttctgaaggcattcgtgagtggtgggctctgaaacctggagtccctcaacccaaagcgaaccaacaacaccaggacaaccgtcggggtcttgtgcttccgggttacaaatacctcggacccggtaacggactcgacaaaggagagccggtcaacgaggcggacgcggcagccctcgaacacgacaaagcttacgaccagcagctcaaggccggtgacaacccgtacctcaagtacaaccacgccgacgccgagtttcaggagcgtcttcaagaagatacgtcttttgggggcaaccttggcagagcagtcttccaggccaaaaagaggatccttgagcctcttggtctggttgaggaagcagctaaaacggctcctggaaagaagggggctgtagatcagtctcctcaggaaccggactcatcatctggtgttggcaaatcgggcaaacagcctgccagaaaaagactaaatttcggtcagactggagactcagagtcagtcccagaccctcaacctctcggagaaccaccagcagcccccacaagtttgggatctaatacaatggcttcaggcggtggcgcaccaatggcagacaataacgagggtgccgatggagtgggtaattcctcaggaaattggcattgcgattcccaatggctgggcgacagagtcatcaccaccagcaccagaacctgggccctgcccacttacaacaaccatctctacaagcaaatctccagccaatcaggagcttcaaacgacaaccactactttggctacagcaccccttgggggtattttgactttaacagattccactgccacttctcaccacgtgactggcagcgactcattaacaacaactggggattccggcccaagaaactcagcttcaagctcttcaacatccaagttagaggggtcacgcagaacgatggcacgacgactattgccaataaccttaccagcacggttcaagtgtttacggactcggagtatcagctcccgtacgtgctcgggtcggcgcaccaaggctgtctcccgccgtttccagcggacgtcttcatggtccctcagtatggatacctcaccctgaacaacggaagtcaagcggtgggacgctcatccttttactgcctggagtacttcccttcgcagatgctaaggactggaaataacttccaattcagctataccttcgaggatgtaccttttcacagcagctacgctcacagccagagtttggatcgcttgatgaatcctcttattgatcagtatctgtactacctgaacagaacgcaaggaacaacctctggaacaaccaaccaatcacggctgctttttagccaggctgggcctcagtctatgtctttgcaggccagaaattggctacctgggccctgctaccggcaacagagactttcaaagactgctaacgacaacaacaacagtaactttccttggacagcggccagcaaatatcatctcaatggccgcgactcgctggtgaatccaggaccagctatggccagtcacaaggacgatgaagaaaaatttttccctatgcacggcaatctaatatttggcaaagaagggacaacggcaagtaacgcagaattagataatgtaatgattacggatgaagaagagattcgtaccaccaatcctgtggcaacagagcagtatggaactgtggcaaataacttgcagagctcaaatacagctcccacgactggaactgtcaatcatcagggggccttacctggcatggtgtggcaagatcgtgacgtgtaccttcaaggacctatctgggcaaagattcctcacacggatggacactttcatccttctcctctgatgggaggctttggactgaaacatccgcctcctcaaatcatgatcaaaaatactccggtaccggcaaatcctccgacgactttcagcccggccaagtttgcttcatttatcactcagtactccactggacaggtcagcgtggaaattgagtgggagctacagaaagaaaacagcaaacgttggaatccagagattcagtacacttccaactacaacaagtctgttaatgtggactttactgtagacactaatggtgtttatagtgaacctcgccctattggaacccggtatctcacacgaaacttgtaa

SEQ ID NO: 4757 - protein, 736 aa, Adeno-associated virus
MAADGYLPDWLEDNLSEGIREWWALKPGVPQPKANQQHQDNRRGLVLPGYKYLGPGNGLDKGEPVNEADAAALEHDKAYDQQLKAGDNPYLKYNHADAEFQERLQEDTSFGGNLGRAVFQAKKRILEPLGLVEEAAKTAPGKKGAVDQSPQEPDSSSGVGKSGKQPARKRLNFGQTGDSESVPDPQPLGEPPAAPTSLGSNTMASGGGAPMADNNEGADGVGNSSGNWHCDSQWLGDRVITTSTRTWALPTYNNHLYKQISSQSGASNDNHYFGYSTPWGYFDFNRFHCHFSPRDWQRLINNNWGFRPKKLSFKLFNIQVRGVTQNDGTTTIANNLTSTVQVFTDSEYQLPYVLGSAHQGCLPPFPADVFMVPQYGYLTLNNGSQAVGRSSFYCLEYFPSQMLRTGNNFQFSYTFEDVPFHSSYAHSQSLDRLMNPLIDQYLYYLNRTQGTTSGTTNQSRLLFSQAGPQSMSLQARNWLPGPCYRQQRLSKTANDNNNSNFPWTAASKYHLNGRDSLVNPGPAMASHKDDEEKFFPMHGNLIFGKEGTTASNAELDNVMITDEEEIRTTNPVATEQYGTVANNLQSSNTAPTTGTVNHQGALPGMVWQDRDVYLQGPIWAKIPHTDGHFHPSPLMGGFGLKHPPPQIMIKNTPVPANPPTTFSPAKFASFITQYSTGQVSVEIEWELQKENSKRWNPEIQYTSNYNKSVNVDFTVDTNGVYSEPRPIGTRYLTRNL

SEQ ID NO: 4758 - protein, 728 aa, Adeno-associated virus
MAADGYLPDWLEDNLSEGIREWWDLKPGAPKPKANQQKQDDGRGLVLPGYKYLGPFNGLDKGEPVNEADAAALEHDKAYDKQLEQGDNPYLKYNHADAEFQERLQEDTSFGGNLGRAVFQAKKRVLEPLGLVEEGAKTAPGKKRPIESPDSSTGIGRKGQQPAKKKLNFGQTGDSESVPDPQPIGEPPAGPSGLGSGTMAAGGGAPMADNNEGADGVGNASGNWHCDSTWLGDRVITTSTRTWALPTYNNHLYKQISSQSGATNDNHFFGYSTPWGYFDFNRFHCHFSPRDWQRLINNNWGFRPRKLRFKLFNIQVKEVTTNDGVTTIANNLTSTIQVFSDSEYQLPYVLGSAHQGCLPPFPADVFMIPQYGYLTLNNGSQSVGRSSFYCLEYFPSQMLRTGNNFEFSYTFEEVPFHSSYAHSQSLDRLMNPLIDQYLYYLARTQSTTGSTRELQFHQAGPNTMAEQSKNWLPGPCYRQQRLSKNIDSNNNSNFAWTGATKYHLNGRNSLTNPGVAMATNKDDEDQFFPINGVLVFGKTGAANKTTLENVLMTSEEEIKTTNPVATEEYGVVSSNLQSSTAGPQTQTVNSQGALPGMVWQNRDVYLQGPIWAKIPHTDGNFHPSPLMGGFGLKHPPPQILIKNTPVPANPPEVFTPAKFASFITQYSTGQVSVEIEWELQKENSKRWNPEIQYTSNYAKSNNVEFAVNNEGVYTEPRPIGTRYLTRNL

SEQ ID NO: 4759 - protein, 728 aa, Adeno-associated virus
MAADGYLPDWLEDNLSEGIREWWDLKPGAPKPKANQQKQDDGRGLVLPGYKYLGPFNGLDKGEPVNAADAAALEHDKAYDQQLKAGDNPYLRYNHADAEFQERLQEDTSFGGNLGRAVFQAKKRVLEPLGLVEEGAKTAPGKKRPIESPDSSTGIGKKGQQPAKKKLNFGQTGDSESVPDPQPIGEPPAGPSGLGSGTMAAGGGAPMADNNEGADGVGNASGNWHCDSTWLGDRVITTSTRTWALPTYNNHLYKQISSQSGATNDNHFFGYSTPWGYFDFNRFHCHFSPRDWQRLINNNWGFRPRKLRFKLFNIQVKEVTTNDGVTTIANNLTSTIQVFSDSEYQLPYVLGSAHQGCLPPFPADVFMIPQYGYLTLNNGSQSVGRSSFYCLEYFPSQMLRTGNNFEFSYTFEEVPFHSSYAHSQSLDRLMNPLIDQYLYYLARTQSTTGSTRELQFHQAGPNTMAEQSKNWLPGPCYRRQRLSKDIDSNNNSNFAWTGATKYHLNGRNSLTNPGVAMATNKDDEDQFFPINGVLVFGKTGAANKTTLENVLMTSEEEIKTTNPVATEEYGVVSSNLQSSTAGPQTQTVNSQGALPGMVWQNRDVYLQGPIWAKIPHTDGNFHPSPLMGGFGLKHPPPQILIKNTPVPANPPEVFTPAKFASFITQYSTGQVSVEIEWELQKENSKRWNPEIQYTSNYAKSNNVEFAVNNEGVYTEPRPIGTRYLTRNL

SEQ ID NO: 4760 - protein, 685 aa, Adeno-associated virus
MAADGYLPDWLEDNLSEGIREWWDLKPGAPKPKANQQKQDDGRGLVLPGYKYLGPFNGLDKGEPVNEADAAALEHDKAYDKQLEQGDNPYLKYNHADAEFQERLQEDTSFGGNLGRAVFQAKKRVLEPLGLVEEGAKTAPGKKRPVEPSPQRSPDSSTGIGKTGQQPAKKRLNFGQTGDSESVPDPQPIGEPPAGPSGLGSGTMAAGGGAPMADNNEGADGVGSSSGNWHCDSTWLGDRVITTSTRTWALPTYNNHLYKQISNGTSGGSTNDNTYFGYSTPWGYFDFNRFHCHFSPRDWQRLINNNWGFRPKRLNFKLFNIQVKEVTQNEGTKTIANNLTSTIQVFTDSEYQLPYVLGSAHQGCLPPFPADVFMIPQYGYLTLNNGSQAVGRSSFYCLEYFPSQMLRTGNNFEFSYQFEDVPFHSSYAHSQSLDRLTNPLIDQYLYYLARTQSTTGSTRGLQFHQAGPNTMAEQSKNWLPGPCYRQQRLSKNIDSNNNSNFAWTGATKYHLNGRNSLTNPGVAMATNKDDEDQFFPINGVLVFGKTGAANKTTLENVLMTSEEEIKTTNPVATEEYGVVSSNLQSSTAGPQTQTVNSQGALPGMVWQNRDVYLQGPIWAKIPHTDGNFHPSPLMGGFGLKHPPPQILIKYTSNYYKSTNVDFAVNTEGTYSEPRPIGTRYLTRNL

SEQ ID NO: 4761 - protein, 733 aa, Adeno-associated virus
MAADGYLPDWLEDNLSEGIREWWDLKPGAPKPKANQQKQDDGRGLVLPGYKYLGPFNGLDKGEPVNAADAAALEHDKAYDQQLKAGDNPYLRYNHADAEFQERLQEDTSFGGNLGRAVFQAKKRVLEPLGLVEEGAKTAPGKKRPIESPDSSTGIGKKGQQPAKKKLNFGQTGDSESVPDPQPIGEPPAGPSGLGSGTMAAGGGAPMADNNEGADGVGSSSGNWHCDSTWLGDRVITTSTRTWALPTYNNHLYKQISNGTSGGSTNDNTYFGYSTPWGYFDFNRFHCHFSPRDWQRLINNNWGFRPKRLNFKLFNIQVKEVTQNEGTKTIANNLTSTIQVFTDSEYQLPYVLGSAHQGCLPPFPADVFMIPQYGYLTLNNGSQAVGRSSFYCLEYFPSQMLRTGNNFEFSYQFEDVPFHSSYAHSQSLDRLMNPLIDQYLYYLSRTQSTGGTAGTQQLLFSQAGPNNMSAQAKNWLPGPCYRQQRVSTTVSQNNNSNFAWTGATKYHLNGRDSLVNPGVAMATHKGDEERFFPSSGVLMFGKQGAGKDNVDYSSVMLTSEEEIKTTNPVATEQYGVVADNLQQQNAAPIVGAVNSQGALPGMVWQNRDVYLQGPIWAKIPHTDGNFHPSPLMGGFGLKHPPPQILIKNTPVPADPPTTFSQAKLASFITQYSTGQVSVEIEWELQKENSKRWNPEIQYTSNYYKSTNVDFAVNTEGTYSEPRPIGTRYLTRSL

SEQ ID NO: 4762 - protein, 738 aa, Adeno-associated virus
MAADGYLPDWLEDNLSEGIREWWDLKPGAPKPKANQQKQDDGRGLVLPGYKYLGPFNGLDKGEPVNAADAAALEHDKAYDQQLKAGDNPYLRYNHADAEFQERLQEDTSFGGNLGRAVFQAKKRVLEPLGLVEEGAKTAPGKKRPVEPSPQRSPDSSTGIGKTGQQPAKKRLNFGQTGDSESVPDPQPIGEPPAGPSGLGSGTMAAGGGAPMADNNEGADGVGSSSGNWHCDSTWLGDRVITTSTRTWALPTYNNHLYKQISNGTSGGSTNDNTYFGYSTPWGYFDFNRFHCHFSPRDWQRLINNNWGFRPKRLNFKLFNIQVKEVTQNEGTKTIANNLTSTIQVFTDSEYQLPYVLGSAHQGCPPPFPADVFMIPQYGYLTLNNGSQAVGRSSFYCLEYFPSQMRRTGNNFEFSYQFEDVPFHSSYAHSQSLDRLMNPLIDQYLYYLSRTQSTGGTAGTQQLLFSQAGPNNMSAQAKNWLPGPCYRQQRVSTTLSQNNNSNFAWTGATKYHLNGRDSLVNPGVAMATHKDDEERFFPSSGVLMFGKQGAGKDNVDYSSVMLTSEEEIKTTNPVATEQYGVVADNLQQQNAAPIVGAVNSQGALPGMVWQNRDVYLQGPIWAKIPHTDGNFHPSPLMGGFGLKHPPPQILIKNTPVPADPPTTFSQAKLASFITQYSTGQVSVEIEWELQKENSKRWNPEIQYTSNYYKSTNVDFAVNTEGTYSEPRPIGTRYLTRNL

SEQ ID NO: 4763 - protein, 733 aa, Adeno-associated virus
MAADGYLPDWLEDNLSEGIREWWDLRPGAPKPKANQQKQDDGRGLVLPGYKYLGPFNGLDKGEPVNEADAAALEHDKAYDKQLEQGDNPYLKYNHADAEFQERLQEDTSFGGNLGRAVFQAKKRVLEPLGLVEEGAKTAPGKKRPIESPDSSTGIGKKGQQPAKKRLNFGQTGDSESVPDPQPIGEPPAGPSGLGSGTMAAGGGAPMADNNEGADGVGSSSGNWHCDSTWLGDRVITTSTRTWALPTYNNHLYKQISNGTSGGSTNDNTYFGYSTPWGYFDFNRFHCHFSPRDWQRLINNNWGFRPKRLNFKLFNIQVKEVTQNEGTKTIANNLTSTIQVFTDSEYQLPYVLGSAHQGCLPPFPADVFMIPQYGYLTLNNGSQAVGRSSFYCLEYFPSQMLRTGNNFEFSYQFEDVPFHSSYAHSQSLDRLMNPLIDQYLYYLSRTQSTGGTAGTQQLLFSQAGPNNMSAQAKNWLPGPCYRQQRVSTTVSQNNNSNFAWTGATKYHLNGRDSLVNPGVAMATHKGDEERFFPSSGVLMFGKQGAGKDNVDYSSVMLTSEEEIKTTNPVATEQYGVVADNLQQQNAAPIVGAVNSQGALPGMVWQNRDVYLQGPIWAKIPHTDGNFHPSPLMGGFGLKHPPPQILIKNTPVPADPPTTFSQAKLASFITQYSTGQVSVEIEWELQKENSKRWNPEIQYTSNYYKSTNVDFAVNTEGTYSEPRPIGTRYLTRNL

SEQ ID NO: 4764 - DNA, 3098 bp, Adeno-associated virus
  source 1..3098: mol_type = unassigned DNA
gaattcgccctttctacggctgcgtcaactggaccaatgagaactttcccttcaacgattgcgtcgacaagatggtgatctggtgggaggagggcaagatgacggccaaggtcgtggagtccgccaaggccattctcggcggcagcaaggtgcgcgtggaccaaaagtgcaagtcttccgcccagatcgatcccacccccgtgatcgtcacttccaacaccaacatgtgcgctgtgattgacgggaacagcaccaccttcgagcaccagcagccgttacaagaccggatgttcaaatttgaactcacccgccgtctggagcacgactttggcaaggtgacaaagcaggaagtcaaagagttcttccgctgggcgcaggatcacgtgaccgaggtggcgcatgagttctacgtcagaaagggtggagccaacaagagacccgcccccgatgacgcggataaaagcgagcccaagcgggcctgcccctcagtcgcggatccatcgacgtcagacgcggaaggagctccggtggactttgccgacaggtaccaaaacaaatgttctcgtcacgcgggcatgcttcagatgctgtttccctgcaagacatgcgagagaatgaatcagaatttcaacatttgcttcacgcacgggaccagagactgttcagaatgtttccccggcgtgtcagaatctcaaccggtcgtcagaaagaggacgtatcggaaactctgtgccattcatcatctgctggggcgggctcccgagattgcttgctcggcctgcgatctggtcaacgtggacctggatgaccgtgtttctgagcaataaatgacttaaaccaggtatggctgccgatggttatcttccagattggctcgaggacaacctctctgagggcattcgcgagtggtgggacttgaaacctggagccccgaaacccaaagccaaccagcaaaagcaggacgacggccggggtctggtgcttcctggctacaagtacctcggacccttcaacggactcgacaagggagagccggtcaacgaggcagacgccgcggccctcgagcacgacaaggcctacgacaagcagctcgagcagggggacaacccgtacctcaagtacaaccacgccgacgccgagtttcaggagcgtcttcaagaagatacgtcttttgggggcaacctcgggcgagcagtcttccaggccaagaagcgggttctcgaacctctcggtctggttgaggaaggcgctaagacggctcctggaaagaagagacccatagaatcccccgactcctccacgggcatcggcaagaaaggccagcagcccgctaaaaagaagctcaactttgggcagactggcgactcagagtcagtgcccgacccccaacctctcggagaacctcccgccgcgccctcaggtctgggatctggtacaatggctgcaggcggtggcgcaccaatggcagacaataacgaaggcgccgacggagtgggtaatgcctccggaaattggcattgcgattccacatggctgggcgacagagtcatcaccaccagcacccgcacctgggccctgcccacctacaacaaccacctctacaagcagatatcaagtcagagcggggctaccaacgacaaccacttcttcggctacagcaccccctggggctattttgacttcaacagattccactgccacttctcaccacgtgactggcagcgactcatcaacaacaactggggattccggcccagaaagctgcggttcaagttgttcaacatccaggtcaaggaggtcacgacgaacgacggcgttacgaccatcgctaataaccttaccagcacgattcaggtcttctcggactcggagtaccaactgccgtacgtcctcggctctgcgcaccagggctgcctccctccgttccctgcggacgtgttcatgattcctcagtacggatatctgactctaaacaacggcagtcagtctgtgggacgttcctccttctactgcctggagtactttccttctcagatgctgagaacgggcaataactttgaattcagctacacctttgaggaagtgcctttccacagcagctatgcgcacagccagagcctggaccggctgatgaatcccctcatcgaccagtacctgtactacctggcccggacccagagcactacggggtccacaagggagctgcagttccatcaggctgggcccaacaccatggccgagcaatcaaagaactggctgcccggaccctgttatcggcagcagagactgtcaaaaaacatagacagcaacaacaacagtaactttgcctggaccggggccactaaataccatctgaatggtagaaattcattaaccaacccgggcgtagccatggccaccaacaaggacgacgaggaccagttctttcccatcaacggagtgctggtttttggcgaaacgggggctgccaacaagacaacgctggaaaacgtgctaatgaccagcgaggaggagatcaaaaccaccaatcccgtggctacagaagaatacggtgtggtctccagcaacctgcaatcgtctacggccggaccccagacacagactgtcaacagccagggggctctgcccggcatggtctggcagaaccgggacgtgtacctgcagggtcccatctgggccaaaattcctcacacggacggcaactttcacccgtctcccctgatgggcggatttggactcaaacacccgcctcctcaaattctcatcaaaaacaccccggtacctgctaatcctccagaggtgtttactcctgccaagtttgcctcatttatcacgcagtacagcaccggccaggtcagcgtggagatcgagtgggaactgcagaaagaaaacagcaaacgctggaatccagagattcagtacacctcaaattatgccaagtctaataatgtggaatttgctgtcaacaacgaaggggtttatactgagcctcgccccattggcacccgttacctcacccgtaacctgtaattgcctgttaatcaataaaccggttaattcgtttcagttgaactttggtctctgcgaagggcgaattc

SEQ ID NO: 4765 - protein, 728 aa, Adeno-associated virus
MAADGYLPDWLEDNLSEGIREWWDLKPGAPKPKANQQKQDDGRGLVLPGYKYLGPFNGLDKGEPVNEADAAALEHDKAYDKQLEQGDNPYLKYNHADAEFQERLQEDTSFGGNLGRAVFQAKKRVLEPLGLVEEGAKTAPGKKRPIESPDSSTGIGKKGQQPAKKKLNFGQTGDSESVPDPQPLGEPPAAPSGLGSGTMAAGGGAPMADNNEGADGVGNASGNWHCDSTWLGDRVITTSTRTWALPTYNNHLYKQISSQSGATNDNHFFGYSTPWGYFDFNRFHCHFSPRDWQRLINNNWGFRPRKLRFKLFNIQVKEVTTNDGVTTIANNLTSTIQVFSDSEYQLPYVLGSAHQGCLPPFPADVFMIPQYGYLTLNNGSQSVGRSSFYCLEYFPSQMLRTGNNFEFSYTFEEVPFHSSYAHSQSLDRLMNPLIDQYLYYLARTQSTTGSTRELQFHQAGPNTMAEQSKNWLPGPCYRQQRLSKNIDSNNNSNFAWTGATKYHLNGRNSLTNPGVAMATNKDDEDQFFPINGVLVFGETGAANKTTLENVLMTSEEEIKTTNPVATEEYGVVSSNLQSSTAGPQTQTVNSQGALPGMVWQNRDVYLQGPIWAKIPHTDGNFHPSPLMGGFGLKHPPPQILIKNTPVPANPPEVFTPAKFASFITQYSTGQVSVEIEWELQKENSKRWNPEIQYTSNYAKSNNVEFAVNNEGVYTEPRPIGTRYLTRNL

SEQ ID NO: 4766 - protein, 733 aa, Adeno-associated virus
MAADGHLPDWLEDNLSEGIREWWDLKPGAPKPKANQQKQDDGRGLVLPGYKYLGPFNGLDKGEPVNAADAAALEHDKAYDQQLKAGDNPYLRYNHADAEFQERLQEDTSFGGNLGRAVFQAKKRVLEPLGLVEEGAKTAPGKKRPIESPDSSTGIGKKGQQPAKKKLNFGQTGDSESVPDPQPIGEPPAGPSGLGSGTMAAGGGAPMADNNEGADGVGSSSGNWHCDSTWLGDRVITTSTRTWALPTYNNHLYKQISNGTSGGSTNDNTYFGYSTPWGYFDFNRFHCHFSPRDWQRLINNSWGFRPKRLNFKLFNIQVKEVTQNEGTKTIANNLTSTIQVFTDSEYQLPYVLGSAHQGCLPPFPADVFMIPQYGYLTLNNGSQAVGRSSFYCLEYFPSQMLRTGNNFEFSYQFEDVPFHSSYAHSQSLDRLMNPLIDQYLYYLSRTQSTGGTAGTQQLLFSQAGPNNMSAQAKNWLPGPCYRQQRVSTTLSQNNNSNFAWTGATKYHLNGRDSLVNPGVAMATHKDDEERFFPSSGVLMFGKQGAGKDNVDYSSVMLTSEEEIKTTNPVATEQYGVVADNLQQQNAAPIVGAVNSQGALPGMVWQNRDVYLQGPIWAKIPHTDGNFHPSPLMGGFGLKHPPPQILIKNTPVPADPPTTFSQAKLASFITQYSTGQVSVEIEWELQKENSKRWNPEIQYTSNYYKSTNVDFAVNTEGTYSEPRPIGTRYLTRNL

SEQ ID NO: 4767 - DNA, 2495 bp, Adeno-associated virus
  source 1..2495: mol_type = unassigned DNA
gaattcgccctttctacggctgcgtcaactagaccaatgagaactttcccttcaacgattgcgtcgacaagatggtgatctggtgggaggagggcaagatgacggccaaggtcgtggagtccgccaaggccattcatcatctgctggggcgggctcccgagattgcttgctcggcctgcgatctggtcaacgtggacctggatgactgtgtttctgagcaataaatgacttaaaccaggtatggctgccgatggttatcttccagattggctcgaggacaacctctctgagggcattcgcgagtggtgggacttgaaacctggagccccgaaacccaaagccaaccagcaaaagcaggacgacggccggggtctggtgcttcctggctacaagtacctcggacccttcaacggactcgacaagggagagccggtcaacgaggcagacgccgcggccctcgagcacgacaaggcctacgacaagcagctcgagcagggggacaacccgtacctcaagtacaaccacgccgacgccgagtttcaggagcgtcttcaagaagatacgtcttttgggggcaacctcgggcgagcagtcttccaggccaagaagcgggttctcgaacctctcggtctggttgaggaaggcgctaagacggctcctggaaagaagagacccatagaatcccccgactcctccacgggcatcggcaagaaaggccagcagcccgctaaaaagaagctcaactttgggcagactggcgactcagagtcagtgcccgaccctcaaccaatcggagaaccccccgcaggcccctctggtctgggatctggtacaatggctgcaggcggtggcgctccaatggcagacaataacgaaggcgccgacggagtgggtaatgcctccggaaattggcattgcgattccacatggctgggcgacagagtcatcaccaccagcacccgcacctgggccctgcccacctacaacaaccacctctacaagcagatatcaagtcagagcggggctaccaacgacaaccacttcttcggctacagcaccccctggggctattttgacttcaacagattccactgccacttctcaccacgtgactggcagcgactcatcaacaacaactggggattccggcccagaaagctgcggttcaagttgttcaacatccaggtcaaggaggtcacgacgaacgacggcgttacgaccatcgctaataaccttaccagcacgattcaggtcttctcggactcggagtaccaactgccgtacgtcctcggctctgcgcaccagggctgcctccctccgttccctgcggacgtgttcatgattcctcagtacggatatctgactctaaacaacggcagtcagtctgtgggacgttcctccttctactgcctggagtactttccttctcagatgctgagaacgggcaataactttgaattcagctacacctttgaggaagtgcctttccacagcagctatgcgcacagccagagcctggaccggctgatgaatcccctcatcgaccagtacctgtactacctggcccggacccagagcactacggggtccacaagggagctgcagttccatcaggctgggcccaacaccatggccgagcaatcaaagaactggctgcccggaccctgttatcggcagcagagactgtcaaaaaacatagacagcaacaacaccagtaactttgcctggaccggggccactaaataccatctgaatggtagaaattcattaaccaacccgggcgtagccatggccaccaacaaggacgacgaggaccagttctttcccatcaacggagtgctggtttttggcaaaacgggggctgccaacaagacaacgctggaaaacgtgctaatgaccagcgaggaggagatcaaaaccaccaatcccgtggctacagaacagtacggtgtggtctccagcaacctgcaatcgtctacggccggaccccagacacagactgtcaacagccagggggctctgcccggcatggtctggcagaaccgggacgtgtacctgcagggtcccatctgggccaaaattcctcacacggacggcaactttcacccgtctcccctgatgggcggatttggactcaaacacccgcctcctcaaattctcatcaaaaacaccccggtacctgctaatcctccagaggtgtttactcctgccaagtttgcctcatttatcacgcagtacagcaccggccaggtcagcgtggagatcgagtgggaactgcagaaagaaaacagcaaacgctggaatccagagattcagtacacctcaaattatgccaagtctaataatgtggaatttgctgtcaacaacgaaggggtttatactgagcctcgccccattggcacccgttacctcacccgtaacctgtaattgcctgttaatcaataaaccggttaattcgtttcagttgaactttggtctctgcgaagggcgaattc

SEQ ID NO: 4768 - protein, 728 aa, Adeno-associated virus
MAADGYLPDWLEDNLSEGIREWWDLKPGAPKPKANQQKQDDGRGLVLPGYKYLGPFNGLDKGEPVNEADAAALEHDKAYDKQLEQGDNPYLKYNHADAEFQERLQEDTSFGGNLGRAVFQAKKRVLEPLGLVEEGAKTAPGKKRPIESPDSSTGIGKKGQQPAKKKLNFGQTGDSESVPDPQPIGEPPAGPSGLGSGTMAAGGGAPMADNNEGADGVGNASGNWHCDSTWLGDRVITTSTRTWALPTYNNHLYKQISSQSGATNDNHFFGYSTPWGYFDFNRFHCHFSPRDWQRLINNNWGFRPRKLRFKLFNIQVKEVTTNDGVTTIANNLTSTIQVFSDSEYQLPYVLGSAHQGCLPPFPADVFMIPQYGYLTLNNGSQSVGRSSFYCLEYFPSQMLRTGNNFEFSYTFEEVPFHSSYAHSQSLDRLMNPLIDQYLYYLARTQSTTGSTRELQFHQAGPNTMAEQSKNWLPGPCYRQQRLSKNIDSNNTSNFAWTGATKYHLNGRNSLTNPGVAMATNKDDEDQFFPINGVLVFGKTGAANKTTLENVLMTSEEEIKTTNPVATEQYGVVSSNLQSSTAGPQTQTVNSQGALPGMVWQNRDVYLQGPIWAKIPHTDGNFHPSPLMGGFGLKHPPPQILIKNTPVPANPPEVFTPAKFASFITQYSTGQVSVEIEWELQKENSKRWNPEIQYTSNYAKSNNVEFAVNNEGVYTEPRPIGTRYLTRNL

SEQ ID NO: 4769 - DNA, 2504 bp, Adeno-associated virus
  source 1..2504: mol_type = unassigned DNA
gaattcgccctttctacggctgcgtcaactggaccaatgagaactttcccttcaacgattgcgtcgacaagatggtgatctggtgggaggagggcaagatgacggccaaggtcgtggagtccgccaaggccattcatcatctgctggggcgggctcccgagattgcttgctcggcctgcgatctggtcaacgtggacctggatgactgtgtttctgagcaataaatgacttaaaccaggtatggctgccgatggttatcttccagattggctcgaggacaacctctctgagggcattcgcgagtggtgggacttgaaacctggagccccgaaacccaaagccaaccagcaaaagcaggacgacggccggggtctggtgcttcctggctacaagtacctcggacccttcaacggactcgacaagggagagccggtcaacgaggcagacgccgcggccctcgagcacgacaaggcctacgacaagcagctcgagcagggggacaacccgtacctcaagtacaaccacgccgacgccgagtttcaggagcgtcttcaagaagatacgtcttttgggggcaacctcgggcgagcagtcttccaggccaagaagcgggttctcgaacctctcggtctggttgaggaaggcgctaagacggctcctggaaagaagagacccatagaatcccccgactcctccacgggcatcggcaagaaaggccagcagcccgctaaaaagaagctcaactttgggcagactggcgactcagagtcagtgcccgaccctcaaccaatcggagaaccccccgcaggcccctctggtctgggatctggtacaatggctgcaggcggtggcgctccaatggcagacaataacgaaggcgccgacggagtgggtaatgcctccggaaattggcattgcgattccacatggctgggcgacagagtcatcaccaccagcacccgcacctgggccctgcccacctacaacaaccacctctacaagcagatatcaagtcagagcggggctaccaacgacaaccacttcttcggctacagcaccccctggggctattttgacttcaacagattccactgccacttctcatcacgtgactggcagcgactcatcaacaacaactggggattccggcccaagagactcaacttcaagctcttcaacatccaggtcaaggaggtcacgcagaatgaaggcaccaagaccatcgccaataaccttaccagcacgattcaggtctttacggactcggaataccggctcccgtacgtcctcggctctgcgcaccagggctgcctgcctccgttcccggcggacgtcttcatgattcctcagtacgggtacctgactctgaacaacggcagtcaggccgtgggccgttcctccttctactgcctggagtactttccttctcaaatgctgagaacgggcaacaactttgagttcagctaccagtttgaggacgtgccttttcacagcagctacgcgcacagccaaagcctggaccggctgatgaaccccctcatcgaccagtacctgtactacctgtctcggactcagtccacgggaggtaccgcaggaactcagcagttgctattttctcaggccgggcctaataacatgtcggctcaggccaaaaactggctacccgggccctgctaccggcagcaacgcgtctccacgacactgtcgcaaaataacaacagcaactttgcttggaccggtgccaccaagtatcatctgaatggcagagactctctggtaaatcccggtgtcgctatggcaacgcacaaggacgacgaagagcgattttttccatccagcggagtcttgatgtttgggaaacagggagctggaaaagacaacgtggactatagcagcgttatgctaaccagtgaggaagaaatcaaaaccaccaacccagtggccacagaacagtacggcgtggtggccgataacctgcaacagcaaaacgccgctcctattgtaggggccgtcaacagtcaaggagccttacctggcatggtctggcagaaccgggacgtgtacctgcagggtcctatctgggccaagattcctcacacggacggcaactttcatccttcgccgctgatgggaggctttggactgaaacacccgcctcctcagatcctgattaagaatacacctgttcccgcggatcctccaactaccttcagtcaagccaagccggcgtcgttcatcacgcagtacagcaccggacaggtcagcgtggaaattgaatgggagctgcagaaagagaacagcaagcgctggaacccagagattcagtatacttccaactactacaaatctacaaatgtggactttgctgtcaatactgagggtacttattcagagcctcgccccattggcacccgttacctcacccgtaacctgtaattgcctgttaatcaataaaccggttaattcgtttcagttgaactttggtctctgcgaagggcgaattc

SEQ ID NO: 4770 - protein, 731 aa, Adeno-associated virus
MAADGYLPDWLEDNLSEGIREWWDLKPGAPKPKANQQKQDDGRGLVLPGYKYLGPFNGLDKGEPVNEADAAALEHDKAYDKQLEQGDNPYLKYNHADAEFQERLQEDTSFGGNLGRAVFQAKKRVLEPLGLVEEGAKTAPGKKRPIESPDSSTGIGKKGQQPAKKKLNFGQTGDSESVPDPQPIGEPPAGPSGLGSGTMAAGGGAPMADNNEGADGVGNASGNWHCDSTWLGDRVITTSTRTWALPTYNNHLYKQISSQSGATNDNHFFGYSTPWGYFDFNRFHCHFSSRDWQRLINNNWGFRPKRLNFKLFNIQVKEVTQNEGTKTIANNLTSTIQVFTDSEYRLPYVLGSAHQGCLPPFPADVFMIPQYGYLTLNNGSQAVGRSSFYCLEYFPSQMLRTGNNFEFSYQFEDVPFHSSYAHSQSLDRLMNPLIDQYLYYLSRTQSTGGTAGTQQLLFSQAGPNNMSAQAKNWLPGPCYRQQRVSTTLSQNNNSNFAWTGATKYHLNGRDSLVNPGVAMATHKDDEERFFPSSGVLMFGKQGAGKDNVDYSSVMLTSEEEIKTTNPVATEQYGVVADNLQQQNAAPIVGAVNSQGALPGMVWQNRDVYLQGPIWAKIPHTDGNFHPSPLMGGFGLKHPPPQILIKNTPVPADPPTTFSQAKPASFITQYSTGQVSVEIEWELQKENSKRWNPEIQYTSNYYKSTNVDFAVNTEGTYSEPRPIGTRYLTRNL

SEQ ID NO: 4771 - protein, 731 aa, Adeno-associated virus
MAADGYLPDWLEDNLSEGIREWWDLKPGAPKPKANQQKQDDGRGLVLPGYKYLGPFNGLDKGEPVNEADAAALEHDKAYDKQLEQGDNPYLKYNHADAEFQERLQEDTSFGGNLGRAVFRAKKRVLEPLGLVEEGAKTAPGKKRPIESPDSSTGIGKKGQQPAKKKLNFGQTGDSESVPDPQPLGEPPAAPSGLGSGTMAAGGGAPMADNNEGADGVGNASGNWHCDSTWLGDRVITTSTRTWALPTYNNHLYKQISSQSGATNDNHFFGYSTPWGYFDFNRFHCHFSPRDWQRLINNNRGFRPRKLRFKLFNIQVKEVTTNDGVTTIANNLTSTIQVFSDSEYQLPYVLGSAHQGCLPPFPADVFMIPQYGYLTLNNGSQSVGRSSFYCLEYFPSQMLRTGNNFEFSYQFEDVPFHSSYAHSQSLDRLMNPLIDQYLYYLSRTQSTGGTAGTQQLLFSQAGPNNMSAQAKNWLPGPCYRQQRVSTTLSQNNNSNFAWTGATKYHLNGRDSLVNPGVAMATHKDDEERFFPSSGVLMFGKQGAGKDNVDYSSVMLTSEEEIKTTNPVATEQYGVVADNLQQQNAAPIVGAVNSQGALPGMAWQNRDVYLQGPIWAKIPHTDGNFHPSPLMGGFGLKHPPPQILIKNTPVPADPPTTFSQAKLASFITQYSTGQVSVEIEWELQKENSKRWNPEIQYTSNYYKSTNVDFAVNTEGTYSEPRPIGTRYLTRNL

SEQ ID NO: 4772 - protein, 738 aa, Adeno-associated virus
MAADGYLPDWLEDNLSEGIREWWDLKPGAPKPKANQQKQDDGRGLVLPGYKYLGPFNGLDKGEPVNEADAAALEHDKAYDKQLEQGDNPYLKYNHADAEFQERLQEDTSFGGNLGRAVFQAKKRVLEPLGLVEEGAKTAPGKKRPVEPSPQRSPDSSTGIGKTGQQPAKKRLNFGQTGDSESVPDPQPIGEPPAGPSGLGSGTMAAGGGAPMADNNEGADGVGSSSGNWHCDSTWLGDRVITTSTRTWALPTYNNHLYKQISNGTSGGSTNDNTYFGYSTPWGYFDFNRFHCHFSPRDWQRLINNNWGFRPKRLNFKLFNIQVKEVTQNEGTKTIANNLTSTIQVFTDSEYQLPYVLGSAHQGCLPPFPADVFMIPQYGYLTLNNGSQAVGRSSFYCLEYFPSQMLRTGNNFEFSYQFEDVPFHSSYAHSQSLDRLMNPLIDQYLYYLSRTQSTGGTAGTQQLLFSQAGPNNMSAQAKNWLPGPCYRQQRVSTTLSQNNNSNFAWTGATKYHLNGRDSLVNPGVAMATHKDDEERFFPSSGVLMFGKQGAGKDNVDYSSVMLTSEEEIKTTNPVATEQYGVVADNLQQQNAAPIVGAVNSQGALPGMVWQNRDVYLQGPIWAKIPHTDGNFHPSPLMGGFGLKHPPPQILIKNTPVPADPPTTFSQAKLASFITQYSTGQVSVEIEWELQKENSKRWNPEIQYTSNYYKSTNVDFAVNTEGTYSEPRPIGTRYLTRNL

SEQ ID NO: 4773 - protein, 735 aa, Adeno-associated virus
MAADGYLPDWLEDNLSEGIREWWDLKPGAPKPKANQQKQDDGRGLVLPGYKYLGPFNGLDKGEPVNEADAAALEHDKAYDKQLEQGDNPYLKYNHADAEFQERLQEDTSFGGNLGRAVFQAKKRVLEPLGLVEEGAKTAPGKKRPVEPSPQRSPDSSTGIGKTGQQPAKKRLNFGQTGDSESVPDPQPIGEPPAGPSGLGSGTMAAGGGAPMADNNEGADGVGSSSGNWHCDSTWLGDRVITTSTRTWALPTYNNHLYKQISNGTSGGSTNDNTYFGYSTPWGYFDFNRFHCHFSPRDWQRLINNNWGFRPRKLRFKLFNIQVKEVTTDDGVTTIANNLTSTIQVFSDSEYQLPYVLGSAHQGCLPPFPADVFMIPQYGYLTLNNGSQSVGRSSFYCLEYFPSQMLRTGNNFEFSYTFEEVPFHSSYAHSQSLDRLMNPLIDQYLYYLARTQSTTGSTRELQFHQAGPNTMAEQSKNWLPGPCYRQQRLSKNIDSNNNSNFAWTGATKYHLNGRNSLTNPGVAMATNKDDEDQFFPINGVLVFGKTGAANKTTLENVLMTSEEEIKTTNPVATEEYGVVSSNLQSSTAGPQTQTVNSQGALPGMVWQNRDVYLQGPIWAKIPHTDGNFHPSPLMDGFGLKHPPPQILIKNTPVPANPPEVFTPAKFASFITQYSTGQVSVEIEWELQKENSKRWNPEIQYTSNYAKSNNVEFAVNNEGVYTEPRPIGTRYLTRNL

SEQ ID NO: 4774 - DNA, 3128 bp, Adeno-associated virus
  source 1..3128: mol_type = unassigned DNA
gaattcgccctttctacggctgcgtcaactggaccaatgagaactttcccttcaacgattgcgtcgacaagatggtgatctggtgggaggagggcaagatgacggccaaggtcgtggagtccgccaaggccattctcggcggcagcaaggtgcgcgtggaccaaaagtgcaagtcttccgcccagatcgatcccacccccgtgatcgtcacttccaacaccaacatgtgcgccgtgattgacgggaacagcaccaccttcgagcaccagcagccgttacaagaccggatgttcaaatttgaactcacccgccgtctggagcacgactttggcaaggtgacaaagcaggaagtcaaagagttcttccgctgggcgcaggatcacgtgaccgaggtggcgcatgagttctacgtcagaaagggtggagccaacaagagacccgcccccgatgacgcggataaaagcgagcccaagcgggcctgcccctcagtcgcggatccatcgacgtcagacgcggaaggagctccggtggactttgccgacaggtaccaaaacaaatgttctcgtcacgcgggcatgcttcagatgctgtttccctgcaagacatgcgagagaatgaatcagaatttcaacatttgcttcacgcacgggaccagagactgttcagaatgtttccccggcgtgtcagaatctcaaccggtcgtcagaaagaggacgtatcggaaactctgtgccattcatcatctgctagggcgggctcccgagattgcttgctcggcctgcgatctggtcaacgtggacctggatgactgtgtttctgagcaataaatgacttaaaccaggtatggctgccgatggttatcttccagattggctcgaggacaacctctctgagggcattcgcgagtggtgggacttgaaacctggagccccgaaacccaaagccaaccagcaaaagcaggacgacggccggggtctggtgcttcctggctacaagtacctcggacccttcaacggactcgacaagggggagcccgtcaacgcggcggacgcagcggccctcgagcacgacaaggcctacgaccagcagctcaaagcgggtgacaatccgtacctgcggtataaccacgccgacgccgagtttcaggagcgtctgcaagaagatacgtcttttgggggcaacctcgggcgagcagtcttccaggccaagaagcgggttctcgaacctctcggtctggttgaggaaggcgctaagacggctcctggaaagaagagaccggtagagccatcaccccagcgttctccagactcctctacgggcatcggcaagacaggccagcagcccgcgaaaaagagactcaactttgggcagactggcgactcagagtcagtgcccgaccctcaaccaatcggagaaccccccgcaggcccctctggtctgggatctggtacaatggctgcaggcggtggcgctccaatggcagacaataacgaaggcgccgacggagtgggtagttcctcaggaaattggcattgcgattccacatggctgggcgacagagtcatcaccaccagcacccgaacctgggccctccccacctacaacaaccacctctacaagcaaatctccaacgggacatcgggaggaagcaccaacgacaacacctacttcggctacagcaccccctgggggtattttgactttaacagattccactgccacttctcaccacgtgactggcagcgactcatcaacaacaactggggattccggcccaagagactcaacttcaagctcttcaacatccaggtcaaggaggtcacgcagaatgaaggcaccaagaccatcgccaataaccttaccagcacgattcaggtctttacggactcggaataccagctcccgtacgtcctcggctctgcgcaccagggctgcctgcctccgttcccggcggacgtcttcatgattcctcagtacgggtacctgactctgaacaacggcagtcaggccgtgggccgttcctccttctactgcctggagtactttccttctcaaatgctgagaacgggcaacaactttgagttcagctaccagtttgaggacgtgccttttcacagcagctacgcgcacagccaaagcctggaccggctgatgaaccccctcatcgaccagtacctgtactacctgtctcggactcagtccacgggaggtaccgcaggaactcagcagttgctattttctcaggccgggcctaataacatgtcggctcaggccaaaaactggctacccgggccctgctaccggcagcaacgcgtctccacgacactgtcgcaaaataacaacagcaactttgcttggaccggtgccaccaagtatcatctgaatggcagagactctctggtaaatcccggtgtcgctatggcaacgcacaaggacgacgaagagcgattttttccatccagcggagtcttgatgtttgggaaacagggagctggaaaagacaacgtggactatagcagcgttatgctaaccagtgaggaagaaatcaaaaccaccaacccagtggccacagaacagtacggcgtggtggccgataacctgcaacagcaaaacgccgctcctattgtaggggccgtcaacagtcaaggagccttacctggcatggtctggcagaaccgggacgtgtacctgcagggtcctatctgggccaagattcctcacacggacggcaactttcatccttcgccgctgatgggaggctttggactgaaacacccgcctcctcagatcctgattaagaatacacctgttcccgcggatcctccaactaccttcagtcaagccaagctggcgtcgttcatcacgcagtacagcaccggacaggtcagcgtggaaattgaatgggagctgcagaaagagaacagcaagcgctggaacccagagattcagtatacttccaactactacaaatctacaaatgtggactttgctgtcaatactgagggtacttattcagagcctcgccccattggcacccgttacctcacccgtaacctgtaattgcctgttaatcaataaaccggctaattcgtttcagttgaactttggtctctgcgaagggcgaattc

SEQ ID NO: 4775 - protein, 738 aa, Adeno-associated virus
MAADGYLPDWLEDNLSEGIREWWDLKPGAPKPKANQQKQDDGRGLVLPGYKYLGPFNGLDKGEPVNAADAAALEHDKAYDQQLKAGDNPYLRYNHADAEFQERLQEDTSFGGNLGRAVFQAKKRVLEPLGLVEEGAKTAPGKKRPVEPSPQRSPDSSTGIGKTGQQPAKKRLNFGQTGDSESVPDPQPIGEPPAGPSGLGSGTMAAGGGAPMADNNEGADGVGSSSGNWHCDSTWLGDRVITTSTRTWALPTYNNHLYKQISNGTSGGSTNDNTYFGYSTPWGYFDFNRFHCHFSPRDWQRLINNNWGFRPKRLNFKLFNIQVKEVTQNEGTKTIANNLTSTIQVFTDSEYQLPYVLGSAHQGCLPPFPADVFMIPQYGYLTLNNGSQAVGRSSFYCLEYFPSQMLRTGNNFEFSYQFEDVPFHSSYAHSQSLDRLMNPLIDQYLYYLSRTQSTGGTAGTQQLLFSQAGPNNMSAQAKNWLPGPCYRQQRVSTTLSQNNNSNFAWTGATKYHLNGRDSLVNPGVAMATHKDDEERFFPSSGVLMFGKQGAGKDNVDYSSVMLTSEEEIKTTNPVATEQYGVVADNLQQQNAAPIVGAVNSQGALPGMVWQNRDVYLQGPIWAKIPHTDGNFHPSPLMGGFGLKHPPPQILIKNTPVPADPPTTFSQAKLASFITQYSTGQVSVEIEWELQKENSKRWNPEIQYTSNYYKSTNVDFAVNTEGTYSEPRPIGTRYLTRNL

SEQ ID NO: 4776 - DNA, 3084 bp, Adeno-associated virus
  source 1..3084: mol_type = unassigned DNA
gaattcgccctttctacggctgcatcaactggaccaatgagaactttcccttcaacgattgcgtcgacaagatggtgatctggtgggaggagggcaagatgacggccaaggtcgtggagtccgccaaggccattctcggcggcagcaaggtgcgcgtggaccaaaagtgcaagtcgtccgcccagatcgaccccacccccgtgatcgtcacctccaacaccaacatgtgcgccgtgattgacgggaacagcaccaccttcgagcaccagcagccgttgcaggaccggatgttcaagttcgaactcacccgccgtctggagcacgactttggcaaggtgaccaagcaggaagtcaaagagttcttccgctgggcgcaggatcacgtgaccgaggtggcgcatgagttctacgtcagaaagggcggagccagcaaaagacccgcccccgatgacgcggatataagcgagcccaagcgggcctgcccctcagtcgcggatccatcgacgtcagacgcggaaggagctccggtggactttgccgacaggtaccaaaacaaatgttctcgtcacgcgggcatgcttcagatgctgtttccctgcaaaacgtgcgagaaaatgaatcagaatttcaacatttgcttcacgcacggggtcagagactgctcagaatgtttccccggtgcatcagaatctcaaccggtcgtcagaaaaaaaacgtatcagaaactgtgtgccattcatcatctgctggggcgggcacccgagattgcttgctcggcctgcgatctggtcaacgtggacctggacgactgtgtttctgagcaataaatgacttaaaccaggtatggctgccgatggttatcttccagattggcttgaggacaacctctctgagggcattcgcgagtggtgggacctgaaacctggagccccgaaacccaaagccaaccagcaaaagcaggacgacggccggggtctggtgcttcctggctacaagtacctcggacccttcaacggactcgacaagggggagcccgtcaacgcggcggacgcagcggccctcgagcacgacaaggcctacgaccagcagctcaaagcgggtgacaatccgtacctgcggtataaccacgccgacgccgagtttcaggagcgtctgcaagaagatacgtcttttgggggcaacctcgggcgagcagtcttccaggccaagaagcgggttctcgaacctctcggtctggttgaggaaggcgctaagacggctcctggaaagaagagaccggtagagccatcacctcagcgttcccccgactcctccacgggcatcggcaagaaaggccaccagcccgcgagaaagagactgaactttgggcagactggcgactcggagtcagtccccgaccctcaaccaatcggagaaccaccagcaggcccctctggtctgggatctggtacaatggctgcaggcggtggcgctccaatggcagacaataacgaaggcgccgacggagtgggtagttcctcaggaaattggcattgcgattccacatggctgggcgacagagtcatcaccaccagcacccgaacctgggccctgcccacctacaacaaccatctctacaagcaaatctccaacgggacatcgggaggaagcactaacgacaacacctactttggctacagcaccccctgggggtattttgacttcaacagattccactgccacttctcaccacgtgactggcagcgactcatcaacaataactggggattccggcccaagagactcaacttcaagctcttcaacatccaggtcaaggaggtcacgcagaatgaaggcaccaagaccatcgccaataaccttaccagcacgattcaggtgtttacggactcggaataccagctcccgtacgtccccggctctgcgcaccagggctgcctccctccgttcccggcggacgtcttcatgattcctcagtacgggtatctgaccctaaacaatggcagtcaggctgtgggccgttcctccttctactgcctggaatacttcccttctcaaatgctgaggacgggcaacaactttgaattcagctacaccttcgaggacgtgcctttccacagcagctacgcgcacagccagagcctggaccggctgatgaaccctctcatcgaccagtacctgtattacttatccagaactcagtccacaggaggaactcaaggtactcagcaattgttattttctcaagccgggcccgcaaacatgtcggctcaggccaagaactggctacctggaccgtgttaccgtcagcaacgagtttccacgacactgtcgcaaaacaacaacagcaattttgcttggaccggtgccaccaagtatcacctgaatggcagagactccctggttaatcccggcgttgccatggctacccacaaggacgacgaggagcgcttcttcccgtcaagcggagttctaatgtttggcaagcagggggctggaaaagacaatgtggactacagcagcgtgatgctcaccagcgaagaagaaattaaaactactaacccagtggctacagagcagtatggtgtggtggcagacaacctgcagcagaccaacggagctcccattgtgggaactgtcaacagccagggggccttacctggtatggtctggcaaaaccgggacgtgtacctgcagggccccatctgggccaaaattcctcacacggacggcaactttcatccttcgccgctgatgggaggctttggactgaaacacccgcctcctcagatcctggtgaaaaacactcctgttcctgcggatcctccgaccaccttcagccaggccaagctggcttcttttatcacgcagtacagcaccggacaggtcagcgtggaaatcgaatgggagctgcagaaagaaaacagcaagcgctggaacccagagattcagtatacttccaactactacaaatctacaaatgtggactttgctgtcaatactgagggtacttattcagagcctcgccccattggcactcgttatctcacccgtaatctgtaattgcttgttaatcaataaaccggt

SEQ ID NO: 4777 - protein, 738 aa, Adeno-associated virus
MAADGYLPDWLEDNLSEGIREWWDLKPGAPKPKANQQKQDDGRGLVLPGYKYLGPFNGLDKGEPVNAADAAALEHDKAYDQQLKAGDNPYLRYNHADAEFQERLQEDTSFGGNLGRAVFQAKKRVLEPLGLVEEGAKTAPGKKRPVEPSPQRSPDSSTGIGKKGHQPARKRLNFGQTGDSESVPDPQPIGEPPAGPSGLGSGTMAAGGGAPMADNNEGADGVGSSSGNWHCDSTWLGDRVITTSTRTWALPTYNNHLYKQISNGTSGGSTNDNTYFGYSTPWGYFDFNRFHCHFSPRDWQRLINNNWGFRPKRLNFKLFNIQVKEVTQNEGTKTIANNLTSTIQVFTDSEYQLPYVPGSAHQGCLPPFPADVFMIPQYGYLTLNNGSQAVGRSSFYCLEYFPSQMLRTGNNFEFSYTFEDVPFHSSYAHSQSLDRLMNPLIDQYLYYLSRTQSTGGTQGTQQLLFSQAGPANMSAQAKNWLPGPCYRQQRVSTTLSQNNNSNFAWTGATKYHLNGRDSLVNPGVAMATHKDDEERFFPSSGVLMFGKQGAGKDNVDYSSVMLTSEEEIKTTNPVATEQYGVVADNLQQTNGAPIVGTVNSQGALPGMVWQNRDVYLQGPIWAKIPHTDGNFHPSPLMGGFGLKHPPPQILVKNTPVPADPPTTFSQAKLASFITQYSTGQVSVEIEWELQKENSKRWNPEIQYTSNYYKSTNVDFAVNTEGTYSEPRPIGTRYLTRNL

SEQ ID NO: 4778 - DNA, 3123 bp, Adeno-associated virus
  source 1..3123: mol_type = unassigned DNA
gaattcgcccttggctgcgtcaactggaccaatgagaactttcccttcaacgattgcgtcgacaagatggtgatctggtgggaggagggcaagatgacggccaaggtcgtggagtccgccaaggccattctcggcggcagcaaggtgcgcgtggaccaaaagtgcaagtcgtccgcccagatcgaccccacccccgtgatcgtcacctccaacaccaacatgtgcgccgtgattgacgggaacagcaccaccttcgagcaccagcagccgttgcaggaccggatgttcaagttcgaactcacccgccgtctggagcacgactttggcaaggtgaccaagcaggaagtcaaagagttcttccgctgggcgcaggatcacgtgaccgaggtggcgcatgagttctacgtcagaaagggcggagccagcaaaagacccgcccccgatgacgcggatataagcgagcccaagcgggcctgcccctcagtcgcggatccatcgacgtcagacgcggaaggagctccggtggactttgccgacaggtaccaaaacaaatgttctcgtcacgcgggcatgctccagatgctgtttccctgcaaaacgtgcgagagaatgaatcagaatttcaacatttgcttcacgcacggggtcagagactgctcagaatgtttccccggtgcatcagaatctcaaccggtcgtcagaaaaaaaacgtatcagaaactgtgtgccattcatcatctgctggggcgggcacccgagattgcttgctcggcctgcgatctggtcaacgtggacctggacgactgtgtttctgagcaataaatgacttaaaccaggtatggctgccgatggttatcttccagattggcttgaggacaacctctctgagggcattcgcgagtggtgggacctgaaacctggagccccgaaacccaaagccaaccagcaaaagcaggacgacggccggggtctggtgcttcctggctacaagtacctcggacccttcaacggactcgacaagggggagcccgtcaacgcggcggacgcagcggccctcgagcacgacaaggcctacgaccagcagctcaaagcgggtgacaatccgtacctgcggtataaccacgccgacgccgagtttcaggagcgtctgcaagaagatacgtcttttgggggcaacctcgggcgagcagtcttccaggccaagaagcgggttctcgaacctctcggtctggttgaggaaggcgctaagacggctcctggaaagaagagaccggtagagccatcacctcagcgttcccccgactcctccacgggcatcggcaagaaaggccaccagcccgcgagaaagagactgaactttgggcagactggcgactcggagtcagtccccgaccctcaaccaatcggagaaccaccagcaggcccctctggtctgggatctggtacaatggctgcaggcggtggcgctccaatggcagacaataacgaaggcgccgacggagtgggtagttcctcaggaaattggcattgcgattccacatggctgggcgacagagtcatcaccaccagcacccgaacctgggccctgcccacctacaacaaccatctctacaagcaaatctccaacgggacatcgggaggaagcactaacgacaacacctactttggctacagcaccccctgggggtattttgacttcaacagattccactgccacttctcaccacgtgactggcagcgactcatcaacaataactggggattccggcccaagagactcaacttcaagctcttcaacatccaggtcaaggaggtcacgcagaatgaaggcaccaagaccatcgccaataaccttaccagcacgattcaggtgtttacggactcggaataccagctcccgtacgtcctcggctctgcgcaccagggctgcctccctccgttcccggcggacgtcttcatgattcctcagtacgggtatctgaccctaaacaatggcagtcaggctgtgggccgttcctccttctactgcctggaatacttcccttctcaaatgctgaggacgggcaacaactttgaattcagctacaccttcgaggacgtgcctttccacagcagctacgcgcacagccagagcctggaccggctgatgaaccctctcatcgaccagtacctgtattacttatccagaactcagtccacaggaggaactcaaggtactcagcaattgttattttctcaagccgggcccgcaaacatgtcggctcaggccaagaactggctacctggaccgtgttaccgtcagcaacgagtttccacgacactgtcgcaaaacaacaacagcaattttgcttggaccggtgccaccaagtatcacctgaatggcagagactccctggttaatcccggcgttgccatggctacccacaaggacgacgaggagcgcttcttcccgtcaagcggagttctaatgtttggcaagcagggggctggaaaagacaatgtggactacagcagcgtgatgctcaccagcgaagaagaaattaaaactactaacccagtggctacagagcagtatggtgtggtggcagacaacctgcagcagaccaacggagctcccattgtgggaactgtcaacagccagggggccttacctggtatggtctggcaaaaccgggacgtgtacctgcagggccccatctgggccaaaattcctcacacggacggcaactttcatccttcgccgctgatgggaggctttggactgaaacacccgcctcctcagatcctggtgaaaaacactcctgttcctgcggatcctccgaccaccttcagccaggccaagctggcttcttttatcacgcagtacagcaccggacaggtcagcgtggaaatcgaatgggagctgcagaaagaaaacagcaagcgctggaacccagagattcagtatacttccaactactacaaatctacaaatgtggactttgctgtcaatactgagggtacttattcagagcctcgccccattggcactcgttatctcacccgtaatctgtaattgcttgttaatcaataaaccggttaattcgtttcagttgaactttggtctctgcgaagggcgaattc

SEQ ID NO: 4779 - protein, 738 aa, Adeno-associated virus
MAADGYLPDWLEDNLSEGIREWWDLKPGAPKPKANQQKQDDGRGLVLPGYKYLGPFNGLDKGEPVNAADAAALEHDKAYDQQLKAGDNPYLRYNHADAEFQERLQEDTSFGGNLGRAVFQAKKRVLEPLGLVEEGAKTAPGKKRPVEPSPQRSPDSSTGIGKKGHQPARKRLNFGQTGDSESVPDPQPIGEPPAGPSGLGSGTMAAGGGAPMADNNEGADGVGSSSGNWHCDSTWLGDRVITTSTRTWALPTYNNHLYKQISNGTSGGSTNDNTYFGYSTPWGYFDFNRFHCHFSPRDWQRLINNNWGFRPKRLNFKLFNIQVKEVTQNEGTKTIANNLTSTIQVFTDSEYQLPYVLGSAHQGCLPPFPADVFMIPQYGYLTLNNGSQAVGRSSFYCLEYFPSQMLRTGNNFEFSYTFEDVPFHSSYAHSQSLDRLMNPLIDQYLYYLSRTQSTGGTQGTQQLLFSQAGPANMSAQAKNWLPGPCYRQQRVSTTLSQNNNSNFAWTGATKYHLNGRDSLVNPGVAMATHKDDEERFFPSSGVLMFGKQGAGKDNVDYSSVMLTSEEEIKTTNPVATEQYGVVADNLQQTNGAPIVGTVNSQGALPGMVWQNRDVYLQGPIWAKIPHTDGNFHPSPLMGGFGLKHPPPQILVKNTPVPADPPTTFSQAKLASFITQYSTGQVSVEIEWELQKENSKRWNPEIQYTSNYYKSTNVDFAVNTEGTYSEPRPIGTRYLTRNL

SEQ ID NO: 4780 - DNA, 3122 bp, Adeno-associated virus
  source 1..3122: mol_type = unassigned DNA
gaattcgccctttctacggctgcgtcaactggaccaatgagaactttcccttcaacgattgcgtcgacaagatggtgatctggtgggaggagggcaagatgacggccaaggtcgtggagtccgccaaggccattctcggcggcagcaaggtgcgtgtggaccaaaagtgcaagtcttccgcccagatcgatcccacccccgtgatcgtcacctccaacaccaacatgtgcgccgtgattgacgggaacagcgccaccttcgagcaccagcagccgttgcaggaccggatgttcaaatttgaactcacccgccgtctggagcatgactttggcaaggtgacgaagcaggaagtcaaagagttcttccgctgggcgcaggatcacgtgaccgaggtggcgcatgagttccacgtcagaaagggtggagccaacaagagacccgcccccgatgacgcggatataagcgagcccaagcgggcctgcccctcagtcgcggatccatcgacgtcagacgcggaaggagctccggtggactttgccgacaggtaccaaaacaaatgttctcgtcacgcgggcatgcttcagatgctgtttccctgcaagacatgcgagagaatgaatcagaatttcaacatttgcttcacgcacgggaccagagactgttcagaatgtttccccggcgtgtcagaatctcaaccggtcgtcagaaagaggacgtatcggaaactctgtgcgattcatcatctgctggggcgggctcccgagattgcttgctcggcctgcgatctggtcaacgtggacctggatgactgtgtttctgagcaataaatgacttaaaccaggtatggctgccgatggttatcttccagattggctcgaggacaacctctctgagggcattcgcgagtggtgggacttgaaacctggagccccgaaacccaaagccaaccagcaaaagcaggacgacggccggggtctggtgcttcctggctacaagtacctcggacccttcaacggactcgacaagggggagcccgtcaacgcggcggacgcagcggccctcgagcacgacaaagcctacgaccagcagctcaaagcgggtgacaatccgtacctgcggtataatcacgccgacgccgagtttcaggagcgtctgcaagaagatacgtcttttgggggcaacctcgggcgagcagtcttccaggccaagaagcgggttctcgaacctctcggtctggttgaggaaggcgctaagacggctcctggaaagaagagactggtagagcagtcgccacaagagccagactcctcctcgggcatcggcaagacaggccagcagcccgctaaaaagagactcaattttggtcagactggcgactcagagtcagtccccgacccacaacctctcggagaacctccagcagccccctcaggtctgggacctaatacaatggcttcaggcggtggcgctccaatggcagacaataacgaaggcgccgacggagtgggtaattcctcgggaaattggcattgcgattccacatggctgggggacagagtcatcaccaccagcacccgaacctgggccctgcccacctacaacaaccacctctacaagcaaatctccaacggcacctcgggaggaagcaccaacgacaacacctattttggctacagcaccccctgggggtattttgacttcaacagattccactgtcacttttcaccacgtgactggcaacgactcatcaacaacaattggggattccggcccaaaagactcaacttcaagctgttcaacatccaggtcaaggaagtcacgacgaacgaaggcaccaagaccatcgccaataatctcaccagcaccgtgcaggtctttacggactcggagtaccagttaccgtacgtgctaggatccgctcaccagggatgtctgcctccgttcccggcggacgtcttcacggttcctcagtacggctatttaactttaaacaatggaagccaagccctgggacgttcctccttctactgtctggagtatttcccatcgcagatgctgagaaccggcaacaactttcagttcagctacaccttcgaggacgtgcctttccacagcagctacgcgcacagccagagcctggacaggctgatgaatcccctcatcgaccagtacctgtactacctggtcagaacgcaaacgactggaactggagggacgcagactctggcattcagccaagcgggtcctagctcaatggccaaccaggctagaaattgggtgcccggaccttgctaccggcagcagcgcgtctccacgacaaccaaccagaacaacaacagcaactttgcctggacgggagctgccaagtttaagctgaacggccgagactctctaatgaatccgggcgtggcaatggcttcccacaaggatgacgacgaccgcttcttcccttcgagcggggtcctgatttttggcaagcaaggagccgggaacgatggagtggattacagccaagtgctgattacagatgaggaagaaatcaaggctaccaaccccgtggccacagaagaatatggagcagtggccatcaacaaccaggccgccaatacgcaggcgcagaccggactcgtgcacaaccagggggtgattcccggcatggtgtggcagaatagagacgtgtacctgcagggtcccatctgggccaaaattcctcacacggacggcaactttcacccgtctcccctgatgggcggctttggactgaagcacccgcctcctcaaattctcatcaagaacacaccggttccagcggacccgccgcttaccttcaaccaggccaagctgaactctttcatcacgcagtacagcaccggacaggtcagcgtggaaatcgagtgggagctgcagaaagaaaacagcaaacgctggaatccagagattcaatacacttccaactactacaaatctacaaatgtggactttgctgtcaacacggaaggagtttatagcgagcctcgccccattggcacccgttacctcacccgcaacctgtaattacatgttaatcaataaaccggttaattcgtttcagttgaactttggtctctgcgaagggcgaattc

SEQ ID NO: 4781 - protein, 736 aa, Adeno-associated virus
MAADGYLPDWLEDNLSEGIREWWDLKPGAPKPKANQQKQDDGRGLVLPGYKYLGPFNGLDKGEPVNAADAAALEHDKAYDQQLKAGDNPYLRYNHADAEFQERLQEDTSFGGNLGRAVFQAKKRVLEPLGLVEEGAKTAPGKKRLVEQSPQEPDSSSGIGKTGQQPAKKRLNFGQTGDSESVPDPQPLGEPPAAPSGLGPNTMASGGGAPMADNNEGADGVGNSSGNWHCDSTWLGDRVITTSTRTWALPTYNNHLYKQISNGTSGGSTNDNTYFGYSTPWGYFDFNRFHCHFSPRDWQRLINNNWGFRPKRLNFKLFNIQVKEVTTNEGTKTIANNLTSTVQVFTDSEYQLPYVLGSAHQGCLPPFPADVFTVPQYGYLTLNNGSQALGRSSFYCLEYFPSQMLRTGNNFQFSYTFEDVPFHSSYAHSQSLDRLMNPLIDQYLYYLVRTQTTGTGGTQTLAFSQAGPSSMANQARNWVPGPCYRQQRVSTTTNQNNNSNFAWTGAAKFKLNGRDSLMNPGVAMASHKDDDDRFFPSSGVLIFGKQGAGNDGVDYSQVLITDEEEIKATNPVATEEYGAVAINNQAANTQAQTGLVHNQGVIPGMVWQNRDVYLQGPIWAKIPHTDGNFHPSPLMGGFGLKHPPPQILIKNTPVPADPPLTFNQAKLNSFITQYSTGQVSVEIEWELQKENSKRWNPEIQYTSNYYKSTNVDFAVNTEGVYSEPRPIGTRYLTRNL

SEQ ID NO: 4782 - DNA, 3117 bp, Adeno-associated virus
  source 1..3117: mol_type = unassigned DNA
gaattcgcccttggctgcgtcaactggaccaatgagaactttcccttcaacgattgcgtcgacaagatggtgatctggtgggaggagggcaagatgacggccaaggtcgtggagtccgccaaggccattctcggcggcagcaaggtgcgtgtggaccaaaagtgcaagtcttccgcccagatcgatcccacccccgtgatcgtcacctccaacaccaacatgtgcgccgtgattgacgggaacagcaccaccttcgagcaccagcagccgttgcaggaccggatgttcaaatttgaactcacccgccgtctggagcatgactttggcaaggtgacgaagcaggaagtcaaagagttcttccgctgggcgcaggatcacgtgaccgaggtggcgcatgagttccacgtcagaaagggtggagccaacaagagacccgcccccgatgacgcggatataagcgagcccaagcgggcctgcccctcagtcgcggatccatcgacgtcagacgcggaaggagctccggtggactttgccgacaggtaccaaaacaaatgttctcgtcacgcgggcatgcttcagatgctgtttccctgcaagacatgcgagagaatgaatcagaatttcaacatttgcttcacgcacgggaccagagactgttcagaatgtttccccggcgtgtcagaatctcaaccggtcgtcagaaagaggacgtatcggaaactctgtgcgattcatcatctgctggggcgggctcccgagattgcttgctcggcctgcgatctggtcaacgtggacctggatgactgtgtttctgagcaataaatgacttaaaccaggtatggctgccgatggttatcttccagattggctcgaggacaacctctctgagggcattcgcgagtggtgggacttgaaacctggagccccgaaacccaaagccaaccagcaaaagcaggacgacggccggggtctggtgcttcctggctacaagtacctcggacccttcaacggactcgacaagggggagcccgtcaacgcggcggacgcagcggccctcgagcacgacaaagcctacgaccagcagctcaaagcgggtgacaatccgtacctgcggtataatcacgccgacgccgagtttcaggagcgtctgcaagaagatacgtcttttgggggcaacctcgggcgagcagtcttccaggccaagaagcgggttctcgaacctctcggtctggttgaggaaggcgctaagacggctcctggaaagaagagaccggtagagcagtcgccacaagagccagactcctcctcgggcatcggcaagacaggccagcagcccgctaaaaagagactcaattttggtcagactggcgactcagagtcagtccccgacccacaacctctcggagaacctccagcagccccctcaggtctgggacctaatacaatggcttcaggcggtggcgctccaatggcagacaataacgaaggcgccgacggagtgggtaattcctcgggaaattggcattgcgattccacatggctgggggacagagtcatcaccaccagcacccgaacctgggccctgcccacctacaacaaccacctctacaagcaaatctccaacggcacctcgggaggaagcaccaacgacaacacctattttggctacagcaccccctgggggtattttgacttcaacagattccactgtcacttttcaccacgtgactggcaacgactcatcaacaacaattggggattccggcccaaaagactcaacttcaagctgttcaacatccaggtcaaggaagtcacgacgaacgaaggcaccaagaccatcgccaataatctcaccagcaccgtgcgggtctttacggactcggagtaccagttaccgtacgtgctaggatccgctcaccagggatgtctgcctccgttcccggcggacgtcttcatggttcctcagtacggctatttaactttaaacaatggaagccaagccctgggacgttcctccttctactgtctggagtatttcccatcgcagatgctgagaaccggcaacaactttcagttcagctacaccttcgaggacgtgcctttccacagcagctacgcgcacagccagagcctggacaggctgatgaatcccctcatcgaccagtacctgtactacctggtcagaacgcaaacgactggaactggagggacgcagactctggcattcagccaagcgggtcctagctcaatggccaaccaggctagaaattgggtgcccggaccttgctaccggcagcagcgcgtctccacgacaaccaaccagagcaacaacagcaactttgcctggacgggagctgccaagtttaagctgaacggccgagactctctaatgaatccgggcgtggcaatggcttcccacaaggatgacgacgaccgcttcttcccttcgagcggggtcctgatttttggcaagcaaggagccgggaacgatggagtggattacagccaagtgctgattacagatgaggaagaaatcaaggctaccaaccccgtggccacagaagaatatggagcagtggccatcaacaaccaggccgccaatacgcaggcgcagaccggactcgtgcacaaccagggggtgattcccggcatggtgtggcagaatagagacgtgtacctgcagggtcccatctgggccaaaattcctcacacggacggcaactttcacccgtctcccctgatgggcggctttggactgaagcacccgcctcctcaaattctcatcaagaacacaccggttccagcggacccgccgcttaccttcaaccaggccaagctgaactctttcatcacgcagtacagcaccggacaggtcagcgtggaaatcgagtgggagctgcagaaagaaaacagcaaacgctggaatccagagattcaatacacttccaactactacaaatctacaaatgtggactttgctgtcaacacggaaggagtttatagcgagcctcgccccattggcacccgttacctcacccgcaacctgtaattacatgttaatcaataaaccggttaattcgtttcagttgaactttggtctctgcgaagggcgaattc

SEQ ID NO: 4783 - protein, 736 aa, Adeno-associated virus
MAADGYLPDWLEDNLSEGIREWWDLKPGAPKPKANQQKQDDGRGLVLPGYKYLGPFNGLDKGEPVNAADAAALEHDKAYDQQLKAGDNPYLRYNHADAEFQERLQEDTSFGGNLGRAVFQAKKRVLEPLGLVEEGAKTAPGKKRPVEQSPQEPDSSSGIGKTGQQPAKKRLNFGQTGDSESVPDPQPLGEPPAAPSGLGPNTMASGGGAPMADNNEGADGVGNSSGNWHCDSTWLGDRVITTSTRTWALPTYNNHLYKQISNGTSGGSTNDNTYFGYSTPWGYFDFNRFHCHFSPRDWQRLINNNWGFRPKRLNFKLFNIQVKEVTTNEGTKTIANNLTSTVRVFTDSEYQLPYVLGSAHQGCLPPFPADVFMVPQYGYLTLNNGSQALGRSSFYCLEYFPSQMLRTGNNFQFSYTFEDVPFHSSYAHSQSLDRLMNPLIDQYLYYLVRTQTTGTGGTQTLAFSQAGPSSMANQARNWVPGPCYRQQRVSTTTNQSNNSNFAWTGAAKFKLNGRDSLMNPGVAMASHKDDDDRFFPSSGVLIFGKQGAGNDGVDYSQVLITDEEEIKATNPVATEEYGAVAINNQAANTQAQTGLVHNQGVIPGMVWQNRDVYLQGPIWAKIPHTDGNFHPSPLMGGFGLKHPPPQILIKNTPVPADPPLTFNQAKLNSFITQYSTGQVSVEIEWELQKENSKRWNPEIQYTSNYYKSTNVDFAVNTEGVYSEPRPIGTRYLTRNL

SEQ ID NO: 4784 - DNA, 3121 bp, Adeno-associated virus
  source 1..3121: mol_type = unassigned DNA
gaattcgcccttctacggctgcgtcaactggaccaatgagaactttcccttcaacgattgcgtcgacaagatggtgatctggtgggaggagggcaagatgacggccaaggtcgtggagtccgccaaggccattctcggcggcagcaaggtgcgtgtggaccaaaagtgcaagtcttccgcccagatcgatcccacccccgtgatcgtcacctccaacaccaacatgtgcgccgtgattgacgggaacagcaccaccttcgagcaccagcagccgttgcaggaccggatgttcaaatttgaactcacccgccgtctggagcatgactttggcaaggtgacgaagcaggaagtcaaagagttcttccgctgggcgcaggatcacgtgaccgaggtggcgcatgagttccacgtcagaaagggtggcgccaacaagagacccgcccccgatgacgcggatataagcgagcccaagcgggcctgcccctcagtcgcggatccatcgacgtcagacgcggaaggagctccggtggactttgccgacaggtaccaaaacaaatgttctcgtcacgcgggcatgcttcagatgctgtttccctgcaagacatgcgagagaatgaatcagaatttcaacatttgcttcacgcacgggaccagagactgttcagaatgtttccccggcgtgtcagaatctcaaccggtcgtcagaaagaggacgtatcggaaactctgtgcgattcatcatctgctggggcgggctcccgagattgcttgctcggcctgcgatctggtcaacgtggacctggatgactgtgtttctgagcaataaatgacttaaaccaggtatggctgccgatggttatcttccagattggctcgaggacaacctctctgagggcattcgcgagtggtgggacttgaaacctggagccccgaaacccaaagccaaccagcaaaagcaggacgacggccggggtctggtgcttcctggctacaagtacctcggacccttcaacggactcgacaagggggagcccgtcaacgcggcggacgcagcggccctcgagcacgacaaagcctacgaccagcagctcaaagcgggtgacaatccgtacctgcggtataatcacgccgacgccgagtttcaggagcgtctgcaagaagatacgtcctttgggggcaacctcgggcgagcagtcttccaggccaagaagcgggttctcgaacctctcggtctggttgaggaaggcgctaagacggctcctggaaagaagagaccggtagagcagtcgccacaagagccagactcctcctcgggcatcggcaagacaggccagcagcccgctaaaaagagactcaattttggtcagactggcgactcagagtcagtccccgacccacaacctctcggagaacctccagcagccccctcaggtctgggacctaatacaatggcttcaggcggtggcgctccaatggcagacaataacgaaggcgccgacggagtgggtaattcctcgggaaattggcattgcgattccacatggctgggggacagagtcatcaccaccagcacccgaacctgggccctgcccacctacaacaaccacctctacaagcaaatctccaacggcacctcgggaggaagcaccaacgacaacacctattttggctacagcaccccctgggggtattttgacttcaacagattccactgtcacttttcaccacgtgactggcaacgactcatcaacaacaattggggattccggcccaaaagactcaacttcaagctgttcaacatccaggtcaaggaagtcacgacgaacgaaggcaccaagaccatcgccaataatctcaccagcaccgtgcaggtctttacggacttggagtaccagttaccgtacgtgctaggatccgctcaccagggatgtctgcctccgttcccggcggacgtcttcatggttcctcagtacggctatttaactttaaacaatggaagccaagccctgggacgttcctccttctactgtctggagtatttcccatcgcagatgccgagaaccggcaacaactttcagttcagctacaccttcgaggacgtgcctttccacagcagctacgcgcacagccagagcctggacaggctgatgaatcccctcatcgaccagtacctgtactacctggtcagaacgcaaacgactggaactggagggacgcagactctggcattcagccaagcgggtcctagctcaatggccaaccaggctagaaattgggtgcccggaccttgctaccggcagcagcgcgtctccacgacaaccaaccagaacaacaacagcaactttgcctggacgggagctgccaagtttaagctgaacggccgagactctctaatgaatccgggcgtggcaatggcttcccacaaggatgacgacgaccgcttcttcccttcgagcggggtcctgatttttggcaagcaaggagccgggaacgatggagtggattacagccaagtgctgattacagatgaggaagaaatcaaggctaccaaccccgtggccacagaagaatatggagcagtggccatcaacaaccaggccgccaatacgcaggcgcagaccggactcgtgcacaaccagggggtgattcccggcatggtgtggcagaatagagacgtgtacctgcagggtcccatctgggccaaaattcctcacacggacggcaactttcacccgtctcccctgatgggcggctttggactgaagcacccgcctcctcaaattctcatcaagaacacaccggttccagcggacccgccgcttaccttcaaccaggccaagctgaactctttcatcacgcagtacagcaccggacaggtcagcgtggaaatcgagtgggagctgcagaaagaaaacagcaaacgctggaatccagagattcaatacacttccaactactacaaatctacaaatgtggactttgctgtcaacacggaaggagtttatagcgagcctcgccccattggcacccgttacctcacccgcaacctgtaattacatgttaatcaataaaccggttaattcgtttcagttgaactttggtctctgcgaagggcgaattc

SEQ ID NO: 4785 - protein, 736 aa, Adeno-associated virus
MAADGYLPDWLEDNLSEGIREWWDLKPGAPKPKANQQKQDDGRGLVLPGYKYLGPFNGLDKGEPVNAADAAALEHDKAYDQQLKAGDNPYLRYNHADAEFQERLQEDTSFGGNLGRAVFQAKKRVLEPLGLVEEGAKTAPGKKRPVEQSPQEPDSSSGIGKTGQQPAKKRLNFGQTGDSESVPDPQPLGEPPAAPSGLGPNTMASGGGAPMADNNEGADGVGNSSGNWHCDSTWLGDRVITTSTRTWALPTYNNHLYKQISNGTSGGSTNDNTYFGYSTPWGYFDFNRFHCHFSPRDWQRLINNNWGFRPKRLNFKLFNIQVKEVTTNEGTKTIANNLTSTVQVFTDLEYQLPYVLGSAHQGCLPPFPADVFMVPQYGYLTLNNGSQALGRSSFYCLEYFPSQMPRTGNNFQFSYTFEDVPFHSSYAHSQSLDRLMNPLIDQYLYYLVRTQTTGTGGTQTLAFSQAGPSSMANQARNWVPGPCYRQQRVSTTTNQNNNSNFAWTGAAKFKLNGRDSLMNPGVAMASHKDDDDRFFPSSGVLIFGKQGAGNDGVDYSQVLITDEEEIKATNPVATEEYGAVAINNQAANTQAQTGLVHNQGVIPGMVWQNRDVYLQGPIWAKIPHTDGNFHPSPLMGGFGLKHPPPQILIKNTPVPADPPLTFNQAKLNSFITQYSTGQVSVEIEWELQKENSKRWNPEIQYTSNYYKSTNVDFAVNTEGVYSEPRPIGTRYLTRNL

SEQ ID NO: 4786 - DNA, 3122 bp, Adeno-associated virus
  source 1..3122: mol_type = unassigned DNA
gaattcgccctttctacggctgcgtcaactggaccaatgagaactttcccttcaacgattgcgtcgacaagatggtgatctggtgggaggagggcaagatgacggccaaggtcgtggagtccgccaaggccattctcggcggcagcaaggtgcgtgtggaccaaaagtgcaagtcttccgcccagatcgatcccacccccgtgatcgtcacctccaacaccaacatgtgcgccgtgattgacgggaacagcaccaccttcgagcaccagcagccgttgcaggaccggatgttcaaatttgaactcacccgccgtctggagcatgactttggcaaggtgacgaagcaggaagtcaaagggttcttccgctgggcgcaggatcacgtgaccgaggtggcgcatgagttccacgtgcgagcccaagcgggcctgcccctcagtcgcggatccatcgacgtcagaccagaaagggtggagccaacaagagacccgcccccgatgacgcggatataagcggaaggagctccggtggactttgccgacaggtaccaaaacaaatgttctcgtcacgcgggcatgcttcagatgctgtttccctgcaagacatgcgagagaatgaatcagaatttcaacatttgcttcacgcacgggaccagagactgttcagaatgtttccccggcgtgtcagaatctcaaccggtcgtcagaaagaggacgtatcggaaactctgtgcgattcatcatctgctggggcgggctcccgagattgcttgctcggcctgcgatctggtcaacgtggacctggatgactgtgtttctgagcaataaatgacttaaaccaggtatggctgccgatggttatcttccagattggctcgaggacaacctctctgagggcattcgcgagtggtgggacttgaaacctggagccccgaaacccaaagccaaccagcaaaagcaggacgacggccggggtctggtgcttcctggctacaagtacctcggacccttcaacggactcgacaagggggagcccgtcaacgcggcggacgcagcggccctcgagcacgacaaagcctacgaccagcagctcaaagcgggtgacaatccgtacctgcggtataatcacgccgacgccgagtttcaggagcgtctgcaagaagatacgtcttttgggggcaacctcgggcgagcagtcttccaggccaagaagcgggttctcgaacctctcggtctggttgaggaaggcgctaagacggctcctggaaagaagagaccggtagagcagtcgccacaagagccagactcctcctcgggcatcggcaagacaggccagcagcccgctaaaaagagactcaattttggtcagactggcgactcagagtcagtccccgacccacaacctctcggagaacctccagcagccccctcaggtctgggacctaatacaatggcttcaggcggtggcgctccaatggcagacaataacgaaggcgccgacggagtgggtaattcctcgggaaattggcattgcgattccacatggctgggggacagagtcatcaccaccagcacccgaacctgggccctgcccacctacaacaaccacctctacaagcaaatctccaacggcacctcgggaggaagcaccaacgacaacacctattttggctacagcaccccctgggggtattttgacttcaacagattccactgtcacttttcaccacgtgactggcaacgactcatcaacaacaattggggattccggcccaaaagactcaacttcaagctgttcaacatccaggtcaaggaagtcacgacgaacgaaggcaccaagaccatcgccaataatctcaccagcaccgtgcaggtctttacggactcggagtaccagttaccgtacgtgctaggatccgctcaccagggatgtctgcctccgttcccggcggacgtcttcatggttcctcagtacggctatttaactttaaacaatggaagccaagccctgggacgttcctccttctactgtctggagtatttcccatcgcagatgctgagaaccggcaacaactttcagttcagctacaccttcgaggacgtgcctttccacagcagctacgcgcacagccagagcctggacaggctgatgaatcccctcatcgaccagtacctgtactacctggtcagaacgcaaacgactggaactggagggacgcagactctggcattcagccaagcgggtcctagctcaatggccaaccaggctagaaattgggtgcccggaccttgctaccggcagcagcgcgtctccacgacaaccaaccagaacaacaacagcaactttgcctggacgggagctgccaagtttaagctgaacggccgagactctctaatgaatccgggcgtggcaatggcttcccacaaggatgacgacgaccgcttcttcccttcgagcggggtcctgatttttggcaagcaaggagccgggaacgatggagtggattacagccaagtgctgattacagatgaggaagaaatcaaggctaccaaccccgtggccacagaagaatatggagcagtggccatcaacaaccaggccgccaatacgcaggcgcagaccggactcgtgcacaaccagggggtgattcccggcatggtgtggcagaatagagacgtgtacctgcagggtcccatctgggccaaaattcctcacacggacggcaactttcacccgtctcccctgatgggcggctttggactgaagcacccgcctcctcaaattctcatcaagaacacaccggttccagcggacccgccgcttaccttcaaccaggccaagctgaactctttcatcacgcagtacagcaccggacaggtcagcgtggaaatcgagtgggagctgcagaaagaaaacagcaaacgctggaatccagagattcaatacacttccaactactacaaatctacaaatgtggactttgctgtcaacacggagggggtttatagcgagcctcgccccattggcacccgttacctcacccgcaacctgtaattacatgttaatcaataaaccggttaattcgtttcagttgaactttggtctctgcgaagggcgaattc

SEQ ID NO: 4787 - protein, 736 aa, Adeno-associated virus
MAADGYLPDWLEDNLSEGIREWWDLKPGAPKPKANQQKQDDGRGLVLPGYKYLGPFNGLDKGEPVNAADAAALEHDKAYDQQLKAGDNPYLRYNHADAEFQERLQEDTSFGGNLGRAVFQAKKRVLEPLGLVEEGAKTAPGKKRPVEQSPQEPDSSSGIGKTGQQPAKKRLNFGQTGDSESVPDPQPLGEPPAAPSGLGPNTMASGGGAPMADNNEGADGVGNSSGNWHCDSTWLGDRVITTSTRTWALPTYNNHLYKQISNGTSGGSTNDNTYFGYSTPWGYFDFNRFHCHFSPRDWQRLINNNWGFRPKRLNFKLFNIQVKEVTTNEGTKTIANNLTSTVQVFTDSEYQLPYVLGSAHQGCLPPFPADVFMVPQYGYLTLNNGSQALGRSSFYCLEYFPSQMLRTGNNFQFSYTFEDVPFHSSYAHSQSLDRLMNPLIDQYLYYLVRTQTTGTGGTQTLAFSQAGPSSMANQARNWVPGPCYRQQRVSTTTNQNNNSNFAWTGAAKFKLNGRDSLMNPGVAMASHKDDDDRFFPSSGVLIFGKQGAGNDGVDYSQVLITDEEEIKATNPVATEEYGAVAINNQAANTQAQTGLVHNQGVIPGMVWQNRDVYLQGPIWAKIPHTDGNFHPSPLMGGFGLKHPPPQILIKNTPVPADPPLTFNQAKLNSFITQYSTGQVSVEIEWELQKENSKRWNPEIQYTSNYYKSTNVDFAVNTEGVYSEPRPIGTRYLTRNL

SEQ ID NO: 4788 - DNA, 2370 bp, Adeno-associated virus
  source 1..2370: mol_type = unassigned DNA
gaattcgccctttctacggctgcgtcaactggaccaatgagaactttcccttcaacgattgcgtcgacaagatggtgatctggtgggaggagggcaagatgacggccaaggtcgtggagtccgccaaggccattctcggcggcagcaaggtgcgcgtggaccaaaagtgcaagtcgtccgcccagatcgaccccacccccgtgatcgtcacctccaacaccaacatgtgcgccgtgattgacgggaacagcaccaccttcgagcaccagcagccgttgcaggaccggatgttcaagttcgaactcacccgccgtctggagcacgactttggcaaggtgaccaagcaggaagtcaaagagttcttccgctgggcgcaggatcacgtgaccgaggtggcgcatgagttctacgtcagaaagggcggagccagcaaaagacccgcccccgatgacgcggatataagcgagcccaagcgggcctgcccctcagtcgcggatccatcgacgtcagacgcggaaggagctccggtggactttgccgacaggtaccaaaacaaatgttctcgtcacgcgggcatgcttcagacgctgtttccctgcaaaacgtgcgagagaatgaatcagaatttcaacatttgcttcacgcacggggtcagagactgctcagaatgtttccccggtgcatcagaatctcaaccggtcgtcagaaaaaaaacgtatcagaaactgtgtgccattcatcatctgctggggcgggcacccgagattgcttgctcggcctgcgatctggtcaacgtggacctggacgactgtgtttctgagcaataaatgacttaaaccaggtatggctgccgatggttatcttccagattggcttgaggacaacctctctgagggcattcgcgagtggtgggacctgaaacctggagccccgaaacccaaagccaaccagcaaaagcaggacgacggccggggtctggtgcttcctggctacaagtacctcggacccttcaacggactcgacaagggggagcccgtcaacgcggcggacgcagcggccctcgagcacgacaaggcctacgaccagcagctcaaagcgggtgacaatccgtacctgcggtataaccacgccgacgccgagtttcaggagcgtctgcaagaagatacgtcttttgggggcaacctcgggcgagcagtcttccaggccaagaagcgggttctcgaacctctcggtctggttgaggaaggcgctaagacggctcctggaaagaagagaccggtagagccatcacctcagcgttcccccgactcctccacgggcatcggcaagaaaggccaccagcccgcgagaaagagactgaactttgggcagactggcgactcggagtcagtccccgaccctcaaccaatcggagaaccaccagcaggcccctctggtctgggatctggtacaatggctgcaggcggtggcgctccaatggcagacaataacgaaggcgccgacggagtgggtagttcctcaggaaattggcattgcgattccacatggctgggcgacagagtcatcaccaccagcacccgaacctgggccctgcccacctacaacaaccatctctacaagcaaatctccaacgggacatcgggaggaagcactaacgacaacacctactttggctacagcaccccctgggggtattttgacttcaacagattccactgccacttctcaccacgtgactggcagcgactcatcaacaataactggggattccggcccaagagactcaacttcaagctcttcaacatccaggtcaaggaggtcacgcagaatgaaggcaccaagaccatcgccaataaccttaccagcacgattcaggtgtttacggactcggaataccagctcccgtacgtcctcggctctgcgcaccagggctgcctccctccgttcccggcggacgtcttcatgattcctcagtacgggtatctgaccctaaacaatggcagtcaggctgtgggccgttcctccttctactgcctggaatacttcccttctcaaatgctgaggacgggcaacaactttgaattcagctacaccttcgaggacgtgcctttccacagcagctacgcgcacagccagagcctggaccggctgatgaaccctctcatcgaccagtacctgtattacttatccagaactcagtccacaggaggaactcaaggtactcagcaattgttattttctcaagccgggcccgcaaacatgtyggctcaggccaagaactggctacctggaccgtgttaccgtcagcaacgagtttccacgacactgtcgcaaaacaacaacagcaattttgctggaccggtgccacca

SEQ ID NO: 4789 - protein, 738 aa, Adeno-associated virus; identical to SEQ ID NO: 4779

SEQ ID NO: 4790 - DNA, 2205 bp, Adeno-associated virus
  source 1..2205: mol_type = unassigned DNA
atgactgacggttaccttccagattggctagaggacaacctctctgaaggcgttcgagagtggtgggcgctgcaacctggagcccctaaacccaaggcaaatcaacaacatcaggacaacgctcggggtcttgtgcttccgggttacaaatacctcggacccggcaacggactcgacaagggggaacccgtcaacgcagcggacgcggcagccctcgagcacgacaaggcctacgaccagcagctcaaggccggtgacaacccctacctcaagtacaaccacgccgacgcggagttccagcagcggcttcagggcgacacatcgtttgggggcaacctcggcagagcagtcttccaggccaaaaagagggttcttgaacctcttggtctggttgagcaagcgggtgagacggctcctggaaagaagagaccgttgattgaatccccccagcagcccgactcctccacgggtatcggcaaaaaaggcaagcagccggctaaaaagaagctcgttttcgaagacgaaactggagcaggcgacggaccccctgagggatcaacttccggagccatgtctgatgacagtgagatgcgtgcagcagctggcggagctgcagtcgagggcggacaaggtgccgatggagtgggtaatgcctcgggtgattggcattgcgattccacctggtctgagggccacgtcacgaccaccagcaccagaacctgggtcttgcccacctacaacaaccacctctacaagcgactcggagagagcctgcagtccaacacctacaacggattctccaccccctggggatactttgacttcaaccgcttccactgccacttctcaccacgtgactggcagcgactcatcaacaacaactggggcatgcgacccaaagccatgcgggtcaaaatcttcaacatccaggtcaaggaggtcacgacgtcgaacggcgagacaacggtggctaataaccttaccagcacggttcagatctttgcggactcgtcgtacgaactgccgtacgtgatggatgcgggtcaagagggcagcctgcctccttttcccaacgacgtctttatggtgccccagtacggctactgtggactggtgaccggcaacacttcgcagcaacagactgacagaaatgccttctactgcctggagtactttccttcgcagatgctgcggactggcaacaactttgaaattacgtacagttttgagaaggtgcctttccactcgatgtacgcgcacagccagagcctggaccggctgatgaaccctctcatcgaccagtacctgtggggactgcaatcgaccaccaccggaaccaccctgaatgccgggactgccaccaccaactttaccaagctgcggcctaccaacttttccaactttaaaaagaactggctgcccgggccttcaatcaagcagcagggcttctcaaagactgccaatcaaaactacaagatccctgccaccgggtcagacagtctcatcaaatacgagacgcacagcactctggacggaagatggagtgccctgacccccggacctccaatggccacggctggacctgcggacagcaagttcagcaacagccagctcatctttgcggggcctaaacagaacggcaacacggccaccgtacccgggactctgatcttcacctctgaggaggagctggcagccaccaacgccaccgatacggacatgtggggcaacctacctggcggtgaccagagcaacagcaacctgccgaccgtggacagactgacagccttgggagccgtgcctggaatggtctggcaaaacagagacatttactaccagggtcccatttgggccaagattcctcataccgatggacactttcacccctcaccgctgattggtgggtttgggctgaaacacccgcctcctcaaatttttatcaagaacaccccggtacctgcgaatcctgcaacgaccttcagctctactccggtaaactccttcattactcagtacagcactggccaggtgtcggtgcagattgactgggagatccagaaggagcggtccaaacgctggaaccccgaggtccagtttacctccaactacggacagcaaaactctctgttgtgggctcccgatgcggctgggaaatacactgagcctagggctatcggtacccgctacctcacccaccacctgtaa

SEQ ID NO: 4791 - protein, 734 aa, Adeno-associated virus
MTDGYLPDWLEDNLSEGVREWWALQPGAPKPKANQQHQDNARGLVLPGYKYLGPGNGLDKGEPVNAADAAALEHDKAYDQQLKAGDNPYLKYNHADAEFQQRLQGDTSFGGNLGRAVFQAKKRVLEPLGLVEQAGETAPGKKRPLIESPQQPDSSTGIGKKGKQPAKKKLVFEDETGAGDGPPEGSTSGAMSDDSEMRAAAGGAAVEGGQGADGVGNASGDWHCDSTWSEGHVTTTSTRTWVLPTYNNHLYKRLGESLQSNTYNGFSTPWGYFDFNRFHCHFSPRDWQRLINNNWGMRPKAMRVKIFNIQVKEVTTSNGETTVANNLTSTVQIFADSSYELPYVMDAGQEGSLPPFPNDVFMVPQYGYCGLVTGNTSQQQTDRNAFYCLEYFPSQMLRTGNNFEITYSFEKVPFHSMYAHSQSLDRLMNPLIDQYLWGLQSTTTGTTLNAGTATTNFTKLRPTNFSNFKKNWLPGPSIKQQGFSKTANQNYKIPATGSDSLIKYETHSTLDGRWSALTPGPPMATAGPADSKFSNSQLIFAGPKQNGNTATVPGTLIFTSEEELAATNATDTDMWGNLPGGDQSNSNLPTVDRLTALGAVPGMVWQNRDIYYQGPIWAKIPHTDGHFHPSPLIGGFGLKHPPPQIFIKNTPVPANPATTFSSTPVNSFITQYSTGQVSVQIDWEIQKERSKRWNPEVQFTSNYGQQNSLLWAPDAAGKYTEPRAIGTRYLTHHL

SEQ ID NO: 4792 - DNA, 3128 bp, Adeno-associated virus
  source 1..3128: mol_type = unassigned DNA
gaattcgccctttctacggctgcgtcaactggaccaatgagaactttcccttcaacgattgcgtcgacaagatgttgatctggtgggaggagggcaagatgacggccaaggtcgtggagtccgccaaggccattctcggcggcagcaaagtgcgcgtggaccaaaagtgcaagccgtccgcccagatcgaccccacccccgtgatcgtcacctccaacaccaacatgtgcgccgtgattgacgggaacagcaccaccttcgagcaccagcagccgttgcgggaccggatgttcaagtttgaactcacccgccgtctggagcacgactttggcaaggtgacaaagcaggaagtcagagagttcttccgctgggcgcaggatcacgtgaccgaggtggcgcacgagttctacgtcagaaagggtggagccaacaagagacccgcccccgatgacgcggataaaagcgagcccaagcgggcctgcccctcagtcgcggatccatcgacgtcagacgcggaaggagctccggtggactttgccgacaggtaccaaaacaaatgttctcgtcacgcgggcatgcttcagatgctgtttccctgcaaaacatgcgagagaatgaatcagaatttcaacatttgcttcacgcacgggaccagagactgttcagaatgtttccccggcgtgtcagaatctcaaccggtcgtcagaaaaaagacgtatcggaaactctgtgcgattcatcatctgctggggcgggcacccgagattgcttgctcggcctgcgatctggtcaacgtggacctagatgactgtgtttctgagcaataaatgacttaaaccaggtatggctgccgatggttatcttccagattggctcgaggacaacctctctgagggcattcgcgagtggtgggacttgaaacctggagccccgaaacccaaagccaaccagcaaaagcaggacgacggccggggtctggtgcttcctggctacaagtacctcggacccttcaacggactcgacaagggggagcccgtcaacgcggcggacgcagcggccctcgagcacgacaaggcctacgaccagcagctcaaagcgggtgacaatccgtacctgcggtataaccacgccgacgccgagtttcaggagcgtctgcaagaagatacgtcttttgggggcaacctcgggcgagcagtcttccaggccaagaagcgggttctcgaacctctcggtctggttgaggaaggcgctaagacggctcctggaaagaagagaccggtagagccatcaccccagcgttctccagactcctctacgggcatcggcaagaaaggccagcagcccgcgaaaaagagactcaactttgggcagactggcgactcagagtcagtgcccgaccctcaaccaatcggagaaccccccgcaggcccctctggtctgggatctggtacaatggctgcaggcggtggcgctccaatggcagacaataacgaaggcgccgacggagtgggtagttcctcaggaaattggcattgcgattccacatggctgggcgacagagtcatcaccaccagcacccgaacctgggccctccccacctacaacaaccacctctacaagcaaatctccaacgggacttcgggaggaagcaccaacgacaacacctacttcggctacagcaccccctgggggtattttgactttaacagattccactgccacttctcaccacgtgactggcagcgactcatcaacaacaactggggattccggcccaagagactcaacttcaagctcttcaacatccaggtcaaggaggtcacgcagaatgaaggcaccaagaccatcgccaataaccttaccagcacgattcaggtctttacggactcggaataccagctcccgtacgtcctcggctctgcgcaccagggctgcctgcctccgttcccggcggacgtcttcatgattcctcagtacgggtacctgactctgaacaatggcagtcaggccgtgggccgttcctccttctactgcctggagtactttccttctcaaatgctgagaacgggcaacaactttgagttcagctaccagtttgaggacgtgccttttcacagcagctacgcgcacagccaaagcctggaccggctgatgaaccccctcatcgaccagtacctgtactacctgtctcggactcagtccacgggaggtaccgcaggaactcagcagttgctattttctcaggccgggcctaataacatgtcggctcaggccaaaaactggctacccgggccctgctaccggcagcaacgcgtctccacgacactgtcgcaaaataacaacagcaactgtaaatcccggtgtcgctatggcaacccacaaggacgacgaagagcgattttgcctggaccggtgccaccaagtatcatctgaatggcagagactctctgttttccgtccagcggagtcttaatgtttgggaaacagggagctggaaaagacaacgtggactatagcagcgttatgctaaccagtgaggaagaaattaaaaccaccaacccagtggccacggaacagtacggcgtggtggccgataacctgcaacagcaaaacgccgctcctattgtaggggccgtcaacagtcaaggagccttacctggcatggtctggcagaaccgggacgtgtacctgcagggtcctatctgggccaagattcctcacacggacggaaactttcatccctcgccgctgatgggaggctttggactgaaacacccgcctcctcagatcctgattaagaatacacctgttcccgcggatcctccaactaccttcagtcaagctaagctggcgtcgttcatcacgcagtacagcaccggacaggtcagcgtggaaattgaatgggagctgcagaaagaaaacagcaaacgctggaacccagagattcaatacacttccaactactacaaatctacaaatgtggacttcgctgttaacacagatggcacttattctgagcctcgccccattggcacccgttacctcacccgtaatctgtaattgctcgttaatcaataaaccggttgattcgtttcagttgaactttggtctctgcgaagggcgaattc

SEQ ID NO: 4793 - protein, 738 aa, Adeno-associated virus
MAADGYLPDWLEDNLSEGIREWWDLKPGAPKPKANQQKQDDGRGLVLPGYKYLGPFNGLDKGEPVNAADAAALEHDKAYDQQLKAGDNPYLRYNHADAEFQERLQEDTSFGGNLGRAVFQAKKRVLEPLGLVEEGAKTAPGKKRPVEPSPQRSPDSSTGIGKKGQQPAKKRLNFGQTGDSESVPDPQPIGEPPAGPSGLGSGTMAAGGGAPMADNNEGADGVGSSSGNWHCDSTWLGDRVITTSTRTWALPTYNNHLYKQISNGTSGGSTNDNTYFGYSTPWGYFDFNRFHCHFSPRDWQRLINNNWGFRPKRLNFKLFNIQVKEVTQNEGTKTIANNLTSTIQVFTDSEYQLPYVLGSAHQGCLPPFPADVFMIPQYGYLTLNNGSQAVGRSSFYCLEYFPSQMLRTGNNFEFSYQFEDVPFHSSYAHSQSLDRLMNPLIDQYLYYLSRTQSTGGTAGTQQLLFSQAGPNNMSAQAKNWLPGPCYRQQRVSTTLSQNNNSNFAWTGATKYHLNGRDSLVNPGVAMATHKDDEERFFPSSGVLMFGKQGAGKDNVDYSSVMLTSEEEIKTTNPVATEQYGVVADNLQQQNAAPIVGAVNSQGALPGMVWQNRDVYLQGPIWAKIPHTDGNFHPSPLMGGFGLKHPPPQILIKNTPVPADPPTTFSQAKLASFITQYSTGQVSVEIEWELQKENSKRWNPEIQYTSNYYKSTNVDFAVNTDGTYSEPRPIGTRYLTRNL

SEQ ID NO: 4794 - DNA, 3129 bp, Adeno-associated virus
  source 1..3129: mol_type = unassigned DNA
gaattcgccctttctacggctgcgtcaactggaccaatgagaactttcccttcaacgattgcgtcgacaagatggtgatctggtgggaggagggcaagatgacggccaaggtcgtggagtccgccaaggccattctcggcggcagcaaagtgcgcgtggaccaaaagtgcaagtcgtccgcccagatcgaccccacccccgtgatcgtcacctccaacaccaacatgtgcgccgtgattgacgggaacagcaccaccttcgagcaccagcagccgttgcaggaccggatgttcaagtttgaactcacccgccgtctggagcacgactttggcaaggtgacaaagcaggaagtcagagagttcttccgctgggcgcaggatcacgtgaccgaggtggcgcacgagttctacgtcagaaagggtggagccaacaagagacccgcccccgatgacgcggataaaagcgagcccaagcgggcctgcccctcagtcgcggatccatcgacgtcagacgcggaaggagctccggtggactttgccgacaggtaccaaaacaaatgttctcgtcacgcgggcatgcttcagatgctgtttccctgcaaaacatgcgagagaatgaatcagaatttcaacatttgcttcacgcacgggaccagagactgttcagaatgtttccccggcgtgtcagaatctcaaccggtcgtcagaaaaaagacgtatcggaaactctgtgcgattcatcatctgctgggggcgggcacccgagattgcttgctcggcctgcgatctggtcaacgtggacctagatgactgtgtttctgagcaataaatgacttaaaccaggtatggctgccgatggttatcttccagattggctcgaggacaacctctctgagggcattcgcgagtggtgggacttgaaacctggagccccgaaacccaaagccaaccagcaaaagcaggacgacggccggggtctggtgcttcctggctacaagtacctcggacccttcaacggactcgacaagggggagcccgtcaacgcggcggacgcagcggccctcgagcacgacaaggcctacgaccagcagctcaaagcgggtgacaatccgtacctgcggtataaccacgccgacgccgagtttcaggagcgtctgcaagaagatacgtcttttgggggcaacctcgggcgagcagtcttccaggccaagaagcgggttctcgaacctctcggtctggttgaggaaggcgctaagacggctcctggaaagaagagaccggtagagccatcaccccagcgttctccagactcctctacgggcatcggcaagaaaggccagcagcccgcgaaaaagagactcaactttgggcagactggcgactcagagtcagtgcccgaccctcaaccaatcggagaaccccccgcaggcccctctggtctgggatctggtacaatggctgcaggcggtggcgctccaatggcagacaataacgaaggcgccgacggagtgggtagttcctcaggaaattggcattgcgattccacatggctgggcgacagagtcatcaccaccagcacccgaacctgggccctccccacctacaacaaccacctctacaagcaaatctccaacgggacttcgggaggaagcaccaacgacaacacctacttcggctacagcaccccctgggggtattttgactttaacagattccactgccacttctcaccacgtgactggcagcgactcatcaacaacaactggggattccggcccaagagactcaacttcaagctcttcaacatccaggtcaaggaggtcacgcagaatgaaggcaccaagaccatcgccaataaccttaccagcacgattcaggtctttacggactcggaataccagctcccgtacgtcctcggctctgcgcaccagggctgcctgcctccgttcccggcggacgtcttcatgattcctcagtacgggtacctgactctgaacaatggcagtcaggccgtgggccgttcctccttctactgcctggagtactttccttctcaaatgctgagaacgggcaacaactttgagttcagctaccagtttgaggacgtgccttttcacagcagctacgcgcacagccaaagcctggaccggctgatgaaccccctcatcgaccagtacctgtactacctgtctcggactcagtccacgggaggtaccgcaggaactcagcagttgctattttctcaggccgggcctaataacatgtcggctcaggccaaaaactggctacccgggccctgctaccggcagcaacgcgtctccacgacactgtcgcaaaataacaacagcaactttgcctggaccggtgccaccaagtatcatctgaatggcagagactctctggtaaatcccggtgtcgctatggcaacccacaaggacgacgaagagcgattttttccgtccagcggagtcttaatgtttgggaaacagggagctggaaaagacaacgtggactatagcagcgttatgctaaccagtgaggaagaaattaaaaccaccaacccagtggccacagaacagtacggcgtggtggccgataacctgcaacagcaaaacgccgctcctattgtaggggccgtcaacagtcaaggagccttacctggcatggtctggcagaaccgggacgtgtacctgcagggtcctatctgggccaagattcctcacacggacggaaactttcatccctcgccgctgatgggaggctttggactgaaacacccgcctcctcagatcctgattaagaatacacctgttcccgcggatcctccaactaccttcagtcaagctaagctggcgtcgttcatcacgcagtacagcaccggacaggtcagcgtggaaattgaatgggagctgcagaaagaaaacagcaaacgctggaacccagagattcaatacacttccaactactacaaatctacaaatgtggactttgctgttaacacagatggcacttattctgagcctcgccccatcggcacccgttacctcacccgtaatctgtaattgcttgttaatcaataaaccggttgattcgtttcagttgaactttggtctctgcgaagggcgaattc

SEQ ID NO: 4795 - DNA, 3128 bp, Adeno-associated virus
  source 1..3128: mol_type = unassigned DNA
gaattcgccctttctacggctgcgtcaactggaccaatgagaactttcccttcaacgattgcgtcgacaagatggtgatctggtgggaggagggcaagatgacggccaaggtcgtggagtccgccaaggccattctcggcggcagcaaagtgcgcgtggaccaaaagtgcaagtcgtccgcccagatcgaccccacccccgtgatcgtcacctccaacaccaacatgtgcgccgtgattgacgggaacagcaccaccttcgagcaccagcagccgttgcaggaccggatgttcaagtttgaactcacccgccgtctggagcacgactttggcaaggtgacaaagcaggaagtcagagagttcttccgctgggcgcaggatcacgtgaccgaggtggcgcacgagttctacgtcagaaagggtggagccaacaagagacccgcccccgatgacgcggataaaagcgagcccaagcgggcctgcccctcagtcgcggatccatcgacgtcagacgcggaaggagctccggtggactttgccgacaggtaccaaaacaaatgttctcgtcacgcgggcatgcttcagatgctgtttccctgcaaaacatgcgagagaatgaatcagaatttcaacatttgcttcacgcacgggaccagagactgttcagaatgtttccccggcgtgtcagaatctcaaccggttgtcagaaaaaagacgtatcggaaactctgtgcgattcatcatctgctggggcgggcacccgagattgcttgctcggcctgcgatctggtcaacgtggacctagatgactgtgtttctgagcaataaatgacttaaaccaggtatggctgccgatggttatcttccagattggctcgaggacaacctctctgagggcattcgcgagtggtgggacttgaaacctggagccccgaaacccaaagccaaccagcaaaagcaggacgacggccggggtctggtgcttcctggctacaagtacctcggacccttcaacggactcgacaagggggagcccgtcaacgcggcggacgcagcggccctcgagcacgacaaggcctacgaccagcagctcaaagcgggtgacaatccgtacctgcggtataaccacgccgacgccgagtttcaggagcgtctgcaagaagatacgtcttttgggggcaacctcgggcgagcagtcttccaggccaagaagcgggttctcgaacctctcggtctggttgaggaaggcgctaagacggctcctggaaagaagagaccggtagagccatcaccccagcgttctccagactcctctacgggcatcggcaagaaaggccagcagcccgcgaaaaagagactcaactttgggcagactggcgactcagagtcagtgcccgaccctcaaccaatcggagaaccccccgcaggcccctctggtctgggatctggtacaatggctgcaggcggtggcgctccaatggcagacaataacgaaggcgccgacggagtgggtagttcctcaggaaattggcattgcgattccacatggctgggcgacagagtcatcaccaccagcacccgaacctgggccctccccacctacaacaaccacctctacaagcaaatctccaacgggacttcgggaggaagcaccaacgacaacacctacttcggctacagcaccccctgggggtattttgactttaacagattccactgccacttctcaccacgtgactggcagcgactcatcaacaacaactggggattccggcccaagagacccaacttcaagctcttcaacatccaggtcaaggaggtcacgcagaatgaaggcaccaagaccatcgccaataaccttaccagcacgattcaggtctttacggactcggaataccagctcccgtacgtcctcggctctgcgcaccagggctgcctgcctccgttcccggcggacgtcttcatgattcctcagtacgggtacctgactctgaacaatggcagtcaggccgtgggccgttcctccttctactgcctggagtactttccttctcaaatgctgagaacgggcaacaactttgagttcagctaccagtttgaggacgtgccttttcacagcagctacgcgcacagccaaagcctggaccggctgatgaaccccctcatcgaccagtacctgtactacctgtctcggactcagtccacgggaggtaccgcaggaactcagcagttgctattttctcaggccgggcctaataacatgtcggctcaggccaaaaactggctacccgggccctgctaccggcagcaacgcgtctccacgacactgtcgcaaaataacaacagcaactttgcctggaccggtgccaccaagtatcatctgaatggcagagactctctggtaaatcccggtgtcgctatggcaacccacaaggacgacgaagagcgattttttccgtccagcggagtcttaatgtttgggaaacagggagctggaaaagacaacgtggactatagcagcgttatgctaaccagtgaggaagaaattaaaaccaccaacccagtggccacagaacagtacggcgtggtggccgataacctgcaacagcaaaacgccgctcctattgtaggggccgtcaacagtcaaggagccttacctggcatggtctggcagaaccgggacgtgtacctgcagggtcctatctgggccaagattcctcacacggacggaaactttcatccctcgccgctgatgggaggctttggactgaaacacccgcctcctcagatcctgattaagaatacacctgttcccgcggatcctccaactaccttcagtcaagctaagctggcgtcgttcatcacgcagtacagcaccggacaggtcagcgtggaaattgaatgggagctgcagaaagaaaacagcaaacgctggaacccagagattcaatacacttccaactactacaaatctacaaatgtggactttgctgttaacacagatggcacttattctgagcctcgccccattggcacccgttacctcacccgtaatctgtaattgcttgttaatcaataaaccggttgattcgtttcagttgaactttggtctctgcgaagggcgaattc

SEQ ID NO: 4796 - protein, 738 aa, Adeno-associated virus
MAADGYLPDWLEDNLSEGIREWWDLKPGAPKPKANQQKQDDGRGLVLPGYKYLGPFNGLDKGEPVNAADAAALEHDKAYDQQLKAGDNPYLRYNHADAEFQERLQEDTSFGGNLGRAVFQAKKRVLEPLGLVEEGAKTAPGKKRPVEPSPQRSPDSSTGIGKKGQQPAKKRLNFGQTGDSESVPDPQPIGEPPAGPSGLGSGTMAAGGGAPMADNNEGADGVGSSSGNWHCDSTWLGDRVITTSTRTWALPTYNNHLYKQISNGTSGGSTNDNTYFGYSTPWGYFDFNRFHCHFSPRDWQRLINNNWGFRPKRPNFKLFNIQVKEVTQNEGTKTIANNLTSTIQVFTDSEYQLPYVLGSAHQGCLPPFPADVFMIPQYGYLTLNNGSQAVGRSSFYCLEYFPSQMLRTGNNFEFSYQFEDVPFHSSYAHSQSLDRLMNPLIDQYLYYLSRTQSTGGTAGTQQLLFSQAGPNNMSAQAKNWLPGPCYRQQRVSTTLSQNNNSNFAWTGATKYHLNGRDSLVNPGVAMATHKDDEERFFPSSGVLMFGKQGAGKDNVDYSSVMLTSEEEIKTTNPVATEQYGVVADNLQQQNAAPIVGAVNSQGALPGMVWQNRDVYLQGPIWAKIPHTDGNFHPSPLMGGFGLKHPPPQILIKNTPVPADPPTTFSQAKLASFITQYSTGQVSVEIEWELQKENSKRWNPEIQYTSNYYKSTNVDFAVNTDGTYSEPRPIGTRYLTRNL

SEQ ID NO: 4797 - protein, 738 aa, Adeno-associated virus
MAADGYLPDWLEDNLSEGIREWWDLKPGAPKPKANQQKQDDGRGLVLPGYKYLGPFNGLDKGEPVNAADAAALEHDKAYDQQLKAGDNPYLRYNHADAEFQERLQEDTSFGGNLGRAVFQAKKRVLEPLGLVEEAAKTAPGKKRPVEPSPQRSPDSSTGIGKKGQQPAKKRLNFGQTGDSESVPDPQPIGEPPAGPSGLGSGTMAAGGGAPMADNNEGADGVGSSSGNWHCDSTWLGDRVITTSTRTWALPTYNNHLYKQISNGTSGGSTNDNTYFGYSTPWGYFDFNRFHCHFSPRDWQRLINNNWGFRPKRLSFKLFNIQVKEVTQNEGTKTIANNLTSTIQVFTDSEYQLPYVLGSAHQGCLPPFPADVFMIPQYGYLTLNNGSQAVGRSSFYCLEYFPSQMLRTGNNFEFSYTFEDVPFHSSYAHSQSLDRLMNPLIDQYLYYLSRTQSTGGTQGTQQLLFSQAGPANMSAQAKNWLPGPCYRQQRVSTTLSQNNNSNFAWTGATKYHLNGRDSLVNPGVAMATHKDDEERFFPSSGVLMFGKQGAGRDNVDYSSVMLTSEEEIKTTNPVATEQYGVVADNLQQTNTGPIVGNVNSQGALPGMVWQNRDVYLQGPIWAKIPHTDGNFHPSPLMGGFGLKHPPPQILIKNTPVPADPPTTFSQAKLASFITQYSTGQVSVEIEWELQKENSKRWNPEIQYTSNYYKSTNVDFAVNTEGTYSEPRPIGTRYLTRNL

SEQ ID NO: 4798 - protein, 720 aa, Adeno-associated virus
MSFVDHPPDWLEEVGEGLREFLGLEAGPPKPKPNQQHQDQARGLVLPGYNYLGPGNGLDRGEPVNRADEVAREHDISYNEQLEAGDNPYLKYNHADAEFQEKLADDTSFGGNLGKAVFQAKKRVLEPFGLVEEGAKTAPTGKRIDDHFPKRKKARTEEDSKPSTSSDAEAGPSGSQQLQIPAQPASSLGADTMSAGGGGPLGDNNQGADGVGNASGDWHCDSTWMGDRVVTKSTRTWVLPSYNNHQYREIKSGSVDGSNANAYFGYSTPWGYFDFNRFHSHWSPRDWQRLINNYWGFRPRSLRVKIFNIQVKEVTVQDSTTTIANNLTSTVQVFTDDDYQLPYVVGNGTEGCLPAFPPQVFTLPQYGYATLNRDNTENPTERSSFFCLEYFPSKMLRTGNNFEFTYNFEEVPFHSSFAPSQNLFKLANPLVDQYLYRFVSTNNTGGVQFNKNLAGRYANTYKNWFPGPMGRTQGWNLGSGVNRASVSAFATTNRMELEGASYQVPPQPNGMTNNLQGSNTYALENTMIFNSQPANPGTTATYLEGNMLITSESETQPVNRVAYNVGGQMATNNQSSTTAPATGTYNLQEIVPGSVWMERDVYLQGPIWAKIPETGAHFHPSPAMGGFGLKHPPPMMLIKNTPVPGNITSFSDVPVSSFITQYSTGQVTVEMEWELKKENSKRWNPEIQYTNNYNDPQFVDFAPDSTGEYRTTRPIGTRYL

SEQ ID NO: 4799 - protein, 736 aa, Adeno-associated virus
MAADGYLPDWLEDNLSEGIREWWDLKPGAPKPKANQQKQDDGRGLVLPGYKYLGPFNGLDKGEPVNAADAAALEHDKAYDQQLKAGDNPYLRYNHADAEFQERLQEDTSFGGNLGRAVFQAKKRVLEPFGLVEEGAKTAPGKKRPVEQSPQEPDSSSGIGKTGQQPAKKRLNFGQTGDSESVPDPQPLGEPPATPAAVGPTTMASGGGAPMADNNEGADGVGNASGNWHCDSTWLGDRVITTSTRTWALPTYNNHLYKQISSASTGASNDNHYFGYSTPWGYFDFNRFHCHFSPRDWQRLINNNWGFRPKRLNFKLFNIQVKEVTTNDGVTTIANNLTSTVQVFSDSEYQLPYVLGSAHQGCLPPFPADVFMIPQYGYLTLNNGSQAVGRSSFYCLEYFPSQMLRTGNNFTFSYTFEDVPFHSSYAHSQSLDRLMNPLIDQYLYYLNRTQNQSGSAQNKDLLFSRGSPAGMSVQPKNWLPGPCYRQQRVSKTKTDNNNSNFTWTGASKYNLNGRESIINPGTAMASHKDDKDKFFPMSGVMIFGKESAGASNTALDNVMITDEEEIKATNPVATERFGTVAVNLQSSSTDPATGDVHVMGALPGMVWQDRDVYLQGPIWAKIPHTDGHFHPSPLMGGFGLKHPPPQILIKNTPVPANPPAEFSATKFASFITQYSTGQVSVEIEWELQKENSKRWNPEVQYTSNYAKSANVDFTVDNNGLYTEPRPIGTRYLTRPL

SEQ ID NO: 4800 - protein, 736 aa, Adeno-associated virus
MAADGYLPDWLEDNLSEGIREWWDLKPGAPKPKANQQKQDDGRGLVLPGYKYLGPFNGLDKGEPVNAADAAALEHDKAYDQQLKAGDNPYLRYNHADAEFQERLQEDTSFGGNLGRAVFQAKKRVLEPFGLVEEGAKTAPGKKRPVEQSPQEPDSSSGIGKTGQQPAKKRLNFGQTGDSESVPDPQPLGEPPATPAAVGPTTMASGGGAPMADNNEGADGVGNASGNWHCDSTWLGDRVITTSTRTWALPTYNNHLYKQISSASTGASNDNHYFGYSTPWGYFDFNRFHCHFSPRDWQRLINNNWGFRPKRLNFKLFNIQVKEVTTNDGVTTIANNLTSTVQVFSDSEYQLPYVLGSAHQGCLPPFPADVFMIPQYGYLTLNNGSQAVGRSSFYCLEYFPSQMLRTGNNFTFSYTFEDVPFHSSYAHSQSLDRLMNPLIDQYLYYLNRTQNQSGSAQNKDLLFSRGSPAGMSVQPKNWLPGPCYRQQRVSKTKTDNNNSNFTWTGASKYNLNGRESIINPGTAMASHKDDEDKFFPMSGVMIFGKESAGASNTALDNVMITDEEEIKATNPVATERFGTVAVNLQSSSTDPATGDVHVMGALPGMVWQDRDVYLQGPIWAKIPHTDGHFHPSPLMGGFGLKHPPPQILIKNTPVPANPPAEFSATKFASFITQYSTGQVSVEIEWELQKENSKRWNPEVQYTSNYAKSANVDFTVDNNGLYTEPRPIGTRYLTRPL

SEQ ID NO: 4801 - protein, 736 aa, Adeno-associated virus
MAADGYLPDWLEDNLSEGIREWWDLKPGAPKPKANQQKQDDGRGLVLPGYKYLGPFNGLDKGEPVNAADAAALEHDKAYDQQLKAGDNPYLRYNHADAEFQERLQEDTSFGGNLGRAVFQAKKRVLEPLGLVEEGAKTAPGKKRPVEQSPQEPDSSSGIGKTGQQPAKKRLNFGQTGDSESVPDPQPLGEPPATPAAVGPTTMASGGGAPMADNNEGADGVGNASGNWHCDSTWLGDRVITTSTRTWALPTYNNHLYKQISSASTGASNDNHYFGYSTPWGYFDFNRFHCHFSPRDWQRLINNNWGFRPKRLNFKLFNIQVKEVTTNDGVTTIANNLTSTVQVFSDSEYQLPYVLGSAHQGCLPPFPADVFMIPQYGYLTLNNGSQAVGRSSFYCLEYFPSQMLRTGNNFTFSYTFEDVPFHSSYAHSQSLDRLMNPLIDQYLYYLNRTQNQSGSAQNKDLLFSRGSPAGMSVQPKNWLPGPCYRQQRVSKTKTDNNNSNFTWTGASKYNLNGRESIINPGTAMASHKDDEDKFFPMSGVMIFGKESAGASNTALDNVMITDEEEIKATNPVATERFGTVAVNLQSSSTDPATGDVHVMGALPGMVWQDRDVYLQGPIWAKIPHTDGHFHPSPLMGGFGLKHPPPQILIKNTPVPANPPAEFSATKFASFITQYSTGQVSVEIEWELQKENSKRWNPEVQYTSNYAKSANVDFTVDNNGLYTEPRPIGTRYLTRPL

SEQ ID NO: 4802 - protein, 736 aa, Adeno-associated virus
MAADGYLPDWLEDNLSEGIREWWDLKPGAPKPKANQQKQDDGRGLVLPGYKYLGPFNGLDKGEPVNAADAAALEHDKAYDQQLKAGDNPYLRYNHADAEFQERLQEDTSFGGNLGRAVFQAKKRVLEPLGLVEEGAKTAPGKKRPVEQSPQEPDSSSGIGKTGQQPAKKRLNFGQTGDSESVPDPQPLGEPPATPAAVGPTTMASGGGAPMADNNEGADGVGNASGNWHCDSTWLGDRVITTSTRTWALPTYNNHLYKQISSASTGASNDNHYFGYSTPWGYFDFNRFHCHFSPRDWQRLINNNWGFRPKRLNFKLFNIQVKEVTTNDGVTTIANNLTSTVQVFSDSEYQLPYVLGSAHQGCLPPFPADVFMIPQYGYLTLNNGSQAVGRSSFYCLEYFPSQMLRTGNNFTFSYTFEDVPFHSSYAHSQSLDRLMNPLIDQYLYYLNRTQNQSGSAQNKDLLFSRGSPAGMSVQPKNWLPGPCYRQQRVSKTKTDNNNSNFTWTGASKYNLNGRESIINPGTAMASHKDDKDKFFPMSGVMIFGKESAGASNTALDNVMITDEEEIKATNPVATERFGTVAVNLQSSSTDPATGDVHVMGALPGMVWQDRDVYLQGPIWAKIPHTDGHFHPSPLMGGFGLKHPPPQILIKNTPVPANPPAEFSATKFASFITQYSTGQVSVEIEWELQKENSKRWNPEVQYTSNYAKSANVDFTVDNNGLYTEPRPIGTRYLTRPL

SEQ ID NO: 4803 - protein, 728 aa, Adeno-associated virus
MAADGYLPDWLEGNLSEGIREWWDLKPGAPKPKANQQKQDDGRGLVLPGYRYLGPFNGLDKGEPVNEADAAALEHDKAYDKQLEQGDNPYLKYNHADAEFQERLQEDTSFGGNLGRAVFQAKKRVLEPLGLVEEGAKTAPGKKRPIESPDSSTGIGKNGQPPAKKKLNFGQTGDSESVPDPQPLGEPPAAPSGLGSGTMAAGGGAPMADNNEGADGVGNASGNWHCDSTWLGDRVITTSTRTWALPTYNNHLYKQISSQSGATNDNHFFGYSTPWGYFDFNRFHCHFSPRDWQRLINNNWGFRPRKLRFKLFNIQVKEVTTNDGVTTIANNLTSTIQVFSDSEYQLPYVLGSAHQGCLPPFPADVFMIPQYGYLTLNNGSQSVGRSSFYCLEYFPSQMLRTGDNFEFSYTFEEVPFHSSYAHSQSLDRLMNPLIDQYLYYLARTQSTTGSTRELQFHQAGPNTMAEQSKNWLPGPCYRQQRLSKNIDSNNNSNFAWTGATKYHLNGRNSLTNPGVAMATNKDDEDQFFPINGVLVFGKTGAANKTTLENVLMTSEEEIKTTNPVATEEYGVVSSNLQSSTAGPQTQTVNSQGALPGMVWQNRDVYLQGPIWAKIPHTDGNFHPSPLMGGFGLKHPPPQILIKNTPVPANPPEVFTPAKFASFITQYSTGQVSVEIEWELQKENSKRWNPEIQYTSNYAKSNNVEFAVNNEGVYTEPRPIGTRYLTRNL

SEQ ID NO: 4804 - DNA, 2211 bp, Adeno-associated virus
  source 1..2211: mol_type = unassigned DNA
atggctgccgatggttatcttccagattggctcgaggacaaccttagtgaaggaattcgcgagtggtgggctttgaaacctggagcccctcaacccaaggcaaatcaacaacatcaagacaacgctcgaggtcttgtgcttccgggttacaaataccttggacccggcaacggactcgacaagggggagccggtcaacgcagcagacgcggcggccctcgagcacgacaaggcctacgaccagcagctcaaggccggagacaacccgtacctcaagtacaaccacgccgacgccgagttccaggagcggctcaaagaagatacgtcttttgggggcaacctcgggcgagcagtcttccaggccaaaaagaggcttcttgaacctcttggtctggttgaggaagcggctaagacggctcctggaaagaagaggcctgtagagcagtctcctcaggaaccggactcctccgcgggtattggcaaatcgggtgcacagcccgctaaaaagagactcaatttcggtcagactggcgacacagagtcagtcccagaccctcaaccaatcggagaacctcccgcagccccctcaggtgtgggatctcttacaatggcttcaggtggtggcgcaccagtggcagacaataacgaaggtgccgatggagtgggtagttcctcgggaaattggcattgcgattcccaatggctgggggacagagtcatcaccaccagcacccgaacctgggccctgcccacctacaacaatcacctctacaagcaaatctccaacagcacatctggaggatcttcaaatgacaacgcctacttcggctacagcaccccctgggggtattttgacttcaacagattccactgccacttctcaccacgtgactggcagcgactcatcaacaacaactggggattccggcctaagcgactcaacttcaagctcttcaacattcaggtcaaagaggttacggacaacaatggagtcaagaccatcgccaataaccttaccagcacggtccaggtcttcacggactcagactatcagctcccgtacgtgctcgggtcggctcacgagggctgcctcccgccgttcccagcggacgttttcatgattcctcagtacgggtatctgacgcttaatgatggaagccaggccgtgggtcgttcgtccttttactgcctggaatatttcccgtcgcaaatgctaagaacgggtaacaacttccagttcagctacgagtttgagaacgtacctttccatagcagctacgctcacagccaaagcctggaccgactaatgaatccactcatcgaccaatacttgtactatctctcaaagactattaacggttctggacagaatcaacaaacgctaaaattcagtgtggccggacccagcaacatggctgtccagggaagaaactacatacctggacccagctaccgacaacaacgtgtctcaaccactgtgactcaaaacaacaacagcgaatttgcttggcctggagcttcttcttgggctctcaatggacgtaatagcttgatgaatcctggacctgctatggccagccacaaagaaggagaggaccgtttctttcctttgtctggatctttaatttttggcaaacaaggaactggaagagacaacgtggatgcggacaaagtcatgataaccaacgaagaagaaattaaaactactaacccggtagcaacggagtcctatggacaagtggccacaaaccaccagagtgcccaagcacaggcgcagaccggctgggttcaaaaccaaggaatacttccgggtatggtttggcaggacagagatgtgtacctgcaaggacccatttgggccaaaattcctcacacggacggcaactttcacccttctccgctgatgggagggtttggaatgaagcacccgcctcctcagatcctcatcaaaaacacacctgtacctgcggatcctccaacggccttcaacaaggacaagctgaactctttcatcacccagtattctactggccaagtcagcgtggagatcgagtgggagctgcagaaggaaaacagcaagcgctggaacccggagatccagtacacttccaactattacaagtctaataatgttgaatttgctgttaatactgaaggtgtatatagtgaaccccgccccattggcaccagatacctgactcgtaatctgtaa

SEQ ID NO: 4805 - protein, 736 aa, Adeno-associated virus
MAADGYLPDWLEDNLSEGIREWWALKPGAPQPKANQQHQDNARGLVLPGYKYLGPGNGLDKGEPVNAADAAALEHDKAYDQQLKAGDNPYLKYNHADAEFQERLKEDTSFGGNLGRAVFQAKKRLLEPLGLVEEAAKTAPGKKRPVEQSPQEPDSSAGIGKSGAQPAKKRLNFGQTGDTESVPDPQPIGEPPAAPSGVGSLTMASGGGAPVADNNEGADGVGSSSGNWHCDSQWLGDRVITTSTRTWALPTYNNHLYKQISNSTSGGSSNDNAYFGYSTPWGYFDFNRFHCHFSPRDWQRLINNNWGFRPKRLNFKLFNIQVKEVTDNNGVKTIANNLTSTVQVFTDSDYQLPYVLGSAHEGCLPPFPADVFMIPQYGYLTLNDGSQAVGRSSFYCLEYFPSQMLRTGNNFQFSYEFENVPFHSSYAHSQSLDRLMNPLIDQYLYYLSKTINGSGQNQQTLKFSVAGPSNMAVQGRNYIPGPSYRQQRVSTTVTQNNNSEFAWPGASSWALNGRNSLMNPGPAMASHKEGEDRFFPLSGSLIFGKQGTGRDNVDADKVMITNEEEIKTTNPVATESYGQVATNHQSAQAQAQTGWVQNQGILPGMVWQDRDVYLQGPIWAKIPHTDGNFHPSPLMGGFGMKHPPPQILIKNTPVPADPPTAFNKDKLNSFITQYSTGQVSVEIEWELQKENSKRWNPEIQYTSNYYKSNNVEFAVNTEGVYSEPRPIGTRYLTRNL

SEQ ID NO: 4806 - DNA, 2460 bp, Adeno-associated virus
  source 1..2460: mol_type = unassigned DNA
ggtaattcctccggaaattggcattgcgattccacatggctgggcgaccgagtcattaccaccagcacccggacttgggccctgcccacctacaacaaccacctctacaagcaaatctccagccaatcgggtgccaccaacgacaaccactacttcggctacagcaccccttgggggtattttgatttcaacagattccactgccatttctcaccacgtgactggcagcgactcatcaacaacaactggggattcatggctgccgatggttatcttccagattggctcgaggacactctctctgaaggaatcagacagtggtggaagctcaaacctggcccaccaccgccgaaacctaaccaacaacaccgggacgacagtaggggtcttgtgcttcctgggtacaagtacctcggacccttcaacggactcgacaaaggagagccggtcaacgaggcagacgccgcggccctcgagcacgacaaagcctacgaccaccagctcaagcaaggggacaacccgtacctcaaatacaaccacgcggacgctgaatttcaggagcgtcttcaagaagatacgtctttcgggggcaacctcgggcgagcagtcttccaggccaaaaagagggtactcgagcctcttggtctggttgaggaagctgttaagacggctcctggaaaaaagagacctatagagcagtctcctgcagaaccggactcttcctcgggcatcggcaaatcaggccagcagcccgctaagaaaagactcaattttggtcagactggcgacacagagtcagtcccagaccctcaaccaatcggagaaccccccgcagccccctctggtgtgggatctaatacaatggcttcaggcggtggggcaccaatggcagacaataacgaaggcgccgacggagtgggtaattcctcgggaaattggcattgcgattccacatggatgggcgacagagttatcaccaccagcacaagaacctgggccctccccacctacaataatcacctctacaagcaaatctccagcgaatcgggagccaccaacgacaaccactacttcggctacagcaccccctgggggtattttgactttaacagattccactgtcacttctcaccacgtgactggcagcgactcatcaacaacaactggggatttagacccaagaaactcaatttcaagctcttcaacatccaagtcaaggaggtcacgcagaatgatggaaccacgaccatcgccaataaccttaccagcacggtgcaggtcttcacagactctgagtaccagctgccctacgtcctcggttcggctcaccagggctgccttccgccgttcccagcagacgtcttcatgattcctcagtacggctacttgactctgaacaatggcagccaagcggtaggacgttcttcattctactgtctagagtattttccctctcagatgctgaggacgggaaacaacttcaccttcagctacacttttgaagacgtgcctttccacagcagctacgcgcacagccagagtctggatcggctgatgaatcctctcattgaccagtacctgtattacctgagcaaaactcagggtacaagtggaacaacgcagcaatcgagactgcagttcagccaagctgggcctagctccatggctcagcaggccaaaaactggctaccgggacccagctaccgacagcagcgaatgtctaagacggctaatgacaacaacaacagtgaatttgcttggactgcagccaccaaatattacctgaatggaagaaattctctggtcaatcccgggcccccaatggccagtcacaaggacgatgaggaaaagtatttccccatgcacggaaatctcatctttggaaaacaaggcacaggaactaccaatgtggacattgaatcagtgcttattacagacgaagaagaaatcagaacaactaatcctgtggctacagaacaatacggacaggttgccaccaaccatcagagtcagaacaccacagcttcctatggaagtgtggacagccagggaatcttacctggaatggtgtggcaggaccgcgatgtctatcttcaaggtcccatttgggccaaaactcctcacacggacggacactttcatccttctccgctcatgggaggctttggactgaaacaccctcctccccagatcctgatcaaaaacacacctgtgccagcgaatcccgcgaccactttcactcctggaaagtttgcttcgttcattacccagtattccaccggacaggtcagcgtggaaatagagtgggagctgcagaaagaaaacagcaaacgctggaacccagaaattcagtacacctccaactacaacaagtcggtgaatgtggagtttaccgtggacgcaaacggtgtttattctgaaccccgccctattggcactcgttaccttacccggaacttg

SEQ ID NO: 4807 - DNA, 3123 bp, Adeno-associated virus
  source 1..3123: mol_type = unassigned DNA
gaattcgccctttctacggctgcgtcaactggaccaatgaaaactttcccttcaacgattgcgtcgacaagatggtgatctggtgggaggagggaaagatgaccgccaaggtcgtggaatctgccaaagccattctgggtggaggcaaggttcgtgtggaccagaaatgcaagtcttcggcccagatcgacccgactccggtgattgtcacctctaacaccaacatgtgcgccgtgattgacggaaactcgaccaccttcgagcaccagcagccgttgcaagaccggatgttcaaatttgaacttacccgccgtttggatcatgactttgggaaggtcaccaagcaggaagtcaaagactttttccggtgggctcaagatcacgtgactgaggtggagcatgagttctacgtcaaaaagggtggagccaagaaaaggcccgcccccgatgatgtatatataaatgagcccaagcgggcgcgcgagtcagttgcgcagccatcgacgtcagacgcggaagcttcgataaactacgcggacaggtaccaaaacaaatgttctcgtcacgtgggcatgaatctgatgctgtttccctgtcgacaatgcgaaagaatgaatcagaattcaaatatctgcttcacacacgggcaaaaagactgtttggaatgctttcccgtgtcagaatctcaacccgtttctgtcgtcagaaaaacgtatcagaaactttgttacattcatcatatcatgggaaaagtaccagacgcctgcactgcctgcgacctggtaaatgtggacttggatgactgtatttctgagcaataaatgacttaaatcaggtatggctgctgacggttatcttccagattggctcgaggacactctctctgaaggaatcagacagtggtggaagctcaaacctggcccaccaccgccgaaacctaaccaacaacaccgggacgacagtaggggtcttgtgcttcctgggtacaagtacctcggacccttcaacggactcgacaaaggagagccggtcaacgaggcagacgccgcggccctcgagcacgacaaagcctacgaccaccagctcaagcaaggggacaacccgtacctcaaatacaaccacgcggacgctgaatttcaggagcgtcttcaagaagatacgtctttcgggggcaacctcgggcgagcagtcttccaggccaaaaagagggtactcgagcctcttggtctggttgaggaagctgttaagacggctcctggaaaaaagagacctatagagcagtctcctgcagaaccggactcttcctcgggcatcggcaaatcaggccagcagcccgctaagaaaagactcaattttggtcagactggcgacacagagtcagtcccaggccctcaaccaatcggagaaccccccgcagccccctctggtgtgggatctaatacaatggcttcaggcggtggggcaccaatggcagacaataacgaaggcgccgacggagtgggtaattcctcgggaaattggcattgcgattccacatggatgggcgacagagttatcaccaccagcacaagaacctgggccctccccacctacaataatcacctctacaagcaaatctccagcgaatcgggagccaccaacgacaaccactacttcggctacagcaccccctgggggtattttgactttaacagattccactgtcacttctcaccacgtgactggcagcgactcatcaacaacaactggggatttagacccaagaaactcaatttcaagctcttcaacatccaagtcaaggaggtcacgcagaatgatggaaccacgaccatcgccaataaccttaccagcgcggtgcaggtcttcacagactctgagtaccagctgccctacgtcctcggttcggctcaccagggctgccttccgccgttcccagcagacgtcttcatgattcctcagtacggctacttgactctgaacaatggcagccaagcggtaggacgttcttcattctactgtctagagtattttccctctcagatgctgaggacgggaaacaacttcaccttcagctacacttttgaagacgtgcctttccacagcagctacgcgcacagccagagtctggatcggctgatgaatcctctcattgaccagtacctgtattacctgagcaaaactcagggtacaagtggaacaacgcagcaatcgagactgcagttcagccaagctgggcctagctccatggctcagcaggccaaaaactggctaccgggacccagctaccgacagcagcgaatgtctaagacggctaatgacaacaacaacagtgaatttgcttggactgcagccaccaaatattacctgaatggaagaaattctctggtcaatcccgggcccccagtggccagtcacaaggacgatgaggaaaagtatttccccatgcacggaaatctcatctttggaaaacaaggcacaggaactaccaatgtggacattgaatcagtgcttattacagacgaagaagaaatcagaacaactaatcctgtggctacagaacaatacggacaggttgccaccaaccatcagagtcagaacaccacagcttcctatggaagtgtggacagccagggaatcttacctggaatggtgtggcaggaccgcgatgtctatcttcaaggtcccatttgggccaaaactcctcacacggacggacactttcatccttctccgctcatgggaggctttggactgaaacaccctcctccccagatcctgatcaaaaacacacctgtgccagcgaatcccgcgaccactttcactcctggaaagtttgcttcgttcattacccagtattccacctgacaggtcagcgtggaaatagagtgggagctgcagaaagaaaacagcaaacgctggaacccagaaattcagtacacctccaactacaacaagtcggtgaatgtggagtttaccgtggacgcaaacggtgtttattctgaaccccgccctattggcactcgttaccttacccggaacttgtaatttcctgttaatgaataagccgatttatgcgtttcagttgaactttggtctctgcgaagggcgaattcgtttaaacct

SEQ ID NO: 4808 - protein, 735 aa, Adeno-associated virus
MAADGYLPDWLEDTLSEGIRQWWKLKPGPPPPKPNQQHRDDSRGLVLPGYKYLGPFNGLDKGEPVNEADAAALEHDKAYDHQLKQGDNPYLKYNHADAEFQERLQEDTSFGGNLGRAVFQAKKRVLEPLGLVEEAVKTAPGKKRPIEQSPAEPDSSSGIGKSGQQPAKKRLNFGQTGDTESVPGPQPIGEPPAAPSGVGSNTMASGGGAPMADNNEGADGVGNSSGNWHCDSTWMGDRVITTSTRTWALPTYNNHLYKQISSESGATNDNHYFGYSTPWGYFDFNRFHCHFSPRDWQRLINNNWGFRPKKLNFKLFNIQVKEVTQNDGTTTIANNLTSAVQVFTDSEYQLPYVLGSAHQGCLPPFPADVFMIPQYGYLTLNNGSQAVGRSSFYCLEYFPSQMLRTGNNFTFSYTFEDVPFHSSYAHSQSLDRLMNPLIDQYLYYLSKTQGTSGTTQQSRLQFSQAGPSSMAQQAKNWLPGPSYRQQRMSKTANDNNNSEFAWTAATKYYLNGRNSLVNPGPPVASHKDDEEKYFPMHGNLIFGKQGTGTTNVDIESVLITDEEEIRTTNPVATEQYGQVATNHQSQNTTASYGSVDSQGILPGMVWQDRDVYLQGPIWAKTPHTDGHFHPSPLMGGFGLKHPPPQILIKNTPVPANPATTFTPGKFASFITQYSTGQVSVEIEWELQKENSKRWNPEIQYTSNYNKSVNVEFTVDANGVYSEPRPIGTRYLTRNL

SEQ ID NO: 4809 - DNA, 3123 bp, Adeno-associated virus
  source 1..3123: mol_type = unassigned DNA
gaattcgccctttctacggctgcgtcaactggaccaatgaaaactttcccttcaacgattgcgtcgacaagatggtgatctggtgggaggagggaaagatgaccgccaaggtcgtggaatctgccaaagccattctgggtggaagcaaggttcgtgtggaccagaaatgcaagtcttcggcccagatcgacccgactccggtgattgtcacctctaacaccaacatgtgcgccgtgattgacggaaactcgaccaccttcgagcaccagcagccgttgcaagaccggatgttcaaatttgaacttacccgccgtttggatcatgactttgggaaggtcaccaagcaggaagtcaaagactttttccggtgggctcaagatcacgtgactgaggtggagcatgagttctacgtcaaaaagggtggagccaagaaaaggcccgcccccgatgatgtatatataaatgagcccaagcgggcgcgcgagtcagttgcgcagccatcgacgtcagacgcggaagcttcgataaactacgcgggcaggtaccaaaacaaatgttctcgtcacgtgggcatgaatctgatgctgtttccctgtcgacaatgcgaaagaatgaatcagaattcaaatatctgcttcacacacgggcaaaaagactgtttggaatgctttcccgtgtcagaatctcaacccgtttctgtcgtcagaaaaacgtatcagaaactttgttacattcatcatatcatgggaaaagaaccagacgcctgcactgcctgcgacctggtaaatgtggacttggatgactgtatttctgagcaataaatgacttaaatcaggtatggctgctgacggttatcttccagattggctcgaggacactctctctgaaggaatcagacagtggtggaagctcaaacctggcccaccaccgccgaaacctaaccaacaacaccgggacgacagtaggggtcttgtgcttcctgggtacaagtacctcggacccttcaacggactcgacaaaggagagccggtcaacgaggcagacgccgcggccctcgagcacgacaaagcctacgaccaccagctcaagcaaggggacaacccgtacctcaaatacaaccacgcggacgctgaatttcaggagcgtcttcaagaagatacgtctttcgggggcaacctcgggcgagcagtcttccaggccaaaaagagggtactcgagcctcttggtctggttgaggaagctgttaagacggctcctggaaaaaagagacctatagagcagtctcctgcagaaccggactcttcctcgggcatcggcgaatcaggccagcagcccgctaagaaaagactcaattttggtcagactggcgacacagagtcagtcccagaccctcaaccaatcggagaaccccccgcagccccctctggtgtgggatctaatacaatggcttcaggcggtggggcaccaatggcagacgataacgaaggcgccgacggagtgggtaattcctcgggaaattggcattgcgattccacatggatgggcgacagagttatcaccaccagcacaagaacctgggccctccccacctacaataatcacctctacaagcaaatctccagcgaatcgggagccaccaacgacaaccactacttcggctacagcaccccctgggggtattttgactttaacagattccactgtcacttctcaccacgtgactggcagcgactcatcaacaacaactggggatttagacccaagaaactcaatttcaagctcttcaacatccaagtcaaggaggtcacgcagaatgatggaaccacgaccatcgccaataaccttaccagcacggtgcaggtcttcacagactctgagtaccagctgccctacgtcctcggttcggctcaccagggctgccttccgccgttcccagcagacgtcttcatgattcctcagtacggctacttgactctgaacaatggcagccaagcggtaggacgttcttcattctactgtctagagtattttccctctcagatgctgaggacgggaaacaacttcaccttcagctacacttttgaagacgtgcctttccacagcagctacgcgcacagccagagtctggatcggctgatgaatcctctcattgaccagtacctgtattacctgagcaaaactcagggtacaagtggaacaacgcagcaatcgagactgcagttcagccaagctgggcctagctccatggctcagcaggccaaaaactggctaccgggacccagctaccgacagcagcgaatgtctaagacggctaatgacaacaacaacagtgaatttgcttggactgcagccaccaaatattacctgaatggaagaaattctctggtcaatcccgggcccccaatggccagtcacaaggacgatgaggaaaagtatttccccatgcacggaaatctcatctttggaaaacaaggcacaggaactaccaatgtggacattgaatcagtgcttattacagacgaagaagaaatcagaacaactaatcctgtggctacagaacaatacggacaggttgccaccaaccatcagagtcaggacaccacagcttcctatggaagtgtggacagccagggaatcttacctggaatggtgtggcaggaccgcgatgtctatcttcaaggtcccatttgggccaaaactcctcacacggacggacactttcatccttctccgctcatgggaggctttggactgaaacaccctcctccccagatcctgatcaaaaacacacctgtgccagcgaatcccgcgaccactttcactcctggaaagtttgcttcgttcattacccagtattccaccggacaggtcagcgtggaaatagagtgggagctgcagaaagaaaacagcaaacgctggaacccagaaattcagtacacctccaactacaacaagtcggtgaatgtggagtttaccgtggacgcaaacggtgtttattctgaaccccgccctattggcactcgttaccttacccggaacttgtaatttcctgttaatgaataaaccgatttatgcgtttcagttgaactttggtctctgcgaagggcgaattcgcggccgcta

SEQ ID NO: 4810 - protein, 735 aa, Adeno-associated virus
MAADGYLPDWLEDTLSEGIRQWWKLKPGPPPPKPNQQHRDDSRGLVLPGYKYLGPFNGLDKGEPVNEADAAALEHDKAYDHQLKQGDNPYLKYNHADAEFQERLQEDTSFGGNLGRAVFQAKKRVLEPLGLVEEAVKTAPGKKRPIEQSPAEPDSSSGIGESGQQPAKKRLNFGQTGDTESVPDPQPIGEPPAAPSGVGSNTMASGGGAPMADDNEGADGVGNSSGNWHCDSTWMGDRVITTSTRTWALPTYNNHLYKQISSESGATNDNHYFGYSTPWGYFDFNRFHCHFSPRDWQRLINNNWGFRPKKLNFKLFNIQVKEVTQNDGTTTIANNLTSTVQVFTDSEYQLPYVLGSAHQGCLPPFPADVFMIPQYGYLTLNNGSQAVGRSSFYCLEYFPSQMLRTGNNFTFSYTFEDVPFHSSYAHSQSLDRLMNPLIDQYLYYLSKTQGTSGTTQQSRLQFSQAGPSSMAQQAKNWLPGPSYRQQRMSKTANDNNNSEFAWTAATKYYLNGRNSLVNPGPPMASHKDDEEKYFPMHGNLIFGKQGTGTTNVDIESVLITDEEEIRTTNPVATEQYGQVATNHQSQDTTASYGSVDSQGILPGMVWQDRDVYLQGPIWAKTPHTDGHFHPSPLMGGFGLKHPPPQILIKNTPVPANPATTFTPGKFASFITQYSTGQVSVEIEWELQKENSKRWNPEIQYTSNYNKSVNVEFTVDANGVYSEPRPIGTRYLTRNL

SEQ ID NO: 4811 - DNA, 3113 bp, Adeno-associated virus
  source 1..3113: mol_type = unassigned DNA
gaattcgccctttctacggctgcgtcaactggaccaatgaaaactttcccttcaacgattgcgtcgacaagatggtgatctggtgggaggagggaaagatgaccgccaaggtcgtggaatctgccaaagccattctgggtggaagcaaggttcgtgtggaccagaaatgcaagtcttcggcccagatcgacccgactccggtgattgtcacctctaacaccaacatgtgcgccgtgattgacggaaactcgaccaccttcgagcaccagcagccgttgcaagaccggatgttcaaatttgaacttacccgccgtttggatcatgactttgggaaggtcaccaagcaggaagtcaaagactttttccggtgggctcaagatcacgtgactgaggtggagcatgagttctacgtcaaaaagggtggagccaagaaaaggcccgcccccgatgatgtatatataaatgagcccaagcgggcgcgcgagtcagttgcgcagccatcgacgtcagacgcggaagcttcgataaactacgcggacaggtaccaaaacaaatgttctcgtcacgtgggcatgaatctgatgctgtttccctgtcgacaatgcgaaagaatgaatcagaattcaaatatctgcttcacacacgggcaaaaagactgtttggaatgctttcccgtgtcagaatctcaacccgttcctgtcgtcagaaaaacgtatcagaaactttgttacattcatcatatcatgggaaaagtaccagacgcctgcactgcctgcgacctggtaaatgtggacttggatgactgtatttctgagcaataaatgacttaaatcaggtatggctgctgacggttatcttccagattggctcgaggacactctctctgaaggaatcagacagtggtggaagctcaaacctggcccaccaccgccgaaacctaaccaacaacaccgggacgacagtaggggtcttgtgcttcctgggtacaagtacctcggacccttcaacggactcgacaaaggagagccggtcaacgaggcagacgccgcggccctcgagcacgacaaagcctacgaccaccagctcaagcaaggggacaacccgtacctcaaatacaaccacgcggacgctgaatttcaggagcgtcttcaagaagatacgtctttcgggggcaacctcgggcgagcagtcttccaggccaaaaagagggtactcgagcctcttggtctggttgaggaagctgttaagacggctcctggaaaaaagagacctatagagcagtctcctgcagaaccggactcttcctcgggcatcggcaaatcaggccagcagcccgctaagaaaagactcaattttggtcagactggcgacacagagtcagtcccagaccctcaaccaatcggagaaccccccgcagccccctctggtgtgggatctaatacaatggcttcaggcggtggggcaccaatggcagacaataacgaaggcgccgacggagtgggtaattcctcgggaaattggcattgcgattccacatggatgggcgacagagttatcaccaccagcacaagaacctgggccctccccacctacaataatcacctctacaagcaaatctccagcgaatcgggagccaccaacgacaaccactacttcggctacagcaccccctgggggtattttgactttaacagattccactgtcacttctcaccacgtgactggcagcgactcatcaataacaactggggatttagacccaagaaactcaatttcaagctcttcaacatccaagtcaaggaggtcacgcagaatgatggaaccacgaccatcgccaataaccttaccagcacggtgcaggtcttcacagactctgagtaccagctgccctacgtcctcggttcggctcaccagggctgccttccgccgttcccagcagacgtcttcatgattcctcagtacggctacttgactctgaacaatggcagccaagcggtaggacgttcttcattctactgtctagagtattttccctctcagatgctgaggacgggaaacaacttcaccttcagctacacttttgaagacgtgcctttccacagcagctacgcgcacagccagagtctggatcggctgatgaatcctctcattgaccagtacctgtattacctgagcaaaactcagggtacaagtggaacaacgcagcaatcgagactgcagttcaaccaagctgggcctagctccatggctcagcaggccaaaaactggctaccgggacccagctaccgacagcagcgaatgtctaagacggctaatgacaacaacaacagtgaatttgcttggactgcagccaccaaatattacccgaatggaagaaattctctggtcaatcccgggcccccaatggccagtcacaaggacgatgaggaaaagtatttccccatgcacggaaatctcatctttggaaaacaaggcacaggaactaccaatgtggacattgaatcagtgcttattacagacgaagaagaaatcagaacgactaatcctgtggctacagaacaatacggacaggttgccaccaaccgtcagagtcagaacaccacagcttcctatggaagtgtggacagccagggaatcttacctggaatggtgtggcaggaccgcgatgtctatcttcaaggtcccatttgggccaaaactcctcacacggacggacactttcatccttctccgctcatgggaggctttggactgaaacaccctcctccccagatcctgatcaaaaacacacctgtgccagcgaatcccgcgaccactttcactcctggaaagtttgcttcgttcattacccagtattccaccggacaggtcagcgtggaaatagagtgggagctgcagaaagaaaacagcaaacgctggaacccggaaattcagtacacctccaactacaacaagtcggtgaatgtggagtttaccgtggacgcaaacggtgtttattctgaaccccgccctattggcactcgttaccttacccggaacttgtaatttcctgttaatgaataaaccgatttatgcgtttcagttgaactttggtctctgcgaagggcgaattc

SEQ ID NO: 4812 - protein, 735 aa, Adeno-associated virus
MAADGYLPDWLEDTLSEGIRQWWKLKPGPPPPKPNQQHRDDSRGLVLPGYKYLGPFNGLDKGEPVNEADAAALEHDKAYDHQLKQGDNPYLKYNHADAEFQERLQEDTSFGGNLGRAVFQAKKRVLEPLGLVEEAVKTAPGKKRPIEQSPAEPDSSSGIGKSGQQPAKKRLNFGQTGDTESVPDPQPIGEPPAAPSGVGSNTMASGGGAPMADNNEGADGVGNSSGNWHCDSTWMGDRVITTSTRTWALPTYNNHLYKQISSESGATNDNHYFGYSTPWGYFDFNRFHCHFSPRDWQRLINNNWGFRPKKLNFKLFNIQVKEVTQNDGTTTIANNLTSTVQVFTDSEYQLPYVLGSAHQGCLPPFPADVFMIPQYGYLTLNNGSQAVGRSSFYCLEYFPSQMLRTGNNFTFSYTFEDVPFHSSYAHSQSLDRLMNPLIDQYLYYLSKTQGTSGTTQQSRLQFNQAGPSSMAQQAKNWLPGPSYRQQRMSKTANDNNNSEFAWTAATKYYPNGRNSLVNPGPPMASHKDDEEKYFPMHGNLIFGKQGTGTTNVDIESVLITDEEEIRTTNPVATEQYGQVATNRQSQNTTASYGSVDSQGILPGMVWQDRDVYLQGPIWAKTPHTDGHFHPSPLMGGFGLKHPPPQILIKNTPVPANPATTFTPGKFASFITQYSTGQVSVEIEWELQKENSKRWNPEIQYTSNYNKSVNVEFTVDANGVYSEPRPIGTRYLTRNL

SEQ ID NO: 4813 - DNA, 3122 bp, Adeno-associated virus
  source 1..3122: mol_type = unassigned DNA
agcggccgcgaattcgccctttctacggctgcgtcaactggaccaatgaaaactttcccttcaacgattgcgtcgacaagatggtgatctggtgggaggagggaaagatgaccgccaaggtcgtggaatctgccaaagccattctgggtggaagcaaggttcgtgtggaccagaaatgcaggtcttcggcccagatcgacccgactccggtgattgtcacctctaacaccaacatgtgcgccgtgattgacggaaactcgaccaccttcgagcaccagcagccgttgcaagaccggatgttcaaatttgaacttacccgccgtttggatcatgactttgggaaggtcaccaagcaggaagtcaaagactttttccggtgggctcaagatcacgtgactgaggtggagcatgagttctacgtcaaaaagggtggagccaagaaaaggcccgcccccgatgatgtatatataaatgagcccaagcgggcgcgcgagtcagttgcgcagccatcgacgtcagacgcggaagcttcgataaactacgcggacaggtaccaaaacaaatgttctcgtcacgtgggcatgaatctgatgctgtttccctgtcgacaatgcgaaagaatgaatcagaattcaaatatctgcttcacacacgggcaaaaagactgtttggaatgctttcccgtgtcagaatctcaacccgtttctgtcgtcagaaaaacgtatcagaaactttgttacattcatcatatcatgggaaaagtaccagacgcctgcactgcctgcgacctggtaaatgtggacttggatgactgtatttctgagcaataaatgacttaaatcaggtatggctgctgacggttatcttccagattggctcgaggacactctctctgaaggaatcagacagtggtggaagctcaaacctggcccaccaccgccgaaacctaaccaacaacaccgggacgacagtaggggtcttgtgcttcctgggtacaagtacctcggacccttcaacggactcgacaaaggagagccggtcaacgaggcagacgccgcggccctcgagcacgacaaagcctacgaccaccagctcaagcaaggggacaacccgtacctcaaatacaaccacgcggacgctgaatttcaggagcgtcttcaagaagatacgtctttcgggggcaacctcgggcgagcagtcttccaggccaaaaagagggtactcgagcctcttggtctggttgaggaagctgttaagacggctcctggaaaaaagagacctatagagcagtctcctgcagaaccggactcttcctcgggcatcggcaaatcaggccagcagcccgctaagaaaagactcaattttggtcagactggcgacacagagtcagtcccagaccctcaaccaatcggagaaccccccgcagccccctctggtgtgggatctaatacaatggcttcaggcggtggggcaccaatggcagacaataacgaaggcgccgacggagtgggtaattcctcgggaaattggcattgcgattccacatggatgggcgacagagttatcaccaccagcacaagaacctgggccctccccacctacaataatcgcctctacaagcaaatctccagcgaatcgggagccaccaacgacaaccactacttcggctacagcaccccctgggggtattttgactttaacagattccactgtcacttctcaccacgtgactggcagcgactcatcaacaacaactggggatttagacccaagaaactcaatttcaagctcttcaacatccaagtcaaggaggtcacgcagaatgatggaaccacgaccatcgccaataaccttaccagcacggtgcaggtcttcacagactctgagtaccagctgccctacgtcctcggttcggctcaccagggctgccttccgccgttcccagcagacgtcttcatgattcctcagtacggctacttgactctgaacaatggcagccaagcggtaggacgttcttcattctactgtctagagtattttccctctcagatgctgaggacgggaaacaacttcaccttcagctacacttttgaagacgtgcctttccacagcagctacgcgcacagccagagtctggatcggctgatgaatcctctcattgaccagtacctgtattacctgagcaaaactcagggtacaagtggaacaacgcagcaatcgagactgcagttcagccaagctgggcctagctccatggctcagcaggccaaaaactggctaccgggacccagctaccgacagcagcgaatgtctaagacggctaatgacaacaacaacagtgaatttgcttggactgcagccaccaaatattacctgaatggaagaaattctctggtcaatcccgggcccccaatggccagtcacaaggacgatgaggaaaagtatttccccatgcacggaaatctcatctttggaaaacaaggcacaggaactaccaatgtggacattgaatcagtgcttattacagacgaagaagaaatcagaacaactaatcctgtggctacagaacaatacggacaggttgccaccaaccatcagagtcagaacaccacagcttcctatggaagtgtggacagccagggaatcttacctggaatggtgtggcaggaccgcgatgtctatcttcaaggtcccatttgggccaaaactcctcacacggacggacactttcatccttctccgctcatgggaggctttggactgaaacaccctcctccccagatcctgatcaaaaacacacctgtgccagcgaatcccgcgaccactttcactcctggaaagtttgcttcgttcattacccagtattccaccggacaggtcagcgtggaaatagagtgggagctgcagaaagaaaacagcaaacgctggaacccagaaattcagtacacctccaactacaacaagtcggtgaatgtggagtttaccgtggacgcaaacggtgtttattctgaaccccgccctattggcactcgttaccttacccggaacttgtaatttcctgttaatgaataaaccgatttatgcgtttcagttgaactttggtctctgcgaagggcgaattc

SEQ ID NO: 4814 - protein, 735 aa, Adeno-associated virus
MAADGYLPDWLEDTLSEGIRQWWKLKPGPPPPKPNQQHRDDSRGLVLPGYKYLGPFNGLDKGEPVNEADAAALEHDKAYDHQLKQGDNPYLKYNHADAEFQERLQEDTSFGGNLGRAVFQAKKRVLEPLGLVEEAVKTAPGKKRPIEQSPAEPDSSSGIGKSGQQPAKKRLNFGQTGDTESVPDPQPIGEPPAAPSGVGSNTMASGGGAPMADNNEGADGVGNSSGNWHCDSTWMGDRVITTSTRTWALPTYNNRLYKQISSESGATNDNHYFGYSTPWGYFDFNRFHCHFSPRDWQRLINNNWGFRPKKLNFKLFNIQVKEVTQNDGTTTIANNLTSTVQVFTDSEYQLPYVLGSAHQGCLPPFPADVFMIPQYGYLTLNNGSQAVGRSSFYCLEYFPSQMLRTGNNFTFSYTFEDVPFHSSYAHSQSLDRLMNPLIDQYLYYLSKTQGTSGTTQQSRLQFSQAGPSSMAQQAKNWLPGPSYRQQRMSKTANDNNNSEFAWTAATKYYLNGRNSLVNPGPPMASHKDDEEKYFPMHGNLIFGKQGTGTTNVDIESVLITDEEEIRTTNPVATEQYGQVATNHQSQNTTASYGSVDSQGILPGMVWQDRDVYLQGPIWAKTPHTDGHFHPSPLMGGFGLKHPPPQILIKNTPVPANPATTFTPGKFASFITQYSTGQVSVEIEWELQKENSKRWNPEIQYTSNYNKSVNVEFTVDANGVYSEPRPIGTRYLTRNL

SEQ ID NO: 4815 - protein, 733 aa, Adeno-associated virus
MAADGYLPDWLEDNLSEGIREWWDLKPGAPKPKANQQKQDDGRGLVLPGYKYLGPFNGLDKGEPVNAADAAALEHDKAYDQQLKAGDNPYLRYNHADAEFQERLQEDTSFGGNLGRAVFQAKKRVLEPLGLVEEGAKTAPGKKRPLESPQEPDSSSGIGKKGKQPAKKRLNFEEDTGAGDGPPEGSDTSAMSSDIEMRAAPGGNAVDAGQGSDGVGNASGDWHCDSTWSEGKVTTTSTRTWVLPTYNNHLYLRLGTTSNSNTYNGFSTPWGYFDFNRFHCHFSPRDWQRLINNNWGLRPKAMRVKIFNIQVKEVTTSNGETTVANNLTSTVQIFADSSYELPYVMDAGQEGSLSPFPNDVFMVPQYGYCGIVTGENQNQTDRNAFYCLEYFPSQMLRTGNNFEMAYNFGKVPFHSMYAYSQSPDRLMNPLLDQYLWHLQSTTSGETLNQGNAATTFGKIRSGDFAFYRKNWLPGPCVKQQRLSKTASQNYKIPASGGNALLKYDTHYTLNNRWSNIAPGPPMATAGPSDGDFSNAQLIFPGPSVTGNTTTSANNLLFTSEEEIAATNPRDTDMFGQIADNNQNATTAPITGNVTAMGVLPGMVWQNRDIYYQGPIWAKIPHADGHFHPSPLIGGFGLKHPPPQIFIKNTPVPANPATTFTAARVDSFITQYSTGQVAVQIEWEIEKERSKRWNPEVQFTSNYGNQSSMLWAPDTTGKYTEPRVIGSRYLTNHL

SEQ ID NO: 4816 - protein, 733 aa, Adeno-associated virus
MAADGYLPDWLEDNLSEGIREWWDLKPGAPKLKANQQKQDDGRGLVLPGYKYLGPFHGLDKGEPVNAADAAALEHDKAYDQQLKAGDNPYLRYNHADAEFQERLQEDTSFGGNLGRAVFQAKKRVLEPLGLVEEGAKTAPGKKRPLESPQEPDSSSGIGKKGKQPAKKRLNFEEDTGAGDGPPEGSDTSAMSSDIEMRAAPGGNAVDAGQGSDGVGNASGDWHCDSTWSEGKVTTTSTRTWVLPTYNNHLYLRLGTTSNSNTYNGFSTPWGYFDFNRFHCHFSPRDWQRLINNNWGLRPKAMRVKIFNIQVKEVTTSNGETTVANNLTSTVQIFADSSYELPYVMDAGQEGSLPPFPNDVFMVPQYGYCGIVTGENQNQTDRNAFYCLEYFPSQMLRTGNNFEMAYNFEKVPFHSMYAHSQSLDRLMNPLLDQYLWHLQSTTSGETLNQGNAATTFGKIRSGDFAFYRKNWLPGPCVKQQRFSKTASQNYKIPASGGNALLKYDTHYTLNNRWSNIAPGPPMATAGPSDGDFSNAQLIFPGPSVTGNTTTSANNLLFTSEGEIAATNPRDTDMFGQIADNNQNATTAPITGNVTAMGVLPGMVWQNRDIYYQGPIWAKIPHADGHFHPSPLIGGFGLKHPPPQIFIKNTPVPANPATTFTAARVDSFITQYSTGQVAVQIEWEIEKERSKRRNPEVQFTSNYGNQSSMLWAPDTTGKYTEPRVIGSRYLTNHL

SEQ ID NO: 4817 - protein, 733 aa, Adeno-associated virus
MAADGYLPDWLEDNLSEGIREWWDLKPGAPKPKANQQKQDDGRGLVLPGYEYLGPFNGLDKGEPVNAADAAALEHDKAYDQQLKAGDNPYLRYNHADAEFQERLQEDTSFGGNLGRAVFQAKKRVLEPLGLVEEGAKTAPGKKRPLESPQEPDSSSGIGKKGKQPAKKRLNFEEDTGAGDGPPEGSDTSAMSSDIEMRAAPGGNAVDAGQGSDGVGNASGDWHCDSTWSEGKVTTTSTRTWVLPTYNNHLYLRLGTTSNSNTYNGFSTPWGYFDFNRFHCHFSPRDWQRLINNNWGLRPKAMRVKIFNIQVKEVTTSNGETTVANNLTSTVQIFADSSYELPYVMDAGQEGSLPPFPNDVFMVPQYGYCGIVTGENQNQTDRNAFYCLEYFPSQMLRTGNNFETAYNFEKVPFHSMYAHSQSLDGLMNPLLDQYLWHLQSTTSGETLNQGNAATTFGKIRSGDFAFYRKNWLPGPCVKQQRFSKTASQNYKIPASGGNALLKYDTHYTLNNRWSNIAPGPPMATAGPSDGDFSNAQLIFPGPSVTGNTTTSANNLLFTSEEEIAATNPRDTDMFGQIADNNQNATTAPITGNVTAMGVLPGMVWQNRDIYYQGPIWAKIPHADGHFHPSPLIGGFGLKHPPPQIFIKNTPVPAYPATTFTAARVDSFITQYSTGQVAVQIEWEIEKERSKRWNPEVQFTSNCGNQSSMLWAPDTTGKYTEPRVIGSRYLTNHL

SEQ ID NO: 4818 - protein, 735 aa, Adeno-associated virus
MAADGYLPDWLEDTLSEGIRQWWKLKPGPPPPKPNQQHRDDSRGLVLPGYKYLGPFNGLDKGEPVNEADAAALEHDKAYDHQLKQGDNPYLKYNHADAEFQERLQEDTSFGGNLGRAVFQAKKRVLEPLGLVEEAVKTAPGKKRPIEQSPAEPDSSSGIGKSGQQPAKKRLNFGQTGDTESVPDPQPIGEPPAAPSGVGSNTMASGGGAPMADNNEGADGVGNSSGNWHCDSTWMGDRVITTSTRTWALPTYNNHLYKQISSESGATNDNHYFGYSTPWGYFDFNRFHCHFSPRDWQRLINNNWGFRPKKLNFKLFNIQVKEVTQNDGTTTIANNLTSTVQVFTDSEYQLPYVLGSAHQGCLPPFPADVFMIPQYGYLTLNNGSQAVGRSSFYCLEYFPSQMLRTGNNFTFSYTFEDVPFHSSYAHSQSLDRLMNPLIDQYLYYLSKTQGTSGTTQQSRLQFSQAGPSSMAQQAKNWLPGPSYRQQRMSKTANDNNNSEFAWTAATKYYLNGRNSLVNPGPPMASHKDDEEKYFPMHGNLIFGKQGTGTTNVDIESVLITDEEEIRTTNPVATEQYGQVATNHQSQNTTASYGSVDSQGILPGMVWQDRDVYLQGPIWAKIPHTDGHFHPSPLMGGFGLKHPPPQILIKNTPVPANPATTFTPGKFASFITQYSTGQVSVEIEWELQKENSKRWNPEIQYTSNYNKSVNVEFTVDANGVYSEPRPIGTRYLTRNL

SEQ ID NO: 4819 - DNA, 3127 bp, Adeno-associated virus
  source 1..3127: mol_type = unassigned DNA
gcggccgcgaattcgcccttcgcagagaccaaagttcaactgaaacgaatcaaccggtttattgattaacatgcaattacagattacgggtgaggtaacgagtgccaatagggcgaggctcagagtaaacaccctggctgtcaacggcaaagtccacaccagtctgcttttcaaagttggaggtgtactgaatctccgggtcccagcgcttgctgttttccttctgcagctcccactcgatttccacgctgacttgtccggtgctgtactgtgtgatgaacgaagcaaacttggcaggagtaaacacctccggaggattagcgggaacgggagtgttcttgatcaggatctgaggaggcggatgtttaagtccaaagccgcccatcaaaggagacgggtgaaagttgccatccgtgtgaggaatcttggcccagatgggaccctgcaggtacacgtcccggttctgccagaccatgccaggtaaggctccctggttgttgacaacttgtgtctgggctgcagtattagccgcttgtaagttgctgctgactatcccgtattcttccgtggctacaggattagtaggacgaatttcttcttcatttgtcattaacacattttccaatgtagttttgttagttgctccagtttttccaaaaatcaggactccgctggatgggaaaaagcggtcctcgtcgtccttgtgagttgccatggcgacgccgggattaaccaacgagtttctgccgttcaggtgatatttggtggcaccagtccaagcaaagttgctgttgttgttttgatccagcgttttggagaccctttgttgccggaagcagggtccaggtaaccaattcttggcttgttcggccatagttgaaggcccgccctggtaaaactgcagttcccgattgccagctgtgcctcctgggtcactctgtgttctggccaggtagtacaagtactggtcgatgaggggattcatcagccggtccaggctctggctgtgtgcgtagctgctgtggaaaggcacgtcctcgaagctgtagctgaactcaaagttgttgcccgttctcagcatctgagaggggaagtactccaggcagtagaaggaggaacgtcccacagactgactgccattgttgagagtcaggtagccgtactgaggaatcatgaagacgtccgccgggaacggaggcaggcagccctggtgcgcagagccgaggacgtacggcagctggtattccgagtccgagaatacctgaatcgtgctggtaaggttattagcgatggtcgtaacgccgtcattcgtcgtgacctccttgacctggatgttgaagagcttgaaccgcagcttcttgggccggaatccccagttgttgttgatgagtcgctgccagtcacgtggtgagaagtggcagtggaatctgttaaagtcaaaatacccccagggggtgctgtagccgaagtaggtgttgtcgttggtactacctgcagtttcactggagatttgctcgtagaggtggttgttgtaggtgggcagggcccaggttcgggtgctggtggtaatgactctgtcgcccagccatgtggaatcgcaatgccaatttcctgaggcattacccactccgtcggcaccttcgttattgtctgccattggtgcgccaccgcctgcagccactgtaccagatcccacactagagggcgctgctggaggttctccgagaggttgagggtcggggactgactctgagtcgccagtctgaccgaaattgagtctctttctggcgggctgctggcccttcttgccgatgcccgtggaggagtcgggggaacgctgaggtgacggctctaccggtctcttctttgcaggagccgtcttagcgccttcctcaaccagaccgagaggttcgagaacccgcttcttggcctggaagactgctcgcccgaggttgcccccaaatgacgtatcttcttgcagacgctcctgaaactcggcgtcggcgtggttataccgcaggtacgggttgtcacccgcattgagctgctggtcgtaggccttgtcgtgctcgagggccgctgcgtccgccgcgttgacgggctcccccttgtcgagtccgttgaagggtccgaggtacttgtagccaggaagcaccagaccccggccgttgtcctgcttttgctggttggctttgggtttcggggctccaggtttcaggtcccaccactcgcgaatgccctcagagaggttgtcctcgagccaatctggaagataaccatcggcagccatacctgatttaaatcatttattgttcaaagatgcagtcatccaaatccacattgaccagatcgcaggcagtgcaagcgtctggcacctttcccatgatatgatgaatgtagcacagtttctgatacgcctttttgacgacagaaacgggtttagattctgacacgggaaagcactctaaacagtctttctgtccgtgagtgaagcagatatttgaattctgattcattctctcgcattgtctgcagggaaacagcatcagattcatgcccacgtgacgagaacatttgttttggtacctgtctgcgtagttgatcgaagcttccgcgtctgacgtcgatggctgcgcaactgactcgcgcacccgtttgggctcacttatatctgcgtcactgggggcgggtcttttcttggctccaccctttttgacgtagaattcatgctccacctcaaccacgtaatcctttgcccaccggaaaaagtctttgacttcctgcttggtgaccttcccaaagtcatgatccagacggcgggtgagttcaaatttgaacatccggtcttgcaacggctgctggtgttcgaaggtcgttgagttcccgtcgatcacggcgcacatgttggtgttggagatgacgatcgcgggagtcgggtctatctgggccgaggacttgcatttctggtccacgcgcaccttgcttcctccgagaatggctttggccgactccacgaccttggcggtcatcttcccctcctcccaccagatcaccatcttgtcgacacagtcgttgaagggaaagttctcattggtccagttgacgcagccgtagaaagggcgaattc

SEQ ID NO: 4820 - DNA, 3106 bp, Adeno-associated virus
  source 1..3106: mol_type = unassigned DNA
gcggccgcgaattcgcccttcgcagagaccaaagttcaactgaaacgaatcaaccggtttattgattaacaagtaattacaggttacgggtgaggtaacgggtgccaatggggcgaggctcagtataaaccccttcgttgttgacagcaaattccacattattagacttggcataatttgaggtgtactgaatctctggattccagcgtttgctgttttctttctgcagttcccactcgatctccacgctgacctggccggtgctgtactgcgtgataaatgaggcaaacttggcaggagtaaacacctctggaggattagcaggtaccggggtgtttttgatgagaatttgaggaggcgggtgtttgagtccaaatccgcccatcaggggagacgggtgaaagttgccgtccgtgtgaggaattttggcccagatgggaccctgcaggcacacgtcccggttctgccagaccatgccgggcagagccccctggctgttgacagtctgtgtctggggtccggccgtagacgattgcaggttgctggagaccacaccgtattcttctgtagccacgggattggtggttttgatctcctcctcgctggtcattagcacgttttccagcgttgtcttgttggcagcccccgttttgccaaaaaccagcactccgttgatgggaaagaactggtcctcgtcgtccttgttggtggccatggctacgcccgggttggttaatgaatttctaccattcagatggtatttagtggccccggtccaggcaaagttactgttgttgttgctgtctatgttttttgacagtctctgctgccgataacagggtccgggcagccagttctttgattgctcggccatggtgttgggcccagcctgatggaactgcagctcccttgtggaccccgtagtgctctgggtccgggccaggtagtacaggtactggtcgatgaggggattcatcagccggtctaggctctggctgtgcacatagctgctgtggaaaggcacttcctcaaaggtgtagctgaattcaaagttattgcccgttctcagcatctgagaaggaaagtactccaggcagtagaaggaggaacgtcccacagactgactgccgttgtttagagtcagatatccgtactgaggaatcatgaacacgtccgcagggaacggagggaggcagccctggtgcgcagagccgaggacgtacggcagttggtactccgagtccgagaagacctgaatcgtgctggtaaggttattagcgatggtcgtaacgccgtcgttcgtcgtgacctccttgacctggatgttgaacaacttgaaccgcagctttctgggccggaatccccagttgttgttgatgagtcgctgccagtcacgtggtgagaagtggcagtggaatctgttgaagtcaaaatagccccagggggtgctgtagctgaagaagtggttgtcgttggtagccccgctctgacttgatatctgcttgtagaggtggttgttgtaggtgggcagggcccaggtgcgggtgctggtggtgatgactctgtcgcccagccatgtggaatcgcaatgccaatttccggaggcattacccactccgtcggcgccttcgttattgtctgccattggtgcgccaccgcctgcagccattgtaccagatcccagacctgagggcgcggcgggaggttctccgagaggttgggggtcgggcactgactctgagtcgccagtctgcccaaagttgagcttctttttagcgggctgctggcctttcttgccgatgcccgtggaggagtcgggggattctatgggtctcttctttccaggagccgtcttagcgacttcctcaaccagaccgagaggttcgagaacccgcttcttggcctggaagactgctcgcccgaggttgcccccaaaagacgtatcttcttgaagacgctcctgaaactcggcgtcggcgtggttgtacttgaggtacgggttgtccccctgctcgagctgcttgtcgtaggccttgtcgtgctcgagggccgcggcgtctgcctcgttgaccggctctcccttgtcgagtccgttgaagggtctgaggtacttgtagccaggaagcaccagaccccggccgtcgtcctgcttttgctggttggctttgggtttcggggctccaggtttcaagtcccaccactcgcgaatgccctcagagaggttgtcctcgagccaatctggaagataaccatcggcagccatacctggtttaagtcatttattgctcagaaacacagtcatccaggtccacgttgaccagatcgcaggccgagcaagcaatctcgggagcccgccccagcagatgatgaatggcacagagtttccgatacgtcctctttctgacgaccggttgagattctgacacgccggggaaacattctgaacagtctctggtcccgtgcgtgaagcaaatgttgaaattctgattcactctctcgcatgtcttgcagggaaacagcatctgaagcatgcccgcgtgacgagaacatttgttttggtacctgtcggcaaagtccaccggagctccttccgcgtctgacgtcgatggattcgcgactgaggggcaggcccgcttgggctcgcttttatccgcgtcatcgggggcgggtctcttgttggccccaccctttctgacgtagaacccatgcgccacctcggtcacgtgatcctgcgcccagcggaagaaccttttgacttcctgctttgtcaccttgccaaagttatgctccagacggcgggtgggttcaaatttgaacatccggtcctgcaacggctgctggtgctcgaaggtggcgctgttcccgtcaatcacggcgcacatgttggtgttggaggtgacggtcacgggggtggggtcgatctgggcggacgacttgcacttttggtccacgcgcaccttgctgccgccgagaatggccttggcggactccacgaccttggccgtcatcttgccctcctcccaccagatcaccatcttgtcggcgcaatcgttgaagggaaagttctcattggtccagttgacgcagccgtagaaagggcgaattc

SEQ ID NO: 4821 - DNA, 3102 bp, Adeno-associated virus
  source 1..3102: mol_type = unassigned DNA
gcggccgcgaattcgcccttcgcagagaccaaagttcaactgaaacgaatcaaccggtttattgattaacaagtaattacaggttacgggtgaggtaacgggtgccaatggggcgaggctcagtataaaccccttcgttgttgacagcaaattccacattattagacttggcataatttgaggtgtactgaatctctggattccagcgtttgctgttttctttctgcagttcccactcgatctccacgctgacctggccggtgctgtactgcgtgataaatgaggcaaacttggcaggagtaaacacctctggaggattagcaggtaccggggtgtttttgatgagaatttgaggaggcgggtgtttgagtccaaatccgcccatcaggggagacgggtgaaagttgccgtccgtgtgaggaatttcggcccagatgggaccctgcaggtacacgtcccggttctgccagaccatgccgggcagagccccctggctgttgacagtctgtgtccggggtccggccgtagacgattgcaggttgctggagaccacaccgtattcttctgtagccacgggattggtggttttgatctcctcctcgctggtcattagcacgttttccagcgttgtcttgttggcagcccccgttttgccaaaaaccagcactccgttgatgggaaggaactggtcctcgtcgtccttgttggtggccatggctacgcccgggttggttaatgaatttctaccattcagatggtatttagtggccccggtccaggcaaagttactgttgttgttgctgtctatgttttttgacagtctctgctgccgataacagggtccgggcagccagttctttgattgctcggccacggtgttgggcccagcctgatggaactgcagctcccttgtggaccccgtagtgctctgggtccgggccaggtagtacaggtactggtcgatgaggggattcatcagccggtccaggctctggctgtgcgcatagctgctgtggaaaggcacttcctcaaaggtgtagctgaattcaaagttattgcccgttctcagcatctgagaaggaaagtactccaggcagcagaaggaggaacgtcccacagactgactgccgttgtttagagtcagatatccgtactgaggaatcatgaacacgtccgcagggaacggagggaggcagccctggtgcgcagagccgaggacgtacggcagttggtactccgagtccgagaagacctgaatcgtgctggtaaggttattagcgatggtcgtaacgccgtcgttcgtcgtgacctccttgacctggatgttgaacaacttgaaccgcagctttctgggccggaatccccagttgttgttgatgagtcgctgccagtcacgtggtgagaagtggcagtggaatctgttgaagtcaaaatagccccagggggtgctgtagccgaagaagtggttgtcgttggtagccccgctctgacttgatatctgcttgtagaggtggttgttgtaggtgggcagggcccaggtgcgggtgctggtggtgatgactctgtcgcccagccatgtggaatcgcaatgccaatttccggaggcattacccactccgtcggcgccttcgttattgtctgccattggtgcgccaccgcctgcagccattgtaccagatcccagacctgagggcgcggcgggaggttctccgagaggttgggggtcgggcactgactctgagtcgccagtctgcccaaagttgagcttctttttagcgggctgctggcctttcttgccgatgcccgtggaggagtcgggggattctatgggtctcttctttccggaagccgtcttagcgccttcctcaaccagaccgagaggttcgagaacccgcttcttggcctggaagactgctcgcccgaggttgcccccaaaagacgtatcttcttgaagacgctcctgaaactcggcgtcggcgtggttgtacttgaggtacgggttgtccccctgctcgagctgcttgtcgtaggccttgtcgtgctcgagggccgcggcgtctgcctcgttgaccggctctcccttgtcgagtccgttgaagggtccgaggtacttgtagccaggaagcaccagaccccggccgtcgtcctgcttttgctggttggctttgggtttcggggctccaggtttcaagtcccaccactcgcgaatgccctcagagaggttgtcctcgagccaatctggaagataaccatcggcagccatacctggtttaagtcatttattgctcagaaacacagtcatccaggtccacgttgaccagatcgcaggccgagcaagcaatctcgggagcccgccccagcagatgatgaatggcacagagtttccgatacgtcctctttctgacgaccggttgagattctgacacgccggggaaacattctgaacagtctctggtcccgtgcgtgaagcaaatgttgaaattctgattcattctctcgcatgtcttgcagggaaacagcatctgaagcatgcccgcgtgacgagaacatttgttttggtacctgtcggcaaagtccaccggagctccttccgcgtctgacgtcgatggatccgcgactgaggggcaagcccgcttgggctcgcttttatccgcgtcatcgggggcgggtctcttgttggctccaccctttctgacgtagaactcatgcgccacctcggtcacgtgatcctgcgcccagcggaagaactctttgacttcctgctttgtcaccttgccaaagtcatgctccagacggcgggtgagttcaaatttgaacatccggtcttgtaacggctgctggtgctcgaaggtggtgctgttcccgtcaatcacggcgcacatgttggtgttggaagtgacgatcacgggggtgggatcgatctgggcggacgacttgcacttttggtccacgcgcaccttgctgccgccgagaatggccttggcggactccacgaccttggccgtcatcttgccctcctcccaccagatcaccatcttgtcgacgcaatcgttgaagggaaagttctcattggtccagttgacgcagccgaagggcgaattc

SEQ ID NO: 4822 - protein, 728 aa, Adeno-associated virus
MAADGYLPDWLEDNLSEGIREWWDLKPGAPKPKANQQKQDDGRGLVLPGYRYLGPFNGLDKGEPVNEADAAALEHDKAYDKQLEQGDNPYLKYNHADAEFQERLQEDTSFGGNLGRAVFQAKKRVLEPLGLVEEGAKTAPGKKRPIESPDSSTGIGKNGQPPAKKKLNFGQTGDSESVPDPQPLGEPPAAPSGLGSGTMAAGGGAPMADNNEGADGVGNASGNWHCDSTWLGDRVITTSTRTWALPTYNNHLYKQISSQSGATNDNHFFGYSTPWGYFDFNRFHCHFSPRDWQRLINNNWGFRPRKLRFKLFNIQVKEVTTNDGVTTIANNLTSTIQVFSDSEYQLPYVLGSAHQGCLPPFPADVFMIPQYGYLTLNNGSQSVGRSSFYCLEYFPSQMLRTGNNFEFSYTFEEVPFHSSYAHSQSLDRLMNPLIDQYLYYLARTQSTTGSTRELQFHQAGPNTMAEQSKNWLPGPCYRQQRLSKNIDSNNNSNFAWTGATKYHLNGRNSLTNPGVAMATNKDDEDQFFPINGVLVFGKTGAANKTTLENVLMTSEEEIKTTNPVATEEYGVVSSNLQSSTAGPQTQTVNSQGALPGMVWQNRDVYLQGPIWAKIPHTDGNFHPSPLMGGFGLKHPPPQILIKNTPVPANPPEVFTPAKFASFITQYSTGQVSVEIEWELQKENSKRWNPEIQYTSNYAKSNNVEFAVNNEGVYTEPRPIGTRYLTRNL

SEQ ID NO: 4823 - DNA, 2187 bp, Adeno-associated virus
  source 1..2187: mol_type = unassigned DNA
atggctgccgatggttatcttccagattggctcgagggcaacctctctgagggcattcgcgagtggtgggacttgaaacctggagccccgaaacccaaagccaaccagcaaaagcaggacgacggccggggtctggtgcttcctggctacaggtacctcggacccttcaacggactcgacaagggagagccggtcaacgaggcagacgccgcggccctcgagcacgacaaggcctacgacaagcagctcgagcagggggacaacccgtacctcaagtacaaccacgccgacgccgagtttcaggagcgtcttcaagaagatacgtcttttgggggcaacctcgggcgagcagtcttccaggccaagaagcgggttctcgaacctctcggtctggttgaggaaggcgctaagacggctcctggaaagaagagacccatagaatcccccgactcctccacgggcatcggcaagaacggccagccgcccgctaaaaagaagctcaactttgggcagactggcgactcagagtcagtgcccgacccccaacctctcggagaacctcccgccgcgccctcaggtctgggatctggtacaatggctgcaggcggtggcgcaccaatggcagacaataacgaaggcgccgacggagtgggtaatgcctccggaaattggcattgcgattccacatggctgggcgacagagtcatcaccaccagcacccgcacctgggccctgcccacctacaacaaccacctctacaagcagatatcaagtcagagcggggctaccaacgacaaccacttcttcggctacagcaccccctggggctattttgacttcaacagattccactgccacttctcaccacgtgactggcagcgactcatcaacaacaactggggattccggcccagaaagctgcggttcaagttgttcaacatccaggtcaaggaggtcacgacgaacgacggcgttacgaccatcgctaataaccttaccagcacgattcaggtcttctcggactcggagtaccaactgccgtacgtcctcggctctgcgcaccagggctgcctccctccgttccctgcggacgtgttcatgattcctcagtacggatatctgactctaaacaacggcagtcagtctgtgggacgttcctccttctactgcctggagtactttccttctcagatgctgagaacgggcgataactttgaattcagctacacctttgaggaagtgcctttccacagcagctatgcgcacagccagagcctggaccggctgatgaatcccctcatcgaccagtacctgtactacctggcccggacccagagcactacggggtccacaagggagctgcagttccatcaggctgggcccaacaccatggccgagcaatcaaagaactggctgcccggaccctgttatcggcagcagagactgtcaaaaaacatagacagcaacaacaacagtaactttgcctggaccggggccactaaataccatctgaatggtagaaattcattaaccaacccgggcgtagccatggccaccaacaaggacgacgaggaccagttctttcccatcaacggagtgctggtttttggcaaaacgggggctgccaacaagacaacgctggaaaacgtgctaatgaccagcgaggaggagatcaaaaccaccaatcccgtggctacagaagaatacggtgtggtctccagcaacctgcaatcgtctacggccggaccccagacacagactgtcaacagccagggggctctgcccggcatggtctggcagaaccgggacgtgtacctgcagggtcccatctgggccaaaattcctcacacggacggcaactttcacccgtctcccctgatgggcggatttggactcaaacacccgcctcctcaaattctcatcaaaaacaccccggtacctgctaatcctccagaggtgtttactcctgccaagtttgcctcatttatcacgcagtacagcaccggccaggtcagcgtggagatcgagtgggaactgcagaaagaaaacagcaaacgctggaatccagagattcagtacacctcaaattatgccaagtctaataatgtggaatttgctgtcaacaacgaaggggtttatactgagcctcgccccattggcacccgttacctcacccgtaacctgtaa

SEQ ID NO: 4824 - protein, 728 aa, Adeno-associated virus; identical to SEQ ID NO: 4803

SEQ ID NO: 4825 - DNA, 3106 bp, Adeno-associated virus
  source 1..3106: mol_type = unassigned DNA
gcggccgcgaattcgcccttcgcagagaccaaagttcaactgaaacgaatcagccggtttattgattaacaagtaattacaggttacgggtgaggtaacgggtgccaatggggcgaggctcagtataaaccccttcgttgttgacagcaaattccacattattagacttggcataatttgaggtgtactgaatctctggattccagcgtttgctgttttctttctgcagttcccactcgatctccacgctgacctggccggtgctgtactgcgtgataaatgaggcaaacttggcaggagtaaacacctctggaggattagcaggtaccggggtgtttttgatgagaatttgaggaggcgggtgtttgagtccaaatccgcccatcaggggagacgggtgaaagttgccgtccgtgtgaggaattttggcccagatgggaccctgcaggtacacgtcccggttctgccagaccatgccgggcagagccccctggctgttgacagtctgtgtctggggtccggccgtagacgattgcaggttgctggagaccacaccgtattcttctgtagccacgggattggtggttttgatctcctcctcgctggtcattagcacgttttccagcgttgtcttgttggcagcccccgttttgccaaaaaccagcactccgttgatgggaaagaactggtcctcgtcgtccttgttggtggccatggctacgcccgggttggttaatgaatttctaccattcagatggtatttagtggccccggtccaggcaaagttactgttgttgttgctgtctatgttttttgacagtctctgctgccgataacagggtccgggcagccagttctttgattgctcggccatggtgttgggcccagcctgatggaactgcagctcccttgtggaccccgtagtgctctgggtccgggccaggtagtacaggtactggtcgatgaggggattcatcagccggtccaggctctggctgtgcgcatagctgctgtggaaaggcacttcctcaaaggtgtagctgaattcaaagttatcgcccgttctcagcatctgagaaggaaagtactccaggcagtagaaggaggaacgtcccacagactgactgccgttgtttagagtcagatatccgtactgaggaatcatgaacacgtccgcagggaacggagggaggcagccctggtgcgcagagccgaggacgtacggcagttggtactccgagtccgagaagacctgaatcgtgctggtaaggttattagcgatggtcgtaacgccgtcgttcgtcgtgacctccttgacctggatgttgaacaacttgaaccgcagctttctgggccggaatccccagttgttgttgatgagtcgctgccagtcacgtggtgagaagtggcagtggaatctgttgaagtcaaaatagccccagggggtgctgtagccgaagaagtggttgtcgttggtagccccgctctgacttgatatctgcttgtagaggtggttgttgtaggtgggcagggcccaggtgcgggtgctggtggtgatgactctgtcgcccagccatgtggaatcgcaatgccaatttccggaggcattacccactccgtcggcgccttcgttattgtctgccattggtgcgccaccgcctgcagccattgtaccagatcccagacctgagggcgcggcgggaggttctccgagaggttgggggtcgggcactgactctgagtcgccagtctgcccaaagttgagcttctttttagcgggcggctggccgttcttgccgatgcccgtggaggagtcgggggattctatgggtctcttctttccaggagccgtcttagcgccttcctcaaccagaccgagaggttcgagaacccgcttcttggcctggaagactgctcgcccgaggttgcccccaaaagacgtatcttcttgaagacgctcctgaaactcggcgtcggcgtggttgtacttgaggtacgggttgtccccctgctcgagctgcttgtcgtaggccttgtcgtgctcgagggccgcggcgtctgcctcgttgaccggctctcccttgtcgagtccgttgaagggtccgaggtacctgtagccaggaagcaccagaccccggccgtcgtcctgcttttgctggttggctttgggtttcggggctccaggtttcaagtcccaccactcgcgaatgccctcagagaggttgccctcgagccaatctggaagataaccatcggcagccatacctggtttaagtcatttattgctcagaaacacagtcatccaggtccacgttggccagatcgcaggccgagcaagcaatctcgggagcccgccccagcagatgatgaatggcacagagtttccgatacgtcctctttctgacgaccggttgagattctgacacgccggggaaacattctgaacagtctctggtcccgtgcgtgaagcaaatgttgaaattctgattcattctctcgcatgtcttgcaggggaacagcatctgaagcatgcccgcgtgacgagaacatttgttttggtacctgtcggcaaagtccaccggagctccttccgcgtctgacgtcgatggatccgcgactgaggggcaggcccgcttgggctcgcttttatccgcgtcatcgggggcgggtctcttgttggctccaccctttctgacgtagaactcatacgccacctcggtcacgtgatcctgcgcccagcggaagaactctttgacttcctgctttgtcaccttgccaaagtcatgctccagacggcgggtgagttcaaatttgaacatccggtcttgtaacggctgctggtgctcgaaggtggtgctgttcccgtcaatcacggcgcacatgttggtgttggaagtgacgatcacgggggtgggatcgatctgggcggacgacttgcacttttggtccacgcgcaccttgctgccgccgagaatggccttggcggactccacgaccttggccgtcatcctgccctcctcccaccagatcaccatcttgtcgacgcaatcgttgaagggaaagttctcattggtccagttgacgcagccgtagaaagggcgaattc

SEQ ID NO: 4826 - protein, 728 aa, Adeno-associated virus
MAADGYLPDWLEDNLSEGIREWWDLKPGAPKPKANQQKQDDGRGLVLPGYRYLGPFNGLDKGEPVNEADAAALEHDKAYDKQLEQGDNPYLKYNHADAEFQERLQEDTSFGGNLGRAVFQAKKRVLEPLGLVEEGAKTAPGKKRPIESPDSSTGIGKNGQPPAKKKLNFGQTGDSESVPDPQPLGEPPAAPSGLGSGTMAAGGGAPMADNNEGADGVGNASGNWHCDSTWLGDRVITTSTRTWALPTYNNHLYKQISSQSGATNDNHFFGYSTPWGYFDFNRFHCHFSPRDWQRLINNNWGFRPRKLRFKLFNIQVKEVTTNDGVTTIANNLTSTIQVFSDSEYQLPYVLGSAHQGCLPPFPADVFMIPQYGYLTLNNGSQSVGRSSFYCLEYFPSQMLRTGDNFEFSYTFEEVPFHSSYAHSQSLDRLMNPLIDQYLYYLARTQSTTGSTRELQFHQAGPNTMAEQSKNWLPGPCYRQQRLSKNIDSNNNSNFAWTGATKYHLNGRNSLTNPGVAMATNKDDEDQFFPINGVLVFGKTGAANKTTLENVLMTSEEEIKTTNPVATEEYGVVSSNLQSSTAGPQTQTVNSQGALPGMVWQNRDVYLQGPIWAKIPHTDGNFHPSPLMGGFGLKHPPPQILIKNTPVPANPPEVFTPAKFASFITQYSTGQVSVEIEWELQKENSKRWNPEIQYTSNYAKSNNVEFAVNNEGVYTEPRPIGTRYLTRNL

SEQ ID NO: 4827 - protein, 728 aa, Adeno-associated virus; identical to SEQ ID NO: 4822

SEQ ID NO: 4828 - protein, 728 aa, Adeno-associated virus
MAADGYLPDWLEDNLSEGIREWWDLKPGAPKPKANQQKQDDGRGLVLPGYKYLGPFNGLDKGEPVNEADAAALEHDKAYDKQLEQGDNPYLKYNHADAEFQERLQEDTSFGGNLGRAVFQAKKRVLEPLGLVEEGAKTAPGKKRPIESPDSSTGIGKNGQPPAKKKLNFGQTGDSESVPDPQPLGEPPAAPSGLGSGTMAAGGGAPMADNNEGADGVGNASGNWHCDSTWLGDRVITTSTRTWALPTYNNHLYKQISSQSGATNDNHFFGYSTPWGYFDFNRFHCHFSPRDWQRLINNNWGFRPRKLRFKLFNIQVKEVTTNDGVTTIANNLTSTIQVFSDSEYQLPYVLGSAHQGCLPPFPADVFMIPQYGYLTLNNGSQSVGRSSFYCLEYFPSQMLRTGNNFEFSYTFEEVPFHSSYAHSQSLDRLMNPLIDQYLYYLARTQSTTGSTRELQFHQAGPNTMAEQSKNWLPGPCYRQQRLSKNIDSNNNSNFAWTGATKYHLNGRNSLTNPGVAMATNKDDEDQFFPINGVLVFGKTGAANKTTLENVLMTSEEEIKTTNPVATEEYGVVSSNLQSSTAGPQTQTVNSQGALPGMVWQNRDVYLQGPIWAKIPHTDGNFHPSPLMGGFGLKHPPPQILIKNTPVPANPPEVFTPAKFASFITQYSTGQVSVEIEWELQKENSKRWNPEIQYTSNYAKSNNVEFAVNNEGVYTEPRPIGTRYLTRNL

SEQ ID NO: 4829 - protein, 728 aa, Adeno-associated virus
MAADGYLPDWLEDNLSEGIREWWDLKPGAPKPKANQQKQDDGRGLVLPGYKYLGPFNGLDKGEPVNEADAAALEHDKAYDKQLEQGDNPYLKYNHADAEFQERLQEDTSFGGNLGRAVFQAKKRVLEPLGLVEEGAKTAPGKKRPIESPDSSTGIGKKGQQPAKKKLNFGQTGDSESVPDPQPLGEPPAAPSGLGSGTMAAGGGAPMADNNEGADGVGNASGNWHCDSTWLGDRVITTSTRTWALPTYNNHLYKQISSQSGATNDNHFFGYSTPWGYFDFNRFHCHFSPRDWQRLINNNWGFRPRKLRFKLFNIQVKEVTTNDGVTTIANNLTSTIQVFSDSEYQLPYVLGSAHQGCLPPFPADVFMIPQYGYLTLNNGSQSVGRSSFYCLEYFPSQMLRTGNNFEFSYTFEEVPFHSSYAHSQSLDRLMNPLIDQYLYYLARTQSTTGSTRELQFHQAGPNTMAEQSKNWLPGPCYRQQRLSKNIDSNNNSNFAWTGATKYHLNGRNSLTNPGVAMATNKDDEDQFFPINGVLVFGKTGAANKTTLENVLMTSEEEIKTTNPVATEEYGVVSSNLQSSTAGPQTQTVNSQGALPGMVWQNRDVYLQGPIWAKIPHTDGNFHPSPLMGGFGLKHPPPQILIKNTPVPANPPEVFTPAKFASFITQYSTGQVSVEIEWELQKENSKRWNPEIQYTSNYAKSNNVEFAVNNEGVYTEPRPIGTRYLTRNL

SEQ ID NO: 4830 - DNA, 3098 bp, Adeno-associated virus
  source 1..3098: mol_type = unassigned DNA
gaattcgcccttcgcagagaccaaagttcaactgaaacgaatcaaccggtttattgattaacaagtaattacaggttacgggtgaggtaacgggtgccaatggggcgaggctcagtataaaccccttcgttgttgacagcaaattccacattattagacttggcataatttgaggtgtactgaatctctggattccagcgtttgctgttttctttctgcagttcccactcgatctccacgctgacctggccggtgctgtactgcgtgataaatgaggcaaactaggcaggagtaaacacccctggaggattagcaggtaccggggtgtttttgatgagaatttgaggaggcgggtgtttgagtccaaatccgcccatcaggggagacgggtgaaagttgccgtccgtgtgaggaattttggcccagatgggaccctgcaggtacacgtcccggttctgccagaccatgccgggcagagccccctggctgttgacagtctgtgtctggggtccggccgtagacgattgcaggttgctggagaccacaccgtattcttctgtagccacgggattggtggttttgatctcctcctcgctggtcattagcacgttttccagcgttgtcttgttggcagcccccgttttgccaaaaaccagcactccgttgatgggaaagaactggccctcgtcgtccttgttggtggccatggctacgcccgggttggttaatgaatttctaccattcagatggtatttagtggccccggtccaggcaaagttactgttgttgttgctgtctatgttttttgacagtctctgctgccgataacagggtccgggcagccagttctttgattgctcggccatggtgttgggcccagcctgatggaactgcagctcccttgtggaccccgtagtgctctgggtccgggccaggtagtacaggtactggtcgatgaggggattcatcagccggtccaggctctggctgtgcgcatagctgctgtggaaaggcacttcctcaaaggtgtagctgaattcaaagttattgcccgttctcagcatctgagaaggaaagtactccaggcagtagaaggaggaacgtcccatagactgactgccgttgtttagagtcagatatccgtactgaggaatcatgaacacgtccgcagggaacggagggaggcagccctggtgcgcagagccgaggacgtacggcagttggtactccgagtccgagaagacctgaatcgtgctggtaaggttattagcgatggtcgtaacgccgtcgttcgtcgtgacctccttgacctggatgttgaacaacttgaaccgcagctttctgggccggaatccccagttgttgttgatgagtcgctgccagtcacgtggtgagaagtggcagtggaatctgttgaagtcaaaatagccccagggggtgctgtagccgaagaagtggttgtcgttggtagccccgctctgacttgatatctgcttgtagaggtggttgttgtaggtgggcagggcccaggtgcgggtgctggtggtgatgactctgtcgcccagccatgtggaatcgcaatgccaatttccggaggcattacccactccgtcggcgccttcgttattgtctgccattggtgcgccaccgcctgcagccattgtaccagatcccagacctgagggcgcggcgggaggttctccgagaggttgggggtcgggcactgactctgagtcgccagtctgcccaaagttgagcttctttttagcgggctgctggcctttcttgccgatgcccgtggaggagtcgggggattctatgggtctcttctttccaggagccgtcttagcgccttcctcaaccagaccgagaggttcgagaacccgcttcttggcctggaagactgctcgcccgaggttgcccccaaaagacgtatcttcttgaagacgctcctgaaactcagcgtcggcgtggttgtacttgaggtacgggttgtccccctgctcgagctgcttgtcgtaggccttgtcgtgctcgagggccgcggcgtctgcctcgttgaccggctctcccttgtcgagtccgttgaagggtccgaggtacttgtagccaggaagcaccagaccccggccgtcgtcctgcttttgctggttggctttgggtttcggggctccaggtttcaagtcccaccactcgcgaatgccctcagagaggttgtcctcgagccaatctggaagataaccatcggcagccatacctggtttaagtcatttattgctcagaaacacagtcatccaggtccacgttgaccagatcgcaggccgagcaagcaatctcgggagcccgccccagcagatgatgaatggcacagagtttccgatacgtcctctttctgacgaccggttgagattctgacacgccggggaaacattctgaacagtctctggtcccgtgcgtgaagcaaatgttgaaattctgattcattctctcgcatgtcttgcagggaaacagcatctgaagcatgcccgcgtgacgagaacatttgttttggtacctgtcggcaaagtccaccggagctccttccgcgtctgacgtcgatggatccgcgactgaggggcaggcccgcttgggctcgcttttatccgcgtcatcgggggcgggcctcttgttggctccaccctttctgacgtagaactcatgcgccacctcggtcacgtgatcctgcgcccagcggaagaactctttgacttcctgctttgtcaccttgccaaagtcctgctccagacggcgggtgagttcaaatttgaacatccggtcttgtaacggctgctggtgctcgaaggtggtgctgttcccgtcaatcacggcgcacatgttggtgttggaagtgacgatcacgggggtgggatcgatctgggcggacgacttgcacttttggtccacgcgcaccttgctgccgccgagaatggccttggcggactccacgaccttggccgtcatcttgccctcctcccaccagatcaccatcttgtcgacgcaatcgttgaagggaaagttctcattggtccagttgacgcagccgtagaaagggcgaattc

SEQ ID NO: 4831 - protein, 729 aa, Adeno-associated virus
MAADGYLPDWLEDNLSEGIREWWDLKPGAPKPKANQQKQDDGRGLVLPGYKYLGPFNGLDKGEPVNAADAAALEHDKAYDQQLKAGDNPYLRYNHADAEFQERLQEDTSFGGNLGRAVFQAKKRVLEPLGLVEEGAKTAPGKKRPIDSPDSSTGIGKKGQQPAKKKLNFGQTGDSESVPDPQPLGEPPAAPSSVGSGTMAAGGGAPMADNNEGADGVGNASGNWHCDSTWLGDRVITTSTRTWALPTYNNHLYKQISSSSSGATNDNHYFGYSTPWGYFDFNRFHCHFSPRDWQRLINNNWGFRPKKLRFKLFNIQVKEVTTNDGVTTIANNLTSTVQVFSDSEYQLPYVLGSAHQGCLPPFPADVFMIPQYGYLTLNNGSQSVGRSSFYCLEYFPSQMLRTGNNFEFSYSFEDVPFHSSYAHSQSLDRLMNPLIDQYLYYLARTQSTTGSTRELQFHQAGPNTMAEQSKNWLPGPCYRQQGLSKNLDFNNNSNFAWTAATKYHLNGRNSLTNPGIPMATNKDDEDQFFPINGVLVFGKTGAANKTTLENVLMTSEEEIKTTNPVATEEYGVVSSNLQPSTAGPQSQTINSQGALPGMVWQNRDVYLQGPIWAKIPHTDGNFHPSPLMGGFGLKHPPPQILIKNTPVPANPPEVFTPAKFASFITQYSTGQVSVEIEWELQKENSKRWNPEIQYTSNYAKSNNVEFAVNPDGVYTEPRPIGTRYLPRNL

SEQ ID NO: 4832 - protein, 1458 aa, Adeno-associated virus
MAADGYLPDWLEDNLSEGIREWWDLKPGAPKPKANQQKQDDGRGLVLPGYKYLGPFNGLDKGEPVNAADAAALEHDKAYDQQLKAGDNPYLRYNHADAEFQERLQEDTSFGGNLGRAVFQAKKRVLEPLGLVEEGAKTAPGKKRPIDSPDSSTGIGKKGQQPAKKKLNFGQTGDSESVPDPQPLGEPPAAPSSVGSGTMAAGGGAPTADNNEGADGVGNASGNWHCDSTWLGDRVITTSTRTWALPTYNNHLYKQISSSSSGATNDNHYFGYSTPWGYFDFNRFHCHFSPRDWQRLINNNWGFRPKKLRFKLFNIQVKEVTTNDGVTTIANNLTSTVQVFSDSEYQLPYVLGSAHQGCLPPFPADVFMIPQYGYLTLNNGSQSVGRSSFYCLEYFPSQMLRTGNNFEFSYSFEDVPFHSSYAHSQSLDRLMNPLIDQYLYYLARTQSTTGSTRELQFHQAGPNTMAEQSKNWLPGPCYRQQRLSKNLDFNNNSNFAWTAATKYHLNGRNSLTNPGIPMATNKDDEDQFFPINGVLVFGKTGAANKTTLENVLMTSEEEIKTTNPVATEEYGVVSSNLQSSTAGPQSQTINSQGALPGMVWQNRDVYLQGPIWAKIPHTDGNFHPSPLMGGFGLEHPPPQILIKNTPVPANPPEVFTPAKFASFITQYSTGQVSVEIEWELQKENSKRWNPEIQYTSNYAKSNNVEFAVNPDGVYTEPRPIGTRYLTRNLMAADGYLPDWLEDNLSEGIREWWDLKPGAPKPKANQQKQDDGRGLVLPGYKYLGPFNGLDKGEPVNAADAAALEHDKAYDQQLKAGDNPYLRYNHADAEFQERLQEDTSFGGNLGRAVFQAKKRVLEPLGLVEEGAKTAPGKKRPIGSPDSSTGIGKKGQQPAKKKLNFGQTGDSESVPDPQPLGEPPAAPSSVGSGTMAAGGGAPMADNNEGADGVGNASGNWHCDSTWLGDRVITTSTRTWALPTYNNHLYKQISSSSSGATNDNHYFGYSTPWGYFDFNRFHCHFSPRDWQRLINNNWGFRPKKLRFKLLNIQVKEVTTNDGVTTIANNLTSTVQVFSDSEYQLPYVLGSAHQGCLPPFPADVFMIPQYGYLTLDNGSQSVGRSSFYCLEYFPSQMLRTGNNFEFSYSFEDVPFHSSYAHSQSLDRLMNPLIDQYLYYLARTQSTTGSTRELQFHQAGPNTMAEQSKNWLPGPCYRQQRLSKNLDFNNNSNFAWTAATKYHLNGRNSLTNPGIPMATNKDDEDQFFPINGVLVFGKTGAANKTTLENVLMTSEEEIKTTNPVATEEYGVVSSNLQSSTAGPQSQTINSQGALPGMVWQNRDVYLQGPIWAKIPHTDGNFHPSPLMGGFGLKHPPPQILIKNTPVPANPPEVFTPAKFASFITQYSTGQVSVEIEWELQKENSKRWNPEIQYTSNYAKSNNVEFAVNPDGVYTEPRPIGTRYLTRNL

SEQ ID NO: 4833 - protein, 729 aa, Adeno-associated virus
MAADGYLPDWLEDNLSEGIREWWDLKPGAPKPKANQQKQDDGRGLVLPGYKYLGPFNGLDKGEPVNAADAAALEHDKAYDQQLKAGDNPYLRYNHADAEFQERLQEDTSFGGNLGRAVFQAKKRVLEPLGLVEEGAKTAPGKKRPIDSPDSSTGIGKKGQQPAKKKLNFGQTGDSESVPDPQPLGEPPAAPSSVGSGTMAAGGGAPTADNNEGADGVGNASGNWHCDSTWLGDRVITTSTRTWALPTYNNHLYKQISSSSSGATNDNHYFGYSTPWGYFDFNRFHCHFSPRDWQRLINNNWGFRPKKLRFKLFNIQVKEVTTNDGVTTIANNLTSTVQVFSDSEYQLPYVLGSAHQGCLPPFPADVFMIPQYGYLTLNNGSQSVGRSSFYCLEYFPSQMLRTGNNFEFSYSFEDVPFHSSYAHSQSLDRLMNPLIDQYLYYLARTQSTTGSTRELQFHQAGPNTMAEQSKNWLPGPCYRQQRLSKNLDFNNNSNFAWTAATKYHLNGRNSLTNPGIPMATNKDDEDQFFPINGVLVFGKTGAANKTTLENVLMTSEEEIKTTNPVATEEYGVVSSNLQSSTAGPQSQTINSQGALPGMVWQNRDVYLQGPIWAKIPHTDGNFHPSPLMGGFGLEHPPPQILIKNTPVPANPPEVFTPAKFASFITQYSTGQVSVEIEWELQKENSKRWNPEIQYTSNYAKSNNVEFAVNPDGVYTEPRPIGTRYLTRNL

SEQ ID NO: 4834 - DNA, 3075 bp, Adeno-associated virus
  source 1..3075: mol_type = unassigned DNA
tgagaactttcctttcaacgattgcgtcggacaagatggtgatctggtgggaggaggggaagatgaccgccaaggtcgtggagtcggccaaagccattcttggaggaagcaaggtgcgtgtggaccagaaatgcaagtcctcggcccagatagacccgactcccgtgatcgtcacctccaacaccaacatgtgcgccgtgattgacgggaactcaacgaccttcgagcaccagcagccgttgcaagaccggatgttcaaatttgaacttacccgccgtctggatcatgactttggaaaggtcaccaagcaggaagtgaaagactttttccggtgggcaaaggatcacgtggttgaggtggagcatgaattctacgtcaaaaagggtggagctaagaaaagacccgcccccagtgacgcagatataagtgagcccaaacgggcgcgcgagtcagttgcgcagccatcaacgtcagacgcggaagcttcgatcaactacgcggacaggtaccaaaaacaaatgttctcgtcacgtgggcatgaatctgatgctgtttccctgcagacaatgcgagagaatgaatcagaattcaaatatctgcttcactcacggacagaaagactgtttagagtgctttcccgtgtcagaatctcaacccgtttctgtcgtcaaaaaggcgtatcagaaactgtgctacattcatcatatcatgggaaaggtgccagacgcttgcactgcctgcgatctggtcaatgtggatttggatgactgcatctctgaacaataaatgatttaaatcaggtatggctgccgatggttatcctccagattggctcgaggacactctctctgaagggataagacagtggtggaagctcaaacctggcccaccaccaccaaagcccgcagagcggcataaggacgacagcaggggtcttgtgcttcctgggtacaagtacctcggacccttcaacggactcgacaagggggagccggtcaacgaggcagacgccgcggccctcgagcacgacaaggcctacgaccggcagctcgacagcggagacaacccgtacctcaagtacaaccacgccgacgcagagtttcaggagcgccttaaagaagatacgtcttttgggggcaacctcggacgagcagtcttccaggcgaaaaagagggttcttgaacctctgggcctggttgaggaacctgttaagacggctccgggaaaaaagaggccggtagagcactctcctgtggagccagactcctcctcgggaaccggaaaagcgggccagcggcctgcaagaaaaagattaaattttggtcagactggagacgcagactccgtacctgacccccagcctctcggacagccaccagcagccccctctggtctgggatctactacaatggctacaggcagtggcgcaccaatggcagacaataacgagggtgccgatggagtgggtaattcctcaggaaattggcattgcgattcccaatggctgggcgacagagtcatcaccaccagcacccgaacctgggccctgcccacatacaacaaccacctctacaagcaaatctccagccaatcaggagccagcaacgacaaccactactttggctacagcaccccctgggggtattttgacttcaacagattccactgccacttttcaccacgtgactggcaaagactcatcaacaacaactggggattccggcccaaaagactcaacttcaagctctttaatattcaagtcaaagaggtcacgcagaatgacggtacgacgacgattgccaataaccttaccagcacggttcaggtgtttactgactcggagtaccagctcccgtacgtcctgggctcggcgcatcaaggatgcctcccgccgtttccagcggacgtcttcatggtcccacagtatggatacctcaccctgaacaacgggagtcaggcggtaggacgctcttccttttactgcctggagtactttccttctcagatgctgcgtactggaaacaactttcagttcagctacacttttgaagacgtgcctttccacagcagctacgctcacagccagagtctggatcggctgatgaatcctctgatcgaccagtacctgtattatctgaacaagacacaaacaaatagtggaactcttcagcagtctcggctactgtttagccaagctggaccaaccaacatgtctcttcaagctaaaaactggctgcctggaccttgctacagacagcagcgtctgtcaaaacaggcaaacgacaacaacaacagcaactttccctggactgcagctacaaagtatcatctaaatggccgggactcgttggttaatccaggaccagctatggccagtcacaaggatgacgaagaaaagtttttccccatgcatggaaccctgatatttggtaaacaaggaacaaatgccaacgacgcggatttggaaaatgtcatgattacagatgaagaagaaatcagggccaccaatcccgtggctacggagcagtacgggactgtgtcaaataatttgcaaaactcaaacactggtccaactactggaactgtcaatcgccaaggagcgttacctggtatggtgtggcaggatcgagacgtgtacctgcagggacccatttgggccaagattcctcacaccgatggacactttcatccttctccactgatgggaggttttggactcaaacacccgcctcctcagatcatgatcaaaaacactcccgttccagccaatcctcccacaaacttcagttctgccaagtttgcttctttcatcacacagtattccacgggacaggtcagcgtggagatcgagtgggagctgcagaaggagaacagcaaacgctggaatcccgaaattcagtacacttccaactacaacaagtctgttaatgtggactttactgtggacactaatggtgtgtattcagagcctcgccccattggcaccagatacctgactcgtaatctgtaattgcttgttaatcaataaaccgtttaattcgtttcagttgaactttggtctctgcgaagggcgaa

SEQ ID NO: 4835 - DNA, 3142 bp, Adeno-associated virus
  source 1..3142: mol_type = unassigned DNA
aaaacgacgggccagtgattgtaatacgactcactatagggcgaaattgaaattagcggccgcgaattcgcctttcgcagagaccaaagttcaactgaaacgaattaaacggtttattgattaacaagcaattacagattacgagtcaggtatctggtgccaatggggcgaggctctgaatacacaccattagtgtccacagtaaagtccacattaacagacttgttgtagttggaagtgtactgaatttcgggattccagcgtttgctgttctccttctgcagctcccactcgatctccacgctgacctgtcccgtggaatactgtgtgatgaaagaagcaaacttggcagaactgaagtttgtgggaggattggctggaacgggagtgtttttgatcatgatctgaggaggcgggtgtttgagtccaaaacctcccatcagtggagaaggatgaaagtgtccatcggtgtgaggaatcttggcccaaatgggtccctgcaggtacacgtctcgatcctgccacaccataccaggtaacgctccttggtgattgacagttccagtagttggaccagtgtttgagttttgcaaattatttgacacagtcccgtactgctccgtagccacgggattggtggccctgatttcttcttcatctgtaatcatgacattttccaaatccgcgtcgttggcatttgttccttgtttaccaaatatcagggttccatgcatggggaaaaacttttcttcgtcatccttgtgactggccatagctggtcctggattaaccaacgagtcccggccatttagatgatactttgtagctgcagtccagggaaagttgctgttgttgttgtcgtttgcctgttttgacagacgctgctgtctgtagcaaggtccaggcagccagtttttagcttgaagagacatgttggttggtccagcttggctaaacagtagccgagactgctgaagagttccactatttgtttgtgtcttgttcagataatacaggtactggtcgatcagaggattcatcagccgatccagactctggctgtgagcgtagctgctgtggaaaggcacgtcttcaaaagtgtagctgaactgaaagttgtttccagtacgcagcatctgagaaggaaagtactccaggcagtaaaaggaagagcgtcctaccgcctgactcccgttgttcagggtgaggtatccatactgtgggaccatgaagacgtccgctggaaacggcgggaggcatccttgatgcgccgagcccaggacgtacgggagctggtactccgagtcagtaaacacctgaaccgtgctggtaaggttattggcaatcgtcgtcgtaccgtcattctgcgtgacctctttgacttgaatattaaagagcttgaagttgagtcttttgggccggaatccccggttgttgttgacgagtctttgccagtcacgtggtgaaaagtggcagtggaatctgttgaagtcaaaatacccccagggggtgctgtagccaaagtagtggttgtcgttgctggctcctgattggctggagatttgcttgtagaggtggttgttgtatgtgggcagggcccaggttcgggtgctggtggtgatgactctgtcgcccagccattgggaatcgcaatgccaatttcctgaggaattacccactccatcggcaccctcgttattgtctgccattggtgcgccactgcctgtagccattgtagtagatcccagaccagagggggctgctggtggctgtccgagaggctgggggtcaggtacggagtctgcgtctccagtctgaccaaaatttaatctttttcttgcaggctgctggcccgcttttccggttcccgaggaggagtctggctccacaggagagtgctctaccggcctcttttttcccggagccgtcttaacaggctcctcaaccaggcccagaggttcaagaaccctctttttcgcctggaagactgctcgtccgaggttgcccccaaaagacgtatcttctttaaggcgctcctgaaactctgcgtcggcgtggttgtacttgaggtacgggttgtctccgctgtcgagctgccggtcgtaggccttgtcgtgctcgagggccgcggcgtctgcctcgttgaccggctcccccttgtcgagtccgttgaagggtccgaggtacttgtacccaggaagcacaagacccctgctgtcgtccttatgccgctctgcgggctttggtggtggtgggccaggtttgagcttccaccactgtcttattccttcagagagagtgtcctcgagccaatctggaagataaccatcggcagccatacctgatttaaatcatttattgttcagagatgcagtcatccaaatccacattgaccagatcgcaggcagtgcaagcgtctggcacctttcccatgatatgatgaatgtagcacagtttctgatacgcctttttgacgacagaaacgggttgagattctgacacgggaaagcactctaaacagtctttctgtccgtgagtgaagcagatatttgaattctgattcattctctcgcattgtctgcagggaaacagcatcagattcatgcccacgtgacgagaacatttgttttggtacctgtccgcgtagttgatcgaagcttccgcgtctgacgtcgatggctgcgcaactgactcgcgcgcccgtttgggctcacttatatctgcgtcactgggggcgggtcttttcttagctccaccctttttgacgtagaattcatgctccacctcaaccacgtgatcctttgcccaccggaaaaagtctttcacttcctgcttggtgacctttccaaagtcatgatccagacggcgggtaagttcaaatttgaacatccggtcttgcaacggctgctggtgctcgaaggtcgttgagttcccgtcaatcacggcgcacatgttggtgttggaggtgacgatcacgggagtcgggtctatctgggccgaggacttgcatttctggtccacacgcaccttgcttcctccaagaatggctttggccgactccacgaccttggcggtcatcttcccctcctcccaccagatcaccatcttgtcgacgcaatggtaaaaggaaagttctcattgg

SEQ ID NO: 4836 - DNA, 2208 bp, Adeno-associated virus
  source 1..2208: mol_type = unassigned DNA
atggctgccgatggttatcttccagattggctcgaggacactctctctgaaggaataagacagtggtggaagctcaaacctggcccaccaccaccaaagcccgcagagcggcataaggacgacagcaggggtcttgtgcttcctgggtacaagtacctcggacccttcaacggactcgacaagggggagccggtcaacgaggcagacgccgcggccctcgagcacgacaaggcctacgaccggcagctcgacagcggagacaacccgtacctcaagtacaaccacgccgacgcagagtttcaggagcgccttaaagaagatacgtcttttgggggcaacctcggacgagcagtcttccaggcgaaaaagagggttcttgaacctctgggcctggttgaggaacctgttaagacggctccgggaaaaaagaggccggtagagcactctcctgtggagccagactcctcctcgggaaccggaaaagcgggccagcagcctgcaagaaaaagattaaattttggtcagactggagacgcagactccgtacctgacccccagcctctcggacagccaccagcagccccctctggtctgggatctactacaatggctacaggcagtggcgcaccaatggcagacaataacgagggtgccgatggagtgggtaattcctcaggaaattggcattgcgattcccaatggctgggcgacagagtcatcaccaccagcacccgaacctgggccctgcccacatacaacaaccacctctacaagcaaatctccagccaatcaggagccagcaacgacaaccactactttggctacagcaccccctgggggtattttgacttcaacagattccactgccacttttcaccacgtgactggcaaagactcatcaacaacaactggggattccggcccaaaagactcaacttcaagctctttaatattcaagtcaaagaggtcacgcagaatggcggtacgacgacgattgccaataaccttaccagcacggttcaggtgtttactgactcggagtaccagctcccgtacgtcctgggctcggcgcatcaaggatgcctcccgccgtttccagcggacgtcttcatggtcccacagtatggatacctcaccctgaacaacgggagtcaggcggtaggacgctcttccttttactgcctggagtactttccttctcagatgctgcgtactggaaacaactttcagttcagctacacttttgaagacgtgcctttccacagcagctacgctcacagccagagtctggatcggctgatgaatcctctgatcgaccagtacctgtattatctgaacaagacacaaacaaatagtggaactcttcagcagtctcggctactgtttagccaagctggaccaaccaacatgtctcttcaagctaaaaactggctgcctggaccttgctacagacagcagcgtctgtcaaaacaggcaaacggcaacaacaacagcaactttccctggactgcagctacaaagtatcatctaaatggccgggactcgttggttaatccaggaccagctatggccagtcacaaggatgacgaagaaaagtttttccccatgcatggaaccctgatatttggtaaacaaggaacaaatgccaacgacgcggatttggaaaatgtcatgattacagatgaagaagaaatcagggccaccaatcccgtggctacggagcagtacgggactgtgtcaaataatttgcaaaactcaaacactggtccaactactggaactgtcaatcaccaaggagcgttacctggtatggtgtggcaggatcgagacgtgtacctgcagggacccatttgggccaagattcctcacaccgatggacactttcatccttctccactgacgggaggttttggactcaaacacccgcctcctcagatcatgatcaaaaacactcccgttccagccaatcctcccacaaacttcagttctgccaagtttgcttctttcatcacacagtattccacgggacaggtcagcgtggagatcgagtgggagctgcagaaggagaacagcaaacgctggaatcccgaaattcagtacacttccaactacaacaagtctgttaatgtggactttactgtggacactaatggtgtgtattcagagcctcgccccattggcaccagatacctgactcgtaatctgtaa

SEQ ID NO: 4837 - protein, 735 aa, Adeno-associated virus
MAADGYLPDWLEDTLSEGIRQWWKLKPGPPPPKPAERHKDDSRGLVLPGYKYLGPFNGLDKGEPVNEADAAALEHDKAYDRQLDSGDNPYLKYNHADAEFQERLKEDTSFGGNLGRAVFQAKKRVLEPLGLVEEPVKTAPGKKRPVEHSPVEPDSSSGTGKAGQQPARKRLNFGQTGDADSVPDPQPLGQPPAAPSGLGSTTMATGSGAPMADNNEGADGVGNSSGNWHCDSQWLGDRVITTSTRTWALPTYNNHLYKQISSQSGASNDNHYFGYSTPWGYFDFNRFHCHFSPRDWQRLINNNWGFRPKRLNFKLFNIQVKEVTQNGGTTTIANNLTSTVQVFTDSEYQLPYVLGSAHQGCLPPFPADVFMVPQYGYLTLNNGSQAVGRSSFYCLEYFPSQMLRTGNNFQFSYTFEDVPFHSSYAHSQSLDRLMNPLIDQYLYYLNKTQTNSGTLQQSRLLFSQAGPTNMSLQAKNWLPGPCYRQQRLSKQANGNNNSNFPWTAATKYHLNGRDSLVNPGPAMASHKDDEEKFFPMHGTLIFGKQGTNANDADLENVMITDEEEIRATNPVATEQYGTVSNNLQNSNTGPTTGTVNHQGALPGMVWQDRDVYLQGPIWAKIPHTDGHFHPSPLTGGFGLKHPPPQIMIKNTPVPANPPTNFSSAKFASFITQYSTGQVSVEIEWELQKENSKRWNPEIQYTSNYNKSVNVDFTVDTNGVYSEPRPIGTRYLTRNL

SEQ ID NO: 4838 - DNA, 2208 bp, Adeno-associated virus
  source 1..2208: mol_type = unassigned DNA
atggctgccgatggttatcttccagattggctcgaggacactctctctgaaggaataagacagtggtggaagctcaaacctggcccaccaccaccaaagctcgcagagcggcatcaggacgacagcaggggtcttgtgcttcctgggtacaagtacctcggacccttcaacggactcgacaaaggagagccggtcaacgaggcagacgccgcggccctcgagcacgacaaggcctacgaccggcagctcgacagcggagacaacccgtacctcaagtacaaccacgccgacgcggagtttcaggagcgtcttaaagaagatacgtcttttgggggcaacctcggacgagcagtcttccaggcgaaaaagagggttcttgaacctctgggcctggttgaggaacctgttaagacggctccgggaaaaaagaggccggtagagcactctcctgtggagccagactcctcctcgggaaccggaaaggcgggccatcagcctgcgagaaagagattgaattttggtcagactggagacgcagactccgtacctgacccccagcctctcggacagccaccagcagcccccacaagtctgggatctactacaatggctacaggcagtggcgcaccaatggcagacaataacgagggtgccgatggagtgggtaattcctcaggaaattggcattgcgattcccaatggctgggcgacagagtcatcaccaccagcacccgaacctgggccctgcccacctacaacaaccacctctacaagcaaatctccagccaatcaggagcctcgaacgacaaccactactttggctacagcaccccctgggggtattttgacttcaacagattccactgtcacttctccccacgtgattggcaaagactcatcaacaacaactggggattccgacccaagagactcaacttcaagctctttaacattcaagtcaaagaggtcacgcagaatgacggtacgacgacgattgccaataaccttaccagcacggttcaggtgtttactgactcggagtaccagctcccgtacgtcctcggctcggcgcatcaaggatgcctcccgccgtttccagcggacgtcttcacggtcccacagtatggatacctcaccctgaacaacgggagtcaggcggtaggacgctcttccttttactgcctggagtactttccttctcagatgctgcgtactggaaacaaccttaccttcagctacacctttgaggacgttcctttccacagcagctacgctcacagccagagtttggaccggctgatgaatcctctgatcgaccagtatctatattatctgaacaggacacaatcaaatagtggaactcttcagcagtctaggctactgtttagccaagctggacccaccagcatgtctcttcaagctaaaaactggctgcctggaccttgctacagacagcagcgtctttcaaagcaggcaaacgacaacaacaacagcaactttccctggactgcggctacaaagtatcatctaaatggccgggactcgttggttaatccaggaccagctatggccagccacaaagacgatgaagaaaagtttttccccatgcatggaaccctgatatttggtaaacaaggaacaaatgctaacgacgcggatttggagcatgttatgattacagatgaagaagaaatcaggaccaccaatcctgtggctacagagcagtacggaaacgtgtcaaataatttgcaaaactcaaatactggtccaactacagaaaatgtcaatcaccagggagcgttacctggtatggtgtggcaggatcgagacgtgtacctgcagggacccatttgggccaagattcctcacaccgacggacactttcacccttctccactgatgggaggttttggactcaaacacccgcctcctcaaatcatgatcaaaaacactcccgttccagccaatcctcccacaaactacagttctgccaagtttgcttctttcatcacacagtattccacgggccaggtcagcgtggagattgagtgggagctgcggaaggagaacagcaaacgctggaaccccgagatccagtatacttccaactacaacaaatctgttaatgtggactttactgtggacactaatggtgtgtattcagagcctcgccccattggcaccagatacctgactcgtaatctgtaa

SEQ ID NO: 4839 - protein, 735 aa, Adeno-associated virus
MAADGYLPDWLEDTLSEGIRQWWKLKPGPPPPKLAERHQDDSRGLVLPGYKYLGPFNGLDKGEPVNEADAAALEHDKAYDRQLDSGDNPYLKYNHADAEFQERLKEDTSFGGNLGRAVFQAKKRVLEPLGLVEEPVKTAPGKKRPVEHSPVEPDSSSGTGKAGHQPARKRLNFGQTGDADSVPDPQPLGQPPAAPTSLGSTTMATGSGAPMADNNEGADGVGNSSGNWHCDSQWLGDRVITTSTRTWALPTYNNHLYKQISSQSGASNDNHYFGYSTPWGYFDFNRFHCHFSPRDWQRLINNNWGFRPKRLNFKLFNIQVKEVTQNDGTTTIANNLTSTVQVFTDSEYQLPYVLGSAHQGCLPPFPADVFTVPQYGYLTLNNGSQAVGRSSFYCLEYFPSQMLRTGNNLTFSYTFEDVPFHSSYAHSQSLDRLMNPLIDQYLYYLNRTQSNSGTLQQSRLLFSQAGPTSMSLQAKNWLPGPCYRQQRLSKQANDNNNSNFPWTAATKYHLNGRDSLVNPGPAMASHKDDEEKFFPMHGTLIFGKQGTNANDADLEHVMITDEEEIRTTNPVATEQYGNVSNNLQNSNTGPTTENVNHQGALPGMVWQDRDVYLQGPIWAKIPHTDGHFHPSPLMGGFGLKHPPPQIMIKNTPVPANPPTNYSSAKFASFITQYSTGQVSVEIEWELRKENSKRWNPEIQYTSNYNKSVNVDFTVDTNGVYSEPRPIGTRYLTRNL

SEQ ID NO: 4840 - DNA, 2208 bp, Adeno-associated virus
  source 1..2208: mol_type = unassigned DNA
atggctgccgatggttatcttccagattggctcgaggacactctctctgaaggaataagacagtggtggaagctcaaacctggcccaccaccaccaaagcccgcagagcggcatcaggacgacagcaggggtcttgtgcttcctgggtacaagtacctcggacccttcaacggactcgacaaaggagagccggtcaacgaggcagacgccgcggccctcgagcacgacaaggcctacgaccggcagctcgacagcggagacaacccgtacctcaagtacaaccacgccgacgcggagtttcaggagcgtcttaaagaagatacgtcttttgggggcaacctcggacgagcagtcttccaggcgaaaaagagggttcttgaacctctgggcctggttgaggaacctgttaagacggctccgggaaaaaagaggccggtagagcactctcctgtggagccagactcctcctcgggaaccggaaaagcgggccatcagcctgcgagaaagagattgaattttggtcagactggagacgcagactccgtacctgacccccagcctctcggacagccaccagcagcccccacaagtttgggatctactacaatggctacaggcagtggcgcaccaatggcagacaataacgagggtgccgatggagtgggtaattcctcaggaaattggcattgcgattcccaatggctgggcgacagagtcatcaccaccagcacccgaacctgggccctgcccacctacaacaaccacctctacaagcaaatctccagccaatcaggagcctcgaacgacaaccactactttggctacagcaccccctgggggtattttgacttcaacagattccactgtcacttctccccacgtgattggcaaagactcatcaacaacaactggggattccgacccaagagactcaacttcaagctctttaacattcaagtcaaggaggtcacgcagaatgacggtacgacgacgattgccaataaccttaccagcacggttcaggtgtttactgactcggagtaccagctcccgtacgtcctcggctcggcgcatcaaggatgcctcccgccgtttccagcggacgtcttcatggtcccacagtatggatacctcaccctgaacaacgggagtcaggcggtaggacgctcttccttttactgcctggagtactttccttctcagatgctgcgtactggaaacaactttaccttcagctacacctttgaggacgttcctttccacagcagctacgctcacagccagagtttggaccggctgatgaatcctctgatcgaccagtatctatattatctgaacaggacacaatcaaatagtggaactcttcagcagtctaggctactgtttagccaagctggacccaccagcatgtctcttcaagctaaaaactggctgcctggaccttgctacagacagcagcgtctttcaaagcaggcaaacgacaacaacaacagcaactttccctggactgcggctacaaagtatcgtctaaatggccgggactcgttggttaatccaggaccagctatggccagccacaaagacgatgaagaaaagtttttccccatgcatggaaccctgatatttggtaaacaaggaacaaatgctaacgacgcggatttggagcatgttatgattacagatgaagaagaaatcaggaccaccaatcctgtggctacagagcagtacggaaacgtgtcaaataatttgcaaaactcaaatactggtccaactacagaaaatgtcaatcaccagggagcgttacctggtatggtgtggcaggatcgagacgtgtacctgcagggacccatttgggccaagattcctcacaccgacggacactttcacccttctccactgatgggaggttttggactcaaacacccgcctcctcaaatcatgatcaaaaacactcccgttccagccaatcctcccacaaacttcagttctgccaagtttgcttctttcatcacacagtattccacgggccaggtcagcgtggagattgagtgggagctgcagaaggagaacagcaaacgctggaaccccgagatccagtatacttccaactacaacaaatctgttaatgtggactttactgtggacactaatggtgtgtattcagagcctcgccccattggcaccagatacctgactcgtaatctgtaa

SEQ ID NO: 4841 - protein, 735 aa, Adeno-associated virus
MAADGYLPDWLEDTLSEGIRQWWKLKPGPPPPKPAERHQDDSRGLVLPGYKYLGPFNGLDKGEPVNEADAAALEHDKAYDRQLDSGDNPYLKYNHADAEFQERLKEDTSFGGNLGRAVFQAKKRVLEPLGLVEEPVKTAPGKKRPVEHSPVEPDSSSGTGKAGHQPARKRLNFGQTGDADSVPDPQPLGQPPAAPTSLGSTTMATGSGAPMADNNEGADGVGNSSGNWHCDSQWLGDRVITTSTRTWALPTYNNHLYKQISSQSGASNDNHYFGYSTPWGYFDFNRFHCHFSPRDWQRLINNNWGFRPKRLNFKLFNIQVKEVTQNDGTTTIANNLTSTVQVFTDSEYQLPYVLGSAHQGCLPPFPADVFMVPQYGYLTLNNGSQAVGRSSFYCLEYFPSQMLRTGNNFTFSYTFEDVPFHSSYAHSQSLDRLMNPLIDQYLYYLNRTQSNSGTLQQSRLLFSQAGPTSMSLQAKNWLPGPCYRQQRLSKQANDNNNSNFPWTAATKYRLNGRDSLVNPGPAMASHKDDEEKFFPMHGTLIFGKQGTNANDADLEHVMITDEEEIRTTNPVATEQYGNVSNNLQNSNTGPTTENVNHQGALPGMVWQDRDVYLQGPIWAKIPHTDGHFHPSPLMGGFGLKHPPPQIMIKNTPVPANPPTNFSSAKFASFITQYSTGQVSVEIEWELQKENSKRWNPEIQYTSNYNKSVNVDFTVDTNGVYSEPRPIGTRYLTRNL

SEQ ID NO: 4842 - DNA, 2208 bp, Adeno-associated virus
  source 1..2208: mol_type = unassigned DNA
atggctgccgatggttatcttccagattggctcgaggacactctctctgaaggaataagacagtggtggaagctcaaacctggcccaccaccaccaaagcccgcagagcggcatcaggacgacagcaggggtcttgtgcttcctgggtacaagtacctcggacccttcaacggactcgacaaaggagagccggtcaacgaggcagacgccgcggccctcgagcacgacaaggcctacgaccggcagctcgacagcggagacaacccgtacctcaagtacaaccacgccgacgcggagtttcaggagcgtcttaaagaagatacgtcttttgggggcaacctcggacgagcagtcttccaggcgaaaaagagggttcttgaacctctgggcctggttgaggaacctgttaagacggctccgggaaaaaagaggccggtagagcactctcctgtggagccagactcctcctcgggaaccggaaaagcgggccatcagcctgcgagaaagagattgaattttggtcagactggagacgcagactccgtacctgacccccagcctctcggacagccaccagcagcccccacaagtttgggatctactacaatggctacaggcagtggcgcaccaatggcagacaataacgagggtgccgatggagtgggtaattcctcaggaaattggcattgcgattcccaatggctgggcgacagagtcatcaccaccagcacccgaacctgggccctgcccacctacaacaaccacctctacaagcaaatctccagccaatcaggagcctcgaacgacaaccactactttggctacagcaccccctgggggtattttgacttcaacagattccactgtcacttctccccacgtgattggcaaagactcatcaacaacaactggggattccgacccaagagactcaacttcaagctctttaacattcaagtcaaagaggtcacgcagaatgacggtacgacgacgattgccaataaccttaccagcacggttcaggtgtttactgactcggagtaccagctcccgtacgtcctcggctcggcgcatcaaggatgcctcccgccgtttccagcggacgtcttcatggtcccacagtatggatacctcaccctgaacaacgggagtcaggcggtaggacgcccttccttttactgcctggagtactttccttctcagatgctgcgtactggaaacaactttaccttcagctacacctttgaggacgttcctttccacagcagctacgctcacagccagagtttggaccggctgatgaatcctctgatcgaccagtatctatattatctgaacaggacacaatcaaatagtggaactcttcagcagtctaggctactgtttagccaagctggacccaccagcatgtctcttcaagctaaaaactggctgcctggaccttgctacagacagcagcgtctttcaaagcaggcaaacgacaacaacaacagcaactttccctggactgcggctacaaagtatcatctaaatggccgggactcgttggttaatccaggaccagctatggccagccacaaagacgatgaagaaaagtttttccccatgcatgggaccctgatatttggtaaacaaggaacaaatgctaacgacgcggatttggagcatgttatgattacagatgaagaagaaatcaggaccaccaatcctgtggctacagagcagtacggaaacgtgtcaaataatttgcaaaactcaaatactggtccaactacagaaaatgtcaatcaccagggagcgttacctggtatggtgtggcaggatcgagacgtgtacctgcagggacccatttgggccaagattcctcacaccgacggacactttcacccttctccactgatgggaggttttggactcaaacacccgcctcctcaaatcatgatcaaaaacactcccgttccagccaatcctcccacaaacttcagttctgccaagtttgcttctttcatcacacagtattccacgggccaggtcagcgtggagattgagtgggagctgcagaaggagaacagcaaacgctggaaccccgagatccagtatacttccaactacaacaaatctgttaatgtggactttactgtggacactaatggtgtgtattcagagcctcgccccattggcaccagatacctgactcgtaatctgtaa

SEQ ID NO: 4843 - protein, 735 aa, Adeno-associated virus
MAADGYLPDWLEDTLSEGIRQWWKLKPGPPPPKPAERHQDDSRGLVLPGYKYLGPFNGLDKGEPVNEADAAALEHDKAYDRQLDSGDNPYLKYNHADAEFQERLKEDTSFGGNLGRAVFQAKKRVLEPLGLVEEPVKTAPGKKRPVEHSPVEPDSSSGTGKAGHQPARKRLNFGQTGDADSVPDPQPLGQPPAAPTSLGSTTMATGSGAPMADNNEGADGVGNSSGNWHCDSQWLGDRVITTSTRTWALPTYNNHLYKQISSQSGASNDNHYFGYSTPWGYFDFNRFHCHFSPRDWQRLINNNWGFRPKRLNFKLFNIQVKEVTQNDGTTTIANNLTSTVQVFTDSEYQLPYVLGSAHQGCLPPFPADVFMVPQYGYLTLNNGSQAVGRPSFYCLEYFPSQMLRTGNNFTFSYTFEDVPFHSSYAHSQSLDRLMNPLIDQYLYYLNRTQSNSGTLQQSRLLFSQAGPTSMSLQAKNWLPGPCYRQQRLSKQANDNNNSNFPWTAATKYHLNGRDSLVNPGPAMASHKDDEEKFFPMHGTLIFGKQGTNANDADLEHVMITDEEEIRTTNPVATEQYGNVSNNLQNSNTGPTTENVNHQGALPGMVWQDRDVYLQGPIWAKIPHTDGHFHPSPLMGGFGLKHPPPQIMIKNTPVPANPPTNFSSAKFASFITQYSTGQVSVEIEWELQKENSKRWNPEIQYTSNYNKSVNVDFTVDTNGVYSEPRPIGTRYLTRNL

SEQ ID NO: 4844 - DNA, 2208 bp, Adeno-associated virus
  source 1..2208: mol_type = unassigned DNA
atggctgccgatggttatcttccagattggctcgaggacactctctctgaaggaataagacagtggtggaagctcaaacctggcccaccaccaccaaagcccgcagagcggcataaggacgacagcaggggtcttgtgcttcctgggtacaagtacctcggacccttcaacggactcgacaagggagagccggtcaacgaggcagacgccgcggccctcgagcacgacaaggcctacgaccggcagctcgacagcggagacaacccgtacctcaagtacaaccacgccgacgcggagtttcaggagcgccttaaagaagatacgtcttttgggggcaacctcggacgagcagtcttccaggcaaaaaagagggttcttgaacctctgggcctggttgaggagcctgttaaaacggctccgggaaaaaagaggccggtagagcactctcctgcggagccagactcctcctcgggaaccggaaaagcgggccagcagcctgcaagaaaaagattgaatttcggtcagactggagacgcagactccgtacctgacccccagcctctcggacagccaccagcagccccctctggtctgggaactaatacgatggcttcaggcagtggcgcaccaatggcagacaataacgagggcgccgacggagtgggtaattcctcgggaaattggcattgcgattccacatggatgggcgacagagtcatcaccaccagcacccgaacttgggccctgcccacctacaacaaccatctctacaagcaaatctccagccaatcaggagccagcaacgacaaccactactttggctacagcaccccttgggggtattttgacttcaacagattccactgccacttttcaccacgtgactggcaaagactcatcaacaacaactggggattccggcccaagagactcaacttcaagctctttaacattcaagtcaaagaggtcacgcagaatgacggtacgacgacgattgccaataaccttaccagcacggttcaggtgtttactgactcggagtaccagctcccgtacgtcctcggctcggcgcatcaaggatgcctcccgccgttcccagcagacgtcttcatggtgccacagtatggatacctcaccctgaacaacgggagtcaggcagtaggacgctcttcattttactgcctggagtactttccttctcagatgctgcgtaccggaaacaactttaccttcagctacacctttgaggacgttcctttccacagcagctacgctcacagccagagtttggaccgtctcatgaatcctctcatcgaccagtacctgtattacttgagcagaacaaacactccaagcggaaccaccacgcagtccaggcttcagttttctcaggccggagcaagtgacattcgggaccagtctaggaactggcttcctggaccctgttaccgccagcagcgagtatcaaagacatctgcggataacaacaacagtgaatactcgtggactggagctaccaagtaccacctcaatggcagagactctctggtgaatccgggcccggccatggccagccacaaggacgatgaagaaaagttttttcctcagagcggggttctcatctttgggaagcaaggctcagagaaaacaaatgtggacattgaaaaggtcatgattacagacgaagaggaaatcaggaccaccaatcccgtggctacggagcagtatggttctgtatctaccaacctgcagggcggcaacacacaagcagctaccgcagatgtcaacacacaaggcgttcttccaggcatggtctggcaggacagagacgtgtacctgcaggggcccatctgggcaaagattccacacacggacggacattttcacccctctcccctcatgggcggattcggacttaaacaccctcctccacagattctcatcaagaacaccccggtacctgcgaatccttcgaccaccttcagtgcggcaaagtttgcttctttcatcacacagtattccacggggcaggtcagcgtggagatcgagtgggagctgcagaaggagaacagcaaacgctggaatcccgagatccagtacacttccaactacaacaaatctgttaatgtggactttactgttgacactaatggcgtgtattcagagcctcgccccattggcaccagatacctgactcgtaatctgtaa

SEQ ID NO: 4845 - protein, 735 aa, Adeno-associated virus
MAADGYLPDWLEDTLSEGIRQWWKLKPGPPPPKPAERHKDDSRGLVLPGYKYLGPFNGLDKGEPVNEADAAALEHDKAYDRQLDSGDNPYLKYNHADAEFQERLKEDTSFGGNLGRAVFQAKKRVLEPLGLVEEPVKTAPGKKRPVEHSPAEPDSSSGTGKAGQQPARKRLNFGQTGDADSVPDPQPLGQPPAAPSGLGTNTMASGSGAPMADNNEGADGVGNSSGNWHCDSTWMGDRVITTSTRTWALPTYNNHLYKQISSQSGASNDNHYFGYSTPWGYFDFNRFHCHFSPRDWQRLINNNWGFRPKRLNFKLFNIQVKEVTQNDGTTTIANNLTSTVQVFTDSEYQLPYVLGSAHQGCLPPFPADVFMVPQYGYLTLNNGSQAVGRSSFYCLEYFPSQMLRTGNNFTFSYTFEDVPFHSSYAHSQSLDRLMNPLIDQYLYYLSRTNTPSGTTTQSRLQFSQAGASDIRDQSRNWLPGPCYRQQRVSKTSADNNNSEYSWTGATKYHLNGRDSLVNPGPAMASHKDDEEKFFPQSGVLIFGKQGSEKTNVDIEKVMITDEEEIRTTNPVATEQYGSVSTNLQGGNTQAATADVNTQGVLPGMVWQDRDVYLQGPIWAKIPHTDGHFHPSPLMGGFGLKHPPPQILIKNTPVPANPSTTFSAAKFASFITQYSTGQVSVEIEWELQKENSKRWNPEIQYTSNYNKSVNVDFTVDTNGVYSEPRPIGTRYLTRNL

SEQ ID NO: 4846 - DNA, 3161 bp, Adeno-associated virus
  source 1..3161: mol_type = unassigned DNA
gattgaatttagcggccgcgaattcgcccttgctgcgtcaactggaccaatgagaactttccattcaatgattgcgtcgacaagatggtgatctggtgggaggagggaaagatgaccgccaaggtcatggagtcggccaaagccattctcggaggaagcaaggtgcgcgtggaccagaaatgtaagtcctcggcccagatagacccgactcccgtgattgtcacctccaacaccaacatgtgcgccgtgattgacgggaactcaacgaccttcgagcaccagcagccgttgcaagaccggatgttcaaatttgaactcacccgccgtctggatcatgactttgggaaggtcaccaagcaggaagtcaaagactttttccggtgggcaaaggatcacgtggttgaggtggagcatgaattctacgtcaaaaagggtggagccaagaaaagacccgcccccagtgacgcagatataagtgagcccaaacgggcgcgcgggtcagttgcgcagccatcgacgtcagacgcggaagcttcgatcaactacgcggacaggtaccaaaacaaatgttctcgtcacgtgggcatgaatctgatgctgtttccctgcagacaatgcgagagaatgaatcaaaattcaaatatctgcttcactcacggacagaaggactgtttagagtgctttcccgtgtcagaatctcaacccgtttctgtcgtcaaaaaggcgtatcagaaactttgctacattcatcatatcatgggaaaggtgccagacgcttgcactgcctgcgatctggtcaatgtggatttggatgactgcatctctgaacaataaatgatttaaatcaggtatggctgccgatggttatcttccagattggctcaaggacactctctctgaaggaataagacagtggtggaagctcaaacctggcccaccaccaccaaagcccgcagagcggcataaggacgacagcgggggtcttgtgcttcctgggtacaagtacctcggacccttcaacggactcgacaagggagagccggtcaacgaggcagacgccgcggccctcgagtacgacaaggcctacgaccggcagctcgacagcggagacaacccgtacctcaagtacaaccacgccgacgcggagtttcaggagcgccttaaagaagatacgtcttttgggggcaacctcggacgagcagtcttccaggcgaaaaagagggttcttgaacctctgggcctggttgaggaacctgttaagacggctccgggaaaaaagaggccggtagagcactctcctgtggagccagactcctcctcgggaacaggaaaagcgggccagcagcctgcgagaaagagattgaattttggtcagactggagacgcagactccgtacctgacccccagcctctcggacagccaccagcagccccctctggtctgggaactaatacgatggctacaggcagtggcgcaccaatggcagacaataacgagggcgccgacggagtgggtaattcctcgggaagttggcattgcgattccacatggatgggcgacagagtcatcaccaccagcacccgaacctgggctctgcccacctacaacaaccatctgtacaagcagatctccagccaatcaggagccagcaacgacaaccactactttggctacagcaccccttgggggtattttgacttcaacagattccactgccacttttcaccacgtgactggcaaagactcatcaacaacaactggggattccggcccaagagactcaacttcaagctctttaacattcaagtcaaggaggtcacgcagaatgacggtacgacgacgattgccaataaccttaccagcacggttcaggtgtttactgactcggagtaccagctcccgtacgtccccggctcggcgcatcaaggatgcctcccgccgttcccagcagacgtcttcatggtgccacagtatggatacctcaccctgaacaacgggagtcaggcagtaggacgctcttcattttactgcctggagtactttccttctcagatgcttcgtaccggaaacaactttaccttcagctacacctttgaggatgttcctttccacagcagctacgctcacagccagagtttggaccgtctcatgaatcctctcatcgaccagtacctgtattacttgagcagaacaaacactccaagcggaaccaccacgcagtccaggcttcagttttctcaggccggagcaagtgacattcgggaccagtctaggaactggcttcctggaccctgttaccgccagcagcgagtatcaaagacagctgcggacaacaacaacagtgaatactcgtggactggagctaccaagtaccacctcaatggcagagactctctggtgaatccgggcccggccatggccagccacaaggacgatgaagaaaagttttttcctcaaagcggggttctcatctttgggaagcaaggctcagagaaaacaaatgtggacattgaaaaggtcatgattacagacgaagaggaaatcagaaccaccaatcccgtggccacggagcagtatggttctgtatctaccaacctccagagcggcaacacacaagcagctactgcagatgtcaacacacaaggcgttcttccaggcatggtctggcaggacagagacgtgcacctgcaggggcctatctgggcaaagattccacacacggacggacattttcacccctctcccctcatgggcggatttggacttaaacaccctcctccacagattctcatcaagaacaccccggtacctgcaaatccttcgaccaccttcagtgcggcaaagtttgcttccttcatcacacagtattccacagggcaggtcagcgtggagatcgagtgggagctgcagaaggagaacagcaaacgctggaaccccgagatccagtacacttccaactacaacaaatctgttaatgtggactttactgtggacactaatggtgtgtattcagagcctcgccccattggcaccagatacctgactcgtaatctgtaattgcttgttaatcaataaaccgtttaattcgtttcagttgaactttggtctctgcgaagggcgaattcgtttaaaccctgcaggactagtccctttagtgagg

SEQ ID NO: 4847 - DNA, 3162 bp, Adeno-associated virus
  source 1..3162: mol_type = unassigned DNA
gaattgaatttagcggccgcgaattcgcccttcgcagagaccaaagttcaactgaaacgaattaaacggtttattgattaacaagcaattacagattacgagtcaggtatctggtgccaatggggcgaggctctgaatacacgccattagtgtccacagtaaagtccacattaacagacttgttgtagttggaagtgtactgaatttcgggattccagcgtttgctgttttccttctgcagctcccactcgatctccacgctgacctgtcccgtggagtactgtgtgatgaaggaagcaaactttgccgcactgaaggtggtcgaaggattcgcaggtaccggggtgttcttgatgagaatctgtggaggagggtgtttaagtccgaatccacccatgaggggagaggggtgaaaatgtccgtccgtgtgtggaatctttgcccagatgggcccctgaaggtacacatctctgtcctgccagaccatgcctggaagaacgccttgtgtgttgacatctgcggtagctgcttgtctgttgcctctctggaggttggtagatacagaaccgtactgctccgtagccacgggattggttgtcctgatttcctcttcgtctgtaatcatgaccttttcaatgtccacatttgttttctctgagccttgcttcccaaagatgagaaccccgctctgaggaaaaaacttttcttcattgtccttgtggcttgccatggccgggcccggattcaccagagagtctctgccattgaggtggtacttggtagctccagtccacgagtattcactgttgttgttatccgcagatgtctttgatactcgctgctggcggtaacagggtccaggaagccagttcctagactggtcccgaatgtcactcgctccggcctgagaaaactgaagccttgactgcgtggtggttccacttggagtgtttgttgtgctcaagtaatacaggtactggtcgatgagaggattcatgagacggtccagactctggctgtgagcgtagccgctgtggaaaggaacgtcctcaaaagtgtagctgaaggtaaagttgtttccggtacgcagcatctgagaaggaaagtactccaggcagtaaaatgaagagcgtcctactgcctgactcccgttgttcagggtgaggtatccatactgtggcaccatgaagacgtctgctgggaacggcgggaggcatccttgatgcgccgagccgaggacgtacgggagctggtactccgagtcagtaaacacctgaaccgtgctggtaaggttattggcaatcgtcgtcgtaccgtcattctgcgtgacctctttgacttgaatgttaaagagcttgaagttgagtctcttgggtcggaatccccagttgttgttgatgagtctttgccagtcacgtggtgaaaagtggcagtggaatctgttgaagtcaaaatacccccaaggggtgctgtagccaaagtagtgattgtcgttcgaggctcctgattggctggaaatttgtttgtagaggtggttgttgtaggtgggcagggcccaggttcgggtgctggtggtgatgactctgtcgcccatccatgtggaatcgcaatgccaatttcccgaggaattacccactccgtcggcgccctcgttattgtctgccattggtgcgccactgcctgtagccatcgtattagttcccagaccagagggggctgctggtggctgtccgagaggctgggggtcaggtactgagtctgcgtctccagtctgaccaaaattcaatctttttcttgcaggctgctggcccgcctttccggttcccgaggaggagtctggctccacaggagagtgctctaccggcctcttttttcctggagccgtcttgacaggttccccaaccaggcccagaggttcaagaaccctctttttcgcctggaagactgctcgtccgaggttgcccccaaaagacgtatcttctttaaggcgctcctgaaactccgcgtcggcgtggttgtacttgaggtacgggttgtctccgctgtcgagctgccggtcgtaggctttgtcgtgctcgagggccgcggcgtctgcctcgttgaccggctctcccttgtcgagtccgttgaagggtccgaggtacttgtacccaggaagcacaagacccctgctgtcgtccttatgccgctctgcgggctttggtggtggtgggccaggtttgagcttccaccactgtcttattccttcagagagagtgtcctcgagccaatctggaagataaccatcggcagccatacctgatttaaatcatttattgttcaaagatgcagtcatccaaatccacattgaccagatcgcaggcagtgcaagcgtctggcacctttcccatgatatgatgaatgtagcacagtttctgatacgcctttttgacgacagaaacgggttgagattctgacacgggaaagcactctaaacagtctttctgtccgtgagtgaagcagatatttgaattctgattcattctctcgcattgtctgcagggaaacagcatcagattcatgcccacgtgacgagaacatttgttttggtacctgtctgcgtagttgatcgaagcttccgcgtctgacgtcgatggctgcgcaactgactcgcgcacccgtttgggctcacttatatctgcgtcactgggggcgggtcttttcttggctccaccctttttgacgtagaattcatgctccacctcaaccacgtgatcctttgcccaccggaaaaagtctttgacttcctgcttggtgaccttcccaaagtcatgatccagacggcgggtgagttcaaatttgaacatccggtcttgcaacggctgctggtgttcgaaggtcgttgagttcccgtcaatcacggcgcacatgttggtgttggaggtgacgatcacgggagtcgggtctatctgggccgaggacttgcatttctggtccacgcgcaccttgcttcctccgagaatggctttggccgactccacgaccttggcggtcatcttcccctcctcccaccagatcaccatcttgtcgacacagtcgttgaagggaaagttctcattggtccagttgacgcagcaagggcgaattcgtttaaacctgcaggactagtccctttagtgaggg

SEQ ID NO: 4848 - DNA, 3164 bp, Adeno-associated virus
  source 1..3164: mol_type = unassigned DNA
gcgaattgaatttagcggccgcgaattcgcccttcgcagagaccaaagttcaactgaaacgaattaaacggtttattgattaacaagcaattacaaattacgagtcaggtatctggtgccaatggggcgaggctctgaatacacgccattagtgtccacagtaaagtccacattaacagacttgttgtagttggaagtgtactgaatttcgggattccagcgtttgctgttttccttctgcagctcccactcgatctccacgctgacctgtcccgtggagtactgtgtgatgaaggaagcaaactttgccgcactgaaggtggtcgaaggattcgcaggtaccggggtgttcttgatgagaatctgtggaggagggtgtttaggtccgaatccacccatgaggggagaggggtgaaaatgtccgtccgtgtgtggaatctttgcccagatgggcccctgaaggtacacatctctgtcctgccagaccatgcctggaagaacgccttgtgtgttgacatctgcggtagctgcttgtctgttgcctctctggaggttggtagatacagaaccatactgctccgtagccacgggattggttgtcctgatttcctcttcgtctgtaatcatgaccttttcaatgtccacatttgttttctctgagccttgcttcccaaagatgagaaccccgctctgaggaaaaaacttttcttcattgtccttgtggcttgccatggccgggcccggattcaccagagagtctctgccattgaggtggtacttggtagctccagtccacgagtattcactgttgttgttatccgcagatgtctttgatactcgctgctggcggtaacagggtccaggaagccagttcctagactggtcccgaatgtcactcgctccggcctgagaaaactgaagccttgactgcgtggtggttccacttggagtgtttgttgtgctcaagtaatacaggtactggtcgatgagaggattcatgagacggtccagactctggctgtgagcgtagctgctgtggaaaggaacgtcctcaaaagtgtagctgaaggtaaagttgtttccggtacgcagcatctgagaaggaaagtactccgggcagtaaaatgaagagcgtcctactgcctgactcccgttgctcagggtgaggtatccatactgtggcaccatgaagacgtctgctgggaacggcgggaggcatccttgatgcgccgagccgaggacgtacgggagctggtactccgagtcagtaaacacctgaaccgtgctggtaaggttattggcaatcgtcgtcgtaccgtcattctgcgtgacctctttgacttgaatgttaaagagcttgaagttgagtctcttgggtcggaatccccagttgttgttgatgagtctttgccagtcacgtggtgaaaagtggcagtggaatctgttgaagtcaaaatacccccaaggggtgctgtagccaaagtagtgattgtcgttcgaggctcctgattggctggaaatttgtctgtagaggtggttgttgtaggtgggcagggcccaggttcgggtgctggtggtgatgactctgtcgcccatccatgtggaatcgcaatgccgatttcccgaggaattacccactccgtcggcgccctcgttattgtctgccattggtgcgccactgcctgtagccatcgtattagttcccagaccagagggggctgctggtggctgtccgagaggctgggggtcaggtactgagtctgcgtctccagtctgaccaaaattcaatctttttcttgcaggctgctggcccgcctttccggttcccgaggaggagtctggctccacaggagagtgctctaccggcctcttttttcccggagccgtcttaacaggttccccaaccaggcccagaggttcaagaaccctctttttcgcctggaagactgctcgtccgaggttgcccccaaaagacgtatcttctttaaggcgctcctgaaactccgcgtcggcgtggttgtacttgaggtacgggttgtctccgctgtcgagctgccggtcgtaggctttgtcgtgctcgagggccgcggcgtctgcctcgttgaccggctctcccttgtcgagtccgttgaagggtccgaggtacttgtacccaggaagcacaagacccctgctgtcgtccttatgccgctctgcgggctttggtggtggtgggccaggtttgagcttccaccactgtcttattccttcagagagagtgtcctcgagccaatctggaagataaccatcggcagccatacctgatttaaatcatttattgttcaaagatgcagtcatccaaatccacattgaccagatcgcaggcagtgcaagcgtctggcacctttcccatgatatgatgaatgtagcacagtttctgatacgcctttttgacgacagaaacgggttgagattctgacacgggaaagcactctaaacagtctttctgtccgtgagtgaagcagatatttgaattctgattcattctctcgcattgtctgcagggaaacagcatcagattcatgcccacgtgacgagaacatttgttttggtacctgtctgcgtagttgatcgaagcttccgcgtctgacgtcgatggctgcgcaactgactcgcgcacccgtttgggcccacttatatctgcgtcactgggggcgggtcttttcttggctccaccctttttgacgtagaattcatgctccacctcaaccacgtgatcctttgcccaccggaaaaagtctttgacttcctgcttggtgaccttcccaaagtcatgatccagacggcgggtgagttcaaatttgaacatccggtcttgcaacggctgctggtgttcgaaggtcgttgagttcccgtcaatcacggcgcacatgttggtgttggaggtgacgatcacgggagtcgggtctatctgggccgaggacttgcatttctggtccacgcgcaccttgcttcctccgagaatggctttggccgactccacgaccttggcggtcatcttcccctcctcccaccagatcaccatcttgtcgacacagtcgttgaagggaaagttctcattggtccagttgacgcagcaagggcgaattcgtttaaacctgcaggactagtccctttagtgaggg

SEQ ID NO: 4849 - DNA, 3163 bp, Adeno-associated virus
  source 1..3163: mol_type = unassigned DNA
accctcactaaagggactagtcctgcaggtttaaacgaattcgcccttgctgcgtcaactggagcaatgagaactttcccttcaacgactgtgtcgacaagatggtgatttggtgggaggaggggaagatgaccgccaaggtcgtggagtcggccaaagccattctcggaggaagcaaggtgcgcgtggaccagaaatgcaagtcctcggcccagatagatccgactcccgtgatcgtcacctccaacaccaacatgtgcgccgtgattgacgggaactcaacgaccttcgaacaccagcagccgttgcaagaccggatgttcaaatttgaactcacccgccgtctggatcatgactttgggaaggtcaccaagcaggaagtcaaagactttttccggtgggcaaaggatcacgtggttgaggtggagcatggattctacgtcaaaaagggtggagccaagaaaagacccgcccctagtgacgcagatataagtgagcccaaacgggtgcgcgagtcagttgcgcagccatcgacgtcggacgcggaagcttcgatcaactacgcggacaggtaccaaaacaaatgttctcgtcacgtgggcatgaatctgatgctgtttccctgcagacaatgcgagagaatgaatcaaaattcaaatatctgcttcactcacggacagaaagactgtttagagtgctttcccgtgtcagaatctcaacctgtttctgtcgtcaaaaaggcgtatcagaaactgcgctacattcatcatatcatgggaaaggtgccagacgcttgcactgcctgcgatctggtcaatgtggatttggatgactgcatctctgaacaataaatgatttaaatcaggtatggctgccgatggttatcttccagattggctcgaggacactctctctgaaggaataagacagtggtggaagctcaaacctggcccaccaccaccaaagcccgcagagcggcataaggacgacagcaggggtcttgtgcttcctgggtacaagtacctcggacccttcaacggactcgacaagggagagccggtcaacgaggcagacgccgcggccctcgagcacgacaaggcctacgaccggcagctcgacagcggagacaacccgtacctcaagtacaaccacgccgacgcggagtttcaggagcgtcttaaagaagatacgtcttttgggggcaacctcggacgagcagtcttccaggcgaaaaagagggttcttgaacctctgggcctggttgaggaacctgttaagacggctccgggaaaaaagaggccggtagagcactctcctgcggagccagactcctcctcgggaaccggaaaagcgggccagcagcctgcaagaaaaagactgaatttcggtcagactggagacgcagactccgtacctgacccccagcctctcggacagccaccagcagcccccacaagtttgggatctactacaatggctacaggcagtggcgcaccaatggcagacaataacgagggtgccgatggagtgggtaattcctcaggaaattggcattgcgattcccaatggctgggcgacagagtcatcaccaccagcacccgaacctgggccctgcccacctacaacaaccacctttacaagcaaatctccagccaatcaggagcctcaaacgacaaccactactttggctacagcaccccctgggggtattttgacttcaacagattccactgccacttttcaccacgtgactggcaaagactcatcaacaacaactggggattccgacccaagagactcaacttcaagctctttaacattcaagtcaaagaggtcacgcagaatgacggtacgacgacgattgccaataaccttaccagcacggttcaggtgtttactgactcggagtaccagctcccgtacgtcctcggctcggcgcatcaaggatgcctcccgccgtttccagcggacgtcttcatggtcccacagtatggatacctcaccctgaacaacgggagtcaggcggtaggacgctcttccttttactgcctggagtgctttccttctcagatgctgcgtactggaaacaactttcagttcagctacacttttgaagacgtgcctttccacagcagctacgctcacagccagagtttggatcggctgatgaatcctctgatcgaccagtacctgtattatctaaacagaacacaaacagctagtggaactcagcagtctcggctactgtttagccaagctggacccacaagcatgtctcttcaagctaaaaactggctgcctggaccgtgttatcgccagcagcgtttgtcaaagcaggcaaacgacaacaacaacagcaactttccctggactggagctaccaagtaccacctcaatggcagagactctttggtgaacccgggcccggccatggccagccacaaggacgatgaagaaaagtttttccccatgcatggaaccctaatatttggtaaagaaggaacaaatgctaccaacgcggaattggaaaatgtcatgattacagatgaagaggaaatcaggaccaccaatcccgtggctacagagcagtacggatatgtgtcaaataatttgcaaaactcaaatactgctgcaagtactgaaactgtgaatcaccaaggagcattacctggtatggtgtggcaggatcgagacgtgtacctgcagggacccatttgggccaagattcctcacaccgatggacactttcatccttctccactgatgggaggttttggactcaaacacccgcctcctcagattatgatcaaaaacactcccgttccagccaatcctcccacaaacttcagttctgccaagtttgcttccttcatcacacagtattccacgggacaggtcagcgtggagatcgagtgggagctgcagaaggagaacagcaaacgctggaatcccgaaattcagtacacttccaactacaacaaatctgttaatgtggactttactgtggacactaatggtgtgtattcagagcctcgccccattggcaccagatacctgactcgtaatctgtaattgcttgttaatcaataaaccgtttaattcgtttcagttgaactttggtctctgcgaagggcgaattcgcggccgctaaattcaattcgcc

SEQ ID NO: 4850 - protein, 735 aa, Adeno-associated virus
MAADGYLPDWLEDTLSEGIRQWWKLKPGPPPPKPAERHKDDSRGLVLPGYKYLGPFNGLYKGEPVDEADAAALEHDKAYDRQLDSGDNPYLKYNHADAEFQERLKEDTSFGGNLGRAVFQAKKRVLEPLGLVGEPVKTAPGKKRPVEHSPVEPDSSSGTGKAGNQPARKRLNFGQTGDADSVPDPQPLGQPPAAPSGLGSTTMATGSGAPVADNNEGADGVGNSSGNWHCDSQWLGDRVITTSTRTWALPTYNNHLYKQISSQSGASNDNHYFGYSTPWGYFDFNRFHCHFSPRDRQRLINNNWGFRPKRLNFKLFNIQVKEVTQNDGTTTIANNLTSTVQVFTDSGYQLPYVLGLAHQGCLPPFPADVFMVPQYGYLTLNNGSQAVGRSSFYCLEYFPSQMLRTGNNFQFSYTFEDVPFHSSYAHSQSLDRLMNPLIDQYLYYLNKTQSNSGTLQQSRLLFSQAGPTSMSLQAKNWLPGPCYRQQRLSKQANDNNNSNFPWTAATKYHLNGRDSLVNPGPAMASHKDDEEKFFPMHGTLIFGKQGTNANDADLDNVMITDEEEIRTTNPVATEQYGYVSNNLQNSNTGPTTGTVNHQGALPGMVWQDRDVYLQGPIWAKIPHTDGHFHPSPLMGGFGLKHPPPQIMIKNTPVPANPPTNFSSAKFASFITQYSTGQVSVEIEWELQKEDSKRWNPEIQYTSNYNKPVNVDFTVDTNGVYSEPRPIGTRYLTRNL

SEQ ID NO: 4851 - DNA, 2208 bp, Adeno-associated virus
  source 1..2208: mol_type = unassigned DNA
atggctgccgatggttatcttccagattggctcgaggacactctctctgaaggaataagacagtggtggaagctcaaacctggcccaccaccaccaaagcccgcagagcggcataaggacgacagcaggggtcttgtgcttcctgggtacaagtacctcggacccttcaacggactctacaagggagagccggtcgacgaggcagacgccgcggccctcgagcacgacaaggcctacgaccggcagctcgacagcggagacaacccgtacctcaagtacaaccacgccgacgcggagtttcaggagcgccttaaagaagatacgtcttttgggggcaacctcggacgagcagtcttccaggccaaaaagagggttcttgaacctctgggcttggttggggagcctgttaaaacggctccgggaaaaaagaggccggtagagcactctcctgtggagccagactcctcctcgggaaccggaaaagcgggcaaccagcctgcaagaaaaagattgaattttggtcagactggagacgcagactccgtacctgacccccagcctctcggacagccaccagcagccccctctggtctgggatctactacaatggctacaggcagtggcgcaccagtggcagacaataacgagggtgccgatggagtgggtaattcctcaggaaattggcattgcgattcccaatggctgggcgacagagtcatcaccaccagcacccgaacctgggctctgcccacctacaataaccacctctacaagcaaatctccagccaatcaggagcctcaaacgacaaccactactttggctacagcaccccctgggggtattttgacttcaacagattccactgccacttttcaccacgtgaccggcaaagactcatcaacaacaactggggattccgaccaaaaagactcaacttcaagctctttaacattcaagtcaaagaggtcacgcagaatgacggtacgacgacgattgccaataaccttaccagcacggttcaggtgtttactgactcggggtaccagctcccgtacgtcctcggcttggcgcatcaaggatgcctcccgccgttcccagcagacgtcttcatggtgccacagtatggatacctcaccctgaacaacgggagtcaggcggtaggacgctcttccttttactgcctggagtactttccttctcagatgctgcgtactggaaacaactttcagttcagctacacctttgaagacgttcctttccacagcagctacgctcacagccagagtctggatcggctgatgaatcctctgatcgaccagtacctgtattatctgaacaagacacaatcaaatagtggaactcttcagcagtctcggctactgtttagccaagctggacccaccagcatgtctcttcaagctaaaaactggctgcctggaccttgctacagacagcagcgtctgtcaaagcaggcaaacgacaacaacaacagcaactttccctggactgcggctacaaagtatcatctaaatggccgggactcgttggttaatccaggaccagctatggccagccacaaagacgatgaagaaaagtttttccccatgcatggaaccctgatatttggtaaacaaggaacaaatgctaacgacgcggatttggacaatgtcatgattacagatgaagaagaaatccgcaccaccaatcccgtggctacggagcagtacggatatgtgtcaaataatttgcaaaactcaaatactggtccaactactggaactgtcaatcaccaaggagcgttacctggtatggtgtggcaggatcgagacgtgtacctgcagggacccatttgggccaagattcctcacaccgatggacactttcatccttctccacttatgggaggttttggactcaaacacccacctcctcagatcatgattaaaaacactcccgttccagccaatcctcccacaaacttcagttctgccaagtttgcttctttcatcacacagtattccacgggacaagtcagcgtggagatcgagtgggagctgcagaaggaggacagcaaacgctggaaccccgagatccagtacacttccaactataacaaacctgttaatgtggactttactgtggacactaatggtgtgtattcagagcctcgccccattggcaccagatacctgactcgtaatctgtaa

SEQ ID NO: 4852 - DNA, 3161 bp, Adeno-associated virus
  source 1..3161: mol_type = unassigned DNA
cgaattgatttagcggccgcgaattcgcccttcgcagagaccaaagttcaactgaaacgaattaaacggtttattgattaacaagcaattacagattacgagtcaggtatctggtgccaatggggcgaggctctgaatacacaccattagtgtccacagtaaagtccacattaacagatttgttgtagttggaagtgtactggatctcgggattccagcgtttgctgttctccttctgtagctcccactcgatctccacgctgacccgccccgtggaatactgtgtgatgaaggaagcaaactttgccgcactgaaggtggtcgaaggattcgcaggtaccggggtgtttttgatgagaatctgtggaggagggtgtttaagtccgaatccgcccatgaggggagaggggtgaaaatgtccgtccgtgtgcggaatctttgcccagataggcccctgcaggtacacgtctctgtcctgccagaccatgcctggaagaacgccttgtgtgttgacatctgcagtagatgcttgtgtgttgccgctctggaggttggtagatacagaaccatactgctccgtggccacgggattggtggttctgatttcctcttcgtctgtaatcatgaccttttcaatgtccacatttgttttctctgatccttgttttccaaagatgagaaccccgctctgaggaaaaaacttttcttcatcgtccttgtggctggccattgccgggcccggattcaccagagagtctctgccattgaggtggtacttggtagctccaatccacgagtattcactgttgttgttgtccgcagatgtctttgatactcgctgctggcggtaacagggtccaggaagccagttcctagactgatcccgaatgtcactcgctccggcctgagaaaactgaagcctggactgcgtggtggttccgcttggagtgtttgttctgctcaagtaatacaggtactggtcgatgagaggattcatgagacggtccaaactctggctgtgagcgtagctgctgtggaaaggaacatcctcaaaggtgtagctgaaggtaaagttgtttccggtacgcagcatctgagaagggaagtactccaggcagtaaaatgaagagcgtcctactgcctgactcccgttgttcagggtgaggtatccatactgtggcaccatgaagacgtctgctgggaacggcgggaggcatccttgatgcgccgagccgaggacgtacgggagctggtactccgagtcagtaaacacctgaaccgtgctggtaaggttattggcaatcgtcgtcgtaccatcattctgcgtgacctctctgacttgaatgttaaagagcttgaagttgagtctcttgggccggaatccccagttgttgttgatgagtctttgccagtcacgtggtgaaaagtggcagtggaatctgttgaagtcaaaatacccccaaggggtgctgtagccaaagtagtggttgtcgttgctggctcctgattggctggaaatctgcttgtacagatggttgttgtaggtgggcagagcccaggttcgggtgctggtggtgatgactctgtcgcccatccatgtggaatcgcaatgccaatttcccgaggaattacccactccgtcggcgccatcgttattgtctgccattggtgcgccactgcctgtagccatcgtattagttcccagaccagagggggctgctggtggctgtccgagaggctgggggtcaggtacggagtctgcgtctccagtctgaccgaaattcaatctctttcttgcaggctggttgcccgcttttccggttcccgaggaggagtctggctccacaggagagtgctctaccggcctcttttttcccggagccgtcttaacaggctcctcaaccaggcccagaggttcaagaaccctcttttttgcctggaagactgctcgtccgaggttgcccccaaaagacgtatcttctttaaggcgctcctgaaactccgcgtcggcgtggtcgtacttgaggtacgggttgtctccgctgtcgagctgccggtcgtaggccttgtcgtgctcgagggccgcggcgtctgcctcgttgaccggctctcccttgtcgagtccgttgaagggtccgaggtacttgtacccaggaagcacaagacccctgctgtcgtccttatgccgctctgcgggctttggtggtggtgggccaggtttgagcttccaccactgtcttattccttcagagagagtgtcctcgagccaatctggaagataaccatcggcagccatacctgatttaaatcatttattgttcagagatgcagtcatccaaatccacattgaccagatcgcaggcagtgcaagcgtctggcacctttcccatgatatgatgaatgtagcaaagtttctgatacgcctttttgacgacagaaacgggttgagattctgacacgggaaagcactctaaacagtctttctgtccgtgagtgaagcagatatttgaattctgattcattctctcgcattgtctgcagggaaacagcatcagattcatgcccacgtgacgagaacatttgttttggtacctgtccgcgtagttgatcgaagcttccgcgtctgacgtcgatggctgcgcaactgactcgcgcgcccgtttgggctcacttatatctgcgtcactgggggcgggtcttttcttggctccaccctttttgacgtagaattcatgctccacctcaaccacgtgatcctttgcccaccggaaaaagtctttcacttcctgcttggtgaccttcccaaagtcatgatccagacggcgggttagttcaaatttgaacatccggtcttgcaacggctgctggtgttcgaaggtcgttgagttcccgtcaatcacggcgcacatgttggtgttggaggtggcgatcacgggagtcgggtctatctgggccgaggacttgcacttttggtccacgcgcaccttgcttcctccgagaatggcttcggccgattccacgaccttggcggtcatctttccctcctcccaccagatcaccatcttgtcgacacagtcgttgaagggaaagttctcattggtccagttgacgcagcaagggcgaattcgtttaaacctgcaggaactagtcccttagtgagg

SEQ ID NO: 4853 - protein, 735 aa, Adeno-associated virus
MAADGYLPDWLEDTLSEGIRQWWKLKPGPPPPKPAERHKDDSRGLVLPGYKYLGPFNGLYKGEPVNEADAAALEHDKAYDRQLDSGDNPYLKYNHAGAEFQERLKEDTSFGGNLGRAVFQAKKRVLEPLGLVEEPVKTAPGKKRPVEHSPVEPDSSSGTGKAGNQPARKRLNFGQTGDADSVPDPQPLGQPPAAPSGLGSTTMATGSGAPVADNNEGADGVGNSSGNWHCDSQWLGDRVITTSTRTWALPTYNNHLYKQISSQSGASNDNHYFGYSTPWGYFDFNRFHCHFSPRDWQRLINNNWGFRPKRLNFKLFNIQVKEVTQNDGTTTIANNLTSTVQVFTDSEYQLPYVLGSAHQGCLPPFPADVFMVPQYGYLTLNNGSQAVGRSSFYCLEYFPSQMLRTGNNFQFSYTFEDVPFHSSYAHSQSLDRLMNPLIDQYLYYLNKTQSNSGTLQQSRLLFSQAGPTSMSLQAKNWLPGPCYRQQRLSKQANDNNNSNFPWTAATKYHLNGRDSLVNPGPAMASHKDDEEKFFPMHGTLIFGKQGTNANDADLDNVMITDEEEIRTTNPVATEQYGYVSNNLQDSNTGPTTGTVNHQGALPGMVWQDRDVYLQGPIWAKIPHTDGHFHPSPLMGGFGLKHPPPQIMIKNTPVPANPPTNFSSAKFASFITQYSTGQVSVEIEWELQKENSKRWNPEIQYTSNYNKSVNVDFTVDTNGVYSEPRPIGTRYLTRNL

SEQ ID NO: 4854 - DNA, 2208 bp, Adeno-associated virus
  source 1..2208: mol_type = unassigned DNA
atggctgccgatggttatcttccagattggctcgaggacactctctctgaaggaataagacagtggtggaagctcaaacctggcccaccaccgccaaagcccgcagagcggcataaggacgacagcaggggtcttgtgcttcctgggtacaagtacctcggacccttcaacggactctacaagggagagccggtcaacgaggcagacgccgcggccctcgagcacgacaaggcctacgaccggcagctcgacagcggagacaacccgtacctcaagtacaaccacgccggcgcggagtttcaggagcgccttaaagaagatacgtcttttgggggcaacctcggacgagcagtcttccaggccaaaaagagggttcttgaacctctgggcttggttgaggagcctgttaaaacggctccgggaaaaaagaggccggtagagcactctcctgtggagccagactcctcctcgggaaccggaaaagcgggcaaccagcctgcaagaaaaagattgaattttggtcagactggagacgcagactccgtacctgacccccagcctctcggacagccaccagcagccccctctggtctgggatctactacaatggctacaggcagtggcgcaccagtggcagacaataacgagggtgccgatggagtgggtaattcctcaggaaattggcattgcgattcccaatggctgggcgacagagtcatcaccaccagcacccgaacctgggctctgcccacctacaacaaccacctctacaagcaaatctccagccaatcaggagcctcaaacgacaaccactactttggctacagcaccccctgggggtattttgacttcaacagattccactgccacttttcaccacgtgactggcaaagactcatcaacaacaactggggattccgaccaaagagactcaacttcaagctctttaacattcaagtcaaagaggtcacgcagaatgacggtacgacgacgattgccaataaccttaccagcacggttcaggtgtttactgactcggagtaccagctcccgtacgtcctcggctcggcgcatcaaggatgcctcccgccgttcccagcagacgtcttcatggtgccacagtatggatacctcaccctgaacaacgggagtcaggcggtaggacgctcttccttttactgcctggagtactttccttctcagatgctgcgtactggaaacaactttcagttcagctacacctttgaagacgttcctttccacagcagctacgctcacagccagagtctggatcggctgatgaatcctctgatcgaccagtacctgtattatctgaacaagacacaatcaaatagtggaacccttcagcagtctcggctactgtttagccaagctggacccaccagcatgtctcttcaagctaaaaactggctgcctggaccttgctacagacagcagcgtctgtcaaagcaggcaaacgacaacaacaacagcaactttccctggactgcggctacaaagtatcatctaaatggccgggactcgttggttaatccaggaccagctatggccagccacaaagacgatgaagaaaagtttttccccatgcatggaaccctgatatttggtaaacaaggaacaaatgctaacgacgcggatttggacaatgtcatgattacagatgaagaagaaatccgcaccaccaatcccgtggctacggagcagtacggatatgtgtcaaataatttgcaagactcaaatactggtccaactactggaactgtcaatcaccaaggagcgttacctggtatggtgtggcaggatcgagacgtgtacctgcagggacccatttgggccaagattcctcacaccgatggacactttcatccttctccacttatgggaggttttggactcaaacacccacctcctcagatcatgattaaaaacactcccgttccagccaatcctcccacaaacttcagttctgccaagtttgcttctttcatcacacagtattccacgggacaagtcagcgtagagatcgagtgggagctgcagaaggagaacagcaaacgctggaaccccgagatccagtacacttccaactataacaaatctgttaatgtggactttactgtggacactaatggtgtgtattcagagcctcgccccattggcaccagatacctgactcgtaatctgtaa

SEQ ID NO: 4855 - protein, 738 aa, Adeno-associated virus
MAADGYLPDWLEDNLSEGIREWWDLKPGAPKPKANQQKQDDGRGLVLPGCKYLGPFNGLDKGEPVNAADAAALEHDKAYDQQLKAGDNPYLRYNHADAEFQERLQEDTSFGGNLGRAVFQAKKRVLEPLGLVEEGAKTAPGKKRPVEPSPQRSPDSSTGIGKTGQQPAKKRLNFGQTGDSESVPDPQPIGEPPAGPSGLGSGTMAAGGGAPMADNNEGADGVGSSSGNWHCDSTWLGDRVITTSTRTWALPTYNNHLYKQISNGTSGGSTNDNTYFGYSTPWGYFDFNRFHCHFSPRDWQRLINNNWGFRPKRLNFKLFNIQVKEVTQNEGTKTIANNLTSTIQVFTDSEYQLPYVLGSAHQGCPPPFPADVFMIPQYGYLTLNNGSQAVGRSSFYCLEYFPSQMRRTGNNFEFSYQFEDVPFHSSYAHSQSLDRLMNPLIDQYLYYLSRTQSTGGTAGTQQLLFSQAGPNNMSAQAKNWLPGPCYRQQRVSTTLSQNNNSNFAWTGATKYHLNGRDSLVNPGVAMATHKDDEERFFPSSGVLMFGKQGAGKDNVDYSSVMLTSEEEIKTTNPVATEQYGVVADNLQQQNAAPIVGAVNSQGALPGMVWQNRDVYLQGPIWAKIPHTDGNFHPSPLMGGFGLKHPPPQILIKNTPVPADPPTTFSQAKLASFITQYSTGQVSVEIEWELQKENSKRWNPEIQYTSNYNKSVNVDFTVDTNGVYSEPRPIGTRYLTRNL

SEQ ID NO: 4856 - DNA, 2217 bp, Adeno-associated virus
  source 1..2217: mol_type = unassigned DNA
atggctgccgatggttatcttccagattggctcgaggacaacctctctgagggcattcgcgagtggtgggacttgaaacctggagccccgaaacccaaagccaaccagcaaaagcaggacgacggccggggtctggtgcttcctggctgcaagtacctcggacccttcaacggactcgacaagggggagcccgtcaacgcggcggacgcagcggccctcgagcacgacaaggcctacgaccagcagctcaaagcgggtgacaatccgtacctgcggtataaccacgccgacgccgagtttcaggagcgtctgcaagaagatacgtcttttgggggcaacctcgggcgagcagtcttccaggccaagaagcgggttctcgaacctctcggtctggttgaggaaggcgctaagacggctcctggaaagaagagaccggtagagccatcaccccagcgttctccagactcctctacgggcatcggcaagacaggccagcagcccgcgaaaaagagactcaactttgggcagactggcgactcagagtcagtgcccgaccctcaaccaatcggagaaccccccgcaggcccctctggtctgggatctggtacaatggctgcaggcggtggcgctccaatggcagacaataacgaaggcgccgacggagtgggtagttcctcaggaaattggcattgcgattccacatggctgggcgacagagtcatcaccaccagcacccgaacctgggccctccccacctacaacaaccacctctacaagcaaatctccaacgggacatcgggaggaagcaccaacgacaacacctacttcggctacagcaccccctgggggtattttgactttaacagattccactgccacttctcaccacgtgactggcagcgactcatcaacaacaactggggattccggcccaagagactcaacttcaagctcttcaacatccaggtcaaggaggtcacgcagaatgaaggcaccaagaccatcgccaataaccttaccagcacgattcaggtctttacggactcggaataccagctcccgtacgtcctcggctctgcgcaccagggctgcccgcctccgttcccggcggacgtcttcatgattcctcagtacgggtacctgactctgaacaacggcagtcaggccgtgggccgttcctccttctactgcctggagtactttccttctcaaatgcggagaacgggcaacaactttgagttcagctaccagtttgaggacgtgccttttcacagcagctacgcgcatagccaaagcctggaccggctgatgaaccccctcatcgaccagtacctgtactacctgtctcggactcagtccacgggaggtaccgcaggaactcagcagttgctattttctcaggccgggcctaataacatgtcggctcaggccaaaaactggctacccgggccctgctaccggcagcaacgcgtctccacgacactgtcgcaaaataacaacagcaactttgcttggaccggtgccaccaagtatcatctgaatggcagagactctctggtaaatcccggtgtcgctatggcaacgcacaaggacgacgaagagcgattttttccatccagcggagtcttgatgtttgggaaacagggagctggaaaagacaacgtggactatagcagcgttatgctaaccagtgaggaagaaatcaaaaccaccaacccagtggccacagaacagtacggcgtggtggccgataacctgcaacagcaaaacgccgctcctattgtaggggccgtcaacagtcaaggagccttacctggcatggtctggcagaaccgggacgtgtacctgcagggtcctatctgggccaagattcctcacacggacggcaactttcatccttcgccgctgatgggaggctttggactgaaacacccgcctcctcagatcctgattaagaatacacctgttcccgcggatcctccaactaccttcagtcaagccaagctggcgtcgttcatcacgcagtacagcaccggacaggtcagcgtggaaattgaatgggagctgcagaaagagaacagcaagcgctggaacccagagattcagtatacttccaactataacaaatctgttaatgtggactttactgtggacactaatggtgtgtattcagagcctcgccccattggcaccagatacctgactcgtaatctgtaa

SEQ ID NO: 4857 - DNA, 3167 bp, Adeno-associated virus
  source 1..3167: mol_type = unassigned DNA
attgaatttagcggccgcgaattcgcccttcgcagagaccaaagttcaactgaaacgaattaaacggtttattgattaacaagcaattacagattacgagtcaggtacctggtgccaatggggcgaggctctgaatacacaccattagtgtccacagtaaagtccacattaacagatttgttgtagttggaagtgtactgaatctcgggattccagcgtttgctgttctccttctgcagctcccactcgatctccacgctgacctgccccgtggagtactgtgtaatgaaggaagcaaactttgccgcactgaaggtagtcgaaggattcgcaggtaccggggtgttcttgatgagaatctgcgggggagggtgtttaagtccgaatccgcccatgaggggagaggggtgaaaatgtccgtccgtgtgtggaatctttgcccagatgggcccctgcaggtacacgtctctgtcctgccacaccatgcctggaagaacgccttgtgtgttgacatctgaggtagctgcttgtgtgttgccgctctggaggttggtagatacagaaccatactgctccgtagccacgggattggtggtcctgatttcctcttcgtctgtaatcatgaccttttcaatgtccacattagtttttcccgagtcttgttttccaaagatgagaaccccgctctgaggaaaaaacttttcttcatcgtccttgtggctggccatggccgggcccggattcaccagagagtctcttccattaaggtggtacttggtagctccagtccacgagtattcactgttgttgttatccgcagatgtctttgatactcgctgctggcggtaacagggtccaggaagccagttcctagactggtcccgaatgtcacttgctccggcctgagaaaactgaagccttgactgcgtggtggttccgcttggagtgtttgttctgctcaagtaatacaggtactggtcgatgagaggattcatgagacggtccaaactctggctgtgggcgtagctgctgtggaaaggaacgtcctcaaaggtgtagctgaaggtaaagttgtttccggtacgcagcatctgagaaggaaagtactccaggcagtaaaatgaagagcgtcctactgcctgactcccgttgttcagggtgaggtatccatactgtggcaccatgaagacgtctgctgggaacggcgggaggcatccttgatgcgccgagccgaggacgtacgggagctggtactccgagtcagtaaacacctgaaccgtgctggtaaggttattggcaatcgtcgtcgtaccgtcattctgcgtgacctccttgacttgaatgttaaagagcttgaagttgagtcttttgggccggaatccccaattgttgttgatgagtctttgccagtcacgtggcgaaaagtggcagtggaatctgttgaagtcaaaatacccccaaggggtgctgtagccaaagtagtggttgtcgtttgaggctcctgattggctggaaatctgcttgtagaggtggttgttgtaggtgggcagagcccaggtgcgggtgctggtggtgatgactctgtcgcccatccatgtggaatcgcaatgccaatttcccgaggaattacccactccgtcggcgccctcgttattgtctgccattggtgcgccactgcctgtagccatcgtattagttcccagaccagagggggctgctggtggctgtccgagaggctgggggtcaggtacggagtctgcgtctccagtctgaccgaaattcaatctctttcttgcaggctgctggcccgcttttccggttcccgaggaggagtctggctccgcaggagagtgctctaccggcctcttttttcccggagccgtcttaacaggttcctcaaccaggcccagaggttcaagaaccctctttttcgcctggaagactgctcgtccgaggttgcccccaaaagacgtatcttctttaagacgctcctggaactccgcgtcggcgtggttgtacttggggtacgggttgtctccgctgtcgagctgccggtcgtaggccttgtcgtgctcgagggccgcggcgtctgcctcgttgaccggctctcccttgtcgagtccgttgaagggtccaaggtacttgtacccaggaagcacaagacccctgctgtcgtccttatgccgctctgcgggctttggtggtggtgggccaggtttgagcttccaccactgtcttattccttcagagagagtgtcctcgagccaatctggaagataaccatcggcagccatacctgatttaaatcatttattgttcagagatgcagtcatccaaatccacattgaccagatcgcaagcagtgcaagcgtctggcacctttcccatgatatgatgaatgtagcacagtttctgatacgcctttttgacgacagaaacgggttgagattctgacacgggaaagcactctaaacagtctttctgtccgtgagtgaagcagatatttgaattctgattcattctctcgcattgtctgcagggaaacagcatcagattcatgcccacgtgacgagaacatttgttttggtacctgtccgcgtagttgattgaagcttccgcgtctgacgtcgatggctgcgcaactgactcgcgcgcccgtttgggctcacttatatctgcgtcactgggggcgggtctttttttggctccaccctttttgacgtagaattcatgctctacctcaaccacgtgatcctttgcccaccggaaaaagtctttgacttcctgcttggtgaccttcccaaagtcatgatccagacggcgggtgagttcaaatttgaacatccggtcttgcaacggctgctggtgttcgaaggtcgttgagttcccgtcaatcactgcgcacatgttggtgttggaggtgacaatcacgggagtcgggtctatctgggccgaggacttgcatttctggtccacgcgcaccttgcttcctccgagaatggctttggccgactccacgaccttggcggtcatcttcccctcctcccaccagatcaccatcttgtcgacgcaatcattgaaaggaaagttctcattggtccagttgacgcagccgtagaaagggcgaattcgtttaaacctgcaggactagtccctttagtgagggt

SEQ ID NO: 4858 - DNA, 3161 bp, Adeno-associated virus
  source 1..3161: mol_type = unassigned DNA
aattgaatttagcggccgcgaattcgcccttcgcagagaccaaagttcaactgaaacgaattaaacggtttattgattaacaagcaattacagattacgagtcaggtatctggtgccaatggggcgaggctctgaatacacaccattagtgtccacagtaaagtccacattaacagatttgttgtagttggaagtgtactgaatctcgggattccagcgtttgctgttctccttctgcagctcccactcgatctccacgctgacctgccccgtggagtactgtgtaatgaaggaagcaaactttgccgcactgaaggtagtcgaaggattcgcaggtaccggggtgttcttgatgagaatctgcgggggagggtgtttaagtccgaatccgcccatgaggggagaggggtgaaaatgtccgtccgtgtgtggaatctttgcccagatgggcccctgcaggtacacgtctctgtcctgccacaccatgcctggaagaacgccttgtgtgttgacatctgaggtagctgcttgtgtgttgccgctctggaggttggtagatacagaaccatactgctccgtagccacgggattggtggtcctgatttcctcttcgtctgtaatcatgaccttttcaatgtccacattagtttttcccgagtcttgttttccaaagatgagaaccccgctctgaggaaaaaacttttcttcatcgtccttgtggctggccatggccgggcccggattcaccagagagtctcttccattaaggtggtacttggtagctccagtccacgagtattcactgttgttgttatccgcagatgtctttgatactcgctgctggcggtaacagggtccaggaagccagttcctagactggtcccgaatgtcacttgctccggcctgagaaaactgaagccttgactgcgtggtggttccgcttggagtgtttgttctgctcaagtaatacaggtactggtcgacgagaggattcatgagacggtccaaactctggctgtgggcgtagctgctgtggaaaggaacgtcctcaaaggtgtagctgaaggtaaagttgtttccggtacgcagcatctgagaaggaaagtactccaggcagtaaaatgaagagcgtcctactgcctgactcccgttgttcagggtgaggtatccatactgtggcaccatgaagacgtctgctgggaacggcgggaggcatccttgatgcgccgagccgaggacgtacgggagctggtactccgagtcagtaaacacctgaaccgtgctggtaaggttattggcaatcgtcgtcgtaccgtcattctgcgtgacctccttgacttgaatgttaaagagcttgaagttgagtcttttgggccgggatccccaattgttgttgatgagtctttgccagtcacgtggcgaaaagtggcagtggaatctgttgaagtcaaaatacccccaaggggtgctgtagccaaagtagtggttgtcgtttgaggctcctgattggctggaaatctgcctgtagaggtggttgttgtaggtgggcagagcccaggtgcgggtgctggtggtgatgactctgtcgcccatccatgtggaatcgcaatgccaatttcccgaggaattacccactccgtcggcgccctcgttattgtctgccattggtgcgccactgcctgtagccatcgtattagttcccagaccagagggggctgctggtggctgtccgagaggctgggggtcaggtacggagtctgcgtctccagtctgaccgaaattcaatctccttcttgcaggctgctggcccgcttttccggttcccgaggaggagtctggctccgcaagagagtgctctaccggcctcttttttcccggagccgtcttaacaggttcctcaaccaggcccagaggttcaagaaccctctttttcgcctggaagactgctcgtccgaggttgcccccaaaagacgtatcttctttaagacgctcctggaactccgcgtcggcgtggttgtacttgaggtacgggttgtctccgccgtcgagctgccggtcgtaggccttgtcgtgctcgagggccgcggcgtctgcctcgttgaccggctctcccttgtcgagtccgttgaagggtccaaggtacttgtacccaggaagcacaagacccctgctgtcgtccttatgccgctctgcgggctttggtggtggtgggccaggtttgagcttccaccactgtcttattccttcagagagagtgtcctcgagccaatctggaagataaccatcggcagccatacctgatttaaatcatttattgttcagagatgcagtcatccaaatccacattgaccagatcgcaagcagtgcaagcgtctggcacctttcccatgatatgatgaatgtagcacagtttctgatacgcctttttgacgacagaaacgggttgagattctgacacgggaaagcactctaaacagtctttctgtccgtgagtgaagcagatatttgaattctgattcattctctcgcattgtctgcagggaaacagcatcagattcatgcccacgtgacgagaacatttgttttggtacctgtccgcgtagttgattgaagcttccgcgtctgacgtcgatggctgcgcaactgactcgcgcgcccgtttgggctcacttatatctgcgtcactgggggcgggtctttttttggctccaccctttttgacgtagaattcatgctctacctcaaccacgtgatcctttgcccaccggaaaaagtctttgacttcctgcttggtgaccttcccaaagtcatgatccagacggcgggtgagttcaaatttgaacatccggtcttgcaacggctgctggtgttcgaaggtcgttgagttcccgtcaatcactgcgcacatgttggtgttggaggtgacaatcacgggagtcgggtctatctgggccgaggacttgcatttctggtccacgcgcaccttgcttcctccgagaatggctttggccgactccacgaccttggcggtcatcttcccctcctcccaccagatcaccatcttgtcgacgcaatcattgaaaggaaagttctcattggtccagttgacgcagcaagggcgaattcgtttaaacctgcaggactagtccctttagtgaggg

SEQ ID NO: 4859 - DNA, 3172 bp, Adeno-associated virus
  source 1..3172: mol_type = unassigned DNA
gattgaatttagcggccgcgaattcgcccttgctgcgtcaactggaccaatgagaactttcccttcaacgattgcgtcgacaagatggtgatctggtgggaggagggcaagatgaccgccaaggtcgtggagtccgccaaggccattctgggtggaagcaaggtgcgcgtggaccaaaagtgcaagtcatcggcccagatcgaccccacgcccgtgatcgtcacctccaacaccaacatgtgcgccgtgatcgacgggaacagcaccaccttcgagcaccagcagcccctgcaggaccgcatgttcaagttcgagctcacccgccgtctggagcacgactttggcaaggtgaccaagcaggaagtcaaagagttcttccgctgggctcaggatcacgtgactgaggtggcgcatgagttctacgtcagaaagggcggagccaccaaaagacccgcccccagtgacgcggatataagcgagcccaagcgggcctgcccctcagttgcggagccatcgacgtcagacgcggaagcaccggtggactttgcggacaggtaccaaaacaaatgttctcgtcacgcgggcatgcttcagatgctgtttccctgcaagacatgcgagagaatgaatcagaatttcaacgtctgcttcacgcacggggtcagagactgctcagagtgcttccccggcgcgtcggaatctcaacccgtcgtcagaaaaaagacgtatcagaaactgtgcgcgattcatcatctgctggggcgggcacccgagattgcgtgttcggcctgcgatctcgtcaacgtggacttggatgactgtgtttctgagcaataaatgacttaaaccaggtatggctgctgacggttatcttccagattggctcgaggacaacctctctgagggcattcgcgagtggtgggacctgaaacctggagcccccaagcccaaggccaaccagcagaagcaggacgacggccggggtctggtgcttcctggctacaagtacctcggacccttcaacggactcgacaagggggagcccgtcaacgcggcggacgcagcggccctcgagcacgacaaggcctacgaccagcagctcaaagcgggtgacaatccgtacctgcggtataaccacgccgacgccgagtttcaggagcgtctgcaagaagatacgtcttttgggggcaacctcgggcgagcagtcttccaggccaagaagcgggttctcgaacctctcggtctggttgaggaagctgctaagacggctcctggaaagaagagaccggtagaaccgtcacctcagcgttcccccgactcctccgcgggcatcggcaagaaaggccagcagcccgctaaaaagagactgaactttggtcagactggcgactcagagtcagtccccgaccctcaaccaatcggagaaccaccagcaggcccctctggtctgggatctggtacaatggctgcaggcggtggcgctccaatggcagacaataacgaaggcgccgacggagtgggtagttcctcaggaaattggcattgcgattccacatggctgggcgacagagtcatcaccaccagcacccgaacctgggccctgcccacctacaacaaccacctctacaagcaaatatccaatgggacatcgggaggaagcaccaacgacaacacctacttcggctacagcaccccctgggggtattttgacttcaacagattccactgccacttctcaccacgtgactggcagcgactcatcaacaacaactggggattccggccaaaaagactcagcttcaagctcttcaacatccaggtcaaggaggtcacgcagaatgaaggcaccgagaccatcgccaataaccttaccagcacgattcaggtatttacggactcggaataccagctgccgtacgtcctcggctccgcgcaccagggctgcctgcctccgttcccggcggacgtcttcatgattccccagtacggctaccttacactgaacaatggaagtcaagccgtaggccgttcctccttctactgcctggaatattttccatctcaaatgctgcgaactggaaacaattttgaattcagctacaccttcgaggacgtgcctttccacagcagctgcgcacacagccagagctcggaccgactgatgaatcctctcatcgaccagtacctgtactacttatccagaactcggtccacaggaggaactcaaggtacccagcaattgttattttctcaagctgggcctgcaaacatgtcggctcaggctaagaactggctacctggaccttgctaccggcagcagcgagtctctacgacactgtcgcaaaacaacaacagcaactttgcttggactggtgccaccaaatatcacctgaacggaagagactctttggtaaatcccggtgtcgccatggcaacccacaaggacgacgaggaacgcttcttcccgtcgagtggagtcctgatgtttggaaaacagggtgctggaagagacaatgtggactacagcagcgttatgctaaccagcgaagaagaaattaaaaccactaaccctgtagccacagaacaatacggtgtggtggctgacaacttgcagcaaaccaatacagggcctattgtgggaaatgtcaacagccaaggagccttacctggcatggtctggcagaaccgagacgtgtacctgcagggtcccatctgggccaagattcctcacacggacggcaacttccacccttcaccgctaatgggaggatttggactgaagcacccacctcctcagatcctgatcaagaacacgccggtacctgcggatcctccaacaacgttcagccaggcgaaattggcttccttcattacgcagtacagcaccggacaggtcagcgtggaaatcgagtgggagctgcagaaggagaacagcaaacgctggaacccagagattcagtacacttcaaactactacaaatctacaaatgtggactttgctgtcaatacagagggaacttattctgagcctcgccccattggtactcgttacctcacccgtaatctgtaattgctggttaatcaataaaccgtttgattcgtttcagttgaactttggtctctgcgaagggcgaattcgtttaaacctgcaggactagtccctttagtgagg

SEQ ID NO: 4860 - DNA, 3172 bp, Adeno-associated virus
  source 1..3172: mol_type = unassigned DNA
gattgaatttagcggccgcgaattcgcccttgctgcgtcaactggaccaatgagaactttcccttcaacgattgcgtcgacaagatggtgatctggtgggaggagggcaagatgaccgccaaggtcgtggagtccgccaaggccattctgggtggaagcaaggtgcgcgtggaccaaaagtgcaagtcatcggcccagatcgaccccacgcccgtgatcgtcacctccaacaccaacatgtgcgccgtgatcggcgggaacagcaccaccttcgagcaccagcagcccctgcaggaccgcatgttcaagttcgagctcacccgccgtctggagcacgactttggcaaggtgaccaagcaggaagtcaaagagttcttccgctgggctcaggatcacgtgactgaggtggcgcatgagttctacgtcagaaagggcggagccaccaaaagacccgcccccagtgacgcggatataagcgagcccaagcgggcctgcccctcagttgcggagccatcgacgtcagacgcggaagcaccggtggactttgcggacaggtaccaaaacaaatgttctcgtcacgcgggcatgcttcagatgctgtttccctgcaagacatgcgagagaatgaatcagaatttcaacgtctgcttcacgcacggggtcagagactgctcagagtgcctccccggcgcgtcagaatctcaacccgtcgtcagaaaaaagacgtatcagaaactgtgcgcgattcatcatctgctggggcgggcacccgagattgcgtgttcggcctgcgatctcgtcaacgtggacttggatgactgtgtttctgagcaataaatgacttaaaccaggtatggctgctgacggttatcttccagattggctcgaggacaacctctctgagggcattcgcgagtggtgggacctgaaacctggagcccccaagcccaaggccaaccagcagaagcaggacgacggccggggtctggtgcttcttggctacaagtacctcggacccttcaacggactcgacaagggggagcccgtcaatgcggcggacgcagcggccctcgagcacgacaaggcctacgaccagcagctcaaagcgggtgacaatccgtacctgcggtataaccacgccgacgccgagtttcaggagcgtctgcaagaagatacgtcttttgggggcaacctcgggcgagcagtcttccaggccaagaagcgggttctcgaacctctcggtctggttgaggaagctgctaagacggctcctggaaagaagagaccggtagaaccgtcacctcagcgttcccccgactcctccacgggcatcggcaagaaaggccagcagcccgctaaaaagagactgaactttggtcagactggcgactcagagtcagtccccgaccctcaaccaatcggagaaccaccagcaggcccctctggtctgggatctggtacaatggctgcaggcggtggcgctccaatggcagacaataacgaaggcgccgacggagtgggtagttcctcaggaaattggcattgcgattccacatggctgggcgacagagtcatcaccaccagcacccgaacctgggccctgcccacctacaacaaccacctctacaagcaaatatccaatgggacatcgggaggaagcaccaacgacaacacctacttcggctacagcaccccctgggggtattttgacttcaacagattccactgccacttctcaccacgtgactggcagcgactcatcaacaacaactggggattccggccaaaaagactcagcttcaagctcttcaacatccaggtcaaggaggtcacgcagaatgaaggcaccaagaccatcgccaataaccttaccagcacgattcaggtatttacggactcggaataccagctgccgtacgtcctcggctccgcgcaccagggctgcctgcctccgttcccggcggacgtcttcatgattccccagtacggctaccttacactgaacaatggaagtcaagccgtaggccgttcctccttctactgcctggaatattttccatctcaaatgctgcgaactggaaacaattttgaattcagctacaccttcgaggacgtgcctttccacagcggctacgcacacagccagagcttggaccgactgatgaatcctctcatcgaccagtacctgtactacttatccagaactcagtccacaggaggaactcaaggtacccagcaattgttattttctcaagctgggcctgcaaacatgtcggctcaggctaagaactggctacctggaccttgctaccggcagcagcgagtctctacgacactgtcgcaaaacaacaacagcaactttgcttggactggtgccaccaaatatcacctgaacggaagagactctttggtaaatcccggtgtcgccatggcaacccacaaggacgacgaggaacgcttcttcccgtcgagtggagtcctgatgtttggaaaacagggtgctggaagagacaatgtggactacagcagcgttatgctaaccagcgaagaagaaattaaaaccactaaccctgtagccacagaacaatacggtgtggtggctgacaacttgcagcaaaccaatacagggcctattgtgggaaatgtcaacagccaaggagccttacctggcatggtctggcagaaccgagacgtgtacctgcagggtcccatctgggccaagattcctcacacggacggcaacttccacccttcaccgctaatgggaggatttggactgaagcacccacctcctcagatcctgatcaagaacacgccggtacctgcggatcctccaacgacgttcagccaggcgaaattggcttccttcattacgcagtacagcaccggacaggtcagcgtggaaatcgagtgggagctgcagaaggagaacagcaaacgctggaacccagagattcagtacacttcaaactactacaaatctacaaatgtggactttgctgtcaatacagagggaacttattctgagcctcgccccattggtactcgttacctcacccgtaatctgtaattgctggttaatcaataaaccgtttgattcgtttcagttgaactttggtctctgcgaagggcgaattcgtttaaacctgcaggactagtccctttagtgagg

SEQ ID NO: 4861 - DNA, 2208 bp, Adeno-associated virus
  source 1..2208: mol_type = unassigned DNA
atggctgccgatggttatcttccagattggctcgaggacactctctctgaaggaataagacagtggtggaagctcaaacctggcccaccaccaccaaagcccgcagagcggcataaggacgacagcaggggtcttgtgcttcctgggtacaagtacctcggacccttcaacggactcgacaagggagagccggtcaacgaggcagacgccgcggccctcgagcacgacaaggcctacgaccggcagctcgaaagcggagacaacccgtacctcaagtacaaccacgccgacgcggagtttcaggagcgtcttaaagaagatacgtcttttgggggcaacctcggacgagcagtcttccaggcgaaaaagagggttcttgaacctctgggcctggttgaggagcctgttaaaacggctccgggaaaaaagaggccggtagagcactctcctgtggagccagactcctcctcgggaaccggaaaagcgggccagcagcctgcgagaaaaagattgaattttggtcagactggagacgcagactccgtacctgacccccagcctctcggacagccaccagcagccccctctggtctgggatctactacaatggcttcaggcagtggcgcaccagtggcagacaataacgagggtgccgatggagtgggtaattcctcaggaaattggcattgcgattcccaatggctgggcgacagagtcatcaccaccagcacccgaacctgggccctgcccacctacaacaaccacctctacaagcaaatctccagccaatcaggagcctcaaacgacaaccactactttggctacagcaccccctgggggtattttgacttcaacagattccactgccacttttcaccacgtgactggcaaagactcatcaacaacagctggggattccgacccaaaagactcaacttcaagctctttaacattcaagtcaaagaggtcacgcagaatgacggtacgacgacgattgccaataaccttaccagcacggttcaagtgtttaccgactcggagtaccagctcccgtacgtcctcggctcggcgcatcaaggatgcctcccgccgttcccagcagacgtctttatggtcccacagtatggatacctcaccctgaacaacgggagtcaggcggtaggacgctcttccttttactgcctggagtactttccttctcagatgctgcgtactggaaacaactttcagttcagctacacctttgaagacgttcccttccacagcagctacgctcacagccagagtctggatcggctgctgaatcctctgatcgaccagtacctatattatctgaacaagacacaatcaaatagtggaactcttcagcagtctcggctactgtttagccaagctggacccaccagcatgtctcttcaagctaaaaactggctgcctggaccttgctacagacagcagcgtctgtcaaagcaggcaaacgacaacaacaacagcaactttccctggactgcggctacaaagtatcatctaaatggccgggactcgttggttaatccaggaccagctatggccagccacaaagacgatgaagaaaagtttttccccatgcatggaaccctgatatttggtaaacaaggaacaaatgctaacgacgcggatttggacaatgtcatgattacagatgaagaagaaatccgcaccaccaatcccgtggctacggagcagtacggatatgtgtcaaataatttgcaaaactcaaatactggtccaactactggaactgtcaatcaccaaggagcgttacctggtatggtgtggcaggatcgagacgtgtacctgcagggacccatttgggccaagattcctcacacggacgggcactttcatccttctccactaatgggaggttttgggctcaaacacccgcctcctcagatcatgatcaaaaacactcccgttccagccaatcctcctacaaacttcagttcttccaagtttgcttctttcatcacacagtattccacggggcaggtcagcgtggagatcgagtgggagctgcagaaggagaacagcaaacgctggaatcccgaaattcagtatacttccaactacaacaaatctgttaatgtggactttactgtggacactaatggtgtgtattcagagcctcgccccattggcaccagatacccgactcgtaatctgtaa

SEQ ID NO: 4862 - protein, 735 aa, Adeno-associated virus
MAADGYLPDWLEDTLSEGIRQWWKLKPGPPPPKPAERHKDDSRGLVLPGYKYLGPFNGLDKGEPVNEADAAALEHDKAYDRQLESGDNPYLKYNHADAEFQERLKEDTSFGGNLGRAVFQAKKRVLEPLGLVEEPVKTAPGKKRPVEHSPVEPDSSSGTGKAGQQPARKRLNFGQTGDADSVPDPQPLGQPPAAPSGLGSTTMASGSGAPVADNNEGADGVGNSSGNWHCDSQWLGDRVITTSTRTWALPTYNNHLYKQISSQSGASNDNHYFGYSTPWGYFDFNRFHCHFSPRDWQRLINNSWGFRPKRLNFKLFNIQVKEVTQNDGTTTIANNLTSTVQVFTDSEYQLPYVLGSAHQGCLPPFPADVFMVPQYGYLTLNNGSQAVGRSSFYCLEYFPSQMLRTGNNFQFSYTFEDVPFHSSYAHSQSLDRLLNPLIDQYLYYLNKTQSNSGTLQQSRLLFSQAGPTSMSLQAKNWLPGPCYRQQRLSKQANDNNNSNFPWTAATKYHLNGRDSLVNPGPAMASHKDDEEKFFPMHGTLIFGKQGTNANDADLDNVMITDEEEIRTTNPVATEQYGYVSNNLQNSNTGPTTGTVNHQGALPGMVWQDRDVYLQGPIWAKIPHTDGHFHPSPLMGGFGLKHPPPQIMIKNTPVPANPPTNFSSSKFASFITQYSTGQVSVEIEWELQKENSKRWNPEIQYTSNYNKSVNVDFTVDTNGVYSEPRPIGTRYPTRNL

SEQ ID NO: 4863 - DNA, 2208 bp, Adeno-associated virus
  source 1..2208: mol_type = unassigned DNA
atggctgccgatggttatcttccagattggctcgaggacactctctctgaaggaataagacagtggtggaagctcaaacctggcccaccaccaccaaagcccgcagagcggcataaggacgacagcaggggtcttgtgcttcctgggtacaagtacctcggacccttcaacggactcgacaagggagagccggtcaacgaggcagacgccgcggccctcgagcacgacaaggcctacgaccggcagctcgacagcggagacaacccgtacctcaagtacaaccacgccgacgcggagtttcaggagcgtcttaaagaagatacgtcttttgggggcaacctcggacgagcagtcttccaggccaaaaagaggattcttgaacctctgggcctggttgaggaacctgttaagacggctccgggagaaaagaggccggtagagcactctcctgcggagccagactcctcctcgggaaccggaaaagcgggccagcagcctgcaagaaagagattgaattttggccagactggagacgcagactcagtacctgacccccagcctctcggacagccaccagcagccccctctggtctgggaactaatacgatggcttcaggcagtggcgcaccaatggcagacaataacgagggcgccgacggagtgggtaattcctcgggaaattggtattgcgattccacatggatgggcgacagagtcatcaccaccagcacccgcacctgggccctgcccacctacaacaaccatctgtacaagcaaatctccagccagtctggagccagcaacgacaaccactactttggctacagcaccccctgggggtattttgacttcaacagattccactgccacttctccccacgtgactggcaaagactcatcaacaacaactggggattccggcccaagagactcagcttcaagctctttaacattcaagtcaaagaggtcacgcagaatgacggtacgacgacgattgccaataaccttaccagcacggttcaggtgtttactgactcggagtaccagctcccgtacgtcctcggctcggcgcatcaaggatgcctcccgccgttcccagcagacgtcttcatggtgccacagtatggatacctcaccctgaacaacggcagtcaggcggtaggacgctcttccttttactgcctggagtactttccttctcagatgcttcgtaccggaaacaactttaccttcagctacacctttgaagacgttcctttccatagcagctacgctcacagccaaagtctggaccgtctcatgaatcctctcatcgaccagtacctgtattacttgagcagaacaaacactccaagcggaaccaccacgatgtccaggcttcagttttctcaggccggagcaagtgacattcgggaccagtctagaaactggcttcctggaccctgttaccgccagcagcgagtatcaaagacagctgcggacaacaacaacagtgattactcgtggactggagctaccaagtaccacctcaatggaagagactctctggtgaatccgggcccagctatggccagccacaaggacgatgaagaaaaatattttcctcagagcggggttctcatctttggaaaacaagactcgggaaaaactaatgtggacattgaaaaggttatgattacagacgaagaggaaatcaggaccaccaatcccgtggctacggagcagtatggttctgtatctaccaacctccagagcggcaacacacaagcagctacctcagatgtcaacacacaaggcgttcttccaggcatggtctggcaggacagagacgtgtacctgcaggggcccatctgggcaaagattccacacacggacggacattttcacccctctcccctcgtgggcggattcggacttaaacaccctcctccacaaattctcatcaagaacaccccggtacctgcgaatccttcgaccactttcagtgcggcaaagtttgcttccttcatcacacagtactccacggggcaggtcagcgtggagatcgagtgggagctgcagaaggagaacagcaaacgctggaatcccgaaattcagtacacttccaactacaacaaatctgttaatgtggactttactgtggacactaatggtgtgtattcagagcctcgccccattggcaccagatacctgactcgtaatctgtaa

SEQ ID NO: 4864 - protein, 735 aa, Adeno-associated virus
MAADGYLPDWLEDTLSEGIRQWWKLKPGPPPPKPAERHKDDSRGLVLPGYKYLGPFNGLDKGEPVNEADAAALEHDKAYDRQLDSGDNPYLKYNHADAEFQERLKEDTSFGGNLGRAVFQAKKRILEPLGLVEEPVKTAPGEKRPVEHSPAEPDSSSGTGKAGQQPARKRLNFGQTGDADSVPDPQPLGQPPAAPSGLGTNTMASGSGAPMADNNEGADGVGNSSGNWYCDSTWMGDRVITTSTRTWALPTYNNHLYKQISSQSGASNDNHYFGYSTPWGYFDFNRFHCHFSPRDWQRLINNNWGFRPKRLSFKLFNIQVKEVTQNDGTTTIANNLTSTVQVFTDSEYQLPYVLGSAHQGCLPPFPADVFMVPQYGYLTLNNGSQAVGRSSFYCLEYFPSQMLRTGNNFTFSYTFEDVPFHSSYAHSQSLDRLMNPLIDQYLYYLSRTNTPSGTTTMSRLQFSQAGASDIRDQSRNWLPGPCYRQQRVSKTAADNNNSDYSWTGATKYHLNGRDSLVNPGPAMASHKDDEEKYFPQSGVLIFGKQDSGKTNVDIEKVMITDEEEIRTTNPVATEQYGSVSTNLQSGNTQAATSDVNTQGVLPGMVWQDRDVYLQGPIWAKIPHTDGHFHPSPLVGGFGLKHPPPQILIKNTPVPANPSTTFSAAKFASFITQYSTGQVSVEIEWELQKENSKRWNPEIQYTSNYNKSVNVDFTVDTNGVYSEPRPIGTRYLTRNL

SEQ ID NO: 4865 - DNA, 2209 bp, Adeno-associated virus
  source 1..2209: mol_type = unassigned DNA
atggctgccgatggttatcctccagattggctcgaggacactctctctgaagggataagacagtggtggaagctcaaacctggcccaccaccaccaaagcccgcagagcggcataaggacgacagcaggggtcttgtgcttcctgggtacaagtacctcggacccttcaacggactcgacaagggggagccggtcaacgaggcagacgccgcggccctcgagcacgacaaggcctacgaccggcagctcgacagcggagacaacccgtacctcaagtacaaccacgccgacgcagagtttcaggagcgccttaaagaagatacgtcttttgggggcaacctcggacgagcagtcttccaggcgaaaaagagggttcttgaacctctgggcctggttgaggaacctgttaagacggctccgggaaaaaagaggccggtagagcactctcctgtggagccagactcctcctcgggaaccggaaaagcgggccagcggcctgcaagaaaaagattaaattttggtcagactggagacgcagactccgtacctgacccccagcctctcggacagccaccagcagccccctctggtctgggatctactacaatggctacaggcagtggcgcaccaatggcagacaataacgagggtgccgatggagtgggtaattcctcaggaaattggcattgcgattcccaatggctgggcgacagagtcatcaccaccagcacccgaacctgggccctgcccacatacaacaaccacctctacaagcaaatctccagccaatcaggagccagcaacgacaaccactactttggctacagcaccccctgggggtattttgacttcaacagattccactgccacttttcaccacgtgactggcaaagactcatcaacaacaactggggattccggcccaaaagactcaacttcaagctctttaatattcaagtcaaagaggtcacgcagaatgacggtacgacgacgattgccaataaccttaccagcacggttcaggtgtttactgactcggagtaccagctcccgtacgtcctgggctcggcgcatcaaggatgcctcccgccgtttccagcggacgtcttcatggtcccacagtatggatacctcaccctgaacaacgggagtcaggcggtaggacgctcttccttttactgcctggagtactttccttctcagatgctgcgtactggaaacaactttcagttcagctacacttttgaagacgtgcctttccacagcagctacgctcacagccagagtctggatcggctgatgaatcctctgatcgaccagtacctgtattatctgaacaagacacaaacaaatagtggaactcttcagcagtctcggctactgtttagccaagctggaccaaccaacatgtctcttcaagctaaaaactggctgcctggaccttgctacagacagcagcgtctgtcaaaacaggcaaacgacaacaacaacagcaactttccctggactgcagctacaaagtatcatctaaatggccgggactcgttggttaatccaggaccagctatggccagtcacaaggatgacgaagaaaagtttttccccatgcatggaaccctgatatttggtaaacaaggaacaaatgccaacgacgcggatttggaaaatgtcatgattacagatgaagaagaaatcagggccaccaatcccgtggctacggagcagtacgggactgtgtcaaataatttgcaaaactcaaacactggtccaactactggaactgtcaatcgccaaggagcgttacctggtatggtgtggcaggatcgagacgtgtacctgcagggacccatttgggccaagattcctcacaccgatggacactttcatccttctccactgatgggaggttttggactcaaacacccgcctcctcagatcatgatcaaaaacactcccgttccagccaatcctcccacaaacttcagttctgccaagtttgcttctttcatcacacagtattccacgggacaggtcagcgtggagatcgagtgggagctgcagaaggagaacagcaaacgctggaatcccgaaattcagtacacttccaactacaacaagtctgttaatgtggactttactgtggacactaatggtgtgtattcagagcctcgccccattggcaccagatacctgactcgtaatctgtaat

SEQ ID NO: 4866 - protein, 735 aa, Adeno-associated virus
MAADGYPPDWLEDTLSEGIRQWWKLKPGPPPPKPAERHKDDSRGLVLPGYKYLGPFNGLDKGEPVNEADAAALEHDKAYDRQLDSGDNPYLKYNHADAEFQERLKEDTSFGGNLGRAVFQAKKRVLEPLGLVEEPVKTAPGKKRPVEHSPVEPDSSSGTGKAGQRPARKRLNFGQTGDADSVPDPQPLGQPPAAPSGLGSTTMATGSGAPMADNNEGADGVGNSSGNWHCDSQWLGDRVITTSTRTWALPTYNNHLYKQISSQSGASNDNHYFGYSTPWGYFDFNRFHCHFSPRDWQRLINNNWGFRPKRLNFKLFNIQVKEVTQNDGTTTIANNLTSTVQVFTDSEYQLPYVLGSAHQGCLPPFPADVFMVPQYGYLTLNNGSQAVGRSSFYCLEYFPSQMLRTGNNFQFSYTFEDVPFHSSYAHSQSLDRLMNPLIDQYLYYLNKTQTNSGTLQQSRLLFSQAGPTNMSLQAKNWLPGPCYRQQRLSKQANDNNNSNFPWTAATKYHLNGRDSLVNPGPAMASHKDDEEKFFPMHGTLIFGKQGTNANDADLENVMITDEEEIRATNPVATEQYGTVSNNLQNSNTGPTTGTVNRQGALPGMVWQDRDVYLQGPIWAKIPHTDGHFHPSPLMGGFGLKHPPPQIMIKNTPVPANPPTNFSSAKFASFITQYSTGQVSVEIEWELQKENSKRWNPEIQYTSNYNKSVNVDFTVDTNGVYSEPRPIGTRYLTRNL

SEQ ID NO: 4867 - DNA, 2208 bp, Adeno-associated virus
  source 1..2208: mol_type = unassigned DNA
atggctgccgatggttatcttccagattggctcgaggacactctctctgaaggaataagacagtggtggaagctcaaacctggcccaccaccaccaaagcccgcagagcggcataaggacgacagcaggggtcttgtgcttcctgggtacaggtacctcggacccttcaacggactcgacaagggagagccggtcaacgaggcagacgccgcggccctcgagcacgacaaggcctacgaccggcagctcgacagcggagacaacccgtacctcaagtacaaccacgtcgacgcggagtttcaggagcgtcttaaagaagatacgtcttttgggggcaacctcggacgagcagtcttccaggccaaaaagaggattcttgaacctctgggcctggttgaggaacctgttaaggcggctccgggagaaaagaggccggtagagcactctcctgcggagccagactcctcctcgggaaccggaaaagcgggccagcagcctgcaagaaagagattgaattttggtcagactggagacgcagactcagtacctgacccccagcctctcggacagccaccagcagccccctctggtctgggaactaatacgatggcttcaggcagtggcgcaccaatggcagacaataacgagggcgccgacggagtgggtaattcctcgggaaattggcattgcgattccacatggatgggcgacagagtcatcaccaccagcacccgcacctgggccctgcccacctacaacaaccatctgtacaagcaaatctccagccagtctggagccagcaacgacaaccactactttggctacagcaccccctgggggcattttgacttcaacagattccactgccacttctccccacgtgactggcaaagactcatcaacaacaactggggattccggcccaagagactcagcttcaagctctttaacattcaagtcaaagaggtcacgcagaatgacggtacgacgacgattgccaataaccttaccagcacggttcaggtgtttactgactcggagtaccagctcccgtacgtcctcggctcggcgcatcaaggatgcctcccgccgttcccagcagacgtcttcatggtgccacagtatggatacctcaccctgaacaacggcagtcaggcggtaggacgctcttccttttactgcctggagtactttccttctcagatgcttcgtaccggaaacaactttaccttcagctacacctttgaagacgttcctttccatagcagctacgctcacagccaaagtctggaccgtctcatgaatcctctcatcgaccagtacctgtattacttgagcagaacaaacactccaagcggaaccaccacgatgtccaggcttcagttttctcaggccggagcaagtgacattcgggaccagtctagaaactggcttcctggaccctgttaccgccagcagcgagtatcaaagacagctgcggacaacaacaacagtgattactcgtggactggagctaccaagtaccacctcaatggaagagactctctggtgaatccgggcccagctatggccagccacaaggacgatgaagaaaaatattttcctcagagcggggttctcatctttggaaaacaagactcgggaaaaactaatgtggacattgaaaaggttatgattacagacgaagaggaaatcaggaccaccaatcccgtggctacggagcagtatggttctgtatctaccaacctccagagcggcaacacacaagcagctacctcagatgtcaacacacaaggcgttcttccaggcatggtctggcaggacagagacgtgtacctgcaggggcccatctgggcaaagattccacacacggacggacattttcacccctctccccccatgggcggattcggacttaaacaccctcctccacaaattctcatcaagaacaccccggtacctgcgaatccttcgaccactttcagtgcggcaaagtttgcttccttcatcacacagtactccacggggcaggtcagcgtggagatcgagtgggagctgcagaaggagaacagcaaacgctggaatcccgaaattcagtacacttccaactacaacaaatctgttaatgtggactttactgtggacactaatggtgtgtattcagagcctcgccccattggcgccagatacctgactcgtaatctgtaa

SEQ ID NO: 4868 - protein, 735 aa, Adeno-associated virus
MAADGYLPDWLEDTLSEGIRQWWKLKPGPPPPKPAERHKDDSRGLVLPGYRYLGPFNGLDKGEPVNEADAAALEHDKAYDRQLDSGDNPYLKYNHVDAEFQERLKEDTSFGGNLGRAVFQAKKRILEPLGLVEEPVKAAPGEKRPVEHSPAEPDSSSGTGKAGQQPARKRLNFGQTGDADSVPDPQPLGQPPAAPSGLGTNTMASGSGAPMADNNEGADGVGNSSGNWHCDSTWMGDRVITTSTRTWALPTYNNHLYKQISSQSGASNDNHYFGYSTPWGHFDFNRFHCHFSPRDWQRLINNNWGFRPKRLSFKLFNIQVKEVTQNDGTTTIANNLTSTVQVFTDSEYQLPYVLGSAHQGCLPPFPADVFMVPQYGYLTLNNGSQAVGRSSFYCLEYFPSQMLRTGNNFTFSYTFEDVPFHSSYAHSQSLDRLMNPLIDQYLYYLSRTNTPSGTTTMSRLQFSQAGASDIRDQSRNWLPGPCYRQQRVSKTAADNNNSDYSWTGATKYHLNGRDSLVNPGPAMASHKDDEEKYFPQSGVLIFGKQDSGKTNVDIEKVMITDEEEIRTTNPVATEQYGSVSTNLQSGNTQAATSDVNTQGVLPGMVWQDRDVYLQGPIWAKIPHTDGHFHPSPPMGGFGLKHPPPQILIKNTPVPANPSTTFSAAKFASFITQYSTGQVSVEIEWELQKENSKRWNPEIQYTSNYNKSVNVDFTVDTNGVYSEPRPIGARYLTRNL

SEQ ID NO: 4869 - DNA, 2208 bp, Adeno-associated virus
  source 1..2208: mol_type = unassigned DNA
atggctgccgatggttatcttccagattggctcgaggacaccctctctgaaggaataagacagtggtggaagctcaaacctggcccaccaccaccaaagcccgcagagcggcataaggacgacagcaggggtcttgtgcttcctgggtacaagtacctcggacccttcaacggactcgacaagggagagccggtcaacgaggcagacgccgcggccctcgagcacgacaaggcctacgaccggcagctcgacagcggagataacccgtacctcaagtacaaccacgccgacgcggagtttcaggagcgccttaaagaggatacgtcttttgggggcaacctcggacgagcagtcttccaggccaaaaagaggattcttgaacctctgggcctggttgaggaacctgttaagacggctccgggaaaaaagaggccggtagagcactctcctgcggagccagactcctcctcgggaaccggaaaagcgggccagcagcctgcaagaaagagattgaattttggtcagactggagacgcagactcagtacctgacccccggcctctcggacagccaccagcagccccctctggtctgggaactaatacgatggcttcaggcagtggcgcaccaatggcagacaataacgagggcgccgacggagtgggtaattcctcgggaaattggcattgcgattccacatggatgggcgacagagtcatcaccaccagcacccgcacctgggccctgcccacctacaacaaccatctgtacaagcaaatctccagccagtctggagccagcaacgacaaccactactttggctacagcaccccctgggggtattttgacttcaacagattccactgccacttctccccacgtgactggcaaagactcatcaacaacaactggggattccggcccaagagactcagcttcaagctctttaacattcaagtcaaagaggtcacgcagaatgacggtacgacgacgattgccaataaccttaccagcacggttcaggtgtttactgactcggagtaccagctcccgtacgtcctcggctcggcgcatcaaggatgcctcccgccgttcccagcagacgtcttcatggtgccacagtatggatacctcaccctgaacaacggcagtcaggcggtaggacgctcttccttttactgcctggagtactttccttctcagatgcttcgtaccggaaacaactttaccttcagctacacctttgaagacgttcctttccatagcagctacgctcacagccaaagtctggaccgtctcatgaatcctctcatcgaccagtacctgtattacttgagcagaacaaacactccaagcggaaccaccacgatgtccaggcttcagttttctcaggccggagcaagtgacattcgggaccagtctagaaactggcttcctggaccctgttaccgccagcagcgagtatcaaagacagctgcggacaacaacaacagtgattactcgtggactggagctaccaagtaccacctcaatggaagagactctctggtgaatccgggcccagctatggccagccacaaggacgatgaagaaaaatattttcctcagagcggggttctcatctttggaaaacaagactcgggaaaaactaatgtggacattgaaaaggttatgattacagacgaagaggaaatcaggaccaccaatcccgtggctacggagcagtatggttctgtatctaccaacctccagagcggcaacacacaagcagctacctcagatgtcaacacacaaggcgttcttccaggcatggtctggcaggacagagacgtgtacctgcaggggcccatctgggcaaagattccacacacggacggacattttcacccctctcccctcatgggcggattcggacttaaacaccctcctccacaaattctcatcaagaacaccccggtacctgcgaatccttcgaccactttcagtgcggcaaagtttgcttccttcatcacacagtactccacggggcaggtcagcgtggagatcgagtgggagctgcagaaggagaacagcaaacgctggaatcccgaaattcagtacacttccaactacaacaaatctgttaatgtggactttactgtggacactaatggtgtgtattcagagcctcgccccattggcaccagatacctgactcgtaatctgtaa

SEQ ID NO: 4870 - protein, 735 aa, Adeno-associated virus
MAADGYLPDWLEDTLSEGIRQWWKLKPGPPPPKPAERHKDDSRGLVLPGYKYLGPFNGLDKGEPVNEADAAALEHDKAYDRQLDSGDNPYLKYNHADAEFQERLKEDTSFGGNLGRAVFQAKKRILEPLGLVEEPVKTAPGKKRPVEHSPAEPDSSSGTGKAGQQPARKRLNFGQTGDADSVPDPRPLGQPPAAPSGLGTNTMASGSGAPMADNNEGADGVGNSSGNWHCDSTWMGDRVITTSTRTWALPTYNNHLYKQISSQSGASNDNHYFGYSTPWGYFDFNRFHCHFSPRDWQRLINNNWGFRPKRLSFKLFNIQVKEVTQNDGTTTIANNLTSTVQVFTDSEYQLPYVLGSAHQGCLPPFPADVFMVPQYGYLTLNNGSQAVGRSSFYCLEYFPSQMLRTGNNFTFSYTFEDVPFHSSYAHSQSLDRLMNPLIDQYLYYLSRTNTPSGTTTMSRLQFSQAGASDIRDQSRNWLPGPCYRQQRVSKTAADNNNSDYSWTGATKYHLNGRDSLVNPGPAMASHKDDEEKYFPQSGVLIFGKQDSGKTNVDIEKVMITDEEEIRTTNPVATEQYGSVSTNLQSGNTQAATSDVNTQGVLPGMVWQDRDVYLQGPIWAKIPHTDGHFHPSPLMGGFGLKHPPPQILIKNTPVPANPSTTFSAAKFASFITQYSTGQVSVEIEWELQKENSKRWNPEIQYTSNYNKSVNVDFTVDTNGVYSEPRPIGTRYLTRNL

SEQ ID NO: 4871 - DNA, 2208 bp, Adeno-associated virus
  source 1..2208: mol_type = unassigned DNA
atggctgccgatggttatcttccagattggctcgaggacactctctctgaaggaataagacagtggtggaagctcaaacctggcccaccaccaccaaagcccgcagagcggcataaggacgacagcaggggtcttgtgcttcctgggtacaagtacctcggacccttcaacggactcgacaagggagagccggtcaacgaggcagacgccgcggccctcgagcacgacaaggcctacgaccggcagctcgacagcggagacaacccgtacctcaagtacaaccacgccgacgcggagtttcaggagcgccttaaaggagatacgtcttttgggggcaacctcggacgagcagtcttccaggccaaaaagaggattcttgaacctctgggcctggttgaggaacctgttaagacggctccgggaaaaaagaggccggtagagcactctcctgcggagccagactcctcctcgggaaccggaaaagcgggccagcagcctgcaagaaagagattgaattttggtcagactggagacgcagactcagtacctgacccccagcctctcggacagccaccagcagccccctctggtctgggaactaatacgatggcttcaggcagtggcgcaccaatggcagacaataacgagggcgccgacggagtgggtaattcctcgggaaattggcattgcgattccacatggatgggcggcagagtcatcaccaccagcacccgcacctgggccctgcccacctacaacaaccatctgtacaagcaaatctccagccagtctggagccagcaacgacaaccactactttggctacagcaccccctgggggtattttgacttcaacagattccactgccacttctccccacgtgactggcaaagactcatcaacaacaactggggattccggcccaagagactcagcttcaagctctttaacattcaagtcaaagaggtcacgcagaatgacggtacgacgacgattgccaataaccttaccagcacggttcaggtgtttactgactcggagtaccagctcccgtacgtcctcggctcggcgcatcaaggatgcctcccgccgttcccagcagacgtcttcatggtgccacagtatggatacctcaccctgaacaacggcagtcaggcggtaggacgctcttccttttactgcctggagtactttccttctcagacgcttcgtaccggaaacaactttaccttcagctacacctttgaagacgttcctttccatagcagctacgctcacagccaaagtctggaccgtctcatgaatcctctcatcgaccagtacctgtattacttgagcagaacaaacactccaagcggaaccaccacgatgtccaggcttcagttttctcaggccggagcaagtgacattcgggaccagtctagaaactggcttcctggaccctgttaccgccagcagcgagtatcaaagacagctgcggacaacaacaacagtgattactcgtggactggagctaccaagtaccacctcaatggaagagactctctggtgaatccgggcccagctatggccagccacaaggacgatgaagaaaaatattttcctcagagcggggttctcatctttggaaaacaagactcgggaaaaactaatgtggacattgaaaaggttatgattacagacgaagaggaaatcaggaccaccaatcccgtggctacggagcagtatggttctgtatctaccaacctccagagcggcaacacacaagcagctacctcagatgtcaacacacaaggcgttcttccaggcatggtctggcaggacagagacgtgtacctgcaggggcccatctgggcaaagattccacacacggacggacattttcacccctctcccctcatgggcggattcggacttaaacaccctcctccacaaattctcatcaagaacaccccggtacctgcgaatccttcgaccactttcagtgcggcaaagtttgcttccttcatcacacagtactccacggggcaggtcagcgtggagatcgagtgggagctgcagaaggagaacagcaaacgctggaatcccgaaattcagtacacttccaactacaacaaatctgttaatgtggactttactgtggacactaatggtgtgtattcagagcctcgccccattggcaccagatacctgactcgtaatctgtaa

SEQ ID NO: 4872 - protein, 735 aa, Adeno-associated virus
MAADGYLPDWLEDTLSEGIRQWWKLKPGPPPPKPAERHKDDSRGLVLPGYKYLGPFNGLDKGEPVNEADAAALEHDKAYDRQLDSGDNPYLKYNHADAEFQERLKGDTSFGGNLGRAVFQAKKRILEPLGLVEEPVKTAPGKKRPVEHSPAEPDSSSGTGKAGQQPARKRLNFGQTGDADSVPDPQPLGQPPAAPSGLGTNTMASGSGAPMADNNEGADGVGNSSGNWHCDSTWMGGRVITTSTRTWALPTYNNHLYKQISSQSGASNDNHYFGYSTPWGYFDFNRFHCHFSPRDWQRLINNNWGFRPKRLSFKLFNIQVKEVTQNDGTTTIANNLTSTVQVFTDSEYQLPYVLGSAHQGCLPPFPADVFMVPQYGYLTLNNGSQAVGRSSFYCLEYFPSQTLRTGNNFTFSYTFEDVPFHSSYAHSQSLDRLMNPLIDQYLYYLSRTNTPSGTTTMSRLQFSQAGASDIRDQSRNWLPGPCYRQQRVSKTAADNNNSDYSWTGATKYHLNGRDSLVNPGPAMASHKDDEEKYFPQSGVLIFGKQDSGKTNVDIEKVMITDEEEIRTTNPVATEQYGSVSTNLQSGNTQAATSDVNTQGVLPGMVWQDRDVYLQGPIWAKIPHTDGHFHPSPLMGGFGLKHPPPQILIKNTPVPANPSTTFSAAKFASFITQYSTGQVSVEIEWELQKENSKRWNPEIQYTSNYNKSVNVDFTVDTNGVYSEPRPIGTRYLTRNL

SEQ ID NO: 4873 - DNA, 2208 bp, Adeno-associated virus
  source 1..2208: mol_type = unassigned DNA
atggctgccgatggttatcttccagattggctcgaggacactctctctgaaggaataagacagtggtggaagctcaaacctggcccaccaccaccaaagcccgcagagcggcataaggacgacagcaggggtcttgtgcttcctgggtacaagtacctcggacccttcaacggactcgacaagggagagccggtcaacgaggcagacgccgcggccctcgagcacgacaaggcctacgaccggcagctcgacagcggagacaacccgtacctcaagtacaaccacgccgacgcggagtttcaggagcgtcttaaagaagatacgtcttttgggggcaacctcggacgagcagtcttccaggccaaaaagaggattcttgaacctctgggcctggttgaggaacctgttaagacggctccgggaaaaaagaggccggtagagcactctcctgcggagccagactcctcctcgggaaccggaaaagcgggccagcagcctgcaagaaagagattgaattttggtcagactggagacgcagactcagtacctgacccccagcctctcggacagccaccagcagccccctctggtctgggaactaatacgatggcttcaggcagtggcgcaccaatggcagacaataacgagggcgccgacggagtgggtaattcctcgggaaattggcattgcgattccacatggatgggcgacagagtcatcaccaccagcacccgcacctgggccctgcccacctgcaacaaccatctgtacaagcaaatctccagccagtctggagccagcaacgacaaccactactttggctacagcaccccctgggggtattttgacttcaacagattccactgccacttctccccacgtgactggcaaagactcatcaacaacaactggggattccggcccaagagactcagcttcaagctctttaacattcaagtcaaagaggtcacgcagaatgacggtacgacgacgattgccaataaccttaccagcacggttcaggtgtttactgactcggagtaccagctcccgtacgtcctcggctcggcgcatcaaggatgcctcccgccgttcccagcagacgtcttcatggtgccacagtatggatacctcaccctgaacaacggcagtcaggcggtaggacgctcttccttttactgcctggagtattttccttctcagatgcttcgtaccggaaacaactttaccttcagctacacctttgaagacgttcctttccatagcagctacgctcacagccaaagtctggaccgtctcatgaatcctctcatcgaccagtacctgtattacttgagcagaacaaacactccaagcggaaccaccacgatgtccaggcttcagttttctcaggccggagcaagtgacattcgggaccagtctagaaactggcttcctggaccctgttaccgccagcagcgagtatcaaagacagctgcggacaacaacaacagtgattactcgtggactggagctaccaagtaccacctcaatggaagagactctctggtgaatccgggcccagctatggccagccacaaggacgatgaagaaaaatattttcctcagagcggggttctcatctttggaaaacaagactcgggaaaaactaatgtggacattgaaaaggttatgattacagacgaagaggaaatcaggaccaccaatcccgtggctacggagcagtatggttctgtatctacctacctccagagcggcaacacacaagcagctacctcagatgtcaacacacaaggcgttcttccaggcatggtctggcaggacagagacgtgtacctgcgggggcccatctgggcaaagattccacacacggacggacattttcacccctctcccctcatgggcggatttggacttaaacaccctcctccacaaattctcatcaagaacaccccggtacctgcgaatccttcgaccactttcagtgcggcaaagtttgcttccttcatcacacagtactccacggggcaggtcagcgtggagatcgagtgggagctgcagaaggagaacagcaaacgctggaatcccgaaattcagtacacttccaactacaacaaatctgttaatgtggactttactgtggacactaatggtgtgtattcagagcctcgccccattggcaccagatacctgactcgtaatctgtaa

SEQ ID NO: 4874 - protein, 735 aa, Adeno-associated virus
MAADGYLPDWLEDTLSEGIRQWWKLKPGPPPPKPAERHKDDSRGLVLPGYKYLGPFNGLDKGEPVNEADAAALEHDKAYDRQLDSGDNPYLKYNHADAEFQERLKEDTSFGGNLGRAVFQAKKRILEPLGLVEEPVKTAPGKKRPVEHSPAEPDSSSGTGKAGQQPARKRLNFGQTGDADSVPDPQPLGQPPAAPSGLGTNTMASGSGAPMADNNEGADGVGNSSGNWHCDSTWMGDRVITTSTRTWALPTCNNHLYKQISSQSGASNDNHYFGYSTPWGYFDFNRFHCHFSPRDWQRLINNNWGFRPKRLSFKLFNIQVKEVTQNDGTTTIANNLTSTVQVFTDSEYQLPYVLGSAHQGCLPPFPADVFMVPQYGYLTLNNGSQAVGRSSFYCLEYFPSQMLRTGNNFTFSYTFEDVPFHSSYAHSQSLDRLMNPLIDQYLYYLSRTNTPSGTTTMSRLQFSQAGASDIRDQSRNWLPGPCYRQQRVSKTAADNNNSDYSWTGATKYHLNGRDSLVNPGPAMASHKDDEEKYFPQSGVLIFGKQDSGKTNVDIEKVMITDEEEIRTTNPVATEQYGSVSTYLQSGNTQAATSDVNTQGVLPGMVWQDRDVYLRGPIWAKIPHTDGHFHPSPLMGGFGLKHPPPQILIKNTPVPANPSTTFSAAKFASFITQYSTGQVSVEIEWELQKENSKRWNPEIQYTSNYNKSVNVDFTVDTNGVYSEPRPIGTRYLTRNL

SEQ ID NO: 4875 - DNA, 2208 bp, Adeno-associated virus; identical to SEQ ID NO: 4869
  source 1..2208: mol_type = unassigned DNA

SEQ ID NO: 4876 - protein, 735 aa, Adeno-associated virus; identical to SEQ ID NO: 4870

SEQ ID NO: 4877 - DNA, 2208 bp, Adeno-associated virus
  source 1..2208: mol_type = unassigned DNA
atggctgccgatggttatcttccagattggctcgaggacactctctctgaaggaataagacagtggtggaagctcaaacctggcccaccaccaccaaagcccgcagagcggcataaggacggcagcaggggtcttgtgcttcctgggtacaagtacctcggacccttcaacggactcgacaagggagagccggtcaacgaggcagacgccgcggccctcgagcacgacaaggcctacgaccggcagctcaacagcggagacaacccgtacctcaagtacaaccacgccgacgcggagtttcaggagcgccttaaagaagatacgtcttttgggggcaacctcggacgagcagtcttccaggcaaaaaagagggttcttgaacctctgggcctggttgaggagcctgttaaaacggctccgggaaaaaagagaccggtagagcactctcctgcggagccagactcctcctcgggaaccggaaaagcgggccagcagcctgcaagaaagagattgaattttggtcagactggagacgcagactccgtacctgacccccagcctctcggacagccaccagcagccccctctggtctgggatctactacaatggctacaggcagtggcgcaccaatggcagacaataacgagggtgccgatggagtgggtaattcctcaggaaattggcattgcgattcccaatggctgggcgacagagtcatcaccacaagcactcgaacctgggccctgcccacctacaacaaccacctctacaagcaaatctccagccaatcaggagcctcaaacgacaaccactattttggctacagcaccccttgggggtattttgacttcaacagattccactgccacttttcaccacgtgactggcaaagactcatcaacaacaactggggattccgacccaagagactcaacttcaagctctttaacattcaagtcaaagaggtcacgcagaatgacggtacgacgacgattgccaataaccttaccagcacggttcaggtgtttactgactcggagtaccagctcccgtacgtcctcggctcggcgcatcaaggatgcctcccgccgttcccagcggacgtcttcatggtcccacagtatggatacctcaccctgaacaacgggagtcaggcggtaggacgctctcccttttactgcctggagtactttccttctcagatgctgcgtactggaaacaactttcagttcagctacacttttgaagacgtgcctttccacagcagctacgctcacagccagagtctggatcggctgatgaatcctctgatcgaccagtacctgtattatctgaacaagacacaaacaaatagtggaactcttcagcagtctcggctactgtttagccaagctggacccaccaacatgtctcttcaagctaaaaactggctgcctggaccttgctacagacagcagcgtctgtcaaagcaggcaaacgacaacaacaacagcaactttccctggactgcagctacaaagtatcatctaaatggccgggactcgttggttaatccaggaccagctatggccagtcacaaggatgacgaagaaaagtttttccccatgcatggaaccctgatatttggtaaacaaggaacaaatgccaacgacgcggatttggaaaatgtcatgattacagatgaagaagaaatcaggaccaccaatcccgtggctacggagcagtacgggactgtgtcaaataatttgcaaaactcaaacactggtccaactactggaactgtcaatcaccaaggagcgttacctggtatggtgtggcaggatcgagatgtgtaccttcagggacccatttgggccaagattcctcacaccgatggacactttcatccttctccactgatgggaggttttggactcaaacacccgcctcctcagattatgatcaaaaacactcccgttccagccaatcctcctacaaacttcagttctgccaagtttgcttctttcatcacacagtattccacggggcaggtcagcgtggagatcgagtgggagctgcagaaggagaacagcaaacgctggaatcccgaaattcagtacacttccaactacaacaaatctgttaatgtggactttactgtggacaataatggcgtgtactcagagcctcgccccattggcaccagatacctgactcgtaatctgtaa

SEQ ID NO: 4878 - protein, 735 aa, Adeno-associated virus
MAADGYLPDWLEDTLSEGIRQWWKLKPGPPPPKPAERHKDGSRGLVLPGYKYLGPFNGLDKGEPVNEADAAALEHDKAYDRQLNSGDNPYLKYNHADAEFQERLKEDTSFGGNLGRAVFQAKKRVLEPLGLVEEPVKTAPGKKRPVEHSPAEPDSSSGTGKAGQQPARKRLNFGQTGDADSVPDPQPLGQPPAAPSGLGSTTMATGSGAPMADNNEGADGVGNSSGNWHCDSQWLGDRVITTSTRTWALPTYNNHLYKQISSQSGASNDNHYFGYSTPWGYFDFNRFHCHFSPRDWQRLINNNWGFRPKRLNFKLFNIQVKEVTQNDGTTTIANNLTSTVQVFTDSEYQLPYVLGSAHQGCLPPFPADVFMVPQYGYLTLNNGSQAVGRSPFYCLEYFPSQMLRTGNNFQFSYTFEDVPFHSSYAHSQSLDRLMNPLIDQYLYYLNKTQTNSGTLQQSRLLFSQAGPTNMSLQAKNWLPGPCYRQQRLSKQANDNNNSNFPWTAATKYHLNGRDSLVNPGPAMASHKDDEEKFFPMHGTLIFGKQGTNANDADLENVMITDEEEIRTTNPVATEQYGTVSNNLQNSNTGPTTGTVNHQGALPGMVWQDRDVYLQGPIWAKIPHTDGHFHPSPLMGGFGLKHPPPQIMIKNTPVPANPPTNFSSAKFASFITQYSTGQVSVEIEWELQKENSKRWNPEIQYTSNYNKSVNVDFTVDNNGVYSEPRPIGTRYLTRNL

SEQ ID NO: 4879 - DNA, 2208 bp, Adeno-associated virus
  source 1..2208: mol_type = unassigned DNA
atggctgccgatggttatcttccagattggctcgaggacactctctctgaaggaataagacagtggtggaagctcaaacctggcccaccaccaccaaagcccgcagagcggcataaggacgacagcaggggtcttgtgcttcctgggtacaagtacctcggacccttcaacggactcgacaagggagagccggtcaacgaggcagacgccgcggccctcgagcacgacaaggcctacgaccggcagctcgacagcggagacaacccgtacctcaagtacaaccacgccgacgcggagtttcaggagcgtcttaaagaagatacgtcttttgggggcaacctcggacgagcagtcttccaggccaaaaagaggattcttgaacctctgggcctggttgaggaacctgttaagacggctccgggaaaaaagaggccggtagagcactctcctgcggagccagactcctcctcgggaaccggaaaagcgggccagcagcctgcaagaaagagattgaattttggtcagactggagacgcagactcagtacctgacccccagcctctcggacagccaccagcagccccctctggtctgggaactaatacgatggcttcaggcagtggcgcaccaatggcagacaataacgagggcgccgacggagtgggtaattcctcgggaaattggcattgcgattccacatggatgggcgacagagtcatcaccaccagcacccgcacctgggccctgcccacctacaacaaccatctgtacaagcaaatctccagccagtctggagccagcaacgacaaccactactttggctacagcaccccctgggggtattttgacttcaacagattccactgccacttctccccacgtgactggcaaagactcatcaacaacaactggggattccggcccaagagactcagcttcaagctctttaacattcaagtcaaagaggtcacgcagaatgacggtacgacgacgattgccaataaccttaccagcacggttcaggtgtttactgactcggagtaccagctcccgtacgtcctcggctcggcgcatcaaggatgcctcccgccgttcccagcagacgtcttcatggtgccacagtatggatacctcaccctgaacaacggcagtcaggcggtaggacgctcttccttttactgcctggagtactttccttctcagatgcttcgtaccggaaacaactttaccttcagctacacctttgaagacgttcctttccatagcagctacgctcacagccaaagtctggaccgtctcatgaatcctctcatcgaccagtacctgtattacttgagcagaacaaacactccaagcggaaccaccacgatgtccaggcttcagttttctcaggccggagcaagtgacattcgggaccagtctagaaactggcttcctggaccctgttaccgccagcagcgagtatcaaagacagctgcggacaacaacaacagtgattactcgtggactggagctaccaagtaccacctcaatggaagagactctctggtgaatccgggcccagctatggccagccacaaggacgatgaagaaaaatattttcctcagagcggggttctcatctttggaaaacaagactcgggaaaaactaatgtggacattgaaaaggttatgattacagacgaagaggaaatcaggaccaccaatcccgtggctacggagcagtatggttctgtatctaccaacctccagagcggcaacacacaagcagctacctcagatgtcaacacacaaggcgttcttccaggcatggtctggcaggacagagacgtgtacctgcaggggcccatctgggcaaagattccacacacggacggacattttcacccctctcccctcatgggcggattcggacttaaacaccctcctccacaaattctcatcaagaacaccccggtacctgcgaatccttcgaccactttcagtgcggcaaagtttgcttccttcatcacacagtactccacggggcaggtcagcgtggagatcgagtgggagctgcagaaggagaacagcaaacgctggaatcccgaaattcagtacacttccaactacaacaaatctgttaatgtggactttactgtggacactaatggtgtgtattcagagcctcgccccattggcaccagatacctgactcgtaatctgtaa

SEQ ID NO: 4880 - protein, 735 aa, Adeno-associated virus
MAADGYLPDWLEDTLSEGIRQWWKLKPGPPPPKPAERHKDDSRGLVLPGYKYLGPFNGLDKGEPVNEADAAALEHDKAYDRQLDSGDNPYLKYNHADAEFQERLKEDTSFGGNLGRAVFQAKKRILEPLGLVEEPVKTAPGKKRPVEHSPAEPDSSSGTGKAGQQPARKRLNFGQTGDADSVPDPQPLGQPPAAPSGLGTNTMASGSGAPMADNNEGADGVGNSSGNWHCDSTWMGDRVITTSTRTWALPTYNNHLYKQISSQSGASNDNHYFGYSTPWGYFDFNRFHCHFSPRDWQRLINNNWGFRPKRLSFKLFNIQVKEVTQNDGTTTIANNLTSTVQVFTDSEYQLPYVLGSAHQGCLPPFPADVFMVPQYGYLTLNNGSQAVGRSSFYCLEYFPSQMLRTGNNFTFSYTFEDVPFHSSYAHSQSLDRLMNPLIDQYLYYLSRTNTPSGTTTMSRLQFSQAGASDIRDQSRNWLPGPCYRQQRVSKTAADNNNSDYSWTGATKYHLNGRDSLVNPGPAMASHKDDEEKYFPQSGVLIFGKQDSGKTNVDIEKVMITDEEEIRTTNPVATEQYGSVSTNLQSGNTQAATSDVNTQGVLPGMVWQDRDVYLQGPIWAKIPHTDGHFHPSPLMGGFGLKHPPPQILIKNTPVPANPSTTFSAAKFASFITQYSTGQVSVEIEWELQKENSKRWNPEIQYTSNYNKSVNVDFTVDTNGVYSEPRPIGTRYLTRNL

SEQ ID NO: 4881 - DNA, 2208 bp, Adeno-associated virus
  source 1..2208: mol_type = unassigned DNA
atggctgccgatggttatcttccagattggctcgaggacactctctctgaaggaataagacagtggtggaagctcaaacctggcccaccaccaccaaagcccgcagagcggcataaggacgacagcaggggtcttgtgcttcctgggtacaagtacctcggacccttcaacggactcgacaagggagagccggtcaacgaggcagacgccgcggccctcgagcacgacaaggcctacgaccggcagctcgacagcggagacaacccgtacctcaagtacaaccacgccgacgcggagtttcaggagcgtcttaaagaagatacgtcttttgggggcaacctcggacgagcagtcttccaggccaaaaagaggattcttgaacctctgggcctggttgaggaacctgttaagacggctccgggaaaaaagaggccggtagagcactctcctgcggagccagactcctcctcgggaaccggaaaagcgggccagcagcctgcaagaaagagattgaattttggtcagactggagacgcagactcagtacctgacccccagcctctcggacagccaccagcagccccctctggtctgggaactaatacgatggcttcaggcagtggcgcaccaatggcagacaataacgagggcgccgacggagtgggtaattcctcgggaaattggcattgcgattccacatggatgggcgacagagtcatcaccaccagcacccgcacctgggccctgcccacctacaacaaccatctgtacaagcaaatctccagccagtctggagccagcaacgacaaccactactttggctacagcaccccctgggggtatttcgacttcaacagattccactgccacttctccccacgtgactggcaaagactcatcaacaacaactggggattccggcccaagagactcagcttcaagctctttaacattcaagtcaaagaggtcacgcagaatgacggtacgacgacgattgccaataaccttaccagcacggttcaggtgtttactgactcggggtaccagctcccgtacgtcctcggctcggcgcatcaaggatgccttccgccgttcccagcagacgtcttcatggtgccacagtatggatacctcaccctgaacaacggcagtcaggcggtaggacgctcttccttttactgcctggagtactttccttctcagatgcttcgtaccggaaacaactttaccttcagctacacctttgaagacgttcctttccatagcagctacgctcacggccaaagtctggaccgtctcatgaatcctctcatcgaccagtacctgtattacttgagcagaacaaacactccaagcggaaccaccacgatgtccaggcttcagttttctcaggccggagcaagtgacgttcgggaccagtctagaaactggcttcctggaccctgttaccgccagcagcgagtatcaaagacagctgcggacaacaacaacagtgattactcgtggactggagctaccaagtaccacctcaatggaagagactctctggtgaatccgggcccagctatggccagccacaaggacgatgaagaaaaatattttcctcagagcggggttctcgtctttggaaaacaagactcgggaaaaactaatgtggacattgaaaaggttatgattacagacgaagaggaaatcaggaccaccaatcccgcggctacggagcagtatggttctgtatctaccaacctccagagcggcaacacacaagcagctacctcagatgtcaacacacaaggcgttcttccaggcatggtctggcaggacagagacgtgtacctgcaggggcccatctgggcaaagattccacacacggacggacattttcacccctctcccctcatgggcggattcggacttaaacaccctcctccacaaattctcatcaagaacaccccggtacctgcgaatccttcgaccactttcagtgcggcaaagtttgtttccttcatcacacagtactccacggggcaggtcagcgtggagatcgagtgggagctgcagaaggagaacagcaaacgctggaatcccgaaattcagtacacttccaactacaacaaatctgttaatgtggactttactgtggacactaatggtgtgtattcagagcctcgccccattggcaccagatacctgactcgtaatctgtaa

SEQ ID NO: 4882 - protein, 735 aa, Adeno-associated virus
MAADGYLPDWLEDTLSEGIRQWWKLKPGPPPPKPAERHKDDSRGLVLPGYKYLGPFNGLDKGEPVNEADAAALEHDKAYDRQLDSGDNPYLKYNHADAEFQERLKEDTSFGGNLGRAVFQAKKRILEPLGLVEEPVKTAPGKKRPVEHSPAEPDSSSGTGKAGQQPARKRLNFGQTGDADSVPDPQPLGQPPAAPSGLGTNTMASGSGAPMADNNEGADGVGNSSGNWHCDSTWMGDRVITTSTRTWALPTYNNHLYKQISSQSGASNDNHYFGYSTPWGYFDFNRFHCHFSPRDWQRLINNNWGFRPKRLSFKLFNIQVKEVTQNDGTTTIANNLTSTVQVFTDSGYQLPYVLGSAHQGCLPPFPADVFMVPQYGYLTLNNGSQAVGRSSFYCLEYFPSQMLRTGNNFTFSYTFEDVPFHSSYAHGQSLDRLMNPLIDQYLYYLSRTNTPSGTTTMSRLQFSQAGASDVRDQSRNWLPGPCYRQQRVSKTAADNNNSDYSWTGATKYHLNGRDSLVNPGPAMASHKDDEEKYFPQSGVLVFGKQDSGKTNVDIEKVMITDEEEIRTTNPAATEQYGSVSTNLQSGNTQAATSDVNTQGVLPGMVWQDRDVYLQGPIWAKIPHTDGHFHPSPLMGGFGLKHPPPQILIKNTPVPANPSTTFSAAKFVSFITQYSTGQVSVEIEWELQKENSKRWNPEIQYTSNYNKSVNVDFTVDTNGVYSEPRPIGTRYLTRNL

SEQ ID NO: 4883 - DNA, 2208 bp, Adeno-associated virus
  source 1..2208: mol_type = unassigned DNA
atggctgccgatggttatcttccagattggctcgaggacactctctctgaaggaataagacagtggtggaaactcaaacctggcccaccaccaccaaagcccgcagagcggcataaggacgacagcaggggtcttgtgcttcctgggtacaagtacctcggacccttcaacggactcgacaagggagagccggtcaacgaggcagacgccgcggccctcgagcacgacaaggcctacgaccggcagctcgacagcggagacaacccgtacctcaagtacaaccacgccgacgcggagtttcaggagcgccttaaagaagatacgtcttttgggggcaacctcggacgagcagtcttccaggcaaaaaagagggttctggaacctctgagcctggttgaggagcctgttaagacggctccgggaaaaaagaggccggtagagcactctcccgcagagccagattcctcctccggaactggaaagtcgggcaaccagcctgcaagaaagagattgaatttcggtcagactggagactcagactccgtacctgacccccagcctctcggacagccaccagcagccccctctggtctgggaactaatacgatggctacaggcagtggcgcaccaatggcagacaataacgagggcgccgacggagtgggtaattcctcgggaaattggcattgcgattccacatggatgggcgacagagtcatcaccaccagcacccgaacctgggccctgcccacctacaacaaccatctgtacaagcaaatatccagccagtctggagccagcaacgacaatcactactttggctacagcaccccctgggggtattttgacttcaacagattccactgccacttttcaccacgtgactggcaaagactcatcaacaacaactggggattccgacccaagagactcaacttcaagctctttaacattcaagtcaaagaggtcacgcagaatgacggtacgacgacgattgccaataaccttaccagcacggttcaggtgtttactgactcggagtaccagctcccgtacgtcctcggctcggcgcatcaaggatgcctcccgccgttcccagcagacgtcttcatggtgccacagtatggatacctcaccctgaacaacgggagtcaggcagtaggacgctcttcattttactgcctagagtactttccttctcagatgctgcgtaccggaaacaactttaccttcagctacacctttgaggacgttcctttccacagcagctacgctcacagccagagtttggaccgtctcatgaatcctctcatcgaccagtacctgtattacttgagcagaacaaacactccaagcggaaccaccacgcagtccaggcttcagttttctcaggccggagcgagtgacattcaggaccagtctaggaactggcttcctggaccctgttaccgtcagcagcgagtatcaaagacatctgcggataacaacaacagtgaatactcgtggactggagctaccaagtaccacctcaatggcagagactctctggtgaatccgggcccggccatggccagccacaaagacgatgaagaaaagttttttcctcagagcggggttcttatctttgggaagcaaggctcagagaaaacaaatgtggatattgaaaaggtcatgattacagacgaagaggaaatcaggaccaccaatcccgtggctacggagcagtatggttctgtatctaccaacctccagagcggcaacacacaagcagctaccgcagatgtcaacacacaaggcgttcttccaggcatggtcgggcaagacagagacgtgtacctgcaggggcctacttgggcaaagattccacacacggacggacattttcacccctctcccctcatgggcggatttggacttaaacaccctcctccacagattctcatcaagaacaccccggtacctgcgaatccttcgaccaccttcagtgcggcaaagtttgcttccttcattacacagtactccacggggcaggtcagcgtggagatcgagtgggagctgcagaaggagaacagcaaacgctggaatcccgagatccagtacacttccaactacaacaagtctgttaatgtggactttactgtggacactaatggcgtgtattcagagcctcgccccattggcaccagatacctgactcgtaatctgtaa

SEQ ID NO: 4884 - protein, 735 aa, Adeno-associated virus
MAADGYLPDWLEDTLSEGIRQWWKLKPGPPPPKPAERHKDDSRGLVLPGYKYLGPFNGLDKGEPVNEADAAALEHDKAYDRQLDSGDNPYLKYNHADAEFQERLKEDTSFGGNLGRAVFQAKKRVLEPLSLVEEPVKTAPGKKRPVEHSPAEPDSSSGTGKSGNQPARKRLNFGQTGDSDSVPDPQPLGQPPAAPSGLGTNTMATGSGAPMADNNEGADGVGNSSGNWHCDSTWMGDRVITTSTRTWALPTYNNHLYKQISSQSGASNDNHYFGYSTPWGYFDFNRFHCHFSPRDWQRLINNNWGFRPKRLNFKLFNIQVKEVTQNDGTTTIANNLTSTVQVFTDSEYQLPYVLGSAHQGCLPPFPADVFMVPQYGYLTLNNGSQAVGRSSFYCLEYFPSQMLRTGNNFTFSYTFEDVPFHSSYAHSQSLDRLMNPLIDQYLYYLSRTNTPSGTTTQSRLQFSQAGASDIQDQSRNWLPGPCYRQQRVSKTSADNNNSEYSWTGATKYHLNGRDSLVNPGPAMASHKDDEEKFFPQSGVLIFGKQGSEKTNVDIEKVMITDEEEIRTTNPVATEQYGSVSTNLQSGNTQAATADVNTQGVLPGMVGQDRDVYLQGPTWAKIPHTDGHFHPSPLMGGFGLKHPPPQILIKNTPVPANPSTTFSAAKFASFITQYSTGQVSVEIEWELQKENSKRWNPEIQYTSNYNKSVNVDFTVDTNGVYSEPRPIGTRYLTRNL

SEQ ID NO: 4885 - DNA, 2208 bp, Adeno-associated virus
  source 1..2208: mol_type = unassigned DNA
atggctgccgatggttatcttccagattggctcgaggacactctctctgaaggaataagacagtggtggaagctcaaacctggcccaccaccaccaaagcccgcagagcggcataaggacgacagcaggggtcttgtgcttcctgggtacaagtacctcggacccttcaacggactcgacaagggagagccggtcaacgaggcagacgccgcggccctcgagcacgacaaggcctacgaccggcagctcgacagcggagacaacccgtacctcaagtacaaccacgccgacgcagagtttcaggagcgccttaaagaagatacgtcttttgggggcaacctcggacgagcagtcttccaggcaaaaaagagggttctggaacctctgggcctggttgaggagcctgttaagacggctccgggaaaaaagaggccggtagagcactctcctgcagagccagattcctcctccggaactggaaagtcgggcaaccagcctgcaagaaagagattgaatttcggtcagactggagactcagactccgtacctgacccccagcctctcggacagccaccagcagccccctctggtctgggaactaatacgatggctacaggcagtggcgcaccaatggcagacaataacgagggcgccgacggagtgggtaattcctcgggaaattggcattgcgattccacatggatgggcgacagagtcatcaccaccagcacccgaacctgggccctgcccacctacaacaaccatctgtacaagcaaatatccagccagtctggagccagcaacgacaatcactactttggctacagcaccccctgggggtattttgacttcaacagattccactgccacttttcaccacgtgactggcaaagactcatcaacaacaactggggattccgacccaagagactcaacttcaagctctttaacattcaagtcaaagaggtcacgcagaatgacggtacgacgacgattgccaataaccttaccagcacggttcaggtgtttactgactcggagtaccagctcccgtacgtcctcggctcggcgcatcaaggatgcctcccgccgttcccagcagacgtcttcatggtgccacagtatggatacctcaccctgaacaacgggagtcaggcagtaggacgctcttcattttactgcctagggtactttccttctcagatgctgcgtaccggaaacaactttaccttcagctacacctttgaggacgttcctttccacagcagctacgctcacagccagagtttggaccgtctcatgaatcctctcatcgaccagtacctgtattacttgagcagaacaaacactccaagcggaaccaccacgcagtccaggcttcagttttctcaggccggagcgagtgacattcgggaccagtctaggaactggcttcctggaccctgttaccgtcagcagcgagtatcaaagacatctgcggataacaacaacagtgaatactcgtggactggagctaccaagtaccacctcaatggcagagactctctggtgaatccgggcccggccatggccagccacaaagacgatgaagaaaagttttttcctcagagcggggttcttatctttgggaagcaaggcccagagaaaacaaatgtggatattgaaaaggtcatgattacagacgaagaggaaatcaggaccaccaatcccgtggctacggagcagtatggttctgtatctaccaacctccagagcggcaacacacaagcagctaccgcagatgtcaacacacaaggcgttcttccaggcatggtctggcaagacagagacgtgtacctgcaggggcctatttgggcaaagattccacacacggacggacattttcacccctctcccctcatgggcggatttggacttaaacaccctcctccacagattctcatcaagaacaccccggtacctgcgaatccttcgaccaccttcagtgcggcaaagtttgcttccttcattacacagtactccacggggcaggtcagcgtggagatcgagtgggagctgcagaaggagaacagcaaacgctggaatcccgagatccagtacacttccaactacaacaagtctgttaatgtggactttactgtggacactaatggcgtgtattcagagcctcgccccattggcaccagatacctgactcgtaatctgtaa

SEQ ID NO: 4886 - protein, 735 aa, Adeno-associated virus
MAADGYLPDWLEDTLSEGIRQWWKLKPGPPPPKPAERHKDDSRGLVLPGYKYLGPFNGLDKGEPVNEADAAALEHDKAYDRQLDSGDNPYLKYNHADAEFQERLKEDTSFGGNLGRAVFQAKKRVLEPLGLVEEPVKTAPGKKRPVEHSPAEPDSSSGTGKSGNQPARKRLNFGQTGDSDSVPDPQPLGQPPAAPSGLGTNTMATGSGAPMADNNEGADGVGNSSGNWHCDSTWMGDRVITTSTRTWALPTYNNHLYKQISSQSGASNDNHYFGYSTPWGYFDFNRFHCHFSPRDWQRLINNNWGFRPKRLNFKLFNIQVKEVTQNDGTTTIANNLTSTVQVFTDSEYQLPYVLGSAHQGCLPPFPADVFMVPQYGYLTLNNGSQAVGRSSFYCLGYFPSQMLRTGNNFTFSYTFEDVPFHSSYAHSQSLDRLMNPLIDQYLYYLSRTNTPSGTTTQSRLQFSQAGASDIRDQSRNWLPGPCYRQQRVSKTSADNNNSEYSWTGATKYHLNGRDSLVNPGPAMASHKDDEEKFFPQSGVLIFGKQGPEKTNVDIEKVMITDEEEIRTTNPVATEQYGSVSTNLQSGNTQAATADVNTQGVLPGMVWQDRDVYLQGPIWAKIPHTDGHFHPSPLMGGFGLKHPPPQILIKNTPVPANPSTTFSAAKFASFITQYSTGQVSVEIEWELQKENSKRWNPEIQYTSNYNKSVNVDFTVDTNGVYSEPRPIGTRYLTRNL

SEQ ID NO: 4887 - protein, 735 aa, Adeno-associated virus
MAADGYLPDWLEDTLSEGIRQWWKLKPGPPPPKPAERHKDDSRGLVLPGYKYLGPFNGLDKGEPVNEADAAALEHDKAYDRQLDSGDNPYLKYNHADAEFQERLKEDTSFGGNLGRAVFQAKKRVLEPLGLVEEPVKTAPGKKRPVEHSPAEPDSSSGTGKSGNQPARKRLNFGQTGDSDSVPDPQPLGQPPAAPSGLGTNTMATGSGAPMADNNEGADGVGNSSGNWHCDSTWMGDRVITTSTRTWALPTYNNHLYKQISSQSGASNDNHYFGYSTPWGYFDFNRFHCHFSPRDWQRLINNNWGFRPKRLNFKLFNIQVKEVTQNDGTTTIANNLTSTVQVFTDSEYQLPYVLGSAHQGCLPPFPADVFMVPQYGYLTLNNGSQAVGRSSFYCLEYFPSQMLRTGNNFTFSYTFEDVPFHSSYAHSQSLDRLMNPLIDQYLYYLSRTNTPSGTTTQSRLQFSQAGASDIRDQSRNWLPGPCYRQQRVSKTSADNNNSEYSWTGATKYHLNGRDSLVNPGPAMASHKDDEEKFFPQSGVLIFGKQGPEKTNVDIEKVMITDEEEIRTTNPVATEQYGSVSTNLQSGNTQAATADVNTQGVLPGMVWQDRDVYLQGPIWAKIPHTDGHFHPSPLMGGFGLKHPPPQILIKNTPVPANPSTTFSAAKFASFITQYSTGQVSVEIEWELQKENSKRWNPEIQYTSNYNKSVNVDFTVDTNGVYSEPRPIGTRYLTRNL

SEQ ID NO: 4888 - protein, 735 aa, Adeno-associated virus; identical to SEQ ID NO: 4887

SEQ ID NO: 4889 - DNA, 2211 bp, Adeno-associated virus
  source 1..2211: mol_type = unassigned DNA
atggctgccgatggttatcttccagattggctcgaggacactctctctgaaggaataagacagtggtggaagctcaaacctggcccaccaccaccaaagcccgcagagcggcataaggacgacagcaggggtcttgtgcttcctgggtacaagtacctcggacccttcaacggactcgacaagggggagccggtcaacgaggcagacgccgcggccctcgagcacgacaaggcctacgaccggcagctcgacagcggagacaacccgtacctcaagtacaaccacgccgacgcagagtttcaggagcgccttaaagaagatacgtcttttgggggcaacctcggacgagcagtcttccaggcgaaaaagagggttcttgaacctctgcggcctggtttgaggaaacctgttaagacggctccgggaaaaaagaggccggtagagcactctcctgtggagccagactcctcctcgggaaccggaaaagcgggccagcagcctgcaagaaaaagattaaattttggtcagactggagacgcagactccgtacctgacccccagcctctcggacagccaccagcagccccctctggtctgggatctactacaatggctacaggcagtggcgcaccaatggcagacaataacgagggtgccgatggagtgggtaattcctcaggaaattggcattgcgattcccaatggctggacgacagagtcatcgccaccagcacccgaacctgggccctgcccacatacaacaaccacctctacaagcaaatctccagccaatcaggagcctgcaacgacaaccactactttggctacagcaccccctgggggtattttgacttcaacagattccactgccacttttcaccacgtgactggcaaagactcatcaacagcaactggggattccggcccaaaagactcaacttcaagctctttaatattcaagtcaaagaggtcacgcagaatgacggtacgacgacgattgccaataaccttaccagcacggttcaggtgtttactgactcggagtaccagctcccgtacgtcccgggctcggcgcatcaaggatgcctcccgccgtttccagcggacgtcttcatggtcccacagtatggatacctcaccctgaacaacgggagtcaggcggtaggacgctcttccttttactgcctggagtactttccttctcagatgctgcgtactggaaacaactttcagttcagctacacttttgaagacgtgcctttccacagcagctacgctcactgccagagtctggatcggctgatgaatcctctgatcgaccagtacctgtattatctgaacaagacacaaacaaatagtggaactcttcagcagtctcggctactgtttagccaagctggaccaaccaacatgtctcttcaagctaaaaactggctgcctggaccttgctacagacagcagcgtctgtcaaaacaggcaaacgacaataacaactgcaactttccctggactgcagctacaaagtatcatctaaatggccgggactcgttggttaatccaggaccagctatggccagtcacaaggatgacgaagaaaagtttttccccatgcatggaaccctgatatttggtaaacaaggaacaaatgccaacgacgcggatttggaaaatgtcatgattacagatgaagaagaaatcaggcccaccaatcccgtggctacggagcagtacgggactgtgtcaaataatttgcaaaactcaaacactggtccaactacaggaactgtcaatcaccaaggagcgttacctggtatggtgtggcaggatcgagacgtgtacctgcagggacccatttgggccaagattcctcacaccgatggacactttcatccttctccactgatgggaggttttggactcaaacacccgcctcctcagatcatgatcaaaagcactcccgttccagccaatcctcccacaaacttcagttctgccaagtttgcttcttccatcacacagtattccacgggacaggtcagcgtggagatcgagtgggagctgcagaaggagaacagcaaacgctggaatcccgaaattcagtacacttccaactacaacaagtctgttaatgtggactttactgtggacactaatggtgtgtattcagagcctcgccccattggcaccagatacctgactcgtaatctgtaa

SEQ ID NO: 4890 - protein, 736 aa, Adeno-associated virus
MAADGYLPDWLEDTLSEGIRQWWKLKPGPPPPKPAERHKDDSRGLVLPGYKYLGPFNGLDKGEPVNEADAAALEHDKAYDRQLDSGDNPYLKYNHADAEFQERLKEDTSFGGNLGRAVFQAKKRVLEPLRPGLRKPVKTAPGKKRPVEHSPVEPDSSSGTGKAGQQPARKRLNFGQTGDADSVPDPQPLGQPPAAPSGLGSTTMATGSGAPMADNNEGADGVGNSSGNWHCDSQWLDDRVIATSTRTWALPTYNNHLYKQISSQSGACNDNHYFGYSTPWGYFDFNRFHCHFSPRDWQRLINSNWGFRPKRLNFKLFNIQVKEVTQNDGTTTIANNLTSTVQVFTDSEYQLPYVPGSAHQGCLPPFPADVFMVPQYGYLTLNNGSQAVGRSSFYCLEYFPSQMLRTGNNFQFSYTFEDVPFHSSYAHCQSLDRLMNPLIDQYLYYLNKTQTNSGTLQQSRLLFSQAGPTNMSLQAKNWLPGPCYRQQRLSKQANDNNNCNFPWTAATKYHLNGRDSLVNPGPAMASHKDDEEKFFPMHGTLIFGKQGTNANDADLENVMITDEEEIRPTNPVATEQYGTVSNNLQNSNTGPTTGTVNHQGALPGMVWQDRDVYLQGPIWAKIPHTDGHFHPSPLMGGFGLKHPPPQIMIKSTPVPANPPTNFSSAKFASSITQYSTGQVSVEIEWELQKENSKRWNPEIQYTSNYNKSVNVDFTVDTNGVYSEPRPIGTRYLTRNL

SEQ ID NO: 4891 - DNA, 2208 bp, Adeno-associated virus
  source 1..2208: mol_type = unassigned DNA
atggctgccgatggttatcttccagattggctcgaggacactctctctgaaggaataagacagtggtggaagctcaaacctggcccaccaccaccaaagcccgcagagcggcataaggacgacagcaggggtcttgtgcttcctgggtacaagtacctcggacccttcaacggactcgacaagggagagccggtcaacgaggcagacgccgcggccctcgagcacgacaaggcctacgaccggcagctcgacagcggagacaacccgtacctcaagtacaaccacgccgacgcggagtttcaggagcgccttaaagaggatacgtcttttgggggcaacctcggacgagcagtcttccaggcaaaaaagagggttctggaacctctgggcctggttgaggagcctgttaagacggctccgggaaaaaagaggccggtagagcactctcctgcagagccagattcctcctccggaactggaaagtcgggcaaccagcctgcaagaaagagattgaatttcggtcagactggagactcagactccgtacctgacccccagcctctcggacagccaccagcagccccctctggtctgggaactaatacgatggctacaggcagtggcgcaccaatggcagacaataacgagggcgccgacggagtgggtaattcctcgggaaattggcattgcgattccacatggatgggcgacagagtcatcaccaccagcacccgaacctgggccctgcccacctacaacaaccatctgtacaagcaaatatccagccagtctggagccagcaacgacaatcactactttggctacagcaccccctgggggtattttgacttcaacagattccactgccacttttcaccacgtgactggcaaagactcatcaacaacaactggggattccgacccaagagactcaacttcaagctctttaacattcaagtcaaagaggtcacgcagaatgacggtacgacgacgattgccaataaccttaccagcacggttcaggtgtttactgactcggagtaccagctcccgtacgtcctcggctcggcgcatcaaggatgcctcccgccgttcccagcagacgtcttcatggtgccacagtatggatacctcaccctgaacaacgggagtcaggcagtaggacgctcttcattttactgcctagagtactttccttctcagatgctgcgtaccggaaacagctttaccttcagctacacctttgaggacgttcctttccacagcagctacgctcacagccagagtttggaccgtctcatgaatcctctcatcgaccagtacctgtattacttgagcagaacaaacactccaagcggaaccaccacgcagtccaggcttcagttttctcaggccggagcgagtgacattcgggaccagtctaggaactggcttcctggaccctgttaccgtcagcagcgagtatcaaagacatctgcggataacaacaacagtgaatactcgtggactggagctaccaagtaccacctcaatggcagagactctctggtgaatccgggcccggccatggccagccacaaagacgatgaagaaaagttctttcctcagagcggggttcttatctttgggaagcaaggctcagagaaaacaaatgtggatattgaaaaggtcatgattacagacgaagaggaaatcaggaccaccaatcccgtggctacggagcagtatggttctgtatctaccaacctccagagcggcaacacacaagcagctaccgcagatgtcaacacacaaggcgttcttccaggcatggtctggcaagacagagacgtgtacctgcaggggcctatttgggcaaagattccacacacggacggacattttcacccctctcccctcatgggcggatttggacttaaacaccctcctccacagattctcatcaagaacaccccggtacctgcgaatccttcgaccaccttcagtgcggcaaagtttgcttccttcattacacagtactccacggggcaggtcagcgtggagatcgagtgggagctgcagaaggagaacagcaaacgctggaatcccgagatccagtacacttccaactacaacaagtctgttaatgtggactttactgtggacactaatggcgtgtattcagagcctcgccccattggcaccagatacctgactcgtaatctgtaa

SEQ ID NO: 4892 - protein, 735 aa, Adeno-associated virus
MAADGYLPDWLEDTLSEGIRQWWKLKPGPPPPKPAERHKDDSRGLVLPGYKYLGPFNGLDKGEPVNEADAAALEHDKAYDRQLDSGDNPYLKYNHADAEFQERLKEDTSFGGNLGRAVFQAKKRVLEPLGLVEEPVKTAPGKKRPVEHSPAEPDSSSGTGKSGNQPARKRLNFGQTGDSDSVPDPQPLGQPPAAPSGLGTNTMATGSGAPMADNNEGADGVGNSSGNWHCDSTWMGDRVITTSTRTWALPTYNNHLYKQISSQSGASNDNHYFGYSTPWGYFDFNRFHCHFSPRDWQRLINNNWGFRPKRLNFKLFNIQVKEVTQNDGTTTIANNLTSTVQVFTDSEYQLPYVLGSAHQGCLPPFPADVFMVPQYGYLTLNNGSQAVGRSSFYCLEYFPSQMLRTGNSFTFSYTFEDVPFHSSYAHSQSLDRLMNPLIDQYLYYLSRTNTPSGTTTQSRLQFSQAGASDIRDQSRNWLPGPCYRQQRVSKTSADNNNSEYSWTGATKYHLNGRDSLVNPGPAMASHKDDEEKFFPQSGVLIFGKQGSEKTNVDIEKVMITDEEEIRTTNPVATEQYGSVSTNLQSGNTQAATADVNTQGVLPGMVWQDRDVYLQGPIWAKIPHTDGHFHPSPLMGGFGLKHPPPQILIKNTPVPANPSTTFSAAKFASFITQYSTGQVSVEIEWELQKENSKRWNPEIQYTSNYNKSVNVDFTVDTNGVYSEPRPIGTRYLTRNL

SEQ ID NO: 4893 - DNA, 2211 bp, Adeno-associated virus; identical to SEQ ID NO: 4804
  source 1..2211: mol_type = unassigned DNA

SEQ ID NO: 4894 - protein, 736 aa, Adeno-associated virus
MAADGYLPDWLEDTLSEGIRQWWKLKPGPPPPKPAERHKDDSRGLVLPGYKYLGPGNGLDKGEPVNAADAAALEHDKAYDQQLKAGDNPYLKYNHADAEFQERLKEDTSFGGNLGRAVFQAKKRLLEPLGLVEEAAKTAPGKKRPVEQSPQEPDSSAGIGKSGSQPAKKKLNFGQTGDTESVPDPQPIGEPPAAPSGVGSLTMASGGGAPVADNNEGADGVGSSSGNWHCDSQWLGDRVITTSTRTWALPTYNNHLYKQISNSTSGGSSNDNAYFGYSTPWGYFDFNRFHCHFSPRDWQRLINNNWGFRPKRLNFKLFNIQVKEVTDNNGVKTIANNLTSTVQVFTDSDYQLPYVLGSAHEGCLPPFPADVFMIPQYGYLTLNDGGQAVGRSSFYCLEYFPSQMLRTGNNFQFSYEFENVPFHSSYAHSQSLDRLMNPLIDQYLYYLSKTINGSGQNQQTLKFSVAGPSNMAVQGRNYIPGPSYRQQRVSTTVTQNNNSEFAWPGASSWALNGRNSLMNPGPAMASHKEGEDRFFPLSGSLIFGKQGTGRDNVDADKVMITNEEEIKTTNPVATESYGQVATNHQSAQAQAQTGWVQNQGILPGMVWQDRDVYLQGPIWAKIPHTDGNFHPSPLMGGFGMKHPPPQILIKNTPVPADPPTAFNKDKLNSFITQYSTGQVSVEIEWELQKENSKRWNPEIQYTSNYYKSNNVEFAVSTEGVYSEPRPIGTRYLTRNL

SEQ ID NO: 4895 - DNA, 2211 bp, Adeno-associated virus
  source 1..2211: mol_type = unassigned DNA
atggctgccgatggttatcttccagattggctcgaggacactctctctgaaggaataagacagtggtggaagctcaaacctggcccaccaccaccaaagcccgcagagcggcataaggacgacagcaggggtcttgtgcttcctgggtacaagtacctcggacccggcaacggactcgacaagggggagccggtcaacgcagcagacgcggcggccctcgagcacgacaaggcctacgaccagcagctcaaggccggagacaacccgtacctcaagtacaaccacgccgacgccgagttccaggagcggctcaaagaagatacgtcttttgggggcaacctcgggcgagcagtcttccaggccaaaaagaggcttcttgaacctcttggtctggttgaggaagcggctaagacggctcctggaaagaagaggcctgtagagcagtctcctcaggaaccggactcctccgcgggtattggcaaatcgggttcacagcccgctaaaaagaaactcaatttcggtcagactggcgacacagagtcagtccccgaccctcaaccaatcggagaacctcccgcagccccctcaggtgtgggatctcttacaatggcttcaggtggtggcgcaccagtggcagacaataacgaaggtgccgatggagtgggtagttcctcgggaaattggcattgcgattcccaatggctgggggacagagtcatcaccaccagcacccgaacctgggccctgcccacctacaacaatcacctctacaagcaaatctccaacagcacatctggaggatcttcaaatgacaacgcctacttcggctacagcaccccctgggggtattttgacttcaacagattccactgccacttctcaccacgtgactggcagcgactcatcaacaacaactggggattccggcctaagcgactcaacttcaagctcttcaacattcaggtcaaagaggttacggacaacaatggagtcaagaccatcgccaataaccttaccagcacggtccaggtcttcacggactcagactatcagctcccgtacgtgctcgggtcggctcacgagggctgcctcccgccgttcccagcggacgttttcatgattcctcagtacgggtatctgacgcttaatgatgggagccaggccgtgggtcgttcgtccttttactgcctggaatatttcccgtcgcaaatgctaagaacgggtaacaacttccagttcagctacgagtttgagaacgtacctttccatagcagctacgctcacagccaaagcctggaccgactaatgaatccactcatcgaccaatacttgtactatctctcaaagactattaacggttctggacagaatcaacaaacgctaaaattcagcgtggccggacccagcaacatggctgtccagggaagaaactacatacctggacccagctaccgacaacaacgtgtctcaaccactgtgactcaaaacaacaacagcgaatttgcttggcctggagcttcttcttgggctctcaatggacgtaatagcttgatgaatcctggacctgctatggccagccacaaagaaggagaggaccgtttctttcctttgtctggatctttaatttttggcaaacaaggaactggaagagacaacgtggatgcggacaaagtcatgataaccaacgaagaagaaattaaaactactaacccggtagcaacggagtcctatggacaagtggccacaaaccaccagagtgcccaagcacaggcgcagaccggctgggttcaaaaccaaggaatacttccgggtatggtttggcaggacagagatgtgtacctgcaaggacccatttgggccaaaattcctcacacggacggcaactttcacccttctccgctaatgggagggtttggaatgaagcacccgcctcctcagatcctcatcaaaaacacacctgtacctgcggatcctccaacggctttcaataaggacaagctgaactctttcatcacccagtattctactggccaagtcagcgtggagattgagtgggagctgcagaaggaaaacagcaagcgctggaacccggagatccagtacacttccaactattacaagtctaataatgttgaatttgctgttaatactgaaggtgtatatagtgaaccccgccccattggcaccagatacctgactcgtaatctgtaa

SEQ ID NO: 4896 - protein, 736 aa, Adeno-associated virus
MAADGYLPDWLEDTLSEGIRQWWKLKPGPPPPKPAERHKDDSRGLVLPGYKYLGPGNGLDKGEPVNAADAAALEHDKAYDQQLKAGDNPYLKYNHADAEFQERLKEDTSFGGNLGRAVFQAKKRLLEPLGLVEEAAKTAPGKKRPVEQSPQEPDSSAGIGKSGSQPAKKKLNFGQTGDTESVPDPQPIGEPPAAPSGVGSLTMASGGGAPVADNNEGADGVGSSSGNWHCDSQWLGDRVITTSTRTWALPTYNNHLYKQISNSTSGGSSNDNAYFGYSTPWGYFDFNRFHCHFSPRDWQRLINNNWGFRPKRLNFKLFNIQVKEVTDNNGVKTIANNLTSTVQVFTDSDYQLPYVLGSAHEGCLPPFPADVFMIPQYGYLTLNDGSQAVGRSSFYCLEYFPSQMLRTGNNFQFSYEFENVPFHSSYAHSQSLDRLMNPLIDQYLYYLSKTINGSGQNQQTLKFSVAGPSNMAVQGRNYIPGPSYRQQRVSTTVTQNNNSEFAWPGASSWALNGRNSLMNPGPAMASHKEGEDRFFPLSGSLIFGKQGTGRDNVDADKVMITNEEEIKTTNPVATESYGQVATNHQSAQAQAQTGWVQNQGILPGMVWQDRDVYLQGPIWAKIPHTDGNFHPSPLMGGFGMKHPPPQILIKNTPVPADPPTAFNKDKLNSFITQYSTGQVSVEIEWELQKENSKRWNPEIQYTSNYYKSNNVEFAVNTEGVYSEPRPIGTRYLTRNL

SEQ ID NO: 4897 - DNA, 2208 bp, Adeno-associated virus
  source 1..2208: mol_type = unassigned DNA
atggctgccgatggttatcttccagattggctcgaggacactctctctgaaggaataagacagcggtggaagctcaaacctggcccaccaccaccagagcccgcagagcggcataaggacgacagcaggggtcttgtgcttcctgggtacaagtacctcggacccttcaacggactcgacaagggagagccggtcaacgaggcagacgccgcggccctcgagcacgacaaagcctacgaccggcagctcgacagcggagacaacccgtacctcaagtacaaccacgccgacgcggagtttcaggagcgccttaaagaagatacgtcttttgggggcaacctcggacgagcagtcttccaggcgaaaaagagggtacttgaacctctgggcctggttgaggaacctgttaagacggctccgggaaaaaagaggccggtagagcactctcctgtggagccagactcctcctcgggaaccggaaaggcgggccagcagcctgcaagaaaaagattgaattttggtcagactggagacgcagactcagtacctgacccccagcctctcggacagccaccagcagccccctctggtctgggaactaatacgatggctacaggcagtggcgcaccaatggcagacaataacgagggcgccgacggagtgggtaattcctcgggaaattggcattgcgattccacatggatgggcgacagagtcatcaccaccagcacccgaacctgggccctgcccacctacaacaaccacctctacaaacaaatttccagccaatcaggagcctcgaacgacaatcactactttggctacagcaccccttgggggtattttgacttcaacagattccactgccacttttcaccacgtgactggcaaagactcatcaacaacaactggggattccgacccaagagactcaacttcaagctctttaacattcaagtcaaagaggtcacgcagaatgacggtacgacgacgattgccaataaccttaccggcacggttcaggtgtttactgactcggagtaccagctcccgtacgtcctcggctcggcgcatcaaggatgcctcccgccgttcccagcagacgtcttcatggtgccacagtatggatacctcaccctgaacaacgggagtcaggcagtaggacgctcttcattttactgcctggagtactttccttctcagatgctgcgtaccggaaacaactttaccttcagctacacttttgaggacgttcctttccacagcagctacgctcacagccagagtctgggccgtctcatgaatcctctcatcgaccagtacctgtattacttgagcagaacaaacactccaagtggaaccaccacgcagtcaaggcttcagttttctcaggccggagcgagtgacattcgggaccagtctaggaactggcttcctggaccctgttaccgccagcagcgagtatcaaagacatctgcggataacaacaacagtgaatactcgtggactggagctaccaagtaccacctcaatggcagagactctctggtgaatccgggcccggccatggcaagccacaaggacgatgaagaaaagttttttcctcagagcggggttctcatctttgggaagcaaggctcagagaaaacaaatgtggacattgaaaaggtcatgattacagacgaagaggaaatcaggacaaccaatcccgtggctacggagcagtatggttctgtatctaccaacctccagagaggcaacagacaagcagctaccgcagatgtcaacacacaaggcgttcttccaggcatggtctggcaggacagagatgtgtaccttcaggggcccatctgggcaaagattccacacacggacggacattttcacccctctcccctcatgggtggattcggacttaaacaccctcctccacagattctcatcaagaacaccccggtacctgcgaatccttcgaccaccttcagtgcggcaaagtttgcttccttcatcacacagtactccacgggacaggtcagcgtggagatcgagtgggagctgcagaaggaaaacagcaaacgctggaatcccgaaattcagtacacttccaactacaacaagtctgttaatgtggactttactgtggacactaatggcgtgtattcagagcctcgccccattggcaccagatacctgactcgtaatctgtaa

SEQ ID NO: 4898 - protein, 735 aa, Adeno-associated virus
MAADGYLPDWLEDTLSEGIRQRWKLKPGPPPPEPAERHKDDSRGLVLPGYKYLGPFNGLDKGEPVNEADAAALEHDKAYDRQLDSGDNPYLKYNHADAEFQERLKEDTSFGGNLGRAVFQAKKRVLEPLGLVEEPVKTAPGKKRPVEHSPVEPDSSSGTGKAGQQPARKRLNFGQTGDADSVPDPQPLGQPPAAPSGLGTNTMATGSGAPMADNNEGADGVGNSSGNWHCDSTWMGDRVITTSTRTWALPTYNNHLYKQISSQSGASNDNHYFGYSTPWGYFDFNRFHCHFSPRDWQRLINNNWGFRPKRLNFKLFNIQVKEVTQNDGTTTIANNLTGTVQVFTDSEYQLPYVLGSAHQGCLPPFPADVFMVPQYGYLTLNNGSQAVGRSSFYCLEYFPSQMLRTGNNFTFSYTFEDVPFHSSYAHSQSLGRLMNPLIDQYLYYLSRTNTPSGTTTQSRLQFSQAGASDIRDQSRNWLPGPCYRQQRVSKTSADNNNSEYSWTGATKYHLNGRDSLVNPGPAMASHKDDEEKFFPQSGVLIFGKQGSEKTNVDIEKVMITDEEEIRTTNPVATEQYGSVSTNLQRGNRQAATADVNTQGVLPGMVWQDRDVYLQGPIWAKIPHTDGHFHPSPLMGGFGLKHPPPQILIKNTPVPANPSTTFSAAKFASFITQYSTGQVSVEIEWELQKENSKRWNPEIQYTSNYNKSVNVDFTVDTNGVYSEPRPIGTRYLTRNL

SEQ ID NO: 4899 - DNA, 2208 bp, Adeno-associated virus
  source 1..2208: mol_type = unassigned DNA
atggctgccgatggttatcttccagattggctcgaggacactctctctgaaggaataagacagcggtggaagctcaaacctggcccaccaccaccagagcccgcagagcggcataaggacgacagcaggggtcttgtgcttcctgggtacaagtacctcggacccttcaacggactcgacaagggagagccggtcaacgaggcagacgccgcggccctcgagcacgacaaagcctacgaccggcagctcgacagcggagacaacccgtacctcaagtacaaccacgccgacgcggagtttcaggagcgccttaaagaagatacgtcctttgggggcaacctcggacgagcagtcttccaggcgaaaaagagggtacttgaacctctgggcctggttgaggaacctgttaagacggctccgggaaaaaagaggccggtagagcactctcctgtggagccagactcctcctcgggaaccggaaaggcgggccagcagcctgcaagaaaaagattgaattttggtcagactggagacgcagactcagtacctgacccccagcctctcggacagccaccagcagccccctctggtctgggaactaatacgatggctacaggcagtggcgcaccaatggcagacaataacgagggcgccgacggagtgggtaattcctcgggaaattggcattgcgattccacatggatgggcgacagagtcatcaccaccagcacccgaacctgggccctgcccacctacaacaaccacctctacaaacaaatttccagccaatcaggagcctcgaacgacaatcactactttggctacagcaccccttgggggtattttgacttcaacagattccactgccacttttcaccacgtgactggcaaagactcatcaacaacaactggggattccgacccaagagactcaacttcaagctctttaacattcaagtcaaagaggtcacgcagaatgacggtacgacgacgattgccaataaccttaccagcacggttcaggtgtttactgactcggagtaccagctcccgtacgtcctcggctcggcgcatcaaggatgcctcccgccgttcccagcagacgtcttcatggtgccacagtatggatacctcaccctgaacaacgagagtcaggcagtaggacgctcttcattttactgcctggagtactttccttctcagatgctgcgtaccggaaacaactttaccttcagctacacttttgaggacgttcctttccacagcagctacgctcacagccagagtctgggccgtctcatgaatcctctcatcgaccagtacctgtattacttgagcagaacaaacactccaagtggaaccaccacgcagtcaaggcttcagttttctcaggccggagcgagtgacattcgggaccagtctaggaactggcttcctggaccctgttaccgccagcagcgagtatcaaagacatctgcggataacaacaacagtgaatactcgtggactggagctaccaagtaccacctcaatggcagagactctctggtgaatccgggcccggccatggcaagccacaaggacgatgaagaaaagttttttcctcagagcggggttctcatctttgggaagcaaggctcagagaaaacaaatgtggacattgaaaaggtcatgattacagacgaagaggaaatcaggacaaccaatcccgtggctacggagcagtatggttctgtatctaccaacctccagagaggcaacagacaagcagctaccgcagatgtcaacacacaaggcgttcttccaggcatggtctggcaggacagagatgtgtaccttcaggggcccatctgggcaaagattccacacacggacggacattttcacccctctcccctcatgggtggattcggacttaaacaccctcctccacagattctcatcaagaacaccccggtacctgcgaatccttcgaccaccttcagtgcggcaaagtttgcttccttcatcacacagtactccacgggacaggtcagcgtggagatcgagtgggagctgcagaaggaaaacagcaaacgctggaatcccgaaattcagtacacttccaactacaacaagtctgttaatgtggactttactgtggacactaatggcgtgtattcagagcctcgccccattggcaccagatacctgactcgtaatctgtaa

SEQ ID NO: 4900 - protein, 735 aa, Adeno-associated virus
MAADGYLPDWLEDTLSEGIRQRWKLKPGPPPPEPAERHKDDSRGLVLPGYKYLGPFNGLDKGEPVNEADAAALEHDKAYDRQLDSGDNPYLKYNHADAEFQERLKEDTSFGGNLGRAVFQAKKRVLEPLGLVEEPVKTAPGKKRPVEHSPVEPDSSSGTGKAGQQPARKRLNFGQTGDADSVPDPQPLGQPPAAPSGLGTNTMATGSGAPMADNNEGADGVGNSSGNWHCDSTWMGDRVITTSTRTWALPTYNNHLYKQISSQSGASNDNHYFGYSTPWGYFDFNRFHCHFSPRDWQRLINNNWGFRPKRLNFKLFNIQVKEVTQNDGTTTIANNLTSTVQVFTDSEYQLPYVLGSAHQGCLPPFPADVFMVPQYGYLTLNNESQAVGRSSFYCLEYFPSQMLRTGNNFTFSYTFEDVPFHSSYAHSQSLGRLMNPLIDQYLYYLSRTNTPSGTTTQSRLQFSQAGASDIRDQSRNWLPGPCYRQQRVSKTSADNNNSEYSWTGATKYHLNGRDSLVNPGPAMASHKDDEEKFFPQSGVLIFGKQGSEKTNVDIEKVMITDEEEIRTTNPVATEQYGSVSTNLQRGNRQAATADVNTQGVLPGMVWQDRDVYLQGPIWAKIPHTDGHFHPSPLMGGFGLKHPPPQILIKNTPVPANPSTTFSAAKFASFITQYSTGQVSVEIEWELQKENSKRWNPEIQYTSNYNKSVNVDFTVDTNGVYSEPRPIGTRYLTRNL

SEQ ID NO: 4901 - DNA, 2208 bp, Adeno-associated virus
  source 1..2208: mol_type = unassigned DNA
atggctgccgatggttatcttccagattggctcgaggacactctctctgaaggaataagacagcggtggaagctcaaacctggcccaccaccaccagagcccgcagagcggcataaggacgacagcaggggtcttgtgcttcctgggtacaagtacctcggacccttcaacggactcgacaagggagagccggtcaacgaggcagacgccgcggccctcgagcacgacaaagcctacgaccggcagctcgacagcggagacaacccgtacctcaagtacaaccacgccgacgcggagtttcaggagcgccttaaagaagatacgtcttttgggggcaacctcggacgagcagtcttccaggcgaaaaagagggtacttgaacctctgggcctggttgaggaacctgttaagacggctccgggaaaaaagaggccggtagagcactctcctgtggagccagactcctcctcgggaaccggaaaggcgggccagcagcctgcaagaaaaagattgaattttggtcagactggagacgcagactcagtacctgacccccagcctctcggacagccaccagcagccccctctggtctgggaactaatacgatggctacaggcagtggcgcaccaatggcagacaataacgagggcgccgacggagtgggtaattcctcgggaaattggcattgcgattccacatggatgggcgacagagtcatcaccaccagcacccgaacctgggccctgcccacctacaacaaccacctctacaaacaaatttccagccaatcaggagcctcgaacgacaatcactactttggctacagcaccccttgggggtattttgacttcaacagattccactgccacttttcaccacgtgactggcaaagactcatcaacaacaactggggattccgacccaagagactcaacttcaagctctttaacattcaagtcaaagaggtcacgcagaatgacggtacgacgacgattgccaataaccttaccagcacggttcaggtgtttactgactcggagtaccagctcccgtacgtcctcggctcggcgcatcaaggatgcctcccgccgttcccagcagacgtcttcatggtaccacagtatggatacctcaccctgaacaacgggagtcaggcagtaggacgctcttcattttactgcctggagtactttccttctcagatgctgcgtaccggaaacaactttaccttcagctacacttttgaggacgttcctttccacagcagctacgctcacagccagagtctgggccgtctcatgaatcctctcatcgaccagtacctgtattacttgagcagaacaaacactccaagtggaaccaccacgcagtcaaggcttcagttttctcaggccggagcgagtgacattcgggaccagtctaggaactggcttcctggaccctgttaccgccagcagcgagtatcaaagacatctgcggataacaacaacagtgaatactcgtggactggagctaccaagtaccacctcaatggcagagactctctggtgaatccgggcccggccatggcaagccacaaggacgatgaagaaaagttttttcctcagagcggggttctcatctttgggaagcaaggctcagagaaaacaaatgtggacattgaaaaggtcatgattacagacgaagaggaaatcaggacaaccaatcccgtggctacggagcagtatggttctgtatctaccaacctccagagaggcaacagacaagcagctaccgcagatgtcaacacacaaggcgttcttccaggcatggtctggcaggacagagatgtgtaccttcaggggcccatctgggcaaagattccacacacggacggacattttcacccctctcccctcatgggtggattcggacttaaacaccctcctccacagattctcatcaagaacaccccggtacctgcgaatccttcgaccaccttcagtgcggcaaagtttgcttccttcatcacacagtactccacgggacaggtcagcgtggagatcgagtgggagctgcagaaggaaaacagcaaacgctggaatcccgaaattcagtacacttccaactacaacaagtctgttaatgtggactttactgtggacactaatggcgtgtattcagagcctcgccccattggcaccagatacctgactcgtaatctgtaa

SEQ ID NO: 4902 - protein, 735 aa, Adeno-associated virus
MAADGYLPDWLEDTLSEGIRQRWKLKPGPPPPEPAERHKDDSRGLVLPGYKYLGPFNGLDKGEPVNEADAAALEHDKAYDRQLDSGDNPYLKYNHADAEFQERLKEDTSFGGNLGRAVFQAKKRVLEPLGLVEEPVKTAPGKKRPVEHSPVEPDSSSGTGKAGQQPARKRLNFGQTGDADSVPDPQPLGQPPAAPSGLGTNTMATGSGAPMADNNEGADGVGNSSGNWHCDSTWMGDRVITTSTRTWALPTYNNHLYKQISSQSGASNDNHYFGYSTPWGYFDFNRFHCHFSPRDWQRLINNNWGFRPKRLNFKLFNIQVKEVTQNDGTTTIANNLTSTVQVFTDSEYQLPYVLGSAHQGCLPPFPADVFMVPQYGYLTLNNGSQAVGRSSFYCLEYFPSQMLRTGNNFTFSYTFEDVPFHSSYAHSQSLGRLMNPLIDQYLYYLSRTNTPSGTTTQSRLQFSQAGASDIRDQSRNWLPGPCYRQQRVSKTSADNNNSEYSWTGATKYHLNGRDSLVNPGPAMASHKDDEEKFFPQSGVLIFGKQGSEKTNVDIEKVMITDEEEIRTTNPVATEQYGSVSTNLQRGNRQAATADVNTQGVLPGMVWQDRDVYLQGPIWAKIPHTDGHFHPSPLMGGFGLKHPPPQILIKNTPVPANPSTTFSAAKFASFITQYSTGQVSVEIEWELQKENSKRWNPEIQYTSNYNKSVNVDFTVDTNGVYSEPRPIGTRYLTRNL

SEQ ID NO: 4903 - DNA, 2208 bp, Adeno-associated virus
  source 1..2208: mol_type = unassigned DNA
atggctgccgatggttatcttccagattggctcgaggacactctctctgaaggaataagacagcggtggaagctcaaacctggcccaccaccaccagagcccgcagagcggcataaggacgacagcaggggtcttgtgcttcctgggtacaagtacctcggacccttcaacggactcgacaagggagagccggtcaacgaggcagacgccgcggccctcgagcacgacaaagcctacgaccggcagctcgacagcggagacaacccgtacctcaagtacaaccacgccgacgcggagtttcaggagcgccttaaagaagatacgtcttttgggggcaacctcggacgagcagtcttccaggcgaaaaagagggtactcgaacctctgggcctggttgaggaacctgttaagacggctccgggaaaaaagaggccggtagagcactctcctgtggagccagactcctcctcgggaaccggaaaggcgggccagcagcctgcaagaaaaagattgaattttggtcagactggagacgcagactcagtacctgacccccagcctctcggacagccaccagcagccccctctggtctgggaactaatacgatggctacaggcagtggcgcaccaatggcagacaataacgagggcgccgacggagtgggtaattcctcgggaaattggcattgcgattccacatggatgggcgacagagtcatcaccaccagcacccgaacctgggccctgcccacctacaacaaccacctctacaaacaaatttccagccaatcaggagcctcgaacgacaatcactactttggctacagcaccccttgggggtattttgacttcaacagattccactgccacttttcaccacgtgactggcaaagactcatcaacaacaactggggattccgacccaagagactcaacttcaagctctttaacattcaagtcaaagaggtcacgcagaatgacggtacgacgacgattgccaataaccttaccagcacggttcaggtgtttactgactcggagtaccagctcccgtacgtcctcggctcggcgcatcaaggatgcctcccgccgttcccagcagacgtcttcatggtgccacagtatggatacctcaccctgaacaacgggagtcaggcagcaggacgctcttcattttactgcctggagtactttccttctcagatgctgcgtaccggaaacaactttaccttcagctacacttttgaggacgttcctttccacagcagctacgctcacagccagagtctgggccgtctcatgaatcctctcatcgaccagtacctgtattacttgagcagaacaaacactccaagtggaaccaccacgcagtcaaggcttcagttttctcaggccggagcgagtgacattcgggaccagtctaggaactggcttcctggaccctgttaccgccagcagcgagtatcaaagacatctgcggataacaacaacagtgaatactcgtggactggagctaccaagtaccacctcaatggcagagactctctggtgaatccgggcccggccatggcaagccacaaggacgatgaagaaaagttttttcctcagagcggggttctcatctttgggaagcaaggctcagagaaaacaaatgtggacattgaaaaggtcatgattacagacgaagaggaaatcaggacaaccaatcccgtggctacggagcagtatggttctgtatctaccaacctccagagaggcaacagacaagcagctaccgcagatgtcaacacacaaggcgttcttccaggcatggtctggcaggacagagatgtgtaccttcaggggcccatctgggcaaagattccacacacggacggacattttcacccctctcccctcatgggtggattcggacttaaacaccctcctccacagattctcatcaagaacaccccggtacctgcgaatccttcgaccaccttcagtgcggcaaagtttgcttccttcatcacacagtactccacgggacaggtcagcgtggagatcgagtgggagctgcagaaggaaaacagcaaacgctggaatcccgaaattcagtacacttccaactacaacaagtccgttaatgtggactttactgtggacactaatggcgtgtattcagagcctcgccccattggcaccagatacctgactcgtaatctgtaa

SEQ ID NO: 4904 - protein, 735 aa, Adeno-associated virus
MAADGYLPDWLEDTLSEGIRQRWKLKPGPPPPEPAERHKDDSRGLVLPGYKYLGPFNGLDKGEPVNEADAAALEHDKAYDRQLDSGDNPYLKYNHADAEFQERLKEDTSFGGNLGRAVFQAKKRVLEPLGLVEEPVKTAPGKKRPVEHSPVEPDSSSGTGKAGQQPARKRLNFGQTGDADSVPDPQPLGQPPAAPSGLGTNTMATGSGAPMADNNEGADGVGNSSGNWHCDSTWMGDRVITTSTRTWALPTYNNHLYKQISSQSGASNDNHYFGYSTPWGYFDFNRFHCHFSPRDWQRLINNNWGFRPKRLNFKLFNIQVKEVTQNDGTTTIANNLTSTVQVFTDSEYQLPYVLGSAHQGCLPPFPADVFMVPQYGYLTLNNGSQAAGRSSFYCLEYFPSQMLRTGNNFTFSYTFEDVPFHSSYAHSQSLGRLMNPLIDQYLYYLSRTNTPSGTTTQSRLQFSQAGASDIRDQSRNWLPGPCYRQQRVSKTSADNNNSEYSWTGATKYHLNGRDSLVNPGPAMASHKDDEEKFFPQSGVLIFGKQGSEKTNVDIEKVMITDEEEIRTTNPVATEQYGSVSTNLQRGNRQAATADVNTQGVLPGMVWQDRDVYLQGPIWAKIPHTDGHFHPSPLMGGFGLKHPPPQILIKNTPVPANPSTTFSAAKFASFITQYSTGQVSVEIEWELQKENSKRWNPEIQYTSNYNKSVNVDFTVDTNGVYSEPRPIGTRYLTRNL

SEQ ID NO: 4905 - protein, 738 aa, Adeno-associated virus; identical to SEQ ID NO: 4797

SEQ ID NO: 4906 - DNA, 2217 bp, Adeno-associated virus
  source 1..2217: mol_type = unassigned DNA
atggctgctgacggttatcttccagattggctcgaggacaacctctctgagggcattcgcgagtggtgggacctgaaacctggagcccccaagcccaaggccaaccagcagaagcaggacgacggccggggtctggtgcttcctggctacaagtacctcggacccttcaacggactcgacaagggggagcccgtcaacgcggcggacgcagcggccctcgagcacgacaaggcctacgaccagcagctcaaagcgggtgacaatccgtacctgcggtataaccacgccgacgccgagtttcaggagcgtctgcaagaagatacgtcttttgggggcaacctcgggcgagcagtcttccaggccaagaagcgggttctcgaacctctcggtctggttgaggaagctgctaagacggctcctggaaagaagagaccggtagaaccgtcacctcagcgttcccccgactcctccacgggcatcggcaagaaaggccagcagcccgctaaaaagagactgaactttggtcagactggcgactcagagtcagtccccgaccctcaaccaatcggagaaccaccagcaggcccctctggtctgggatctggtacaatggctgcaggcggtggcgctccaatggcagacaataacgaaggcgccgacggagtgggtagttcctcaggaaattggcattgcgattccacatggctgggcgacagagtcatcaccaccagcacccgaacctgggccctgcccacctacaacaaccacctctacaagcaaatatccaatgggacatcgggaggaagcaccaacgacaacacctacttcggctacagcaccccctgggggtattttgacttcaacagattccactgccacttctcaccacgtgactggcagcgactcatcaacaacaactggggattccggccaaaaagactcagcttcaagctcttcaacatccaggtcaaggaggtcacgcagaatgaaggcaccaagaccatcgccaataaccttaccagcacgattcaggtatttacggactcggaataccagctgccgtacgtcctcggctccgcgcaccagggctgcctgcctccgttcccggcggacgtcttcatgattccccagtacggctaccttacactgaacaatggaagtcaagccgtaggccgttcctccttctactgcctggaatattttccatctcaaatgctgcgaactggaaacaattttgaattcagctacaccttcgaggacgtgcctttccacagcagctacgcacacagccagagcttggaccgactgatgaatcctctcatcgaccagtacctgtactacttatccagaactcagtccacaggaggaactcaaggtacccagcaattgttattttctcaagctgggcctgcaaacatgtcggctcaggctaagaactggctacctggaccttgctaccggcagcagcgagtctctacgacactgtcgcaaaacaacaacagcaactttgcttggactggtgccaccaaatatcacctgaacggaagagactctttggtaaatcccggtgtcgccatggcaacccacaaggacgacgaggaacgcttcttcccgtcgagtggagtcctgatgttcggaaaacagggtgctggaagagacaatgtggactacagcagcgttatgctaaccagcgaagaagaaattaaaaccactaaccccgtagccacagaacaatacggtgtggtggctgacaacttgcagcaaaccaatacagggcctattgtgggaaatgtcaacagccaaggagccttacctggcatggtctggcagaaccgagacgtgtacctgcagggtcccatctgggccaagattcctcacacggacggcaacttccacccttcaccgctaatgggaggatttggactgaagcacccacctcctcagatcctgatcaagaacacgccggtacctgcggatcctccaacaacgttcagccaggcgaaattggcttccttcattacgcagtacagcaccggacaggtcagcgtggaaatcgagtgggagctgcagaaggagaacagcaaacgctggaacccagagattcagtacacttcaaactactacaaatctacaaatgtggactttgctgtcaatacagagggaacttattctgagcctcgccccattggtactcgttacctcacccgtaatctgtaa

SEQ ID NO: 4907 - protein, 738 aa, Adeno-associated virus
MAADGYLPDWLEDNLSEGIREWWDLKPGAPKPKANQQKQDDGRGLVLPGYKYLGPFNGLDKGEPVNAADAAALEHDKAYDQQLKAGDNPYLRYNHADAEFQERLQEDTSFGGNLGRAVFQAKKRVLEPLGLVEEAAKTAPGKKRPVEPSPQRSPDSSTGIGKKGQQPAKKRLNFGQTGDSESVPDPQPIGEPPAGPSGLGSGTMAAGGGAPMADNNEGADGVGSSSGNWHCDSTWLGDRVITTSTRTWALPTYNNHLYKQISNGTSGGSTNDNTYFGYSTPWGYFDFNRFHCHFSPRDWQRLINNNWGFRPKRLSFKLFNIQVKEVTQNEGTKTIANNLTSTIQVFTDSEYQLPYVLGSAHQGCLPPFPADVFMIPQYGYLTLNNGSQAVGRSSFYCLEYFPSQMLRTGNNFEFSYTFEDVPFHSSYAHSQSLDRLMNPLIDQYLYYLSRTQSTGGTQGTQQLLFSQAGPANMSAQAKNWLPGPCYRQQRVSTTLSQNNNSNFAWTGATKYHLNGRDSLVNPGVAMATHKDDEERFFPSSGVLMFGKQGAGRDNVDYSSVMLTSEEEIKTTNPVATEQYGVVADNLQQTNTGPIVGNVNSQGALPGMVWQNRDVYLQGPIWAKIPHTDGNCHPSPLMGGFGLKHPPPQILIKNTPVPADPPTTFSQAKLASFITQYSTGQVSVEIEWELQKENSKRWNPEIQYTSNYYKSTNVDFAVNTEGTYSEPRPIGTRYLTRNL

SEQ ID NO: 4908 - protein, 738 aa, Adeno-associated virus
MAADGYLPDWLEDNLSEGIREWWDLKPGAPKPKANQQKQDDGRGLVLPGYKYLGPFNGLDKGEPVNAADAAALEHDKAYDQQLKAGDNPYLRYNHADAEFQERLQEDTSFGGNLGRAVFQAKKRVLEPLGLVEEGAKTAPGKKRPVEPSPQRSPDSSTGIGKKGQQPARKRLNFGRTGDSESVPDPQPIGEPPAAPSSVGSGTMAAGGGAPMADNNEGADGVGSSSGNWHCDSTWLGDRVITTSTRTWALPTYNNHLYKQISNGTSGGSTNDNTYFGYSTPWGYLDFNRFHCHFSPRDWQRLINNNWGFRPKRLSFKLFNIQVKEVTQNEGTKTIANNLASTIQVFTDSEYQPPYVLGSAHQGCLPPFPADVFMIPQYGYLTLNNGSQAVGRSSFYCLEYFPSQMLRTGNNFSFSYTFEDVPFHSSYAHSQSLDRLMNPLIDQYLYYLSRTQSTGGTAGTQQLLFSRAGPSNMSAQARNWLPGPCYRQQRVSTTLSQNNNSNFAWTGATKYHLNGRDSLVNPGVAMATNKDDEDRFFPSSGILMFGKQGAGKDNVDYSNVMLTSEEEIKTTNPVATEQYGVVADNLQQQNTAPTVGAVNSQGALPGMVWQNRDVYLQGPIWAKIPHTDGNFHPSPLMGGFGLKHPPPQILIKNTPVPADPPTAFNQAKLNSFIAQYSTGQVSVEIEWELQKENSKRWNPEIQYTSNYYKSTNADFAVNTEGVYSEPRPIGTRYLTRNL

SEQ ID NO: 4909 - DNA, 2217 bp, Adeno-associated virus
  source 1..2217: mol_type = unassigned DNA
atggctgccgatggttatcttccagattggctcgaggacaacctctctgagggcattcgcgagtggtgggacctgaaacctggagccccgaaacccaaagccaaccagcaaaagcaggacgacggccggggtctggtgcttcctggctacaagtacctcggacccttcaacggactcgacaagggggagcccgtcaacgcggcggacgcagcggccctcgagcacgacaaggcctacgaccagcagctcaaagcgggtgacaatccgtacctgcggtataatcacgccgacgccgagtttcaggagcgtctgcaagaagatacgtcttttgggggcaacctcgggcgagcagtcttccaggccaagaagcgggttctcgaacctctcggtctggttgaggaaggcgctaagacggctcctggaaagaagagaccggtagagccgtcaccacagcgttcccccgactcctccacgggcatcggcaagaaaggccagcagcccgccagaaagagactcaatttcggtcggactggcgactcagagtcagtccccgaccctcaacctatcggagaacctccagcagcgccctctagtgtgggatctggtacaatggctgcaggcggtggcgcaccaatggcagacaataacgaaggtgccgacggagtgggtagttcctcgggaaattggcattgcgattccacatggctgggcgacagagttatcaccaccagcacccgaacctgggccctgcccacctacaacaaccacctctacaagcaaatctccaacgggacctcgggaggcagcaccaacgacaacacctactttggctacagcaccccctgggggtatcttgactttaacagattccactgccacttctcaccacgtgactggcagcgactcatcaacaacaactggggattccggcccaagagactcagcttcaagctcttcaacatccaggtcaaagaggtcacgcagaatgaaggcaccaagaccatcgccaataacctcgccagcaccatccaggtgtttacggactcggaataccagccgccgtacgtcctcggctctgcccaccagggctgcctgcctccgttcccggcggacgtcttcatgattcctcagtacggctacctgactctcaacaacggtagtcaggccgtgggacgttcctccttctactgcctggagtacttcccctctcagatgctgagaacgggcaacaacttttccttcagctacactttcgaggacgtgcctttccacagcagctacgcgcacagccagagtttggacaggctgatgaatcctctcatcgaccagtacctgtactacctgtcaagaacccagtctacgggaggcacagcgggaacccagcagttgctgttttctcgggccgggcctagcaacatgtcggctcaggccagaaactggctgcctggaccctgctacagacagcagcgcgtctccacgacactgtcgcaaaacaacaacagcaactttgcctggactggtgccaccaagtatcatctgaacggcagagactctctggtgaatccgggcgtcgccatggcaaccaacaaggacgacgaggaccgcttcttcccatccagcggcatcctcatgtttggcaagcagggagctggaaaagacaacgtggactatagcaacgtgatgctaaccagcgaggaagaaatcaagaccaccaaccccgtggccacagaacagtatggcgtggtggctgataacctacagcagcaaaacaccgctcctactgtgggggccgtcaacagccagggagccttacctggcatggtctggcagaaccgggacgtgtacctgcagggtcctatttgggccaagattcctcacacagatggcaactttcacccgtctcctttaatgggcggctttggacttaaacatccgcctcctcagatcctcatcaaaaacactcctgttcctgcggatcctccaacagcgttcaaccaggccaagctgaattctttcatcgcgcagtacagcaccggacaagtcagcgtggagatcgagtgggagctgcagaaggagaacagcaagcgctggaacccagagattcagtatacttccaactactacaaatctacaaatgcggactttgctgttaatactgagggtgtttactctgagcctcgccccattggcactcgttacctcacccgtaatctgtaa

SEQ ID NO: 4910 - DNA, 2208 bp, Adeno-associated virus
  source 1..2208: mol_type = unassigned DNA
atggctgccgatggttatcttccagattggctcgaggacactctctctgaaggaataagacagtggtggaagctcaaacctggcccaccaccaccaaagcccgcagagcggcataaggacgacagcaggggtcttgtgcttcctgggtacaagtacctcggacccttcaacggactcgacaagggggagccggtcaacgaggcagacgccgcggccctcgagcacgacaaggcctacgaccggcagctcgacagcggagacaacccgtacctcaagtacaaccacgccgacgcagagtttcaggagcgccttaaagaagatacgtcttttgggggcaacctcggacgagcagtcttccaggcgaaaaagagggttcttgaacctctgggcctggttgaggagcctgttaagacggctccgggaaaaaagaggccggtagagcactctcctgtggagccagactcctcctcgggaaccggaaaagcgggccagcagcctgcaagaaaaagattaaattttggtcagactggagacgcagactccgtacctgacccccagcctctcggacagccaccagcagccccctctggtctgggatctactacaatggctacaggcagtggcgcaccaatggcagacaataacgagggtgccgatggagtgggtaattcctcaggaaattggcattgcgattcccaatggctgggcgacagagtcatcaccaccagcacccgaacctgggccctgcccacatacaacaaccacctctacaagcaaatctccagccaatcaggagccagcaacgacaaccactactttggctacagcaccccctgggggtattttgacttcaacagattccactgccacttttcaccacgtgactggcaaagactcgtcaacaacaaccggggattccggcccaaaagactcaacttcaagctctttaatattcaagtcaaagaggtcacgcagaatgacggtacgacgacgattgccaataaccttaccagcacggttcaggtgtttactgactcggagtaccagctcccgtacgtcctgggctcggcgcatcaaggatgcctcccgccgtttccagcggacgtcttcatggtcccacagtatggatacctcaccctgaacaacgggagtcaggcggtaggacgctcttccttttactgcctggagtactttccttctcagatgctgcgtactggaaacaactttcagttcagctacacttttgaagacgtgcctttccacagcagctacgctcacagccagagtctggatcggctgatgaatcctctgatcgaccagtacctgtattatctgaacaagacacaaacaaatagtggaactcttcagcagtctcggctactgtttagccaagctggaccaaccaacatgtctcttcaagctaaaaactggctgcctggaccttgctacagacagcagcgtctgtcaaaacaggcaaacgacaacaacaacagcaactttccctggactgcagctacaaagtatcatctaaatggccgggactcgttggttaatccaggaccagctatggccagtcacaaggatgacgaagaaaagtttttccccatgcatggaaccctgatatttggtaaacaaggaacaaatgccaacgacgcggatttggaaaatgtcatgattacagatgaagaagaaatcagggccaccaatcccgtggctacggagcagtacgggactgtgtcaaataatttgcaaaactcaaacactggtccaactactggaactgtcaatcaccaaggagcgttacctggtatggtgtggcaggatcgagacgtgtacctgcagggacccatttgggccaagattcctcacaccgatggacactttcatccttctccactgatgggaggttttggactcaaacacccgcctcctcagatcatgatcaaaaacactcccgttccagccaatcctcccacaaacttcagttctgccaagtttgcttctttcatcacacagtattccacgggacaggtcagcgtggagatcgagtgggagctgcagaaggagaacagcaaacgctggaatcccgaaattcagtacacttccaactacaacaagtctgttaatgtggactttactgtggacactaatggtgtgtattcagagcctcgccccattggcaccagatacctgactcgtaatctgtaa

SEQ ID NO: 4911 - protein, 735 aa, Adeno-associated virus
MAADGYLPDWLEDTLSEGIRQWWKLKPGPPPPKPAERHKDDSRGLVLPGYKYLGPFNGLDKGEPVNEADAAALEHDKAYDRQLDSGDNPYLKYNHADAEFQERLKEDTSFGGNLGRAVFQAKKRVLEPLGLVEEPVKTAPGKKRPVEHSPVEPDSSSGTGKAGQQPARKRLNFGQTGDADSVPDPQPLGQPPAAPSGLGSTTMATGSGAPMADNNEGADGVGNSSGNWHCDSQWLGDRVITTSTRTWALPTYNNHLYKQISSQSGASNDNHYFGYSTPWGYFDFNRFHCHFSPRDWQRLVNNNRGFRPKRLNFKLFNIQVKEVTQNDGTTTIANNLTSTVQVFTDSEYQLPYVLGSAHQGCLPPFPADVFMVPQYGYLTLNNGSQAVGRSSFYCLEYFPSQMLRTGNNFQFSYTFEDVPFHSSYAHSQSLDRLMNPLIDQYLYYLNKTQTNSGTLQQSRLLFSQAGPTNMSLQAKNWLPGPCYRQQRLSKQANDNNNSNFPWTAATKYHLNGRDSLVNPGPAMASHKDDEEKFFPMHGTLIFGKQGTNANDADLENVMITDEEEIRATNPVATEQYGTVSNNLQNSNTGPTTGTVNHQGALPGMVWQDRDVYLQGPIWAKIPHTDGHFHPSPLMGGFGLKHPPPQIMIKNTPVPANPPTNFSSAKFASFITQYSTGQVSVEIEWELQKENSKRWNPEIQYTSNYNKSVNVDFTVDTNGVYSEPRPIGTRYLTRNL

SEQ ID NO: 4912 - protein, 738 aa, Adeno-associated virus
MAADGYLPDWLEDNLSEGIREWWDLKPGAPKPKANQQKQDDGRGLVLPGYKYLGPFNGLDKGEPVNAADAAALEHDKAYDQQLKAGDNPYLRYNHADAEFQERLQEDTSFGGNLGRAVFQAKKRVLEPLGLVEEAAKTAPGKKRPVEPSPQRSPDSSTGIGKKGQQPAKKRLSFGQTGDSESVPDPQPIGEPPAGPSGLGSGTMAAGGGAPMADNNEGADGVGSSSGNWHCDSTWLGDRVITTSTRTWALPTYNNHLYKQISNGTSGGSTNDNTYFGYSTPWGYFDFNRFHCHFSPRDWQRLINNNWGFRPKRLSFKLFNIQVKEVTQNEGTKTIANNLTSTIQVFTDSEYQLPYVLGSAHQGCLPPFPADVFMIPQYGYLTLNNGSQAVGRSSFYCLEYFPSQMLRTGNNSEFSYTFEDVPFHSSYAHSQSLDRLMNPLIDQYLYYLSRTQSTGGTQGTQQLLFSQAGPANMSAQAKNWLPGPCYRQQRVSTTLSQNNNSNFAWTGATKYHLNGRDSLVNPGVAMATHKDDEERFFPSSGVLMFGKQGAGRDNVDYSSVMLTSEEEIKTTNPVATEQYGVVADNLQQTNTGPIVGNVNSQGALPGMVWQNRDVYLQGPIWAKIPHTDGNFHPSPLMGGFGLKHPPPQILIKNTPVPADPPTTFSQAKLASFITQYSTGQVSVEIEWELQKENSKRWNPEIQYTSNYYKSTNVDFAVNTEGTYSEPRPIGTRYLTRNL

SEQ ID NO: 4913 - DNA, 2217 bp, Adeno-associated virus
  source 1..2217: mol_type = unassigned DNA
atggctgctgacggttatcttccagattggctcgaggacaacctctctgagggcattcgcgagtggtgggacctgaaacctggagcccccaagcccaaggccaaccagcagaagcaggacgacggccggggtctggtgcttcctggctacaagtacctcggacccttcaacggactcgacaagggggagcccgtcaacgcggcggacgcagcggccctcgagcacgacaaggcctacgaccagcagctcaaagcgggtgacaatccgtacctgcggtataaccacgccgacgccgagtttcaggagcgtctgcaagaagatacgtcttttgggggcaacctcgggcgagcagtcttccaggccaagaagcgggttctcgaacctctcggtctggttgaggaagctgctaagacggctcctggaaagaagagaccggtagaaccgtcacctcagcgttcccccgactcctccacgggcatcggcaagaaaggccagcagcccgctaaaaagagactgagctttggtcagactggcgactcagagtcagtccccgaccctcaaccaatcggagaaccaccagcaggcccctctggtctgggatctggtacaatggctgcaggcggtggcgctccaatggcagacaataacgaaggcgccgacggagtgggtagttcctcaggaaattggcattgcgattccacatggctgggcgacagagtcatcaccaccagcacccgaacctgggccctgcccacctacaacaaccacctctacaagcaaatatccaatgggacatcgggaggaagcaccaacgacaacacctacttcggctacagcaccccctgggggtattttgacttcaacagattccactgccacttctcaccacgtgactggcagcgactcatcaacaacaactggggattccggccaaaaagactcagcttcaagctcttcaacatccaggtcaaggaggtcacgcagaatgaaggcaccaagaccatcgccaataaccttaccagcacgattcaggtatttacggactcggaataccagctgccgtacgtcctcggctccgcgcaccagggctgcctgcctccgttcccggcggacgtcttcatgattccccagtacggctaccttacactgaacaatggaagtcaagccgtaggccgttcctccttctactgcctggaatattttccatctcaaatgctgcgaactggaaacaattctgaattcagctacaccttcgaggacgtgcctttccacagcagctacgcacacagccagagcttggaccgactgatgaatcctctcatcgaccagtacctgtactacttatccagaactcagtccacaggaggaactcaaggtacccagcaattgttattttctcaagctgggcctgcaaacatgtcggctcaggctaagaactggctacctggaccttgctaccggcagcagcgagtctctacgacactgtcgcaaaacaacaacagcaactttgcttggactggtgccaccaaatatcacctgaacggaagagactctttggtaaatcccggtgtcgccatggcaacccacaaggacgacgaggaacgcttcttcccgtcgagtggagtcctgatgtttggaaaacagggtgctggaagagacaatgtggactacagcagcgttatgctaaccagcgaagaagaaattaaaaccactaaccctgtagccacagaacaatacggtgtggtggctgacaacttgcagcaaaccaatacagggcctattgtgggaaatgtcaacagccaaggagccttacctggcatggtctggcagaaccgagacgtgtacctgcagggtcccatctgggccaagattcctcacacggacggcaacttccacccttcaccgctaatgggaggatttggactgaagcacccacctcctcagatcctgatcaagaacacgccggtacctgcggatcctccaacaacgttcagccaggcgaaattggcttccttcattacgcagtacagcaccggacaggtcagcgtggaaatcgagtgggagctgcagaaggagaacagcaaacgctggaacccagagattcagtacacttcaaactactacaaatctacaaatgtggactttgctgtcaatacagagggaacttattctgagcctcgccccattggtactcgttacctcacccgtaatctgtaa

SEQ ID NO: 4914 - protein, 738 aa, Adeno-associated virus
MAADGYLPDWLEDNLSEGIREWWDLKPGAPKPKANQQKQDDGRGLVLPGYKYLGPFNGLDKGEPVNAADAAALEHDKAYDQQLKAGDNPYLRYNHADAEFQERLQEDTSFGGNLGRAVFQAKKRVLEPLGPVEEAAKTAPGKKRPVEPPPQRSPDSSTGIGKKGQQPAKKRLNFGQTGDSESVPDPQPIGEPPAGPSGLGSGTMAAGGGAPMADNNEGADGVGSSSGNWHCDSTWLGDRVITTSTRTWALPTYNNHLYKQISNGTSGGSTNDNTYFGYSTPWGYFDFNRFHCHFSPRDWQRLINNNWGFRPKRLSFKLFNIQVKEVTQNEGTKTVANNLTSTIQVFTDSEYQLPYVLGSAHQGCLPPFPADVFMIPQYGYLTLNNGSQAVGRSSFYCLEYFPSQMLRTGNNFEFSYTFEDVPFHSSYAHSQSLDRLMNPLIDQYLYYLSRTQSTGGTQGTQQLLFSQAGPANMSAQAKNWLPGPCYRQQRVSTTLSQNNNSNFAWTGATKYHLNGRDSLVNPGVAMATHKDDEERFFPSSGVLMFGKQGAGRDNVDYSSVMLTSEEEIKTTNPVATEQYGVVADNLQQTNTGPIVGNVNSQGALPGMVWQNRDVYLQGPIWAKIPHTDGNFHPSPLMGGFGLKHPPPQILIKNTPVPADPPTTFSQAKLASFITQYSTGQVSVEIEWELQKENSKRWNPEIQYTSNYYKSTNVDFAVNTEGTYSEPRPIGTRYLTRNL

SEQ ID NO: 4915 - DNA, 2217 bp, Adeno-associated virus
  source 1..2217: mol_type = unassigned DNA
atggctgctgacggttatcttccagattggctcgaggacaacctctctgagggcattcgcgagtggtgggacctgaaacctggagcccccaagcccaaggccaaccagcagaagcaggacgacggccggggtctggtgcttcctggctacaagtacctcggacccttcaacggactcgacaagggggagcccgtcaacgcggcggacgcagcggccctcgagcacgacaaggcctacgaccagcagctcaaagcgggtgacaatccgtacctgcggtataaccacgccgacgccgagtttcaggagcgtctacaagaagatacgtcttttgggggcaacctcgggcgagcagtcttccaggccaagaagcgggttctcgaacctctcggtccggttgaggaagctgctaagacggctcctggaaagaagagaccggtagaaccgccacctcagcgttcccccgactcctccacgggcatcggcaagaaaggccagcagcccgctaaaaagagactgaactttggtcagactggcgactcagagtcagtccccgaccctcaaccaatcggagaaccaccagcaggcccctctggtctgggatctggtacaatggctgcaggcggtggcgctccaatggcagacaataacgaaggcgccgacggagtgggtagttcctcaggaaattggcattgcgattccacatggctgggcgacagagtcatcaccaccagcacccgaacctgggccctgcccacctacaacaaccacctctacaagcaaatatccaatgggacatcgggaggaagcaccaacgacaacacctacttcggctacagcaccccctgggggtattttgacttcaacagattccactgccacttctcaccacgtgactggcagcgactcatcaacaacaactggggattccggccaaaaagactcagcttcaagctcttcaacatccaggtcaaggaggtcacgcagaatgaaggcaccaagaccgtcgccaataaccttaccagcacgattcaggtatttacggactcggaataccagctgccgtacgtcctcggctccgcgcaccagggctgcctgcctccgttcccggcggacgtcttcatgattccccagtacggctaccttacactgaacaatggaagtcaagccgtaggccgttcctccttctactgcctggaatattttccatctcaaatgctgcgaactggaaacaattttgaattcagctacaccttcgaggacgtgcctttccacagcagctacgcacacagccagagcttggaccgactgatgaatcctctcatcgaccagtacctgtactacttatccagaactcagtccacaggaggaactcaaggtacccagcaattgttattttctcaagctgggcctgcaaacatgtcggctcaggctaagaactggctacctggaccttgctaccggcagcagcgagtctctacgacactgtcgcaaaacaacaacagcaactttgcttggactggtgccaccaaatatcacctgaacggaagagactctttggtaaatcccggtgtcgccatggcaacccacaaggacgacgaggaacgcttcttcccgtcgagtggagtcctgatgtttggaaaacagggtgctggaagagacaatgtggactacagcagcgttatgctaaccagcgaagaagaaattaaaaccactaaccctgtagccacagaacaatacggtgtggtggctgacaacttgcagcaaaccaatacagggcctattgtgggaaatgtcaacagccaaggagccttacctggcatggtctggcagaaccgagacgtgtacctgcagggtcccatctgggccaagattcctcacacggacggcaacttccacccttcaccgctaatgggaggatttggactgaagcacccacctcctcagatcctgatcaagaacacgccggtacctgcggatcctccaacaacgttcagccaggcgaaattggcttccttcattacgcagtacagcaccggacaggtcagcgtggaaatcgagtgggagctgcagaaggagaacagcaaacgttggaacccagagattcagtacacttcaaactactacaaatctacaaatgtggactttgctgtcaatacagagggaacttattctgagcctcgccccattggtactcgttacctcacccgtaatctgtaa

SEQ ID NO: 4916 - protein, 738 aa, Adeno-associated virus
MAADGYLPDWLEDNLSEGIREWWDLKPGAPKPKANQQKQDDGRGLVLPGYKYLGPFNGLDKGEPVNAADAAALEHDKAYDQQLKAGDNPYLRYNHADAEFQERLQEDTSFGGNLGRAVFQAKKRVLEPLGLVEEAAKTAPGKKRPVEPSPQRSPDSSTGIGKKGQQPAKKRLNFGQTGDSESVPDPQPIGEPPAGPSGLGSGTMAAGGGAPMADNNEGADGVGSSSGNWHCDSTWLGDRVITTSTRTWALPTYNNHLYKQISNGTSGGSTNDNTYFGYSTPWGYFDFNRFHCHFSPRDWQRLINNNWGFRPKRLSFKLFNIQVKEVTQNEGTKTIANNLTSTIQVFTDSEYQLPYVLGSAHQGCLPPFPADVFMIPQYGYLTLNNGSQAVGRSSFYCLEYFPSQMLRTGNNFEFSYTFEDVPFHSSYAHSQSLDRLMNPLIDQYLYYLSRTQSTGGTQGTQQLLFSQAGPANMSAQAKNWLPGPCYRQQRVSTTLSQSNNSNFAWTGATKYHLNGRDSLVNPGVAMATHKDDEERFFPSSGVLMFGKQGAGRDNVDYSSVMLTSEEEIKTTNPVATEQYGVVADNLQQTNTGPIVGNVNSQGALPGMVWQNRDVYLQGPIWAKIPHTDGNFHPSPLMGGLGLKHPPPQILIKNTPVPADPPTTFSQAKLASFITQYSTGQVSVEIEWELQKENSKRWNPEIQYTSNYYKSTNVDFAVNTEGTYSEPRPIGTRYLTRNL

SEQ ID NO: 4917 - DNA, 2217 bp, Adeno-associated virus
  source 1..2217: mol_type = unassigned DNA
atggctgctgacggttatcttccagattggctcgaggacaacctctctgagggcattcgcgagtggtgggacctgaaacctggagcccccaagcccaaggccaaccagcagaagcaggacgacggccggggtctggtgcttcctggctacaagtacctcggacccttcaacggactcgacaagggggagcccgtcaacgcggcggacgcagcggccctcgagcacgacaaggcctacgaccagcagctcaaagcgggtgacaatccgtacctgcggtataaccacgccgacgccgagtttcaggagcgtctgcaagaagatacgtcttttgggggcaacctcgggcgagcagtcttccaggccaagaagcgggttctcgaacctctcggtctggttgaggaagcggctaagacggctcctggaaagaagagaccggtagaaccgtcacctcagcgttcccccgactcctccacgggcatcggcaagaaaggccagcagcccgctaaaaagagactgaactttggtcagactggcgactcagagtcagtccccgaccctcaaccaatcggagaaccaccagcaggcccctctggtctgggatctggtacaatggctgcaggcggtggcgctccaatggcagacaataacgaaggcgccgacggagtgggtagttcctcaggaaattggcattgcgattccacatggctgggcgacagagtcatcaccaccagcacccgaacctgggccctgcccacctacaacaaccacctctacaagcaaatatccaatgggacatcgggaggaagcaccaacgacaacacctacttcggctacagcaccccctgggggtattttgacttcaacagattccactgccacttctcaccacgtgactggcagcgactcatcaacaacaactggggattccggccaaaaagactcagcttcaagctcttcaacatccaggtcaaggaggtcacgcagaatgaaggcaccaagaccatcgccaataaccttaccagcacgattcaggtatttacggactcggaataccagctgccgtacgtcctcggctccgcgcaccagggctgcctgcctccgttcccggcggacgtcttcatgattccccagtacggctaccttacactgaacaatggaagtcaagccgtaggccgttcctccttctactgcctggaatattttccatctcaaatgctgcgaactggaaacaattttgaattcagctacaccttcgaggacgtgcctttccacagcagctacgcacacagccagagcttggaccgactgatgaatcctctcatcgaccagtacctgtactacttatccagaactcagtccacaggaggaactcaaggtacccagcaattgttattttctcaagctgggcctgcaaacatgtcggctcaggctaagaactggctacctggaccttgctaccggcagcagcgagtctctacgacactgtcgcaaagcaacaacagcaactttgcttggactggtgccaccaaatatcacctgaacggaagagactctttggtaaatcccggtgtcgccatggcaacccacaaggacgacgaggaacgcttcttcccgtcgagtggagtcctgatgtttggaaaacagggtgctggaagagacaatgtggactacagcagcgttatgctaaccagcgaagaagaaattaaaaccactaaccctgtagccacagaacaatacggtgtggtggctgacaacttgcagcaaaccaatacagggcctattgtgggaaatgtcaacagccaaggagccttacctggcatggtctggcagaaccgagacgtgtacctgcagggtcccatctgggccaagattcctcacacggacggcaacttccacccttcaccgctaatgggaggacttggactgaagcacccacctcctcagatcctgatcaagaacacgccggtacctgcggatcctccaacaacgttcagccaggcgaaattggcttccttcattacgcagtacagcaccggacaggtcagcgtggaaatcgagtgggagctgcagaaggagaacagcaaacgctggaacccagagattcagtacacttcaaactactacaaatctacaaatgtggactttgctgtcaatacagagggaacttattctgagcctcgccccattggtactcgttacctcacccgtaatctgtaa

SEQ ID NO: 4918 - protein, 737 aa, Adeno-associated virus
MAADGYLPDWLEDNLSEGIREWWDLKPGAPKPKANQQKQDDGRGLVLPGYKYLGPFNGLDKGEPVNAADAAALEHDKAYDQQLKAGDNPYPRYNHADAEFQERLQEDTPFGGNLGRAVFQAKKRVLEPLGLVEEAAKTAPGKKRPVEPSPQRSPDSSTGIGKKGQQPAKKRLNFGQTGDSESVPDPQPIGEPPAGPSGLGSGTMAAGGGAPMADNNEGADGVGNASGNWHCDSTWLGDRVITTSTRTWALPTYNNHLYKQISSASTGASNDNHYFGYSTPWGYFDFNRFHCHFSPRDWQRLINNNWGFRPKRLNFKLFNIQVKEVTTNDGVTTIANNLTSTVQVFSDSEYQLPYVLGSAHQGCLPPFPADVFMIPQYGYLTLNNGSQAVGRSSFYCLEYFPSQMLRTGNNFTFSYTFEEVPLHSSYAHSQSLDRLMNPLIVQYLYYLNRTQNQSGSAQNKDLLFSRGSPAGMSVQPKNWLPGPCYRQQRVSKTKTDNNNSNFTWTGASKYNLNGRESIINPGTAMASHKDDEDKFFPMSGVMIFGKESAGASNTALDNVMITDEEEIKATNPVATERFGTVAVNFQSSSTDPATGDVHAMGALPGMVWQDRDVYLQGPIWAKIPHTDGHFHPSPLMGGFGLKNPPPQILIKNTPVPANPPAEFSATKFASFITQYSTGQVSVEIEWELQKENSKRWNPEVQYTSNYAKSASVDFTVDNNGLYTEPRPIGTRYLTRPL

SEQ ID NO: 4919 - protein, 737 aa, Adeno-associated virus
MAADGYLPDWLEDNLSEGIREWWDLKPGAPKPKANQQKQDDGRGLVLPGYKYLGPFNGLDKGEPVNAADAAALEHDKAYDQQLKAGDNPYPRYNHADAEFQERLQEDTSFGGNLGRAVFQAKKRVLEPLGLVEEAAKTAPGKKRPVEPSPQRSPDSSTGIGKKGQQPAKKRLNFGQTGDSESVPDPQPIGEPPAGPSGLGSGTMAAGGGAPMADNNEGADGVGNASGNWHCDSTWLGDRVITTSTRTWALPTYNNHLYKQISSASTGASNDNHYFGYSTPWGYFDFNRFHCHFSPRDWQRLINNNWGFRPKRLNFKLFNIQVKEVTTNDGVTTIANNLTSTVQVFSDSEYQLPYVLGSAHQGCLPPFPADVFMIPQYGYLTLNNGSQAVGRSSFYCLEYFPSQMLRTGNNFTFSYTFEEVPLHSSYAHSQSLDRLMNPLIDQYLYYLNRTQNQSGSAQNKDLLFSRGSPAGMSVQPKNWLPGPCYRQQRVSKTKTDNNNSNFTWTGASKYNLNGRESIINPGTAMASHKDDEDKFFPMSGVMIFGKESAGASNTALDNVMITDEEEIKATNPVATERFGTVAVNFQSSSTDPATGDVHAMGALPGMVWQDRDVYLQGPIWAKIPHTDGHFHPSPLMGGFGLKNPPPQILIKNTPVPANPPAEFSATKFASFITQYSTGQVSVEIEWELQKENSKRWNPEVQYTSNYAKSASVDFTVDNNGLYTEPRPIGTRYLTRPL

SEQ ID NO: 4920 - DNA, 2214 bp, Adeno-associated virus
  source 1..2214: mol_type = unassigned DNA
atggctgctgacggttatcttccagattggctcgaggacaacctctctgagggcattcgcgagtggtgggacctgaaacctggagcccccaagcccaaggccaaccagcagaagcaggacgacggccggggtctggtgcttcctggctacaagtacctcggacccttcaacggactcgacaagggggagcccgtcaacgcggcggacgcagcggccctcgagcacgacaaggcctacgaccagcagctcaaagcgggtgacaatccgtacccgcggtataaccacgccgacgccgagtttcaggagcgtctgcaagaagatacgccttttgggggcaacctcgggcgagcagtcttccaggccaagaagcgggttctcgaacctctcggtctggttgaggaagctgctaagacggctcctggaaagaagagaccggtagaaccgtcacctcagcgttcccccgactcctccacgggcatcggcaagaaaggccagcagcccgctaaaaagagactgaactttggtcagactggcgactcagagtcagtccccgaccctcaaccaatcggagaaccaccagcaggcccctctggtctgggatctggtacaatggctgcaggcggtggcgctccaatggcagacaataacgaaggcgccgacggagtgggtaatgcctcaggaaattggcattgcgattccacatggctgggcgacagagtcatcaccaccagcacccgcacctgggccttgcccacctacaataaccacctctacaagcaaatctccagtgcttcaacgggggccagcaacgacaaccactacttcggctacagcaccccctgggggtattttgatttcaacagattccactgccacttttcaccacgtgactggcagcgactcatcaacaacaattggggattccggcccaagagactcaacttcaaactcttcaacatccaagtcaaggaggtcacgacgaatgatggcgtcacaaccatcgctaataaccttaccagcacggttcaagtcttctcggactcggagtaccagcttccgtacgtcctcggctctgcgcaccagggctgcctccctccgttcccggcggacgtgttcatgattccgcaatacggctacctgacgctcaacaatggcagccaagccgtgggacgttcatccttttactgcctggaatatttcccttctcagatgctgagaacgggcaacaactttaccttcagctacacctttgaggaagtgcctctccacagcagctacgcgcacagccagagcctggaccggctgatgaatcctctcatcgtccaatacctgtattacctgaacagaactcaaaatcagtccggaagtgcccaaaacaaggacttgctgttcagccgtgggtctccagctggcatgtctgttcagcccaaaaactggctacctggaccctgttatcggcagcagcgcgtttctaaaacaaaaacagacaacaacaacagcaattttacctggactggtgcttcaaaatataacctcaatgggcgtgaatccatcatcaaccctggcactgctatggcctcacacaaagacgacgaagacaagttctttcccatgagcggtgtcatgatttttggaaaagagagcgccggagcttcaaacactgcattggacaatgtcatgattacagacgaagaggaaattaaagccactaaccctgtggccaccgaaagatttgggaccgtggcagtcaatttccagagcagcagcacagaccctgcgaccggagatgtgcatgctatgggagcattacctggcatggtgtggcaagatagagacgtgtacctgcagggtcccatttgggccaaaattcctcacacagatggacactttcacccgtctcctcttatgggcggctttggactcaagaacccgcctcctcagatcctcatcaaaaacacgcctgttcctgcgaatcctccggcggagttttcagctacaaagtttgcttcattcatcacccaatactccacaggacaagtgagtgtggaaattgaatgggagctgcagaaagaaaacagcaagcgctggaatcccgaagtgcagtacacatccaattatgcaaaatctgccagcgttgattttactgtggacaacaatggactttatactgagcctcgccccattggcacccgttaccttacccgtcccctgtaa

SEQ ID NO: 4921 - protein, 736 aa, Adeno-associated virus
MAADGYLPDWLEDTLSEGIRQWWKLRPGPPPPKPAERHKDDSRGLVLPGYKYLGPFNGLDKGEPVNEADAAALEHDKAYDRQLDSGDNPYLKYNHADAEFQERLKEDTSFGGNLGRAVFQAKKRVLEPLGLVEEGAETAPGKKRPVEQSPQGPDSSSGIGKTGQQPAKKRLNFGQTGDSESVPDPQPLGEPPATPAAVGPTTMASGGGAPMADNNEGADGVGNASGNWHCDSTWLGDRVITTSTRTWALPTYNNHLYKQISSASTGASNDNHYFGYSTPWGYFDFNRFHCHFSPRDWQRLINNNWGFRPKRLNFKLFNIQVKEVTTNDGVTTIANNLTSTVQVFSDSEYQLPYVLGSAHQGCLPPFPADVFMIPQYGYLTLNNGSQAVGRSSFYCLEYFPSQMLRTGNNFTFSYTFEEVPFHSSYAHSQSLDRLMNPLIDQYLYYPNRTQNQSGSAQNKDLLFSRGSPAGMSVQPKNWLPGPCYRQQRVSKTKTDNNNSNFTWTGASKYNLNGRESIINPGTAMASHKDDEDKFFPMSGVMIFGKESAGASNTALDNVMITDEEEIKATNPVATERFGTVAVNFQSSSTDPATGDVHAMGALPGMVWQGRDVYLQGPIWAKIPHTDGHFHPSPLMGGFGLKNPPPQILIKNTPVPANPPAEFSATKFASFITQYSTGQVSVEIEWELQKENSKRWNPEVQYTSNYAKSANVDFTVDNNGLYTEPRPIGTRYLTRPL

SEQ ID NO: 4922 - DNA, 2211 bp, Adeno-associated virus
  source 1..2211: mol_type = unassigned DNA
atggctgccgatggttatcttccagattggctcgaggacactctctctgaaggaataagacagtggtggaagctcagacctggcccaccaccaccaaagcccgcagagcggcataaggacgacagcaggggtcttgtgcttcctgggtacaagtacctcggacccttcaacggactcgacaagggagagccggtcaacgaggcagacgccgcggccctcgagcacgacaaagcctacgaccggcagctcgacagcggagacaacccgtacctcaagtacaaccacgccgacgcggagtttcaggagcgccttaaagaagatacgtcttttgggggcaacctcgggcgagcagtcttccaggccaagaagcgggttctcgaacctctcggtctggttgaggaaggcgctgagacggctcctggaaagaaacgtccggtagagcagtcgccacaagggccagactcctcctcgggcatcggcaagacaggccagcagcccgctaaaaagagactcaattttggtcagactggcgactcagagtcagtccccgatccacaacctctcggagaacctccagcaacccccgctgctgtgggacctactacaatggcttcaggcggtggcgcaccaatggcagacaataacgaaggcgccgacggagtgggtaatgcctcaggaaattggcattgcgattccacatggctgggcgacagagtcatcaccaccagcacccgcacctgggccttgcccacctacaataaccacctctacaagcaaatctccagtgcttcaacgggggccagcaacgacaaccactacttcggctacagcaccccctgggggtattttgatttcaacagattccactgccacttttcaccacgtgactggcagcgactcatcaacaacaattggggattccggcccaagagactcaacttcaaactcttcaacatccaagtcaaggaggtcacgacgaatgatggcgtcacaaccatcgctaataaccttaccagcacggttcaagtcttctcggactcggagtaccagcttccgtacgtcctcggctctgcgcaccagggctgcctccctccgttcccggcggacgtgttcatgattccgcaatacggctacctgacgctcaacaatggcagccaagccgtgggacgttcatccttttactgcctggaatatttcccttctcagatgctgagaacgggcaacaactttaccttcagctacacctttgaggaagtgcctttccacagcagctacgcgcacagccagagcctggaccggctgatgaatcctctcatcgaccaatacctgtattacccgaacagaactcaaaatcagtccggaagtgcccaaaacaaggacttgctgtttagccgtgggtctccagctggcatgtctgttcagcccaaaaactggctacctggaccctgttatcggcagcagcgcgtttctaaaacaaaaacagacaacaacaacagcaattttacctggactggtgcttcaaaatataacctcaatgggcgtgaatccatcatcaaccctggcactgctatggcctcacacaaagacgacgaagacaagttctttcccatgagcggtgtcatgatttttggaaaagagagcgccggagcttcaaacactgcattggacaatgtcatgattacagacgaagaggaaattaaagccactaaccctgtggccaccgaaagatttgggaccgtggcagtcaatttccagagcagcagcacagaccctgcgaccggagatgtgcatgctatgggagcattacctggcatggtgtggcaaggtagagacgtgtacctgcagggtcccatttgggccaaaattcctcacacagatggacactttcacccgtctcctcttatgggcggctttggactcaagaacccgcctcctcagatcctcatcaaaaacacgcctgttcctgcgaatcctccggcggagttttcagctacaaagtttgcttcattcatcacccaatactccacaggacaagtgagtgtggaaattgaatgggagctgcagaaagaaaacagcaagcgctggaatcccgaagtgcagtacacatccaattatgcaaaatctgccaacgttgattttactgtggacaacaatggactttatactgagcctcgccccattggcacccgttaccttacccgtcccctgtaa

SEQ ID NO: 4923 - protein, 736 aa, Adeno-associated virus
MAADGYLPDWLEDTLSEGIRQWWKLRPGPPPPKPAERHKDDSRGLVLPGYKYLGPFNGLDKGEPVNEADAAALEHDKAYDRQLDSGDNPYLKYNHADAEFQERLKEDTSFGGNLGRAVFQAKKRVLEPLGLVEEGAKTAPGKKRPVEQSPQGPDSSSGIGKTGQQPAKKRLNFGQTGDSESVPDPQPLGEPPATPAAVGPTTMASGGGAPMADNNEGADGVGNASGNWHCDSTWLGDRVITTSTRTWALPTYNNHLYKQISSASTGASNDNHYFGYSTPWGYFDFNRFHCHFSPRDWQRLINNNWGFRPKRLNFKLFNIQVKEVTTNDGVTTIANNLTSTVQVFSDSEYQLPYVLGSAHQGCLPPFPADVFMIPQYGYLTLNNGSQAVGRSSFYCLEYFPSQMLRTGNNFTFSYTFEEVPFHSSYAHSQSLDRLMNPLIDQYLYYPNRTQNQSGSAQNKDLLFSRGSPAGMSVQPKNWLPGPCYRQQRVSKTKTDNNNSNFTWTGASKYNLNGRESIINPGTAMASHKDDEDKFFPMSGVMIFGKESAGASNTALDNVMITDEEEIKATNPVATERFGTVAVNFQSSSTDPATGDVHAMGALPGMVWQGRDVYLQGPIWAKIPHTDGHFHPSPLMGGFGLKNPPPQILIKNTPVPANPPAEFSATKFASFITQYSTGQVSVEIEWELQKENSKRWNPEVQYTSNYAKSANVDFTVDNNGLYTEPRPIGTRYLTRPL

SEQ ID NO: 4924 - protein, 736 aa, Adeno-associated virus
MAADGYLPDWLEDTLSEGIRQWWKLRPGPPPPKPAERHKDDSRGLVLPGYKYLGPFNGLDKGEPVNEADAAALEHDKAYDRQLDSGDNPYLKYNHADAEFQERLKEDTSFGGNLGRAVFQAKKRVLEPLGLVEEGAKTAPGKKRPVEQSPQGPDSSSGIGKTGQQPAKKRLNFGQTGDSESVPDPQPLGEPPATPAAVGPTTMASGGGAPMADNNEGADGVGNASGNWHCDSTWLGDRVITTSTRTWALPTYNNHLYKQISSASTGASNDNHYFGYSTPWGYFDFNRFHCHFSPRDWQRLINNNWGFRPKRLNFKLFNIQVKEVTTNDGVTTIANNLTSTVQVFSDSEYQLPYVLGSAHQGCLPPFPADVFMIPQYGYLTLNNGSQAVGRSSFYCLEYFPSQMLRTGNNFTFSYTFEEVPFHSSYAHSQSLDRLMNPLIDQYLYYLNRTQNQSGSAQNKDLLFSRGSPAGMSVQPKNWLPGPCYRQQRVSKTKTDNNNSNFTWTGASKYNLNGRESIINPGTAMASHKDDEDKFFPMSGVMIFGKESAGASNTALDNVMITDEEEIKATNPVATERFGTVAVNFQSSSTDPATGDVHAMGALPGMVWQGRDVYLQGPIWAKIPHTDGHFHPSPLMGGFGLKNPPPQILIKNTPVPANPPAEFSATKFASFITQYSTGQVSVEIEWELQKENSKRWNPEVQYTSNYAKSANVDFTVDNNGLYTEPRPIGTRYLTRPL

SEQ ID NO: 4925 - protein, 736 aa, Adeno-associated virus
MAADGYLPDWLEDTLSEGIRQWWKLRPGPPPPKPAERHKDDSRGLVLPGYKYLGPFNGLDKGEPVNEADAAALEHDKAYDRQLDSGDNPYLKYNHADAEFQERLKEDTSFGGNLGRAVFQAKKRVLEPLGLVEEGAKTAPGKKRPVEQSPQGPDSSSGIGKTGQQPAKKRLNFGQTGDSESVPDPQPLGEPPATPAAVGPTTMASGGGAPMADNNEGADGVGNASGNWHCDSTWLGDRVITTSTRTWALPTYNNHLYKQISSASTGASNDNHYFGYSTPWGYFDFNRFHCHFSPRDWQRLINNNWGFRPKRLNFKLFNIQVKEVTTNDGVTTIANNLTSTVQVFSDSEYQLPYVLGSAHQGCLPPFPADVFMIPQYGYLTLNNGSQAVGRSSFYCLEYFPSQMLRTGNNFTFSYTFEEVPFHSSYAHSQSLDRLMNPLIDQYLYYLNRTQNQSGSAQNKDLLFSRGSPAGMSVQPKNWLPGPCYRQQRVSKTKTDNNNSNFTWTGASKYNLNGRESIINPGTAMASHKDDEDKFFPMSGVMIFGKESAGASNTALDNVMITDEEEIKATNPVATERFGTVAVNFQSSSTDPATGDVHAMGALPGMVWQDRDVYLQGPIWAKIPHTDGHFHPSPLMGGFGLKNPPPQILIKNTPVPANPPAEFSATKFASFITQYSTGQVSVEIEWELQKENSKRWNPEVQYTSNYAKSANVDFTVDNNGLYTEPRPIGTRYLTRPL

SEQ ID NO: 4926 - DNA, 2208 bp, Adeno-associated virus
  source 1..2208: mol_type = unassigned DNA
atggctgccgatggctatcttccagattggctcgaggacactctctctgaaggaataagacagtggtggaagctcaaacctggcccaccaccaccaaagcccgcagagcggcatagggacgacagcaggggtcttgtgcttcctgggtacaagtacctcggacccttcaacggactcgacaagggagagccggtcaacgaggcagacgccgcggccctcgagcacgacaaagcctacgaccggcagctcgacagcggagacaacccgtacctcaagtacaaccacgccgacgcggagtttcaggagcgccttaaagaagatacgtcttttgggggcaacctcggacgagcagtcttccaggcgaaaaagagggttcttgaacctctgggcctggttgaggaacctgttaagacggctccgggaaaaaagaggccggtagagcactctcctgtggagccagactcctcctcgggaaccggaaaggcgggccagcagcctgcaagaaaaagattgaattttggtcagactggagacgcagactcagtacctgacccccagcctctcggacagccaccagcagccccctctggtctgggaactaatacgatggctacaggcagtggcgcaccaatggcagacaataacgagggcgccgacggagtgggtaattcctcgggaaattggcattgcgattccacatggatgggcgacagagtcatcaccaccagcacccgaacctgggccctgcccacctacaacaaccacctctacaaacaaatttccagccaatcaggagcctcgaacgacaatcactactttggctacagcaccccttgggggtattttgacttcaacagattccactgccacttttcaccacgtgactggcaaagactcatcaacaacaactggggattccgacccaagagactcaacttcaagctctttaacattcaagtcaaagaggtcacgcagaatgacggtacgacgacgattgccaataaccttaccagcacggttcaggtgtttactgactcggggtaccagctcccgtacgtcctcggctcggcgcatcaaggatgcctcccgccgttcccagcagacgtcttcatggtgccacagtatggataccccaccctgaacaacgggagtcaggcagtaggacgctcttcattttactgcctggagtactttccttctcagatgctgcgtaccggaaacaactttaccttcagctacacttttgaggacgttcctttccacagcagctacgctcacagccagagtctggaccgtctcatgaatcctctcatcgaccagtacctgtattacttgagcacaacaaacactccaagtggaaccaccacgcagtcaaggcttcagttttctcaggccggagcgagtgacattcgggaccagtctaggaactggcttcctggaccctgttaccgccagcagcgagtatcaaagacatctgcggataacaacaacagtgaatactcgtggactggagctaccaagtaccacctcaatggcagagactctctggtgaatccgggcccggccgtggcaagccacaaggacgatgaagaaaagttttttcctcagagcggggttctcatctttgggaagcaaggctcagagaaaacaaatgtggacattgaaaaggtcatgattacagacgaagaggaaatcaggacaaccaatcccgtggctacggagcagtatggttctgtatctaccaacctccagagaggcaacagacaagcagctaccgcagatgtcaacacacaaggcgttcttccaggcatggtctggcaggacagagatgtgtaccttcaggggcccatctgggcaaagattccacacacggacggacattttcacccctctcccctcatgggtggattcggacttaaacaccctcctccacagattctcatcaagaacaccccggtacctgcgaatccttcgaccaccttcagtgcggcaaagtttgcttccttcatcacacagtactccacgggacaggtcagcgtggagatcgagtgggagctgcagaaggaaaacagcaaacgctggaatcccgaaattcagtacacttccaactacaacaagtctgttaatgtggactttactgtggacactaatggcgtgtattcagagcctcgccccattggcaccagatacctgactcgtaatctgtaa

SEQ ID NO: 4927 - protein, 735 aa, Adeno-associated virus
MAADGYLPDWLEDTLSEGIRQWWKLKPGPPPPKPAERHRDDSRGLVLPGYKYLGPFNGLDKGEPVNEADAAALEHDKAYDRQLDSGDNPYLKYNHADAEFQERLKEDTSFGGNLGRAVFQAKKRVLEPLGLVEEPVKTAPGKKRPVEHSPVEPDSSSGTGKAGQQPARKRLNFGQTGDADSVPDPQPLGQPPAAPSGLGTNTMATGSGAPMADNNEGADGVGNSSGNWHCDSTWMGDRVITTSTRTWALPTYNNHLYKQISSQSGASNDNHYFGYSTPWGYFDFNRFHCHFSPRDWQRLINNNWGFRPKRLNFKLFNIQVKEVTQNDGTTTIANNLTSTVQVFTDSGYQLPYVLGSAHQGCLPPFPADVFMVPQYGYPTLNNGSQAVGRSSFYCLEYFPSQMLRTGNNFTFSYTFEDVPFHSSYAHSQSLDRLMNPLIDQYLYYLSTTNTPSGTTTQSRLQFSQAGASDIRDQSRNWLPGPCYRQQRVSKTSADNNNSEYSWTGATKYHLNGRDSLVNPGPAVASHKDDEEKFFPQSGVLIFGKQGSEKTNVDIEKVMITDEEEIRTTNPVATEQYGSVSTNLQRGNRQAATADVNTQGVLPGMVWQDRDVYLQGPIWAKIPHTDGHFHPSPLMGGFGLKHPPPQILIKNTPVPANPSTTFSAAKFASFITQYSTGQVSVEIEWELQKENSKRWNPEIQYTSNYNKSVNVDFTVDTNGVYSEPRPIGTRYLTRNL

SEQ ID NO: 4928 - DNA, 2211 bp, Adeno-associated virus
  source 1..2211: mol_type = unassigned DNA
atggctgccgacggttatcttccagattggctcgaggacactctctctgaaggaataagacagtggtggaagctcaaacctggcccaccaccaccaaagcccgcagagcggcataaggacgacagcaggggtcttgtgcttcctgggtacaagtacctcggacccttcaacggactcgacaagggagagccggtcaacgaggcagacgccgcggccctcgagcacgacaaagcctacgaccggcagctcgacagcggagacaacccgtacctcaagtacaaccacgccgacgcggagtttcaggagcgccttaaagaagatacgtcttttgggggcaacctcgggcgggcagtcttccaggccaagaagcgggttctcgaacctctcggtctggttgaggaaggcgctaagacggctcctggaaagaaacgtccggtagagcagtcgccacaagagccagactccccctcgggcatcggcaagacaggccagcagcccgctaaaaagagactcaattttggtcagactggcgactcagagtcagtccccgatccacaacctctcggagaacctccagcaacccccgctgctgtgggacctactacaatggcttcaggcggtggcgcaccaatggcagacaataacgaaggcgccgacggagtgggtaatgcctcaggaaattggcactgcgattccacatggctgggcgacagagtcatcaccaccagcacccgcacctgggccttgcccacctacaataaccacctctacaagcaaatctccagtgcttcaacgggggccagcaacgacaaccactacttcggctacagcaccccctgggggtattttgatttcaacagattccactgccacttttcaccacgtgactggcagcgactcatcaacaacaattggggattccggcccaagagactcaacttcaaactcttcaacatccaagtcaaggaggtcacgacgaatgatggcgtcacaaccatcgctaataaccttaccagcacggttcaagtcttctcggactcggagtaccagcttccgtacgtcctcggctctgcgcaccagggccgcctccctccgttcccggcggacgtgttcatgattccgcaatacggctacctgacgctcaacaatggcagccaagccgtgggacgttcatcctcttactgcctggaatatttcccttctcagatgctgagaacgggcaacaactttaccttcagctacacctttgaggaagtgcctctccacagcagctgcgcgcacagccagagcctggaccggctgatgaatcctctcatcgaccaatacctgtattacctgaacagaactcaaaatcagtccggaagtgcccaaaacagggacttgctgttcagccgtgggtctccagctggcatgtctgttcagcccaaaaactggctacctggaccctgttatcggcagcagcgcgtttctaaaacaaaaacagacaacaacaacagcaattttacctggactggtgcttcaaaatataacctcaatgggcgtgaatccatcatcaaccctggcactgctatggcctcacacaaagacgacgaagacaagttctttcccatgagcggtgtcatgatttttggaaaagagagcgccggagcttcaaacactgcattggacaatgtcatgattacagacgaagaggaaattaaagccactaaccctgtggccaccgaaagatttgggaccgtggcagtcaatttccagagcagcagcacagaccctgcgaccggagatgtgcatgctatgggagcattacctggcatggtgtggcaagatagagacgtgtacctgcagggtcccatttgggccaaaattcctcacacagatggacactttcacccgtctcctcttatgggcggctttggactcaagaacccgcctcctcagatcctcatcaaaaacacgcctgttcctgcgaatcctccggcggagttttcagctacaaagtttgcttcattcatcacccaatactccgcaggacaagtgagtgtggaaattgaatgggagctgcagaaagaaaacagcaagcgctggaatcccgaagtgcagtacacatccaattatgcaaaatctgccaacgttgattttactgtggacaacaatggactttatactgagcctcgccccattggcacccgttaccttacccgtcccctgtaa

SEQ ID NO: 4929 - protein, 736 aa, Adeno-associated virus
MAADGYLPDWLEDTLSEGIRQWWKLKPGPPPPKPAERHKDDSRGLVLPGYKYLGPFNGLDKGEPVNEADAAALEHDKAYDRQLDSGDNPYLKYNHADAEFQERLKEDTSFGGNLGRAVFQAKKRVLEPLGLVEEGAKTAPGKKRPVEQSPQEPDSPSGIGKTGQQPAKKRLNFGQTGDSESVPDPQPLGEPPATPAAVGPTTMASGGGAPMADNNEGADGVGNASGNWHCDSTWLGDRVITTSTRTWALPTYNNHLYKQISSASTGASNDNHYFGYSTPWGYFDFNRFHCHFSPRDWQRLINNNWGFRPKRLNFKLFNIQVKEVTTNDGVTTIANNLTSTVQVFSDSEYQLPYVLGSAHQGRLPPFPADVFMIPQYGYLTLNNGSQAVGRSSSYCLEYFPSQMLRTGNNFTFSYTFEEVPLHSSCAHSQSLDRLMNPLIDQYLYYLNRTQNQSGSAQNRDLLFSRGSPAGMSVQPKNWLPGPCYRQQRVSKTKTDNNNSNFTWTGASKYNLNGRESIINPGTAMASHKDDEDKFFPMSGVMIFGKESAGASNTALDNVMITDEEEIKATNPVATERFGTVAVNFQSSSTDPATGDVHAMGALPGMVWQDRDVYLQGPIWAKIPHTDGHFHPSPLMGGFGLKNPPPQILIKNTPVPANPPAEFSATKFASFITQYSAGQVSVEIEWELQKENSKRWNPEVQYTSNYAKSANVDFTVDNNGLYTEPRPIGTRYLTRPL

SEQ ID NO: 4930 - protein, 736 aa, Adeno-associated virus
MAADGYLPDWLEDTLSEGIRQWWKLKPGPPPPKPAERHKDDSRGLVLPGYKYLGPFNGLDKGEPVNEADAAALEHDKAYDRQLDSGDNPYLKYNHADAEFQERLKEDTSFGGNLGRAVFQAKKRVLEPLGLVEEGAKTAPGKKRPVEQSPQEPDSSSGIGKTGQQPAKKRLNFGQTGDSESVPDPQPLGEPPATPAAVGPTTMASGGGAPMADNNEGADGVGNASGNWHCDSTWLGDRVITTSTRTWALPTYNNHLYKQISSASTGASNDNHYFGYSTPWGYFDFNRFHCHFSPRDWQRLINNNWGFRPKRLNFKLFNIQVKEVTTNDGVTTIANNLTSTVQVFSDSEYQLPYVLGSAHQGCLPPFPADVFMIPQYGYLTLNNGSQAVGRSSFYCLEYFPSQMLRTGNNFTFSYTFEEVPLHSSCAHSQSLDRLMNPLIDQYLYYLNRTQNQSGSAQNRDLLFSRGSPAGMSVQPKNWLPGPCYRQQRVSKTKTDNNNSNFTWTGASKYNLNGRESIINPGTAMASHKDDEDKFFPMSGVMIFGKESAGASNTALDNVMITDEEEIKATNPVATERFGTVAVNFQSSSTDPATGDVHAMGALPGMVWQDRDVYLQGPIWAKIPHTDGHFHPSPLMGGFGLKNPPPQILIKNTPVPANPPAEFSATKFASFITQYSTGQVSVEIEWELQKENSKRWNPEVQYTSNYAKSANVDFTVDNNGLYTEPRPIGTRYLTRPL

SEQ ID NO: 4931 - DNA, 2208 bp, Adeno-associated virus
  source 1..2208: mol_type = unassigned DNA
atggctgccgatggctatcttccagattggctcgaggacactctctctgaaggaataagacagtggtggaagctcaaacctggcccaccaccaccaaagcccgcagagcggcatagggacgacagcaggggtcttgtgcttcctgggtacaagtacctcggacccttcaacggactcgacaagggagagccggtcaacgaggcagacgccgcggccctcgagcacgacaaagcctacgaccggcagctcgacagcggagacaacccgtacctcaagtacaaccacgccgacgcggagtttcaggagcgccttaaagaagatacgtcttttgggggcaacctcggacgagcagtcttccaggcgaaaaagagggttcttgaacctctgggcctggttggggaacctgttaagacggctccgggaaaaaagaggccggtagagcactctcctgtggagccagactcctcctcgggaaccggaaaggcgggccagcagcctgcaagaaaaagattgaattttggtcagactggagacgcagactcagtacctgacccccagcctctcggacagccaccagcagccccctctggtctgggaactaatacgatggctacaggcagtggcgcaccaatggcagacaataacgagggcgccgacggagtgggtaattcctcgggaaattggcattgcgattccacatggatgggcgacagagtcatcaccaccagcacccgaacctgggccctgcccacctacaacaaccacctctacaaacaaatttccagccaatcaggagcctcgaacgacagtcactactttggctacagcaccccttgggggtattttgacttcaacagattccactgccacttttcaccacgtgactggcaaagactcatcaacaacaactggggattccgacccaagagactcaacttcaagctctttaacattcaagtcaaagaggtcacgcagaatgacggtacgacgacgattgccaataaccttaccagcacggttcaggtgtttactgactcggagtaccagctcccgtacgtcctcggctcggcgcatcaaggatgcctcccgccgttcccagcagacgtcttcatggtgccacagtatggatacctcaccctgaacaacgggagtcaggcagtaggacgctcttcattttactgcctggagtactttccttctcagatgctgcgtaccggaaacaactttaccttcagctacacttttgaggacgttcctttccacagcagctacgctcacagccagagtctggaccgtctcatgaatcctctcatcgaccagtacctgtattacttgagcacaacaaacactccaagtggaaccaccacgcagtcaaggctccagttttctcaggccggagcgagtgacattcgggaccagtctaggaactggcttcctggaccctgttaccgccagcagcgagtatcaaagacatctgcggataacaacaacagtgaatactcgtggactggagctaccaagtaccacctcaatggcagagactctctggtgaatccgggcccggccatggcaagccacaaggacaatgaagaaaagttttttcctcagagcggggttctcatctttgggaagcaaggctcagagaaaacaaatgtggacattgaaaaggtcatgattacagacgaagaggaaatcaggacaaccaatcccgtggctacggagcagtatggttctgtatctaccaacctccagagaggcaacagacaagcagctaccgcagatgtcaacacacaaggcgttcttccaggcatggtctggcaggacagagatgtgtaccttcaggggcccatctgggcaaagattccacacacggacggacattttcacccctctcccctcatgggtggattcggacttaaacaccctcctccacagattctcatcaagaacaccccggtacctgcgaatccttcgaccaccttcagtgcggcaaagtttgcttccttcatcacacagtactccacgggacaggtcagcgtggagatcgagtgggagctgcagaaggaaaacagcaaacgctggaatcccgaaattcagtacacttccaactacaacaagtctgttaatgtggactttactgtggacactaatggcgtgtattcagagcctcgccccattggcaccagatacctgactcgtaatctgtaa

SEQ ID NO: 4932 - protein, 735 aa, Adeno-associated virus
MAADGYLPDWLEDTLSEGIRQWWKLKPGPPPPKPAERHRDDSRGLVLPGYKYLGPFNGLDKGEPVNEADAAALEHDKAYDRQLDSGDNPYLKYNHADAEFQERLKEDTSFGGNLGRAVFQAKKRVLEPLGLVGEPVKTAPGKKRPVEHSPVEPDSSSGTGKAGQQPARKRLNFGQTGDADSVPDPQPLGQPPAAPSGLGTNTMATGSGAPMADNNEGADGVGNSSGNWHCDSTWMGDRVITTSTRTWALPTYNNHLYKQISSQSGASNDSHYFGYSTPWGYFDFNRFHCHFSPRDWQRLINNNWGFRPKRLNFKLFNIQVKEVTQNDGTTTIANNLTSTVQVFTDSEYQLPYVLGSAHQGCLPPFPADVFMVPQYGYLTLNNGSQAVGRSSFYCLEYFPSQMLRTGNNFTFSYTFEDVPFHSSYAHSQSLDRLMNPLIDQYLYYLSTTNTPSGTTTQSRLQFSQAGASDIRDQSRNWLPGPCYRQQRVSKTSADNNNSEYSWTGATKYHLNGRDSLVNPGPAMASHKDNEEKFFPQSGVLIFGKQGSEKTNVDIEKVMITDEEEIRTTNPVATEQYGSVSTNLQRGNRQAATADVNTQGVLPGMVWQDRDVYLQGPIWAKIPHTDGHFHPSPLMGGFGLKHPPPQILIKNTPVPANPSTTFSAAKFASFITQYSTGQVSVEIEWELQKENSKRWNPEIQYTSNYNKSVNVDFTVDTNGVYSEPRPIGTRYLTRNL

SEQ ID NO: 4933 - protein, 737 aa, Adeno-associated virus
RMAADGYLPDWLEDNLSEGIREWWDLKPGAPKPKANQQKQDDGRGLVLPGYKYLGPFNGLDKGEPVNAADAAALEHDKAYDQQLKAGDNPYLRYNHADAEFQERLQEDTSFGGNLGRAVFQAKKRVLEPLGLVEEGAKTAPGKKRPVEQSPQEPDSSSGIGKTGQQPAKKRLNFGQTGDSESVPDPQPLGEPPATPAAVGPTTMASGGGAPMADNNEGADGVGNASGNWHCDSTWLGDRVITTSTRTWALPTYNNHLYKQISSTSTGASNDNHYFGYGTPWGYFDFNRFHCHFSPRDWQRLINNNWGFRPKRLNFKLFNIQVEEVTTNDGVTTIANNLTSTVQVFSDSEYQLPYVLGSAHQGCLPPFPADVFMIPQYGYLTLNNGSQAVGRSSFYCLEYFPSQMLRTGNNFTFSYTFEEVPFHSSYAHSQSLDRLMNPLIDQYLYYLNRTQNQSGSAQNKDLLFSRGSPAGMSVQPKNWLPGPCYRQQRVSKTKTDNNNSNFTWTGASKYNLNGRESIINPGTAVASHKDDEDKFFPMSGVMIFGKESAGASSTALDNVMITDEEEIKATNPVATERFGTVAVNFQSSSTDPATGDVHAMGALPGMVWQDRDVYLQGPIWAKIPHTDGHFHPSPLMGGFGLKNPPPQILIKNTPVPANPPAEFSATKFASFITQYSTGQVSVEIEWELQKENSKRWNPEVQYTSNYAKSANVDFTVDNNGLYTEPRPIGTRYLTRPL

SEQ ID NO: 4934 - protein, 736 aa, Adeno-associated virus
MAADGYLPDWLEDNLSEGIREWWDLKPGAPKPKANQQKQDDGRGLVLPGYKYLGPFNGLDKGEPVNAADAAALEHDKAYDQQLKAGDNPYLRYNHADAEFQERLQEDTSFGGNLGRAVFQAKKRVLEPLGLVEEGAKTAPGKKRPVEQSPQEPDSSSGIGKTGQQPAKKRLNFGQTGDSESVPDPQPLGEPPATPAAVGPTTMASGGGAPMADNNEGADGVGNASGNWHCDSTWLGDRVITTSTRTWALPTYNNHLYKQISSTSTGASNDNHYFGYGTPWGYFDFNRFHCHFSPRDWQRLINNNWGFRPKRLNFKLFNIQVEEVTTNDGVTTIANNLTSTVQVFSDSEYQLPYVLGSAHQGCLPPFPADVFMIPQYGYLTLNNGSQAVGRSSFYCLEYFPSQMLRTGNNFTFSYTFEEVPFHSSYAHSQSLDRLMNPLIDQYLYYLNRTQNQSGSAQNKDLLFSRGSPAGMSVQPKNWLPGPCYRQQRVSKTKTDNNNSNFTWTGASKYNLNGRESIINPGTAVASHKDDEDKFFPMSGVMIFGKESAGASSTALDNVMITDEEEIKATNPVATERFGTVAVNFQSSSTDPATGDVHAMGALPGMVWQDRDVYLQGPIWAKIPHTDGHFHPSPLMGGFGLKNPPPQILIKNTPVPANPPAEFSATKFASFITQYSTGQVSVEIEWELQKENSKRWNPEVQYTSNYAKSANVDFTVDNNGLYTEPRPIGTRYLTRPL

SEQ ID NO: 4935 - DNA, 2211 bp, Adeno-associated virus
  source 1..2211: mol_type = unassigned DNA
atggctgccgatggttatcttccagattggctcgaggacaacctctctgagggcattcgcgagtggtgggacttgaaacctggagccccgaagcccaaagccaaccagcaaaagcaggacgacggccggggtctggtgcttcctggctacaagtacctcggacccttcaacggactcgacaagggggagcccgtcaacgcggcggacgcagcggccctcgagcacgacaaggcctacgaccagcagctcaaagcgggtgacaatccgtacctgcggtataaccacgccgacgccgagtttcaggagcgtctgcaagaagatacgtcttttgggggcaacctcgggcgagcagtcttccaggccaagaagcgggttctcgaacctctcggtctggttgaggaaggcgctaagacggctcctggaaagaaacgtccggtagagcagtcgccacaagagccagactcctcctcgggcatcggcaagacaggccagcagcccgctaaaaagagactcaattttggccagactggcgactcagagtcagtccccgatccacaacctctcggagaacctccagcaacccccgctgctgtgggacctactacaatggcttcaggcggtggcgcaccaatggcagacaataacgaaggcgccgacggagtgggtaatgcctcaggaaattggcattgcgattccacatggctgggcgacagagtcatcaccaccagcacccgcacctgggccttgcccacctacaataaccacctctacaagcaaatctccagtacttcaacgggggccagcaacgacaaccactacttcggctacggcaccccctgggggtattttgatttcaacagattccactgccacttttcaccacgtgactggcagcgactcatcaacaacaattggggattccggcccaagagactcaacttcaaactcttcaacatccaagtcgaggaggtcacgacgaatgatggcgtcacaaccatcgctaataaccttaccagcacggttcaagtcttctcggactcggagtaccagcttccgtacgtcctcggctctgcgcaccagggctgcctccctccgttcccggcggacgtgttcatgattccgcaatacggctacctgacgctcaacaatggcagccaagccgtgggacgttcatccttttactgcctggaatatttcccttctcagatgctgagaacgggcaacaactttaccttcagctacacctttgaggaagtgcctttccacagcagctacgcgcacagccagagcctggaccggctgatgaatcctctcatcgaccaatacctgtattacctgaacagaacacaaaatcagtccggaagtgcccaaaacaaggacttgctgtttagccgtgggtctccagctggcatgtctgttcagcccaaaaactggctacctggaccctgttatcggcagcagcgcgtttctaaaacaaaaacagacaacaacaacagcaattttacctggactggtgcttcaaaatataacctcaatgggcgtgaatccatcatcaaccctggcaccgctgtggcctcacacaaagacgacgaagacaagttctttcccatgagcggtgtcatgatttttggaaaagagagcgccggagcttcaagcactgcattggacaatgtcatgattacagacgaagaggaaattaaagccactaaccctgtggccaccgaaagatttgggaccgtggcagtcaatttccagagcagcagcacagaccctgcgaccggagatgtgcatgctatgggagcattacctggcatggtgtggcaagatagagacgtgtacctgcagggtcccatttgggccaaaattcctcacacagatggacactttcacccgtctcctcttatgggcggctttggactcaagaacccgcctcctcagatcctcatcaaaaacacgcctgttcctgcgaatcctccggcggagttttcagctacaaagtttgcttcattcatcacccaatactccacaggacaagtgagtgtggaaattgaatgggagctgcagaaagaaaacagcaagcgctggaatcccgaagtgcagtacacatccaattatgcaaaatctgccaacgttgattttactgtggacaacaatggactttatactgagcctcgccccattggcacccgttaccttacccgtcccctgtaa

SEQ ID NO: 4936 - protein, 737 aa, Adeno-associated virus
RMAADGYLPDWLEDNLSEGIREWWDLKPGAPKPKANQQKQDDGRGLVLPGYKYLGPFNGLDKGEPVNAADAAALEHDKAYDQQLKAGDNPYLRYNHADAEFQERLQEDTSFGGNLGRAVFQAKKRVLEPLGLVEEGAKTAPGKKRPVEQSPQEPDSSSGIGKTGQQPAKKRLNFGQTGDSESVPDPQPLGEPPATPAAVGPTTMASGGGAPMADNNEGADGVGNASGNWHCDSTWLGDRVITTSTRTWALPTYNNHLYKQISSTSTGASNDNHYFGYSTPWGYFDFNRFHCHFSPRDWQRLINNNWGFRPKRLNFKLFNIQVEEVTTNDGVTTIANNLTSTVQVFSDSEYQLPYVLGSAHQGCLPPFPADVFMIPQYGYLTLNNGSQAVGRSSFYCLEYFPSQMLRTGNNFTFSYTFEEVPFHSSYAHSQSLDRLMNPLIDQYLYYLNRTQNQSGSAQNKDLLFSRGSPAGMSVQPKNWLPGPCYRQQRVSKTKTDNNNSNFTWTGASKYNLNGRESIINPGTAVASHKDDEDKFFPMSGVMIFGKESAGASSTALDNVMITDEEEIKATNPVATERFGTVAVNFQSSSTDPATGDVHAMGALPGMVWQDRDVYLQGPIWAKIPHTDGHFHPSPLMGGFGLKNPPPQILIKNTPVPANPPAEFSATKFASFITQYSTGQVSVEIEWELQKENSKRWNPEVQYTSNYAKSANVDFTVDNNGLYTEPRPIGTRYLTRPL

SEQ ID NO: 4937 - protein, 737 aa, Adeno-associated virus
RMAADGYLPDWLEDNLSEGIREWWDLKPGAPKPKANQQKQDDGRGLVLPGYKYLGPFNGLDKGEPVNAADAAALEHDKAYDQQLKAGDNPYLRYNHADAEFQERLQEDTSFGGNLGRAVFQAKKRVLEPLGLVEEGAKTAPGKKRPVEQSPQEPDSSSGIGKTGQQPAKKRLNFGQTGDSESVPDPQPLGEPPATPAAVGPTTMASGGGAPMADNNEGADGVGNASGNWHCDSTWLGDRVITTSTRTWALPTYNNHLYKQISSTSTGASNDNHYFGYSTPWGYFDFNRFHCHFSPRDWQRLINNNWGFRPKRLNFKLFNIQVKEVTTNDGVTTIANNLTSTVQVFSDSEYQLPYVLGSAHQGCLPPFPADVFMIPQYGYLTLNNGSQAVGRSSFYCLEYFPSQMLRTGNNFTFSYTFEEVPFHSSYAHSQSLDRLMNPLIDQYLYYLNRTQNQSGSAQNKDLLFSRGSPAGMSVQPKNWLPGPCYRQQRVSKTKTDNNNSNFTWTGASKYNLNGRESIINPGTAVASHKDDEDKFFPMSGVMIFGKESAGASSTALDNVMITDEEEIKATNPVATERFGTVAVNFQSSSTDPATGDVHAMGALPGMVWQDRDVYLQGPIWAKIPHTDGHFHPSPLMGGFGLKNPPPQILIKNTPVPANPPAEFSATKFASFITQYSTGQVSVEIEWELQKENSKRWNPEVQYTSNYAKSANVDFTVDNNGLYTEPRPIGTRYLTRPL

SEQ ID NO: 4938 - protein, 737 aa, Adeno-associated virus
RMAADGYLPDWLEDNLSEGIREWWDLKPGAPKPKANQQKQDDGRGLVLPGYKYLGPFNGLDKGEPVNAADAAALEHDKAYDQQLKAGDNPYLRYNHADAEFQERLQEDTSFGGNLGRAVFQAKKRVLEPLGLVEEGAKTAPGKKRPVEQSPQEPDSSSGIGKTGQQPAKKRLNFGQTGDSESVPDPQPLGEPPATPAAVGPTTMASGGGAPMADNNEGADGVGNASGNWHCDSTWLGDRVITTSTRTWALPTYNNHLYKQISSTSTGASNDNHYFGYSTPWGYFDFNRFHCHFSPRDWQRLINNNWGFRPKRLNFKLFNIQVKEVTTNDGVTTIANNLTSTVQVFSDSEYQLPYVLGSAHQGCLPPFPADVFMIPQYGYLTLNNGSQAVGRSSFYCLEYFPSQMLRTGNNFTFSYTFEEVPFHSSYAHSQSLDRLMNPLIDQYLYYLNRTQNQSGSAQNKDLLFSRGSPAGMSVQPKNWLPGPCYRQQRVSKTKTDNNNSNFTWTGASKYNLNGRESIINPGTAVASHKDDEDKFFPMSGVMIFGKESAGANSTALDNVMITDEEEIKATNPVATERFGTVAVNFQSSSTDPATGDVHAMGALPGMVWQDRDVYLQGPIWAKIPHTDGHFHPSPLMGGFGLKNPPPQILIKNTPVPANPPAEFSATKFASFITQYSTGQVSVEIEWELQKENSKRWNPEVQYTSNYAKSANVDFTVDNNGLYTEPRPIGTRYLTRPL

SEQ ID NO: 4939 - DNA, 2208 bp, Adeno-associated virus
  source 1..2208: mol_type = unassigned DNA
atggctgccgatggttatcttccagattggctcaaggacactctctctgaaggaataagacagtggtggaagctcaaacctggcccaccaccaccaaagcccgcagagcggcataaggacgacagcgggggtcttgtgcttcctgggtacaagtacctcggacccttcaacggactcgacaagggagagccggtcaacgaggcagacgccgcggccctcgagtacgacaaggcctacgaccggcagctcgacagcggagacaacccgtacctcaagtacaaccacgccgacgcggagtttcaggagcgccttaaagaagatacgtcttttgggggcaacctcggacgagcagtcttccaggcgaaaaagagggttcttgaacctctgggcctggttgaggaacctgttaagacggctccgggaaaaaagaggccggtagagcactctcctgtggagccagactcctcctcgggaacaggaaaagcgggccagcagcctgcgagaaagagattgaattttggtcagactggagacgcagactccgtacctgacccccagcctctcggacagccaccagcagccccctctggtctgggaactaatacgatggctacaggcagtggcgcaccaatggcagacaataacgagggcgccgacggagtgggtaattcctcgggaagttggcattgcgattccacatggatgggcgacagagtcatcaccaccagcacccgaacctgggctctgcccacctacaacaaccatctgtacaagcagatctccagccaatcaggagccagcaacgacaaccactactttggctacagcaccccttgggggtattttgacttcaacagattccactgccacttttcaccacgtgactggcaaagactcatcaacaacaactggggattccggcccaagagactcaacttcaagctctttaacattcaagtcaaggaggtcacgcagaatgacggtacgacgacgattgccaataaccttaccagcacggttcaggtgtttactgactcggagtaccagctcccgtacgtccccggctcggcgcatcaaggatgcctcccgccgttcccagcagacgtcttcatggtgccacagtatggatacctcaccctgaacaacgggagtcaggcagtaggacgctcttcattttactgcctggagtactttccttctcagatgcttcgtaccggaaacaactttaccttcagctacacctttgaggatgttcctttccacagcagctacgctcacagccagagtttggaccgtctcatgaatcctctcatcgaccagtacctgtattacttgagcagaacaaacactccaagcggaaccaccacgcagtccaggcttcagttttctcaggccggagcaagtgacattcgggaccagtctaggaactggcttcctggaccctgttaccgccagcagcgagtatcaaagacagctgcggacaacaacaacagtgaatactcgtggactggagctaccaagtaccacctcaatggcagagactctctggtgaatccgggcccggccatggccagccacaaggacgatgaagaaaagttttttcctcaaagcggggttctcatctttgggaagcaaggctcagagaaaacaaatgtggacattgaaaaggtcatgattacagacgaagaggaaatcagaaccaccaatcccgtggccacggagcagtatggttctgtatctaccaacctccagagcggcaacacacaagcagctactgcagatgtcaacacacaaggcgttcttccaggcatggtctggcaggacagagacgtgcacctgcaggggcctatctgggcaaagattccacacacggacggacattttcacccctctcccctcatgggcggatttggacttaaacaccctcctccacagattctcatcaagaacaccccggtacctgcaaatccttcgaccaccttcagtgcggcaaagtttgcttccttcatcacacagtattccacagggcaggtcagcgtggagatcgagtgggagctgcagaaggagaacagcaaacgctggaaccccgagatccagtacacttccaactacaacaaatctgttaatgtggactttactgtggacactaatggtgtgtattcagagcctcgccccattggcaccagatacctgactcgtaatctgtaa

SEQ ID NO: 4940 - protein, 735 aa, Adeno-associated virus
MAADGYLPDWLKDTLSEGIRQWWKLKPGPPPPKPAERHKDDSGGLVLPGYKYLGPFNGLDKGEPVNEADAAALEYDKAYDRQLDSGDNPYLKYNHADAEFQERLKEDTSFGGNLGRAVFQAKKRVLEPLGLVEEPVKTAPGKKRPVEHSPVEPDSSSGTGKAGQQPARKRLNFGQTGDADSVPDPQPLGQPPAAPSGLGTNTMATGSGAPMADNNEGADGVGNSSGSWHCDSTWMGDRVITTSTRTWALPTYNNHLYKQISSQSGASNDNHYFGYSTPWGYFDFNRFHCHFSPRDWQRLINNNWGFRPKRLNFKLFNIQVKEVTQNDGTTTIANNLTSTVQVFTDSEYQLPYVPGSAHQGCLPPFPADVFMVPQYGYLTLNNGSQAVGRSSFYCLEYFPSQMLRTGNNFTFSYTFEDVPFHSSYAHSQSLDRLMNPLIDQYLYYLSRTNTPSGTTTQSRLQFSQAGASDIRDQSRNWLPGPCYRQQRVSKTAADNNNSEYSWTGATKYHLNGRDSLVNPGPAMASHKDDEEKFFPQSGVLIFGKQGSEKTNVDIEKVMITDEEEIRTTNPVATEQYGSVSTNLQSGNTQAATADVNTQGVLPGMVWQDRDVHLQGPIWAKIPHTDGHFHPSPLMGGFGLKHPPPQILIKNTPVPANPSTTFSAAKFASFITQYSTGQVSVEIEWELQKENSKRWNPEIQYTSNYNKSVNVDFTVDTNGVYSEPRPIGTRYLTRNL

SEQ ID NO: 4941 - DNA, 2208 bp, Adeno-associated virus
  source 1..2208: mol_type = unassigned DNA
atggctgccgatggttatcttccagattggctcgaggacactctctctgaaggaataagacagtggtggaagctcaaacctggcccaccaccaccaaagcccgcagagcggcataaggacgacagcaggggtcttgtgcttcctgggtacaagtacctcggacccttcaacggactcgacaagggggagccggtcaacgaggcagacgccgcggccctcgagcacgacaaggcctacgaccggcagctcgacagcggagacaacccgtacctcaagtacaaccacgccgacgcagagtttcaggagcgccttaaagaagatacgtcttttgggggcaacctcggacgagcagtcttccaggcgaaaaagagggttcttgaacctctgggcctggttgaggaacctgttaagacggctccgggaaaaaagaggccggtagagcactctcctgtggagccagactcctcctcgggaaccggaaaagcgggccagcagcctgcaagaaaaagattaaattttggtcagactggagacgcagactccgtacctgacccccagcctctcggacagccaccagcagccccctctggtctgggatctactacaatggctacaggcagtggcgcaccaatggcagacaataacgagggtgccgatggagtgggtaattcctcaggaaattggcattgcgattcccaatggctgggcgacagagtcatcaccaccagcacccgaacctgggccctgcccacatacaacaaccacctctacaagcaaatctccagccaatcaggagccagcaacgacaaccactactttggctacagcaccccctgggggtattttgacttcaacagattccactgccacttttcaccacgtgactggcaaagactcatcaacaacaactggggattccggcccaaaagactcaacttcaagctctttaatattcaagtcaaagaggtcacgcagaatgacggtacgacgacgattgccaataaccttaccagcacggttcaggtgtttactgactcggagtaccagctcccgtacgtcctgggctcggcgcatcaaggatgcctcccgccgtttccagcggacgtcttcatggtcccacagtatggatacctcaccctgaacaacgggagtcaggcggtaggacgctcttccttttactgcctggagtactttccttctcagatgctgcgtactggaaacaactttcagttcagctacacttttgaagacgtgcctttccacagcagctacgctcacagccagagtctggatcggctgatgaatcctctgatcgaccagtacctgtattatctgaacaagacacaaacaaatagtggaactcttcagcagtctcggctactgtttagccaagctggaccaaccaacatgtctcttcaagctaaaaactggctgcctggaccttgctacagacagcagcgtctgtcaaaacaggcaaacgacaacaacaacagcaactttccctggactgcagctacaaagtatcatctaaatggccgggactcgttggttaatccaggaccagctatggccagtcgcaaggatgacgaagaaaagtttttccccatgcatggaaccctgatatttggtaaacaaggaacaaatgccaacgacgcggatttggaaaatgtcatgattacagatgaagaagaaatcagggccaccaatcccgtggctacggagcagtacgggactgtgtcaaataatttgcaaaactcaaacactggtccaactactggaactgtcaatcaccaaggagcgttacctggtatggtgtggcaggatcgagacgtgtacctgcagggacccatttgggccaagattcctcacaccgatggacactttcatccttctccactgatgggaggttttggactcaaacacccgcctcctcagatcatgatcaaaaacactcccgttccagccaatcctcccacaaacttcagttctgccaagtttgcttctttcatcacacagtattccacgggacaggtcagcgtggagatcgagtgggagctgcagaaggagaacagcaaacgctggaatcccgaaattcagtacacttccaactacaacaagtctgttaatgtggactttactgtggacactaatggtgtgtattcagagcctcgccccattggcaccagatacctgactcgtaatctgtaa

SEQ ID NO: 4942 - protein, 735 aa, Adeno-associated virus
MAADGYLPDWLEDTLSEGIRQWWKLKPGPPPPKPAERHKDDSRGLVLPGYKYLGPFNGLDKGEPVNEADAAALEHDKAYDRQLDSGDNPYLKYNHADAEFQERLKEDTSFGGNLGRAVFQAKKRVLEPLGLVEEPVKTAPGKKRPVEHSPVEPDSSSGTGKAGQQPARKRLNFGQTGDADSVPDPQPLGQPPAAPSGLGSTTMATGSGAPMADNNEGADGVGNSSGNWHCDSQWLGDRVITTSTRTWALPTYNNHLYKQISSQSGASNDNHYFGYSTPWGYFDFNRFHCHFSPRDWQRLINNNWGFRPKRLNFKLFNIQVKEVTQNDGTTTIANNLTSTVQVFTDSEYQLPYVLGSAHQGCLPPFPADVFMVPQYGYLTLNNGSQAVGRSSFYCLEYFPSQMLRTGNNFQFSYTFEDVPFHSSYAHSQSLDRLMNPLIDQYLYYLNKTQTNSGTLQQSRLLFSQAGPTNMSLQAKNWLPGPCYRQQRLSKQANDNNNSNFPWTAATKYHLNGRDSLVNPGPAMASRKDDEEKFFPMHGTLIFGKQGTNANDADLENVMITDEEEIRATNPVATEQYGTVSNNLQNSNTGPTTGTVNHQGALPGMVWQDRDVYLQGPIWAKIPHTDGHFHPSPLMGGFGLKHPPPQIMIKNTPVPANPPTNFSSAKFASFITQYSTGQVSVEIEWELQKENSKRWNPEIQYTSNYNKSVNVDFTVDTNGVYSEPRPIGTRYLTRNL

SEQ ID NO: 4943 - DNA, 2208 bp, Adeno-associated virus
  source 1..2208: mol_type = unassigned DNA
atggctgccgatggttatcttccagattggctcgaggacactctctctgaaggaataagacagtggtggaagctcaaacctggcccaccaccaccaaagcccgcagagcggcataaggacgacagcaggggtcttgtgcttcctgggtacaagtacctcggacccttcaacggactcgacaagggagagccggtcaacgaggcagacgccgcggccctcgagcacgacaaagcctacgaccggcagctcgacagcggagacaacccgtacctcaagtacaaccacgccgacgcggagtttcaggagcgccttaaagaagatacgtcttttgggggcaacctcggacgagcagtcttccaggcgaaaaagagggttcttgaacctctgggcctggttggggaacctgtcaagacggctccaggaaaaaagaggccggtagagcactctcctgtggagccagactcctcctcgggaaccggaaaggcgggccagcagcctgcaagaaaaagattgaattttggtcagactggagacgcagactcagtacctgacccccagcctctcggacagccaccagcagccccctctggtctgggaactaatacgatggctacaggcagtggcgcaccaatggcagacaataacgagggcgccgacggagtgggtaattcctcgggaaattggcattgcgattccacatggatgggcgacagagtcatcaccaccagcacccgaacctgggccctgcccacctacaacaaccacctctacaaacaaatttccagccaatcaggagcctcgaacgacaatcactactttggctacagcaccccttgggggtattttgacttcaacagattccactgccacttttcaccacgtgactggcaaagactcatcaacaacaactggggattccgacccaagagactcaacttcaagctctttaacattcaagtcaaagaggtcacgcagaatgacggtacgacgacgattgccaataaccttaccagcacggttcaggtgtttactgactcggagtaccagctcccgtacgtcctcggctcggcgcatcaaggatgcctcccgccgttcccagcagacgtcttcatggtgccacagtatggatacctcaccctgaacaacgggagtcaggcagtaggacgctcttcattttactgcctggagtactttccttctcagatgctgcgtaccggaaacaactttaccttcagctacacttttgaggacgttcctttccacagcggctacgctcacagccagagtctggaccgtctcatgaatcctctcatcgaccagtacctgtattacttgagcacaacaaacactccaagtggaaccaccacgcagtcaaggcttcagttttctcaggccggagcgagtgacattcgggaccagtctaggaactggcttcctggaccctgttaccgccagcagcgagtatcaaagacatctgcggataacaacaacagtgaatactcgtggactggagctaccaagtaccacctcaatggcagagactctctggtgaatccgggcccggccatggcaagccacaaggacaatgaagaaaagttttttcctcagagcggggttctcatctttgggaagcaaggctcagagaaaacaaatgtggacattgaaaaggtcatgattacagacgaagaggaaatcaggacaaccaatcccgtggctacggagcagtacggttctgtatctaccaacctccagagaggcaacagacaagcagctaccgcagatgtcaacacacaaggcgttcttccaggcatggtctggcaggacagagatgtgtaccttcaggggcccatctgggcaaagattccacacacggacggacattttcacccctctcccctcatgggtggattcggacttaaacaccctcctccacagattctcatcaagaacaccccggtacctgcgaatccttcgaccaccttcagtgcggcaaagtttgcttccttcatcacacagtactccacgggacaggtcagcgtggagatcgagtgggagctgcagaaggaaaacagcaaacgctggaatcccgaaattcagtacacttccaactacaacaagtctgttaatgtggactttactgtggacactaatggcgtgtattcagagcctcgccccattggcaccagatacctgactcgtaatctgtaa

SEQ ID NO: 4944 - protein, 735 aa, Adeno-associated virus
MAADGYLPDWLEDTLSEGIRQWWKLKPGPPPPKPAERHKDDSRGLVLPGYKYLGPFNGLDKGEPVNEADAAALEHDKAYDRQLDSGDNPYLKYNHADAEFQERLKEDTSFGGNLGRAVFQAKKRVLEPLGLVGEPVKTAPGKKRPVEHSPVEPDSSSGTGKAGQQPARKRLNFGQTGDADSVPDPQPLGQPPAAPSGLGTNTMATGSGAPMADNNEGADGVGNSSGNWHCDSTWMGDRVITTSTRTWALPTYNNHLYKQISSQSGASNDNHYFGYSTPWGYFDFNRFHCHFSPRDWQRLINNNWGFRPKRLNFKLFNIQVKEVTQNDGTTTIANNLTSTVQVFTDSEYQLPYVLGSAHQGCLPPFPADVFMVPQYGYLTLNNGSQAVGRSSFYCLEYFPSQMLRTGNNFTFSYTFEDVPFHSGYAHSQSLDRLMNPLIDQYLYYLSTTNTPSGTTTQSRLQFSQAGASDIRDQSRNWLPGPCYRQQRVSKTSADNNNSEYSWTGATKYHLNGRDSLVNPGPAMASHKDNEEKFFPQSGVLIFGKQGSEKTNVDIEKVMITDEEEIRTTNPVATEQYGSVSTNLQRGNRQAATADVNTQGVLPGMVWQDRDVYLQGPIWAKIPHTDGHFHPSPLMGGFGLKHPPPQILIKNTPVPANPSTTFSAAKFASFITQYSTGQVSVEIEWELQKENSKRWNPEIQYTSNYNKSVNVDFTVDTNGVYSEPRPIGTRYLTRNL

SEQ ID NO: 4945 - DNA, 2208 bp, Adeno-associated virus
  source 1..2208: mol_type = unassigned DNA
atggctgccgatggttatcttccagattggctcgaggacactctctctgaaggaataagacagtggtggaagctcaaacctggcccaccaccaccaaagcccgcagagcggcataaggacgacagcaggggtcttgtgcttcctgggtacaagtacctcggacccttcaacggactcgacaagggagagccggtcaacgaggcagacgccgcggccctcgagcacgacaaagcctacgaccggcagctcgacagcggagacaacccgtacctcaagtacaaccacgccgacgcggagtttcaggagcgccttaaagaagatacgtcttttgggggcaacctcggacgagcagtcttccaggcgaaaaagagggttcttgaacctctgggcctggttggggaacctgttaagacggctccgggaaaaaagaggccggtagagcactctcctgtggagccagactcctcctcgggaaccggaaaggcgggccagcagcctgcaagaaaaagattgaattttggtcagactggagacgcagactcagtacctgacccccagcctctcggacagccaccagcagccccctctggtctgggaactaatacgatggctacaggcagtggcgcaccaatggcagacaataacgagggcgccgacggagtgggtaattcctcgggaaatcggcattgcgattccacatggatgggcgacagagtcatcaccaccagcacccgaacctgggccctgcccacctacaacaaccacctctacagacaaatttccagccaatcaggagcctcgaacgacaatcactactttggctacagcaccccttgggggtattttgacttcaacagattccactgccacttttcaccacgtgactggcaaagactcatcaacaacaactggggattccgacccaagagactcaacttcaagctctttaacattcaagtcaaagaggtcacgcagaatgacggtacgacgacgattgccaataaccttaccagcacggttcaggtgtttactgactcggagtaccagctcccgtacgtcctcggctcggcgcatcaaggatgcctcccgccgttcccagcagacgtcttcatggtgccacagtatggatacctcaccctgagcaacgggagtcaggcagtaggacgctcttcattttactgcccggagtactttccttctcagatgctgcgtaccggaaacaactttaccttcagctacacttttgaggacgttcctttccacagcagctacgctcacagccagagtctggaccgtctcatgaatcctctcatcgaccagtacctgtattacttgagcacaacaaacactccaagtggaaccaccacgcagtcaaggcttcagttttctcaggccggagcgagtgacattcgggaccagtctaggaactggcttcctggaccctgttaccgccagcagcgagtatcaaagacatctgcggataacaacaacagtgaatactcgtggactggagctaccaagtaccacctcaatggcagagactctctggtgaatccgggcccggccatggcaagccacaaggacaatgaagaaaagttttttcctcagagcggggttctcatctttgggaagcaaggctcagagaaaacaaatgtggacattgaaaaggtcatgattacagacgaagaggaaatcaggacaaccaatcccgtggctacggagcagtatggttctgtatctaccaacctccagagaggcaacagacaagcagctaccgcagatgtcaacacacaaggcgttcttccaggcatggtctggcaggacagagatgtgtaccttcaggggcccatctgggcaaagattccacacacggacggacattttcacccctctcccctcatgggtggattcggacctaaacaccctcctccacagattctcatcaagaacaccccggtacctgcgaatccttcgaccaccttcagtgcggcaaagtttgcttccttcatcacacagtactccacgggacaggtcagcgtggagatcgagtgggagctgcagaaggaaaacagcaaacgctggaatcccgaaattcagtacacttccaactacaacaagtctgttaatgtggactttactgtggacactaatggcgtgtattcagagcctcgccccattggcaccagatacctgactcgtaatttgtaa

SEQ ID NO: 4946 - protein, 735 aa, Adeno-associated virus
MAADGYLPDWLEDTLSEGIRQWWKLKPGPPPPKPAERHKDDSRGLVLPGYKYLGPFNGLDKGEPVNEADAAALEHDKAYDRQLDSGDNPYLKYNHADAEFQERLKEDTSFGGNLGRAVFQAKKRVLEPLGLVGEPVKTAPGKKRPVEHSPVEPDSSSGTGKAGQQPARKRLNFGQTGDADSVPDPQPLGQPPAAPSGLGTNTMATGSGAPMADNNEGADGVGNSSGNRHCDSTWMGDRVITTSTRTWALPTYNNHLYRQISSQSGASNDNHYFGYSTPWGYFDFNRFHCHFSPRDWQRLINNNWGFRPKRLNFKLFNIQVKEVTQNDGTTTIANNLTSTVQVFTDSEYQLPYVLGSAHQGCLPPFPADVFMVPQYGYLTLSNGSQAVGRSSFYCPEYFPSQMLRTGNNFTFSYTFEDVPFHSSYAHSQSLDRLMNPLIDQYLYYLSTTNTPSGTTTQSRLQFSQAGASDIRDQSRNWLPGPCYRQQRVSKTSADNNNSEYSWTGATKYHLNGRDSLVNPGPAMASHKDNEEKFFPQSGVLIFGKQGSEKTNVDIEKVMITDEEEIRTTNPVATEQYGSVSTNLQRGNRQAATADVNTQGVLPGMVWQDRDVYLQGPIWAKIPHTDGHFHPSPLMGGFGPKHPPPQILIKNTPVPANPSTTFSAAKFASFITQYSTGQVSVEIEWELQKENSKRWNPEIQYTSNYNKSVNVDFTVDTNGVYSEPRPIGTRYLTRNL

SEQ ID NO: 4947 - DNA, 2205 bp, Adeno-associated virus
  source 1..2205: mol_type = unassigned DNA
atggctgccgatggttatcttccagattggctcgaggacactctctctgaaggaataagacagtggtggaagctcaaacctggcccaccaccaccaaagcccgcagagcggcataaggacgacagcaggggtcttgtgcttcctgggtacaagtacctcggacccttcaacggactcgacaagggagagccggtcaacgaggcagacgccgcggccctcgagcacgacaaggcctacgaccggcagctcgacagcggagacaacccgtacctcaagtacaaccacgccgacgcggagtttcaggagcgtcttaaagaagatacgtcttttgggggcaacctcggacgagcagtcttccaggcgaaaaagagggttcttgaacctctgggcctggttgaggaacctgttaagacggctccgggaaaaaagaggccggtagagcactctcctgcggagccagactcctcctcgggaaccggaaaagcgggccagcagcctgcaagaaaaagactgaatttcggtcagactggagacgcagactccgtacctgacccccagcctctcagacagccaccagcagcccccacaagtttgggatctactacaatggctacaggcagtggcgcaccaatggcagacaataacgagggtgccgatggagtgggtaattcctcaggaaattggcattgcgattcccaatggctgggcgacagagtcatcaccaccagcacccgaacctgggccctgcccacctacaacaaccacctttacaagcaaatctccagccaatcaggagcctcaaacgacaaccactactttggctacagcaccccctgggggtattttgacttcaacagattccactgccacttttcaccacgtgactggcaaagactcatcaacaacaactggggattccgacccaagagactcaacttcaagctctttaacattcaagtcaaagaggtcacgcagaatgacggtacgacgacgattgccaataaccttaccagcacggttcaggtgtttactgactcggagtaccagctcccgtacgtcctcggctcggcgcatcaaggatgcctcccgccgtttccagcggacgtcttcatggtcccacagtatggatacctcaccctgaacaacgggagtcaggcggtaggacgctcttccttttactgcctggagtactttccttctcagatgctgcgtactggaaacaactttcagttcagctacacttttgaagacgtgcctttccacagcagctacgctcacagccagagtttggatcggctgatgaatcctctgatcgaccagtacctgtattatctaaacagaacacaaacagctagtggaactcagcagtctcggctactgtttagccaagctggacccacaagcatgtctcttcaagctaaaaactggctgcctggaccgtgttatcgccagcagcgtttgtcaaagcaggcaaacgacaacaacaacagcaactttccctggactggagctaccaagtactacctcaatggcagagactctttggtgaacccgggcccggccatggccagccacaaggacgatgaagaaaagtttttccccatgcatggaaccctaatatttggtaaagaaggaacaaatgctaccaacgcggaattggaaaatgtcatgattacagatgaagaggaaatcaggaccaccaatcccgtggctacagagcagtacggatatgtgtcaaataatttgcaaaactcaaatactgctgcaagtactgaaactgtgaatcaccaaggagcattacctggtatggtgtggcaggatcgagacgtgtacctgcagggacccatttgggccaagattcctcacaccgatggacactttcatccttctccactgatgggaggttttggactcaaacacccgcctcctcagattatgatcaaaaacactcccgttccagccaatcctcccacaaacttcagttctgccaagtttgcttccttcatcacacagtattccacgggacaggtcagcgtggagatcgagtgggagctgcagaaggagaacagcaaacgctggaatcccgaaattcagtacacttccaactacaacaaatctgttaatgtggactttactgtggacactaatggtgtgtattcagagcctcgccccattggcaccagatacctgactcgtaatctgtaa

SEQ ID NO: 4948 - protein, 734 aa, Adeno-associated virus
MAADGYLPDWLEDTLSEGIRQWWKLKPGPPPPKPAERHKDDSRGLVLPGYKYLGPFNGLDKGEPVNEADAAALEHDKAYDRQLDSGDNPYLKYNHADAEFQERLKEDTSFGGNLGRAVFQAKKRVLEPLGLVEEPVKTAPGKKRPVEHSPAEPDSSSGTGKAGQQPARKRLNFGQTGDADSVPDPQPLRQPPAAPTSLGSTTMATGSGAPMADNNEGADGVGNSSGNWHCDSQWLGDRVITTSTRTWALPTYNNHLYKQISSQSGASNDNHYFGYSTPWGYFDFNRFHCHFSPRDWQRLINNNWGFRPKRLNFKLFNIQVKEVTQNDGTTTIANNLTSTVQVFTDSEYQLPYVLGSAHQGCLPPFPADVFMVPQYGYLTLNNGSQAVGRSSFYCLEYFPSQMLRTGNNFQFSYTFEDVPFHSSYAHSQSLDRLMNPLIDQYLYYLNRTQTASGTQQSRLLFSQAGPTSMSLQAKNWLPGPCYRQQRLSKQANDNNNSNFPWTGATKYYLNGRDSLVNPGPAMASHKDDEEKFFPMHGTLIFGKEGTNATNAELENVMITDEEEIRTTNPVATEQYGYVSNNLQNSNTAASTETVNHQGALPGMVWQDRDVYLQGPIWAKIPHTDGHFHPSPLMGGFGLKHPPPQIMIKNTPVPANPPTNFSSAKFASFITQYSTGQVSVEIEWELQKENSKRWNPEIQYTSNYNKSVNVDFTVDTNGVYSEPRPIGTRYLTRNL

SEQ ID NO: 4949 - DNA, 3160 bp, Adeno-associated virus
  source 1..3160: mol_type = unassigned DNA
acccttcactaaagggactagtcctgcaggtttaaacgaattcgcccttgctgcgtcaactggaccaatgagaactttcccttcaacgactgtgtcgacaagatggtgatttggtgggaggaggggaagatgaccgccaaggtcgtggagtcggccaaagccattctcggaggaagcaaggtgcgcgtggaccagaaatgcaagtcctcggcccagatagatccgactcccgtgatcgtcacctccaacaccaacatgtgcgccgtgattgacgggaactcaacgaccttcgaacaccagcagccgttgcaagaccggatgttcaaatttgaactcacccgccgtctggatcatgactttgggaaggtcaccaagcgggaagtcaaagactttttccggtgggcaaaggatcacgtggttgaggtggagcatgaattctacgtcaaaaagggtggagccaagaaaagacccgcccctagtgacgcagatataagtgagcccaaacgggtgcgcgagtcagttgcgcagccatcgacgtcagacgcggaagcttcgatcaactacgcggacaggtaccaaaacaaatgttctcgtcacgtgggcatgaatctgatgctgtttccctgcagacaatgcgagagaatgaatcaaaattcaaatatctgcttcactcacggacagaaagactgtttagagtgctttcccgtgtcagaatctcaacctgtttctgtcgtcaaaaaggcgtatcagaaactgtgctacattcatcatatcatgggaaaggtgccagacgcttgcactgcctgcgatctggtcaatgtggatttggatgactgcatctctgaacaataaatgatttaaatcaggtatggctgccgatggttatcttccagattggctcgaggacactctctctgaaggaataagacagtggtggaagctcaaacctggcccaccaccaccaaagcccgcagagcggcataaggacgacagcaggggtcttgtgcttcctgggtacaagtacctcggacccttcaacggactcgacaagggagagccggtcaacgaggcagacgccgcggccctcgagcacgacaaggcctacgaccggcagctcgacagcggagacaacccgtacctcaagtacaaccacgccgacgcggagtttcaggagcgtcttaaagaagatacgtcttttgggggcaacctcggacgagcagtcttccaggcgaaaaagagggttcttgaacctctgggcctggttgaggaacctgttaagacggctccgggaaaaaagaggccggtagagcactctcctgcggagccagactcctcctcgggaaccggaaaagcgggccagcagcctgcaagaaaaagactgaatttcggtcagactggagacgcagactccgtacctgacccccagcctctcagacagccaccagcagcccccacaagtttgggatctactacaatggctacaggcagtggcgcaccaatggcagacaataacgagggtgccgatggagtgggtaattcctcaggaaattggcattgcgattcccaatggctgggcgacagagtcatcaccaccagcacccgaacctgggccctgcccacctacaacaaccacctttacaagcaaatctccagccaatcaggagcctcaaacgacaaccactactttggctacagcaccccctgggggtattttgacttcaacagattccactgccacttttcaccacgtgactggcaaagactcatcaacaacaactggggattccgacccaagagactcaacttcaagctctttaacattcaagtcaaagaggtcacgcagaatgacggtacgacgacgattgccaataaccttaccagcacggttcaggtgtttactgactcggagtaccagctcccgtacgtcctcggctcggcgcatcaaggatgcctcccgccgtttccagcggacgtcttcatggtcccacagtatggatacctcaccctgaacaacgggagtcaggcggtaggacgctcttccttttactgcctggagtactttccttctcagatgctgcgtactggaaacaactttcagttcagctacacttttgaagacgtgcctttccacagcagctacgctcacagccagagtttggatcggctgatgaatcctctgatcgaccagtacctgtattatctaaacagaacacaaacagctagtggaactcagcagtctcggctactgtttagccaagctggacccacaagcatgtctcttcaagctaaaaactggctgcctggaccgtgttatcgccagcagcgtttgtcaaagcaggcaaacgacaacaacaacagcaactttccctggactggagctaccaagtactacctcaatggcagagactctttggtgaacccgggcccggccatggccagccacaaggacgatgaagaaaagtttttccccatgcatggaaccctaatatttggtaaagaaggaacaaatgctaccaacgcggaattggaaaatgtcatgattacagatgaagaggaaatcaggaccaccaatcccgtggctacagagcagtacggatatgtgtcaaataatttgcaaaactcaaatactgctgcaagtactgaaactgtgaatcaccaaggagcattacctggtatggtgtggcaggatcgagacgtgtacctgcagggacccatttgggccaagattcctcacaccgatggacactttcatccttctccactgatgggaggttttggactcaaacacccgcctcctcagattatgatcaaaaacactcccgttccagccaatcctcccacaaacttcagttctgccaagtttgcttccttcatcacacagtattccacgggacaggtcagcgtggagatcgagtgggagctgcagaaggagaacagcaaacgctggaatcccgaaattcagtacacttccaactacaacaaatctgttaatgtggactttactgtggacactaatggtgtgtattcagagcctcgccccattggcaccagatacctgactcgtaatctgtaattgcttgttaatcaataaaccgtttaattcgtttcagttgaactttggtctctgcgaagggcgaattcgcggccgctaaatcaatcg

SEQ ID NO: 4950 - protein, 734 aa, Adeno-associated virus
MAADGYLPDWLEDTLSEGIRQWWKLKPGPPPPKPAERHKDDSRGLVLPGYKYLGPFNGLDKGEPVNEADAAALEHDKAYDRQLDSGDNPYLKYNHADAEFQERLKEDTSFGGNLGRAVFQAKKRVLEPLGLVEEPVKTAPGKKRPVEHSPAEPDSSSGTGKAGQQPARKRLNFGQTGDADSVPDPQPLGQPPAAPTSLGSTTMATGSGAPMADNNEGADGVGNSSGNWHCDSQWLGDRVITTSTRTWALPTYNNHLYKQISSQSGASNDNHYFGYSTPWGYFDFNRFHCRFSPRDWQRLINNNWGFRPKRLNFKLFNIQVKEVTQNDGTTTIANNLTSTVQVFTDSEYQLPYVLGSAHQGCLPPFPADVFMVPQYGYLTLNNGSQAVGRSSFYCLEYFPSQMLRTGNNFQFSYTFEDVPFHSSYAHSQGLDRLMNPLIDQYLYYLNRTQTASGTQQSRLLFSQAGPTSMSLQAKNWLPGPCYRQQRLSKQANDNNNSNFPWTGATKYHLNGGDSLVNPGPAMASHKDDEEKFFPMHGTLIFGKEGTNATNAELENVMITDEEEIRTTNPVATEQYGYVSNNLQNSNTAASTETVNHQGALPGMVWQDRDVYLRGPIWAKIPHADGHFHPSPLMGGFGLKHPPPQIMIKNTPVPANPPTNFSSAKFASFITQYSTGQVSVEIEWELQKENSKRWNPEIQYTSNYNKSVNVDFTVDTNGVYSEPRPIGTRYLTRNL

SEQ ID NO: 4951 - DNA, 3157 bp, Adeno-associated virus
  source 1..3157: mol_type = unassigned DNA
ctcactaagggactagtcctgcaggtttaaacgaattcgcccttgctgcgtcaactggaccaatgagaactttcccttcaacgactgtgtcgacaagatggtgatttggtgggaggaggggaagatgaccgccaaggtcgtggagtcggccaaagccactctcggaggaagcaaggtgcgcgtggaccagaaacgcaagtcctcggcccagatagatccgactcccgtgatcgtcacctccaacaccaacatgtgcgccgtgattgacgggaactcaacgaccttcgaacaccagcagccgttgcaagaccgaatgttcaaatttgaactcacccgccgtctggatcatgacttcgggaaggtcaccaagcaggaagtcaaagactttttccggtgggcaaaggatcacgtggttgaggtggagcatgaattctacgtcaaaaagggtggagccaagaaaagacccgcccctagtgacgcagatataagtgagcccaaacgggtgcgcgagtcagttgcgcagccatcgacgtcagacgcggaagcttcgatcaactacgcggacaggtaccaaaacaaatgttctcgtcacgtgggcatgaatctgatgctgtttccctgcagacaatgcgagagaatgaatcaaaattcaaatatctgcttcactcacggacagaaagactgtttagagtgctttcccgtgtcagaatctcaacctgtttctgtcgtcaaaaaggcgtatcagaaactgtgctacattcatcatatcatgggaaaggtgccagacgcttgcactgcctgcgatctggtcaatgtggatttggatgactgcatctctgaacaataaatgatttaaatcaggtatggctgccgatggttatcttccagattggctcgaggacactctctctgaaggaataagacagtggtggaagctcaaacctggcccaccaccaccaaagcccgcagagcggcataaggacgacagcaggggtcttgtgcttcctgggtacaagtacctcggacccttcaacggactcgacaagggagagccggtcaacgaggcagacgccgcggctctcgagcacgacaaggcctacgaccggcagctcgacagcggagacaacccgtacctcaagtacaaccacgccgacgcggagtttcaggagcgtcttaaagaagatacgtcttttgggggcaacctcggacgagcagtcttccaggcgaaaaagagggttcttgaacctctgggcctggttgaggaacctgttaagacggctccgggaaaaaagaggccggtagagcactctcctgcggagccagactcctcctcgggaaccggaaaagcgggccagcagcctgcaagaaaaagactgaatttcggtcagactggagacgcagactccgtacctgacccccagcctctcggacagccaccagcagcccccacaagtttgggatctactacaatggctacaggcagtggcgcaccaatggcagacaataacgagggtgccgatggagtgggtaattcctcaggaaattggcattgcgattcccaatggctgggcgacagagtcatcaccaccagcacccgaacctgggccctgcccacctacaacaaccacctttacaagcaaatctccagccaatcaggagcctcaaacgacaaccactactttggctacagcaccccctgggggtattttgacttcaacagattccactgccgcttttcaccacgtgactggcaaagactcatcaacaacaactggggattccgacccaagagactcaacttcaagctctttaacattcaagtcaaagaggtcacgcagaatgacggtacgacgacgattgccaataaccttaccagcacggttcaggtgtttactgactcggagtaccagctcccgtacgtcctcggctcggcgcatcaaggatgcctcccgccgtttccagcggacgtcttcatggtcccacagtatggatacctcaccctgaacaacgggagtcaggcggtaggacgctcttccttttactgcctggagtactttccttctcagatgctgcgtactggaaacaactttcagttcagctacacttttgaagacgtgcctttccacagcagctacgctcacagccagggtttggatcggctgatgaatcctctgatcgaccagtacctgtattatctaaacagaacacaaacagctagtggaactcagcagtctcggctactgtttagccaagctggacccacaagcatgtctcttcaagctaaaaactggctgcctggaccgtgttatcgccagcagcgtttgtcaaagcaggcaaacgacaacaacaacagcaactttccctggactggagctaccaagtaccacctcaatggcggagactctttggtgaacccgggcccggccatggccagccacaaggacgatgaagaaaagtttttccccatgcatggaaccctaatatttggtaaagaaggaacaaatgctaccaacgcggaattggaaaatgtcatgattacagatgaagaggaaatcaggaccaccaatcccgtggctacagagcagtacggatatgtgtcaaataatttgcaaaactcaaatactgctgcaagtactgaaactgtgaatcaccaaggagcattacctggtatggtgtggcaggatcgagacgtgtacctgcggggacccatttgggccaagattcctcacgccgatggacactttcatccttctccactgatgggaggttttggactcaaacacccgcctcctcagattatgatcaaaaacactcccgttccagccaatcctcccacaaacttcagttctgccaagtttgcttccttcatcacacagtattccacgggacaggtcagcgtggagatcgagtgggagctgcagaaggagaacagcaaacgctggaatcccgaaattcagtacacttccaactacaacaaatctgttaatgtggactttactgtggacactaatggtgtgtattcagagcctcgccccattggcaccagatacctgactcgtaatctgtaattgcttgttaatcaataaaccgtttaattcgtttcagttgaactttggtctctgcgaagggcgaattcgcggccgctaaattcaattcg

SEQ ID NO: 4952 - protein, 734 aa, Adeno-associated virus
MAADGYLPDWLEDTLSEGIRQWWKLKPGPPPPKPAERHKDDSRGLVLPGYKYLGPFNGLDKGEPVNEADAAALEHDKAYDRQLDSGDNPYLKYNHADAEFQERLKEDTSFGGNLGRAVFQAKKRVLEPLGLVEEPVKTAPGKKRPVEHSPAEPDSSSGTGKAGQQPARKRLNFGQTGDADSVPDPQPLGQPPAAPTSLGSTTMATGSGAPMADNNEGADGVGNSSGNWHCDSQWLGDRVITTSTRTWALPTYNNHLYKQISSQSGASNDNHYFGYSTPWGYFDFNRFHCHFSPRDWQRLINNNWGFRPKRLNFKLFNIQVKEVTQNDGTTTIANNLTSTVQVFTDSEYQLPYVLGSAHQGCLPPFPADVFMVPQYGYLTLNNGSQAVGRSSFYCLECFPSQMLRTGNNFQFSYTFEDVPFHSSYAHSQSLDRLMNPLIDQYLYYLNRTQTASGTQQSRLLFSQAGPTSMSLQAKNWLPGPCYRQQRLSKQANDNNNSNFPWTGATKYHLNGRDSLVNPGPAMASHKDDEEKFFPMHGTLIFGKEGTNATNAELENVMITDEEEIRTTNPVATEQYGYVSNNLQNSNTAASTETVNHQGALPGMVWQDRDVYLQGPIWAKIPHTDGHFHPSPLMGGFGLKHPPPQIMIKNTPVPANPPTNFSSAKFASFITQYSTGQVSVEIEWELQKENSKRWNPEIQYTSNYNKSVNVDFTVDTNGVYSEPRPIGTRYLTRNL

SEQ ID NO: 4953 - DNA, 2208 bp, Adeno-associated virus
  source 1..2208: mol_type = unassigned DNA
atggctgccgatggttatcttccagattggctcgaggacactctctctgaaggaataagacagtggtggaagctcaaacctggcccaccaccaccaaagcccgcagagcggcataaggacgacagcaggggtcttgtgcttcctggatacaagtacctcggacccttcaacggactcgacaagggagagccggtcaacgaggcagacgccgcggccctcgagcacgacaaggcctacgaccggcagctcgacagcggagacaacccgtacctcaagtacaaccacgccgacgcggagtttcaggagcgccttaaagaagatacgtcttttgggggcaacctcggacgagcagtcttccaggcgaaaaagagggttcttgaacctctgggcctggttgaggaacctgttaagacggctccgggaaaaaagaggccggtagagcactctcctgtggagccagactcctcctcgggaaccggaaaagcgggcaaccagcctgcaagaaaaagattgaatttcggtcagactggagacgcagactccgtacctgacccccagcctctcggacagccaccagcatccccctctggtctgggaactaatacgatggctacaggcagtggcgcaccaatggcagacaataacgagggcgccgacggagtgggtaattcctcgggaaattggcattgcgattccacatggatgggcgacagagtcgtcaccaccagcacccgcacctgggccctgcccacctacaacaaccacctctacaagcagatttccagccaatcaggagccagcaacgacaaccactactttggctacagcaccccttgggggtattttgacttcaacagattccactgccacttttcgccacgcgactggcagagactcatcaacaacaactggggattccggcccaaaagactcaacttcaagctgtttaacattcaagtcaaggaggtcacgcagaatgacggtacgacgacgattgccaataaccttaccagcacggttcaggtgtttactgacttggagtaccagctcccgtacgtcctcggctcggcgcatcaaggatgcctcccgccgttcccagcagacgtcttcatggtgccacagtatggatacctcaccctgaacaacgggagtcaggcggtaggacgctcttccttttactgcctggagtactttccttctcagatgcttcgcaccggaaacaactttaccttcagctacacttttgaagacgttcctttccacagcagctacgctcacagtcaaagtctggaccgtctcatgaatcctctcatcgaccagtacctgtattacttgagcagaacaaacactccaagcggaaccactacgcagtccaggcttcagttttctcaggccggagcgagtgacattcgggaccagtctaggaactggcttcctggaccctgttaccgccagcagcgagtatcaaagacagctgcggataacaacaacagtgaatactcgtggactggagctaccaagtaccacctcaatggcagagactctctggtgaatccgggcccggccatggccagccacaaggacgatgaagaaaagttttttcctcaaagcggggttctcatctttgggaagcaaggctcagagaaaacaaatgtggacattgaaaaggtcatgattacagacgaagaggaaatcaggaccaccaatcccgtggctacggagcagtatggttctgtatctaccaacctccagagcggcaacacacaagcagctacctcagatgtcaacacacaaggcgttcttccaggcatggtctggcaggacagagacgtgtacctgcaggggcccatctgggcaaaaattccacacacggacggacattttcacccctctcccctcatgggcggatttggacttaaacaccctcctccacagattctcattaagaataccccggtacctgcgaatccttcgaccaccttcagcgcggcaaagtttgcttccttcatcacacagtattccacggggcaggtcagcgtggagatcgagtgggagctgcagaaggagaacagcaaacgctggaatcccgaaattcagtacacttccaactacaacaaatctgttaatgtggactttactgtggacactaatggggtgtattcagagcctcgccctattggcaccagatacctgactcgtaatctgtaa

SEQ ID NO: 4954 - DNA, 3159 bp, Adeno-associated virus
  source 1..3159: mol_type = unassigned DNA
gattgatttagcggccgcgaattcgcccttgctgcgtcaactggaccaatgagaactttcccttcaacgattgcgtcgacaagatggtgatctggtgggaggagggaaagatgaccgccaaggtcgtggagtcggccaaagccattctcggaggaagcaaggtgcgtgtggaccaaaagtgcaagtcttcggcccagatcgacccgactcccgtgatcgtcacctccaacaccaacatgtgcgccgtgattgatggaaactcaacgaccttcgagcaccagcagccgttgcaagaccggatgttcaaatttgaacttacccgccgtctggatcatgactttggaaaggtcaccaagcaggaagtgaaagactttttccggtgggcaaaggatcacgtggttgaggtggagcatgagttctacgtcaaaaagggtggagccaaaaaaagacccgcccccagtgacgcagatataagtgagcccaaacgggcgcgcgagtcagttgcgcagccatcgacgtcagacgcggaagcttcgatcaactacgcggacaggtaccaaaacaaatgttctcgtcacgtgggcatgaatctgatgctgtttccctgcagacaatgcgagagaatgaatcagaattcaaatatctgcttcactcacggacagaaagactgtccatagtgctttcccgtgtcagaatctcaacccgtttctgtcgtcaaaaaggcgtatcagaaactgtgctacattcatcacatcatgggaaaggtgccagacgcttgcactgcttgcgacctggtcaatgtggatttggatgactgcatctctgaacaataaatgatttaaatcaggtatggctgccgatggttatcttccagattggctcgaggacactctctctgaaggaataagacagtggtggaagctcaaacctggcccaccaccaccaaagcccgcagagcggcataaggacgacagcaggggtcttgtgcttcctggatacaagtacctcggacccttcaacggactcgacaagggagagccggtcaacgaggcagacgccgcggccctcgagcacgacaaggcctacgaccggcagctcgacagcggagacaacccgtacctcaagtacaaccacgccgacgcggagtttcaggagcgccttaaagaagatacgtcttttgggggcaacctcggacgagcagtcttccaggcgaaaaagagggttcttgaacctctgggcctggttgaggaacctgttaagacggctccgggaaaaaagaggccggtagagcactctcctgtggagccagactcctcctcgggaaccggaaaagcgggcaaccagcctgcaagaaaaagattgaatttcggtcagactggagacgcagactccgtacctgacccccagcctctcggacagccaccagcatccccctctggtctgggaactaatacgatggctacaggcagtggcgcaccaatggcagacaataacgagggcgccgacggagtgggtaattcctcgggaaattggcattgcgattccacatggatgggcgacagagtcgtcaccaccagcacccgcacctgggccctgcccacctacaacaaccacctctacaagcagatttccagccaatcaggagccagcaacgacaaccactactttggctacagcaccccttgggggtattttgacttcaacagattccactgccacttttcgccacgcgactggcagagactcatcaacaacaactggggattccggcccaaaagactcaacttcaagctgtttaacattcaagtcaaggaggtcacgcagaatgacggtacgacgacgattgccaataaccttaccagcacggttcaggtgtttactgacttggagtaccagctcccgtacgtcctcggctcggcgcatcaaggatgcctcccgccgttcccagcagacgtcttcatggtgccacagtatggatacctcaccctgaacaacgggagtcaggcggtaggacgctcttccttttactgcctggagtactttccttctcagatgcttcgcaccggaaacaactttaccttcagctacacttttgaagacgttcctttccacagcagctacgctcacagtcaaagtctggaccgtctcatgaatcctctcatcgaccagtacctgtattacttgagcagaacaaacactccaagcggaaccactacgcagtccaggcttcagttttctcaggccggagcgagtgacattcgggaccagtctaggaactggcttcctggaccctgttaccgccagcagcgagtatcaaagacagctgcggataacaacaacagtgaatactcgtggactggagctaccaagtaccacctcaatggcagagactctctggtgaatccgggcccggccatggccagccacaaggacgatgaagaaaagttttttcctcaaagcggggttctcatctttgggaagcaaggctcagagaaaacaaatgtggacattgaaaaggtcatgattacagacgaagaggaaatcaggaccaccaatcccgtggctacggagcagtatggttctgtatctaccaacctccagagcggcaacacacaagcagctacctcagatgtcaacacacaaggcgttcttccaggcatggtctggcaggacagagacgtgtacctgcaggggcccatctgggcaaaaattccacacacggacggacattttcacccctctcccctcatgggcggatttggacttaaacaccctcctccacagattctcattaagaataccccggtacctgcgaatccttcgaccaccttcagcgcggcaaagtttgcttccttcatcacacagtattccacggggcaggtcagcgtggagatcgagtgggagctgcagaaggagaacagcaaacgctggaatcccgaaattcagtacacttccaactacaacaaatctgttaatgtggactttactgtggacactaatggggtgtattcagagcctcgccctattggcaccagatacctgactcgtaatctgtaattgcttgttaatcaataaaccgtttaattcgtttcagttgaactttggtctctgcgaagggcgaattcgtttaaacctgcaggactagtccctttagtgagg

SEQ ID NO: 4955 - protein, 735 aa, Adeno-associated virus
MAADGYLPDWLEDTLSEGIRQWWKLKPGPPPPKPAERHKDDSRGLVLPGYKYLGPFNGLDKGEPVNEADAAALEHDKAYDRQLDSGDNPYLKYNHADAEFQERLKEDTSFGGNLGRAVFQAKKRVLEPLGLVEEPVKTAPGKKRPVEHSPVEPDSSSGTGKAGNQPARKRLNFGQTGDADSVPDPQPLGQPPASPSGLGTNTMATGSGAPMADNNEGADGVGNSSGNWHCDSTWMGDRVVTTSTRTWALPTYNNHLYKQISSQSGASNDNHYFGYSTPWGYFDFNRFHCHFSPRDWQRLINNNWGFRPKRLNFKLFNIQVKEVTQNDGTTTIANNLTSTVQVFTDLEYQLPYVLGSAHQGCLPPFPADVFMVPQYGYLTLNNGSQAVGRSSFYCLEYFPSQMLRTGNNFTFSYTFEDVPFHSSYAHSQSLDRLMNPLIDQYLYYLSRTNTPSGTTTQSRLQFSQAGASDIRDQSRNWLPGPCYRQQRVSKTAADNNNSEYSWTGATKYHLNGRDSLVNPGPAMASHKDDEEKFFPQSGVLIFGKQGSEKTNVDIEKVMITDEEEIRTTNPVATEQYGSVSTNLQSGNTQAATSDVNTQGVLPGMVWQDRDVYLQGPIWAKIPHTDGHFHPSPLMGGFGLKHPPPQILIKNTPVPANPSTTFSAAKFASFITQYSTGQVSVEIEWELQKENSKRWNPEIQYTSNYNKSVNVDFTVDTNGVYSEPRPIGTRYLTRNL

SEQ ID NO: 4956 - DNA, 2205 bp, Adeno-associated virus
  source 1..2205: mol_type = unassigned DNA
atggctgccgatggttatcttccagattggctcgaggacactctctctgaaggaataagacagtggtggaagctcaaacctggcccaccaccaaagcccgcagagcggcataaggacgacagcaggggtcttgtgcttcctggatacaagtacctcggacccttcaacggactcgacaagggagagccggtcaacgaggcagacgccgcggccctcgagcacgacaaggcctacgaccggcagctcgacagcggagacaacccgtacctcaagtacaaccacgccgacgcggagtttcaggagcgccttaaagaagatacgtcttttgggggcaacctcggacgagcagtcttccaggcgaaaaagagggttcttgaacctctgggcctggttgaggaacctgttaagacggctccgggaaaaaagaggcccgtagagcactctcctgtggagccagactcctcctcgggaaccggaaaagcgggcaaccagcctgcaagaaaaagattgaatttcggtcagactggagacgcagactccgtacctgacccccagcctctcggacagccaccagcagccccctctggtctgggaactaatacgatggctacaggcagtggcgcaccaatggcagacaataacgagggcgccgacggagtgggtaattcctcgggagattggcattgcgattccacatggatgggcgacagagtcatcaccaccagcacccgcacctgggccctgcccacctacaacaaccacctctacaagcagatttccagccaatcaggagccagcaatgacaaccactactttggctacagcaccccttgggggtattttgacttcaacagattccactgccacttttcgccacgcgactggcagagactcatcaacaacaactggggattccggcccaaaagactcaacctcaagctgtttaacattcaagtcaaggaggtcacgcagaatgacggtacgacgacgattgccaataaccttaccagcacggttcaggtgtttactgacttggagtaccagctcccgtacgtcctcggctcggcgcatcaaggatgcctcccgccgttcccagcagacgtcttcatggtgccacagtatggatacctcaccctgaacaacgggagtcaggcggtaggacgctcttccttttactgcctggagtactttccttctcagatgcttcgtaccggaaacaactttaccttcagctacacttttgaagacgttcctttccacagcagctacgctcacagtcaaagtctggaccgtctcatgaatcctctcatcgaccagtacctgtattacttgagcagaacaaacactccaagcggaaccactacgcagtccaggcttcagttttctcaggccggagcgagtgacattcgggaccagtctaggaactggcttcctggaccctgttaccgccagcagcgagtatcaaagacagctgcggataacaacaacggtgaatactcgtggactggagctaccaagtaccacctcaatggcagagactctctggtgaatccgggcccggccatggccagccacaaggacgatgaagaaaagttttttcctcaaagcggggttctcatctttgggaagcaaggctcagagaaaacaaatgtggacattgaaaaggtcatgattacagacgaagaggaaatcaggaccaccaatcccgtggctacggagcagtatggttctgtatctaccaacctccagagcggcaacacacgagcagctacctcagatgtcaacacacaaggcgttcttccaggcatggtctggcaggacagagacgtgtacctgcaggggcccatctgggcaaaaattccacacacggacggacattttcacccctctcccctcatgggcggatttggacttaaacaccctcctccacagattctcattaagaataccccggtacctgcgaatccttcgaccaccttcagcgcggcaaagtttgcttccttcatcacacagtattccacggggcaggtcagcgtggagatcgagtgggagctgcagaaggagaacagcaaacgctggaatcccgaaattcagtacacttccaactacaacaaatctgttaatgtggactttactgtggacactaatggggtgtattcagagcctcgccctattggcaccagatacctgactcgtaatctgtaa

SEQ ID NO: 4957 - DNA, 3156 bp, Adeno-associated virus
  source 1..3156: mol_type = unassigned DNA
cgattgaatttagcggccgcgaattcgcccttgctgcgtcaacggaccaatgagaactttcccttcaacgattgcgtcgacaagatggtgatctggtgggaggagggaaagatgaccgccaaggtcgtggagtcggccaaagccattctcggaggaagcaaggtgcgtgtggaccaaaagtgcaagtcttcggcccagatcgacccgactcccgtgatcgtcacctccaacaccaacatgtgcgccgtgattgatggaaactcaacgaccttcgagcaccagcagccgttgcaagaccggatgttcaaatttgaacttacccgccgtctggatcatgactttggaaaggtcaccaagcaggaagtgaaagactttttccggtgggcaaaggatcacgtggttgaggtggagcatgagttctacgtcaaaaagggtggagccaaaaaaagacccgcccccagtgacgcagatataagtgagcccaaacgggcgcgcgagtcagttgcgcagccatcgacgtcagacgcggaagcttcgatcaactacgcggacaggtaccaaaacaaatgttctcgtcacgtgggcatgaatctgatgctgtttccctgcagacaatgcgagcgaatgaatcagaattcaaatatctgcttcactcacggacagaaagactgtttagagtgctttcccgtgtcagaatctcaacccgtttctgtcgtcaaaaaggcgtatcagaaactgtgctacattcatcacatcatgggaaaggtgccagacgcttgcactgcttgcgacctggtcaatgtggatttggatgactgcatctctgaacaataaatgatttaaatcaggtatggctgccgatggttatcttccagattggctcgaggacactctctctgaaggaataagacagtggtggaagctcaaacctggcccaccaccaaagcccgcagagcggcataaggacgacagcaggggtcttgtgcttcctggatacaagtacctcggacccttcaacggactcgacaagggagagccggtcaacgaggcagacgccgcggccctcgagcacgacaaggcctacgaccggcagctcgacagcggagacaacccgtacctcaagtacaaccacgccgacgcggagtttcaggagcgccttaaagaagatacgtcttttgggggcaacctcggacgagcagtcttccaggcgaaaaagagggttcttgaacctctgggcctggttgaggaacctgttaagacggctccgggaaaaaagaggcccgtagagcactctcctgtggagccagactcctcctcgggaaccggaaaagcgggcaaccagcctgcaagaaaaagattgaatttcggtcagactggagacgcagactccgtacctgacccccagcctctcggacagccaccagcagccccctctggtctgggaactaatacgatggctacaggcagtggcgcaccaatggcagacaataacgagggcgccgacggagtgggtaattcctcgggagattggcattgcgattccacatggatgggcgacagagtcatcaccaccagcacccgcacctgggccctgcccacctacaacaaccacctctacaagcagatttccagccaatcaggagccagcaatgacaaccactactttggctacagcaccccttgggggtattttgacttcaacagattccactgccacttttcgccacgcgactggcagagactcatcaacaacaactggggattccggcccaaaagactcaacctcaagctgtttaacattcaagtcaaggaggtcacgcagaatgacggtacgacgacgattgccaataaccttaccagcacggttcaggtgtttactgacttggagtaccagctcccgtacgtcctcggctcggcgcatcaaggatgcctcccgccgttcccagcagacgtcttcatggtgccacagtatggatacctcaccctgaacaacgggagtcaggcggtaggacgctcttccttttactgcctggagtactttccttctcagatgcttcgtaccggaaacaactttaccttcagctacacttttgaagacgttcctttccacagcagctacgctcacagtcaaagtctggaccgtctcatgaatcctctcatcgaccagtacctgtattacttgagcagaacaaacactccaagcggaaccactacgcagtccaggcttcagttttctcaggccggagcgagtgacattcgggaccagtctaggaactggcttcctggaccctgttaccgccagcagcgagtatcaaagacagctgcggataacaacaacggtgaatactcgtggactggagctaccaagtaccacctcaatggcagagactctctggtgaatccgggcccggccatggccagccacaaggacgatgaagaaaagttttttcctcaaagcggggttctcatctttgggaagcaaggctcagagaaaacaaatgtggacattgaaaaggtcatgattacagacgaagaggaaatcaggaccaccaatcccgtggctacggagcagtatggttctgtatctaccaacctccagagcggcaacacacgagcagctacctcagatgtcaacacacaaggcgttcttccaggcatggtctggcaggacagagacgtgtacctgcaggggcccatctgggcaaaaattccacacacggacggacattttcacccctctcccctcatgggcggatttggacttaaacaccctcctccacagattctcattaagaataccccggtacctgcgaatccttcgaccaccttcagcgcggcaaagtttgcttccttcatcacacagtattccacggggcaggtcagcgtggagatcgagtgggagctgcagaaggagaacagcaaacgctggaatcccgaaattcagtacacttccaactacaacaaatctgttaatgtggactttactgtggacactaatggggtgtattcagagcctcgccctattggcaccagatacctgactcgtaatctgtaattgcttgttaatcaataaaccgtttaattcgtttcagttgaactttggtctctgcgaagggcgaattcgtttaaacctgcaggactagtccctttagtgag

SEQ ID NO: 4958 - protein, 734 aa, Adeno-associated virus
MAADGYLPDWLEDTLSEGIRQWWKLKPGPPPKPAERHKDDSRGLVLPGYKYLGPFNGLDKGEPVNEADAAALEHDKAYDRQLDSGDNPYLKYNHADAEFQERLKEDTSFGGNLGRAVFQAKKRVLEPLGLVEEPVKTAPGKKRPVEHSPVEPDSSSGTGKAGNQPARKRLNFGQTGDADSVPDPQPLGQPPAAPSGLGTNTMATGSGAPMADNNEGADGVGNSSGDWHCDSTWMGDRVITTSTRTWALPTYNNHLYKQISSQSGASNDNHYFGYSTPWGYFDFNRFHCHFSPRDWQRLINNNWGFRPKRLNLKLFNIQVKEVTQNDGTTTIANNLTSTVQVFTDLEYQLPYVLGSAHQGCLPPFPADVFMVPQYGYLTLNNGSQAVGRSSFYCLEYFPSQMLRTGNNFTFSYTFEDVPFHSSYAHSQSLDRLMNPLIDQYLYYLSRTNTPSGTTTQSRLQFSQAGASDIRDQSRNWLPGPCYRQQRVSKTAADNNNGEYSWTGATKYHLNGRDSLVNPGPAMASHKDDEEKFFPQSGVLIFGKQGSEKTNVDIEKVMITDEEEIRTTNPVATEQYGSVSTNLQSGNTRAATSDVNTQGVLPGMVWQDRDVYLQGPIWAKIPHTDGHFHPSPLMGGFGLKHPPPQILIKNTPVPANPSTTFSAAKFASFITQYSTGQVSVEIEWELQKENSKRWNPEIQYTSNYNKSVNVDFTVDTNGVYSEPRPIGTRYLTRNL

SEQ ID NO: 4959 - DNA, 2208 bp, Adeno-associated virus
  source 1..2208: mol_type = unassigned DNA
atggctgccgatggttatcttccagattggctcgaggacactctctctgaaggaataagacagtggtggaagctcaaacctggcccaccaccaccaaagcccgcagagcggcataaggacgacagcaggggtcttgtgcttcctgggtacaagtacctcggacccttcaacggactcgacaagggagagccggtcaacgaggcagacgccgcggccctcgagcacgacaaggcctacgaccggcagctcgacagcggagacaacccgtacctcaagtacgaccacgccgacgcggagtttcaggagcgccttaaagaagatacgtcttttgggggcaacctcggacgagcagtcttccaggcaaaaaagagggttcttgaacctctgggcctggttgaggagcctgttaagacggctccgggaaaaaagaggccggtagagcactctcctgtggagccagactcctcctcgggaaccggaaaagcgggcaaccagcctgcaagaaagagattgaatttcggtcagactggagacgcagactccgtacctgacccccagcctctcggacagccaccagcagccccctctggtctgggaactaatacgatggctacaggcagtggcgcaccaatggcagacaataacgatggcgccgacggagtgggtaattcctcgggaaattggcattgcgattccacatggatgggcgacagagtcatcaccaccagcacccgaacctgggctctgcccacctacaacaaccatctgtacaagcagatttccagccaatcaggagccagcaacgacaaccactactttggctacagcaccccttgggggtattttgacttcaacagattccactgccacttttcaccacgtgactggcaaagactcatcaacaacaactggggattccggcccaagagactcaacttcaagctctttaacattcaagtcagagaggtcacgcagaatgatggtacgacgacgattgccaataaccttaccagcacggttcaggtgtttactgactcggagtaccagctcccgtacgtcctcggctcggcgcatcaaggatgcctcccgccgttcccagcagacgtcttcatggtgccacagtatggatacctcaccctgaacaacgggagtcaggcagtaggacgctcttcattttactgcctggagtacttcccttctcagatgctgcgtaccggaaacaactttaccttcagctacacctttgaggatgttcctttccacagcagctacgctcacagccagagtttggaccgtctcatgaatcctctcatcgaccagtacctgtattacttgagcagaacaaacactccaagcggaaccaccacgcagtccaggcttcagttttctcaggccggagcgagtgacattcgggatcagtctaggaactggcttcctggaccctgttaccgccagcagcgagtatcaaagacatctgcggacaacaacaacagtgaatactcgtggattggagctaccaagtaccacctcaatggcagagactctctggtgaatccgggcccggcaatggccagccacaaggacgatgaagaaaagttttttcctcagagcggggttctcatctttggaaaacaaggatcagagaaaacaaatgtggacattgaaaaggtcatgattacagacgaagaggaaatcagaaccaccaatcccgtggccacggagcagtatggttctgtatctaccaacctccagagcggcaacacacaagcatctactgcagatgtcaacacacaaggcgttcttccaggcatggtctggcaggacagagacgtgtacctgcaggggcctatctgggcaaagattccgcacacggacggacattttcacccctctcccctcatgggcggattcggacttaaacaccctcctccacagattctcatcaaaaacaccccggtacctgcgaatccttcgaccaccttcagtgcggcaaagtttgcttccttcatcacacagtattccacggggcgggtcagcgtggagatcgagtgggagctacagaaggagaacagcaaacgctggaatcccgagatccagtacacttccaactacaacaaatctgttaatgtggactttactgtggacactaatggtgtgtattcagagcctcgccccattggcaccagatacctgactcgtaatctgtaa

SEQ ID NO: 4960 - protein, 735 aa, Adeno-associated virus
MAADGYLPDWLEDTLSEGIRQWWKLKPGPPPPKPAERHKDDSRGLVLPGYKYLGPFNGLDKGEPVNEADAAALEHDKAYDRQLDSGDNPYLKYDHADAEFQERLKEDTSFGGNLGRAVFQAKKRVLEPLGLVEEPVKTAPGKKRPVEHSPVEPDSSSGTGKAGNQPARKRLNFGQTGDADSVPDPQPLGQPPAAPSGLGTNTMATGSGAPMADNNDGADGVGNSSGNWHCDSTWMGDRVITTSTRTWALPTYNNHLYKQISSQSGASNDNHYFGYSTPWGYFDFNRFHCHFSPRDWQRLINNNWGFRPKRLNFKLFNIQVREVTQNDGTTTIANNLTSTVQVFTDSEYQLPYVLGSAHQGCLPPFPADVFMVPQYGYLTLNNGSQAVGRSSFYCLEYFPSQMLRTGNNFTFSYTFEDVPFHSSYAHSQSLDRLMNPLIDQYLYYLSRTNTPSGTTTQSRLQFSQAGASDIRDQSRNWLPGPCYRQQRVSKTSADNNNSEYSWIGATKYHLNGRDSLVNPGPAMASHKDDEEKFFPQSGVLIFGKQGSEKTNVDIEKVMITDEEEIRTTNPVATEQYGSVSTNLQSGNTQASTADVNTQGVLPGMVWQDRDVYLQGPIWAKIPHTDGHFHPSPLMGGFGLKHPPPQILIKNTPVPANPSTTFSAAKFASFITQYSTGRVSVEIEWELQKENSKRWNPEIQYTSNYNKSVNVDFTVDTNGVYSEPRPIGTRYLTRNL

SEQ ID NO: 4961 - DNA, 2217 bp, Adeno-associated virus
  source 1..2217: mol_type = unassigned DNA
atggctgccgatggttatcttccagattggctcgaggacaacctctctgagggcattcgcgagtggtgggacttgaaacctggagccccgaaacccaaagccaaccagcaaaagcaggacgacggccggggtctggtgcttcctggctacaagtacctcggacccttcaacggactcgacaagggggagcccgtcaacgcggcggacgcagcggccctcgagcacgacaaggcctacgaccagcagctcaaagcgggtgacaatccgtacctgcggtataaccacgccgacgccgagtttcaggagcgtctgcaagaagatacgtcttttgggggcaacctcgggcgagcagtcttccaggccaagaagcgggttctcgaacctctcggtctggttgaggaaggcgctaagacggctcctggaaagaagagaccggtagagccatcaccccagcgttctccagactcctctacgggcatcggcaagacaggccagcagcccgcgaaaaagagactcaactttgggcagactggcgactcagagtcagtgcccgaccctcaaccaatcggagaaccccccgcaggcccctctggtctgggatctggtacaatggctgcaggcggtggcgctccaatggcagacaataacgaaggcgccgacggagtgggtagttcctcaggaaattggcattgcgattccgcatggctgggcgacagagtcatcaccaccagcacccgaccctgggccctccccacctacaacaaccacctctacaagcaaatctccaacgggacatcgggaggaagcaccaacgacaacacctacttcggctacagcaccccctgggggtattttgactttaacagattccactgccacttctcaccacgtgactggcagcgactcatcaacaacaactggggattccggcccaagagactcaacttcaagctcttcaacatccaggtcaaggaggtcacgcagaatgaaggcaccaagaccatcgccaataaccttaccagcacgattcaggtctttacggactcggaataccagctcccgtacgtcctcggctctgcgcaccagggctgcccgcctccgttcccggcggacgtcttcatgattcctcagtacgggtacctgactctgaacaacggcagtcaggccgtgggccgttcctccttctactgcctggagtactttccttctcaaatgcggagaacgggcaacaactttgagttcagctaccagtttgaggacgtgccttttcacagcagctacgcgcatagccaaagcctggaccggctgatgaaccccctcatcgaccagtacctgtactacctgtctcggactcagtccacgggaggtaccgcaggaactcagcagttgctattttctcaggccgggcctaataacatgtcggctcaggccaaaaactggctacccgggccctgctaccggcagcaacgcgtctccacgacactgtcgcaaaataacaacagcaactttgcttggaccggtgccaccaagtatcatctgaatggcagagactctctggtaaatcccggtgtcgctatggcaacgcacaaggacgacgaagagcgattttttccatccagcggagtcttgatgtttgggaaacagggagctggaaaagacaacgtggactatagcagcgttatgctaaccagtgaggaagaaatcaaaaccaccaacccagtggccacagaacagtacggcgtggtggccgataacctgcaacagcaaaacgccgctcctattgtaggggccgtcaacagtcaaggagccttacctggcatggtctggcagaaccgggacgtgtacctgcagggtcctatctgggccaagattcctcacacggacggcaactttcatccttcgccgctgatgggaggctttggactgaaacacccgcctcctcagatcctgattaagaatacacctgttcccgcggatcctccaactaccttcagtcaagccaagctggcgtcgttcatcacgcagtacagcaccggacaggtcagcgtggaaattgaatgggagctgcagaaagagaacagcaagcgctggaacccagagattcagtatacttccaactactacaaatctacaaatgtggactttgctgtcaatactgagggtacttattcagagcctcgccccattggcacccgttacctcacccgtaacctgtaa

SEQ ID NO: 4962 - protein, 738 aa, Adeno-associated virus
MAADGYLPDWLEDNLSEGIREWWDLKPGAPKPKANQQKQDDGRGLVLPGYKYLGPFNGLDKGEPVNAADAAALEHDKAYDQQLKAGDNPYLRYNHADAEFQERLQEDTSFGGNLGRAVFQAKKRVLEPLGLVEEGAKTAPGKKRPVEPSPQRSPDSSTGIGKTGQQPAKKRLNFGQTGDSESVPDPQPIGEPPAGPSGLGSGTMAAGGGAPMADNNEGADGVGSSSGNWHCDSAWLGDRVITTSTRPWALPTYNNHLYKQISNGTSGGSTNDNTYFGYSTPWGYFDFNRFHCHFSPRDWQRLINNNWGFRPKRLNFKLFNIQVKEVTQNEGTKTIANNLTSTIQVFTDSEYQLPYVLGSAHQGCPPPFPADVFMIPQYGYLTLNNGSQAVGRSSFYCLEYFPSQMRRTGNNFEFSYQFEDVPFHSSYAHSQSLDRLMNPLIDQYLYYLSRTQSTGGTAGTQQLLFSQAGPNNMSAQAKNWLPGPCYRQQRVSTTLSQNNNSNFAWTGATKYHLNGRDSLVNPGVAMATHKDDEERFFPSSGVLMFGKQGAGKDNVDYSSVMLTSEEEIKTTNPVATEQYGVVADNLQQQNAAPIVGAVNSQGALPGMVWQNRDVYLQGPIWAKIPHTDGNFHPSPLMGGFGLKHPPPQILIKNTPVPADPPTTFSQAKLASFITQYSTGQVSVEIEWELQKENSKRWNPEIQYTSNYYKSTNVDFAVNTEGTYSEPRPIGTRYLTRNL

SEQ ID NO: 4963 - protein, 735 aa, Adeno-associated virus
MAADGYLPDWLEDTLSEGIRQWWKLKPGPPPPKPAERHKDDSRGLVLPGYKYLGPFNGLDKGEPVNEADAAALEHDKAYDRQLDSGDNPYLKYNHADAEFQERLKEDTSFGGNLGRAVFQAKKRVLEPLGLVEEPVKTAPGKKRPVEHSPVEPDSSSGTGKAGQQPARKRLNFGQTGDADSVPDPQPLGQPPAAPSGLGSTTMATGSGAPMADNNEGADGVGNSSGNWHCDSQWLGDRVITTSTRTWALPTYNNHLYKQISSQSGASNDNHYFGYSTPWGYFDFNRFHCHFSPRDWQRLINNNWGFRPKRLNFKLFNIQVKEVTQNDGTTTIANNLTSTVQVFTDSEYQLPYVLGSAHQGCLPPFPADVFMVPQYGYLTLNNGSQAVGRSSFYCLEYFPSQMLRTGNNFQFSYTFEDVPFHSSYAHSQSLDRLMNPLVDQYLYYLNKTQTNSGTLQQSRLLFSQAGPTNMSLQAKNWLPGPCYRQQRLSKQANDNNNSNFPWTAATKYHLNGRDSLVNPGPAMASHKDDEEKFFPMHGTLIFGKQGTNANDADLENVMITDEEEIRTTNPVATEQYGTVSNNLQNSNTGPTTGTVNHQGALPGMVWQDRDVYLQGPIWAKIPHTDGHFHPSPLMGGFGLKHPPPQIMIKNTPVPANPPTNFSSAKFASFITQYSTGQVSVEIEWELQKENSKRWNPEIQYTSNYNKSVNVDFTVDTNGVYSEPRPIGTRYLTRNL

SEQ ID NO: 4964 - DNA, 3158 bp, Adeno-associated virus
  source 1..3158: mol_type = unassigned DNA
gattgaatttagcggccgcgaattcgcccttgctgcgtcaactggaccaatgagaactttcctttcaatgattgcgtcgacaagatggtgatctggtgggaggagggaaagatgaccgccaaggtcgtggagtcggccaaagccattctcggaggaagcaaggtgcgcgcggaccagaaatgcaagtcctcggcccagatagacccgactcccgtgattgtcacctccaacaccaacatgtgcgccgtgattgacgggaactcaacgaccttcgaacaccagcagccgttgcaagaccggatgttcaaatttgaactcacccgccgtctggatcatgactttgggaaggtcaccaagcaggaagtcaaagactttttccggtgggcaaaggatcacgtggttgaggtggagcatgaattctacgtcaaaaagggtggagctaagaaaagacccgcccccagtgacgcagatataagtgagcccaaacgggcgcgcgagtcagttgcgcagccatcgacgtcagacgcggaagcttcgatcaactacgcgggcaggtaccaaaacaaatgttctcgtcacgtgggcatgaatctgatgctgtttccctgcagacaatgcgagagaatgaatcagaattcaaatatctgcttcactcacggacagaaagactgtttagagtgctttcccgtgtcagaatctcaacccgtttctgtcgtcaaaaaggcgtatcagaaactttgctacattcatcatatcatgggaaaggtgccagacgcttgcactgcctgcgatctggtcaatgtggatttggatgactgcatctctgaacaataaatgatttaaatcaggtatggctgccgatggttatcttccagattggctcgaggacactctctctgaaggaataagacagtggtggaagctcaaacctggcccaccaccaccaaagcccgcagagcggcataaggacgacagcaggggtcttgtgcttcctgggtacaagtacctcggacccttcaacggactcgacaagggggagccggtcaacgaggcagacgccgcggccctcgagcacgacaaggcctacgaccggcagctcgacagcggagacaacccgtacctcaagtacaaccacgccgacgcggagtttcaggagcgccttaaagaagatacgtcttttgggggcaacctcggacgagcagtcttccaggcaaaaaagagggttcttgaacctctgggcctggttgaggaacctgttaaaacggctccgggaaaaaagaggccggtagagcactctcctgtggagccagactcctcctcgggaaccggaaaagcgggccagcagcctgcaagaaaaagattgaatttcggtcagactggagacgcagactccgtacctgacccccagcctctcggacagccaccagcagccccctctggtctgggatctactacaatggctacaggcagtggcgcaccaatggcagacaataacgagggtgccgatggagtgggtaattcctcgggaaattggcattgcgattcccaatggctgggcgacagagtcatcaccaccagcacccgcacctgggccctgcccacctacaacaaccacctctacaagcaaatctccagccaatcaggagcctcaaacgacaaccactactttggctacagcaccccctgggggtattttgacttcaacagattccactgccacttttcaccacgtgactggcaaagactcatcaacaacaactggggattccgacccaagagactcaacttcaagctctttaacattcaagtcaaagaggtcacgcagaatgacggtacgacgacgattgccaataaccttaccagcacggttcaggtgtttactgactcggagtaccagctcccgtacgtcctcggctcggcgcatcaaggatgcctcccgccgtttccagcggacgtcttcatggtcccacagtatggatacctcaccctgaacaacgggagtcaggcagtaggacgctcttcattttactgcctggagtactttccttctcagatgctgcgtaccggaaacaactttcaattcagctacacttttgaagacgtgcctttccacagcagctacgctcacagccagagtctggatcggctgatgaatcctctggtcgaccagtacctgtattatctgaacaagacacaaacaaatagtggaactcttcagcagtctcggctactgtttagccaagctggacccaccaacatgtctcttcaagctaaaaactggctgcctggaccttgctacagacagcagcgtctgtcaaagcaggcaaacgacaacaacaacagcaactttccctggactgcagctacaaagtatcatctaaatggccgggactcgttggttaatccaggaccagctatggccagtcacaaggatgacgaagaaaagtttttccccatgcatggaacccttatatttggtaaacaaggaacaaatgccaacgacgcggatttggaaaatgtcatgattacagatgaagaagaaatcaggaccaccaatcccgtggctacggagcagtacggaactgtatcaaataatttgcaaaactcaaacactggtccaactactggaactgtcaatcaccaaggagcgttacctggtatggtgtggcaggatcgagacgtgtacctgcagggacccatttgggccaagattcctcacaccgatggacactttcatccttctccactgatgggaggttttggactcaaacacccacctcctcaaatcatgatcaaaaacactcccgttccagccaatcctcccacaaacttcagttctgccaagtttgcttctttcatcacacagtattccacggggcaggtcagcgtggagatcgagtgggagctgcagaaggagaacagcaaacgctggaatcccgaaattcagtacacttccaactacaacaaatctgttaatgtggactttactgtggacactaatggtgtgtattcagagcctcgccccattggcaccagatacctgactcgtaatctgtaattgcttgttaatcaataaaccgtttaattcgtttcagttgaactttggtctctgcgaagggcgaattcgtttaaacctgcaggactagtccctttagtga

SEQ ID NO: 4965 - protein, 735 aa, Adeno-associated virus
MAADGYLPDWLEDTLSEGIRQWWKLKPGPPPPKPAERHKDDSRGLVLPGYKYLGPFNGLDKGEPVNEADAAALEHDKAYDRQLDSGDNPYLKYNHADAEFQERLKEDTSFGGNLGRAVFQAKKRVLEPLGLVEEPVKTAPGKKRPVEHPPVEPDSSSGTGKAGQQPARKRLNFGQTGDADSVPDPQPLGQPPAAPSGLGSTTMATGSGAPMADNNEGADGVGNSSGNWHCDSQWLGDRVITTSTRTWALPTYNNHLYKQISSQSGASNDNHYFGYSTPWGYFDFNRFHCHFSPRDWQRLINNNWGFRPKRLNFKLFNIQVKEVTQNDGTTTIANNLTSTVQVFTDSEYQLPYVLGSAHQGCLPPFPADVFMVPQYGYLTLNNGSQAVGRSSFYCLEYFPSQMLRTGNNFQFSYTFEDVPFHSSYAHSQSLDRLMNPLIDQYLYYLNKTQTNSGTLQQSRLLFSQAGPTNMSLQAKNRLPGPCYRQQRLSKQANDNNNSNFPWTAATKYHLNGRDSLVNPGPAMASHKDDEEKFFPMHGTLIFGKQGTNANDADLENVMITDEEEIRTTNPVATEQYGTVSNNLQNSNTGPTTGTVNHQGALPGMVWQDRDVYLQGPIWAKIPHTDGHFHPSPLVGGFGLKHPPPQIMIKNTPVPANPPTNFSSAKFASFITQYSTGQVSVEIEWELQKENSKRWNPEIQYTSNYNKSVNVDFTVDTNGVYSEPRPIGTRYLTRNL

SEQ ID NO: 4966 - DNA, 3159 bp, Adeno-associated virus
  source 1..3159: mol_type = unassigned DNA
gattgaatttagcggccgcgaattcgcccttgctgcgtcaactggaccaatgagaactttcctttcaatgattgcgtcgacaagatggtgatctggtgggaggagggaaagatgaccgccaaggtcgtggagtcggccaaagccattctcggaggaagcaaggtgcgcgtggaccagaaatgcaagtcctcggcccagatagacccgactcccgtgattgtcacctccaacaccgacatgtgcgccgtgattgacgggaactcaacgaccttcgaacaccagcagccgttgcaagaccggatgttcaaatttgaactcacccgccgtctggatcatgactttgggaaggtcaccaagcaggaagtcaaagactttttccggtgggcaaaggatcacgtggttgaggtggagcatgaattctacgtcaaaaagggtggagctaagaaaagacccgcccccagtgacgcagatataagtgagcccaaacgggcgcgcgagtcagttgcgcagccatcgacgtcagacgcggaagcttcgatcaactacgcggacaggtaccaaaacaaatgttctcgtcacgtgggcatgaatctgatgctgtttccctgcagacaatgcgagagaatgaatcagaattcaaatatctgcttcactcacggacagaaagactgtttagagtgctttcccgtgtcagaatctcaacccgtttctgtcgtcaaaaaggcgtatcagaaactttgctacattcatcatatcatgggaaaggtgccagacgcttgcactgcctgcgatctggtcaatgtggatttggatgactgcatctctgaacaataaatgatttaaatcaggtatggctgccgatggttatcttccagattggctcgaggacactctctctgaaggaataagacagtggtggaagctcaaacctggcccaccaccaccaaagcccgcagagcggcataaggacgacagcaggggtcttgtgcttcctgggtacaagtacctcggacccttcaacggactcgacaagggggagccggtcaacgaggcagacgccgcggccctcgagcacgacaaggcctacgaccggcagctcgacagcggagacaacccgtacctcaagtacaaccacgccgacgcggagtttcaggagcgccttaaagaagatacgtcttttgggggcaacctcggacgagcagtcttccaggcaaaaaagagggttcttgaacctctgggcctggttgaggaacctgttaaaacggctccgggaaaaaagaggccggtagagcaccctcctgtggagccagactcctcctcgggaaccggaaaagcgggccagcagcctgcaagaaaaagattgaatttcggtcagactggagacgcagactccgtacctgacccccagcctctcggacagccaccagcagccccctctggtctgggatctactacaatggctacaggcagtggcgcaccaatggcagacaataacgagggtgccgatggagtgggtaattcctcgggaaattggcattgcgattcccaatggctgggcgacagagtcatcaccaccagcacccgcacctgggccctgcccacctacaacaaccacctctacaagcaaatctccagccaatcaggagcctcaaacgacaaccactactttggctacagcaccccctgggggtattttgacttcaacagattccactgccacttttcaccacgtgactggcaaagactcatcaacaacaactggggattccgacccaagagactcaacttcaagctctttaacattcaagtcaaagaggtcacgcagaatgacggtacgacgacgattgccaataaccttaccagcacggttcaggtgtttactgactcggagtaccagctcccgtacgtcctcggctcggcgcatcaaggatgcctcccgccgtttccagcggacgtcttcatggtcccacagtatggatacctcaccctgaacaacgggagtcaggcagtaggacgctcttcattttactgcctggagtactttccttctcagatgctgcgtaccggaaacaactttcagttcagctacacttttgaagacgtgcctttccacagcagctacgctcacagccagagtctggatcggctgatgaatcctctgatcgaccagtacctgtattatctgaacaagacacaaacaaatagtggaactcttcagcagtctcggctactgtttagccaagctggacccaccaacatgtctcttcaagctaaaaaccggctgcctggaccttgctacagacagcagcgtctgtcaaagcaggcaaacgacaacaacaacagcaactttccctggaccgcagctacaaagtatcatctaaatggccgggactcgttggttaatccaggaccagctatggccagtcacaaggatgacgaagaaaagtttttccccatgcatggaacccttatatttggtaaacaaggaacaaatgccaacgacgcggatttggaaaatgtcatgattacagatgaagaagaaatcaggaccaccaatcccgtggctacggagcagtacggaactgtatcaaataatttgcaaaactcaaacactggtccaactactggaactgtcaatcaccaaggagcgttacctggtatggtgtggcaggatcgagacgtgtacctgcagggacccatttgggccaagattcctcacaccgatggacactttcatccttctccactggtgggaggttttggactcaaacacccacctcctcaaatcatgatcaaaaacactcccgttccagccaatcctcccacaaacttcagttctgccaagtttgcttctttcatcacacagtattccacggggcaggtcagcgtggagatcgagtgggagctgcagaaggagaacagcaaacgctggaatcccgaaattcagtacacttccaactacaacaaatctgttaatgtggactttactgtggacactaatggtgtgtattcagagcctcgccccattggcaccagatacctgactcgtaatctgtaattgcttgttaatcaataaaccgtttaattcgtttcagttgaactttggtctctgcgaagggcgaattcgtttaaacctgcaggactagtccctttagtgag

SEQ ID NO: 4967 - DNA, 2208 bp, Adeno-associated virus
  source 1..2208: mol_type = unassigned DNA
atggctgccgatggttatcttccagattggctcgaggacactctctctgaaggaataagacagtggtggaagctcaaacctggcccaccaccaccaaagcccgcagagcggcataaggacgacagcaggggtcttgtgcttcctgggtacaagtaccttggacccttcaacggactcgacaagggagagccggtcaacgaggcagacgccgcggccctcgagcacgacaaggcctacgaccggcagctcgacagcggagacaacccgtaccccaagtacaaccacgccgacgcggagttccaggagcgtcttaaagaagatacgtcttttgggggcaacctcggacgagcagtcttccaggcgaaaaagagggttcttgaacctctgggcctggttgaggaacctgttaagacggctccgggaaaaaagaggccggtagagcactctcctgcggagccagactcctcctcgggaaccggaaaagcgggccagcagcctgcaagaaagagattgaatttcggtcagactggagacgcagactccgtacctgacccccagcctctcggacagccaccagcagccccctctggtctgggaactaatacgatggctacaggcagtggcgcaccaatggcagacaataacgagggcgccgacggagtgggtaattcctcgggaaattggcattgcgattccacatggatgggcgacagagtcatcaccaccagcacccgcacctgggctctgcccacctacaacaaccacctctacaagcagatttccagccaatcaggagcctcaaacgacaaccactactttggctacagcaccccttgggggtattttgacttcaacagattccactgccacttttcgccacgtgactggcaaagactcatcaacaacaattggggattccggcccaaaagactcaacttcaagctctttaacattcaagtcaaggaggtcacgcagaatgacggtacgacgacgattgccaataaccttaccagcacggttcaggtgtttactgactcggagtaccagctcccgtacgtcctcggctcggcgcatcaaggatgcctcccgccgttcccagcagacgtcttcatggtgccacagtatggatacctcaccctgaacaacgggagtcaggcagtaggacgctcttcattttactgcctggagtactttccttctcagatgctgcgtaccggaaacaactttaccttcagctacacctttgaggacgttcctttccacagcagctacgcccacagccagagtttggaccgtctcatgaatcctctcatcgaccagtacctgtattacttgagcagaacaaacactccaagcggaaccaccacgcagtcaaggcttcagttttctcaggccggagcaagtgacattcgggaccagtctaggaactggcttcctggaccctgttaccgccagcagcgagtatcaaagacatctgcggataacaacaacagtgaatactcgtggactggagctaccaagtaccaccttaatggaagagactctctggtgaatccgggcccggccatggccagccacaaggacgatgaagaaaagttttttcctcagagcggggttctcatctttggaaaacaagactcgggaaaaactaatgtggacattgaaaaggtcatgattacagacgaagaggaaatcaggaccaccaatcccgtggctacggagcagtatggttctgtatctaccaacctccagagcggcaacacacaagcagctacctcagatgtcaacacacaaggcgttcttccaggcatggtgtggcaggacagagacgtgtacctgcaggggcccatctgggcaaagattccacacacggacggacattttcacccctctcccctcatgggcggattcggacttaaacaccctcccccgcagattctcatcaagaacaccccggtacctgcgaatccttcgactaccttcagtgcggcaaagtttgcttccttcattacacagtactccacggggcaggtcagcgtggagatcgagtgggagctgcagaaggagaacagcaaacgctggaatcccgagattcagtacacttccaactacaacaaatctgttaatgtggactttactgtggacactaatggtgtgtattcagagcctcgccccattggcaccaggtacctgactcgtaatctgtaa

SEQ ID NO: 4968 - protein, 735 aa, Adeno-associated virus
MAADGYLPDWLEDTLSEGIRQWWKLKPGPPPPKPAERHKDDSRGLVLPGYKYLGPFNGLDKGEPVNEADAAALEHDKAYDRQLDSGDNPYPKYNHADAEFQERLKEDTSFGGNLGRAVFQAKKRVLEPLGLVEEPVKTAPGKKRPVEHSPAEPDSSSGTGKAGQQPARKRLNFGQTGDADSVPDPQPLGQPPAAPSGLGTNTMATGSGAPMADNNEGADGVGNSSGNWHCDSTWMGDRVITTSTRTWALPTYNNHLYKQISSQSGASNDNHYFGYSTPWGYFDFNRFHCHFSPRDWQRLINNNWGFRPKRLNFKLFNIQVKEVTQNDGTTTIANNLTSTVQVFTDSEYQLPYVLGSAHQGCLPPFPADVFMVPQYGYLTLNNGSQAVGRSSFYCLEYFPSQMLRTGNNFTFSYTFEDVPFHSSYAHSQSLDRLMNPLIDQYLYYLSRTNTPSGTTTQSRLQFSQAGASDIRDQSRNWLPGPCYRQQRVSKTSADNNNSEYSWTGATKYHLNGRDSLVNPGPAMASHKDDEEKFFPQSGVLIFGKQDSGKTNVDIEKVMITDEEEIRTTNPVATEQYGSVSTNLQSGNTQAATSDVNTQGVLPGMVWQDRDVYLQGPIWAKIPHTDGHFHPSPLMGGFGLKHPPPQILIKNTPVPANPSTTFSAAKFASFITQYSTGQVSVEIEWELQKENSKRWNPEIQYTSNYNKSVNVDFTVDTNGVYSEPRPIGTRYLTRNL

SEQ ID NO: 4969 - DNA, 2208 bp, Adeno-associated virus
  source 1..2208: mol_type = unassigned DNA
atggctgccgatggttatcttccagattggctcgaggacactctctctgaaggaataagacagtggtggaagctcaaacctggcccaccaccaccaaagcccgcagagcggcataaggacgacagcaggggtcttgtgcttcctgggtacaagtaccttggacccttcaacggactcgacaagggagagccggtcaacgaggcagacgccgcggccctcgagcacgacaaggcctacgaccggcagctcgacggcggagacaacccgtacctcaagtacaaccacgccgacgcggagttccaggagcgtcttaaagaagatacgtcttttgggggcaacctcggacgagcagtcttccaggcgaaaaagagggttcttgaacctctgggcctggttgaggaacctgttaagacggctccgggaaaaaagaggccggtagagcactctcttgcggagccagactcctcctcgggaaccggaaaagcgggccagcagcctgcaagaaggagattgaatttcggtcagactggagacgcagactccgtacctgacccccagcctctcggacagccaccagcagccccctctggtctgggaactaatacgatggctacaggcagtggcgcaccaatggcagacaataacgagggcgccgacggagtgggtaattcctcgggaaattggcattgcgattccacatggatgggcgacagagtcatcaccaccagcacccgcacctgggctctgcccacctacaacaaccacctctacaggcagatttccagccaatcaggagcctcaaacgacaaccactactttggctacagcaccccttgggggtattttgacttcaacagattccactgccacttttcgccacgtgactggcaaagactcatcaacaacaattggggatcccggcccaaaagactcaacttcaagctctttaacattcaagtcaaggaggtcacgcagaatgacggtacgacgacgattgccaataaccttaccagcacggttcaggtgtttactgactcggagtaccagctcccgtacgtcctcggctcggcgcatcaaggatgcctcccgccgttcccagcagacgtcttcatggtgccacagtatggatacctcaccctgaacaacgggagtcaggcagtaggacgctcttcattttactgcctggagtactttccttctcagatgctgcgtaccggaaacaactttaccttcagctacacctttgaggacgttcctttccacagcagctacgcccacagccagagtttggaccgtctcatgaatcctctcgtcgaccagtacctgtattacttgagcagaacaaacactccaagcggaaccaccacgcagtcaaggcttcagttttctcaggccggagcaagtgacattcgggaccagtctaggaactggcttcctggaccctgttaccgccagcagcgagtatcaaagacatctgcggataacaacaacagtgaatactcgtggactggagctaccaagtaccaccttaatggaagagactctctggtgaatccgggcccggccatggccagccacaaggacgatgaagaaaagttttttcctcagagcggggttctcatctttggaaaacaagactcgggaaaaactaatgtggacattgaaaaggtcatgattacagacgaagaggaaatcaggaccaccaatcccgtggctacggagcagtatggttctgtatctaccaacctccagagcggcaacacacaagcagctacctcagatgtcaacacacaaggcgttcttccaggcatggtgtggcaggacagagacgtgtacctgcaggggcccatctgggcaaagattccacacacggacggacattttcacccctctcccctcatgggcggattcggacttaaacaccctcccccgcagattctcatcaagaacaccccggtacctgcgaatccttcgactaccttcagtgcggcaaagtttgcttccttcattacacagtactccacggggcaggtcagcgtggagatcgagtgggagctgcagaaggagaacagcaaacgctggaatcccgagattcagtacacttccaactacaacaaatctgttaatgtggactttactgtggacactaatggtgtgtattcagagcctcgccccattggcaccagatacctgactcgtaatctgtaa

SEQ ID NO: 4970 - protein, 735 aa, Adeno-associated virus
MAADGYLPDWLEDTLSEGIRQWWKLKPGPPPPKPAERHKDDSRGLVLPGYKYLGPFNGLDKGEPVNEADAAALEHDKAYDRQLDGGDNPYLKYNHADAEFQERLKEDTSFGGNLGRAVFQAKKRVLEPLGLVEEPVKTAPGKKRPVEHSLAEPDSSSGTGKAGQQPARRRLNFGQTGDADSVPDPQPLGQPPAAPSGLGTNTMATGSGAPMADNNEGADGVGNSSGNWHCDSTWMGDRVITTSTRTWALPTYNNHLYRQISSQSGASNDNHYFGYSTPWGYFDFNRFHCHFSPRDWQRLINNNWGSRPKRLNFKLFNIQVKEVTQNDGTTTIANNLTSTVQVFTDSEYQLPYVLGSAHQGCLPPFPADVFMVPQYGYLTLNNGSQAVGRSSFYCLEYFPSQMLRTGNNFTFSYTFEDVPFHSSYAHSQSLDRLMNPLVDQYLYYLSRTNTPSGTTTQSRLQFSQAGASDIRDQSRNWLPGPCYRQQRVSKTSADNNNSEYSWTGATKYHLNGRDSLVNPGPAMASHKDDEEKFFPQSGVLIFGKQDSGKTNVDIEKVMITDEEEIRTTNPVATEQYGSVSTNLQSGNTQAATSDVNTQGVLPGMVWQDRDVYLQGPIWAKIPHTDGHFHPSPLMGGFGLKHPPPQILIKNTPVPANPSTTFSAAKFASFITQYSTGQVSVEIEWELQKENSKRWNPEIQYTSNYNKSVNVDFTVDTNGVYSEPRPIGTRYLTRNL

SEQ ID NO: 4971 - protein, 738 aa, Adeno-associated virus
MAADGYLPDWLEDNLSEGIREWWDLKPGAPKPKANQQKQDDGRGLVLPGYKYLGPFNGLDKGEPVNAADAAALEHDKAYDQQLKAGDNPYLRYNHADAEFQERLQEDTSFGGNLGRAVFQAKKRVLEPLGLVEEAAKTAPGKKRPVEPSPQRSPDSSAGIGKKGQQPAKKRLNFGQTGDSESVPDPQPIGEPPAGPSGLGSGTMAAGGGAPMADNNEGADGVGSSSGNWHCDSTWLGDRVITTSTRTWALPTYNNHLYKQISNGTSGGSTNDNTYFGYSTPWGYFDFNRFHCHFSPRDWQRLINNNWGFRPKRLSFKLFNIQVKEVTQNEGTETIANNLTSTIQVFTDSEYQLPYVLGSAHQGCLPPFPADVFMIPQYGYLTLNNGSQAVGRSSFYCLEYFPSQMLRTGNNFEFSYTFEDVPFHSSCAHSQSSDRLMNPLIDQYLYYLSRTRSTGGTQGTQQLLFSQAGPANMSAQAKNWLPGPCYRQQRVSTTLSQNNNSNFAWTGATKYHLNGRDSLVNPGVAMATHKDDEERFFPSSGVLMFGKQGAGRDNVDYSSVMLTSEEEIKTTNPVATEQYGVVADNLQQTNTGPIVGNVNSQGALPGMVWQNRDVYLQGPIWAKIPHTDGNFHPSPLMGGFGLKHPPPQILIKNTPVPADPPTTFSQAKLASFITQYSTGQVSVEIEWELQKENSKRWNPEIQYTSNYYKSTNVDFAVNTEGTYSEPRPIGTRYLTRNL

SEQ ID NO: 4972 - DNA, 2217 bp, Adeno-associated virus
  source 1..2217: mol_type = unassigned DNA
atggctgctgacggttatcttccagattggctcgaggacaacctctctgagggcattcgcgagtggtgggacctgaaacctggagcccccaagcccaaggccaaccagcagaagcaggacgacggccggggtctggtgcttcttggctacaagtacctcggacccttcaacggactcgacaagggggagcccgtcaatgcggcggacgcagcggccctcgagcacgacaaggcctacgaccagcagctcaaagcgggtgacaatccgtacctgcggtataaccacgccgacgccgagtttcaggagcgtctgcaagaagatacgtcttttgggggcaacctcgggcgagcagtcttccaggccaagaagcgggttctcgaacctctcggtctggttgaggaagctgctaagacggctcctggaaagaagagaccggtagaaccgtcacctcagcgttcccccgactcctccacgggcatcggcaagaaaggccagcagcccgctaaaaagagactgaactttggtcagactggcgactcagagtcagtccccgaccctcaaccaatcggagaaccaccagcaggcccctctggtctgggatctggtacaatggctgcaggcggtggcgctccaatggcagacaataacgaaggcgccgacggagtgggtagttcctcaggaaattggcattgcgattccacatggctgggcgacagagtcatcaccaccagcacccgaacctgggccctgcccacctacaacaaccacctctacaagcaaatatccaatgggacatcgggaggaagcaccaacgacaacacctacttcggctacagcaccccctgggggtattttgacttcaacagattccactgccacttctcaccacgtgactggcagcgactcatcaacaacaactggggattccggccaaaaagactcagcttcaagctcttcaacatccaggtcaaggaggtcacgcagaatgaaggcaccaagaccatcgccaataaccttaccagcacgattcaggtatttacggactcggaataccagctgccgtacgtcctcggctccgcgcaccagggctgcctgcctccgttcccggcggacgtcttcatgattccccagtacggctaccttacactgaacaatggaagtcaagccgtaggccgttcctccttctactgcctggaatattttccatctcaaatgctgcgaactggaaacaattttgaattcagctacaccttcgaggacgtgcctttccacagcggctacgcacacagccagagcttggaccgactgatgaatcctctcatcgaccagtacctgtactacttatccagaactcagtccacaggaggaactcaaggtacccagcaattgttattttctcaagctgggcctgcaaacatgtcggctcaggctaagaactggctacctggaccttgctaccggcagcagcgagtctctacgacactgtcgcaaaacaacaacagcaactttgcttggactggtgccaccaaatatcacctgaacggaagagactctttggtaaatcccggtgtcgccatggcaacccacaaggacgacgaggaacgcttcttcccgtcgagtggagtcctgatgtttggaaaacagggtgctggaagagacaatgtggactacagcagcgttatgctaaccagcgaagaagaaattaaaaccactaaccctgtagccacagaacaatacggtgtggtggctgacaacttgcagcaaaccaatacagggcctattgtgggaaatgtcaacagccaaggagccttacctggcatggtctggcagaaccgagacgtgtacctgcagggtcccatctgggccaagattcctcacacggacggcaacttccacccttcaccgctaatgggaggatttggactgaagcacccacctcctcagatcctgatcaagaacacgccggtacctgcggatcctccaacgacgttcagccaggcgaaattggcttccttcattacgcagtacagcaccggacaggtcagcgtggaaatcgagtgggagctgcagaaggagaacagcaaacgctggaacccagagattcagtacacttcaaactactacaaatctacaaatgtggactttgctgtcaatacagagggaacttattctgagcctcgccccattggtactcgttacctcacccgtaatctgtaa

SEQ ID NO: 4973 - protein, 738 aa, Adeno-associated virus
MAADGYLPDWLEDNLSEGIREWWDLKPGAPKPKANQQKQDDGRGLVLLGYKYLGPFNGLDKGEPVNAADAAALEHDKAYDQQLKAGDNPYLRYNHADAEFQERLQEDTSFGGNLGRAVFQAKKRVLEPLGLVEEAAKTAPGKKRPVEPSPQRSPDSSTGIGKKGQQPAKKRLNFGQTGDSESVPDPQPIGEPPAGPSGLGSGTMAAGGGAPMADNNEGADGVGSSSGNWHCDSTWLGDRVITTSTRTWALPTYNNHLYKQISNGTSGGSTNDNTYFGYSTPWGYFDFNRFHCHFSPRDWQRLINNNWGFRPKRLSFKLFNIQVKEVTQNEGTKTIANNLTSTIQVFTDSEYQLPYVLGSAHQGCLPPFPADVFMIPQYGYLTLNNGSQAVGRSSFYCLEYFPSQMLRTGNNFEFSYTFEDVPFHSGYAHSQSLDRLMNPLIDQYLYYLSRTQSTGGTQGTQQLLFSQAGPANMSAQAKNWLPGPCYRQQRVSTTLSQNNNSNFAWTGATKYHLNGRDSLVNPGVAMATHKDDEERFFPSSGVLMFGKQGAGRDNVDYSSVMLTSEEEIKTTNPVATEQYGVVADNLQQTNTGPIVGNVNSQGALPGMVWQNRDVYLQGPIWAKIPHTDGNFHPSPLMGGFGLKHPPPQILIKNTPVPADPPTTFSQAKLASFITQYSTGQVSVEIEWELQKENSKRWNPEIQYTSNYYKSTNVDFAVNTEGTYSEPRPIGTRYLTRNL

SEQ ID NO: 4974 - protein, 735 aa, Adeno-associated virus
MAADGYLPDWLEDTLSEGIRQWWKLKPGPPPPKPAERHKDDSRGLVLPGYKYLGPFNGLDKGEPVNEADAAALEHDKAYDRQLDSGDNPYLKYNHADAEFQERLKEDTSFGGNLGRAVFQAKKRVLEPLGLVEPPVKTAPGKKRPVEHSPAEPDSSSGTGKAGQQPARKRLNFGQTGDADSVPDPQPLGQPPAAPSGLGSTTMATGSGAPMADNNEGADGVGNSSGNWHCDSQWLGDRVITTSTRTWALPTYNNHLYKQISSQSGASNDNHYFGYSTPWGYFDFNRFHCHFSPRDWQRLINNNWGFRPKRLNFKLFNIQVKEVTQNDGTTTIANNLTSTVQVFTDSEYQLPYVLGSAHQGCLPPFPADVFMVPQYGYLTLNNGSQAVGRSSFYCLEYFPSQMLRTGNNFQFSYTFEDVPFHSSYAHSQSLDRLMNPLIDQYLYYLNKTQSNSGTLQQSRLLFSQAGPTSMSLQAKNWLPGPCYRQQRLSKQANDNNNSNFPWTAATKYHLNGRDSLVNPGPAMASHKDDEEKFFPMHGTLIFGKQGTNANDADLDNVMITDEEEIRTTNPVATEQYGYVSNNLQNSNTGPTTGTVNHQGALPGMVWQDRDVYLQGPIWAKIPHTDGHFHPSPLMGGFGLKHPPPQIMIKNTPVPANPPTNFSSAKFASFITQYSTGQVSVEIEWELQKENSKRWNPEIQYTSNYNKSVNVDFTVDTNGVYSEPRPIGTRYLTRNL

SEQ ID NO: 4975 - protein, 735 aa, Adeno-associated virus
MAADGYLPDWLEDTLSEGIRQWWKLKPGPPPPKPAERHKDDSRGLVLPGYKYLGPFNGLDKGEPVNEADAAALEHDKAYDRQLDSGDNPYLKYNHADAEFQERLKEDTSFGGNLGRAVFQAKKRVLEPLGLVEGPVKTAPGKKRPVEHSPAEPDSSSGTGKAGQQPARKRLNFGQTGDADSVPDPQPLGQPPAAPSGLGSTTMATGSGAPMADNNEGADGVGNSSGNWHCDSQWLGDRVITTSTRTWALPTYNNHLYKQISSQSGASNDNHYFGYSTPWGYFDFNRFHCHFSPRDWQRLINNNWGFRPKRLNFKLFNIQVKEVTQNDGTTTIANNLTSTVQVFTDSEYQLPYVLGSAHQGCLPPFPADVFMVPQYGYLTLNNGSQAVGRSSFYCLEYFPSQMLRTGNNFQFSYTFEDVPFHSSYAHSQSLDRLMNPLIDQYLYYLNKTQSNSGTLQQSRLLFSQAGPTSMSLQAKNWLPGPCYRQQRLSKQANDNNNSNFPWTAATKYHLNGRDSLVNPGPAMASHKDDEEKFFPMHGTLIFGKQGTNANDADLDNVMITDEEEIRTTNPVATEQYGYVSNNLQNSNTGPTTGTVNHQGALPGMVWQDRDVYLQGPIWAKIPHTDGHFHPSPLMGGFGLKHPPPQIMIKNTPVPANPPTNFSSAKFASFITQYSTGQVSVEIEWELQKENSKRWNPEIQYTSNYNKSVNVDFTVDTNGVYSEPRPIGTRYLTRNL

SEQ ID NO: 4976 - DNA, 2208 bp, Adeno-associated virus
  source 1..2208: mol_type = unassigned DNA
atggctgccgatggttatcttccagattggctcgaggacactctctctgaaggaataagacagtggtggaagctcaaacctggcccaccaccaccaaagcccgcagagcggcataaggacgacagcaggggtcttgtgcttcctgggtacaagtacctcggacccttcaacggactcgacaagggggagccggtcaacgaggcagacgccgcggccctcgagcacgacaaggcctacgaccggcagctcgacagcggagacaacccgtacctcaagtacaaccacgccgacgcggagtttcaggagcgtcttaaagaagatacgtcttttgggggcaacctcggacgagcagtcttccaggcgaaaaagagggttcttgaacctctgggcctggttgagggacctgttaagacggctccgggaaaaaagaggccggtagagcactctcctgcggagccagactcctcctcgggaaccggaaaagcgggccagcagcctgcaagaaaaagattgaattttggtcagactggagacgcagactccgtacctgacccccagcctctcggacagccaccagcagccccctctggtttgggatctactacaatggctacaggcagtggcgcaccaatggcagacaataacgagggtgccgatggagtgggtaattcctcaggaaattggcattgcgattcccaatggctgggcgacagagtcatcaccaccagcacccgaacctgggccctgcccacctacaacaaccacctctacaagcaaatctcaagccaatcaggagcctcaaacgacaaccactactttggctacagcaccccttgggggtattttgacttcaacagattccactgccacttttcaccacgtgactggcaaagactcatcaacaacaactggggattccgacccaagagactcaacttcaagctctttaacattcaagtcaaagaggtcacgcagaatgacggtacgacgacgattgccaataaccttaccagcacggttcaggtgtttactgactcggagtaccagctcccgtacgtcctcgggtcggcgcatcaaggatgcctcccgccgtttccagcggacgtcttcatggtcccacagtatggatacctcaccctgaacaacgggagtcaggcggtaggacgctcttccttttactgcctggagtactttccttctcagatgcttcgtactggaaacaactttcagttcagctacacctttgaagacgttcctttccacagcagctacgctcacagccagagtctggatcggctgatgaatcctctgatcgaccagtacctgtattatctgaacaaaacacaatcaaatagtggaactcttcagcagtctcggctactgtttagtcaagctggacccaccagcatgtctcttcaagctaaaaactggctacctggaccttgctacagacagcagcgtctgtcaaagcaggcaaacgacaacaacaacagcaactttccctggactgcggctacaaagtatcacctaaatggccgggactcgttggttaatccaggaccagctatggccagtcacaaagacgatgaagaaaagtttttccccatgcatggaaccctgatatttggtaaacaaggaacaaatgctaacgacgcggatttggacaatgtcatgattacagatgaagaagaaatccgcaccaccaatcccgtggctacggagcagtacggatatgtgtcaaataatttgcaaaactcaaatactggtccaactactggaactgtcaatcaccaaggagcgttacctggcatggtgtggcaggatcgagacgtgtacctgcagggacccatttgggccaagattcctcacaccgatggacactttcatccttctccactgatgggaggttttgggctcaaacacccgcctcctcagatcatgatcaaaaacactcccgttccagccaatcctcccacaaacttcagttctgccaagtttgcttctttcatcacacagtattccacggggcaggtcagcgtggagatcgagtgggagctgcagaaagagaacagcaaacgctggaatcccgaaattcagtacacttccaactacaacaaatctgttaatgtggactttactgtggacactaatggcgtgtattcagagcctcgccccattggcaccagatacctgactcgtaatctgtaa

SEQ ID NO: 4977 - DNA, 2211 bp, Adeno-associated virus
  source 1..2211: mol_type = unassigned DNA
atggctgccgatggttatcttccagattggctcgaggacaacctctctgagggcattcgcgagtggtgggacttgaaacctggagccccgaagcccaaagccaaccagcaaaagcaggacgacggccggggtctggtgcttcctggctacaagtacctcggacccttcaacggactcgacaagggggagcccgtcaacgcggcggacgcagcggccctcgagcacgacaaggcctacgaccagcagctcaaagcgggtgacaatccgtacctgcggtataaccacgccgacgccgagtttcaggagcgtctgcaagaagatacgtcttttgggggcaacctcgggcgagcagtcttccaggccaagaagcgggttctcgaacctctcggtctggttgaggaaggcgctaagacggctcctggaaagaaacgtccggtagagcagtcgccacaagagccagactcctcctcgggcatcggcaagacaggccagcagcccgctaaaaagagactcaattttggtcagactggcgactcagagtcagtccccgatccacaacctctcggagaacctccagcaacccccgctgctgtgggacctactacaatggcttcaggcggtggcgcaccaatggcagacaataacgaaggcgccgacggagtgggtaatgcctcaggaaattggcattgcgattccacatggctgggcgacagagtcatcaccaccagcacccgcacctgggccttgcccacctacaataaccacctctacaagcaaatctccagtgcttcaacgggggccagcaacgacaaccactacttcggctacagcaccccctgggggtattttgatttcaacagattccactgccacttttcaccacgtgactggcagcgactcatcaacaacaattggggattccggcccaagagactcaacttcaaactcttcaacatccaagtcaaggaggtcacgacgaatgatggcgtcacaaccatcgctaataaccttaccagcacggttcaagtcttctcggactcggagtaccagcttccgtacgtcctcggctctgcgcaccagggctgcctccctccgttcccggcggacgtgttcatgattccgcaatacggctacctgacgctcaacaatggcagccaagccgtgggacgttcatccttttactgcctggaatatttcccttctcagatgctgagaacgggcaacaactttaccttcagctacacctttgaggaagtgcctttccacagcagctacgcgcacagccagagcctggaccggctgatgaatcctctcatcgaccaatacctgtattacctgaacagaactcaaaatcagtccggaagtgcccaaaacaaggacttgctgtttagccgtgggtctccagctggcatgtctgttcagcccaaaaactggctacctggaccctgttatcggcagcagcgcgtttctaaaacaaaaacagacaacaacaacagcaattttacctggactggtgcttcaaaatataacctcaatgggcgtgaatccatcatcaaccctggcactgctatggcctcacacaaagacgacgaagacaagttctttcccatgagcggtgtcatgatttttggaaaagagagcgccggagcttcaaacactgcattggacaatgtcatgattacagacgaagaggaaattaaagccactaaccctgtggccaccgaaagatttgggaccgtggcagtcaatttccagagcagcagcacagaccctgcgaccggagatgtgcatgctatgggagcattacctggcatggtgtggcaagatagagacgtgtacctgcagggtcccatttgggccaaaattcctcacacagatggacactttcacccgtctcctcttatgggcggctttggactcaagaacccgcctcctcagatcctcatcaaaaacacgcctgttcctgcgaatcctccggcggagttttcagctacaaagtttgcttcattcatcacccaatactccacaggacaagtgagtgtggaaattgaatgggagctgcagaaagaaaacagcaagcgctggaatcccgaagtgcagtacacatccaattatgcaaaatctgccaacgttgattttactgtggacaacaatggactttatactgagcctcgccccattggcacccgttaccttacccgtcccctgtaa

SEQ ID NO: 4978 - DNA, 2208 bp, Adeno-associated virus
  source 1..2208: mol_type = unassigned DNA
atggctgccgatggttatcttccagattggctcgaggacactctctctgaaggaacaagacagtggtggaagctcaaacctggcccaccaccaccaaagcccgcagagcggcataaggacgacagcaggggtcttgtgcttcctgggtacaagtacctcggacccttcaacggactcgacaagggggagccggtcaacgaggcagacgccgcggccctcgagcacgacaaggcctacgaccggcagctcgacagcggagacaacccgtacctcaagtacaaccacgccgacgcggagtttcaggagcgtcttaaagaagatacgtcttttgggggcaacctcggacgagcagtcttccaggcgaaaaagagggttcttgaacctctgggcctggttgaggaacctgttaagacggctccgggaaaaaagaggccggtagagcactctcctgcggagccagactcctcctcgggaaccggaaaagcgggccagcagcctgcaagaaaaagattgaattttggtcagactggagacgcagactccgtacctgacccccagcctctcggacagccaccagcagccccctctggtttgggatctactacaatggctacaggcagtggcgcaccaatggcagacaataacgagggtgccgatggagtgggtaattcctcaggaaattggcattgcgattcccaatggctgggcgacagagtcatcaccaccagcacccgaacctgggccctgcccacctacaacaaccacctctacaagcaaatctcaagccaatcaggagcctcaaacgacaaccactactttggctacagcaccccttgggggtattttgacttcaacagattccactgccacttttcaccacgtgactggcaaagactcatcaacaacaactggggattccgacccaagagactcaacttcaagctctttaacattcaagtcaaagaggtcacgcagaatgacggtacgacgacgattgccaataaccttaccagcacggttcaggtgtttactgactcggagtaccagctcccgtacgtcctcgggtcggcgcatcaaggatgcctcccgccgtttccagcggacgtcttcatggtcccacagtatggatacctcaccctgaacaacgggagtcaggcggtaggacgctcttccttttactgcctggagtactttccttctcagatgcttcgtactggaaacaactttcagttcagctacacctttgaagacgttcctttccacagcagctacgctcacagccagagtctggatcggctgatgaatcctctgatcgaccagtacctgtattatctgaacaaaacacaatcaaatagtggaactcttcagcagtctcggctactgtttagtcaagctggacccaccagcatgtctcttcaagctaaaaactggctacctggaccttgctacagacagcagcgtctgtcaaagcaggcaaacgacaacaacaacagcaactttccctggactgcggctacaaagtaccacctaaatggccgggactcgttggttaatccaggaccagctatggccagtcacaaagacgatgaagaaaagtttttccccatgcatggaaccctgatatttggtaaacaaggaacaaatgctaacgacgcggatttggacaatgtcatgattacagatgaagaagaaatccgcaccaccaatcccgtggctacggagcagtacggatatgtgtcaaataatttgcaaaactcaaatactggtccaactactggaactgtcaatcaccaaggagcgttacctggcatggtgtggcaggatcgagacgtgtacctgcagggacccatttgggccaagattcctcacaccgatggacactttcatccttctccactgatgggaggttttgggctcaaacacccgcctcctcagatcatgatcaaaaacactcccgttccagccaatcctcccacaaacttcagttctgccaagtttgcttctttcatcacacagtattccacggggcaggtcagcgtggagatcgagtgggagctgcagaaagagaacagcaaacgctggaatcccgaaattcagtacacttccaactacaacaaatctgttaatgtggactttactgtggacactaatggcgtgtattcagagcctcgccccattggcaccagatacctgactcgtaatctgtaa

SEQ ID NO: 4979 - DNA, 2217 bp, Adeno-associated virus
  source 1..2217: mol_type = unassigned DNA
atggctgctgacggttatcttccagattggctcgaggacaacctctctgagggcattcgcgagtggtgggacctgaaacctggagcccccaagcccaaggccaaccagcagaagcaggacgacggccggggtctggtgcttcctggctacaagtacctcggacccttcaacggactcgacaagggggagcccgtcaacgcggcggacgcagcggccctcgagcacgacaaggcctacgaccagcagctcaaagcgggtgacaatccgtacctgcggtataaccacgccgacgccgagtttcaggagcgtctgcaagaagatacgtcttttgggggcaacctcgggcgagcagtcttccaggccaagaagcgggttctcgaacctctcggtctggttgaggaagctgctaagacggctcctggaaagaagagaccggtagaaccgtcacctcagcgttcccccgactcctccacgggcatcggcaagaaaggccagcagcccgctaaaaagagactgaactttggtcagactggcgactcagagtcagtccccgaccctcaaccaatcggagaaccacctgcaggcccctctggtctgggatctggtacaatggctgcaggcggtggcgctccaatggcagacaataacgaaggcgccgacggagtgggtagttcctcaggaaattggcattgcgattccacatggctgggcgacagagtcatcaccaccagcacccgaacctgggccctgcccacctacaacaaccacctctacaagcaaatatccaatgggacatcgggagggagcaccaacgacaacacctacttcggctacagcaccccctgggggtattttgacttcaacagattccactgccacttctcaccacgtgactggcagcgactcatcaacaacaactggggattccggccaaaaagactcagcttcaagctcttcaacatccaggtcaaggaggtcacgcagaatgaaggcaccaagaccatcgccaataaccttaccagcacgattcaggtatttacggactcggaataccagctgccgtacgtcctcggctccgcgcaccagggctgcctgcctccgttcccggcggacgtcttcatgattccccagtacggctaccttacactgaacaatggaagtcaagccgtaggccgttcctccttctactgcctggaatattttccatctcaaatgctgcgaactggaaacaattttgaattcagctacaccttcgaggacgtgcctttccacagcagctacgcacacagccagagcttggaccgactgatgaatcctctcatcgaccagtacctgtactacttatccagaactcagtccacaggaggaactcaaggtacccagcaattgttattttctcaagctgggcctgcaaacatgtcggctcaggctaagaactggctacctggaccttgctaccggcagcagcgagtctctacgacactgtcgcaaaacaacaacagcaactttgcttggactggtgccaccaaatatcacctgaacggaagagactctttggtaaatcccggtgtcgccatggcaacccacaaggacgacgaggaacgcttcttcccgtcgagtggagtcctgatgtttggaaaacagggtgctggaagagacaatgtggactacagcagcgttatgctaaccagcgaagaagaaattaaaaccactaaccctgtagccacagaacaatacggtgtggtggctgacaacttgcagcaaaccaatacagggcctattgtgggaaatgtcaacagccaaggagccttacctggcatggtctggcagaaccgagacgtgtacctgcagggtcccatctgggccaagattcctcacacggacggcaactgccacccttcaccgctaatgggaggatttggactgaagcacccacctcctcagatcctgatcaagaacacgccggtacctgcggatcctccaacaacgttcagccaggcgaaattggcttccttcattacgcagtacagcaccggacaggtcagcgtggaaatcgagtgggagctgcagaaggagaacagcaaacgctggaacccagagattcagtacacttcaaactactacaaatctacaaatgtggactttgctgtcaatacagagggaacttattctgagcctcgccccattggtactcgttacctcacccgtaatctgtaa

SEQ ID NO: 4980 - protein, 735 aa, Adeno-associated virus
MAADGYLPDWLEDTLSEGTRQWWKLKPGPPPPKPAERHKDDSRGLVLPGYKYLGPFNGLDKGEPVNEADAAALEHDKAYDRQLDSGDNPYLKYNHADAEFQERLKEDTSFGGNLGRAVFQAKKRVLEPLGLVEEPVKTAPGKKRPVEHSPAEPDSSSGTGKAGQQPARKRLNFGQTGDADSVPDPQPLGQPPAAPSGLGSTTMATGSGAPMADNNEGADGVGNSSGNWHCDSQWLGDRVITTSTRTWALPTYNNHLYKQISSQSGASNDNHYFGYSTPWGYFDFNRFHCHFSPRDWQRLINNNWGFRPKRLNFKLFNIQVKEVTQNDGTTTIANNLTSTVQVFTDSEYQLPYVLGSAHQGCLPPFPADVFMVPQYGYLTLNNGSQAVGRSSFYCLEYFPSQMLRTGNNFQFSYTFEDVPFHSSYAHSQSLDRLMNPLIDQYLYYLNKTQSNSGTLQQSRLLFSQAGPTSMSLQAKNWLPGPCYRQQRLSKQANDNNNSNFPWTAATKYHLNGRDSLVNPGPAMASHKDDEEKFFPMHGTLIFGKQGTNANDADLDNVMITDEEEIRTTNPVATEQYGYVSNNLQNSNTGPTTGTVNHQGALPGMVWQDRDVYLQGPIWAKIPHTDGHFHPSPLMGGFGLKHPPPQIMIKNTPVPANPPTNFSSAKFASFITQYSTGQVSVEIEWELQKENSKRWNPEIQYTSNYNKSVNVDFTVDTNGVYSEPRPIGTRYLTRNL

SEQ ID NO: 4981 - DNA, 2208 bp, Adeno-associated virus
  source 1..2208: mol_type = unassigned DNA
atggctgccgatggttatcttccagattggctcgaggacactctctctgaaggaataagacagtggtggaagctcaaacctggcccaccaccaccaaagcccgcagagcggcatcaggacaacagcaggggtcttgtgcttcctgggtacaagtacctcggaccctccaacggactcgacaaaggagagccggtcaacgaggcagacgccgcggccctcgagcacgacaaggcctacgaccggcagctcgacagcggagacaacccgtacctcaagtacaaccacgccgacgcggagtttcaggagcgtcttaaagaagatacgtcttttgggggcaacctcggacgagcagtcttccaggcgaaaaagagggttcttgaacctctgggcctggttgaggaacctgttaagacggctccgggaaaaaagaggccggtagagcactctcctgtggagccagactcctcctcgggaaccggaaaagcgggccatcagcctgcgagaaagagattgaattttggtcagactggagacgcagactccgtacctgacccccagcctctcggacagccaccagcagcccccacaagtttgggatctactacaatggctacaggcagtggcgcaccaatggcagacaataacgagggtgccgatggagtgggtaattcctcaggaaattggcattgcgattcccaatggctgggcgacagagtcatcaccaccagcacccgaacctgggccctgcccacctacaacaaccacctctacaagcaaatctccagccaatcaggagcctcgaacgacaaccactactttggctgcagcaccccctgggggtattttgacttcaacagattccactgtcacttctccccacgtgattggcaaagactcatcaacaacaactggggattccgacccaagagactcaacttcaagctctttaacattcaagtcaaagaggtcacgcagaatgacggtacgacgacgattgccaataaccttaccagcacggttcaggtgtttactgactcggagtacccgctcccgtacgtcctcggctcggcgcatcaaggatgcctcccgccgtttccagcggacgtcttcatggtcccacagtatggatacctcaccctgaacaacgggagtcaggcggtaggacgctcttccttttactgcctggagtactttccttctcagatgctgcgtaccggaaacaactttaccttcagctacacctttgaggacgttcctttccacagcagctacgctcacagccagagtttggaccggctgatgaatcctctgatcgaccagtatctatattatctgaacaggacacaatcaaatagtggaactcttcagcagtctaggctactgtttagccaagctggacccaccagcatgtctcttcaagctaaaaactggctgcctggaccttgctacagacagcagcgtctttcaaagcaggcaaacgacaacaacaacagcaactttccctggactgcggctacaaagtatcatctaaatggccgggactcgttggttaatccaggaccagctatggccagccacaaagacgatgaagaaaagtttttccccatgcatggaaccctgatatttggtaaacaaggaacaaatgctaacgacgcggatttggagcatgttatgattacagatgaagaagaaatcaggaccaccaatcctgtggctacagagcagtacggaaacgtgtcaaataatttgcaaaactcaaatactggtccaactacagaaaatgtcaatcaccagggagcgttacctggtatggtgtggcaggatcgagacgtgtacctgcagggacccatttgggccaagattcctcacaccgacggacactttcacccttctccactgatgggaggttttggactcaaacacccgcctcctcaaatcatgatcaaaaacactcccgttccagccaatcctcccacaaacttcagttctgccaagtttgcttctttcatcacacagtattccacgggccaggtcagcgtggagattgagtgggagctgcagaaggagaacagcaaacgctggaaccccgagatccagtatacttccaactacaacaaatctgttaatgtggactttactgtggacactaatggtgtgtattcagagccttgccccattggcaccagatacctgactcgtaatctgtaa

SEQ ID NO: 4982 - protein, 735 aa, Adeno-associated virus
MAADGYLPDWLEDTLSEGIRQWWKLKPGPPPPKPAERHQDNSRGLVLPGYKYLGPSNGLDKGEPVNEADAAALEHDKAYDRQLDSGDNPYLKYNHADAEFQERLKEDTSFGGNLGRAVFQAKKRVLEPLGLVEEPVKTAPGKKRPVEHSPVEPDSSSGTGKAGHQPARKRLNFGQTGDADSVPDPQPLGQPPAAPTSLGSTTMATGSGAPMADNNEGADGVGNSSGNWHCDSQWLGDRVITTSTRTWALPTYNNHLYKQISSQSGASNDNHYFGCSTPWGYFDFNRFHCHFSPRDWQRLINNNWGFRPKRLNFKLFNIQVKEVTQNDGTTTIANNLTSTVQVFTDSEYPLPYVLGSAHQGCLPPFPADVFMVPQYGYLTLNNGSQAVGRSSFYCLEYFPSQMLRTGNNFTFSYTFEDVPFHSSYAHSQSLDRLMNPLIDQYLYYLNRTQSNSGTLQQSRLLFSQAGPTSMSLQAKNWLPGPCYRQQRLSKQANDNNNSNFPWTAATKYHLNGRDSLVNPGPAMASHKDDEEKFFPMHGTLIFGKQGTNANDADLEHVMITDEEEIRTTNPVATEQYGNVSNNLQNSNTGPTTENVNHQGALPGMVWQDRDVYLQGPIWAKIPHTDGHFHPSPLMGGFGLKHPPPQIMIKNTPVPANPPTNFSSAKFASFITQYSTGQVSVEIEWELQKENSKRWNPEIQYTSNYNKSVNVDFTVDTNGVYSEPCPIGTRYLTRNL

SEQ ID NO: 4983 - DNA, 2196 bp, Adeno-associated virus
  source 1..2196: mol_type = unassigned DNA
atggctgctgacggttatcttccagattggctcgaggacaacctctctgagggcattcgcgagtggtgggcgctgaaacctggagccccgcaacccaaagccaaccagcaaaagcaggacgacggccggggtctggtgcttcctggctacaagtacctcggacccttcaacggactcgacaagggggagcccgtcaacgaggcggacgccgcggccctcgagcacgacaaggcctacgaccagcagctcaaagcgggtgacaatccgtacctgcggtataatcacgccgacgccgagtttcaagagcgtctgcaagaagatacgtcctttgggggcaacctcgggcgagcagtcttccaggccaaaaagagggtactcgagcctctgggtctggttgaggaaggcgctaagacggctcctggaaagaagcggccagtagaaccggactccagctcgggcatcggcaagtcaggccagcagcccgcgaaaaagagactgaattttgggcagactggcgactcagagtcagtgcctgacccccaacctctctcagaaccacccgcaggtccctctggtctgggatctggtacaatggctgctggcggtggcgctccaatggcagacaataacgaaggcgccgacggagtgggtaatgtctcaggaaattggcattgcgattccacatggctgggcgaccgagtcatcaccaccagcactcggacctgggccctccccacctacaacaaccacctctacaagcaaatctccaacgggacctcgggaggcagcagcaacgacaacacctactttggctacagcaccccctgggggtattttgactttaacagattccactgccacttttcaccacgtgactggcagcgactcatcaacaacaactgggggttccggcccaagaagctcaacttcaagctcttcaacatccaggtcaaggaggtcacccagaatgaaggcaccaagaccatcgccaataacctcaccagcacggtgcaggtctttacggactcggagtaccagctcccgtacgtgctcggctctgcccaccagggctgcctgcctccgttcccggcggacgtgttcatgattccgcagtacgggtacctgacgctgaacaacgggagccaggccgtggggcgatcctccttctactgcctggagtactttccctcgcagatgctgagaacgggcaacaactttaccttcagctacaccttcgaggacgtgcccttccacagcagctacgcgcacagccagagcctggaccggctgatgaacccgctgattgaccagtacctgtactacctgtctcggactcagaccaacgggaccaatgccacgcagactctgttgtttgctcaggccgggcctcagaacatgtcggctcaggccaagaactggctgcctggtccttgctatcggcagcagcgcgtctctacgacagtgtcgcaaaacaacaacagcaactttacctggaccggggcgaccaagtaccacctgaacggccgagactccctggtgagccccggtgtcgccatggcaacgcacaaggacgacgaggagcgcttcttcccgagcagcggggtcctgatgtttggcaagcagggcgctggaaaggacaatgtcgagtacaccaacgtgatgctcaccagcgaggaggagatcaagaccaccaaccctgtggccacggagcagtacggcgtggtggctgacaatctgcagcagaccaactcagctcccattgtgggggcagtcaacagccagggggccttacccggtatggtctggcagaaccgggacgtgtacctgcagggtcccatctgggccaagatcccgcatacggacggcaactttcacccgtctcctctcatgggcggctttggactgaaacacccgcctccccagatcctgatcaaaaacacgccggtacctgcggatcccccggtgaactttacggacgctaagctggcgagtttcatcacgcagtacagcaccgggcaggtcagcgtggagattgagtgggagctgcagaaggagaacagcaagcgctggaatcccgagattcagtacacttccaattattataaatcagctaatgtggactttgccgtcaatgcagatggtgtatatagtgaaccccgccccattggcactcgttacctcacccgtaatctgtaa

SEQ ID NO: 4984 - protein, 731 aa, Adeno-associated virus
MAADGYLPDWLEDNLSEGIREWWALKPGAPQPKANQQKQDDGRGLVLPGYKYLGPFNGLDKGEPVNEADAAALEHDKAYDQQLKAGDNPYLRYNHADAEFQERLQEDTSFGGNLGRAVFQAKKRVLEPLGLVEEGAKTAPGKKRPVEPDSSSGIGKSGQQPAKKRLNFGQTGDSESVPDPQPLSEPPAGPSGLGSGTMAAGGGAPMADNNEGADGVGNVSGNWHCDSTWLGDRVITTSTRTWALPTYNNHLYKQISNGTSGGSSNDNTYFGYSTPWGYFDFNRFHCHFSPRDWQRLINNNWGFRPKKLNFKLFNIQVKEVTQNEGTKTIANNLTSTVQVFTDSEYQLPYVLGSAHQGCLPPFPADVFMIPQYGYLTLNNGSQAVGRSSFYCLEYFPSQMLRTGNNFTFSYTFEDVPFHSSYAHSQSLDRLMNPLIDQYLYYLSRTQTNGTNATQTLLFAQAGPQNMSAQAKNWLPGPCYRQQRVSTTVSQNNNSNFTWTGATKYHLNGRDSLVSPGVAMATHKDDEERFFPSSGVLMFGKQGAGKDNVEYTNVMLTSEEEIKTTNPVATEQYGVVADNLQQTNSAPIVGAVNSQGALPGMVWQNRDVYLQGPIWAKIPHTDGNFHPSPLMGGFGLKHPPPQILIKNTPVPADPPVNFTDAKLASFITQYSTGQVSVEIEWELQKENSKRWNPEIQYTSNYYKSANVDFAVNADGVYSEPRPIGTRYLTRNL

SEQ ID NO: 4985 - DNA, 2196 bp, Adeno-associated virus
  source 1..2196: mol_type = unassigned DNA
atggctgctgacggttatcttccagattggctcgaggacaacctctctgagggcattcgcgagtggtgggcgctgaaacctggagccccgcaacccaaagccaaccagcaaaagcaggacgacggccggggtctggtgcttcctggctacaagtacctcggacccttcaacggactcgacaagggggagcccgtcaacgaggcggacgccgcggccctcgagcacgacaaggcctacgaccagcagctcaaagcgggtgacaatccgtacctgcggtataatcacgccgacgccgagtttcaagagcgtctgcaagaagatacgtcctttgggggcaacctcgggcgagcagtcttccaggccaaaaagagggtactcgagcctctgggtctggttgaggaaggcgctaagacggctcctggaaagaagcggccagtagaaccggactccagctcgggcatcggcaagtcaggccggcagcccgcgaaaaagagactgaattttgggcagactggcgactcagagtcagtgcctgacccccaacctctctcagaaccacccgcaggtccctctggtctgggatctggtacaatggctgcaggcggtggcgctccaatggcagacaataacgaaggcgccgacggagtgggtaatgcctcaggaaattggcattgcgattccacatggctgggcgaccgagtcatcaccaccagcactcggacctgggccctccccacctacaacaaccacctctacaagcaaatctccaacgggacctcgggaggcagcagcaacgacaacacctactttggctacagcaccccctgggggtattttgactttaacagattccactgccacttttcaccacgtgactggcagcgactcatcaacaacaactggggattccggcccaagaggctcaacttcaagctcttcaacatccaggtcaaggaggtcacccagaatgaaggcaccaagaccatcgccaataacctcaccagcacggtgcaggtctttacggactcgaagtaccagctcccgtacgtgctcggctctgcccaccagggctgcctgcctccgttcccggcggacgtgttcatgattccgcagtacgggtacctgacgctgaacaacgggagccaggccgtggggcgatcctccttctactgcctggagtactttccctcgcagatgctgagaacgggcaacaactttaccttcagctacaccttcgaggacgtgcccttccacagcagctacgcgcacagccagagcctggaccggctgatgaacccgctgattgaccagtacctgtactacctgtctcggactcagaccaacgggaccaatgccacgcagactctgttgtttgctcaggccgggcctcagaacatgtcggctcaggccaagaactggctgcctggtccttgctatcggcagcagcgcgtctctacgacagtgtcgcaaaacaacaacagcaactttacctggaccggggcgaccaagtaccacctgaacggccgagactccctggtgaaccccggtgtcgccatggcaacgcacaaggacgacgaggagcgcttcttcccgagcagcggggtcctgatgtttggcaagcagggcgctggaaaggacaatgtcgagtacaccaacgtgatgctcaccagcgaggaggagatcaagaccaccaaccctgtggccacggagcagtacggtgtggtggctgacaatctgcagcagaccaactcggctcccattgtgggggcagtcaacagccagggggccttacccggtatggtctggcagaaccgggacgtgtacctgcagggtcccatctgggccaagatcccgcatacggacggcaactttcacccgtctcctctcatgggcggctttggactgaaacacccgcctccccagatcctgatcaaaaacacgccggtacctgcggatcccccggtgaactttacggacgctaagctggcgagtttcatcacgcagtacagcaccgggcaggtcagcgtggagattgagtgggagctgcagaaggagaacagcaagcgctggaatcccgagattcagtacacttccaattattataaatcagctaatgtggactttgccgtcaatgcagatggtgtatatagtgaaccccgccccattggcactcgttacctcacccgtaatctgtaa

SEQ ID NO: 4986 - protein, 731 aa, Adeno-associated virus
MAADGYLPDWLEDNLSEGIREWWALKPGAPQPKANQQKQDDGRGLVLPGYKYLGPFNGLDKGEPVNEADAAALEHDKAYDQQLKAGDNPYLRYNHADAEFQERLQEDTSFGGNLGRAVFQAKKRVLEPLGLVEEGAKTAPGKKRPVEPDSSSGIGKSGRQPAKKRLNFGQTGDSESVPDPQPLSEPPAGPSGLGSGTMAAGGGAPMADNNEGADGVGNASGNWHCDSTWLGDRVITTSTRTWALPTYNNHLYKQISNGTSGGSSNDNTYFGYSTPWGYFDFNRFHCHFSPRDWQRLINNNWGFRPKRLNFKLFNIQVKEVTQNEGTKTIANNLTSTVQVFTDSKYQLPYVLGSAHQGCLPPFPADVFMIPQYGYLTLNNGSQAVGRSSFYCLEYFPSQMLRTGNNFTFSYTFEDVPFHSSYAHSQSLDRLMNPLIDQYLYYLSRTQTNGTNATQTLLFAQAGPQNMSAQAKNWLPGPCYRQQRVSTTVSQNNNSNFTWTGATKYHLNGRDSLVNPGVAMATHKDDEERFFPSSGVLMFGKQGAGKDNVEYTNVMLTSEEEIKTTNPVATEQYGVVADNLQQTNSAPIVGAVNSQGALPGMVWQNRDVYLQGPIWAKIPHTDGNFHPSPLMGGFGLKHPPPQILIKNTPVPADPPVNFTDAKLASFITQYSTGQVSVEIEWELQKENSKRWNPEIQYTSNYYKSANVDFAVNADGVYSEPRPIGTRYLTRNL

SEQ ID NO: 4987 - DNA, 2196 bp, Adeno-associated virus
  source 1..2196: mol_type = unassigned DNA
atggctgctgacggttatcttccagattggctcgaggacaacctctctgagggcattcgcgagtggtgggcgctgaaacctggagccccgcaacccaaagccaaccagcaaaagcaggacgacggccggggtctggtgcttcctggctacaagtacctcggacccttcaacggactcgacaagggggagcccgtcaacgaggcggacgccgcggccctcgagcacgacaaggcctacgaccagcagctcaaagcgggtgacaatccgtacctgcggtataatcacgccgacgccgagtttcaagagcgtctgcaagaagatacgtcctttgggggcaacctcgggcgagcagtcttccaggccaaaaagagggtactcgagcctctgggtctggttgaggaaggcgctaagacggctcctggaaagaagcggccagtagaaccggactccagctcgggcatcggcaagtcaggccagcagcccgcgaaaaagagactgaattttgggccgactggcgactcagagtcagtgcctgacccccaacctctctcagaaccacctgcaggtccctctggtctgggatctggtacaatggctgcaggcggtggcgctccaatggcagacaataacgaaggcgccgacggagtgggtaatgtctcaggaaattggcattgcgattccacatggctgggcgaccgagtcatcaccaccagcactcggacctgggccctccccacctacaacaaccacctctacaagcaaatctccaacgggacctcgggaggcagcagcaacgacaacacctactttggctacagcaccccctgggggtattttgactttaacagattccactgccacttttcaccacgcgactggcagcgactcatcaacaacaactggggattccggcccaagaagctcaacttcaagctcttcaacatccaggtcaaggaggtcacccagaatgaaggcaccaagaccaccgccaataacctcaccagcacggtgcaggtctttacggactcggagtaccagctcccgtacgtgctcggctctgcccaccagggctgcctgcctccgttcccggcggacgtgttcatgattccgcagtacgggtacctgacgctgaacaacgggagccaggccgtggggcgatcctccttctactgcctggagtactttccctcgcagatgctgagaacgggcaacaactttaccttcagctacaccttcgaggacgtgcccttccacagcagctacgcgcacagccagagcctggaccggctgatgaacccgctgattgaccagtacctgtactacctgtctcggactcagaccaacgggaccaatgccacgcagactctgttgtttgctcaggccgggcctcagaacatgtcggctcaggccaagaactggctgcctggtccttgctatcggcagcagcgcgtctctacggcagtgtcgcaaaacaacaacagcaactttacctggaccggggcgaccaagtaccacctgaacggccgagactccctggtgaaccccggtgtcgccatggcaacgcacaaggacgacgaggagcgcttcttcccgagcagcggggtcctgatgtttggcaagcagggcgctggaaaggacaatgtcgagtacaccaacgtgatgctcaccagcgaggaggagatcaagaccaccaaccctgtggccacggagcagtacggtgtggtggctgacaatctgcagcagaccaactcggctcccattgtgggggcagtcaacagccagggggccttacccggtatggtctggcagaaccgggacgtgtacctgcagggtcccatctgggccaagatcccgcatacggacggcaactttcacccgtctcctctcatgggcggctttggactgaaacacccgcctccccagatcctgatcaaaaacacgccggtacctgcggatcccccggtgaactttacggacgctaagctggcgagtttcatcacgcagtacagcaccgggcaggtcagcgtggagattgagtgggagctgcagaaggagaacagcaagcgctggaatcccgagattcagtacacttccaattattataaatcagctaatgtggactttgccgtcaatgcagatggtgtatatagcgaaccccgccccattggcactcgttacctcacccgtaatctgtaa

SEQ ID NO: 4988 - protein, 731 aa, Adeno-associated virus
MAADGYLPDWLEDNLSEGIREWWALKPGAPQPKANQQKQDDGRGLVLPGYKYLGPFNGLDKGEPVNEADAAALEHDKAYDQQLKAGDNPYLRYNHADAEFQERLQEDTSFGGNLGRAVFQAKKRVLEPLGLVEEGAKTAPGKKRPVEPDSSSGIGKSGQQPAKKRLNFGPTGDSESVPDPQPLSEPPAGPSGLGSGTMAAGGGAPMADNNEGADGVGNVSGNWHCDSTWLGDRVITTSTRTWALPTYNNHLYKQISNGTSGGSSNDNTYFGYSTPWGYFDFNRFHCHFSPRDWQRLINNNWGFRPKKLNFKLFNIQVKEVTQNEGTKTTANNLTSTVQVFTDSEYQLPYVLGSAHQGCLPPFPADVFMIPQYGYLTLNNGSQAVGRSSFYCLEYFPSQMLRTGNNFTFSYTFEDVPFHSSYAHSQSLDRLMNPLIDQYLYYLSRTQTNGTNATQTLLFAQAGPQNMSAQAKNWLPGPCYRQQRVSTAVSQNNNSNFTWTGATKYHLNGRDSLVNPGVAMATHKDDEERFFPSSGVLMFGKQGAGKDNVEYTNVMLTSEEEIKTTNPVATEQYGVVADNLQQTNSAPIVGAVNSQGALPGMVWQNRDVYLQGPIWAKIPHTDGNFHPSPLMGGFGLKHPPPQILIKNTPVPADPPVNFTDAKLASFITQYSTGQVSVEIEWELQKENSKRWNPEIQYTSNYYKSANVDFAVNADGVYSEPRPIGTRYLTRNL

SEQ ID NO: 4989 - DNA, 4404 bp, Adeno-associated virus
  source 1..4404: mol_type = unassigned DNA
atggctgccgatggttatcttccagattggctcgagggcaacctctctgagggcattcgcgagtggtgggacttgaaacctggagccccgaaacccaaagccaaccagcaaaagcaggacgacggccggggtctggtgcttcctggctacaggtacctcggacccttcaacggactcgacaagggagagccggtcaacgaggcagacgccgcggccctcgagcacgacaaggcctacgacaagcagctcgagcagggggacaacccgtacctcaagtacaaccacgccgacgccgagtttcaggagcgtcttcaagaagatacgtcttttgggggcaacctcgggcgagcagtcttccaggccaagaagcgggttctcgaacctctcggtctggttgaggaaggcgctaagacggctcctggaaagaagagacccatagaatcccccgactcctccacgggcatcggcaagaacggccagccgcccgctaaaaagaagctcaactttgggcagactggcgactcagagtcagtgcccgacccccaacctctcggagaacctcccgccgcgccctcaggtctgggatctggtacaatggctgcaggcggtggcgcaccaatggcagacaataacgaaggcgccgacggagtgggtaatgcctccggaaattggcattgcgattccacatggctgggcgacagagtcatcaccaccagcacccgcacctgggccctgcccacctacaacaaccacctctacaagcagatatcaagtcagagcggggctaccaacgacaaccacttcttcggctacagcaccccctggggctattttgacttcaacagattccactgccacttctcaccacgtgactggcagcgactcatcaacaacaactggggattccggcccagaaagctgcggttcaagttgttcaacatccaggtcaaggaggtcacgacgaacgacggcgttacgaccatcgctaataaccttaccagcacgattcaggtcttctcggactcggagtaccaactgccgtacgtcctcggctctgcgcaccagggctgcctccctccgttccctgcggacgtgttcatgattcctcagtacggatatctgactctaaacaacggcagtcagtctgtgggacgttcctccttctactgcctggagtactttccttctcagatgctgagaacgggcgataactttgaattcagctacacctttgaggaagtgcctttccacagcagctatgcgcacagccagagcctggaccggctgatgaatcccctcatcgaccagtacctgtactacctggcccggacccagagcactacggggtccacaagggagctgcagttccatcaggctgggcccaacaccatggccgagcaatcaaagaactggctgcccggaccctgttatcggcagcagagactgtcaaaaaacatagacagcaacaacaacagtaactttgcctggaccggggccactaaataccatctgaatggtagaaattcattaaccaacccgggcgtagccatggccaccaacaaggacgacgaggaccagttctttcccatcaacggagtgctggtttttggcaaaacgggggctgccaacaagacaacgctggaaaacgtgctaatgaccagcgaggaggagatcaaaaccaccaatcccgtggctacagaagaatacggtgtggtctccagcaacctgcaatcgtctacggccggaccccagacacagactgtcaacagccagggggctctgcccggcatggtctggcagaaccgggacgtgtacctgcagggtcccatctgggccaaaattcctcacacggacggcaactttcacccgtctcccctgatgggcggatttggactcaaacacccgcctcctcaaattctcatcaaaaacaccccggtacctgctaatcctccagaggtgtttactcctgccaagtttgcctcatttatcacgcagtacagcaccggccaggtcagcgtggagatcgagtgggaactgcagaaagaaaacagcaaacgctggaatccagagattcagtacacctcaaattatgccaagtctaataatgtggaatttgctgtcaacaacgaaggggtttatactgagcctcgccccattggcacccgttacctcacccgtaacctgtaaatggctgccgatggttatcttccagattggctcgaggacaacctctctgagggcattcgcgagtggtgggacttgaaacctggagccccgaaacccaaagccaaccagcaaaagcaggacgacggccggggtctggtgcttcctggctacaagtacctcggacccttcaacggactcgacaagggggagcccgtcaacgcggcggacgcagcggccctcgagcacgacaaggcctacgaccagcagctcaaagcgggtgacaatccgtacctgcggtataaccacgccgacgccgagtttcaggagcgtctgcaagaagatacgtcttttgggggcaacctcgggcgagcagtcttccaggccaagaagcgggttctcgaacctctcggtctggttgaggaaggcgctaagacggctcctggaaagaagagaccggtagagccatcaccccagcgttctccagactcctctacgggcatcggcaagaaaggccagcagcccgcgaaaaagagactcaactttgggcagactggcgactcagagtcagtgcccgaccctcaaccaatcggagaaccccccgcaggcccctctggtctgggatctggtacaatggctgcaggcggtggcgctccaatggcagacaataacgaaggcgccgacggagtgggtagttcctcaggaaattggcattgcgattccacatggctgggcgacagagtcatcaccaccagcacccgaacctgggccctccccacctacaacaaccacctctacaagcaaatctccaacgggacttcgggaggaagcaccaacgacaacacctacttcggctacagcaccccctgggggtattttgactttaacagattccactgccacttctcaccacgtgactggcagcgactcatcaacaacaactggggattccggcccaagagactcaacttcaagctcttcaacatccaggtcaaggaggtcacgcagaatgaaggcaccaagaccatcgccaataaccttaccagcacgattcaggtctttacggactcggaataccagctcccgtacgtcctcggctctgcgcaccagggctgcctgcctccgttcccggcggacgtcttcatgattcctcagtacgggtacctgactctgaacaatggcagtcaggccgtgggccgttcctccttctactgcctggagtactttccttctcaaatgctgagaacgggcaacaactttgagttcagctaccagtttgaggacgtgccttttcacagcagctacgcgcacagccaaagcctggaccggctgatgaaccccctcatcgaccagtacctgtactacctgtctcggactcagtccacgggaggtaccgcaggaactcagcagttgctattttctcaggccgggcctaataacatgtcggctcaggccaaaaactggctacccgggccctgctaccggcagcaacgcgtctccacgacactgtcgcaaaataacaacagcaactttgcctggaccggtgccaccaagtatcatctgaatggcagagactctctggtaaatcccggtgtcgctatggcaacccacaaggacgacgaagagcgattttttccgtccagcggagtcttaatgtttgggaaacagggagctggaaaagacaacgtggactatagcagcgttatgctaaccagtgaggaagaaattaaaaccaccaacccagtggccacagaacagtacggcgtggtggccgataacctgcaacagcaaaacgccgctcctattgtaggggccgtcaacagtcaaggagccttacctggcatggtctggcagaaccgggacgtgtacctgcagggtcctatctgggccaagattcctcacacggacggaaactttcatccctcgccgctgatgggaggctttggactgaaacacccgcctcctcagatcctgattaagaatacacctgttcccgcggatcctccaactaccttcagtcaagctaagctggcgtcgttcatcacgcagtacagcaccggacaggtcagcgtggaaattgaatgggagctgcagaaagaaaacagcaaacgctggaacccagagattcaatacacttccaactactacaaatctacaaatgtggactttgctgttaacacagatggcacttattctgagcctcgccccatcggcacccgttacctcacccgtaatctgtaa

SEQ ID NO: 4990 - protein, 738 aa, Adeno-associated virus; identical to SEQ ID NO: 4793

SEQ ID NO: 4991 - protein, 738 aa, Adeno-associated virus; identical to SEQ ID NO: 4793

SEQ ID NO: 4992 - DNA, 2501 bp, Adeno-associated virus
  source 1..2501: mol_type = unassigned DNA
gaattcgcccttggctgcgtcaactggaccaatgagaactttcccttcaacgattgcgtcgacaagatggtgatctggtgggaggagggcaagatgacggccaaggtcgtggagtccgccaaggccattcatcatctgctggggcgggctcccgagattgcttgctcggcctgcgatctggtcaacgtggacctggatgactgtgtttctgagcaataaatgacttaaaccaggtatggctgccgatggttatcttccagattggctcgaggacaacctctctgagggcattcgcgagtggtgggacttgagacctggagccccgaaacccaaagccaaccagcaaaagcaggacgacggccggggtctggtgcttcctggctacaagtacctcggacccttcaacggactcgacaagggagagccggtcaacgaggcagacgccgcggccctcgagcacgacaaggcctacgacaagcagctcgagcagggggacaacccgtacctcaagtacaaccacgccgacgccgagtttcaggagcgtcttcaagaagatacgtcttttgggggcaacctcgggcgagcagtcttccaggccaagaagcgggttctcgaacctctcggtctggttgaggaaggcgctaagacggctcctggaaagaagagacccatagaatcccccgactcctccacgggcatcggcaagaaaggccagcagcccgctaaaaagagactcaactttgggcagactggcgactcagagtcagtgcccgaccctcaaccaatcggagaaccccccgcaggcccctctggtctgggatctggcacaatggctgcaggcggtggcgctccaatggcagacaataacgaaggcgccgacggagtgggtagttcctcaggaaattggcattgcgattccacatggctgggcgacagagtcatcaccaccagcacccgaacctgggccctccccacctacaacaaccacctctacaagcaaatctccaacgggacatcgggaggaagcaccaacgacaacacctacttcggctacagcaccccctgggggtattttgactttaacagattccactgccacttctcaccacgtgactggcagcgactcatcaacaacaactggggattccggcccaagagactcaacttcaagctcttcaacatccaggtcaaggaggtcacgcagaatgaaggcaccaagaccatcgccaataaccttaccagcacgattcaggtctttacggactcggaataccagctcccgtacgtcctcggctctgcgcaccagggctgcctgcctccgttcccggcggacgtcttcatgattcctcagtacgggtacctgactctgaacaacggcagtcaggccgtgggccgttcctccttctactgcctggagtactttccttctcaaatgctgagaacgggcaacaactttgagttcagctaccagtttgaggacgtgccttttcacagcagctatgcgcacagccaaagcctggaccggctgatgaaccccctcatcgaccagtacctgtactacctgtctcggactcagtccacgggaggtaccgcaggaactcagcagttgctattttctcaggccgggcctaataacatgtcggctcaggccaaaaactggctacccgggccctgctaccggcagcaacgcgtctccacgacagtgtcgcaaaataacaacagcaactttgcttggaccggtgccaccaagtatcatctgaatggcagagactctctggtaaatcccggtgtcgctatggcaacgcacaagggcgacgaagagcgattttttccatccagcggagtcttgatgtttgggaaacagggagctggaaaagacaacgtagactatagcagcgttatgctaaccagtgaggaagaaatcaaaaccaccaacccagtggccacagaacagtacggcgtggtggccgataacctgcaacagcaaaacgccgctcctattgtaggggccgtcaacagtcaaggagccttacctggcatggtctggcagaaccgggacgtgtacctgcagggtcctatctgggccaagattcctcacacggacggcaactttcatccttcgccgctgatgggaggctttggactgaaacacccgcctcctcagatcctgattaagaatacacctgttcccgcggatcctccaactaccttcagtcaagccaagctggcgtcgttcatcacgcagtacagcaccggacaggtcagcgtggaaattgaatgggagctgcagaaagagaacagcaagcgctggaacccagagattcagtatacttccaactactacaaatctacaaatgtggactttgctgtcaatactgagggtacttattcagagcctcgccccattggcacccgttacctcacccgtaacctgtaattgcctgttaatcaataaaccggttgattcgtttcagttgaactttggtctcaagggcgaattc

SEQ ID NO: 4993 - DNA, 2187 bp, Adeno-associated virus
  source 1..2187: mol_type = unassigned DNA
atggctgccgatggttatcttccagattggctcgaggacaacctctctgagggcattcgcgagtggtgggacttgaaacctggagccccgaaacccaaagccaaccagcaaaagcaggacgacggccggggtctggtgcttcctggctacaagtacctcggacccttcaacggactcgacaagggagagccggtcaacgaggcagacgccgcggccctcgagcacgacaaggcctacgacaagcagctcgagcagggggacaacccgtacctcaagtacaaccacgccgacgccgagtttcaggagcgtcttcaagaagatacgtcttttgggggcaacctcgggcgagcagtcttccaggccaagaagcgggttctcgaacctctcggtctggttgaggaaggcgctaagacggctcctggaaagaagagacccatagaatcccccgactcctccacgggcatcggcaagaaaggccagcagcccgctaaaaagaagctcaactttgggcagactggcgactcagagtcagtgcccgacccccaacctctcggagaacctcccgccgcgccctcaggtctgggatctggtacaatggctgcaggcggtggcgcaccaatggcagacaataacgaaggcgccgacggagtgggtaatgcctccggaaattggcattgcgattccacatggctgggcgacagagtcatcaccaccagcacccgcacctgggccctgcccacctacaacaaccacctctacaagcagatatcaagtcagagcggggctaccaacgacaaccacttcttcggctacagcaccccctggggctattttgacttcaacagattccactgccacttctcaccacgtgactggcagcgactcatcaacaacaactggggattccggcccagaaagctgcggttcaagttgttcaacatccaggtcaaggaggtcacgacgaacgacggcgttacgaccatcgctaataaccttaccagcacgattcaggtcttctcggactcggagtaccaactgccgtacgtcctcggctctgcgcaccagggctgcctccctccgttccctgcggacgtgttcatgattcctcagtacggatatctgactctaaacaacggcagtcagtctgtgggacgttcctccttctactgcctggagtactttccttctcagatgctgagaacgggcaataactttgaattcagctacacctttgaggaagtgcctttccacagcagctatgcgcacagccagagcctggaccggctgatgaatcccctcatcgaccagtacctgtactacctggcccggacccagagcactacggggtccacaagggagctgcagttccatcaggctgggcccaacaccatggccgagcaatcaaagaactggctgcccggaccctgttatcggcagcagagactgtcaaaaaacatagacagcaacaacaacagtaactttgcctggaccggggccactaaataccatctgaatggtagaaattcattaaccaacccgggcgtagccatggccaccaacaaggacgacgaggaccagttctttcccatcaacggagtgctggtttttggcgaaacgggggctgccaacaagacaacgctggaaaacgtgctaatgaccagcgaggaggagatcaaaaccaccaatcccgtggctacagaagaatacggtgtggtctccagcaacctgcaatcgtctacggccggaccccagacacagactgtcaacagccagggggctctgcccggcatggtctggcagaaccgggacgtgtacctgcagggtcccatctgggccaaaattcctcacacggacggcaactttcacccgtctcccctgatgggcggatttggactcaaacacccgcctcctcaaattctcatcaaaaacaccccggtacctgctaatcctccagaggtgtttactcctgccaagtttgcctcatttatcacgcagtacagcaccggccaggtcagcgtggagatcgagtgggaactgcagaaagaaaacagcaaacgctggaatccagagattcagtacacctcaaattatgccaagtctaataatgtggaatttgctgtcaacaacgaaggggtttatactgagcctcgccccattggcacccgttacctcacccgtaacctgtaa

SEQ ID NO: 4994 - protein, 728 aa, Adeno-associated virus; identical to SEQ ID NO: 4765

SEQ ID NO: 4995 - protein, 728 aa, Adeno-associated virus; identical to SEQ ID NO: 4829

SEQ ID NO: 4996 - protein, 728 aa, Adeno-associated virus; identical to SEQ ID NO: 4829

SEQ ID NO: 4997 - DNA, 3113 bp, Adeno-associated virus
  source 1..3113: mol_type = unassigned DNA
gaattcgccctttctacggctgcgtcaactggaccaatgagaactttcccttcaacgattgcgtcgacaagatggtgatctggtgggaggagggcaagatgacggccaaggtcgtggagtccgccaaggccattctcggcggcagcaaggtgcgcgtggaccaaaagtgcaagtcgtccgcccagatcgatcccacccccgtgatcgtcacttccaacaccaacatgtgcgccgtgattgacgggaacagcaccaccttcgagcaccagcagccgttacaagaccggatgttcaaatttgaactcacccgccgtctggagcatgactttggcaaggtgacaaagcaggaagtcaaagagttcttccgctgggcgcaggatcacgtgaccgaggtggcgcatgagttctacgtcagaaagggtggagccaacaagagacccgcccccgatgacgcggataaaagcgagcccaagcgggcctgcccctcagtcgcggatccatcgacgtcagacgcggaaggagctccggtggactttgccgacaggtaccaaaacaaatgttctcgtcacgcgggcatgcttcagatgctgcttccctgcaagacatgcgagagaatgaatcagaatttcagcatttgcttcacgcacgggaccagagactgttcagaatgtttccccggcgtgtcagaatctcaaccggtcgtcagaaagaggacgtatcggaaactctgtgccattcatcatctgctggggcgggctcccgagattgcttgctcggcctgcgatctggtcaacgtggacctggatgactgtgtttctgagcaataaatgacttaaaccaggtatggctgccgatggtcatcttccagattggctcgaggacaacctctctgagggcattcgcgagtggtgggacttgaaacctggagccccgaaacccaaagccaaccagcaaaagcaggacgacggccggggtctggtgcttcctggctacaagtacctcggacccttcaacggactcgacaagggggagcccgtcaacgcggcggacgcagcggccctcgagcacgacaaggcctacgaccagcagctcaaagcgggtgacaatccgtacctgcggtataaccacgccgacgccgagtttcaggagcgtcttcaagaagatacgtcttttgggggcaacctcgggcgagcagtcttccaggccaagaagcgggttctcgaacctctcggtctggttgaggaaggcgctaagacggctcctggaaagaagagacccatagaatcccccgactcctccacgggcatcggcaagaaaggccagcagcccgctaaaaagaagctcaactttgggcagactggcgactcagagtcagtgcccgaccctcaaccaatcggagaaccccccgcaggcccctctggtctgggatctggtacaatggctgcaggcggtggcgctccaatggcagacaataacgaaggcgccgacggagtgggtagttcctcaggaaattggcattgcgattccacatagctgggcgacagagtcatcaccaccagcacccgaacctgggccctccccacctacaacaaccacctctacaagcaaatctccaacgggacatcgggaggaagcaccaacgacaacacctacttcggctacagcaccccctgggggtattttgactttaacagattccactgccacttctcaccacgtgactggcagcgactcatcaacaacagctggggattccggcccaagagactcaacttcaagctcttcaacatccaggtcaaggaggtcacgcagaatgaaggcaccaagaccatcgccaataaccttaccagcacgattcaggtctttacggactcggaataccagctcccgtacgtcctcggctctgcgcaccagggctgcctgcctccgttcccggcggacgtcttcatgattcctcagtacgggtacctgactctgaacaacggcagtcaggccgtgggccgttcctccttctactgcctggagtactttccttctcaaatgctgagaacgggcaacaactttgagttcagctaccagtttgaggacgtgccttttcacagcagctacgcgcacagccaaagcctggaccggctgatgaaccccctcatcgaccagtacctgtactacctgtctcggactcagtccacgggaggtaccgcaggaactcagcagttgctattttctcaggccgggcctaataacatgtcggctcaggccaaaaactggctacccgggccctgctaccggcagcaacgcgtctccacgacactgtcgcaaaataacaacagcaactttgcttggaccggtgccaccaagtatcatctgaatggcagagactctctggtaaatcccggtgtcgctatggcaacgcacaaggacgacgaagagcgattttttccatccagcggagtcttgatgtttgggaaacagggagctggaaaagacaacgtggactatagcagcgttatgctaaccagtgaggaagaaatcaaaaccaccaacccagtggccacagaacagtacggcgtggtggccgataacctgcaacagcaaaacgccgctcctattgtaggggccgtcaacagtcaaggagccttacctggcatggtctggcagaaccgggacgtgtacctgcagggtcctatctgggccaagattcctcacacggacggcaactttcatccttcgccgctgatgggaggctttggactgaaacacccgcctcctcagatcctgattaagaatacacctgttcccgcggatcctccaactaccttcagtcaagccaagctggcgtcgttcatcacgcagtacagcaccggacaggtcagcgtggaaattgaatgggagctgcagaaagagaacagcaagcgctggaacccagagattcagtatacttccaactactacaaatctacaaatgtggactttgctgtcaatactgagggtacttattcagagcctcgccccattggcacccgttacctcacccgtaacctgtaattgcctgttaatcaataaaccggttaattcgtttcagttgaactttggtctctgcgaagggcgaattc

SEQ ID NO: 4998 - DNA, 3106 bp, Adeno-associated virus
  source 1..3106: mol_type = unassigned DNA
gaattcgcccttctacggctgcgtcaactggaccaatgagaactttcccttcaacgattgcgtcgacaagatggtgatctggtgggaggagggcaagatgacggccaaggtcgtggagtccgccaaggccattctcggcggcagcaaggtgcgcgtggaccaaaagtgcaagtcgtccgcccagatcgaccccacccccgtgatcgtcacctccaacaccaacatgtgcgccgtgattgacgggaacagcaccaccttcgagcaccagcagccgttgcaggaccggatgttcaaatttgaactcacccgccgtctggagcatgactttggcaaggcgacaaagcaggaagtcaaagagttcttccgctgggcgcaggatcacgtgaccgaggtggcgcatgagttctacgtcagaaagggtggagccaacaagagacccgcccccgatgacgcggataaaagcgagcccaagcgggcccgcccctcagtcgcggatccatcgacgtcagacgcggaaggagctccggtggactttgccgacaggtaccaaaacaaatgttctcgtcacgcgggcatgcttcagatgctgtttccctgcaaaacatgcgagagaatgaatcagaatttcaacatttgcttcacgcacgggaccagagactgttcagaatgtttccccggcgtgtcagaatctcaaccggtcgtcagaaagaggacgtatcggaaactctgtgccattcatcatctgctggggcgggctcccgagattgcttgctcggcctgcgatctggtcaacgtggacctggatgactgtgtttctgagcaataaatgacttaaaccaggtatggctgccgatggttatcttccagattggctcgaggacaacctctctgagggcattcgcgagtggtgggacttgaaacctggagccccgaaacccaaagccaaccagcaaaagcaggacgacggccggggtctggtgcttcctggctacaagtacctcggacccttcaacggactcgacaagggagagccggtcaacgaggcagacgccgcggccctcgagcacgacaaggcctacgacaagcagctcgagcagggggacaacccgtacctcaagtacaaccacgccgacgccgagtttcaggagcgtcttcaagaagatacgtcttttgggggcaacctcgggcgagcagtcttccgggccaagaagcgggttctcgaacctctcggtctggttgaggaaggcgctaagacggctcctggaaagaagagacccatagaatcccccgactcctccacgggcatcggcaagaaaggccagcagcccgctaaaaagaagctcaactttgggcagactggcgactcagagtcagtgcccgacccccaacctctcggagaacctcccgccgcgccctcaggtctgggatctggtacaatggctgcaggcggtggcgcaccaatggcagacaataacgaaggcgccgacggagtgggtaatgcctccggaaattggcattgcgattccacatggctgggcgacagagtcatcaccaccagcacccgcacctgggccctgcccacctacaacaaccacctctacaagcagatatcaagtcagagcggggctaccaacgacaaccacttcttcggctacagcaccccctggggctattttgacttcaacagattccactgccacttctcaccacgtgactggcagcgactcatcaacaacaaccggggattccggcccagaaagctgcggttcaagttgttcaacatccaggtcaaggaggtcacgacgaacgacggcgttacgaccatcgctaataaccttaccagcacgattcaggtcttctcggactcggagtaccaactgccgtacgtcctcggctctgcgcaccagggctgcctccctccgttccctgcggacgtgttcatgattcctcagtacggatatctgactctaaacaacggcagtcagtctgtgggacgttcctccttctactgcctggagtactttccttctcagatgctgagaacgggcaataactttgaattcagctaccagtttgaggacgtgccctttcacagcagctacgcgcacagccaaagcctggaccggctgatgaaccccctcatcgaccagtacctgtactacctgtctcggactcagtccacgggaggtaccgcaggaactcagcagttgctattttctcaggccgggcctaataacatgtcggctcaggccaaaaactggctacccgggccctgctaccggcagcaacgcgtctccacgacactgtcgcaaaataacaacagcaactttgcttggaccggtgccaccaagtatcatctgaatggcagagactctctggtaaatcccggtgtcgctatggcaacgcacaaggacgacgaagagcgattttttccatccagcggagtcttgatgtttgggaaacagggagctggaaaagacaacgtggactatagcagcgttatgctaaccagtgaggaagaaatcaaaaccaccaacccagtggccacagaacagtacggcgtggtggccgataacctgcaacagcaaaacgccgctcctattgtaggggccgtcaacagtcaaggagccttacctggcatggcctggcagaaccgggacgtgtacctgcagggtcctatctgggccaagattcctcacacggacggcaactttcatccttcgccgctgatgggaggctttggactgaaacacccgcctcctcagatcctgattaagaatacacctgttcccgcggatcctccaactaccttcagtcaagccaagctggcgtcgttcatcacgcagtacagcaccggacaggtcagcgtggaaattgaatgggagctgcagaaagagaacagcaagcgctggaacccagagattcagtatacttccaactactacaaatctacaaatgtggactttgctgtcaatactgagggtacttattcagagcctcgccccattggcacccgttacctcacccgtaacctgtaattgcctgttaatcaataaaccggttaattcgtttcagttgaactttggtctctgcgaagggcgaattc

SEQ ID NO: 4999 - DNA, 3197 bp, Adeno-associated virus
  source 1..3197: mol_type = unassigned DNA
gaattcgccctttctacggctgcgtcaactggaccaatgagaactttcccttcaacgattgcgtcgacaagatggtgatctggtgggaggagggcaagatgacggccaaggtcgtggagtccgccaaggccattctcggcggcagcaaggtgcgcgtggaccaaaagtgcaagtcgtccgcccagatcgaccccacccccgtgatcgtcacctccaacaccaacatgtgcgccgtgattgacgggaacagcaccaccttcgagcaccagcagccgttacaagaccggatgttcaaatttgaactcacccgccgtctggagcacgactttggcaaggtgacaaagcaggaagtcaaagagttcttccgctgggcgcaggatcacgtgaccgaggtggcgcatgagttctacgtcagaaagggtggagccaacaagagacccgcccccgatgacgcggataaaagcgagcccaagcgggcctgcccctcagtcgcggatccatcgacgtcagacgcggaaggagctccggtggactttgccgacaggtaccaaaacaaatgttctcgtcacgcgggcatgcttcagatgctgtttccctgcaagacatgcgagagaatgaatcagaatttcaacatttgcttcacgcacgggaccagagactgttcagaatgtttccccggcgtgtcagaatctcaaccggtcgtcagaaagaggacgtatcggaaactctgtgccattcatcatctgctggggcgggctcccgagattgcttgctcggcctgcgatctggtcaacgtggacctggatgactgtgtttctgagcaataaatgacttaaaccaggtatggctgccgatggttatcttccagattggctcgaggacaacctctctgagggcattcgcgagtggtgggacttgaaacctggagccccgaaacccaaagccaaccagcaaaagcaggacgacggccggggtctggtgcttcctggctacaagtacctcggacccttcaacggactcgacaagggagagccggtcaacgaggcagacgccgcggccctcgagcacgacaaggcctacgacaagcagctcgagcagggggacaacccgtacctcaagtacaaccacgccgacgccgagtttcaggagcgtcttcaagaagatacgtcttttgggggcaacctcgggcgagcagtcttccaggccaagaagcgggttctcgaacctctcggtctggttgaggaaggcgctaagacggctcctggaaagaagagaccggtagagccatcaccccagcgttctccagactcctctacgggcatcggcaagacaggccagcagcccgcgaaaaagagactcaactttgggcagactggcgactcagagtcagtgcccgaccctcaaccaatcggagaaccccccgcaggcccctctggtctgggatctggtacaatggctgcaggcggtggcgctccaatggcagacaataacgaaggcgccgacggagtgggtagttcctcaggaaattggcattgcgattccacatggctgggcgacagagtcatcaccaccagcacccgaacctgggccctccccacctacaacaaccacctctacaagcaaatctccaacgggacatcgggaggaagcaccaacgacaacacctacttcggctacagcaccccctgggggtattttgactttaacagattccactgccacttctcaccacgtgactggcagcgactcatcaacaacaactggggattccggcccaagagactcaacttcaagctcttcaacatccaggtcaaggaggtcacgcagaatgaaggcaccaagaccatcgccaataaccttaccagcacgattcaggtctttacggactcggaataccagctcccgtacgtcctcggctctgcgcaccagggctgcctgcctccgttcccggcggacgtcttcatgattcctcagtacgggtacctgactctgaacaacggcagtcaggccgtgggccgttcctccttctactgcctggagtactttccttctcaaatgctgagaacgggcaacaactttgagttcagctaccagtttgaggacgtgccttttcacagcagctacgcgcacagccaaagcctggaccggctgatgaaccccctcatcgaccagtacctgtactacctgtctcggactcagtccacgggaggtaccgcaggaactcagcagttgctattttctcaggccgggcctaataacatgtcggctcaggccaaaaactggctacccgggccctgctaccggcagcaacgcgtctccacgacactgtcgcaaaataacaacagcaactttgcttggaccggtgccaccaagtatcatctgaatggcagagactctctggtaaatcccggtgtcgctatggcaacgcacaaggacgacgaagagcgattttttccatccagcggagtcttgatgtttgggaaacagggagctggaaaagacaacgtggactatagcagcgttatgctaaccagtgaggaagaaatcaaaaccaccaacccagtggccacagaacagtacggcgtggtggccgataacctgcaacagcaaaacgccgctcctattgtaggggccgtcaacagtcaaggagccttacctggcatggtctggcagaaccgggacgtgtacctgcagggtcctatctgggccaagattcctcacacggacggcaactttcatccttcgccgctgatgggaggctttggactgaaacacccgcctcctcagatcctgattaagaatacacctgttcccgcggatcctccaactaccttcagtcaagccaagctggcgtcgttcatcacgcagtacagcaccggacaggtcagcgtggaaattgaatgggagctgcagaaagagaacagcaagcgctggaacccagagattcagtatacttccaactactacaaatctacaaatgtggactttgctgtcaatactgagggtacttattcagagcctcgccccattggcacccgttacctcacccgtaacctgtaattgcctgttaatcaataaaccggttaattcgtttcagttgaactttggtctctgcgaagggcgaattcgtttaaacctgcaggactagtccctttagtgagggttaattctgagcttggcgtaatcatgggtcatag

SEQ ID NO: 5000 - DNA, 3276 bp, Adeno-associated virus
  source 1..3276: mol_type = unassigned DNA
gaattcgcccttcgcagagaccaaagttcaactgaaacgaattaaccggtttattgattaacaggcaattacaggttacgggtgaggtaacgggtgccaatggggcgaggctcagtataaaccccttcgttgttgacagcaaattccacattattagacttggcataatttgaggtgtactgaatctctggattccagcgtttgctgttttctttctgcagttcccactcgatctccacgctgacctggccggtgctgtactgcgtgataaatgaggcaaacttggcaggagtaaacacctctggaggattagcaggtaccggggtgtttttgatgagaatttgaggaggcgggtgtttgagtccaaatccgtccatcaggggagacgggtgaaagttgccgtccgtgtgaggaattttggcccagatgggaccctgcaggtacacgtcccggttctgccagaccatgccgggcagagccccctggctgttgacagtctgtgtctggggtccggccgtagacgattgcaggttgctggagaccacaccgtattcttctgtagccacgggattggtggttttgatctcctcctcgctggtcattagcacgttttccagcgttgtcttgttggcagcccccgttttgccaaaaaccagcactccgttgatgggaaagaactggtcctcgtcgtccttgttggtggccatggctacgcccgggttggttaatgaatttctaccattcagatggtatttagtggccccggtccaggcaaagttactgttgttgttgctgtctatgttttttgacagtctctgctgccgataacagggtccgggcagccagttctttgattgctcggccatggtgttgggcccagcctgatggaactgcagctcccttgtggaccccgtagtgctctgggtccgggccaggtagtacaggtactggtcgatgaggggattcatcagccggtccaggctctggctatgcgcatagctgctgtggaaaggcacttcctcaaaggtgtagctgaattcaaagttattgcccgttctcagcatctgagaaggaaagtactccaggcagtagaaggaggaacgtcccacagactgactgccgttgtttagagtcagatatccgtactgaggaatcatgaacacgtccgcagggaacggagggaggcagccctggtgcgcagagccgaggacgtacggcagttggtactccgagtccgagaagacctgaatcgtgctggtaaggttattagcgatggtcgtaacgccgtcgtccgtcgtgacctccttgacctggatgttgaacaacttgaaccgcagctttctgggccggaatccccagttgttgttgatgagtcgctgccagtcacgtggtgagaagtggcagtggaatctgttaaagtcaaaatacccccagggggtgctgtagccgaagtaggtgttgtcgttggtgcttcctcccgatgtcccgttggagatttgcttgtagaggtggttgttgtaggtggggagggcccaggttcgggtgctggtggtgatgactctgtcgcccagccatgtggaatcgcaatgccaatttcctgaggaactacccactccgtcggcgccttcgttattgtctgccattggagcgccaccgcctgcagccattgtaccagatcccagaccagaggggcctgcggggggttctccgattggttgagggtcgggcactgactctgagtcgccagtctgcccaaagttgagtctctttttcgcgggctgctggcctgtcttgccgatgcccgtagaggagtctggagaacgctggggtgatggctctaccggtctcttctttccaggagccgtcttagcgccttcctcaaccagaccgagaggttcgagaacccgcttcttggcctggaagactgctcgcccgaggttgcccccaaaagacgtatcttcttgaagacgctcctgaaactcggcgtcggcgtggttgtacttgaggtacgggttgtccccctgctcgagctgcttgtcgtaggccttgtcgtgctcgagggccgcggcgtctgcctcgttgaccggctctcccttgtcgagtccgttgaagggtccgaggtacttgtagccaggaagcaccagaccccggccgtcgtcctgcttttgctggttggctttgggtttcggggctccaggtttcaagtcccaccactcgcgaatgccctcagagaggttgtcctcgagccaatctggaagataaccatcggcagccatacctggtttaagtcatttattgctcagaaacacagtcatccaggtccacgttgaccagatcgcaggccgagcaagcaatctcgggagcccgccccagcagatgatgaatggcacagagtttccgatacgtcctctttctgacgaccggttgagattctgacacgccggggaaacattctgaacagtctctggtcccgtgcgtgaagcaaatgttgaaattctgattcattctctcgcatgtcttgcagggaaacagcatctgaagcatgcccgcgtgacgagaacacttgttttggtacctgtcggcaaagtccaccggagctccttccgcgtctgacgtcgatggatgcaaaatgtcgcaaaagcactcacgtgacagctaatacaggaccactcccctatgacgtgatttacgtcagcgctatgcccgcgtgacgagaacatttgttttggtacctgtcggcaaagtccaccggagctccttccgcgtctgacgtcgatggatccgcgactgaggggcaggcccgcttgggctcgcttttatccgcgtcatcgggggcgggtctcttgttggctccaccctttctgacgtagaactcatgcgccacctcggtcacgtgatcctgcgcccagcggaagaactctttgacttcctgctttgtcaccttgccaaagtcatgctccagacggcgggtgagttcaaatttgaacatccggtcctgcaacggctgctggtgctcgaaggtggtgctgttcccgtcaatcacggcgcacatgttggtgttggaagtgacgatcacgggggtgggatcgatctgggcggaagacttgcacttttggtccacgcgcaccttgctgccgccgagaatggccttggcggactccacgaccttggccgtcatcttgccctcctcccaccagatcaccatcttgtcgacgcaatcgttgaagggaaagttctcattggtccagttgacgcagccgtagaaagggcgaattc

SEQ ID NO: 5001 - protein, 738 aa, Adeno-associated virus; identical to SEQ ID NO: 4777

SEQ ID NO: 5002 - protein, 738 aa, Adeno-associated virus
MAADGYLPDWLEDNLSEGIREWWDLKPGAPKPKANQQKQDDGRGLVLPGYKYLGPFNGLDKGEPVNAADAAALEHDKAYDQQLKAGDNPYLRYNHADAEFQERLQEDTSFGGNLGRAVFQAKKRVLEPLGLVEEGAKTAPGKKRPVEPSPQRSPDSSTGIGKKGHQPARKRLNFGQTGDSESVPDPQPIGEPPAGPSGLGSGTMAAGGGAPMADNNEGADGVGSSSGNWHCDSTWLGDRVITTSTRTWALPTYNNHLYKQISNGTSGGSTNDNTYFGYSTPWGYFDFNRFHCHFSPRDWQRLINNNWGFRPKRLNFKLFNIQVKEVTQNEGTKTIANNLTSTIQVFTDSEYQLPYVPGSAHQGCLPPFPADVFMIPQYGYLTLNNGSQAVGRSSFYCLEYFPSQMLRTGNNFEFSYTFEDVPFHSSYAHSQSLDRLMNPLIDQYLYYLSRTQSTGGTQGTQQLLFSQAGPANMSAQAKNWLPGPCYRQQRVSTTLSQNNNSNFAWTGATKYHLNGRDSLVNPGVAMATHKDDEERFFPSSGVLMFGKQGAGKDNVDYSSVMLTSEEEIKTTNPVATEQYGVVADNLQQTNGAPIVGTVNSQGALPGMVWQNRDVYLQGPIWAKIPHTDGNFHPSPLMGGFGLKHPPPQILIKNTPVPADPPTTFSQAKLASFITQYSTGQVSVEIEWELQKENSKRWNPEIQYTSNYYKSTNVDFAVNTEGTYSEPRPIGTRYLTRNL

SEQ ID NO: 5003 - protein, 738 aa, Adeno-associated virus; identical to SEQ ID NO: 4775

SEQ ID NO: 5004 - DNA, 2489 bp, Adeno-associated virus
  source 1..2489: mol_type = unassigned DNA
gaattcgccctttctacggctgcgtcaactggaccaatgagaactttcccttcaacgattgcgtcgacaagatggtgatctggtgggaggagggcaagatgacggccaaggtcgtgaagtccgccaaggccattcatcatctgctggggcgggctcccgagattgcttgctcggcctgcgatctggtcaacgtggacctggatgactgtgtttctgagcaataaatgacttaaaccaggtatggctgccgatggttatcttccagattggctcgaggacaacctctctgagggcattcgcgagtggtgggacttgaaacctggagccccgaaacccaaagccaaccagcaaaagcaggacgacggccggggtctggtgcttcctggctacaagtacctcggacccttcaacggactcgacaagggagagccggtcaacgaggcagacgccgcggccctcgagcacgacaaggcctacgacaagcagctcgagcagggggacaacccgtacctcaagtacaaccacgccgacgccgagtttcaggagcgtcttcaagaagatacgtcttttgggggcaacctcgggcgagcagtcttccaggccaagaagcgggttctcgaacctctcggtctggttgaggaaggcgctaagacggctcctggaaagaagagacccatagaatcccccgactcctccacgggcatcggcaggaaaggccagcagcccgctaaaaagaagctcaactttgggcagactggcgactcagagtcagtgcccgaccctcaaccaatcggagaaccccccgcaggcccctctggtctgggatctggtacaatggctgcaggcggtggcgctccaatggcagacaataacgaaggcgccgacggagtgggtaatgcctccggaaattggcattgcgattccacatggctgggcgacagagtcatcaccaccagcacccgcacctgggccctgcccacctacaacaaccacctctacaagcagatatcaagtcagagcggggctaccaacgacaaccacttcttcggctacagcaccccctggggctattttgacttcaacagattccactgccacttctcaccacgtgactggcagcgactcatcaacaacaactggggattccggcccagaaagctgcggttcaagttgttcaacatccaggtcaaggaggtcacgacgaacgacggcgttacgaccatcgccaataaccttaccagcacgattcaggtcttctcggactcggagtaccaactgccgtacgtcctcggctctgcgcaccagggctgcctccctccgttccctgcggacgtgttcatgattcctcagtacggatatctgactctaaacaacggcagtcagtctgtgggacgttcctccttctactgcctggagtactttccttctcagatgctgagaacgggcaataactttgaattcagctacacctttgaggaagtgcctttccacagcagctatgcgcacagccagagcctggaccggctgatgaatcccctcatcgaccagtacctgtactacctggcccggacccagagcactacggggtccacaagggagctgcagttccatcaggctgggcccaacaccatggccgagcaatcaaagaactggctgcccggaccctgttatcggcagcagagactgtcaaaaaacatagacagcaacaacaacagtaactttgcctggaccggggccactaaataccatctgaatggtagaaattcattaaccaacccgggcgtagccatggccaccaacaaggacgacgaggaccagttctttcccatcaacggagtgctggtttttggcaaaacgggggctgccaacaagacaacgctggaaaacgtgctaatgaccagcgaggaggagatcaaaaccaccaatcccgtggctacagaagaatacggtgtggtctccagcaacctgcaatcgtctacggccggaccccagacacagactgtcaacagccagggggctctgcccggcatggtctggcagaaccgggacgtgtacctgcagggtcccatctgggccaaaattcctcacacggacggcaactttcacccgtctcccctgatgggcggatttggactcaaacacccgcctcctcaaattctcatcaaaaacaccccggtacctgctaatcctccagaggtgtttactcctgccaagtttgcctcatttatcacgcagtacagcaccggccaggtcagcgtggagatcgagtgggaactgcagaaagaaaacagcaaacgctggaatccagagattcagtacacctcaaattatgccaagtctaataatgtggaatttgctgtcaacaacgaaggggtttatactgagcctcgccccattggcacccgttacctcacccgtaacctgtaattgcctgttaatcaataaaccggttaattcgtttcagttgaactttggtcaagggcgaattc

SEQ ID NO: 5005 - DNA, 3098 bp, Adeno-associated virus
  source 1..3098: mol_type = unassigned DNA
gaattcgccctttctacggctgcgtcaactggaccaatgagaactttcccttcaacgattgcgtcgacaagatggtgatctggtgggaggagggcaagatgacggccaaggtcgtggagtccgccaaggccattctcggcggcagcaaggtgcgcgtggaccaaaagtgcaagtcttccgcccagatcgatcccacccccgtgatcgtcacttccaacaccaacatgtgcgccgtgattgacgggaacagcaccaccttcgagcaccagcagccgttacaagaccggatgttcaaatttgaactcacccgccgtctggagcacgactttggcaaggtgacaaagcaggaagtcaaagagttcttccgctgggcgcaggatcacgtgaccgaggtggcgcatgagttctacgtcagaaagggtggagccaacaagagacccgcccccgatgacgcggataaaagcgagcccaagcgggcctgcccctcagtcgcggatccatcgacgtcagacgcggaaggagctccggtggactttgccgacaggtaccaaaacaaatgttctcgtcacgcgggcatgcttcagatgctgtttccctgcaagacatgcgagagaatgaatcagaatttcaacatttgcttcacgcacgggaccggagactgttcagaatgtttccccggcgtgtcagaatctcaaccggtcgtcagaaagaggacgtatcggaaactctgtgccattcatcatctgctggggcgggctcccgagattgcttgctcggcctgcgatctggtcaacgtggacctggatgactgtgtttctgagcaataaatgacttaaaccaggtatggctgccgatggttatcttccagattggctcgaggacaacctctctgagggcattcgcgagtggtgggacttgaaacctggagccccgaaacccaaagccaaccagcaaaagcaggacgacggccggggtctggtgcttcctggctacaagtacctcggacccttcaacggactcgacaagggagagccggtcaacgcggcggacgcagcggccctcgagcacgacaaggcctacgaccagcagctcaaagcgggtgacaatccgtacctgcggtataaccacgccgacgccgagtttcaggagcgtcttcaagaagatacgtcttttgggggcaacctcgggcgagcagtcttccaggccaagaagcgggttctcgaacctctcggtctggttgaggaaggcgctaagacggctcctggaaagaagagacccatagaatcccccgactcctccacgggcatcggcaagaaaggccagcagcccgctaaaaagaagctcaactttgggcagactggcgactcagagtcagtgcccgaccctcaaccaatcggagaaccccccgcaggcccctctggtctgggatctggtacaatggctgcaggcggtggcgctccaatggcagacaataacgaaggcgccgacggagtgggtaatgcctccggaaattggcattgcgattccacatggctgggcgacagagtcatcaccaccagcacccgcacctgggccctgcccacctacaacaaccacctctacaagcagatatcaagtcagagcggggctaccaacgacaaccacttcttcggctacagcaccccctggggctattttgacttcaacagattccactgccacttctcaccacgtgactggcagcgactcatcaacaacaactggggattccggcccagaaagctgcggttcaagttgttcaacatccaggtcaaggaggtcacgacgaacgacggcgttacgaccatcgctaataaccttaccagcacgattcaggtcttctcggactcggagtaccaactgccgtacgtcctcggctctgcgcaccagggctgcctccctccgttccctgcggacgtgttcatgattcctcagtacggatatctgactctaaacaacggcagtcagtctgtgggacgttcctccttctactgcctggagtactttccttctcagatgctgagaacgggcaataactttgaattcagctacacctttgaggaagtgcctttccacagcagctatgcgcacagccagagcctggaccggctgatgaatcccctcatcgaccagtacctgtactacctggcccggacccagagcactacggggtccacaagggagctgcagttccatcaggctgggcccaacaccatggccgagcaatcaaagaactggctgcccggaccctgttatcggcggcagagactgtcaaaagacatagacagcaacaacaacagtaactttgcctggaccggggccactaaataccatctgaatggtagaaattcattaaccaacccgggcgtagccatggccaccaacaaggacgacgaggaccagttctttcccatcaacggagtgctggtttttggcaaaacgggggctgccaacaagacaacgctggaaaacgtgctaatgaccagcgaggaggagatcaaaaccaccaatcccgtggctacagaagaatacggtgtggtctccagcaacctgcaatcgtctacggccggaccccagacacagactgtcaacagccagggggctctgcccggcatggtctggcagaaccgggacgtgtacctgcagggtcccatctgggccaaaattcctcacacggacggcaactttcacccgtctcccctgatgggcggatttggactcaaacacccgcctcctcaaattctcatcaaaaacaccccggtacctgctaatcctccagaggtgtttactcctgccaagtttgcctcatttatcacgcagtacagcaccggccaggtcagcgtggagatcgagtgggaactgcagaaagagaacagcaaacgctggaatccagagattcagtacacctcaaattatgccaagtctaataatgtggaatttgctgtcaacaacgaaggggtttatactgagcctcgccccattggcacccgttacctcacccgtaacctgtaattacttgttaatcaataaaccggttgattcgtttcagttgaactttggtctctgcgaagggcgaattc

SEQ ID NO: 5006 - DNA, 2969 bp, Adeno-associated virus
  source 1..2969: mol_type = unassigned DNA
gaattcgccctttctacggctgcgtcaactggaccaatgagaactttcccttcaacgattgcgtcgacaagatggtgatctggtgggaggagggcaagatgacggccaaggtcgtggagtccgccaaggccattctcggcggcagcaaggtgcgcgtggaccaaaagtgcaagtcgtccgcccagatcgaccccacccccgtgatcgtcacctccaacaccaacatgtgcgccgtgattgacgggaacagcaccaccttcgagcaccagcagccgttacaagaccggatgttcaaatttgaactcacccgccgtctggagcacgactttggcaaggtgacaaagcaggaagtcaaagagttcttccgctgggcgcaggatcacgtgaccgaggtggcgcatgagttctacgtcagaaagggtggagccaacaagagacccgcccccgatgacgcggataaaagcgagcccaagcgggcctgcccctcagtcgcggatccatcgacgtcagacgcggaaggagctccggtggactttgccgacaggtaccaaaacaaatgttctcgtcacgcgggcatgcttcagatgctgtttccctgcaagacatgcgagagaatgaatcagaatttcaacatttgcttcacgcacgggaccagagactgttcagaatgtttccccggcgtgtcagaatctcaaccggtcgtcagaaagaggacgtatcggaaactctgtgccattcatcatctgctggggcgggctcccgagattgcttgctcggcctgcgatctggtcaacgtggacctggatgactgtgtttctgagcaataaatgacttaaaccaggtatggctgccgatggttatcttccagattggctcgaggacaacctctctgagggcatccgcgagtggtgggacttgaaacctggagccccgaaacccaaagccaaccagcaaaagcaggacgacggccggggtctggtgcttcctggctacaagtacctcggacccttcaacggactcgacaagggagagccggtcaacgaggcagacgccgcggccctcgagcacgacaaggcctacgacaagcagctcgagcagggggacaacccgtacctcaagtacaaccacgccgacgccgagtttcaggagcgtcttcaagaagatacgtcttttgggggcaacctcgggcgagcagtcttccaggccaagaagcgggttctcgaacctctcggtctggttgaggaaggcgctaagacggctcctggaaagaagagaccggtagagccatcaccccagcgttctccagactcctctacgggcatcggcaagacaggccagcagcccgcgaaaaagagactcaactttgggcagactggcgactcagagtcagtgcccgaccctcaaccaatcggagaaccccccgcaggcccctctggtctgggatctggtacaatggctgcaggcggtggcgctccaatggcagacaataacgaaggcgccgacggagtgggtagttcctcaggaaattggcattgcgattccacatggctgggcgacagagtcatcaccaccagcacccgaacctgggccctccccacctacaacaaccacctctacaagcaaatctccaacgggacatcgggaggaagcaccaacgacaacacctacttcggctacagcaccccctgggggtattttgactttaacagattccactgccacttctcaccacgtgactggcagcgactcatcaacaacaactggggattccggcccaagagactcaacttcaagctcttcaacatccaggtcaaggaggtcacgcagaatgaaggcaccaagaccatcgccaataaccttaccagcacgattcaggtctttacggactcggaataccagctcccgtacgtcctcggctctgcgcaccagggctgcctgcctccgttcccggcggacgtcttcatgattcctcagtacgggtacctgactctgaacaacggcagtcaggccgtgggccgttcctccttctactgcctggagtactttccttctcaaatgctgagaacgggcaacaactttgagttcagctaccagtttgaggacgtgccttttcacagcagctacgcgcacagccaaagcctggaccggctgacgaaccccctcatcgaccagtacctgtactacctggcccggacccagagcactacggggtccacaagggggctgcagttccatcaggctgggcccaacaccatggccgagcaatcaaagaactggctgcccggaccctgttatcggcagcagagactgtcaaaaaacatagacagcaacaacaacagtaactttgcctggaccggggccactaaataccatctgaatggtagaaattcattaaccaacccgggcgtagccatggccaccaacaaggacgacgaggaccagttctttcccatcaacggagtgctggtttttggcaaaacgggggctgccaacaagacaacgctggaaaacgtgctaatgaccagcgaggaggagatcaaaaccaccaatcccgtggctacagaagaatacggtgtggtctccagcaacctgcaatcgtctacggccggaccccagacacagactgtcaacagccagggggctctgcccggcatggtctggcagaaccgggacgtgtacctgcagggtcccatctgggccaaaattcctcacacggacggcaactttcacccgtctcccctgatgggcggatttggactcaaacacccgcctcctcaaattctcatcaagtatacttccaactactacaaatctacaaatgtggactttgctgtcaatactgagggtacttattcagagcctcgccccattggcacccgttacctcacccgtaacctgtaattgcctgttaatcaataaaccggttaattcgtttcagttgaactttggtctctgcgaagggcgaattc

SEQ ID NO: 5007 - DNA, 3113 bp, Adeno-associated virus
  source 1..3113: mol_type = unassigned DNA
gaattcgccctttctacggctgcgtcaactggaccaatgagaactttcccttcaacgattgcgtcgacaagatggtgatctggtgggaggagggcaagatgacggccaaggtcgtggagtccgccaaggccattctcggcggcagcaaggtgcgcgtggaccaaaagtgcaagtcgtccgcccagatcgatcccacccccgtgatcgtcacttccaacaccaacatgtgcgccgtgattgacgggaacagcaccaccttcgagcaccagcagccgttacaagaccggatgttcaaatttgaactcacccgccgtctggagcatgactttggcaaggtgacaaagcaggaagtcaaagagttcttccgctgggcgcaggatcacgtgaccgaggtggcgcatgagttctacgtcagaaagggtggagccaacaagagacccgcccccgatgacgcggataaaagcgagcccaagcgggcctgcccctcagtcgcggatccatcgacgtcagacgcggaaggagctccggtggactttgccgacaggtaccaaaacaaatgttctcgtcacgcgggcatgcttcagatgctgtttccctgcaagacatgcgagagaatgaatcagaatttcaacatttgcttcacgcacgggaccagagactgttcagaatgtttccccggcgtgtcagaatctcaaccggtcgtcagaaagaggacgtatcggaaactctgtgccattcatcatctgctggggcgggctcccgagattgcttgctcggcctgcgatctggtcaacgtggacctggatgactgtgtttctgagcaataaatgacttaaaccaggtatggctgccgatggttatcttccagattggctcgaggacaacctctctgagggcattcgcgagtggtgggacttgaaacctggagccccgaaacccaaagccaaccagcaaaagcaggacgacggccggggtctggtgcttcctggctacaagtacctcggacccttcaacggactcgacaagggggagcccgtcaacgcggcggacgcagcggccctcgagcacgacaaggcctacgaccagcagctcaaagcgggtgacaatccgtacctgcggtataaccacgccgacgccgagtttcaggagcgtcttcaagaagatacgtcttttgggggcaacctcgggcgagcagtcttccaggccaagaagcgggttctcgaacctctcggtctggttgaggaaggcgctaagacggctcctggaaagaagagacccatagaatcccccgactcctccacgggcatcggcaagaaaggccagcagcccgctaaaaagaagctcaactttgggcagactggcgactcagagtcagtgcccgaccctcaaccaatcggagaaccccccgcaggcccctctggtctgggatctggtacaatggctgcaggcggtggcgctccaatggcagacaataacgaaggcgccgacggagtgggtagttcctcaggaaattggcattgcgattccacatggctgggcgacagagtcatcaccaccagcacccgaacctgggccctccccacctacaacaaccacctctacaagcaaatctccaacgggacatcgggaggaagcaccaacgacaacacctacttcggctacagcaccccctgggggtattttgactttaacagattccactgccacttctcaccacgtgactggcagcgactcatcaacaacaactggggattccggcccaagagactcaacttcaagctcttcaacatccaggtcaaggaggtcacgcagaatgaaggcaccaagaccatcgccaataaccttaccagcacgattcaggtctttacggactcggaataccagctcccgtacgtcctcggctctgcgcaccagggctgcctgcctccgttcccggcggacgtcttcatgattcctcagtacgggtacctgactctgaacaacggcagtcaggccgtgggccgttcctccttctactgcctggagtactttccttctcaaatgctgagaacgggcaacaactttgagttcagctaccagtttgaggacgtgccttttcacagcagctatgcgcacagccaaagcctggaccggctgatgaaccccctcatcgaccagtacctgtactacctgtctcggactcagtccacgggaggtaccgcaggaactcagcagttgctattttctcaggccgggcctaataacatgtcggctcaggccaaaaactggctacccgggccctgctaccggcagcaacgcgtctccacgacagtgtcgcaaaataacaacagcaactttgcttggaccggtgccaccaagtatcatctgaatggcagagactctctggtaaatcccggtgtcgctatggcaacgcacaagggcgacgaagagcgattttttccatccagcggagtcttgatgtttgggaaacagggagctggaaaagacaacgtggactatagcagcgttatgctaaccagtgaggaagaaatcaaaaccaccaacccagtggccacagaacagtacggcgtggtggccgataacctgcaacagcaaaacgccgctcctattgtaggggccgtcaacagtcaaggagccttacctggcatggtctggcagaaccgggacgtgtacctgcagggtcctatctgggccaagattcctcacacggacggcaactttcatccttcgccgctgatgggaggctttggactgaaacacccgcctcctcagatcctgattaagaatacacctgttcccgcggatcctccaactaccttcagtcaagccaagctggcgtcgttcatcacgcagtacagcaccggacaggtcagcgtggaaattgaatgggagctgcagaaagagaacagcaagcgctggaacccagagattcagtatacttccaactactacaaatctacaaatgtggactttgctgtcaatactgagggtacttattcagagcctcgccccattggcacccgttacctcacccgtagcctgtaattgcctgttaatcaataaaccggttgattcgtttcagttgaactttggtctctgcgaagggcgaattc

SEQ ID NO: 5008 - DNA, 3128 bp, Adeno-associated virus
  source 1..3128: mol_type = unassigned DNA
gaattcgccctttctacggctgcgtcaactggaccaatgagaactttcccttcaacgattgcgtcgacaagatggtgatctggtgggaggagggcaagatgacggccaaggtcgtggagtccgccaaggccattctcggcggcagcaaggtgcgcgtggaccaaaagtgcaagtcgtccgcccagatcgaccccacccccgtgatcgtcacctccaacaccaacatgtgcgccgtgattgacgggaacagcaccaccttcgagcaccagcagccgttgcaggaccggatgttcaaatttgaactcacccgccgtctggagcatgactttggcaaggtgacaaagcaggaagtcaaagagttcttccgctgggcgcaggatcacgtgaccgaggtggcgcatgagttctacgtcagaaagggtggagccaacaagagacccgcccccgatgacgcggataaaagcgagcccaagcgggcctgcccctcagtcgcggatccatcgacgtcagacgcggaaggagctccggtggactttgccgacaggtaccaaaacaaatgttctcgtcacgcgggcatgcttcagatgctgtttccctgcaagacatgcgagagaatgaatcagaatttcaacatttgcttcacgcgcgggaccagagactgttcagaatgtttcccgggcgtgtcagaatctcaaccggtcgtcagaaagaggacgtatcggaaactctgtgccattcatcatctgctggggcgggctcccgagattgcttgctcggcctgcgatctggtcaacgtggacctggatgactgtgtttctgagcaataaatgacttaaaccaggtatggctgccgatggttatcttccagattggctcgaggacaacctctctgagggcattcgcgagtggtgggacttgaaacctggagccccgaaacccaaagccaaccagcaaaagcaggacgacggccggggtctggtgcttcctggctacaagtacctcggacccttcaacggactcgacaagggggagcccgtcaacgcggcggacgcagcggccctcgagcacgacaaggcctacgaccagcagctcaaagcgggtgacaatccgtacctgcggtataaccacgccgacgccgagtttcaggagcgtctgcaagaagatacgtcttttgggggcaacctcgggcgagcagtcttccaggccaagaagcgggttctcgaacctctcggtctggttgaggaaggcgctaagacggctcctggaaagaagagaccggtagagccatcaccccagcgttctccagactcctctacgggcatcggcaagacaggccagcagcccgcgaaaaagagactcaactttgggcagactggcgactcagagtcagtgcccgaccctcaaccaatcggagaaccccccgcaggcccctctggtctgggatctggtacaatggctgcaggcggtggcgctccaatggcagacaataacgaaggcgccgacggagtgggtagttcctcaggaaattggcattgcgattccacatggctgggcgacagagtcatcaccaccagcacccgaacctgggccctccccacctacaacaaccacctctacaagcaaatctccaacgggacatcgggaggaagcaccaacgacaacacctacttcggctacagcaccccctgggggtattttgactttaacagattccactgccacttctcaccacgtgactggcagcgactcatcaacaacaactggggattccggcccaagagactcaacttcaagctcttcaacatccaggtcaaggaggtcacgcagaatgaaggcaccaagaccatcgccaataaccttaccagcacgattcaggtctttacggactcggaataccagctcccgtacgtcctcggctctgcgcaccagggctgcccgcctccgttcccggcggacgtcttcatgattcctcagtacgggtacctgactctgaacaacggcagtcaggccgtgggccgttcctccttctactgcctggagtactttccttctcaaatgcggagaacgggcaacaactttgagttcagctaccagtttgaggacgtgccttttcacagcagctacgcgcatagccaaagcctggaccggctgatgaaccccctcatcgaccagtacctgtactacctgtctcggactcagtccacgggaggtaccgcaggaactcagcagttgctattttctcaggccgggcctaataacatgtcggctcaggccaaaaactggctacccgggccctgctaccggcagcaacgcgtctccacgacactgtcgcaaaataacaacagcaactttgcttggaccggtgccaccaagtatcatctgaatggcagagactctctggtaaatcccggtgtcgctatggcaacgcacaaggacgacgaagagcgattttttccatccagcggagtcttgatgtttgggaaacagggagctggaaaagacaacgtggactatagcagcgttatgctaaccagtgaggaagaaatcaaaaccaccaacccagtggccacagaacagtacggcgtggtggccgataacctgcaacagcaaaacgccgctcctattgtaggggccgtcaacagtcaaggagccttacctggcatggtctggcagaaccgggacgtgtacctgcagggtcctatctgggccaagattcctcacacggacggcaactttcatccttcgccgctgatgggaggctttggactgaaacacccgcctcctcagatcctgattaagaatacacctgttcccgcggatcctccaactaccttcagtcaagccaagctggcgtcgttcatcacgcagtacagcaccggacaggtcagcgtggaaattgaatgggagctgcagaaagagaacagcaagcgctggaacccagagattcagtatacttccaactactacaaatctacaaatgtggactttgctgtcaatactgagggtacttattcagagcctcgccccattggcacccgttacctcacccgtaacctgtaattgcctgttaatcaataaaccggttaattcgtttcagttgaactttggtctctgcgaagggcgaattc

SEQ ID NO: 5009 - protein, 738 aa, Adeno-associated virus; identical to SEQ ID NO: 5002

SEQ ID NO: 5010 - DNA, 1933 bp, Adeno-associated virus
  misc_difference 1302: note = modified_base - a, c, t or g
  source 1..1933: mol_type = unassigned DNA
caaggcctacgaccagcagctcaaagcgggtgacaatccgtacctgcggtataaccacgccgacgccgagtttcaggagcgtcttcaagaagatacgtcttttgggggcaacctcgggcgagcagtcttccaggccaaaaagcgggttctcgaacctcttggtctggttgagacgccagctaagacggcacctggaaagaagcgaccggtagactcgccagactccacctcgggcatcggcaagaaaggccagcagcccgcgaaaaagagactcaactttgggcagactggcgactcagagtcagtccccgaccctcaaccaatcggagaaccaccagcaggcccctctggtctgggatctggtacaatggctgcaggcggtggcgcaccaatggctgacaataacgagggcgccgacggagtgggtaatgcctcaggaaattggcattgcgattccacatggctgggcgacagagtcatcaccaccagcacccgaacctgggccctgcccacctacaacaaccacctctacaagcaaatctccagtcagtcagcagggagcaccaacgataacgtctatttcggctacagcaccccctgggggtattttgacttcaacagattccattgccacttctcaccacgtgactggcagcgacttatcaacaacaactggggattccggcccaagaagctcaacttcaagctcttcaacatccaggtcaaggaggtcacgacgaatgacggtgtcacaaccatcgctaataaccttaccagcacggttcaggtcttttcggactcggaatatcaactgccgtacgtcctcggctccgcgcaccagggctgcctgcctccgttcccggcagacgtgttcatgattccgcagtacggatacctgactctgaacaatggcagccaatcggtaggccgttcctccttctactgcctggagtactttccttctcagatgctgagaacgggcaacaacttcacctttagctacaccttcgaggacgtgcctttccacagcagctacgcgcacagccagagtctggaccggctgatgaatcccctcatcgaccagtacctgtactacttggccagaacacagagcaacgcaggaggtactgctggcaatcgggaactgcagttttatcagggcggacctaccaccatggccgaacaagcaaagaactggctgcccggaccttgcttccggcaacagagagtatccaagacgctggatcaaaataacaacagcaactttgcctggactggtgccacaaaataccatttaaatgnaagaaattcattggttaatcccggtgtcgccatggcaacccacaaggacgacgaggaacgcttcttcccttcgagcggagttctaatttttggcaaaactggagcagctaataaaactacattagaaaacgtgctcatgacaaatgaagaagaaattcgtcctaccaacccggtagctaccgaggaatacgggattgtaagcagcaacttgcaggcggctagcaccgcagcccagacacaagttgttaacaaccagggagccttacctggcatggtctggcagaaccgggacgtgtacctgcaaggtcccatttgggccaagattcctcacacggacggcaactttcacccgtctcctctaatgggtggctttggactgaaacacccgcctccccagatcctgatcaaaaacacaccggtacctgctaatcctccagaagtgtttactcctgccaagtttgcttccttcatcacgcagtacagcaccgggcaagtcagcgttgagatcgagtgggagctgcagaaagagaacagcaagcgctggaacccagagattcagtacacctccaactttgacaaacagactggagtggactttgctgttgacagccagggtgtttactctgagcct

SEQ ID NO: 5011 - DNA, 3105 bp, Adeno-associated virus
  source 1..3105: mol_type = unassigned DNA
gaattcgcccttgctgcgtcaactggaccaatgagaactttcccttcaacgattgcgtcgacaagatggtgatctggtgggaggagggcaagatgaccgccaaggtcgtggagtccgccaaggccattctgggcggaagcaaggtgcgcgtggaccaaaagtgcaagtcatcggcccagatcgaccccacgcccgtgatcgtcacctccaacaccaacatgtgcgccgtgatcgacgggaacagcaccaccttcgagcaccagcagccgctgcaggaccgcatgttcaagttcgagctcacccgccgtctggagcacgactttggcaaggtgaccaagcaggaagtcaaagagttcttccgctgggctcaggatcacgtgactgaggtggcgcatgagttctacgtcagaaagggcggagccaccaaaagacccgcccccagtgacgcggatataagcgagcccaagcgggcctgcccctcagttgcggagccatcgacgtcagacgcggaagcaccggtggactttgcggacaggtaccaaaacaaatgttctcgtcacgcgggcatgcttcagatgctgtttccctgcaagacatgcgagagaatgaatcagaatttcaacgtctgcttcacgcacggggtcagagactgctcagagtgcttccccggcgcgtcagaatctcaacccgtcgtcagaaaaaagacgtatcagaaactgtgcgcgattcatcatctgctggggcgggcacccgagattgcgtgttcggcccgcgatctcgtcaacgtggacttggatgactgtgtttctgagcaataaatgacttaaaccaggtatggctgctgacggttatcttccagattggctcgaggacaacctctctgagggcattcgcgagtggtgggacctgaaacctggagcccccaagcccaaggccaaccagcagaagcaggacgacggccggggtctggtgcttcctggctacaagtacctcggacccttcaacggactcgacaagggggagcccgtcaacgcggcggacgcagcggccctcgagcacgacaaggcctacgaccagcagctcaaagcgggtgacaatccgtacctgcggtataaccacgccgacgccgagtttcaggagcgtctgcaagaagatacgtcttttgggggcaacctcgggcgagcagtcttccaggccaagaagagggtactcgaacctctgggcctggttgaagaaggtgctaagacggctcctggaaagaagagaccgttagagtcaccacaagagcccgactcctcctcaggaatcggcaaaaaaggcaaacaaccagccaaaaagagactcaactttgaagaggacactggagccggagacggaccccctgaaggatcagataccagcgccatgtcttcagacattgaaatgcgtgcagcaccgggcggaaatgctgtcgatgcgggacaaggttccgatggagtgggtaatgcctcgggtgattggcattgcgattccacctggtctgagggcaaggtcacaacaacctcgaccagaacctgggtcttgcccacctacaacaaccacttgtacctgcggctcggaacaacatcaaacagcaacacctacaacggattctccaccccctggggatactttgactttaacagattccactgtcacttctcaccacgtgactggcaaagactcatcaacaacaactggggactacgaccaaaagccatgcgcgttaaaatcttcaatatccaagttaaggaggtcacaacgtcgaacggcgagactacggtcgctaataaccttaccagcacggttcagatatttgcggactcgtcgtatgagctcccgtacgtgatggacgctggacaagagggaagtctgtctcctttccccaatgacgtcttcatggtgcctcaatatggctactgtggcattgtgactggcgaaaatcagaaccagacggacagaaatgctttctactgcctggagtattttccttcacaaatgctgagaactggcaataactttgaaatggcttacaactttgggaaggtgccgttccactcaatgtatgcttacagccagagcccggacagactgatgaatcccctcctggaccagtacctgtggcacttacagtcgaccacctctggagagactctgaatcaaggcaatgcagcaaccacatttggaaaaatcaggagtggagactttgccttttacagaaagaactggctgcctgggccttgtgttaaacagcagagactctcaaaaactgccagtcaaaattacaagattcctgccagcgggggcaacgctctgttaaagtatgacacccactataccttaaacaaccgctggagcaacatagcgcctggacctccaatggcaacagctggaccttcagatggggacttcagcaacgcccagctcatcttccctggaccatcagtcaccggaaacacaacaacctcagcaaacaatctgttgtttacatcagaagaagaaattgctgccaccaacccaagagacacggacatgtttggtcagattgctgacaataatcagaatgctacaactgctcccataaccggcaacgtgactgctatgggagtgcttcctggcatggtgtggcaaaacagagacatttactaccaagggccaatttgggccaagatcccacacgcggacggacattttcatccttcaccgctaattggcggttttggactgaaacatccgcctccccagatatttatcaaaaacacccccgtacctgccaatcctgcgacaaccttcactgcagccagagtggactctttcatcacacaatacagcaccggccaggtcgctgttcagattgaatgggaaatcgaaaaggaacgctccaaacgctggaatcctgaagtgcagtttacttcaaactatgggaaccagtcttctatgttgtgggctcccgatacaactgggaagtatacagagccgcgggttattggctctcgttatttgactaatcatttgtaactgcctagttaatcaataaaccgtgtgattcgtttcagttgaactttggtctctgcgaagggcgaattc

SEQ ID NO: 5012 - protein, 733 aa, Adeno-associated virus
MAADGYLPDWLEDNLSEGIREWWDLKPGAPKPKANQQKQDDGRGLVLPGYKYLGPFNGLDKGEPVNAADAAALEHDKAYDQQLKAGDNPYLRYNHADAEFQERLQEDTSFGGNLGRAVFQAKKRVLEPLGLVEEGAKTAPGKKRPLESPQEPDSSSGIGKKGKQPAKKRLNFEEDTGAGDGPPEGSDTSAMSSDIEMRAAPGGNAVDAGQGSDGVGNASGDWHCDSTWSEGKVTTTSTRTWVLPTYNNHLYLRLGTTSNSNTYNGFSTPWGYFDFNRFHCHFSPRDWQRLINNNWGLRPKAMRVKIFNIQVKEVTTSNGETTVANNLTSTVQIFADSSYELPYVMDAGQEGSLPPFPNDVFMVPQYGYCGIVTGENQNQTDRNAFYCLEYFPSQMLRTGNNFEMAYNFEKVPFHSMYAHSQSLDRLMNPLLDQYLWHLQSTTSGETLNQGNAATTFGKIRSGDFAFYRKNWLPGPCVKQQRFSKTASQNYKIPASGGNALLKYDTHYTLNNRWSNIAPGPPMATAGPSDGDFSNAQLIFPGPSVTGNTTTSANNLLFTSEEEIAATNPRDTDMFGQIADNNQNATTAPITGNVTAMGVLPGMVWQNRDIYYQGPIWAKIPHADGHFHPSPLIGGFGLKHPPPQIFIKNTPVPANPATTFTAARVDSFITQYSTGQVAVQIEWEIEKERSKRWNPEVQFTSNYGNQSSMLWAPDTTGKYTEPRVIGSRYLTNHL

SEQ ID NO: 5013 - DNA, 3105 bp, Adeno-associated virus
  source 1..3105: mol_type = unassigned DNA
gaattcgcccttgctgcgtcaactggaccaatgagaactttcccttcaacgattgcgtcgacaagatggtgatctggtgggaggagggcaagatgaccgccaaggtcgtggagtccgccaaggccattctgggcggaagcaaggtgcgcgtggaccaaaagtgcaagtcatcggcccagatcgaccccacgcccgtgatcgtcacctccaacaccaacatgtgcgccgtgatcgacgggaacagcaccaccttcgagcaccagcagccgctgcaggaccgcatgttcaagttcgagctcacccgccgtctggagcacgactttggcaaggtgaccaagcaggaagtcaaagagttcttccgctgggctcaggatcacgtgactgaggtggcgcatgagttctacgtcagaaagggcggagccaccaaaagacccgcccccagtgacgcggatataagcgagcccaagcgggcctgcccctcagttgcggagccatcgacgtcagacgcggaagcaccggtggactttgcggacaggtaccaaaacaaatgttctcgtcacgcgggcatgcttcagatgctgtttccctgcaagacatgcgagagaatgaatcagaatttcaacgtctgcttcacgcacggggtcagagactgctcagagtgcttccccggcgcgtcagaatctcaacccgtcgtcagaaaaaagacgtatcagaaactgtgcgcgattcatcatctgctggggcgggcacccgagattgcgtgttcggcctgcgatctcgtcaacgtggacttggatgactgtgtttctgagcaataaatgacttaaaccaggtatggctgctgacggttatcttccagattggctcgaggacaacctctctgagggcattcgcgagtggtgggacctgaaacctggagcccccaagctcaaggccaaccagcagaagcaggacgacggccggggtctggtgcttcctggctacaagtacctcggacccttccacggactcgacaagggggagcccgtcaacgcggcggacgcagcggccctcgagcacgacaaggcctacgaccagcagctcaaagcgggtgacaatccgtacctgcggtataaccacgccgacgccgagtttcaggagcgtctgcaagaagatacgtcttttgggggcaacctcgggcgagcagtcttccaggccaagaagagggtactcgaaccactgggcctggttgaagaaggtgctaagacggctcctggaaagaagagaccgttagagtcaccacaagagcccgactcctcctcaggaatcggcaaaaaaggcaaacaaccagccaaaaagagactcaactttgaagaggacactggagccggagacggaccccctgaaggatcagataccagcgccatgtcttcagacattgaaatgcgtgcagcaccgggcggaaatgctgtcgatgcgggacaaggttccgatggagtgggtaatgcctcgggtgattggcattgcgattccacctggtctgagggcaaggtcacaacaacctcgaccagaacctgggtcttgcccacctacaacaaccacttgtacctgcggctcggaacaacatcaaacagcaacacctacaacggattctccaccccctggggatactttgactttaacagattccactgtcacttctcaccacgtgactggcaaagactcatcaacaacaactggggactacgaccaaaagccatgcgcgttaaaatcttcaatatccaagttaaggaggtcacaacgtcgaacggcgagactacggtcgctaataaccttaccagcacggttcagatatttgcggactcgtcgtatgagctcccgtacgtgatggacgctggacaagagggaagtctgcctcctttccccaatgacgtcttcatggtgcctcaatatggctactgtggcattgtgactggcgaaaatcagaaccagacggacagaaatgctttctactgcctggagtattttccttcacaaatgctgagaactggcaataactttgaaatggcttacaactttgagaaggtgccgttccactcaatgtatgctcacagccagagcctggacagactgatgaatcccctcctggaccagtacctgtggcacttacagtcgaccacctctggagagactctgaatcaaggcaatgcagcaaccacatttggaaaaatcaggagtggagactttgccttttacagaaagaactggctgcctgggccttgtgttaaacagcagagattctcaaaaactgccagtcaaaattacaagattcctgccagcgggggcaacgctctgttaaagtatgacacccactataccttaaacaaccgctggagcaacatagcgcctggacctccaatggcaacagctggaccttcagatggggacttcagcaacgcccagctcatcttccctggaccatcagtcaccggaaacacaacaacctcagcaaacaatctgttgtttacatcagaaggagaaattgctgccaccaacccaagagacacggacatgtttggtcagattgctgacaataatcagaatgctacaactgctcccataaccggcaacgtgactgctatgggagtgcttcctggcatggtgtggcaaaacagagacatttactaccaagggccaatttgggccaagatcccacacgcggacggacattttcatccttcaccgctaattggcggttttggactgaaacatccgcctccccagatatttatcaaaaacacccccgtacctgccaatcctgcgacaaccttcactgcagccagagtggactctttcatcacacaatacagcaccggccaggtcgctgttcagattgaatgggaaatcgaaaaggaacgctccaaacgccggaatcctgaagtgcagtttacttcaaactatgggaaccagtcttctatgttgtgggctcccgatacaactgggaagtatacagagccgcgggttattggctctcgttatttgactaatcatttgtaactgcctagttaatcaataaaccgtgtgattcgtttcagttgaactttggtctctgcgaagggcgaattc

SEQ ID NO: 5014 - DNA, 3105 bp, Adeno-associated virus
  source 1..3105: mol_type = unassigned DNA
gaattcgcccttcgcagagaccaaagttcaactgaaacgaatcacacggtttattgattaactaggcagttacaaatgattagtcaaataacgagagccaataacccgcggctctgtatacttcccagttgtatcgggagcccacaacatagaagactggttcccacagtttgaagtaaactgcacttcaggattccagcgtttggagcgttccttttcgatttcccattcaatctgaacagcgacctggccggtgctgtattgtgtgatgaaagagtccactctggctgcagtgaaggttgtcgcaggataggcaggtacgggggtgtttttgataaatatctggggaggcggatgtttcagtccaaaaccgccaattagcggtgaaggatgaaaatgtccgtccgcgtgtgggatcttggcccaaattggcccttggtagtaaatgtctctgttttgccacaccatgccaggaagcactcccatagcagtcacgttgccggttatgggagcagttgtagcattctgattattgtcagcaatctgaccaaacatgtccgtgtctcttgggttggtggcagcaatttcttcttctgatgtaaacaacagattgtttgctgaggttgttgtgtttccggtgactgatggtccagggaagatgagctgggcgttgctgaagtccccatctgaaggtccagctgttgccattggaggtccaggcgctatgttgctccagcggttgtttaaggtatagtgggtgtcatactttaacagagcgttgcccccgctggcaggaatcttgtaattttgactggcagtttttgagaatctctgctgtttaacacaaggcccaggcagccagttctttctgtaaaaggcaaagtctccactcctgatttttccaaatgtggttgctgcattgccttgattcagagtctctccagaggtggtcgactgtaagtgccacaggtactggtccaggaggggattcatcagtccgtccaggctctggctgtgagcatacattgagtggaacggcaccttctcaaagttgtaagccgtttcaaagttattgccagttctcagcatttgtgaaggaaaatactccaggcagtagaaagcatttctgtccgtctggttctgattttcgccagtcacaatgccacagtagccatattgaggcaccatgaagacgtcattggggaaaggaggcagacttccctcttgtccagcgtccatcacgtacgggagctcatacgacgagtccgcaaatatctgaaccgtgctggtaaggttattagcgaccgtagtctcgccgttcgacgttgtgacctccttaacttggatattgaagattttaacgcgcatggcttttggtcgtagtccccagttgttgttgatgagtctttgccagtcacgtggtgagaagtgacagtggaatctgttaaagtcaaagtatccccagggggtggagaatccgttgtaggtgttgctgtttgatgttgttccgagccgcaggtacaagtggttgttgtaggtgggcaagacccaggttctggtcgaggttgttgtgaccttgccctcagaccaggtggaatcgcaatgccaatcacccgaggcattacccactccatcggaaccttgtcccgcatcgacagcatttccgcccggtgctgcacgcatttcaatgtctgaagacatggcgctggtatctgatccttcagggggtccgtctccggctccagtgtcctcttcaaagttgagtctctttttggctggttgtttgccttttttgccgattcctgaggaggagtcgggctcttgtggtgactctaacggtctcttctttccaggagccgtcttagcaccttcttcaaccaggcccagaggttcgagtaccctcttcttggcctggaagactgctcgcccgaggttgcccccaaaagacgtatcttcttgcagacgctcctgaaactcggcgtcggcgtggttataccgcaggtacggattgtcacccgctttgagctgctggtcgtaggccttgtcgtgctcgagggccgctgcgtccgccgcgttgacgggctcccccttgtcgagtccgttgaagggtccgaggtactcgtagccaggaagcaccagaccccggccgtcgtcctgcttctgctggttggccttgggcttgggggctccaggtttcaggtcccaccactcgcgaatgccctcagagaggttgtcctcgagccaatctggaagataaccgtcagcagccatacctggtttaagtcatttattgctcagaaacacagtcatccaagtccacgttgacgagatcgcaggccgaacacgcaatctcgggtgcccgccccagcagatgatgaatcgcgcacagtttctgatacgtcttttttctgacgacgggttgagattctgacgcgccggggaagcactctgagcagtctctgaccccgtgcgtgaagcagacgttgaaattctgattcattctctcgcatgtcttgcagggaaacagcatctgaagcatgcccgcgtgacgagaacatttgttttggtacctgtccgcaaggtccaccggtgcttccgcgtctgacgtcgatggctccgcaactgaggggcaggcccgcttgggctcgcttatatccgcgtcactgggggcgggtcttttggtggctccgccctttctgacgtagaactcatgcgccacctcagtcacgtgatcctgagcccagcggaagaactctttgacttcctgcttggtcaccttgccaaagtcgtgctccagacggcgggtgagctcgaacttgaacatgcggtcctgcagcggctgctggtgctcgaaggtggtgctgttcccgtcgatcacggcgcacatgttggtgttggaggtgacgatcacgggcgtggggtcgatctgggccgatgacttgcacttttggtccacgcgcaccttgcttccgcccagaatggccttggcggactccacgaccttggcggtcatcttgccctcctcccaccagatcaccatcttgtcgacgcaatcgttgaagggaaagttctcattggtccagttgacgcagcaagggcgaattc

SEQ ID NO: 5015 - DNA, 3094 bp, Adeno-associated virus
  source 1..3094: mol_type = unassigned DNA
gaattcgcccttgctgcgtcaactggaccaagagaactttcccttcaacgattgcgtcgacaagatggtgatctggtgggaggagggcaagatgacggccaaggtcgtggagtccgccaaagccattctgggcggaagcaaggtgcgcgtcgaccaaaagtgcaagtcctcggcccagatcgatcccacccccgtgatcgtcacctccaacaccaacatgtgcgccgtgatcgacgggaacagcaccaccttcgagcaccagcagccgttgcaggaccggatgttcaaatttgaactcacccgccgtctggaacacgactttggcaaggtgaccaagcaggaagtcaaagagttcttccgctgggctagtgatcacgtgactgaggtgacgcatgagttctacgtcagaaagggcggagccagcaaaagacccgcccccgatgacgcggatataagcgagcccaagcgggcctgtccctcagtcacggacccatcgacgtcagacgcggaaggagctccggtggactttgccgacaggtaccaaaacaaatgttctcgtcacgcgggcatgcttcagatgctgtttccctgcaaaacgtgcgagagaatgaatcagaatttcaacatttgcttcacgcacggggtcagagactgtttagaatgtttccccggcgtgtcagaatctcaaccggtcgtcagaaaaaagacgtatcggaagctgtgtgcgattcatcatctgctggggcgggcacccgagattgcttgctcggcctgcgacctggtcaacgtggacctggacgactgtgtttctgagcaataaatgacttaaaccgggtatggctgccgatggttatcttccagattggctcgaggacaacctctctgagggcattcgcgagtggtgggacctgaaacctggagccccgaaacccaaagccaaccagcaaaagcaggacgacggccggggtctggtgcttcctggctacaagtacctcggacccttcaacggactcgacaagggggagcccgtcaacgcggcggacgcagcggccctcgagcacgacaaggcctacgaccagcagctcaaagcgggtgacaatccgtacctgcggtataaccacgccgacgccgagtttcaggagcgtctgcaagaagatacgtcatttgggggcaacctcgggcgagcagtcttccaggccaagaagcgggttctcgaacctctcggtctggttgaggaaggcgctaagacggctcctggaaagaagagacccatagactctccagactcctccacgggcatcggcaaaaaaggccagcagcccgctaaaaagaagctcaattttggtcagactggcgactcagagtcagtccccgaccctcaacctcttggagaacctccagcagcgccctctagtgtgggatctggtacaatggctgcaggcggtggcgcaccaatggcagacaataacgaaggtgccgacggagtgggtaatgcctcaggaaattggcattgcgattccacatggctgggcgacagagtcatcaccaccagcaccagaacctgggccctccccacctacaacaaccacctctacaagcaaatctccagcagcagctcaggagccaccaatgacaaccactacttcggctacagcaccccctgggggtattttgactttaacagattccactgccacttctcaccacgtgactggcagcgactcatcaacaacaactggggattccggcccaagaagctgcggttcaagctcttcaacatccaggtcaaggaggtcacaacgaatgacggcgtcacgaccatcgctaataaccttaccagcacggttcaggtcttctcggactcggaataccagctgccgtacgtcctcggctctgcgcaccagggctgcctgcctccgttcccggcggacgtcttcatgattcctcagtacggctacctgactctgaacaacggcagccaatcggtgggccgttcctccttctactgcctggaatatttcccctctcaaatgctgagaacgggcaacaactttgagttcagttacagcttcgaggacgtgcctttccacagcagctacgcgcacagccagagcctagaccggctgatgaaccctctcatcgaccagtacctgtactacctggcccggacccagagcaccacgggttccaccagggaactgcaatttcatcaagctgggcccaatactatggccgagcagtcaaagaactggctgcctggaccctgctataggcaacagggactgtcaaagaacttggactttaacaacaacagcaattttgcctggactgctgccactaaatatcatctgaatggcagaaactctttgaccaatcctggcattcccatggcaaccaacaaggatgatgaggaccagttctttcccatcaacggggtactggtttttggcaagacgggagctgccaacaaaactacgctggaaaacgttctgatgaccagcgaggaggagatcaagaccactaaccctgtggctacagaagaatacggtgtggtctccagcaacctgcagccgtctacagccgggcctcaatcacagactatcaacagccagggagcactgcctggcatggtctggcagaaccgggacgtgtatctgcagggtcccatctgggccaaaattcctcacacggatggcaactttcacccgtctcctctgatgggcggttttggactcaaacacccgcctccacagatcctgatcaaaaacacacctgtacctgctaatcctccggaggtgtttactcctgccaagtttgcctccttcatcacgcagtacagcaccggacaagtcagcgtggaaatcgagtgggagctgcagaaagaaaacagcaagcgctggaacccagaaattcagtatacttccaattatgccaagtctaataatgttgaatttgctgtgaaccctgatggtgtttatactgagcctcgccccattggcactcgttacctcccccgtaatctgtaattgcttgttaatcaataaaccggttgattcgtttcagttgaactttggtctctgcgaagggcgaattc

SEQ ID NO: 5016 - DNA, 3095 bp, Adeno-associated virus
  source 1..3095: mol_type = unassigned DNA
gaattcgcccttcgcagagaccaaagttcaactgaaacgaatcaaccggtttattgattaacaagcaattacagattacgggtgaggtaacgagtgccaatggggcgaggctcagtataaacaccatcagggttcacagcaaattcaacattattagacttggcataattggaagtatactgaatttctgggttccagcgcttgctgttttctttctgcagctcccactcgatttccacgctgacttgtccggtgctgtactgcgtgatgaaggaggcaaacttggcaggagtaaacacctccggaggattagcaggtacaggtgtgtttttgatcaggatctgtggaggcgggtgtttgagtccaaaaccgcccatcagaggagacgggtgaaagttgccatccgtgtgaggaattttggcccagatgggaccctgcagatacacgtcccggttctgccagaccatgccaggcagtgctccctggctgttgatagtctgtgattgaggcccggctgtagacgactgcaggttgctggagaccacaccgtattcttctgtagccacagggttagtggtcttgatctcctcctcgctggtcatcagaacgttttccagcgtagttttgttggcagctcccgtcttgccaaaaaccagtaccccgttgatgggaaagaactggtcctcatcatccttgttggttgccatgggaatgccaggattggtcaaagagtttctgccattcagatgatatttagtggcagcagtccaggcaaaattgctgttgttgttaaagtccaagttctttgacagtctctgttgcctatagcagggtccaggcagccagttctttgactgctcggccatagtattgggcccagcttgatgaaattgcagttccctggtggaacccgtggtgctctgggtccgggccaggtagtacaggtactggtcgatgagagggttcatcagccggtctaggctctggctgtgcgcgtagctgctgtggaaaggcacgtcctcgaagctgtaactgaactcaaagttgttgcccgttctcagcatttgagaggggaaatattccaggcagtagaaggaggaacggcccaccgattggctgccgttgtccagagtcaggtagccgtactgaggaatcatgaagacgtccgccgggaacggaggcaggcagccctggtgcgcagagccgaggacgtacggcagctggtattccgagtccgagaagacctgaaccgtgctggtaaggttattagcgatggtcgtgacgccgtcattcgttgtgacctccttgacctggatgttgaggagcttgaaccgcagcttcttgggccggaatccccagttgttgttgatgagtcgctgccagtcacgtggtgagaagtggcagtggaatctgttaaagtcaaaatacccccagggggtgctgtagccgaagtagtggttgtcattggtggctcctgagctgctgctggagatttgcttgtagaggtggttgttgtaggtggggagggcccaggttctggtgctggtggtgatgactctgtcgcccagccatgtggaatcgcaatgccaatttcctgaggcattacccactccgtcggcaccttcgttattgtctgccattggtgcgccaccgcctgcagccattgtaccagatcccacactagagggcgctgctggaggttctccaagaggttgagggtcggggactgactctgagtcgccagtctgaccaaaattgagcttctttttagcgggctgctggccttttttgccgatgcccgtggaggagtctggagagcctatgggtctcttctttccaggagccgtcttagcgccttcctcaaccagaccgagaggttcgagaacccgcttcttggcctggaagactgctcgcccgaggttgcccccaaatgacgtatcttcttgcagacgctcctgaaactcggcgtcggcgtggttataccgcaggtacggattgtcacccgctttgagctgctggtcgtaggccttgtcgtgctcgagggccgctgcgtccgccgcgttgacgggctcccccttgtcgagtccgttgaagggtccgaggtacttgtagccaggaagcaccagaccccggccgtcgtcctgcttttgctggttggctttgggtttcggggctccaggtttcaggtcccaccactcgcgaatgccctcagagaggttgtcctcgagccaatctggaagataaccatcggcagccatacctggtttaagtcatttattgctcagaaacacagtcgtccaggtccacgttgaccaggtcgcaggccgagcaagcaatctcgggtgcccgccccagcagatgatgaatcgcacacagcttccgatacgtcttttttctgacgaccggttgagattctgacacgccggggaaacattctaaacagtctctgaccccgtgcgtgaagcaaatgttgaaattctgattcattctctcgcacgttttgcagggaaacagcacctgaagcatgcccgcgtgacgagaacatttgttttggtacctgtcggcaaagtccaccggagctccttccgcgtctgacgtcgatgggtccgtgactgagggacgggcccgcttgggctcgcttatatccgcgtcatcgggggcgggtcttttgctggctccgccctttctgacgtagaactcatgcgtcacctcagtcacgtgatcactagcccagcggaagaactctttgacttcctgctttgtcaccttgccaaagtcgtgttccagacggcgggtgagttcaaatttgaacatccggtcctgcaacggttgctggtgctcgaaggtggtgctgttcccgtcgatcacggcgcacatgttggtgttggaggtgacgatcacgggggtgggatcgatctgggcggacgacttgcacttttggtccacgcgcaccttgctgccgccgagaatggccttggcggactccacgaccttggccgtcatcttgccctcctcccaccagatcaccatcttgtcgacgcaatcgttgaagggaaagttctcattggtccagttgacgcagcaagggcgaattc

SEQ ID NO: 5017 - DNA, 3095 bp, Adeno-associated virus
  source 1..3095: mol_type = unassigned DNA
gaattcgcccttcgcagagaccaaagttcaactgaaacgaatcaaccggtttattgattaacaagcaattacagattacgggtgaggtaacgagtgccaatggggcgaggctcagtataaacaccatcagggttcacagcaaattcaacattattagacttggcataattggaagtatactgaatttctgggttccagcgcttgctgttttctttctgcagctcccactcgatttccacgctgacttgtccggtgctgtactgcgtgatgaaggaggcaaacttggcaggagtaaacacctccggaggattagcaggtacaggtgtgtttttgatcaggatctgtggaggcgggtgttcgagtccaaaaccgcccatcagaggagacgggtgaaagttgccatccgtgtgaggaattttggcccagatgggaccctgcagatacacgtcccggttctgccagaccatgccaggcagtgctccctggctgttgatagtctgtgattgaggcccggctgtagacgactgcaggttgctggagaccacaccgtattcttctgtagccacagggttagtggtcttgatctcctcctcgctggtcatcagaacgttttccagcgtagttttgttggcagctcccgtcttgccaaaaaccagtaccccgttgatgggaaagaactggtcctcatcatccttgttggttgccatgggaatgccaggattggtcaaagagtttctgccattcagatgatatttagtggcagcagtccaggcaaaattgctgttgttgttaaagtccaagttctttgacagtctctgttgcctatagcagggtccaggcagccagttctttgactgctcggccatagtattgggcccagcttgatgaaattgcagttccctggtggaacccgtggtgctctgggtccgggccaggtagtacaggtactggtcgatgagagggttcatcagccggtctaggctctggctgtgcgcgtagctgctgtggaaaggcacgtcctcgaagctgtaactgaactcaaagttgttgcccgttctcagcatttgagaggggaaatattccaggcagtagaaggaggaacggcccaccgattggctgccgttgttcagagtcaggtagccgtactgaggaatcatgaagacgtccgccgggaacggaggcaggcagccctggtgcgcagagccgaggacgtacggcagctggtattccgagtccgagaagacctgaaccgtgctggtaaggttattagcgatggtcgtgacgccgtcattcgttgtgacctccttgacctggatgttgaagagcttgaaccgcagcttcttgggccggaatccccagttgttgttgatgagtcgctgccagtcacgtggtgagaagtggcagtggaatctgttaaagtcaaaatacccccagggggtgctgtagccgaagtagtggttgtcattggtggctcctgagctgctgctggagatttgcttgtagaggtggttgttgtaggtggggagggcccaggttctggtgctggtggtgatgactctgtcgcccagccatgtggaatcgcaatgccaatttcctgaggcattacccactccgtcggcaccttcgttattgtctgccgttggtgcgccaccgcctgcagccattgtaccagatcccacactagagggcgctgctggaggttctccaagaggttgagggtcggggactgactctgagtcgccagtctgaccaaaattgagcttctttttagcgggctgctggccttttttgccgatgcccgtggaggagtctggagagtctatgggtctcttctttccaggagccgtcttagcgccttcctcaaccagaccgagaggttcgagaacccgcttcttggcctggaagactgctcgcccgaggttgcccccaaatgacgtatcttcttgcaggcgctcctgaaactcggcgtcggcgtggttataccgcaggtacggattgtcacccgctttgagctgctggtcgtaggccttgtcgtgctcgagggccgctgcgtccgccgcgttgacgggctcccccttgtcgagtccgttgaagggtccgaggtacttgtagccaggaagcaccagaccccggccgtcgtcctgcttttgctggttggctttgggtttcggggctccaggtttcaggtcccaccactcgcgaatgccctcagagaggttgtcctcgagccaatctggaagataaccatcggcagccatacctggtttaagccatttattgctcagaaacacagtcgtccaggtccacgttgaccaggtcgcaggccgagcaggcaatctcgggtgcccgccccagcagatgatgaatcgcacacagcttccgatacgtcttttttctgacgaccggttgagattctgacacgccggggaaacattctaaacagtctctgaccccgtgcgtgaagcaaatgttgaaattctgattcattctctcgcacgttttgcagggaaacagcatctgaagcatgcccgcgtggcgagaacatttgttttggtacctgtcggcaaagtccaccggagctccttccgcgtctgacgtcgatgggtccgtgactgagggacaggcccgcttgggctcgcttatatccgcgtcatcgggggcgggtcttttgctggctccgccctttctgacgtagaactcatgcgtcacctcagtcacgtgatcactagcccagcggaagaactctttgacttcctgctttgtcaccttgccaaagtcgtgttccagacggcgggtgagttcaaatttgaacatccggtcctgcaacggctgctggtgctcgaaggtggtgctgttcccgtcgatcacggcgcgcatgttggtgttggaggtgacgatcacgggggtgggatcgatctgggcggacgacttgcacttttggtccacgcgcaccttgctgccgccgagaatggccttggcggactccacgaccttggccgtcatcttgccctcctcccaccagatcaccatcttgtcgacgcaatcgttgaagggaaagttctcattggtccagttgacgcagcaagggcgaattc

SEQ ID NO: 5018 - protein, 729 aa, Adeno-associated virus; identical to SEQ ID NO: 4833

SEQ ID NO: 5019 - protein, 729 aa, Adeno-associated virus
MAADGYLPDWLEDNLSEGIREWWDLKPGAPKPKANQQKQDDGRGLVLPGYKYLGPFNGLDKGEPVNAADAAALEHDKAYDQQLKAGDNPYLRYNHADAEFQERLQEDTSFGGNLGRAVFQAKKRVLEPLGLVEEGAKTAPGKKRPIDSPDSSTGIGKKGQQPAKKKLNFGQTGDSESVPDPQPLGEPPAAPSSVGSGTMAAGGGAPTADNNEGADGVGNASGNWHCDSTWLGDRVITTSTRTWALPTYNNHLYKQISSSSSGATNDNHYFGYSTPWGYFDFNRFHCHFSPRDWQRLINNNWGFRPKKLRFKLFNIQVKEVTTNDGVTTIANNLTSTVQVFSDSEYQLPYVLGSAHQGCLPPFPADVFMIPQYGYLTLNNGSQSVGRSSFYCLEYFPSQMLRTGNNFEFSYSFEDVPFHSSYAHSQSLDRLMNPLIDQYLYYLARTQSTTGSTRELQFHQAGPNTMAEQSKNWLPGPCYRQQRLSKNLDFNNNSNFAWTAATKYHLNGRNSLTNPGIPMATNKDDEDQFFPINGVLVFGKTGAANKTTLENVLMTSEEEIKTTNPVATEEYGVVSSNLQSSTAGPQSQTINSQGALPGMVWQNRDVYLQGPIWAKIPHTDGNFHPSPLMGGFGLKHPPPQILIKNTPVPANPPEVFTPAKFASFITQYSTGQVSVEIEWELQKENSKRWNPEIQYTSNYAKSNNVEFAVNPDGVYTEPRPIGTRYLTRNL

SEQ ID NO: 5020 - protein, 729 aa, Adeno-associated virus
MAADGYLPDWLEDNLSEGIREWWDLKPGAPKPKANQQKQDDGRGLVLPGYKYLGPFNGLDKGEPVNAADAAALEHDKAYDQQLKAGDNPYLRYNHADAEFQERLQEDTSFGGNLGRAVFQAKKRVLEPLGLVEEGAKTAPGKKRPIDSPDSSTGIGKKGQQPAKKKLNFGQTGDSESVPDPQPLGEPPAAPSSVGSGTMAAGGGAPMADNNEGADGVGNASGNWHCDSTWLGDRVITTSTRTWALPTYNNHLYKQISSSSSGATNDNHYFGYSTPWGYFDFNRFHCHFSPRDWQRLINNNWGFRPKKLRFKLFNIQVKEVTTNDGVTTIANNLTSTVQVFSDSEYQLPYVLGSAHQGCLPPFPADVFMIPQYGYLTLNNGSQSVGRSSFYCLEYFPSQMLRTGNNFEFSYSFEDVPFHSSYAHSQSLDRLMNPLIDQYLYYLARTQSTTGSTRELQFHQAGPNTMAEQSKNWLPGPCYRQQRLSKNLDFNNNSNFAWTAATKYHLNGRNSLTNPGIPMATNKDDEDQFFPINGVLVFGKTGAANKTTLENVLMTSEEEIKTTNPVATEEYGVVSSNLQSSTAGPQSQTINSQGALPGMVWQNRDVYLQGPIWAKIPHTDGNFHPSPLMGGFGLKHPPPQILIKNTPVPANPPEVFTPAKFASFITQYSTGQVSVEIEWELQKENSKRWNPEIQYTSNYAKSNNVEFAVNPDGVYTEPRPIGTRYLTRNL

SEQ ID NO: 5021 - DNA, 2217 bp, Adeno-associated virus
  source 1..2217: mol_type = unassigned DNA
atggctgctgacggttatcttccagattggctcgaggacaacctctctgagggcattcgcgagtggtgggacctgaaacctggagcccccaagcccaaggccaaccagcagaagcaggacgacggccggggtctggtgcttcctggctacaagtacctcggacccttcaacggactcgacaagggggagcccgtcaacgcggcggacgcagcggccctcgagcacgacaaggcctacgaccagcagctcaaagcgggtgacaatccgtacctgcggtataaccacgccgacgccgagtttcaggagcgtctacaagaagatacgtcttttgggggcaacctcgggcgagcagtcttccaggccaagaagcgggttctcgaacctctcggtctggttgaggaagctgctaagacggctcctggaaagaagagaccggtagaaccgtcacctcagcgttcccccgactcctccacgggcatcggcaagaaaggccagcggcccgctaaaaagagactgaactttggtcagactggcgactcagagtcagtccccgaccctcaaccaatcggagaaccaccagcaggcccctctggtctgggatctggtacaatggctgcaggcggtggcgctccaatggcagacaataacgaaggcgccgacggagtgggtagttcctcaggaaattggcattgcgattccacatggctgggcgacagagtcatcaccaccagcacccgaacctgggccctgcccacctacaacaaccacctctacaagcaaatatccaatgggacatcgggaggaagcaccaacgacaacacctacttcggctacagcaccccctgggggtattttgacttcaacagattccactgccacttctcaccacgtgactggcagcgactcatcaacaacaactggggattccggccaaaaagactcagcttcaagcccttcaacatccaggtcaaggaggtcacgcagaatgaaggcaccaagaccatcgccaataaccttaccagcacgattcaggtatttacggactcggaataccagctgccgtacgtcctcggctccgcgcaccagggctgcctgcctccgttcccggcggacgtcttcatgattccccagtacggctaccttacactgaacaatggaagtcaagccgtaggccgttcctccttctactgcctggaatattttccatctcaaatgctgcgaactggaaacaattttgaattcagctacaccttcgaggacgtgcctttccacagcagctacgcacacagccagagcttggaccgactgatgaatcctctcatcgaccagtacctgcactacttatccagaactcagtccacaggaggaactcaaggtacccagcaattgttattttctcaagctgggcctgcaaacatgtcggctcaggctaagaactggctacctggaccttgctaccggcagcagcgagtctctacgacactgtcgcaaaacaacaacagcaactttgcttggactggtgccaccaaatatcacctgaacggaagagactctttggtaaatcccggtgtcgccatggcaacccacaaggacgacgaggaacgcttcttcccgtcgagtggagtcctgatgtttggaaaacagggtgctggaagagacaatgtggactacagcagcgttatgctaaccagcgaagaagaaattaaaaccactaaccctgtagccacagaacaatacggtgtggtggctgacaacttgcagcaaaccaatacagggcctattgtgggaaatgtcaacagccaaggagccttacctggcatggtctggcagaaccgagacgtgtacctgcagggtcccatctgggccaagattcctcacacggacggcaacttccacccttcaccgctaatgggaggatttggactgaagcacccacctcctcagatcctgatcaagaacacgccggtacctgcggatcctccaacaacgttcagccaggcgaaattggcttccttcattacgcagtacagcaccggacaggtcagcgtggaaatcgagtgggagctgcagaaggagaacagcaaacgctggaacccagagattcagtacacttcaaactactacaaatctacaaatgtggactttgctgtcaatacagagggaacttattctgagcctcgccccattggtactcgctacctcacccgtaatctgtaa

SEQ ID NO: 5022 - protein, 738 aa, Adeno-associated virus
MAADGYLPDWLEDNLSEGIREWWDLKPGAPKPKANQQKQDDGRGLVLPGYKYLGPFNGLDKGEPVNAADAAALEHDKAYDQQLKAGDNPYLRYNHADAEFQERLQEDTSFGGNLGRAVFQAKKRVLEPLGLVEEAAKTAPGKKRPVEPSPQRSPDSSTGIGKKGQRPAKKRLNFGQTGDSESVPDPQPIGEPPAGPSGLGSGTMAAGGGAPMADNNEGADGVGSSSGNWHCDSTWLGDRVITTSTRTWALPTYNNHLYKQISNGTSGGSTNDNTYFGYSTPWGYFDFNRFHCHFSPRDWQRLINNNWGFRPKRLSFKPFNIQVKEVTQNEGTKTIANNLTSTIQVFTDSEYQLPYVLGSAHQGCLPPFPADVFMIPQYGYLTLNNGSQAVGRSSFYCLEYFPSQMLRTGNNFEFSYTFEDVPFHSSYAHSQSLDRLMNPLIDQYLHYLSRTQSTGGTQGTQQLLFSQAGPANMSAQAKNWLPGPCYRQQRVSTTLSQNNNSNFAWTGATKYHLNGRDSLVNPGVAMATHKDDEERFFPSSGVLMFGKQGAGRDNVDYSSVMLTSEEEIKTTNPVATEQYGVVADNLQQTNTGPIVGNVNSQGALPGMVWQNRDVYLQGPIWAKIPHTDGNFHPSPLMGGFGLKHPPPQILIKNTPVPADPPTTFSQAKLASFITQYSTGQVSVEIEWELQKENSKRWNPEIQYTSNYYKSTNVDFAVNTEGTYSEPRPIGTRYLTRNL

SEQ ID NO: 5023 - DNA, 2217 bp, Adeno-associated virus
  source 1..2217: mol_type = unassigned DNA
atggctgctgacggttatcttccagattggctcgaggacaacctctctgagggcattcgcgagtggtgggacctgaaacctggagcccccaagcccaaggccaaccagcagaagcaggacgacggccggggtctggtgcttcctggctacaagtacctcggacccttcaacggactcgacaagggggagcccgtcaacgcggcggacgcagcggccctcgagcacgacaaggcctacgaccagcagctcaaagcgggtgacaatccgtacctgcggtataaccacgccgacgccgagtttcaggagcgtctgcaagaagatacgtcttttgggggcaacctcgggcgagcagtcttccaggccaagaagcgggttctcgaacctctcggtctggttgaggaagctgctaagacggctcctggaaagaagagaccggtagaaccgtcacctcagcgttcccccgactcctccacgggcatcggcaagaaaggccagcagcccgctaaaaagagactgaactttggtcagactggcgactcagagtcagtccccgaccctcaaccaatcggagaaccaccagcaggcccctctggtctgggatctggtacaatggctgcaggcggtggcgctccaatggcagacaataacgaaggcgccgacggagtgggtagttcctcaggaaattggcattgcgattccacatggctgggcgacagagtcatcaccaccagcacccgaacctgggccctgcccacctacaacaaccacctctacaagcaaatatccaatgggacatcgggaggaagcaccaacgacaacacctacttcggctacagcaccccctgggggtattttgacttcaacagattccactgccacttctcaccacgtgactggcagcgactcatcaacaacaactggggattccggccaaaaagactcagcttcaagctcttcaacatccaggtcaaggaggtcacgcagaatgaaggcaccaagaccatcgccaataaccttaccagcacgattcaggtatttacggactcggaataccagctgccgtacgtcctcggctccgcgcaccagggctgcctgcctccgttcccggcggacgtcttcatgattccccagtacggctaccttacactgaacaatggaagtcaagccgtaggccgttcctccttctactgcctggaatattttccatctcaaatgctgcgaactggaaacaattttgaattcagctacaccttcgaggacgtgcctttccacagcagctacgcacacagccagagcttggaccgactgatgaatcctctcatcgaccagtacctgtactacttatccagaactcagtccacaggaggaactcaaggtacccagcaattgttattttctcaagctgggcctgcaaacatgtcggctcaggctaagaactggctacctggaccttgctaccggcagcagcgagtctctacgacactgtcgcaaaacaacaacagcaactttgcttggactggtgccaccaaatatcacctgaacggaagagactctttggtaaatcccggtgtcgccatggcaacccacaaggacgacgaggaacgcttcttcccgtcgagtggagtcctgatgtttggaaaacagggtgctggaagagacaatgtggactacagcagcgttatgctaaccagcgaagaagaaattaaaaccactaaccctgtagccacagaacaatacggtgtggtggctgataacttgcagcaaaccaatacggggcctattgtgggaaatgtcaacagccaaggagccttacctggcatggtctggcagaaccgagacgtgtacctgcagggtcccatctgggccaagattcctcacacggacggcaacttccacccttcaccgctaatgggaggatttggactgaagcacccacctcctcagatcctgatcaagaacacgccggtacctgcggatcctccaacaacgttcagccaggcgaaattggcttccttcattacgcagtacagcaccggacaggtcagcgtggaaatcgagtgggagctgcagaaggagaacagcaaacgctggaacccagagattcagtacacttcaaactactacaaatctacaaatgtggactttgctgtcaatacagagggaacttattctgagcctcgccccattggtactcgttacctcacccgtaatctgtaa

SEQ ID NO: 5024 - protein, 738 aa, Adeno-associated virus; identical to SEQ ID NO: 4797

SEQ ID NO: 5025 - protein, 738 aa, Adeno-associated virus
MAADGYLPDWLEDNLSEGIREWWDLKPGAPKPKANQQKQDDGRGLVLPGYKYLGPFNGLDKGEPVNAADAAALEHDKAYDQQLKAGDNPYLRYNHADAEFQERLQEDTSFGGNLGRAVFQAKKRVLEPLGLVEEAAKTAPGKKRPVEPSPQRSPDSSTGIGKKGQQPAKKRLNFGQTGDSESVPDPQPIGEPPAGPSGLGSGTMAAGGGAPMADNNEGADGVGSSSGNWHCDSTWLGDRVITTSTRTWALPTYNNHLYKQISNGTSGGSTNDNTYFGYSTPWGYFDFNRFHCHFSPRDWQRLINNNWGFRPKRLSFKLFNIQVKEVTQDEGTKTIANNLTSTIQVFTDSEYQLPYVLGSAHQGCLPPFPADVFMIPQYGYLTLNNGSQAVGRSSFYCLEYFPSQMLRTGNNFEFSYTFEDVPFHSSYAHSQSLDRLMNPLIDQYLYYLSRTQSTGGTQGTQQLLFSQAGPANMSARAKNWLPGPCYRQQRVSTTLSQNNNSNFAWTGATKYHLNGRDSLVNPGVAMATHKDDEERFFPSSGVLMFGKQGAGRDNVDYSSVMLTSEEEIKTTNPVATEQYGVVADNLQQANTGPIVGNVNSQGALPGMVWQNRDVYLQGPIWAKIPHTDGNFHPSPLMGGFGLKHPPPQILIKNTPVPADPPTTFSQAKLASFITQYSTGQVSVEIEWELQKENSKRWNPEIQYTSNYYKSTNVDFAVNSEGTYSEPRPIGTRYLTRNL

SEQ ID NO: 5026 - DNA, 2217 bp, Adeno-associated virus
  source 1..2217: mol_type = unassigned DNA
atggctgctgacggttatcttccagattggctcgaggacaacctctctgagggcattcgcgagtggtgggacctgaaacctggagcccccaagcccaaggccaaccagcagaagcaggacgacggccggggtctggtgcttcctggctacaagtacctcggacccttcaacggactcgacaagggggagcccgtcaacgcggcggacgcagcggccctcgagcacgacaaggcctacgaccagcagctcaaagcgggtgacaatccgtacctgcggtataaccacgccgacgccgagtttcaggagcgtctgcaagaagatacgtcttttgggggcaacctcgggcgagcagtcttccaggccaagaagcgggttctcgaacctctcggtctggttgaggaagctgctaagacggctcctggaaagaagagaccggtagaaccgtcacctcagcgttcccccgactcctccacgggcatcggcaagaaaggccagcagcccgctaaaaagagactgaactttggtcagactggcgactcagagtcagtccccgaccctcaaccaatcggagaaccaccagcaggcccctctggtctgggatctggtacaatggctgcaggcggtggcgctccaatggcagacaataacgaaggcgccgacggagtgggtagttcctcaggaaattggcattgcgattccacatggctgggcgacagagtcatcaccaccagcacccgaacctgggccctgcccacctacaacaaccacctctacaagcaaatatccaatgggacatcgggaggaagcaccaacgacaacacctacttcggctacagcaccccctgggggtattttgacttcaacagattccactgccacttctcaccacgtgactggcagcgactcatcaacaacaactggggattccggccaaaaagactcagcttcaagctcttcaacatccaggtcaaggaggtcacgcaggatgaaggcaccaagaccatcgccaataaccttaccagcacgattcaggtatttacggactcggaataccagctgccgtacgtcctcggctccgcgcaccagggctgcctgcctccgttcccggcggacgtcttcatgattccccagtacggctaccttacactgaacaatggaagtcaagccgtaggccgttcctccttctactgcctggaatattttccatctcaaatgctgcgaactggaaacaattttgaattcagctacaccttcgaggacgtgcctttccacagcagctacgcacacagccagagcttggaccgactgatgaatcctctcatcgaccagtacctgtactacttatccagaactcagtccacaggaggaactcaaggtacccagcaattgttattttctcaagctgggcctgcaaacatgtcggctcgggctaagaactggctacctggaccttgctaccggcagcagcgagtctctacgacactgtcgcaaaacaacaacagcaactttgcttggactggtgccaccaaatatcacctgaacggaagagactctttggtaaatcccggtgttgctatggcaacgcataaggacgacgaggaacgtttctttccatcgagcggagtcctgatgtttggaaaacagggtgctggaagagacaatgtggactatagcagcgttatgctaaccagcgaggaagaaattaaaaccactaaccctgtagccacagaacaatacggtgtggtggctgacaacttgcagcaagccaatacagggcctattgtgggaaatgtcaacagccaaggagccttacctggcatggtctggcagaaccgagacgtgtacctgcagggtcccatctgggccaaaattcctcacacggacggcaattttcacccgtctcctctgatgggcggctttggactgaagcacccacctccccagatcctgatcaagaatacgccggtacctgcggatcctccaacgacgttcagccaggcaaaattggcttccttcatcacgcagtacagcaccggccaggtcagcgtggagatcgagtgggagctgcagaaggagaacagcaagcgatggaacccagaaattcagtacacttccaactactacaaatctacaaatgtggactttgctgtcaattctgagggtacatattcagagcctcgccccattggtactcgttatctgacacgtaatctgtaa

SEQ ID NO: 5027 - DNA, 2211 bp, Adeno-associated virus
  source 1..2211: mol_type = unassigned DNA
atggctgccgatggttatcttccagattggctcgaggacaacctctctgagggcattcgcgagtggtgggacttgaaacctggagccccgaaacccaaagccaaccagcaaaagcaggacgacggccggggcctggtgcttcctggctacaagtacctcggacccttcaacggactcgacaagggggagcccgtcaacgcggcggacgcagcggccctcgagcacgacaaggcctacgaccagcagctcgaagcgggtgacaatccgtacctgcggtataaccacgccgacgccgagtttcaggagcgtctgcaagaagatacgtcttttgggggcaacctcgggcgagcagtcttccaggccaagaagcgggttctcgaacctctcggtctggttgaggaaggcgctaagacggctcctggaaagaagagaccagtagagcagtcaccccaagaaccagactcctcctcgggcatcggcaagaaaggccaacagcccgccagaaaaagactcaattttggccagactggcgactcagagtcagttccagaccctcaacctctcggagaacctccagcagcgccctctggtgtgggacctaatacaatggctgcaggcggtggcgcaccaatggcagacaataacgaaggcgccgacggagtgggtagttcctcgggaaattggcattgcgattccacatggctgggcgacagagtcatcaccaccagcacccgaacctgggccctgcccacctacaacaaccacctctacaagcaaatctccaacgggacatcgggaggagccaccaacgacaacacctacttcggctacagcaccccctgggggtattttgactttaacagattccactgccacttttcaccacgtgactggcagcgactcatcaacaacaactggggattccggcccaagagactcagcttcaagctcttcaacatccaggtcaaggaggtcacgcagaatgaaggcaccaagaccatcgccaataacctcaccagcaccatccaggtgtttacggactcggagtaccagctgccgtacgttctcggctctgcccaccagggctgcctgcctccgttcccggcggacgtgttcatgattccccagtacggctacctaacactcaacaacggtagtcaggccgtgggacgctcctccttctactgcctggaatactttccttcgcagatgctgagaaccggcaacaacttccagtttacttacaccttcgaggacgtgcctttccacagcagctacgcccacagccagagcttggaccggctgatgaatcctctgattgaccagtacctgtactacttgtctcggactcaaacaacaggaggcacggcaaatacgcagactctgggcttcagccaaggtgggcctaatacaatggccaatcaggcaaagaactggctgccaggaccctgttaccgccaacaacgcgtctcaacgacaaccgggcaaaacaacaatagcaactttgcctggactgctgggaccaaataccatctgaatggaagaaattcattggctaatcctggcatcgctatggcaacacacaaagacgacgaggagcgttttttcccagtaacgggatcctgtttttggcaacaaaatgctgccagagacaatgcggattacagcgatgtcatgctcaccagcgaggaagaaatcaaaaccactaaccctgtggctacagaggaatacggtatcgtggcagataacttgcagcagcaaaacacggctcctcaaattggaactgtcaacagccagggggccttacccggtatggtctggcagaaccgggacgtgtacctgcagggtcccatctgggccaagattcctcacacggacggcaacttccacccgtctccgctgatgggcggctttggcctgaaacatcctccgcctcagatcctgatcaagaacacgcctgtacctgcggatcctccgaccaccttcaaccagtcaaagctgaactctttcatcacgcaatacagcaccggacaggtcagcgtggaaattgaatgggagctacagaaggaaaacagcaagcgctggaaccccgagatccagtacacctccaactactacaaatctacaagtgtggactttgctgttaatacagaaggcgtgtactctgaaccccgccccattggcacccgttacctcacccgtaatctgtaa

SEQ ID NO: 5028 - protein, 736 aa, Adeno-associated virus
MAADGYLPDWLEDNLSEGIREWWDLKPGAPKPKANQQKQDDGRGLVLPGYKYLGPFNGLDKGEPVNAADAAALEHDKAYDQQLEAGDNPYLRYNHADAEFQERLQEDTSFGGNLGRAVFQAKKRVLEPLGLVEEGAKTAPGKKRPVEQSPQEPDSSSGIGKKGQQPARKRLNFGQTGDSESVPDPQPLGEPPAAPSGVGPNTMAAGGGAPMADNNEGADGVGSSSGNWHCDSTWLGDRVITTSTRTWALPTYNNHLYKQISNGTSGGATNDNTYFGYSTPWGYFDFNRFHCHFSPRDWQRLINNNWGFRPKRLSFKLFNIQVKEVTQNEGTKTIANNLTSTIQVFTDSEYQLPYVLGSAHQGCLPPFPADVFMIPQYGYLTLNNGSQAVGRSSFYCLEYFPSQMLRTGNNFQFTYTFEDVPFHSSYAHSQSLDRLMNPLIDQYLYYLSRTQTTGGTANTQTLGFSQGGPNTMANQAKNWLPGPCYRQQRVSTTTGQNNNSNFAWTAGTKYHLNGRNSLANPGIAMATHKDDEERFFPVTGSCFWQQNAARDNADYSDVMLTSEEEIKTTNPVATEEYGIVADNLQQQNTAPQIGTVNSQGALPGMVWQNRDVYLQGPIWAKIPHTDGNFHPSPLMGGFGLKHPPPQILIKNTPVPADPPTTFNQSKLNSFITQYSTGQVSVEIEWELQKENSKRWNPEIQYTSNYYKSTSVDFAVNTEGVYSEPRPIGTRYLTRNL

SEQ ID NO: 5029 - DNA, 2214 bp, Adeno-associated virus
  source 1..2214: mol_type = unassigned DNA
atggctgctgacggttatcttccagattggctcgaggacaacctctctgagggcattcgcgagtggtgggacctgaaacctggagcccccaagcccaaggccaaccagcagaagcaggacgacggccggggtctggtgcttcctggctacaagtacctcggacccttcaacggactcgacaagggggagcccgtcagcgcggcggacgcagcggccctcgagcacgacaaggcctgcgaccagcggctcaaagcgggtgacaatccgtacctgcggtataaccacgccgacgccgagtttcaggagcgtctgcaagaagatacgtcttttgggggcaacctcgggcgagcagtcttccaggccaagaagcgggttctcgaacctctcggtctggttgaggaagctgctaagacggctcctggaaagaagggaccggtagaaccgtcacctcagcgttcccccgactcctccacgggcatcggcaagaaaggccagcagcccgctagaaagagactgaactttgggcagactggcgactcagagtcagtccccgaccctcaaccaatcggagaaccaccagcaggcccctctggtctgggatctggtacaatggctgcaggcggtggcgcaccaatggctgacaataacgagggcgccgacggagtgggtaatgcctcaggaaattggcattgcgattccacatggctgggcgacagagtcatcaccaccagcacccgaacctgggctttgcccacctacaacaatcacctctacaagcaaatctccagtcagtcagcaggtagcaccaacgacaacgtctacttcggctacagcaccccctgggggtattttgacttcaacagattccactgtcacttctcaccacgtgactggcagcggctcatcaacaacaactggggattccggcccaagaagctcaacttcaagctgttcaacatccaggtcaaggaggtcacaacgaatgacggcgtcacgaccatcgccaataaccttaccagcacggttcaggtcttttcggactcggaataccagctgccctacgtcctcggctccgcacaccagggctgcctgcctccgttcccggcggacgtcttcatgattccccagtacggctacctgactctgaacaatggcagccaatcggtgggtcgttcctctttctactgcctggaatatttcccttctcaaatgctgagaacgggcaacaacttcaccttcagctacaccttcgaggacgttcccttccacagcagctacgcacacagccagagcctggaccggctgatgaatcctcttatcgaccagtacctgtattacctggccagaacacagagcaacgcaggaggcacagctggcaatcgggaactgcagttttatcagggcgggcctaccaccatggccgaacaagccaaaaactggctgcctggaccttgcttccggcaacaaagagtctccaagacgctggatcaaaacaacaacagcaactttgcttggactggtgccaccaaataccatctaaatggaagaaattcattggttaatcccggtgtcgccatggcaacccacaaggacgacgaggaacgcttcttcccttcgagcggagtcctgatttttggaaaaactggagcagctaataagactacactggaaaatgtgttaatgacaaatgaagaggaaattcgtcctaccaacccggtagccaccgaggaatacgggactgttagcagcaacctgcaggcggctaacactgcagcccagacacaagttgtcaacaaccagggagccttacctggtatggtctggcagaaccgggacgtgtacctgcagggtcccatctgggccaagattcctcacacggacggcaactttcacccgtctccgctgatgggcggctttggactgaagcatccgcctcctcagatcctgatcaaaaacactcctgttcctgctaatcccccggaggtgtttacgcctgccaagtttgcttctttcatcacacagtacagcaccggccaggtcagcgtggagatcgagtgggagctgcagaaggagaacagcaagcgctggaacccagagattcagtatacctccaattttgacgaacagactggtgtggactttgccgttgacagccagggtgtttattctgagcctcgccccattggtactcgttacctcacccgtaatctgtaa

SEQ ID NO: 5030 - protein, 737 aa, Adeno-associated virus
MAADGYLPDWLEDNLSEGIREWWDLKPGAPKPKANQQKQDDGRGLVLPGYKYLGPFNGLDKGEPVSAADAAALEHDKACDQRLKAGDNPYLRYNHADAEFQERLQEDTSFGGNLGRAVFQAKKRVLEPLGLVEEAAKTAPGKKGPVEPSPQRSPDSSTGIGKKGQQPARKRLNFGQTGDSESVPDPQPIGEPPAGPSGLGSGTMAAGGGAPMADNNEGADGVGNASGNWHCDSTWLGDRVITTSTRTWALPTYNNHLYKQISSQSAGSTNDNVYFGYSTPWGYFDFNRFHCHFSPRDWQRLINNNWGFRPKKLNFKLFNIQVKEVTTNDGVTTIANNLTSTVQVFSDSEYQLPYVLGSAHQGCLPPFPADVFMIPQYGYLTLNNGSQSVGRSSFYCLEYFPSQMLRTGNNFTFSYTFEDVPFHSSYAHSQSLDRLMNPLIDQYLYYLARTQSNAGGTAGNRELQFYQGGPTTMAEQAKNWLPGPCFRQQRVSKTLDQNNNSNFAWTGATKYHLNGRNSLVNPGVAMATHKDDEERFFPSSGVLIFGKTGAANKTTLENVLMTNEEEIRPTNPVATEEYGTVSSNLQAANTAAQTQVVNNQGALPGMVWQNRDVYLQGPIWAKIPHTDGNFHPSPLMGGFGLKHPPPQILIKNTPVPANPPEVFTPAKFASFITQYSTGQVSVEIEWELQKENSKRWNPEIQYTSNFDEQTGVDFAVDSQGVYSEPRPIGTRYLTRNL

SEQ ID NO: 5031 - DNA, 2214 bp, Adeno-associated virus
  source 1..2214: mol_type = unassigned DNA
atggctgccgatggttatcttccagattggctcgaggacaacctctctgagggcattcgcgagtggtgggacctgaaacctggagccccgaaacccaaagccaaccagcaaaagcaggacgacggccggggtctggtgcttcctggctacaagtacctcggacccttcaacggactcgacaagggggagcccgtcaacgcggcggacgcagcggccctcgagcacgacaaggcctacgaccagcagctcaaagcgggtgacaatccgtacctgcggtataaccacgccgacgccgagtttcaggagcgtctgcaagaagatacgtcttttgggggcaacctcgggcgagcagtcttccaggccaagaagcgggttctcgaacctctcggtctggttgaggaagctgctaagacggctcctggaaagaagagaccggtagaaccgtcacctcagcgttcccccgactcctccacgggcatcggcaagaaaggccagcagcccgctagaaagagactgaactttgggcagactggcgactcagagtcagtccccgaccctcaaccaatcggagaaccaccagcaggcccctctggtctgggatctggtacaatggctgcaggcggtggcgctccaatggcagacaataacgaaggcgccgacggagtgggtaatgcctcaggaaattggcattgcgattccacatggctgggcgacagagtcatcaccaccagcacccgaacctgggctttgcccacctacaacaaccacctctacaagcaaatctccagtcagtcagcaggtagcaccaacgacaacgtctacttcggctacagcaccccctgggggtattttgacttcaacagattccactgtcacttctcaccacgtgactggcagcggctcatcaacaacaactggggattccggcccaagaagctcaacttcaagctgttcaacatccaggtcaaggaggtcacaacgaatgacggcgtcacgaccatcgccaataaccttaccagcacggttcaggtcttttcggactcggaataccagctgccctacgtcctcggctccgcacaccagggctgcctgcctccgttcccggcggacgtcttcatgattcctcagtacggctacctgactctcaacaacggtagtcaggccgtgggacgttcctccttctactgcctggagtacttcccctctcagatgctgagaacgggcaacaacttttccttcagctacactttcgaggacgtgcctttccacagcagctacgcgcacagccagagtttggacaggctgatgaatcctctcatcgaccagtacctgtactacctgtcaagaacccagtctacgggaggcacagcgggaacccagcagttgctgttttctcaggccgggcctagcaacatgtcgactcaggccagaaactggctgcctggaccctgctacagacagcagcgcgtctccacgacactgtcgcaaaacaacaacagcaactttgcctggactggtgccaccaagtatcatctgaacggcagagactctctggtgaatccgggcgtcgccatggcaaccaacaaggacgacgaggaccgcttcttcccatccagcggcatcctcatgtttggcaagcagggagctggaaaagacaacgtggactatagcaacgtgatgctaaccagcgaggaagaaatcaagaccaccaaccccgtggccacagaacagtatggcgtggtggctgataacctacagcagcaaaacaccgctcctattgtgggggccgtcaacagccagggagccttacctggcatggtctggcagaaccgggacgtgtacctgcagggtcctatttgggccaagattcctcacacagatggcaactttcacccgtctcctttaatgggcggctttggacttaaacatccgcctcctcagatccttatcaaaaacactcctgttcctgcggatcctccaacagcgttcaaccaggccaagctgaattctttcatcacgcagtacagcaccggacaagtcagcgtggagatcgagtgggagctgcagaaggagaacagcaagcgctggaacccagagattcagtatacttccaactactacaaatctacaaatgtggactttgctgttaatactgagggtgcttactctgagcctcgccccattggcactcgttacctcacccgtaatctgtaa

SEQ ID NO: 5032 - protein, 737 aa, Adeno-associated virus
MAADGYLPDWLEDNLSEGIREWWDLKPGAPKPKANQQKQDDGRGLVLPGYKYLGPFNGLDKGEPVNAADAAALEHDKAYDQQLKAGDNPYLRYNHADAEFQERLQEDTSFGGNLGRAVFQAKKRVLEPLGLVEEAAKTAPGKKRPVEPSPQRSPDSSTGIGKKGQQPARKRLNFGQTGDSESVPDPQPIGEPPAGPSGLGSGTMAAGGGAPMADNNEGADGVGNASGNWHCDSTWLGDRVITTSTRTWALPTYNNHLYKQISSQSAGSTNDNVYFGYSTPWGYFDFNRFHCHFSPRDWQRLINNNWGFRPKKLNFKLFNIQVKEVTTNDGVTTIANNLTSTVQVFSDSEYQLPYVLGSAHQGCLPPFPADVFMIPQYGYLTLNNGSQAVGRSSFYCLEYFPSQMLRTGNNFSFSYTFEDVPFHSSYAHSQSLDRLMNPLIDQYLYYLSRTQSTGGTAGTQQLLFSQAGPSNMSTQARNWLPGPCYRQQRVSTTLSQNNNSNFAWTGATKYHLNGRDSLVNPGVAMATNKDDEDRFFPSSGILMFGKQGAGKDNVDYSNVMLTSEEEIKTTNPVATEQYGVVADNLQQQNTAPIVGAVNSQGALPGMVWQNRDVYLQGPIWAKIPHTDGNFHPSPLMGGFGLKHPPPQILIKNTPVPADPPTAFNQAKLNSFITQYSTGQVSVEIEWELQKENSKRWNPEIQYTSNYYKSTNVDFAVNTEGAYSEPRPIGTRYLTRNL

SEQ ID NO: 5033 - DNA, 2217 bp, Adeno-associated virus
  source 1..2217: mol_type = unassigned DNA
atggctgccgatggttatcttccagattggctcgaggacaacctctctgagggcattcgcgagtggtgggacctgaaacctggagccccgaaacccaaagccaaccagcaaaagcaggacgacggccggggtctggtgcttcctggctacaagtacctcggacccttcaacggactcgacaagggggagcccgtcaacgcggcggacgcagcggccctcgagcacgacaaggcctacgaccagcagctcaaagcgggtgacaatccgtacctgcggtataatcacgccgacgccgagtttcaggagcgtctgcaagaagatacgtcttttgggggcaacctcgggcgagcagtcttccaggccaagaagcgggttctcgaacctctcggtctggttgaggaaggcgctaagacggctcctggaaagaagagaccggtagagccgtcaccacagcgttcccccgactcctccacgggcatcggcaagaaaggccagcagcccgccagaaagagactcaatttcggtcagactggcgactcagagtcagtccccgaccctcaacctatcggagaacctccagcagcgccctctagtgtgggatctggtacaatggctgcaggcggtggcgcaccaatggcagacaataacgaaggtgccgacggagtgggtagttcctcgggaaattggcattgcgattccacatggctgggcgacagagtcatcaccaccagcacccgaacctgggccctgcccacctacaacaaccacctctacaagcaaatctccaacgggacctcgggaggcagcaccaacgacaacacctactttggctacagcaccccctgggggtattttgactttaacagattccactgccacttctcaccacgtgactggcagcgactcatcaacaacaactggggattccggcccaagagactcagcttcaagctcttcaacatccaggtcaaagaggtcacgcagaatgaaggcaccaagaccatcgccaataacctcaccagcaccatccaggtgtttacggactcggaataccagctgccgtacgtcctcggctctgcccaccagggctgcctgcctccgttcccggcggacgtcttcatgattcctcagtacggctacctgactctcaacaacggtagtcaggccgtgggacgttcctccttctactgcctggagtacttcccctctcagatgctgagaacgggcaacaacttttccttcagctacactttcgaggacgtgcctttccacagcagctacgcgcacagccagagtttggacaggctgatgaatcctctcatcgaccagtacctgtactacctgtcaagaacccagtctacgggaggcacagcgggaacccagcagttgctgttttctcaggccgggcctagcaacatgtcggctcaggccagaaactggctgcctggaccctgctacagacagcagcgcgtctccacgacactgtcgcaaaacaacaacagcaactttgcctggactggtgccaccaagtatcatctgaacggcagagactctctggtgaatccgggcgtcgccatggcaaccaacaaggacgacgaggaccgcttcttcccatccagcggcatcctcatgtttggcaagcagggagctggaaaagacaacgtggactatagcaacgtgatgctaaccagcgaggaagaaatcaaggccaccaaccccgtggccacagaacagtatggcgtggtggctgataacctacagcagcaaaacaccgctcctattgtgggggccgtcaacagccagggagccttacctggcatggtctggcagaaccgggacgtgtacctgcagggtcctatttgggccaagattcctcacacagatggcaactttcacccgtctcctttaatgggcggctttggacttaaacatccgcctcctcagatcctcatcaaaaacactcctgttcctgcggatcctccaacagcgttcaaccaggccaagctgaattctttcatcacgcagtacagcaccggacaagtcagcgtggagatcgagtgggagctgcagaaggagaacagcaagcgctggaacccagagattcagtatacttccaactactacaaatctacaaatgtggactttgctgttaatactgagggtgtttactctgagcctcgccccattggcactcgttacctcacccgtaatctgtaa

SEQ ID NO: 5034 - protein, 738 aa, Adeno-associated virus
MAADGYLPDWLEDNLSEGIREWWDLKPGAPKPKANQQKQDDGRGLVLPGYKYLGPFNGLDKGEPVNAADAAALEHDKAYDQQLKAGDNPYLRYNHADAEFQERLQEDTSFGGNLGRAVFQAKKRVLEPLGLVEEGAKTAPGKKRPVEPSPQRSPDSSTGIGKKGQQPARKRLNFGQTGDSESVPDPQPIGEPPAAPSSVGSGTMAAGGGAPMADNNEGADGVGSSSGNWHCDSTWLGDRVITTSTRTWALPTYNNHLYKQISNGTSGGSTNDNTYFGYSTPWGYFDFNRFHCHFSPRDWQRLINNNWGFRPKRLSFKLFNIQVKEVTQNEGTKTIANNLTSTIQVFTDSEYQLPYVLGSAHQGCLPPFPADVFMIPQYGYLTLNNGSQAVGRSSFYCLEYFPSQMLRTGNNFSFSYTFEDVPFHSSYAHSQSLDRLMNPLIDQYLYYLSRTQSTGGTAGTQQLLFSQAGPSNMSAQARNWLPGPCYRQQRVSTTLSQNNNSNFAWTGATKYHLNGRDSLVNPGVAMATNKDDEDRFFPSSGILMFGKQGAGKDNVDYSNVMLTSEEEIKATNPVATEQYGVVADNLQQQNTAPIVGAVNSQGALPGMVWQNRDVYLQGPIWAKIPHTDGNFHPSPLMGGFGLKHPPPQILIKNTPVPADPPTAFNQAKLNSFITQYSTGQVSVEIEWELQKENSKRWNPEIQYTSNYYKSTNVDFAVNTEGVYSEPRPIGTRYLTRNL

SEQ ID NO: 5035 - DNA, 2217 bp, Adeno-associated virus
  source 1..2217: mol_type = unassigned DNA
atggctgccgatggttatcttccagattggctcgaggacaacctctctgagggcattcgcgagtggtgggacctgaaacctggagccccgaaacccaaagccaaccagcaaaagcaggacgacggccggggtctggtgcttcctggctacaagcacctcggacccttcaacggactcgacaagggggagcccgtcaacgcggcggacgcagcggccctcgagcacgacaaggcctacgaccagcagctcaaagcgggtgacaatccgtacctgcggtataatcacgctgacgccgagtttcaggagcgtctgcaagaagatacgtcttttgggggcaacctcgggcgagcagtcttccaggccaagaagcgggttctcgaacctctcggtctggttgaggaaggcgctaagacggctcctggaaagaagagaccggtagagccgtcaccacagcgttcccccgactcctccacgggcatcggcaagaaaggccagcagcccgccagaaagagactcaatttcggtcagactggcgactcagagtcagtccccgaccctcaacctatcggagaacctccagcagcgccctctagtgtgggatctggtacaatggctgcaggcggtggcgcaccaatggcagacaataacgaaggtgccgacggagtgggtagttcctcgggaaattggcattgcgattccacatggctgggcgacagagtcatcaccaccagcacccgaacctgggccctgcccacctacaacaaccacctctacaagcaaatctccaacgggacctcgggaggcagcaccaacgacaacacctactttggctacagcaccccctgggggtattttgactttaacagattccactgccacttctcaccacgtgactggcagcgactcatcaacaacaactggggattccggcccaagagactcagcttcaagctcttcaacatccaggtcaaagaggtcacgcagaatgaaggcaccaagaccatcgccaataaccttaccagcacggttcaggtcttttcggactcggaataccagctgccctacgtcctcggctccgcacaccagggctgcctgcctccgttcccggcggacgtcttcatgattccccagtacggctacctgactctgaacaatggcagccaatcggtgggtcgttcctctttctactgcctggaatatttcccttctcaaatgctgagaacgggcaacaacttcaccttcagctacaccttcgaggacgttcccttccacagcagctacgcacacagccagagcctggaccggctgatgaatcctcttatcgaccagtacctgtattacctggccagaacacagagcaacgcaggaggcacagctggcaatcgggaactgcagttttatcagggcgggcctaccaccatggccgaacaagccaaaaactggctgcctggaccttgcttccggcaacaaagagtctccaagacgctggatcaaaacaacaacagcaactttgcttggactggtgccaccaaataccatctaaatggaagaaattcattggttaatcccggtgtcgccatggcaacccacaaggacgacgaggaacgcttcttcccttcgagcggagtcctgatttttggaaaaactggagcagctaataagactacactggaaaatgtgttaatgacaaatgaagaggaaattcgtcctaccaacccggtagccaccgaggaatacgggactgttagcagcaacctgcaggcggctaacactgcagcccagacacaagttgtcaacaaccagggagccttacctggtatggtctggcagaaccgggacgtgtacctgcagggtcccatctgggccaagattcctcacacggacggcaactttcacccgtctccgctgatgggcggctttggactgaagcatccgcctcctcagatcctgatcaaaaacactcctgttcctgctaatcccccggaggtgtttacgcctgccaagtttgcttctttcatcacacagtacagcaccggccaggtcagcgtggagatcgagtgggagctgcagaaggagaacagcaagcgctggaacccagagattcagtatacctccaattttgacaaacagactggtgtggactttgccgttgacagccagggtgtttattctgagcctcgccccattggtactcgttacctcacccgtaatctgtaa

SEQ ID NO: 5036 - protein, 738 aa, Adeno-associated virus
MAADGYLPDWLEDNLSEGIREWWDLKPGAPKPKANQQKQDDGRGLVLPGYKHLGPFNGLDKGEPVNAADAAALEHDKAYDQQLKAGDNPYLRYNHADAEFQERLQEDTSFGGNLGRAVFQAKKRVLEPLGLVEEGAKTAPGKKRPVEPSPQRSPDSSTGIGKKGQQPARKRLNFGQTGDSESVPDPQPIGEPPAAPSSVGSGTMAAGGGAPMADNNEGADGVGSSSGNWHCDSTWLGDRVITTSTRTWALPTYNNHLYKQISNGTSGGSTNDNTYFGYSTPWGYFDFNRFHCHFSPRDWQRLINNNWGFRPKRLSFKLFNIQVKEVTQNEGTKTIANNLTSTVQVFSDSEYQLPYVLGSAHQGCLPPFPADVFMIPQYGYLTLNNGSQSVGRSSFYCLEYFPSQMLRTGNNFTFSYTFEDVPFHSSYAHSQSLDRLMNPLIDQYLYYLARTQSNAGGTAGNRELQFYQGGPTTMAEQAKNWLPGPCFRQQRVSKTLDQNNNSNFAWTGATKYHLNGRNSLVNPGVAMATHKDDEERFFPSSGVLIFGKTGAANKTTLENVLMTNEEEIRPTNPVATEEYGTVSSNLQAANTAAQTQVVNNQGALPGMVWQNRDVYLQGPIWAKIPHTDGNFHPSPLMGGFGLKHPPPQILIKNTPVPANPPEVFTPAKFASFITQYSTGQVSVEIEWELQKENSKRWNPEIQYTSNFDKQTGVDFAVDSQGVYSEPRPIGTRYLTRNL

SEQ ID NO: 5037 - protein, 737 aa, Adeno-associated virus
MAADGYLPDWLEDNLSEGIREWWDLKPGAPKPKANQQKQDDGRGLVLPGYKYLGPFNGLDKGEPVNAADAAALEHDKAYDQQLKAGDNPYLRYNHADAEFQERLQEDTSFGGNLGRAVFQAKKRVLEPLGLVEEAAKTAPGKKRPVEPSPQRSPDSSTGIGKKGQQPARKRLNFGQTGDSESVPDPQPIGEPPAGPSGLGSGTMAAGGGAPMADNNKGADGVGNASGNWHCDSTWLGDRVITTSTRTWALPTYNNHLYKQISSQSAGSTNDNVYFGYSTPWGYFDFNRFHCHFSPRDWQRLINSNWGFRPKKLNFKLFNIQVKEVTTNDGVTTIANNLTSTVQVFSDSEYQLPYVLGSAHQGCLPPFPADVFMIPQYGYLTLNNGSQSVGRSSFYCLEYFPSQMLRTGNNFTFSYTFEDVPFHSSYAHSQSLDRLMNPLIDQYLYYLARTQSNAGGTAGNRELQFYQGGPTTMAEQAKNWLPGPCFRQQRVSKTLDQNNNSNFAWTGATKYHLNGRNSLVNPGVAMATHKDDEERFFPSSGVLIFGKTGAANKTTLENVLMTNEEEIRPTNPVATEEYGTVSSNLQAANTAAQTQVVNNQGALPGMVWQNRDVYLQGPIWAKIPHTDGNFHPSPLMGGFGLKHPPPQILIKNTPVPANPPEVFTPAKFASFITQYSTGQVSVEIEWELQKENSKRWNPEIQYTSNFDKQTGVDFAVDSQGVYSEPRPIGTRYLTRNL

SEQ ID NO: 5038 - DNA, 2214 bp, Adeno-associated virus
  source 1..2214: mol_type = unassigned DNA
atggctgctgacggttatcttccagattggctcgaggacaacctctctgagggcattcgcgagtggtgggacctgaaacctggagcccccaagcccaaggccaaccagcagaagcaggacgacggccggggtctggtgcttcctggctacaagtacctcggacccttcaacggactcgacaagggggagcccgtcaacgcggcggacgcagcggccctcgagcacgacaaggcctacgaccagcagctcaaagcgggtgacaatccgtacctgcggtataaccacgccgacgccgagtttcaggagcgtctgcaagaagatacgtcttttgggggcaacctcgggcgagcagtcttccaggccaagaagcgggttctcgaacctctcggtctggttgaggaagctgctaagacggctcctggaaagaagagaccggtagaaccgtcacctcagcgttcccccgactcctccacgggcatcggcaagaaaggccagcagcccgctagaaagagactgaactttgggcagactggcgactcagagtcagtccccgaccctcaaccaatcggagaaccaccagcaggcccctctggtctgggatctggtacaatggctgcaggcggtggcgcaccaatggctgacaataacaagggcgccgacggagtgggtaatgcctcaggaaattggcattgcgattccacatggctgggcgacagagtcatcaccaccagcacccgaacctgggctttgcccacctacaacaaccacctctacaagcaaatctccagtcagtcagcaggtagcaccaacgacaacgtctacttcggctacagcaccccctgggggtattttgacttcaacagattccactgtcacttctcaccacgtgactggcagcggctcatcaacagcaactggggattccggcccaagaagctcaacttcaagctgttcaacatccaggtcaaggaggtcacaacgaatgacggcgtcacgaccatcgccaataaccttaccagcacggttcaggtcttttcggactcggaataccagctgccctacgtcctcggctccgcacaccagggctgcctgcctccgttcccggcggacgtcttcatgattccccagtacggctacctgactctgaacaatggcagccaatcggtgggtcgttcctctttctactgcctggaatatttcccttctcaaatgctgagaacgggcaacaacttcaccttcagctacaccttcgaggacgttcccttccacagcagctacgcacacagccagagcctggaccggctgatgaatcctcttatcgaccagtacctgtattacctggccagaacacagagcaacgcaggaggcacagctggcaatcgggaactgcagttttatcagggcgggcctaccaccatggccgaacaagccaaaaactggctgcctggaccttgcttccggcaacaaagagtctccaagacgctggatcaaaacaacaacagcaactttgcttggactggtgccaccaaataccatctaaatggaagaaattcattggttaatcccggtgtcgccatggcaacccacaaggacgacgaggaacgcttcttcccttcgagcggagtcctgatttttggaaaaactggagcagctaataagactacactggaaaatgtgttaatgacaaatgaagaggaaattcgtcctaccaacccggtagccaccgaggaatacgggactgttagcagcaacctgcaggcggctaacactgcagcccagacacaagttgtcaacaaccagggagccttacctggtatggtctggcagaaccgggacgtgtacctgcagggtcccatctgggccaagattcctcacacggacggcaactttcacccgtctccgctgatgggcggctttggactgaagcatccgcctcctcagatcctgatcaaaaacactcctgttcctgctaatcccccggaggtgtttacgcctgccaagtttgcttctttcatcacacagtacagcaccggccaggtcagcgtggagatcgagtgggagctgcagaaggagaacagcaagcgctggaacccagagattcagtatacctccaattttgacaaacagactggtgtggactttgccgttgacagccagggtgtttattctgagcctcgccccattggtactcgttacctcacccgtaatctgtaa

SEQ ID NO: 5039 - protein, 737 aa, Adeno-associated virus
MAADGYLPDWLEDNLSEGIREWWDLKPGAPKPKANQQKQDDGRGLVLPGYKYLGPFNGLDKGEPVNAADAAALEHDKAYDQQLKAGDNPYLRYNHADAEFQERLQEDTSFGGNLGRAVFQAKKRVLEPLGLVEEAAKTAPGKKRPVEPSPQRSPDSSTGIGKKGQQPARKRLNFGQTGDSESVPDPQPIGEPPAGPSGLGSGTMAAGGGAPMADNNEGADGVGNASGNWHCDSTWLGDRVITTSTRTWALPTYNNHLYKQISSQSAGSTNDNVYFGYSTPWGYFDFNRFHCHFSPRDWQRLINSNWGFRPKKLNFKLFNIQVKEVTTNDGVTTIANNLTSTVQVFSDSEYQLPYVLGSAHQGCLPPFPADVFMIPQYGYLTLNNGSQSVGRSSFYCLEYFPSQMLRTGNNFTFSYTFEDVPFHSSYAHSQSLDRLMNPLIDQYLYYLARTQSNAGGTAGNRELQFYQGGPTTMAEQAKNWLPGPCFRQQRVSKTLDQNNNSNFAWTGATKYHLNGRNSLVNPGVAMATHKDDEERFFPSSGVLIFGKTGAANKTTLENVLMTNEEEIRPTNPVATEEYGTVSSNLQAANTAAQTQVVNNQGALPGMVWQNRDVYLQGPIWAKIPHTDGNFHPSPLMGGFGLKHPPPQILIKNTPVPANPPEVFTPAKFASFITQYSTGQVSVEIEWELQKENSKRWNPEIQYTSNFDKQTGVDFAVDSQGVYSEPRPIGTRYLTRNL

SEQ ID NO: 5040 - protein, 737 aa, Adeno-associated virus
MAADGYLPDWLEDNLSEGIREWWDLKPGAPKPKANQQKQDDGRGLVLPGYKYLGPFNGLDKGEPVNAADAAALEHDKAYDQQLKAGDNPYLRYNHADAEFQERLQEDTSFGGNLGRAVFQAKKRVLEPLGLVEEAAKTAPGKKRPVEPSPQRSPDSSTGIGKKGQQPARKRLNFGQTGDSESVPDPQPIGEPPAGPSGLGSGTMAAGGGAPMADNNEGADGVGNASGNWHCDSTWLGDRVITTSTRTWALPTYNNHLYKQISSQSAGSTNDNVYFGYSTPWGYFDFNRFHCHFSPRDWQRLINNNWGFRPKKLNFKLFNIQVKEVTTNDGVTTIANNLTSTVQVFSDSEYQLPYVLGSAHQGCLPPFPADVFMIPQYGYLTLNNGSQSVGRSSFYCLEYFPSQMLRTGNNFTFSYTFEDVPFHSSYAHSQSLDRLMNPLIDQYLYYLARTQSNAGGTAGNRELQFYQGGPTTMAEQAKNWLPGPCFRQQRVSKTLDQNNNSNFAWTGATKYHLNGRNSLVNPGVAMATHKDDEERFFPSSGVLIFGKTGAANKTTLENVLMTNEEEIRPTNPVATEEYGTVSSNLQAANTAAQTQVVNNQGALPGMVWQNRDVYLQGPIWAKIPHTDGNFHPSPLMGGFGLKHPPPQILIKNTPVPANPPEVFTPAKFASFITQYSTGQVSVEIEWELQKENSKRWNPEIQYTSNFDKQTGVDFAVDSQGVYSEPRPIGTRYLTRNL

SEQ ID NO: 5041 - protein, 737 aa, Adeno-associated virus
MAADGYLPDWLEDNLSEGIREWWDLKPGAPKPKANQQKQDDGRGLVLPGYKYLGPFNGLDKGEPVNAADAAALEHDKAYDQQLKAGDNPYLRYNHADAEFQERLQEDTSFGGNLGRAVFQAKKRVLEPLGLVEEAAKTAPGKKRPVEPSPQRSPDSSTGIGKKGQQPARKRLNFGQTGDSESVPDPQPIGEPPAGPSGLGSGTMAAGGGAPMADNNKGADGVGNASGNWHCDSTWLGDRVITTSTRTWALPTYNNHLYKQISSQSAGSTNDNVYFGYSTPWGYFDFNRFHCHFSPRDWQRLINNNWGFRPKKLNFKLFNIQVKEVTTNDGVTTIANNLTSTVQVFSDSEYQLPYVLGSAHQGCLPPFPADVFMIPQYGYLTLNNGSQSVGRSSFYCLEYFPSQMLRTGNNFTFSYTFEDVPFHSSYAHSQSLDRLMNPLIDQYLYYLARTQSNAGGTAGNRELQFYQGGPTTMAEQAKNWLPGPCFRQQRVSKTLDQNNNSNFAWTGATKYHLNGRNSLVNPGVAMATHKDDEERFFPSSGVLIFGKTGAANKTTLENVLMTNEEEIRPTNPVATEEYGTVSSNLQAANTAAQTQVVNNQGALPGMVWQNRDVYLQGPIWAKIPHTDGNFHPSPLMGGFGLKHPPPQILIKNTPVPANPPEVFTPAKFASFITQYSTGQVSVEIEWELQKENSKRWNPEIQYTSNFDKQTGVDFAVDSQGVYSEPRPIGTRYLTRNL

SEQ ID NO: 5042 - DNA, 2217 bp, Adeno-associated virus
  source 1..2217: mol_type = unassigned DNA
atggctgccgatggttatcttccagattggctcgaggacaacctctctgagggcattcgcgagtggtgggacctgaaacctggagccccgaaacccaaagccaaccagcaaaagcaggacgacggccggggtctggtgcttcctggctacaagtacctcggacccttcaacggactcgacaagggggagcccgtcaacgcggcggacgcagcggccctcgagcacgacaaggcctacgaccagcagctcaaagcgggtgacaatccgcacctgcggtataatcacgccgacgccgagtttcaggagcgtctgcaagaagatacgtcttttgggggcaacctcgggcgagcagtcttccaggccaagaagcgggttctcgaacctctcggtctggttgaggaaggcgctaagacggctcctggaaagaagagaccggtagagccgtcaccacagcgttcccccgactcctccacgggcatcggcaagaaaggccagcagcccgccagaaagagactcaatttcggtcagactggcgactcagagtcagtccccgaccctcaacttatcggagaacctccagcagcgccctctagtgtgggatctggtacaatggctgcaggcggtggcgcaccaatggcagacaataacgaaggtgccgacggagtgggtagttcctcgggaaattggcattgcgattccacatggctgggcgacagagtcatcaccaccagcacccgaacctgggccctgcccacctacaacaaccacctctacaagcaaatctccaacgggacctcgggaggcagcaccaacgacaacacctactttggctacagcaccccctgggggtattttgactttaacagattccactgccacttctcaccacgtgactggcagcgactcatcaacaacaactggggattccggcccaagagactcagcttcaagctcttcaacatccaggtcaaagaggtcacgcagaatgaaggcaccaagaccatcgccaataacctcaccagcaccatccaggtgtttacggactcggagtaccagctgccgtacgtcctcggctctgcccaccagggctgcctgcctccgttcccggcggacgtcttcatgattcctcagtacggcaacctgactctcaacaacggtagtcaggccgtgggacgttcctccttctactgcctggagtacttcccctctcagatgctgagaacgggcaacaacttttccttcagctacactttcgaggacgtgcctttccacagcagctacgcgcacagccagagtttggacaggctgatgaatcctctcatcgaccagtacctgtactacctgtcaagaacccagtctacgggaggcacagcgggaacccagcagttgctgttttctcaggccgggcctagcaacatgtcggctcaggccagaaactggctgcctggaccctgctacagacagcagcgcgtctccacgacactgtcgcaaaacaacaacagcaactttgcctggactggtgccaccaagtatcatctgaacggcagagactctctggtgaatccgggcgtcgccatggcaaccaacaaggacgacgaggaccgcttcttcccatccagcggcatcctcatgtttggcaagcagggagctggaaaagacaacatgggctatagcaacgtgatgctaaccagcgaggaagaaatcaagaccaccaaccccgtggccacagaacagtatggcgtggtggctgataacctacagcagcaaaacaccgctcctattgtgggggccgtcaacagccagggagccttacctggcatggtctggcagaaccgggacgtgtacctgcagggtcctatttgggccaagattcctcacacagatggcaactttcacccgtctcctttaatgggcggctttggacttaaacatccgcctcctcagatcctcatcaaaaacactcctgttcctgcggatcctccaacagcgttcaaccaggccaagctgaattctttcatcacgcagtacggcaccggacaagtcagcgtggagatcgagtgggagctgcagaaggagaacagcaagcgctggaacccagagattcagtatacttccaactactacaaatctacaaatgtggactttgctgttaatactgagggtgtttactctgagcctcgccccattggcactcgttacctcacccgtaatctgtaa

SEQ ID NO: 5043 - protein, 738 aa, Adeno-associated virus
MAADGYLPDWLEDNLSEGIREWWDLKPGAPKPKANQQKQDDGRGLVLPGYKYLGPFNGLDKGEPVNAADAAALEHDKAYDQQLKAGDNPHLRYNHADAEFQERLQEDTSFGGNLGRAVFQAKKRVLEPLGLVEEGAKTAPGKKRPVEPSPQRSPDSSTGIGKKGQQPARKRLNFGQTGDSESVPDPQLIGEPPAAPSSVGSGTMAAGGGAPMADNNEGADGVGSSSGNWHCDSTWLGDRVITTSTRTWALPTYNNHLYKQISNGTSGGSTNDNTYFGYSTPWGYFDFNRFHCHFSPRDWQRLINNNWGFRPKRLSFKLFNIQVKEVTQNEGTKTIANNLTSTIQVFTDSEYQLPYVLGSAHQGCLPPFPADVFMIPQYGNLTLNNGSQAVGRSSFYCLEYFPSQMLRTGNNFSFSYTFEDVPFHSSYAHSQSLDRLMNPLIDQYLYYLSRTQSTGGTAGTQQLLFSQAGPSNMSAQARNWLPGPCYRQQRVSTTLSQNNNSNFAWTGATKYHLNGRDSLVNPGVAMATNKDDEDRFFPSSGILMFGKQGAGKDNMGYSNVMLTSEEEIKTTNPVATEQYGVVADNLQQQNTAPIVGAVNSQGALPGMVWQNRDVYLQGPIWAKIPHTDGNFHPSPLMGGFGLKHPPPQILIKNTPVPADPPTAFNQAKLNSFITQYGTGQVSVEIEWELQKENSKRWNPEIQYTSNYYKSTNVDFAVNTEGVYSEPRPIGTRYLTRNL

SEQ ID NO: 5044 - DNA, 2217 bp, Adeno-associated virus
  source 1..2217: mol_type = unassigned DNA
atggctgccgatggttatcttccagattggctcgaggacaacctctctgagggcattcgcgagtggtgggacctgaaacctggagccccgaaacccaaagccaaccagcaaaagcaggacgacggccggggtctggtgcttcctggctacaagtacctcggacccttcaacggactcgacaagggggagcccgtcaacgcggcggacgcagcggccctcgagcacgacaaggcctacgaccagcagctcaaagcgggtgacaatccgtacctgcggtataatcacgccgacgccgagtttcaggagcgtctgcaagaagatacgtcttttgggggcaacctcgggcgagcagtcttccaggccaagaagcgggttctcgaacctctcggtctggttgaggaaggcgctaagacggctcctggaaagaagagaccggtagagccgtcaccacagcgttcccccgactcctccacgggcatcggcaagaaaggccagcagcccgccggaaagagactcaatttcggtcagactggcgactcagagtcagtccccgaccctcaacctatcggagaacctccagcagcgccctctagtgtgggatctggtacaatggctgcaggcggtggcgcaccaatggcagacaataacgaaggtgccgacggagtgggtagttcctcgggaaattggcattgcgattccacatggctgggcgacagagtcatcaccaccagcacccgaacctgggccctgcccacctacaacaaccacctctacaagcaaatctccaacgggacctcgggaggcagcaccaacgacaacacctactttggctacagcaccccctgggggtattttgactttaacagattccactgccacttctcaccacgtgactggcagcgactcatcaacaacaactggggattccggcccaagagactcagcttcaagctcttcaacatccaggtcaaagaggtcacgcagaatgaaggcaccaagaccatcgccaataacctcaccagcaccatccaggtgtttacggactcggaataccagctgccgtacgtcctcggctctgcccaccagggctgcctgcctccgttcccggcggacgtcttcatgattcctcagtacggctacctgactctcaacaacggtagtcaggccgtgggacgttcctccttctactgcctggagtacttcccctctcagatgctgagaacgggcaacaacttttccttcagctacactttcgaggacgtgcctttccacagcagctacgcgcacagccagagtttggacaggctgatgaatcctctcgtcgaccagtacctgtactacctgtcaagaacccagtctacgggaggcacagcgggaacccagcagttgctgttttctcaggccgggcctagcaacatgtcggctcaggccagaaactggctgcctggaccctgctacagacagcagcgcgtctccacgacactgtcgcaaaacaacaacagcaactttgcctggactggtgccaccaagtatcatctgaacggcagagactctctggtgaatccgggcgtcgccatggcaaccaacaaggacgacgaggaccgcttcttcccatccagcggcatcctcatgtttggcaagcagggagctggaaaagacaacgtggactatagcaacgtgatgctaaccagcgaggaagaaatcaagaccaccaaccccgtggccacagaacagtatggcgtggtggctgataacctacagcagcaaaacaccgctcctattgtgggggccgtcaacagccagggagccttacctggcatggtctggcagaaccgggacgtgtacctgcagggtcctatttgggccaagattcctcacacagatggcaactttcacccgtctcctttaatgggcggctttggacttaaacatccgcctcctcagatcctcatcaaaaacactcctgttcctgcggatcctccaacagcgttcaaccaggccaagctgaattctttcatcacgcagtacagcaccggacaagtcagcgtggagatcgagtgggagctgcagaaggagaacagcaagcgctggagcccagagattcagtatacttccaactactacaaatctacaaatgtggactttgctgttaatactgagggtgtttactctgagcctcgccccattggcactcgttacctcacccgtaatctgtaa

SEQ ID NO: 5045 - protein, 738 aa, Adeno-associated virus
MAADGYLPDWLEDNLSEGIREWWDLKPGAPKPKANQQKQDDGRGLVLPGYKYLGPFNGLDKGEPVNAADAAALEHDKAYDQQLKAGDNPYLRYNHADAEFQERLQEDTSFGGNLGRAVFQAKKRVLEPLGLVEEGAKTAPGKKRPVEPSPQRSPDSSTGIGKKGQQPAGKRLNFGQTGDSESVPDPQPIGEPPAAPSSVGSGTMAAGGGAPMADNNEGADGVGSSSGNWHCDSTWLGDRVITTSTRTWALPTYNNHLYKQISNGTSGGSTNDNTYFGYSTPWGYFDFNRFHCHFSPRDWQRLINNNWGFRPKRLSFKLFNIQVKEVTQNEGTKTIANNLTSTIQVFTDSEYQLPYVLGSAHQGCLPPFPADVFMIPQYGYLTLNNGSQAVGRSSFYCLEYFPSQMLRTGNNFSFSYTFEDVPFHSSYAHSQSLDRLMNPLVDQYLYYLSRTQSTGGTAGTQQLLFSQAGPSNMSAQARNWLPGPCYRQQRVSTTLSQNNNSNFAWTGATKYHLNGRDSLVNPGVAMATNKDDEDRFFPSSGILMFGKQGAGKDNVDYSNVMLTSEEEIKTTNPVATEQYGVVADNLQQQNTAPIVGAVNSQGALPGMVWQNRDVYLQGPIWAKIPHTDGNFHPSPLMGGFGLKHPPPQILIKNTPVPADPPTAFNQAKLNSFITQYSTGQVSVEIEWELQKENSKRWSPEIQYTSNYYKSTNVDFAVNTEGVYSEPRPIGTRYLTRNL

SEQ ID NO: 5046 - DNA, 2217 bp, Adeno-associated virus
  source 1..2217: mol_type = unassigned DNA
atggttgccgatggttatcttccagattggctcgaggacaacctctctgagggcattcgcgagtggtgggacctgaaacctggagccccgaaacccaaagccaaccagcaaaagcagggcgacggccggggtctggtgcttcctggctacaagtacctcggacccttcaacggactcgacaagggggagcccgtcaacgcggcggacgcagcggccctcgagcacgacaaggcctacgaccagcagcttaaagcgggtgacaatccgtacctgcggtataatcacgccgacgccgagcttcaggagcgtctgcaagaagatacgtcttttgggggcaacctcgggcgagcagtcttccaggccaagaagcgggttctcgaacctctcggtctggttgaggaaggcgctaagacggctcctggaaagaagagaccggtagagccgtcaccacagcgttcccccgactcctccacgggcatcggcaagaaaggccagcagcccgccagaaagagactcaatttcggtcagactggcgactcagagtcagtccccgaccctcaacctatcggagaacctccagcagcgccctctagtgtgggatctggtacaatggctgcaggcggtggcgcgccaatggcagacaataacgaaggtgccgacggagtgggtagttcctcgggaaattggcattgcgattccacatggctgggcgacagagtcatcaccaccagcacccgaacctgggccctgcccacctacaacaaccacctctacaagcaaatctccaacgggacctcgggaggcagcaccaacgacaacacctactttggctacagcaccccctgggggtattttgactttaacagattccactgccacttctcaccacgtgactggcagcgactcatcaacaacaactggggattccggcccaagagactcagcttcaagctcttcaacatccaggtcaaagaggtcacgcagaatgaaggcaccaagaccatcgccaataacctcaccagcaccatccaggtgtttacggactcggaataccagctgccgtacgtcctcggctctgcccaccagggctgccagcctccgttcccggcggacgtcttcatgattcctcagtacggctacctgactctcaacaacggtagtcaggccgtgggacgttcctccttctactgcctggagtacttcccctctcagatgctgagaacgggcaacaacttttccttcagctacactttcgaggacgtgcctttccacagcagctacgcgcacagccagagtttggacaggctgatgaatcctctcatcgaccagtacctgtactacctgtcaagaacccagtctacgggaggcacagcgggaacccagcagttgctgttttctcaggccgggcctagcaacatgtcggctcaggccagaaactggctgcctggaccctgctacagacagcagcgcgtctccacgacactgtcgcaaaacaacaacagcaactttgcctggactggtgccaccaagtatcatctgaacggcagagactctctggtgaatccgggcgtcgccatggcaaccaacaaggacgacgaggaccgcttcttcccatccagcggcatcctcatgtttggcaagcagggagctggaaaagacaacgtggactatagcaacgtgatgctaaccagcgaggaagaaatcaagaccaccaaccccgtggccacagaacagtatggcgtggtggctgataacctacagcagcaaaacaccgctcctattgtgggggccgtcaacagccagggagccttacctggcatggtctggcagaaccgggacgtgtacctgcagggtcctatttgggccaagattcctcacacagatggcaactttcacccgtctcctttaatgggcggctttggacttaaacatccgcctcctcagatcctcatcaaaaacactcctgttcctgcggatcctccaacagcgttcaaccaggccaagctgaattctttcatcacgcagtacagcaccggacaagtcagcgtggagatcgagtgggagccgcagaaggagaacagcaagcgctggaacccagagattcagtatacttccaactactacaaatctacaaatgtggactttgctgttaatactgagggtgtttactctgagcctcgccccattggcactcgttacctcacccgtaatctgtaa

SEQ ID NO: 5047 - protein, 738 aa, Adeno-associated virus
MVADGYLPDWLEDNLSEGIREWWDLKPGAPKPKANQQKQGDGRGLVLPGYKYLGPFNGLDKGEPVNAADAAALEHDKAYDQQLKAGDNPYLRYNHADAELQERLQEDTSFGGNLGRAVFQAKKRVLEPLGLVEEGAKTAPGKKRPVEPSPQRSPDSSTGIGKKGQQPARKRLNFGQTGDSESVPDPQPIGEPPAAPSSVGSGTMAAGGGAPMADNNEGADGVGSSSGNWHCDSTWLGDRVITTSTRTWALPTYNNHLYKQISNGTSGGSTNDNTYFGYSTPWGYFDFNRFHCHFSPRDWQRLINNNWGFRPKRLSFKLFNIQVKEVTQNEGTKTIANNLTSTIQVFTDSEYQLPYVLGSAHQGCQPPFPADVFMIPQYGYLTLNNGSQAVGRSSFYCLEYFPSQMLRTGNNFSFSYTFEDVPFHSSYAHSQSLDRLMNPLIDQYLYYLSRTQSTGGTAGTQQLLFSQAGPSNMSAQARNWLPGPCYRQQRVSTTLSQNNNSNFAWTGATKYHLNGRDSLVNPGVAMATNKDDEDRFFPSSGILMFGKQGAGKDNVDYSNVMLTSEEEIKTTNPVATEQYGVVADNLQQQNTAPIVGAVNSQGALPGMVWQNRDVYLQGPIWAKIPHTDGNFHPSPLMGGFGLKHPPPQILIKNTPVPADPPTAFNQAKLNSFITQYSTGQVSVEIEWEPQKENSKRWNPEIQYTSNYYKSTNVDFAVNTEGVYSEPRPIGTRYLTRNL

SEQ ID NO: 5048 - DNA, 2217 bp, Adeno-associated virus
  source 1..2217: mol_type = unassigned DNA
atggctgccgatggttatcttccagattggctcgaggacaacctctctgagggcattcgcgagtggtgggacctgaaacctggagccccgaaacccaaagccaaccagcaaaagcaggacgacggccggggtctggtgcttcctggctacaagtacctcggacccttcaacggactcgacaagggggagcccgtcaacgcggcggacgcagcggccctcgagcacgacaaggcctacgaccagcagctcaaagcgggtgacaatccgtacctgcggtataatcacgccgacgccgagtttcaggagcgtctgcaagaagatacgtcttttgggggcaacctcgggcgagcagtcttccaggccaagaagcgggttctcgaacctctcggtctggttgaggaaggcgctaagacggctcctggaaagaagagaccggtagagccgtcaccacagcgttcccccgactcctccacgggcatcggcaagaaaggccagcagcccgccagaaagagactcaatttcggtcagactggcgactcagagtcagtccccgaccctcaacctatcggagaacctccagcagcgccctctagtgtgggatctggtacaatggctgcaggcggtggcgcaccaatggcagacaataacgaaggtgccgacggagtgggtagttcctcgggaaattggcattgcgattccacatggctgggcgacagagtcatcaccaccagcacccgaacctgggccctgcccacctacaacaaccacctctacaagcaaatctccaacgggacctcgggaggcagcaccaacgacaacacctactttggctacagcaccccctgggggtattttgactttaacagattccactgccacttctcaccacgtgactggcagcgactcatcaacaacaactggggattccggcccaagagactcagcttcaagctcttcaacatccaggtcaaagaggtcacgcagaatgaaggcaccaagaccatcgccaatagcctcaccagcaccatccaggtgtttacggactcggaataccagctgccgtacgtcctcggctctgcccaccagggctgcctgcctccgttcccggcggacgtcttcatgattcctcagtacggctacctgactcccaacaacggtagtcaggccgtgggacgttcctccttctactgcctggagtacttcccctctcagatgctgagaacgggcaacaacttttccttcagctacactttcgaggacgtgcctttccacagcagctacgcgcacagccagagtttggacaggctgatgaatcctctcatcgaccagtacctgtactacctgtcaagaacccagtctacgggaggcacagcgggaacccagcagttgctgtcttctcaggccgggcctagcaacatgtcggctcaggccagaaactggctgcctggaccctgctacagacagcagcgcgtctccacgacactgtcgcaaaacaacaacagcaactttgcctggactggtgccaccaagtatcatctgaacggcagagactctctggtgaatccgggcgtcgccatggcaaccaacaaggacgacgaggaccgcttcttcccatccagcggcatcctcatgtttggcaagcagggagctggaaaagacaacgtggactatagcaacgtgatgctaaccagcgaggaagaaatcaagaccaccaaccccgtggccacagaacagtatggcgtggtggctgataacctacagcagcaaaacaccgctcctattgtgggggccgtcaacagccagggagccttacctggcatggtctggcagaaccgggacgtgtacttgcagggtcctatttgggccaagattcctcacacagatggcaactttcacccgtctcctttaatgggcggctttggacttaaacatccgcctcctcagatcctcatcaaaaacactcctgttcctgcggatcctccaacagcgttcaaccaggccaagctgaattctttcatcacgcagtacagcaccggacaagtcagcgtggagatcgagtgggagctgcagaaggagaacagcaagcgctggaacccagagattcagtatacttccaactactacaaatctacaaatgtggactttgctgttaatactgagggtgtttactctgagcctcgccccattggcactcgttacctcacccgtaatctgtaa

SEQ ID NO: 5049 - protein, 738 aa, Adeno-associated virus
MAADGYLPDWLEDNLSEGIREWWDLKPGAPKPKANQQKQDDGRGLVLPGYKYLGPFNGLDKGEPVNAADAAALEHDKAYDQQLKAGDNPYLRYNHADAEFQERLQEDTSFGGNLGRAVFQAKKRVLEPLGLVEEGAKTAPGKKRPVEPSPQRSPDSSTGIGKKGQQPARKRLNFGQTGDSESVPDPQPIGEPPAAPSSVGSGTMAAGGGAPMADNNEGADGVGSSSGNWHCDSTWLGDRVITTSTRTWALPTYNNHLYKQISNGTSGGSTNDNTYFGYSTPWGYFDFNRFHCHFSPRDWQRLINNNWGFRPKRLSFKLFNIQVKEVTQNEGTKTIANSLTSTIQVFTDSEYQLPYVLGSAHQGCLPPFPADVFMIPQYGYLTPNNGSQAVGRSSFYCLEYFPSQMLRTGNNFSFSYTFEDVPFHSSYAHSQSLDRLMNPLIDQYLYYLSRTQSTGGTAGTQQLLSSQAGPSNMSAQARNWLPGPCYRQQRVSTTLSQNNNSNFAWTGATKYHLNGRDSLVNPGVAMATNKDDEDRFFPSSGILMFGKQGAGKDNVDYSNVMLTSEEEIKTTNPVATEQYGVVADNLQQQNTAPIVGAVNSQGALPGMVWQNRDVYLQGPIWAKIPHTDGNFHPSPLMGGFGLKHPPPQILIKNTPVPADPPTAFNQAKLNSFITQYSTGQVSVEIEWELQKENSKRWNPEIQYTSNYYKSTNVDFAVNTEGVYSEPRPIGTRYLTRNL

SEQ ID NO: 5050 - protein, 738 aa, Adeno-associated virus
MAADGYLPDWLEDNLSEGIREWWDLKPGAPKPKANQQKQDDGRGLVLPGYKYLGPFNGLDKGEPVNAADAAALEHDKAYDQQLKAGDNPYLRYNHADAEFQERLQEDTSFGGNLGRAVFQAKKRVLEPLGLVEEGAKTAPGKKRPVEPSPQRSPDSSTGIGKKGQQPARKRLNFGQTGDSESVPDPQPIGEPPAAPSSVGSGTMAAGGGAPMADNNEGADGVGSSSGNWHCDSTWLGDRVITTSTRTWALPTYNNHLYKQISNGTSGGSTNDNTYFGYSTPWGYFDFNRFHCHFSPRDWQRLINNNWGFRPKRLSFKLFNIQVKEVTQNEGTKTIANNLTSTIQVFTDSEYQLPYVLGSAHQGCLPPFPADVFMIPQYGYLTLNNGSQAVGRSSFYCLEYFPSQMLRTGNNFSFSYTFEDVPFHSSYVHSQSLDRLMNPLIDQYLYYLSRTQSTGGTAGTQQLLFSQAGPSNMSAQARNWLPGPCYRQQRVSTTLSQNNNSNFAWTGATKYHLNGRDSLVNSGVAMATNKDDEDRFFPSSGILMFGKQGAGKDNVDYSNVMLTSEEEIKTTNPVATEQYGVVADNLQQQNTAPIVGAVNSQGALPGMVWQNRDVYLQGPIWAKIPHTDGNFHPSPLMGGFGLKHPPPQILIKNTPVPADPPTAFNQAKLNSFITQYSTGQVSVEIEWELQKENSKRWNPEIQYTSNYYKSTNVDFAVNTEGVYSEPRPIGTRYPTRNL

SEQ ID NO: 5051 - DNA, 2217 bp, Adeno-associated virus
  source 1..2217: mol_type = unassigned DNA
atggctgccgatggttatcttccagattggctcgaggacaacctctctgagggcattcgcgagtggtgggacctgaaacctggagccccgaaacccaaagccaaccagcaaaagcaggacgacggccggggtctggtgcttcctggctacaagtacctcggacccttcaacggactcgacaagggggagcccgtcaacgcggcggacgcagcggccctcgagcacgacaaggcctacgaccagcagctcaaagcgggtgacaatccgtacctgcggtataatcacgccgacgccgagtttcaggagcgtctgcaagaagatacgtcttttgggggcaacctcgggcgagcagtcttccaggccaagaagcgggttctcgaacctctcggtctggttgaggaaggcgctaagacggctcctggaaagaagagaccggtagagccgtcaccacagcgttcccccgactcctccacgggcatcggcaagaaaggccagcagcccgccagaaagagactcaatttcggtcagactggcgactcagagtcagtccccgaccctcaacctatcggagaacctccagcagcgccctctagtgtgggatctggtacaatggctgcaggcggtggcgcaccaatggcagacaataacgaaggtgccgacggagtgggtagttcctcgggaaattggcattgcgattccacatggctgggcgacagagtcatcaccaccagcacccgaacctgggccctgcccacctacaacaaccacctctacaagcaaatctccaacgggacctcgggaggcagcaccaacgacaacacctactttggctacagcaccccctgggggtattttgactttaacagattccactgccacttctcaccacgtgactggcagcgactcatcaacaacaactggggattccggcccaagagactcagcttcaagctcttcaacatccaggtcaaagaggtcacgcagaatgaaggcaccaagaccatcgccaataacctcaccagcaccatccaggtgtttacggactcggaataccagctgccgtacgtcctcggctctgcccaccagggctgcctgcctccgttcccggcggacgtcttcatgattcctcagtacggctacctgactctcaacaacggtagtcaggccgtgggacgttcctccttctactgcctggagtacttcccctctcagatgctgagaacgggcaacaacttttccttcagctacactttcgaggacgtgcctttccacagcagctacgtgcacagccagagtttggacaggctgatgaatcctctcatcgaccagtacctgtactacctgtcaagaacccagtctacgggaggcacagcgggaacccagcagttgctgttttctcaggccgggcctagcaacatgtcggctcaggccagaaactggctgcctggaccctgctacagacagcagcgcgtctccacgacactgtcgcaaaacaacaacagcaactttgcctggactggtgccaccaagtatcatctgaacggcagagactctctggtgaattcgggcgtcgccatggcaaccaacaaggacgacgaggaccgcttcttcccatccagcggcatcctcatgtttggcaagcagggagctggaaaagacaacgtggactatagcaacgtgatgctaaccagcgaggaagaaatcaagaccaccaaccccgtggccacagaacagtatggcgtggtggctgataacctacagcagcaaaacaccgctcctattgtgggggccgtcaacagccagggagccttacctggcatggtctggcagaaccgggacgtgtacctgcagggtcctatttgggccaagattcctcacacagatggcaactttcacccgtctcctttaatgggcggctttggacttaaacatccgcctcctcagatcctcatcaaaaacactcctgttcctgcggatcctccaacagcgttcaaccaggccaagctgaattctttcatcacgcagtacagcaccggacaagtcagcgtggagatcgagtgggagctgcagaaggagaacagcaagcgctggaacccagagattcagtatacttccaactactacaaatctacaaatgtggactttgctgttaatactgagggtgtttactctgagcctcgccccattggcactcgttaccccacccgtaatctgtaa

SEQ ID NO: 5052 - protein, 734 aa, Adeno-associated virus; identical to SEQ ID NO: 4948

SEQ ID NO: 5053 - DNA, 2214 bp, Adeno-associated virus
  source 1..2214: mol_type = unassigned DNA
atggctgctgacggttatcttccagattggctcgaggacaacctctctgagggcattcgcgagtggtgggacctgaaacctggagccccgaaacccaaagccaaccagcagaagcaggacgacggccggggtctggtgcttcctggctacaagtacctcggacccttcaacggactcgacaagggggagcccgtcaacgcggcggacgcagcggccctcgagcacgacaaggcctacgaccagcagctcaaagcgggtgacaatccgtacctgcggtataaccacgccgacgccgagtttcaggagcgtctgcaagaagatacgtcttttgggggcaacctcgggcgagcagtcttccaggccaagaagcgggttctcgaacctctcggtctggttgaggaagctgctaagacggctcctggaaagaagagaccggtagaaccgtcacctcagcgttcccccgactcctccacgggcatcggcaagaaaggccagcagcccgctagaaagagactgaactttgggcagactggcgactcagagtcagtccccgaccctcaacctctcggagaaccaccagcaggcccctctggtctgggatctggtacaatggctgcaggcggtggcgctccaatggcagacaataacgaaggcgccgacggagtgggtaatgcctcaggaaattggcattgcgattccacatggctgggcgacagagtcatcaccaccagcacccgaacctgggctttgcccacctacaacaaccacctctacaagcaaatctccagtcagtcagcaggtagcaccaacgacaacgtctacttcggctacagcaccccctgggggtattttgacttcaacagattccactgtcacttctcaccacgtgactggcagcgactcatcaacaacaactggggattccggcccaagaagctcaacttcaagctcttcaacatccaagtcaaggaggtcacgacgaatgacggcgtcacgaccatcgctaataaccttaccagcacggttcaggtcttttcggactcggagtaccagctgccgtacgtcctcggctctgcccaccagggctgcctgcctccgttcccggcggacgtcttcatgattcctcagtacggctacctgactctgaacaatggcagccaatcggtgggacgttcatccttctactgcctggaatacttcccttctcaggtgctgagaacgggtaacaacttcaccttcagttacaccttcgaggacgtgcctttccacagcagctacgcgcacagccagagcctagaccggctgatgaatcccctcatcgaccagtacctgtattacctggctagaacacagagtaacccaggaggcacatctggcaatcgggaactgcagttttaccagggcgggccttccaccatggccgaacaagccaagaactggttacctggaccttgcttccggcaacaaagagtttccaaaacactggatcaaaacaacaacagcaactttgcttggactggtgccaccaaatatcacctgaacggcagaaactcattggtgaatcctggtgtcgccatggcaactcacaaggacgacgaggaccgctttttcccatccagcggagtcctgatttttggaaaaactggagcaaccaacaagactacattggaaaacgtgttaatgacaaatgaagaagaaattcgtcctactaatcctgtggccacagaagaatacgggatagtcagcagcaatttacaagcggccaatactgcagcccagacacaagttgtcaacaaccagggagccttacctggcatggtctggcagaaccgggacgtgtacctgcagggtcccatctgggccaaaattcctcacacagacggcaactttcacccgtctccgctgatgggcggctttggactgaagcatccgcctcctcagatcctgatcaaaaacactcctgttcctgctaatcccccggaggtgtttacgcctgccaagtttgcttctttcatcacacagtacagcaccggccaggtcagcgtggagatcgagtgggagctgcagaaggagaacagcaagcgctggaacccagagattcagtatacctccaattttgacaaacagactggtgtggactttgccgttgacagccagggtgtttattctgagcctcgccccattggtactcgttacctcacccgtaatctgtaa

SEQ ID NO: 5054 - protein, 737 aa, Adeno-associated virus
MAADGYLPDWLEDNLSEGIREWWDLKPGAPKPKANQQKQDDGRGLVLPGYKYLGPFNGLDKGEPVNAADAAALEHDKAYDQQLKAGDNPYLRYNHADAEFQERLQEDTSFGGNLGRAVFQAKKRVLEPLGLVEEAAKTAPGKKRPVEPSPQRSPDSSTGIGKKGQQPARKRLNFGQTGDSESVPDPQPLGEPPAGPSGLGSGTMAAGGGAPMADNNEGADGVGNASGNWHCDSTWLGDRVITTSTRTWALPTYNNHLYKQISSQSAGSTNDNVYFGYSTPWGYFDFNRFHCHFSPRDWQRLINNNWGFRPKKLNFKLFNIQVKEVTTNDGVTTIANNLTSTVQVFSDSEYQLPYVLGSAHQGCLPPFPADVFMIPQYGYLTLNNGSQSVGRSSFYCLEYFPSQVLRTGNNFTFSYTFEDVPFHSSYAHSQSLDRLMNPLIDQYLYYLARTQSNPGGTSGNRELQFYQGGPSTMAEQAKNWLPGPCFRQQRVSKTLDQNNNSNFAWTGATKYHLNGRNSLVNPGVAMATHKDDEDRFFPSSGVLIFGKTGATNKTTLENVLMTNEEEIRPTNPVATEEYGIVSSNLQAANTAAQTQVVNNQGALPGMVWQNRDVYLQGPIWAKIPHTDGNFHPSPLMGGFGLKHPPPQILIKNTPVPANPPEVFTPAKFASFITQYSTGQVSVEIEWELQKENSKRWNPEIQYTSNFDKQTGVDFAVDSQGVYSEPRPIGTRYLTRNL

SEQ ID NO: 5055 - DNA, 2214 bp, Adeno-associated virus
  source 1..2214: mol_type = unassigned DNA
atggctgccgatggttatcttccagattggctcgaggacaacctctctgagggcattcgcgagtggtgggacctgaaacctggagccccgaaacccaaagccaaccagcaaaagcaggacgacggccggggtctggtgcttcctggctacaagtacctcggacccttcaacggactcgacaagggggagcccgtcaacgcggcggacgcagcggccctcgagcacgacaaggcctacgaccagcagctcaaagcgggtgacaatccgtacctgcggtataatcacgccgacgccgagtttcaggagcgtctgcaagaagatacgtcttttgggggcaacctcgggcgagcagtcttccaggccaagaagcgggttctcgaacctctcggtctggttgaggaaggcgctaagacggctcctggaaagaagagaccggtagagccgtcaccacagcgttcccccgactcctccacgggcatcggcaagaaaggccagcagcccgccagaaagagactcaatttcggtcagactggcgactcagagtcagtccccgaccctcaacctatcggagaacctccagcagcgccctctagtgtgggatctggtacaatggctgcaggcggtggcgcaccaatggcagacaataacgaaggtgccgacggagtgggtagttcctcgggaaattggcattgcgattccacacggctgggcgacagagtcatcaccaccagcacccggacctgggctttgcccacctacaacaaccacctctacaagcaaatctccagtcagtcagcaggtagcaccaacgacaacgtctacttcggctacagcaccccctgggggtattttgacttcaacagattccactgtcacttctcaccacgtgactggcagcggctcatcaacaacaactggggattccggcccaagaagctcaacttcaagctgttcaacatccaggtcaaggaggtcacaacgaatgacggcgtcacgaccatcgccaataaccttaccagcacggttcaggtcttttcggactcggaataccagctgccctacgtcctcggctccgcacaccagggctgcctgcctccgttcccggcggacgtcttcatgattccccagtacggctacctgactctgaacaatggcagccaatcggtgggtcgttcctctttctactgcctggaatatttcccttctcaaatgctgagaacgggcaacaacttcaccttcagctacaccttcgaggacgttcccttccacagcagctacgcacacagccagagcctggaccggctgatgaatcctcttatcgaccagtacctgtattacctggccagaacacagagcaacgcaggaggcacagctggcaatcgggaactgcagttttatcagggcgggcctaccaccatggccgaacaagccaaaaactggctgcctggaccttgcttccggcaacgaagagtctccaagacgctggatcaaaacaacaacagcaactttgcttggactggtgccaccaaataccatctaaatggaagaaattcattggttaatcccggtgtcgccatggcaacccacaaggacgacgaggaacgcttcttcccttcgagcggagtcctgatttttggaaaaactggagcagctaataagactacactggaaaatgtgttaatgacaaatgaagaggaaattcgtcctaccaacccggtagccaccgaggaatacgggactgttagcagcaacctgcaggcggctaacactgcagcccagacacaagttgtcaacaaccagggagccttacctggtatggtctggcagaaccgggacgtgtacctgcagggtcccatctgggccaagattcctcacacggacggcaactttcacccgtctccgctgatgggcggctttggactgaagcatccgcctcctcagatcctgatcaaaaacactcctgttcctgctaatcccccggaggtgtttacgcctgccaagtttgcttctttcatcacacagtacagcaccggccaggtcagcgtggagatcgagtgggagctgcagaaggagaacagcaagcgctggaacccagagattcagtatacctccaattttgacaaacagactggtgtggactttgccgttgacagccagggtgtttattctgagcctcgccccattggtactcgttacctcacccgtaatctgtaa

SEQ ID NO: 5056 - protein, 737 aa, Adeno-associated virus
MAADGYLPDWLEDNLSEGIREWWDLKPGAPKPKANQQKQDDGRGLVLPGYKYLGPFNGLDKGEPVNAADAAALEHDKAYDQQLKAGDNPYLRYNHADAEFQERLQEDTSFGGNLGRAVFQAKKRVLEPLGLVEEGAKTAPGKKRPVEPSPQRSPDSSTGIGKKGQQPARKRLNFGQTGDSESVPDPQPIGEPPAAPSSVGSGTMAAGGGAPMADNNEGADGVGSSSGNWHCDSTRLGDRVITTSTRTWALPTYNNHLYKQISSQSAGSTNDNVYFGYSTPWGYFDFNRFHCHFSPRDWQRLINNNWGFRPKKLNFKLFNIQVKEVTTNDGVTTIANNLTSTVQVFSDSEYQLPYVLGSAHQGCLPPFPADVFMIPQYGYLTLNNGSQSVGRSSFYCLEYFPSQMLRTGNNFTFSYTFEDVPFHSSYAHSQSLDRLMNPLIDQYLYYLARTQSNAGGTAGNRELQFYQGGPTTMAEQAKNWLPGPCFRQRRVSKTLDQNNNSNFAWTGATKYHLNGRNSLVNPGVAMATHKDDEERFFPSSGVLIFGKTGAANKTTLENVLMTNEEEIRPTNPVATEEYGTVSSNLQAANTAAQTQVVNNQGALPGMVWQNRDVYLQGPIWAKIPHTDGNFHPSPLMGGFGLKHPPPQILIKNTPVPANPPEVFTPAKFASFITQYSTGQVSVEIEWELQKENSKRWNPEIQYTSNFDKQTGVDFAVDSQGVYSEPRPIGTRYLTRNL

SEQ ID NO: 5057 - DNA, 2208 bp, Adeno-associated virus
  source 1..2208: mol_type = unassigned DNA
atggctgccgatggttatcttccagattggctcgaggacactctctctgaaggaataagacagtggtggaagctcaaacctggcccaccaccaccaaagcccgcagagcggcataaggacgacagcaggggtcttgtgcttcctgggtacaagtacctcggacccttcaacggactcgacaagggggagccggtcaacgaggcagacgccgcggccctcgagcacgacaaggcctacgaccggcagctcgacagcggagacaacccgtacctcaagtacaaccacgccgacgcggagtttcaggagcgtcttaaagaagatacgtcttttgggggcaacctcggacgagcagtcttccaggcgaaaaagagggttcttgaacctctgggcctggttgaggaacctgttaagacggctccgggaaaaaagaggccggtagagcactctcctgcggagccagactcctcctcgggaaccggaaaagcgggccagcagcctgcaagaaaaagattgaattttggtcagactggagacgcagactccgtacctgacccccagcctctcggacagccaccagcagccccctctggtttgggatctactacaatggctacaggcagtggcgcaccaatggcagacaataacgagggtgccgatggagtgggtaattcttcaggaaattggcattgcgattcccaatggctgggcgacagagtcatcaccaccagcacccgaacctgggcccagcccacctacaacaaccacctctacaagcaaatctcaagccaatcaggagcctcaaacgacaaccactactttggctacagcaccccttgggggtattttgacttcaacagattccactgccacttttcaccacgtgactggcaaagactcatcaacaacaactggggattccgacccaagagactcaacttcaagctctttaacattcaagtcaaagaggtcacgcagaatgacggtacgacgacgattgccaataaccttaccagcacggttcaggtgtttactgactcggagtaccagctcccgtacgtcctcgggtcggcgcatcaaggatgcctcccgccgtttccagcggacgtcttcatggtcccacagtatggatacctcaccctgaacaacgggagtcaggcggtaggacgctcttccttttactgcctggagtactttccttctcagatgcttcgtactggaaacaactttcagttcagctacacctttgaagacgttcctttccacagcagctacgctcacagccagagtctggatcggctgatgaatcctctgatcgaccagtacctgtattatctgaacaaaacacaatcaaatagtggagctcttcagcagtctcggctactgtttagtcaagctggacccaccagcatgtctcttcaagctaaaaactggctacctggaccttgctacagacagcagcgtctgtcaaagcaggcaaacgacaacaacaacagcaactttccctggactgcggctacaaagtaccacctaaatggccgggactcgttggttaatccaggaccagctatggccagtcacaaagacgatgaagaaaagtttttccccatgcatggaaccctgatatttggtaaacaaggaacaaatgctaacgacgcggatttggacaatgtcatgattacagatgaagaagaaatccgcaccaccaatcccgtggctacggagcagtacggatatgtgtcaaataatttgcaaaactcaaatactggtccaactactggaactgtcaatcaccgaggagcgttacctggcatggtgtggcaggatcgagacgtgtacctgcagggacccatttgggccaagattcctcacaccgatggacactttcatccttctccactgatgggaggttttgggctcaaacacccgcctcctcagatcatgatcaaaaacactcccgttccagccaatcctcccacaaacttcagttctgccaagtttgcttctttcatcacacagtattccacggggcaggtcagcgtggagatcgagtgggagctgcagaaagagaacagcaaacgctggaatcccgaaattcagtacacttccaactacaacaaatctgttaatgtggactttactgtggacactaatggcgtgtattcagagcctcgccccattggcaccagatacctgactcgtaatctgtaa

SEQ ID NO: 5058 - protein, 735 aa, Adeno-associated virus
MAADGYLPDWLEDTLSEGIRQWWKLKPGPPPPKPAERHKDDSRGLVLPGYKYLGPFNGLDKGEPVNEADAAALEHDKAYDRQLDSGDNPYLKYNHADAEFQERLKEDTSFGGNLGRAVFQAKKRVLEPLGLVEEPVKTAPGKKRPVEHSPAEPDSSSGTGKAGQQPARKRLNFGQTGDADSVPDPQPLGQPPAAPSGLGSTTMATGSGAPMADNNEGADGVGNSSGNWHCDSQWLGDRVITTSTRTWAQPTYNNHLYKQISSQSGASNDNHYFGYSTPWGYFDFNRFHCHFSPRDWQRLINNNWGFRPKRLNFKLFNIQVKEVTQNDGTTTIANNLTSTVQVFTDSEYQLPYVLGSAHQGCLPPFPADVFMVPQYGYLTLNNGSQAVGRSSFYCLEYFPSQMLRTGNNFQFSYTFEDVPFHSSYAHSQSLDRLMNPLIDQYLYYLNKTQSNSGALQQSRLLFSQAGPTSMSLQAKNWLPGPCYRQQRLSKQANDNNNSNFPWTAATKYHLNGRDSLVNPGPAMASHKDDEEKFFPMHGTLIFGKQGTNANDADLDNVMITDEEEIRTTNPVATEQYGYVSNNLQNSNTGPTTGTVNHRGALPGMVWQDRDVYLQGPIWAKIPHTDGHFHPSPLMGGFGLKHPPPQIMIKNTPVPANPPTNFSSAKFASFITQYSTGQVSVEIEWELQKENSKRWNPEIQYTSNYNKSVNVDFTVDTNGVYSEPRPIGTRYLTRNL

SEQ ID NO: 5059 - DNA, 2217 bp, Adeno-associated virus
  source 1..2217: mol_type = unassigned DNA
atggctgccgatggttatcttccagattggctcgaggacaacctctctgagggcattcgcgagtggtgggcgctgaaacctggagccccgaagcccaaagccaaccagcaaaagcaggacgacggccggggtctggtgcttcctggctacaagtacctcggacccttcaacggactcgacaagggggagcccgtcaacgcggcggacgcagcggccctcgagcacgacaaggcctacgaccagcagctgcaggcgggtgacaatccgtacctgcggtataatcacgccgacgccgagtttcaggagcgtctgcaagaagatacgtcttttgggggcaacctcgggcgagcagtcttccaggccaagaagcgggttctcgaacctctcggtctggttgaggaaggcgctaagacggctcctggaaagaagagaccggtagagccgtcaccacagcgttcccccgactcctccacgggcatcggcaagaaaggccagcagcccgccagaaagagactcaatttcggtcagactggcgactcagagtcagtccccgaccctcaacctatcggagaacctccagcagcgccctctagtgtgggatctggtacaatggctgcaggcggtggcgcgccaatggcagacaataacgaaggtgccgacggagtgggtagttcctcgggaaattggcattgcgattccacatggctgggcgacagagtcatcaccaccagcacccgaacctgggccctgcccacctacaacaaccacctctacaagcaaacctccaacgggacctcgggaggcagcaccaacgacaacacctactttggctacagcaccccctgggggtattttgactttaacagattccactgccacttctcaccacgtgactggcagcgactcatcaacaacaactggggattccggcccaagagactcagcttcaagctcttcaacatccaggtcaaagaggtcacgcagaatgaaggcaccaagaccatcgccaataacctcaccagcaccatccaggtgtttacggactcggaataccagctgccgtacgtcctcggctctgcccaccagggctgcctgcctccgttcccggcggacgtcttcatgattcctcagtacggctacctgactctcaacaacggtagtcaggccgtgggacgttcctccttctactgcctggagtacttcccctctcagatgctgagaacgggcaacaacttttccttcagctacactttcgaggacgtgcctttccacagcagctacgcgcacagccagagtttggacaggctgatgaatcctctcatcgaccagtacctgtactacctgtcaagaacccagtctacgggaggcacagcgggaacccagcagttgctgttttctcaggccgggcctagcaacatgtcggctcaggccagaaactggctgcctggaccctgctacagacagcagcgcgtctccacgacactgtcgcaaaacaacaacagcaactttgcctggactggtgccaccaagtatcatctgaacggcagagactctctggtgaatccgggcgtcgccatggcaaccaacaaggacgacgaggaccgcttcttcccatccagcggcatcctcatgtttggcaagcagggagctggaaaagacaacgtggactatagcaacgtgatgctaaccagcgaggaagaaatcaagaccaccaaccccgtggccacagaacagtatggcgtggtggctgataacctacagcagcaaaacaccgctcctattgtgggggccgtcaacagccagggagccttacctggcatggtctggcagaaccgggacgtgtacctgcagggtcctatttgggccaagattcctcacacagatggcaactttcacccgtctcctttaatgggcggctttggacttaaacatccgcctcctcagatcctcatcaaaaacactcctgttcctgcggatcctccaacagcgttcaaccaggccaagctgaattctttcatcacgcagtacagcaccggacaagtcagcgcggagatcgagtgggagctgcagaaggagaacagcaagcgctggaacccagagattcagtatacttccaactactacaaatctacaaatgtggactttgctgttaatactgagggtgtttactctgagcctcgccccattggcactcgttacctcacccgtaatctgtaa

SEQ ID NO: 5060 - protein, 738 aa, Adeno-associated virus
MAADGYLPDWLEDNLSEGIREWWALKPGAPKPKANQQKQDDGRGLVLPGYKYLGPFNGLDKGEPVNAADAAALEHDKAYDQQLQAGDNPYLRYNHADAEFQERLQEDTSFGGNLGRAVFQAKKRVLEPLGLVEEGAKTAPGKKRPVEPSPQRSPDSSTGIGKKGQQPARKRLNFGQTGDSESVPDPQPIGEPPAAPSSVGSGTMAAGGGAPMADNNEGADGVGSSSGNWHCDSTWLGDRVITTSTRTWALPTYNNHLYKQTSNGTSGGSTNDNTYFGYSTPWGYFDFNRFHCHFSPRDWQRLINNNWGFRPKRLSFKLFNIQVKEVTQNEGTKTIANNLTSTIQVFTDSEYQLPYVLGSAHQGCLPPFPADVFMIPQYGYLTLNNGSQAVGRSSFYCLEYFPSQMLRTGNNFSFSYTFEDVPFHSSYAHSQSLDRLMNPLIDQYLYYLSRTQSTGGTAGTQQLLFSQAGPSNMSAQARNWLPGPCYRQQRVSTTLSQNNNSNFAWTGATKYHLNGRDSLVNPGVAMATNKDDEDRFFPSSGILMFGKQGAGKDNVDYSNVMLTSEEEIKTTNPVATEQYGVVADNLQQQNTAPIVGAVNSQGALPGMVWQNRDVYLQGPIWAKIPHTDGNFHPSPLMGGFGLKHPPPQILIKNTPVPADPPTAFNQAKLNSFITQYSTGQVSAEIEWELQKENSKRWNPEIQYTSNYYKSTNVDFAVNTEGVYSEPRPIGTRYLTRNL

SEQ ID NO: 5061 - DNA, 2217 bp, Adeno-associated virus
  source 1..2217: mol_type = unassigned DNA
atggctgctgacggttatcttccagattggctcgaggacaacctctctgagggcattcgcgagtggtgggacctgaaacctggagcccccaagcccaaggccaaccagcagaagcaggacgacggccggggtctggtgcttcctggctacaagtacctcggacccttcaacggactcgacaagggggagcccgtcaacgcggcggacgcagcggccctcgagcacgacaaggcctacgaccagcagctcaaagcgggtgacaatccgtacctgcggtataatcacgccgacgccgagtttcaggagcgtctgcaagaagatacgtcttttgggggcaacctcgggcgagcagtcttccaggccaagaagcgggttctcgaacctctcggtctggttgaggaagctgctaagacggctcctggaaagaagagaccggtagaaccgtcacctcagcgttcccccgactcctccacgggcatcggcaagaaaggccagcagcccgctagaaagagactgaactttgggcagactggcgactcagagtcagtccccgaccctcaaccaatcggagaacctccagcagcgccctctagtgtgggatctggtacaatggccgcaggcggtggcgcaccaatggcagacaataacgaaggtgccgacggagtgggtagttcctcgggaaattggcattgcgattccacatggctgggcgacagagtcatcaccaccagcacccgaacctgggccctgcccacctacaacaaccacctctacaagcaaatctccaacgggacctcgggaggcagcaccaacgacaacacctactttggctacagcaccccctgggggtattttgactttaacagattccactgccacttctcaccacgtgactggcagcgactcatcaacaacaactggggattccggcccaagagactcagcttcaagctcttcaacatccaggtcaaagaggtcacgcagaatgaaggcaccaagaccatcgccaataacctcaccagcaccatccaggtgtttacggactcggaataccagctgccgtacgtcctcggctctgcccaccagggctgcctgcctccgttcccggcggacgtcttcatgattcctcagtacggctacctgactctcaacaacggtagtcaggccgtgggacgttcctccttctactgcctggagtacttcccctctcagatgctgagaacgggcaacaacttttccttcagctacactttcgaggacgtgcctttccacagcagctacgcgcacagccagagtttggacaggctgatgaatcctctcatcgaccagtacctgtactacctgtcaagaacccagtctacgggaggcacagcgggaacccagcagctgctgttttctcaggccgggcctagcaacatgtcggctcaggccagaaactggctgcctggaccctgctacagacagcagcgcgtctccacgacactgtcgcaaaacaacaacagcaactttgcctggactggtgccaccaagtatcatctgaacggcagagactctctggtgaatccgggcgtcgccatggcaaccaacaaggacgacgaggaccgcttcttcccatccagcggcatcctcatgtttggcaagcagggagctggaaaagacaacgtggactatagcaacgtgatgctaaccagcgaggaagaaatcaagaccaccaaccccgtggccacagaacagtatggcgtggtggctgataacctacagcagcaaaacaccgctcctattgtgggggccgtcaacagccagggagccttacctggcatggtctggcagaaccgggacgtgtacctgcagggtcctatttgggccaagattcctcacacagatggcaactttcacccgtctcctttaatgggcggctttggacttaaacatccgcctcctcagatcctcatcaaaagcactcctgttcctgcggatcctccaacagcgttcaaccaggccaagctgaattctttcatcacgcagtacagcaccggacaagtcagcgtggagatcgagtgggagctgcagaaggagaacagcaagtgctggaacccagagattcagtatacttccaactactacaaatctacaaatgtggactttgctgttaatactgagggtgtttactctgagcctcgccccattggcactcgttacctcacccgtaatctgtaa

SEQ ID NO: 5062 - protein, 738 aa, Adeno-associated virus
MAADGYLPDWLEDNLSEGIREWWDLKPGAPKPKANQQKQDDGRGLVLPGYKYLGPFNGLDKGEPVNAADAAALEHDKAYDQQLKAGDNPYLRYNHADAEFQERLQEDTSFGGNLGRAVFQAKKRVLEPLGLVEEAAKTAPGKKRPVEPSPQRSPDSSTGIGKKGQQPARKRLNFGQTGDSESVPDPQPIGEPPAAPSSVGSGTMAAGGGAPMADNNEGADGVGSSSGNWHCDSTWLGDRVITTSTRTWALPTYNNHLYKQISNGTSGGSTNDNTYFGYSTPWGYFDFNRFHCHFSPRDWQRLINNNWGFRPKRLSFKLFNIQVKEVTQNEGTKTIANNLTSTIQVFTDSEYQLPYVLGSAHQGCLPPFPADVFMIPQYGYLTLNNGSQAVGRSSFYCLEYFPSQMLRTGNNFSFSYTFEDVPFHSSYAHSQSLDRLMNPLIDQYLYYLSRTQSTGGTAGTQQLLFSQAGPSNMSAQARNWLPGPCYRQQRVSTTLSQNNNSNFAWTGATKYHLNGRDSLVNPGVAMATNKDDEDRFFPSSGILMFGKQGAGKDNVDYSNVMLTSEEEIKTTNPVATEQYGVVADNLQQQNTAPIVGAVNSQGALPGMVWQNRDVYLQGPIWAKIPHTDGNFHPSPLMGGFGLKHPPPQILIKSTPVPADPPTAFNQAKLNSFITQYSTGQVSVEIEWELQKENSKCWNPEIQYTSNYYKSTNVDFAVNTEGVYSEPRPIGTRYLTRNL

SEQ ID NO: 5063 - protein, 738 aa, Adeno-associated virus
MAADGYLPDWLEDNLSEGIREWWDLKPGAPKPKANQQKQDDGRGLVLPGYKYLGPFNGLDKGEPVNAADAAALEHDKAYDQQLKAGDNPYLRYNHADAEFQERLQEDTSFGGNLGRAVFQAKKRVLEPLGLVEEAAKTAPGKKRPVEPSPQRSPDSSTGIGKKGQQPARKRLNFGQTGDSESVPDPQPIGEPPAAPSSVGSGTMAAGGGAPMADNNEGADGVGSSSGNWHCDSTWLGDRVITTSTRTWALPTYNNHLYKQISNGTSGGSTNDNTYFGYSTPWGYFDFNRFHCHFSPRDWQRLINNNWGFRPKRLSFKLFNIQVKEVTQNEGTKTIANNLTSTIQVFTDSEYQLPYVLGSAHQGCLPPFPADVFMIPQYGYLTLNNGSQAVGRSSFYCLEYFPSQMLRTGNNFSFSYTFEDVPFHSSYAHSQSLDRLMNPLIDQYLYYLSRTQSTGGTAGTQQLLFSQAGPSNMSAQARNWLPGPCYRQQRVSTTLSQNNNSNFAWTGATKYHLNGRDSLVNPGVAMATNKDDEDRFFPSSGILMFGKQGAGKDNVDYSNVMLTSEEEIKTTNPVATEQYGVVADNLQQQNTAPIVGAVNSQGALPGMVWQNRDVYLQGPIWAKIPHTDGNFHPSPLMGGFGLKHPPPQILIKSTPVPADPPTAFNQAKLNSFITQYSTGQVSVEIEWELQKENSKRWNPEIQYTSNYYKSTNVDFAVNTEGVYSEPRPIGTRYLTRNL

SEQ ID NO: 5064 - DNA, 2217 bp, Adeno-associated virus
  source 1..2217: mol_type = unassigned DNA
atggctgctgacggttatcttccagattggctcgaggacaacctctctgagggcattcgcgagtggtgggacctgaaacctggagcccccaagcccaaggccaaccagcagaagcaggacgacggccggggtctggtgcttcctggctacaagtacctcggacccttcaacggactcgacaagggggagcccgtcaacgcggcggacgcagcggccctcgagcacgacaaggcctacgaccagcagctcaaagcgggtgacaatccgtacctgcggtataaccacgccgacgccgagtttcaggagcgtctgcaagaagatacgtcttttgggggcaacctcgggcgagcagtcttccaggccaagaagcgggttctcgaacctctcggtctggttgaggaagctgctaagacggctcctggaaagaagagaccggtagaaccgtcacctcagcgttcccccgactcctccacgggcatcggcaagaaaggccagcagcccgctagaaagagactgaactttgggcagactggcgactcagagtcagtccccgaccctcaaccaatcggagaaccaccagcaggcccctctggtctgggatctggtacaatggctgcaggcggtggcgcaccaatggctgacaataacgagggcgccgacggagtgggtaatgcctcaggaaattggcattgcgattccacatggctgggcgacagagtcatcaccaccagcacccgaacctgggctttgcccacctacaacaaccacctctacaagcaaatctccagtcagtcagcaggtagcaccaacgacaacgtctacttcggctacagcaccccctgggggtattttgacttcaacagattccactgtcacttctcaccacgtgactggcagcggctcatcaacaacaactggggattccggcccaagaagctcaacttcaagctgttcaacatccaggtcaaggaggtcacaacgaatgacggcgtcacgaccatcgccaataaccctaccagcacggttcaggtcttttcggactcggaataccagctgccctacgtcctcggctccgcacaccagggctgcctgcctccgttcccggcggacgtcttcatgattccccagtacggctacctgactctgaacaatggcagccaatcggtgggtcgttcctctttctactgcctggaatatttcccttctcaaatgctgagaacgggcaacaacttcaccttcagctacaccttcgaggacgttcccttccacagcagctacgcacacagccagagcctggaccggctgatgaatcctcttatcgaccagtacctgtattacctggccagaacacagagcaacgcaggaggcacagctggcaatcgggaactgcagttttatcagggcgggcctaccaccatggccgaacaagccaaaaactggctgcctggaccctgctacagacagcagcgcgtctccacgacactgtcgcaaaacaacaacagcaactttgcctggactggtgccaccaagtatcatctgaacggcagagactctctggtgaatccgggcgtcgccatggcaaccaacaaggacgacgaggaccgcttcttcccatccagcggcatcctcatgtttggcaagcagggagctggaaaagacaacgtggactatagcaacgtgatgctaaccagcgaggaagaaatcaagaccaccaaccccgtggccacagaacagtatggcgtggtggctgataacctacagcagcaaaacaccgctcctattgtgggggccgtcaacagccagggagccttacctggcatggtctggcagaaccgggacgtgtacctgcagggtcctatttgggccaagattcctcacacagatggcaactttcacccgtctcctttaatgggcggctttggacttaaacatccgcctcctcagatcctcatcaaaaacactcctgttcctgcggatcctccaacagcgttcaaccaggccaagctgaattctttcatcacgcagtacagcaccggacaagtcagcgtggagatcgagtgggagctgcagaaggagaacagcaagcgctggaacccagagattcagtatacttccaactactacaaatctacaaatgtggactttgctgttaatactgagggtgtttactctgagcctcgccccattggcactcgttacctcacccgtaatctgtaa

SEQ ID NO: 5065 - protein, 738 aa, Adeno-associated virus
MAADGYLPDWLEDNLSEGIREWWDLKPGAPKPKANQQKQDDGRGLVLPGYKYLGPFNGLDKGEPVNAADAAALEHDKAYDQQLKAGDNPYLRYNHADAEFQERLQEDTSFGGNLGRAVFQAKKRVLEPLGLVEEAAKTAPGKKRPVEPSPQRSPDSSTGIGKKGQQPARKRLNFGQTGDSESVPDPQPIGEPPAGPSGLGSGTMAAGGGAPMADNNEGADGVGNASGNWHCDSTWLGDRVITTSTRTWALPTYNNHLYKQISSQSAGSTNDNVYFGYSTPWGYFDFNRFHCHFSPRDWQRLINNNWGFRPKKLNFKLFNIQVKEVTTNDGVTTIANNPTSTVQVFSDSEYQLPYVLGSAHQGCLPPFPADVFMIPQYGYLTLNNGSQSVGRSSFYCLEYFPSQMLRTGNNFTFSYTFEDVPFHSSYAHSQSLDRLMNPLIDQYLYYLARTQSNAGGTAGNRELQFYQGGPTTMAEQAKNWLPGPCYRQQRVSTTLSQNNNSNFAWTGATKYHLNGRDSLVNPGVAMATNKDDEDRFFPSSGILMFGKQGAGKDNVDYSNVMLTSEEEIKTTNPVATEQYGVVADNLQQQNTAPIVGAVNSQGALPGMVWQNRDVYLQGPIWAKIPHTDGNFHPSPLMGGFGLKHPPPQILIKNTPVPADPPTAFNQAKLNSFITQYSTGQVSVEIEWELQKENSKRWNPEIQYTSNYYKSTNVDFAVNTEGVYSEPRPIGTRYLTRNL

SEQ ID NO: 5066 - DNA, 2208 bp, Adeno-associated virus
  source 1..2208: mol_type = unassigned DNA
atggctgccgatggttatcttccagattggctcgaggacaacctctctgagggcattcacgagtggtgggacccgaaacctggagccccgaaacccaaagccaaccagcaaaagcaggacgacggccggggtctggtgcttcctggctacaagtacctcggacccttcaacggactcgacaagggggagcccgtcaacgcggcggacgcagcggccctcgagcacgacaaggcctacgaccagcagctcaaagcgggtgacaatccgtacctgcggtataatcacgccgacgccgagtttcaggagcgtctgcaagaagatacgtcttttgggggcaacctcgggcgagcagtcttccaggccaagaagcgggttctcgaacctctcggtctggttgaggaaggcgctaagacggctcctggaaagaagagaccggtagagccgtcaccacagcgttcccccgactcctccacgggcatcggcaagaaaggccagcagcccgccagaaagagactcaatttcggtcagactggcgactcagagtcagtccccgaccctcaacctatcggagaacctccagcagcgccctctagtgtgggatctggtacaatggctgcaggcggtggcgcaccaatggcagacaataacgaaggtgccgacggagtgggtagttcctcgggaaattggcattgcgattccacatggctgggcgacagagtcatcaccaccagcacccgaacctgggccctgcccacccacaacaaccacctctacaagcaaatctccaacgggacctcgggaggcagcaccaacgacaacgtctacttcggctacagcaccccctgggggtattttgacttcaacagattccactgtcacttctcaccacgtgaccggcagcgactcatcaacaacaactggggattccggcccaagagactcagcttcaagctcttcaacatccaggtcaaagaggtcacgcagaatgaaggcaccaagaccatcgccaataacctcaccagcaccatccaggtgtttacggactcggaataccagctgccgtacgtcctcggctctgcccaccagggctgcctgcctccgttcccggcggacgtcttcatgattcctcagtacggctacctgactctcaacaacggtagtcaggccgtgggacgttcctccttctactgcctggagtacttcccctctcagatgctgagaacgggcaacaacttttccttcagctacactttcgaggacgtgcctttccacagcagctacgcgcacagccagagtttggacaggctgatgaatcctctcatcgaccagtacctgtactacctgtcaagaacccagtctacggaaggcacagcgggaacccagcagttgctgttttctcaggccgggcctagcaacatgtcggctcaggccagaaactggctgcctggaccctgctacagacagcagcgcgtctccacgacactgtcgcaaaacaacaacagcaactttgcctggactggtgccaccaagtatcatctgaacggcagagactctctggtgaatccgggcgtcgccatggcaacccacaaggacgacgaggaacgcttcttcccttcgagcggagtcctgatttttggaaaaactggagcagctaataagactacactggaaaatgtgttaatgacaaatgaagaggaaattcgtcctaccaacccggtagccaccgaggaatacgggactgttagcagcaacctgcaggcggctaacactgcagcccagacacaagttgtcaacaaccagggagccttacctggtatggtctggcagaaccgggacgtgtacctgcagggtcccatctgggccaagattcctcacacggacggcaactttcacccgtctccgctgatgggcggctttggactgaagcatcctcagatcctgatcaaaaacactcctgttcctgctaatcccccggaggtgtttacgcctgccaagtttgcttctttcatcacacagtacagcaccggccaggtcagcgtggagatcgagtgggagctgcagaaggagaacagcaagcgctggaacccagagattcagtatacctccaattttgacaaacagactggtgtggactttgccgttgacagccagggtgtttattctgagcctcgccccattggtactcgttacctcacccgtaatctgtaa

SEQ ID NO: 5067 - protein, 735 aa, Adeno-associated virus
MAADGYLPDWLEDNLSEGIHEWWDPKPGAPKPKANQQKQDDGRGLVLPGYKYLGPFNGLDKGEPVNAADAAALEHDKAYDQQLKAGDNPYLRYNHADAEFQERLQEDTSFGGNLGRAVFQAKKRVLEPLGLVEEGAKTAPGKKRPVEPSPQRSPDSSTGIGKKGQQPARKRLNFGQTGDSESVPDPQPIGEPPAAPSSVGSGTMAAGGGAPMADNNEGADGVGSSSGNWHCDSTWLGDRVITTSTRTWALPTHNNHLYKQISNGTSGGSTNDNVYFGYSTPWGYFDFNRFHCHFSPRDRQRLINNNWGFRPKRLSFKLFNIQVKEVTQNEGTKTIANNLTSTIQVFTDSEYQLPYVLGSAHQGCLPPFPADVFMIPQYGYLTLNNGSQAVGRSSFYCLEYFPSQMLRTGNNFSFSYTFEDVPFHSSYAHSQSLDRLMNPLIDQYLYYLSRTQSTEGTAGTQQLLFSQAGPSNMSAQARNWLPGPCYRQQRVSTTLSQNNNSNFAWTGATKYHLNGRDSLVNPGVAMATHKDDEERFFPSSGVLIFGKTGAANKTTLENVLMTNEEEIRPTNPVATEEYGTVSSNLQAANTAAQTQVVNNQGALPGMVWQNRDVYLQGPIWAKIPHTDGNFHPSPLMGGFGLKHPQILIKNTPVPANPPEVFTPAKFASFITQYSTGQVSVEIEWELQKENSKRWNPEIQYTSNFDKQTGVDFAVDSQGVYSEPRPIGTRYLTRNL

SEQ ID NO: 5068 - protein, 738 aa, Adeno-associated virus
MAADGYLPDWLEDNLSEGIREWWDLKPGAPKPKANQQKQDDGRGLVLPGYKYLGPFNGLDKGEPVNAADAAALEHDKAYDQQLKAGDNPYLRYNHADAEFQERLQEDTSFGGNLGRAVFQAKKRVLEPLGLVEEGAKTAPGKKRPVEPSPQRSPDSSTGIGKKGQQPARKRLNFGQTGDSESVPDPQPIGEPPAAPSSVGSGTMAAGGGAPMADNNEGADGVGSSSGNWHCDSTWLGDRVITTSTRTWALPTYNNHLYKQISNGTSGGSTNDNTYFGYSTPWGYFDFNRFHCHFSPRDWQRPINNNWGFRPKRLSFKLFNIQVKEVTQNEGTKTIANNLTSTIQVFTDSEYQLPYVLGSAHQGCLPPFPADVFMIPQYGYLTLNNGSQAVGRSSFYCLEYFPSQMLRTGNNFSFSYPFEDVPFHSSYAHSQSLDRLMNPLIDQYLYYLSRTQSTGGTAGTQQLLFSQAGPSNMSAQARNWLPGPCYRQQRVSTTLSQNNNSNFAWTGATKYHLNGRDSLVNPGVAMATNKDDEDRFFPSSGILMFGKQGAGKDNVDYSNVMLTSEEEIKTTNPVATEQYGVVADNLQQQDTAPIVGAVNSQGALPGMVWQNRDVYLQGPIWAKIPHTDGNFHPSPLMGGFGLKHPPPQVLIKNTPVPADPPTAFNQAKLNSFITQYSTGQVSVEIEWELQKENSKRWNPEIQYTSNYYKSTNVDFAVNTEGVYSEPRPIGTRYLTRNL

SEQ ID NO: 5069 - DNA, 2217 bp, Adeno-associated virus
  source 1..2217: mol_type = unassigned DNA
atggctgccgatggttatcttccagattggctcgaggacaacctctctgagggcattcgcgagtggtgggacctgaaacctggagccccgaaacccaaggccaaccagcaaaagcaggacgacggccggggtctggtgcttcctggctacaagtacctcggacccttcaacggactcgacaagggggagcccgtcaacgcggcggacgcagcggccctcgagcacgacaaggcctacgaccagcagctcaaagcgggtgacaatccgtacctgcggtataatcacgccgacgccgagtttcaggagcgtctgcaagaagatacgtcttttgggggcaacctcgggcgagcagtcttccaggccaagaagcgggttctcgaacctctcggtctggttgaggaaggcgctaagacggctcctggaaagaagagaccggtagagccgtcaccacagcgttcccccgactcctccacgggcatcggcaagaaaggccagcagcccgccagaaagagactcaatttcggtcagactggcgactcagagtcagtccccgaccctcaacctatcggagaacctccagcagcgccctctagtgtgggatctggtacaatggctgcaggcggtggcgcaccaatggcagacaataacgaaggtgccgacggagtgggtagttcctcgggaaattggcattgcgattccacatggctgggcgacagagtcatcaccaccagcacccgaacctgggccctgcccacctacaacaaccacctctacaagcaaatctccaacgggacctcgggaggcagcaccaacgacaacacctactttggctacagcaccccctgggggtattttgactttaacagattccactgccacttctcaccacgtgactggcagcgacccatcaacaacaactggggattccggcccaagagactcagcttcaagctcttcaacatccaggtcaaagaggtcacgcagaatgaaggcaccaagaccatcgccaataacctcaccagcaccatccaggtgtttacggactcggaataccagctgccgtacgtcctcggctctgcccaccagggctgcctgcctccgttcccggcggacgtcttcatgattcctcagtacggctacctgactctcaacaacggtagtcaggccgtgggacgttcctccttctactgcctggagtacttcccctctcagatgctgagaacgggcaacaacttttccttcagctaccctttcgaggacgtgcctttccacagcagctacgcgcacagccagagtttggacaggctgatgaatcctctcatcgaccagtacctgtactacctgtcaagaacccagtctacgggaggcacagcgggaacccagcagttgctgttttctcaggccgggcctagcaacatgtcggctcaggccagaaactggctgcctggaccctgctacagacagcagcgcgtctccacgacactgtcgcaaaacaacaacagcaactttgcctggactggtgccaccaagtatcatctgaacggcagagactctctggtgaatccgggcgtcgccatggcaaccaacaaggacgacgaggaccgcttcttcccatccagcggcatcctcatgtttggcaagcagggagctggaaaagacaacgtggactatagcaacgtgatgctaaccagcgaggaagaaatcaagaccaccaaccccgtggccacagaacagtatggcgtggtggctgataacctacagcagcaagacaccgctcctattgtgggggccgtcaacagccagggagccttacctggcatggtctggcagaaccgggacgtgtacctgcagggtcctatttgggccaagattcctcacacagatggcaactttcacccgtctcctttaatgggcggctttggacttaaacatccgcctcctcaggtcctcatcaaaaacactcctgttcctgcggatcctccaacagcgttcaaccaggccaagctgaattctttcatcacgcagtacagcaccggacaagtcagcgtggagatcgagtgggagctgcagaaggagaacagcaagcgctggaacccagagattcagtatacttccaactactacaaatctacaaatgtggactttgctgttaatactgagggtgtttactctgagcctcgccccattggcactcgttacctcacccgtaatctgtaa

SEQ ID NO: 5070 - DNA, 2214 bp, Adeno-associated virus
  source 1..2214: mol_type = unassigned DNA
atggctgctgacggttatcttccagattggctcgaggacaacctctctgagggcattcgcgagtggtgggacctgaaacctggagcccccaagcccaaggccaaccagcagaagcaggacgacggccggggtctggtgcttcctggctacaagtacctcggacccttcaacggactcgacaagggggagcccgtcaacgcggcggacgcagcggccctcgagcacgacaaggcctacgaccagcagctcaaagcgggtgacaatccgtacctgcggtataaccacgccgacgccgagttccaggagcgtctgcaagaagatacgtcttttgggggcaacctcgggcgagcagtcttccaggccaagaagcgggttctcgaacctctcggtctggctgaggaagctgctaagacggctcctggaaagaagagaccggtagaaccgtcacctcagcgttcccccgactcctccacgggcatcggcaagaaaggccagcagcccgctagaaagagactgaactttgggcagactggcgactcagagtcagtccccgaccctcaaccaatcggagagccaccagcaggcccctctggtctgggatctggtacaatggctgcaggcggtggcgcaccaatggctgacaataacaagggcgccgacggagtgggtaatgcctcaggaaattggcattgcgattccacatggctgggcgacagagtcatcaccaccagcacccgaacctgggctttgcccacctacaacaaccacctctacaagcaaatctccagtcagtcagcaggtagcaccaacgacaacgtctacttcggctacagcaccccctgggggtattttgacttcaacagattccactgtcacttctcaccacgtgactggcagcggctcatcaacaacaactggggattccggcccaagaagctcaacttcaagctgttcaacatccaggtcaaggaggtcacaacgggtgacggcgtcacgaccatcgccaataaccttaccagcacggttcaggtcttttcggactcggaataccagctgccctacgtcctcggctccgcacaccagggctgcctgcctccgttcccggcggacgtcttcatgattccccagtacggctacctgactctgaacaatgacagccaatcggtgggtcgttcctctttctactgcctggaatatttcccttctcaaatgctgagaacgggcaacaacttcaccttcagctacaccttcgaggacgttcccttccacagcagctacgcacacagccagagcctggaccggctgatgaatcctcttatcgaccagtacctgtattacctggccagaacacagagcaacgcaggaggcacagctggcaatcgggaactgcagttttatcagggcgggcctaccaccatggccgaacaagccaaaaactggctgcctggaccttgcttccggcaacaaagagtctccaagacgctggatcaaaacaacaacagcaactttgcttggactggtgccaccaaataccatctaaatggaagaaattcattggttaatcccggtgtcgccatggcaacccacaaggacgacgaggaacgcttcttcccttcgagcggagtcctgatttttggaaaaactggagcagctaataagactacactggaaaatgtgttaatgacaaatgaagaggaaattcgtcctaccaacccggtagccaccgaggaatacgggactgttagcagcaacctgcaggcggctaacactgcagcccagacacaagttgtcaacaaccagggagccttacctggtatggtctggcagaaccgggacgtgtacctgcagggtcccatctgggccaagattcctcacacggacggcaactttcacccgtctccgctgatgggcggctttggactgaagcatccgcctcctcagatcctgatcaaaaacactcctgttcctgctaatcccccggaggtgtttacgcctgccaagtttgcttctttcatcacacagtacagcaccggccaggtcagcgtggagatcgagtgggagctgcagaaggagaacagcaagcgctggaacccagagattcagtatacctccaattttgacaaacagactggtgtggactttgccgttgacagccagggtgtttattctgagcctcgccccattggtactcgttacctcacccgtaatctgtaa

SEQ ID NO: 5071 - protein, 737 aa, Adeno-associated virus
MAADGYLPDWLEDNLSEGIREWWDLKPGAPKPKANQQKQDDGRGLVLPGYKYLGPFNGLDKGEPVNAADAAALEHDKAYDQQLKAGDNPYLRYNHADAEFQERLQEDTSFGGNLGRAVFQAKKRVLEPLGLAEEAAKTAPGKKRPVEPSPQRSPDSSTGIGKKGQQPARKRLNFGQTGDSESVPDPQPIGEPPAGPSGLGSGTMAAGGGAPMADNNKGADGVGNASGNWHCDSTWLGDRVITTSTRTWALPTYNNHLYKQISSQSAGSTNDNVYFGYSTPWGYFDFNRFHCHFSPRDWQRLINNNWGFRPKKLNFKLFNIQVKEVTTGDGVTTIANNLTSTVQVFSDSEYQLPYVLGSAHQGCLPPFPADVFMIPQYGYLTLNNDSQSVGRSSFYCLEYFPSQMLRTGNNFTFSYTFEDVPFHSSYAHSQSLDRLMNPLIDQYLYYLARTQSNAGGTAGNRELQFYQGGPTTMAEQAKNWLPGPCFRQQRVSKTLDQNNNSNFAWTGATKYHLNGRNSLVNPGVAMATHKDDEERFFPSSGVLIFGKTGAANKTTLENVLMTNEEEIRPTNPVATEEYGTVSSNLQAANTAAQTQVVNNQGALPGMVWQNRDVYLQGPIWAKIPHTDGNFHPSPLMGGFGLKHPPPQILIKNTPVPANPPEVFTPAKFASFITQYSTGQVSVEIEWELQKENSKRWNPEIQYTSNFDKQTGVDFAVDSQGVYSEPRPIGTRYLTRNL

SEQ ID NO: 5072 - DNA, 2217 bp, Adeno-associated virus
  source 1..2217: mol_type = unassigned DNA
atggctgccgatggttatcttccagattggctcgaggacaacctctctgagggcattcgcgagtggtgggacctgaaacctggagccccgaaacccaaagccaaccagcaaaagcaggacgacggccggggtctggtgcttcctggctacaagtacctcggacccttcaacggactcgacaagggggagcccgtcaacgcggcggacgcagcggccctcgagcacgacaaggcctacgaccagcagctcaaagcgggtgacaatccgtacctgcggtataatcacgccgacgccgagtttcaggagcgtctgcaagaagatacgtcttttgggggcaacctcgggcgagcagtcttccaggccaagaagcgggttctcgaacctctcggtctggttgaggaaggcgctaagacggctcctggaaagaagagaccggtagagccgtcaccacagcgttcccccgactcctccacgggcatcggcaagaaaggccagcagcccgccagaaagagactcaatttcggtcagactggcgactcagagtcagtccccgaccctcaacctatcggagaacctccagcagcgccctctagtgtgggatctggtacaatggctgcaggcggtggcgcaccaatggcagacaataacgaaggtgccgacggagtgggtagttcctcgggaaattggcattgcgattccacatggctgggcgacagagtcatcaccaccagcacccgaacctgggccctgcccacctacaacaaccacctctacaagcaaatctccaacgggacctcgggaggcagcaccaacgacaacacctactttggctacagcaccccctgggggtattttgactttaacagattccactgccacttctcaccacgtgactggcagcgactcatcaacaacaactggggattccggcccaagagactcagcttcaagctcttcaacatccaggtcaaagaggtcacgcagaatgaaggcaccaagaccatcgccaataacctcaccagcaccatccaggtgtttacggactcggaataccagctgccgtacgtcctcggctctgcccaccagggctgcctgcctccgttcccggcggacgtcttcatgattcctcagtacggctacctgactctcaacaacggtagtcaggccgtgggacgttcctccttctactgcctggagtacttcccctctcagatgctgagaacgggcaacaacttttccttcagctacactttcgaggacgtgcctttccacagcagctacgcgcacagccagagtttggacaggctgatgaatcctctcatcgaccagtacctgtactacctgtcaagaacccagtctacgggaggcacagcgggaacccagcagttgctgttttctcaggccgggcctagcaacatgtcggctcaggccagaaactggctgcctggaccctgctacagacagcagcgcgtctccacgacactgtcgcaaaacaacaacagcaactttgcctggactggtgccaccaagtatcatctgaacggcagagactctctggtgaatccgggcgtcgccatggcaaccaacaaggacgacgaggaccgcttcttcccatccagcggcatcctcatgtttggcaagcagggagctggaaaagacaacgtggactatagcaacgtgatgctaaccagcgaggaagaaatcaagaccaccaaccccgtggccacagaacagtatggcgtggtggctgataacctacagcagcaaaacaccgctcctattgtgggggccgtcaacagccagggagccttacctggcatggtctggcagaaccgggacgtgtacctgcagggtcctatttgggccaagattcctcacacagatggcaactttcacccgtctcctttaatgggcggctttggacttaaacatccgcctcctcagatcctcatcaaaaacactcctgttcctgcggatcctccaacagcgttcaaccaggccaagctgaattctttcatcacgcagtacagcaccggacaagtcagcgtggagatcgtgtgggagctgcagaaggagaacagcaagcgcaggaacccagagattcagtatacttccaactactacaaatctacaaatgtggactttgctgttaatactgagggtgtttactctgagcctcgccccattggcactcgttacctcacccgtaatctgtaa

SEQ ID NO: 5073 - protein, 738 aa, Adeno-associated virus
MAADGYLPDWLEDNLSEGIREWWDLKPGAPKPKANQQKQDDGRGLVLPGYKYLGPFNGLDKGEPVNAADAAALEHDKAYDQQLKAGDNPYLRYNHADAEFQERLQEDTSFGGNLGRAVFQAKKRVLEPLGLVEEGAKTAPGKKRPVEPSPQRSPDSSTGIGKKGQQPARKRLNFGQTGDSESVPDPQPIGEPPAAPSSVGSGTMAAGGGAPMADNNEGADGVGSSSGNWHCDSTWLGDRVITTSTRTWALPTYNNHLYKQISNGTSGGSTNDNTYFGYSTPWGYFDFNRFHCHFSPRDWQRLINNNWGFRPKRLSFKLFNIQVKEVTQNEGTKTIANNLTSTIQVFTDSEYQLPYVLGSAHQGCLPPFPADVFMIPQYGYLTLNNGSQAVGRSSFYCLEYFPSQMLRTGNNFSFSYTFEDVPFHSSYAHSQSLDRLMNPLIDQYLYYLSRTQSTGGTAGTQQLLFSQAGPSNMSAQARNWLPGPCYRQQRVSTTLSQNNNSNFAWTGATKYHLNGRDSLVNPGVAMATNKDDEDRFFPSSGILMFGKQGAGKDNVDYSNVMLTSEEEIKTTNPVATEQYGVVADNLQQQNTAPIVGAVNSQGALPGMVWQNRDVYLQGPIWAKIPHTDGNFHPSPLMGGFGLKHPPPQILIKNTPVPADPPTAFNQAKLNSFITQYSTGQVSVEIVWELQKENSKRRNPEIQYTSNYYKSTNVDFAVNTEGVYSEPRPIGTRYLTRNL

SEQ ID NO: 5074 - protein, 738 aa, Adeno-associated virus
MAADGYLPDWLEDNLSEGIREWWDLKPGAPKPKANQQKQDDGRGLVLPGYKYLGPFNGLDKGEPVNAADAAALEHDKAYDQQLKAGDNPYLRYNHADAEFQERLQEDTSFGGNLGRAVFQAKKRVLEPLGLVEEGAKTAPGKKRPVEPSPQRSPDSSTGIGKKGQQPARKRLNFGQTGDSESVPDPQPIGEPPAAPSSVGSGTMAAGGGAPMADNNEGADGVGSSSGNWHCDSTWLGDRVITTSTRTWALPTYNNHLYKQISNGTSGGSTNDNTYFGYSTPWGYFDFNRFHCHFSPRDWQRLINNNWGFRPKRLSFKLFNIQVKEVTQNEGTKTIANNLTSTIQVFTDSEYQLPYVLGSAHQGCLPPFPADVFMIPQYGYLTLNNGSQAVGRSSFYCLEYFPSQMLRTGNNFSFSYTFEDVPFHSSYAHSQSLDRLMNPLIDQYLYYLSRTQSTGGTAGTQQLLFSQAGPSNMSAQARNWLPGPCYRQQRVSTTLSQNNNSNFAWTGATKYHLNGRDSLVNPGVAMATNKDDEDRFFPSSGILMFGKQGAGKDNVDYSNVMLTSEEEIKTTNPVATEQYGVVADNLQQQNTAPIVGAVNSQGALPGMVWQNRDVYLQGPIWAKIPHTDGNFHPSPLMGGFGLKHPPPQILIKNTPVPADPPTAFNQAKLNSFITQYSTGQVSVEIEWELQKENSKRWNPEIQYTSNYYKSTNVDFAVNTEGVYSEPRPIGTRYLTRNL

SEQ ID NO: 5075 - protein, 738 aa, Adeno-associated virus
MAADGYLPDWLEDNLSEGIREWWDLKPGAPKPKANQQKQDDGRGLVLPGYKYLGPFNGLDKGEPVNAADAAALEHDKAYDQQLKAGDNPYLRYNHADAEFQERLQEDTSFGGNLGRAVFQAKKRVLEPLGLVEEGAKTAPGKKRPVEPSPQRSPDSSTGIGKKGQQPARKRLNFGQTGDSESVPDPQPIGEPPAAPSSVGSGTMAAGGGAPMADNNEGADGVGSSSGNWHCDSTWLGDRVITTSTRTWALPTYNNHLYKQISNGTSGGSTNDNTYFGYSTPWGYFDFNRFHCHFSPRDWQRLINNNWGFRPKRLSFKLFNIQVKEVTQNEGTKTIANNLTSTIQVFTDSEYQLPYVLGSAHQGCLPPFPADVFMIPQYGYLTLNNGSQAVGRSSFYCLEYFPSQMLRTGNNFSFSYTFEDVPFHSSYAHSQSLDRLMNPLIDQYLYYLSRTQSTGGTAGTQQLLFSQAGPSNMSAQARNWLPGPCYRQQRVSTTLSQNNNSNFAWTGATKYHLNGRDSLVNPGVAMATNKDDEDRFFPSSGILMFGKQGAGKDNVDYSNVMLTSEEEIKTTNPVATEQYGVVADNLQQQNTAPIVGAVNSQGALPGMVWQNRDVYLQGPIWAKIPHTDGNFHPSPLMGGFGLKHPPPQILIKNTPVPADPPTAFNQAKLNSFITQYSTGQVSVEIVWELQKENSKRWNPEIQYTSNYYKSTNVDFAVNTEGVYSEPRPIGTRYLTRNL

SEQ ID NO: 5076 - protein, 738 aa, Adeno-associated virus; identical to SEQ ID NO: 5074

SEQ ID NO: 5077 - DNA, 2214 bp, Adeno-associated virus
  source 1..2214: mol_type = unassigned DNA
atggctgctgacggttatcttccagattggctcgaggacaacctctctgagggcattcgcgagtggtgggacctgaaacctggagcccccaagcccaaggccaaccagcagaagcaggacgacggccggggtctggtgcttcctggctacaagtacctcggacccttcaacggactcgacaagggggagcccgtcaacgcggcggacgcagcggccctcgagcacgacaaggcctacgaccagcagctcaaagcgggtgacaatccgtacctgcggtataaccacgccgacgccgagtttcaggagcgtctgcaagaagatacgtcttttgggggcaacctcgggcgagcagtcttccaggccaagaagcgggttctcgaacctctcggtctggttgaggaagctgctaagacggctcctggaaagaagagaccggtagaaccgtcacctcagcgttcccccgactcctccacgggcatcggcaagaaaggccagcagcccgctagaaagagactgaactttgggcagactggcgactcagagtcagtccccgaccctcaaccaatcggagaaccaccagcaggcccctctggtctgggatctggtacaatggctgcaggcggtggcgctccaatggcagacaataacgaaggcgccgacggagtgggtaatgcctcaggaaattggcattgcgattccacatggctgggcgacagagtcatcaccaccagcacccgaacctgggctttgcccacctacaacaaccacctctacaagcaaatctccagtcagtcagcaggtagcaccaacgacaacgtctacttcggctacagcaccccctgggggtattttgacttcaacagattccactgtcacttctcaccacgtgactggcagcggctcatcaacaacaactggggattccggcccaagaagctcaacttcaagctgttcaacatccaggtcaaggaggtcacaacgaatgacggcgtcacgaccatcgccaataaccttaccagcacggttcaggtcttttcggactcggaataccagctgccctacgtcctcggctccgcacaccagggctgcctgcctccgttcccggcggacgtcttcatgattccccagtacggctacctgactctgaacaatggcagccaatcggtgggtcgttcctctttctactgcctggaatatttcccttctcaaatgctgagaacgggcaacaacttcaccttcagctacaccttcgaggacgttcccttccacagcagctacgcacacagccagagcctggaccggctgatgaatcctcttatcgaccagtacctgtattacctggccagaacacagagcaacgcaggaggcacagctggcaatcgggaactgcagttttatcagggcgggcctaccaccatggccgaacaagccaaaaactggctgcctagaccttgcttccggcaacaaagagtctccaagacgctggatcaaaacaacaacagcaactttgcttggactggtgccaccaaataccatctaaatggaagaaattcattggttaatcccggtgtcgccatggcaacccacaaggacgacgaggaacgcttcttcccttcgagcggagtcctgatttttggaaaaactggagcagctaataagactacactggaaaatgtgttaatgacaaatgaagaggaaattcgtcctaccaacccggtagccaccgaggaatacgggactgttagcagcaacctgcaggcggctaacactgcagcccagacacaagttgtcaacaaccagggagccttacctggtatggtctggcagaaccgggacgtgtacctgcagggtcccatctgggccaagattcctcacacggacggcaactttcacccgtctccgctgatgggcggctttggactgaagcatccgcctcctcagatcctgatcaaaaacactcctgttcctgctaatcccccggaggtgtttacgcctgccaagtttgcttctttcatcacacagtacagcaccggccaggtcagcgtggagatcgagtgggagctgcagaaggagaacagcaagcgctggaacccagagattcagtatacctccaattttgacaaacagactggtgtggactttgccgttgacagccagggtgtttattctgagcctcgccccattggtactcgttacctcacccgtaatctgtaa

SEQ ID NO: 5078 - protein, 737 aa, Adeno-associated virus
MAADGYLPDWLEDNLSEGIREWWDLKPGAPKPKANQQKQDDGRGLVLPGYKYLGPFNGLDKGEPVNAADAAALEHDKAYDQQLKAGDNPYLRYNHADAEFQERLQEDTSFGGNLGRAVFQAKKRVLEPLGLVEEAAKTAPGKKRPVEPSPQRSPDSSTGIGKKGQQPARKRLNFGQTGDSESVPDPQPIGEPPAGPSGLGSGTMAAGGGAPMADNNEGADGVGNASGNWHCDSTWLGDRVITTSTRTWALPTYNNHLYKQISSQSAGSTNDNVYFGYSTPWGYFDFNRFHCHFSPRDWQRLINNNWGFRPKKLNFKLFNIQVKEVTTNDGVTTIANNLTSTVQVFSDSEYQLPYVLGSAHQGCLPPFPADVFMIPQYGYLTLNNGSQSVGRSSFYCLEYFPSQMLRTGNNFTFSYTFEDVPFHSSYAHSQSLDRLMNPLIDQYLYYLARTQSNAGGTAGNRELQFYQGGPTTMAEQAKNWLPRPCFRQQRVSKTLDQNNNSNFAWTGATKYHLNGRNSLVNPGVAMATHKDDEERFFPSSGVLIFGKTGAANKTTLENVLMTNEEEIRPTNPVATEEYGTVSSNLQAANTAAQTQVVNNQGALPGMVWQNRDVYLQGPIWAKIPHTDGNFHPSPLMGGFGLKHPPPQILIKNTPVPANPPEVFTPAKFASFITQYSTGQVSVEIEWELQKENSKRWNPEIQYTSNFDKQTGVDFAVDSQGVYSEPRPIGTRYLTRNL

SEQ ID NO: 5079 - DNA, 2214 bp, Adeno-associated virus
  source 1..2214: mol_type = unassigned DNA
atggctgctgacggttatcttccagattggctcgaggacaacctctctgagggcattcgcgagtggtgggacctgaaacctggagcccccaagcccaaggccaaccagcagaagcaggacgacggccggggtctggtgcttcctggctacaagtacctcggacccttcaacggactcgacaagggggagcccgtcaacgcggcggacgcagcggccctcgagcacgacaaggcctacgaccagcagctcaaagcgggtgacaatccgtacctgcggtataaccatgccgacgccgagtttcaggagcgtctgcaagaagatacgtcttttgggggcaacctcgggcgagcagtcctccaggccaagaagcgggttctcgaacctctcggtctggttgaggaagctgctaagacggctcctggaaagaagagaccggtagaaccgtcacctcagcgttcccccgactcctccacgggcatcggcaagaaaggccagcagcccgctagaaagagactgaactttgggcagactggcgactcagagtcagtccccgaccctcaaccaatcggagaaccaccagcaggcccctctggtctgggatctggtacaatggctgcaggcggtggcgctccaatggcagacaataacgaaggcgccgacggagtgggtaatgcctcaggaaattggcattgcgattccacatggctgggcgacagagtcatcaccaccagcacccgaacctgggctttgcccacctacaacaaccacctctacaagcaaatctccagtcagtcagcaggtagcaccaacgacaacgtctacttcggctacagcaccccctgggggtattttgacttcaacagattccactgtcacttctcaccacgtgactggcagcggctcatcaacaacaactggggattccggcccaagaagctcaacttcaagctgttcaacatccaggtcaaggaggtcacaacgaatgacggcgtcacgaccatcgccaataaccttaccagcacggttcaggtcttttcggactcggaataccagctgccctacgtcctcggctccgcacaccagggctgcctgcctccgttcccggcggacgtcttcatgattccccagtacggctacctgactctgaacaatggcagccaatcggtgggtcgttcctctttctactgcctggaatatttcccttctcaaatgctgagaacgggcaacaacttcaccttcagctacaccttcgaggacgttcccttccacagcagctacgcacacagccagagcctggaccggctgatgaatcctcttatcgaccagtacctgtattacctggccagaacacagagcaacgcaggaggcacagctggcaatcgggaactgcagttttatcagggcgggcctaccaccatggccgaacaagccaaaaactggctgcctggaccttgcttccggcaacaaagagtctccaagacgctggatcaaaacaacaacagcaactttgcttggactggtgccaccaaataccatctaaatggaagaaattcattggttaatcccggtgtcgccatggcaacccacaaggacgacgaggaacgcttcttcccttcgagcggagtcctgatttttggaaaaactggagcagctaataagactacactggaaaatgtgttaatgacaaatgaagaggaaattcgtcctaccaacccggtagccaccgaggaatacgggactgttagcagcaacctgcaggcggctaacactgcagcccagacacaagttgtcaacaaccagggagccttacctggtatggtctggcagaaccgggacgtgtacctgcagggtcccatctgggccaagattcctcacacggacggcaactttcacccgtctccgctgatgggcggctttggactgaagcatccgcctcctcagatcctgatcaaaaacactcctgttcctgctaatcccccggaggtgtttacgcctgccaagtttgcttctttcatcacacagtacagcaccggccaggtcagcgtggagatcgagtgggagctgcagaaggagaacagcaagcgctggaacccagagattcagtatacctccaattttgacaaacagactggtgtggactttgccgttgacagccagggtgtttattctgagcctcgccccattggtactcgttacctcacccgtaatctgtaa

SEQ ID NO: 5080 - protein, 737 aa, Adeno-associated virus; identical to SEQ ID NO: 5040

SEQ ID NO: 5081 - protein, 737 aa, Adeno-associated virus
MAADGYLPDWLEDNLSEGIREWWDLKPGAPKPKANQQKQDDGRGLVLPGYKYLGPFNGLDKGEPVNAADAAALEHDKAYDQQLKAGDNPYLRYNHADAEFQERLQEDTSFGGNLGRAVLQAKKRVLEPLGLVEEAAKTAPGKKRPVEPSPQRSPDSSTGIGKKGQQPARKRLNFGQTGDSESVPDPQPIGEPPAGPSGLGSGTMAAGGGAPMADNNEGADGVGNASGNWHCDSTWLGDRVITTSTRTWALPTYNNHLYKQISSQSAGSTNDNVYFGYSTPWGYFDFNRFHCHFSPRDWQRLINNNWGFRPKKLNFKLFNIQVKEVTTNDGVTTIANNLTSTVQVFSDSEYQLPYVLGSAHQGCLPPFPADVFMIPQYGYLTLNNGSQSVGRSSFYCLEYFPSQMLRTGNNFTFSYTFEDVPFHSSYAHSQSLDRLMNPLIDQYLYYLARTQSNAGGTAGNRELQFYQGGPTTMAEQAKNWLPGPCFRQQRVSKTLDQNNNSNFAWTGATKYHLNGRNSLVNPGVAMATHKDDEERFFPSSGVLIFGKTGAANKTTLENVLMTNEEEIRPTNPVATEEYGTVSSNLQAANTAAQTQVVNNQGALPGMVWQNRDVYLQGPIWAKIPHTDGNFHPSPLMGGFGLKHPPPQILIKNTPVPANPPEVFTPAKFASFITQYSTGQVSVEIEWELQKENSKRWNPEIQYTSNFDKQTGVDFAVDSQGVYSEPRPIGTRYLTRNL

SEQ ID NO: 5082 - DNA, 2217 bp, Adeno-associated virus
  source 1..2217: mol_type = unassigned DNA
atggctgccgatggttatcttccagattggctcgaggacaacctctctgagggcattcgcgagtggtgggacctgaaacctggagccccgaaacccaaagccaaccagcaaaagcaggacgacggccggggtctggtgcttcctggctacaagtacctcggacccttcaacggactcgacaagggggagcccgtcaacgcggcggacgcagcggccctcgagcacgacaaggcctacgaccagcagctcaaagcgggtgacaatccgtacctgcggtataatcacgccgacgccgagtttcaggagcgtctgcaagaagatacgtcttttgggggcaacctcgggcgagcagtcttccaggccaagaagcgggttctcgaacctctcggtctggttgaggaaggcgctaagacggctcctggaaagaagagaccggtagagccgtcaccacagcgttcccccgactcctccacgggcatcggcaagaaaggccagcagcccgccagaaagagactcaatttcggtcagactggcgactcagagtcagtccccgaccctcaacctatcggagaacctccagcagcgccctctagtgtgggatctggtacaatggctgcaggcggtggcgcaccaatggcagacaataacgaaggtgccgacggagtgggtagttcctcgggaaattggcattgcgattccacatggctgggcgacagagtcatcaccaccagcacccgaacctgggccctgcccacctacaacaaccacctctacaagcaaatctccaacgggacctcgggaggcagcaccaacgacaacacctactttggctacagcaccccctgggggtattttgactttaacagattccactgccacttctcaccacgtgactggcagcgactcatcaacaacaactggggattccggcccaagagactcagcttcaagctcttcaacatccaggtcaaagaggtcacgcagaatgaaggcaccaagaccatcgccaataacctcaccagcaccatccaggtgtttacggactcggaataccagctgccgtacgtcctcggctctgcccaccagggctgcctgcctccgttcccggcggacgtcttcatgattcctcagtacggctacctgactctcaacaacggtagtcaggccgtgggacgttcctccttctactgcctggagtacttcccctctcagatgctgagaacgggcaacaacttttccttcagctacactttcgaggacgtgcctttccacagcagctacgcgcacagccagagtttggacaggctgatgaatcctctcatcgaccagtacctgtactacctgtcaagaacccagtctacgggaggcacagcgggaacccagcagttgctgttttctcaggccgggcctagcaacatgtcggctcaggccagaaactggctgcctggaccctgctacagacagcagcgcgtctccacgacactgtcgcaaaacaacaacagcaactttgcctggactggtgccaccaagtatcatctgaacggcagagactctctggtgaatccgggcgtcgccatggcaaccaacaaggacgacgaggaccgcttcttcccacccagcggcatcctcatgtttggcaagcagggagctggaaaagacaacgtggactatagcaacgtgatgctaaccagcgaggaagaaatcaagaccaccaaccccgtggccacagaacagtatggcgtggtggctgataacctacagcagcaaaacaccgctcctattgtgggggccgtcaacagccagggagccttacctggcatggtctggcagaaccgggacgtgtacctgcagggtcctatttgggccaagattcctcacacagatggcaactttcacccgtctcctttaatgggcggctttggacttaaacatccgcctcctcagatcctcatcaaaaacactcctgttcctgcggatcctccaacagcgttcaaccaggccaagctgaattctttcatcacgcagtacagcaccggacaagtcagcgtggtgatcgagtgggagctgcagaaggagaacagcaagcgctggaacccagagattcagtatacttccaactactacaaatctacaaatgtggactttgctgttaatactgagggtgtttactctgagcttcgccccattggcactcgttacctcacccgtaatctgtaa

SEQ ID NO: 5083 - protein, 738 aa, Adeno-associated virus
MAADGYLPDWLEDNLSEGIREWWDLKPGAPKPKANQQKQDDGRGLVLPGYKYLGPFNGLDKGEPVNAADAAALEHDKAYDQQLKAGDNPYLRYNHADAEFQERLQEDTSFGGNLGRAVFQAKKRVLEPLGLVEEGAKTAPGKKRPVEPSPQRSPDSSTGIGKKGQQPARKRLNFGQTGDSESVPDPQPIGEPPAAPSSVGSGTMAAGGGAPMADNNEGADGVGSSSGNWHCDSTWLGDRVITTSTRTWALPTYNNHLYKQISNGTSGGSTNDNTYFGYSTPWGYFDFNRFHCHFSPRDWQRLINNNWGFRPKRLSFKLFNIQVKEVTQNEGTKTIANNLTSTIQVFTDSEYQLPYVLGSAHQGCLPPFPADVFMIPQYGYLTLNNGSQAVGRSSFYCLEYFPSQMLRTGNNFSFSYTFEDVPFHSSYAHSQSLDRLMNPLIDQYLYYLSRTQSTGGTAGTQQLLFSQAGPSNMSAQARNWLPGPCYRQQRVSTTLSQNNNSNFAWTGATKYHLNGRDSLVNPGVAMATNKDDEDRFFPPSGILMFGKQGAGKDNVDYSNVMLTSEEEIKTTNPVATEQYGVVADNLQQQNTAPIVGAVNSQGALPGMVWQNRDVYLQGPIWAKIPHTDGNFHPSPLMGGFGLKHPPPQILIKNTPVPADPPTAFNQAKLNSFITQYSTGQVSVVIEWELQKENSKRWNPEIQYTSNYYKSTNVDFAVNTEGVYSELRPIGTRYLTRNL

SEQ ID NO: 5084 - DNA, 2214 bp, Adeno-associated virus
  source 1..2214: mol_type = unassigned DNA
atggctgctgacggttatcttccagattggctcgaggacaacctctctgagggcattcgcgagtggtgggacctgaaacctggagcccccaagcccaaggccaaccagcagaagcaggacgacggccggggtctggtgcttcctggctacaagtacctcggacccttcaacggactcgacaagggggagcccgtcaacgcggcggacgcagcggccctcgagcacgacaaggcctacgaccagcagctcaaagcgggtgacaatccgtacctgcggtataaccacgccgacgccgagtttcaggagcgtctgcaagaagatacgtcttttgggggcaacctcgggcgagcagtcttccaggccaagaagcgggttctcgaacctctcggtctggttgaggaagctgctaagacggctcctggaaagaagagaccggtagaaccgtcacctcagcgttcccccgactcctccacgggcatcggcaagaaaggccagcagcccgctagaaagagactgaactttgggcagactggcgactcagagtcagtccccgaccctcaaccaatcggagaaccaccagcaggcccctctggtctgggatctggtacaatggctgcaggcggtggcgccccaatggcagacaataacgaaggcgccgacggagtgggtaatgcctcaggaaattggcattgcgattccacatggctgggcgacagagtcatcaccaccagcacccgaacctgggctttgcccacctacaacaaccacctctacaagcaaatctccagtcagtcagcaggtagcaccaacgacaacgtctacttcggctacagcaccccctgggggtattttgacttcaacagattccactgtcacttctcaccacgtgactggcagcggctcatcaacaacaactggggattccggcccaagaagctcaacttcaagctgttcaacatccaggtcaaggaggtcacaacgaatgacggcgtcacgaccatcgccaataaccttaccagcacggttcaggtcttttcggactcggaataccagctgccctacgtcctcggctccgcacaccagggctgcctgcctccgttcccggcggacgtcttcatgattccccagtacggctacctgactctgaacaatggcagccaatcggtgggtcgttcctctttctactgcctggaatatttcccttctcaaatgctgagaacgggcaacaacttcaccatcagctacaccttcgaggacgttcccttccacagcagctacgcacacagccagagcctggaccggctgatgaatcctcttatcgaccagtacctgtattacctggccagaacacagagcaacgcaggaggcacagctggcaatcaggaactgcagttttatcagggcgggcctaccaccatggccgaacaagccaaaaactggctgcctggaccttgcttccggcaacaaagagtctccaagacgctggatcaaaacaacaacagcaactttgcttggactggtgccaccaaataccatctaaatggaagaaattcattggttaatcccggtgtcgccatggcaacccacaaggacgacgaggaacgcttcttcccttcgagcggagtcctgatttttggaaaaactggagcagctaataagactacactggaaaatgtgttaatgacaaatgaagaggaaattcgtcctaccaacccggtagccaccgaggaatacgggactgttagcagcaacctgcaggcggctaacactgcagcccagacacaagttgtcaacaaccagggagccttacctggtatggtctggcagaaccgggacgtgtacctgcagggtcccatctgggccaagattcctcacacagatggcaactttcacccgtctcctttaatgggcggctttggacttaaacatccgcctcctcagatcctcatcaaaaacactcctgttcctgcggatcctccaacagcgttcaaccaggccaagctgaattctttcatcacgcagtacagcaccggacaagtcagcgtggagatcgagtgggagctgcagaaggagaacagcaagcgctggaacccagagattcagtatacttccaactactacaaatctacaaatgtggactttgctgttaatactgagggtgtttactctgagcctcgccccattggcactcgttacctcacccgtaatctgtaa

SEQ ID NO: 5085 - protein, 737 aa, Adeno-associated virus
MAADGYLPDWLEDNLSEGIREWWDLKPGAPKPKANQQKQDDGRGLVLPGYKYLGPFNGLDKGEPVNAADAAALEHDKAYDQQLKAGDNPYLRYNHADAEFQERLQEDTSFGGNLGRAVFQAKKRVLEPLGLVEEAAKTAPGKKRPVEPSPQRSPDSSTGIGKKGQQPARKRLNFGQTGDSESVPDPQPIGEPPAGPSGLGSGTMAAGGGAPMADNNEGADGVGNASGNWHCDSTWLGDRVITTSTRTWALPTYNNHLYKQISSQSAGSTNDNVYFGYSTPWGYFDFNRFHCHFSPRDWQRLINNNWGFRPKKLNFKLFNIQVKEVTTNDGVTTIANNLTSTVQVFSDSEYQLPYVLGSAHQGCLPPFPADVFMIPQYGYLTLNNGSQSVGRSSFYCLEYFPSQMLRTGNNFTISYTFEDVPFHSSYAHSQSLDRLMNPLIDQYLYYLARTQSNAGGTAGNQELQFYQGGPTTMAEQAKNWLPGPCFRQQRVSKTLDQNNNSNFAWTGATKYHLNGRNSLVNPGVAMATHKDDEERFFPSSGVLIFGKTGAANKTTLENVLMTNEEEIRPTNPVATEEYGTVSSNLQAANTAAQTQVVNNQGALPGMVWQNRDVYLQGPIWAKIPHTDGNFHPSPLMGGFGLKHPPPQILIKNTPVPADPPTAFNQAKLNSFITQYSTGQVSVEIEWELQKENSKRWNPEIQYTSNYYKSTNVDFAVNTEGVYSEPRPIGTRYLTRNL

SEQ ID NO: 5086 - DNA, 2217 bp, Adeno-associated virus
  source 1..2217: mol_type = unassigned DNA
atggctgccgatggttatcttccagattggctcgaggacaacctctctgagggcattcgcgagtggtgggacctgaaacctggagccccgaaacccaaagccaaccagcaaaagcaggacgacggccggggtctggtgcttcctggctacaagtacctcggacccttcaacggactcgacaagggggagcccgtcaacgcggcggacgcagcggccctcgagcacgacaaggcctacgaccagcagctcaaagcgggtgacaatccgtacctgcggtataatcacgccgacgccgagtttcaggagcgtctgcaagaagatacgtcttttgggggcaacctcgggcgagcagtcttccaggccaagaagcgggttctcgaacctctcggtctggttgaggaaggcgctaagacggctcctggaaagaagagaccggtagagccgtcaccacagcgttcccccgactcctccacgggcatcggcaagaaaggccagcagcccgccagaaagagactcaatttcggtcagactggcgactcagagtcagtccccgaccctcaacctatcggagaacctccagcagcgccctctagtgtgggatctggtacaatggctgcaggcggtggcgcaccaatggcagacaataacgaaggtgccgacggagtgggtagttcctcgggaaattggcattgcgattccacatggctgggcgacagagtcatcaccaccagcacccgaacctgggccctgcccgcctacaacaaccacctctacaagcaaatctccaacgggacctcgggaggcagcaccaacgacaacacctactttggctacagcaccccctgggggtattttgactttaacagattccactgccacttctcaccacgtgactggcagcgactcatcaacaacaactggggattccggcccaagagactcagcttcaagctcttcaacatccaggtcaaagaggtcacgcagaatgaaggcaccaagaccatcgccaataacctcaccagcaccatccaggtgtttacggactcggaataccagctgccgtacgtcctcggctctgcccaccagggctgcctgcctccgttcccggcggatgtcttcatgattcctcagtacggctacctgactctcaacaacggtagtcaggccgtgggacgttcctccttctactgcctggagtacttcccctctcagatgctgagaacgggcaacaacttttccttcagctacactttcgaggacgtgcctttccacagcagctacgcgcacagccagagtttggacaggctgatgaatcctctcatcgaccagtacctgtactacctgtcaagaacccagtctacgggaggcacagcgggaacccagcagttgctgttttctcaggccgggcctagcaacatgtcggctcaggccagaaactggctgcctggaccctgctacagacagcagcgcgtctccacgacactgtcgcaaaacaacaacagcaactttgcctggactggtgccaccaagtatcatctgagcggcagagactctctggtgaatccgggcgtcgccatggcaaccaacaaggacgacgaggaccgcttcttcccatccagcggcatcctcatgtttggcaagcagggagctggaaaagacaacgtggactatagcaacgtgatgctaaccagcgaggaagaaatcaagaccaccaaccccgtggccacagaacagtatggcgtggtggctgataacctacagcagcaaaacaccgctcctattgtgggggccgtcaacagccagggagccttacctggcatggtctggcagaaccgggacgtgtacctgcagggtcctatttgggccaagattcctcacacagatggcaactttcacccgtctcctttaatgggcggctttggacttaaacatccgcctcctcagatcctcatcaaaaacactcctgttcctgcggatcctccaacagcgttcaaccaggccaagctgaattcttccatcacgcagtacagcaccggacaagtcagcgtggagatcgagtgggagctgcagaaggagaacagcaagcgctggaacccagagattcagtatacttccaactactacaaatctacaaatgtggactttgctgttaatactgagggtgtttactctgagcctcgccccattggcactcgttacctcacccgtaatttgtaa

SEQ ID NO: 5087 - protein, 738 aa, Adeno-associated virus
MAADGYLPDWLEDNLSEGIREWWDLKPGAPKPKANQQKQDDGRGLVLPGYKYLGPFNGLDKGEPVNAADAAALEHDKAYDQQLKAGDNPYLRYNHADAEFQERLQEDTSFGGNLGRAVFQAKKRVLEPLGLVEEGAKTAPGKKRPVEPSPQRSPDSSTGIGKKGQQPARKRLNFGQTGDSESVPDPQPIGEPPAAPSSVGSGTMAAGGGAPMADNNEGADGVGSSSGNWHCDSTWLGDRVITTSTRTWALPAYNNHLYKQISNGTSGGSTNDNTYFGYSTPWGYFDFNRFHCHFSPRDWQRLINNNWGFRPKRLSFKLFNIQVKEVTQNEGTKTIANNLTSTIQVFTDSEYQLPYVLGSAHQGCLPPFPADVFMIPQYGYLTLNNGSQAVGRSSFYCLEYFPSQMLRTGNNFSFSYTFEDVPFHSSYAHSQSLDRLMNPLIDQYLYYLSRTQSTGGTAGTQQLLFSQAGPSNMSAQARNWLPGPCYRQQRVSTTLSQNNNSNFAWTGATKYHLSGRDSLVNPGVAMATNKDDEDRFFPSSGILMFGKQGAGKDNVDYSNVMLTSEEEIKTTNPVATEQYGVVADNLQQQNTAPIVGAVNSQGALPGMVWQNRDVYLQGPIWAKIPHTDGNFHPSPLMGGFGLKHPPPQILIKNTPVPADPPTAFNQAKLNSSITQYSTGQVSVEIEWELQKENSKRWNPEIQYTSNYYKSTNVDFAVNTEGVYSEPRPIGTRYLTRNL

SEQ ID NO: 5088 - protein, 736 aa, Adeno-associated virus
MAADGYLPDWLEDNLSEGIREWWDLKPGAPKPKANQQKQDDGRGLVLPGYKYLGPFNGLDKGEPVNAADAAALEHDKAYDQQLKAGDNPYLRYNHADAEFQERLQEDTSFGGNLGRAVFQAKKRVLEPLGLVEEGAKTAPGKKRPVEQSPQEPDSSSGIGKTGQQPAKKRLNFGQTGDSESVPDPQPLGEPPATPAAVGPTTMASGGGAPMADNNEGADGVGNASGNWHCDSTWLGDRVITTSTRTWALPTYNNHLYKQISSASTGASNDNHYFGYSTPWGYFDFNRFHCHFSPRDWQRLINNNWGFRPKRLNFKLFNIQVKEVTTNDGVTTIANNLTSTVQVFSDSEYQLPYVLGSAHQGCLPPFPADVFMIPQYGYLTLNNGSQAVGRSSFYCLEYFPSQMLRTGNNFTFSYTFEEVPFHSSYAHSQSLDRLMNPLIDQYLYYLNRTQNQSGSAQNKDLLFSRGSPAGMSVQPKNWLPGPCYRQQRVSKTKTDNNNSNFTWTGASKYNLNGRESIINPGTAMASHKDDEDKFFPMSGVMIFGKESAGASNTALDNVMITDEEEIKATNPVATERFGTVAVNFQSSSTDPATGDVHAMGALPGMVWQDRDVYLQGPIWAKIPHTDGHFHPSPLMGGFGLKNPPPQILIKNTPVPANPPAEFSATKFASFITQYSTGQVSVEIEWELQKENSKRWNPEVQYTSNYAKSANVDFTVDNNGLYTEPRPIGTRYLTRPL

SEQ ID NO: 5089 - DNA, 2217 bp, Adeno-associated virus
  source 1..2217: mol_type = unassigned DNA
atggctgctgacggttatcttccagattggctcgaggacaacctctctgagggcattcgcgagtggtgggacctgaaacctggagcccccaagcccaaggccaaccagcagaagcaggacgacggccggggtctggtgcttcctggctacaagtacctcggacccttcaacggactcgacaagggggagcccgtcaacgcggcggacgcagcggccctcgagcacgacaaggcctacgaccagcagctcaaagcgggtgacaatccgtacctgcggtataaccacgccgacgccgagtttcaggagcgtctgcaagaagatacgtcttttgggggcaacctcgggcgagcagtcttccaggccaagaagcgggttctcgaacctctcggtctggttgaggaagctgctaagacggctcctggaaagaagagaccggtagaaccgtcacctcagcgttcccccgactcctccacgggcatcggcaagaaaggccagcagcccgctaaaaagagactgaactttggtcagactggcgactcagagtcagtccccgaccctcaaccaatcggagaaccaccagcaggcccctctggtctgggatctggtacaatggctgcaggcggtggcgctccaatggcagacaataacgaaggcgccgacggagtgggtagttcctcaggaaattggcattgcgattccacatggctgggcgacagagtcatcaccaccagcacccgaacctgggccctgcccacctacaacaaccacctctacaagcaaatatccaatgggacatcgggaggaagcaccaacgacaacacctacttcggctacagcaccccctgggggtattttgacttcaacagattccactgccacttctcaccacgtgactggcagcgactcatcaacaacaactggggattccggccaaaaagactcagcttcaagctcttcaacatccaggtcaaggaggtcacgcagaatgaaggcaccaagaccatcgccaataaccttaccagcacgattcaggtatttacggactcggaataccagctgccgtacgtcctcggctccgcgcaccagggctgcctgcctccgttcccggcggacgtcttcatgattccccagtacggctaccttacactgaacaatggaagtcaagccgtaggccgttcctccttctactgcctggaatattttccatctcaaatgctgcgaactggaaacaattttgaattcagctacaccttcgaggacgtgcctttccacagcagctacgcacacagccagagcttggaccgactgatgaatcctctcatcgaccagtacctgtactacttatccagaactcagtccacaggaggaactcaaggtacccagcaattgttattttctcaagctgggcctgcaaacatgtcggctcaggctaagaactggctacctggaccttgctaccggcagcagcgagtctctacgacactgtcgcaaaacaacaacagcaactttgcttggactggtgccaccaaatatcacctgaacggaagagactctttggtaaatcccggtgtcgccatggcaacccacaaggacgacgaggaacgcttcttcccgtcgagtggagtcctgatgtttggaaaacagggtgctggaagagacaatgtggactacagcagcgttatgctaaccagcgaagaagaaattaaaaccactaaccctgtagccacagaacaatacggtgtggtggctgacaacttgcagcaaaccaatacagggcctattgtgggaaatgtcaacagccaaggagccttacctggcatggtctggcagaaccgagacgtgtacctgcagggtcccatctgggccaagattcctcacacggacggcaacttccacccttcaccgctaatgggaggatttggactgaagcacccacctcctcagatcctgatcaagaacacgccggtacctgcggatcctccaacaacgttcagccaggcgaaattggcttccttcattacgcagtacagcaccggacaggtcagcgtggaaatcgagtgggagctgcagaaggagaacagcaaacgctggaacccagagattcagtacacttcaaactactacaaatctacaaatgtggactttgctgtcaatacagagggaacttattctgagcctcgccccattggtactcgttacctcacccgtaatctgtaa

SEQ ID NO: 5090 - protein, 738 aa, Adeno-associated virus
MAADGYLPDWLEDNLSEGIREWWDLKPGAPKPKANQQKQDDGRGLVLPGYKYLGPFNGLDKGEPVNAADAAALEHDKAYDQQLKAGDNPYLRYNHADAEFQERLQEDTSFGGNLGRAVFQAKKRVLEPLGLVEEGAKTAPGKKRPVEPSPQRSPDSSTGIGKKGQQPARKRLNFGQTGDSESVPDPQPLGEPPAAPSSVGSGTMAAGGGAPMADNNEGADGVGSSSGNWHCDSTWLGDRVITTSTRTWALPTYNNHLYKQISNGTSGGSTNDNTYFGYSTPWGYFDFNRFHCHFSPRDWQRLINNNWGFRPKRLSFKLFNIQVKEVTQNEGTKTIANNLTSTIQVFTDSEYQLPYVLGSAHQGCLPPFPADVFMIPQYGYLTLNNGSQAVGRSSFYCLEYFPSQMLRTGNNFSFSYTFEDVPFHSSYAHSQSLDRLMNPLIDQYLYYLSRTQSTGGTAGTQQLLFSQAGPSNMSAQARNWLPGPCYRQQRVSTTLSQNNNSNFAWTGATKYHLNGRDSLVNPGVAMATNKDDEDRFFPSSGILMFGKQGAGKDNVDYSNVMLTSEEEIKTTNPVATEQYGVVADNLQRQNTAPIVGAVNSQGALPGMVWQNRDVYLQGPIWAKIPHTDGNFHPSPLMGGFGLKHPPPQILIKNTPVPADPPTAFNQAKLNSFITQYSTGQVSVEIEWELQKENSKRWNPEIQYTSNYYKSTNVDFAVNTEGVYSEPRPIGTRYLTRNL

SEQ ID NO: 5091 - protein, 736 aa, Adeno-associated virus
MAADGYLPDWLEDNLSEGIREWLNLKPGAPQPKANQQKQDNARGLVLPGYKYLGPFNGLDKGDPVNEADAAALEHDKAYGQQLKAGDNPYLKYNHADAEFQERLQKDTSFGGNLGKAVFQAKKRILEPLGLVETPAKTAPGKKRPVDPSPQRSPDSSSGIGKKSPHPARKRLNFGQTGEAESVPDPQPIGEPPSDPSSVGSGTMAAGGGAPMADNNEGADGVGNSSGNWHCDSTWLGDRVITTSTRTWALPTYNNHLYKQISSQSGATNDNHYFGYSTPWGYFDFNRFHCHFSPRDWQRLINNNWGFRPKRLSFKLFNIQVKEVTQNDGTTTIANNLTSTVQVFTDSEYQLPYVLGSAHQGCLPPFPADVFMIPQYGYLTLNNGSQAVGRSSFYCLEYFPSQMLRTGNNFQFSYTFEDVPFHSSYAHSQSLDRLMNPLIDQYLYYLSKTQGTNATVQGAKLQFSQAGPSNMRDQARNWLPGPCYRQQRVSKTANDNNNSEYAWTGATKYHLNGRDSLVNPGPAMASHKDDEEKFFPMNGTLVFGKNGAGNSNVDIENVMITDEEEIRTTNPVATEQYGVVSDNLQSSNTRPITGDVDSQGVLPGMVWQDRDVYLQGPIWAKIPHTDGHFHPSPLMGGFGLKHPPPQILIKNTPVPANPATTFTPGKFASFITQYSTGQVSVQIEWELQKENSKRWNPEIQYTSNYNKSVNVDFTVDTNGVYSEPRPIGTRYLTRNL

SEQ ID NO: 5092 - protein, 736 aa, Adeno-associated virus; identical to SEQ ID NO: 4787

SEQ ID NO: 5093 - protein, 736 aa, Adeno-associated virus
MAADGYLPDWLEDNLSEGIREWWDLKPGAPKPKANQQKQDDGRGLVLPGYKYLGPFNGLDKGEPVNAADAAALEHDKAYDQQLKAGDNPYLRYNHADAEFQERLQEDTSFGGNLGRAVFQAKKRVLEPLGLVEEGAKTAPGKKRPVEQSPQEPDSSSGIGKTGQQPAKKRLNFGQTGDSESVPDPQPLGEPPAAPSGLGPNTMASGGGAPMADNNEGADGVGNSSGNWHCDSTWLGDRVITTSTRTWALPTYNNHLYKQISNGTSGGSTNDNTYFGYSTPWGYFDFNRFHCHFSPRDWQRLINNNWGFRPKRLNFKLFNIQVKEVTTNEGTKTIANNLTSTVQVFTDSEYQLPYVLGSAHQGCLPPFPADVFMVPQYGYLTLNNGSQALGRSSFYCLEYFPSQMLRTGNNFQFSYTFEDVPFHSSYAHSQSLDRLMNPLIDQYLYYLVRTQTTGTGGTQTLAFSQAGPSSMANQARNWVPGPCYRQQRVSTTTNQNNNSNFAWTGAAKFKLNGRDSLMNPGVAMASHKDDEDRFFPSSGVLIFGKQGAGNDGVDYSQVLITDEEEIKATNPVATEEYGAVAINNQAANTQAQTGLVHNQGVIPGMVWQNRDVYLQGPIWAKIPHTDGNFHPSPLMGGFGLKHPPPQILIKNTPVPADPPLTFNQAKLNSFITQYSTGQVSVEIEWELQKENSKRWNPEIQYTSNYYKSTNVDFAVNTEGVYSEPRPIGTRYLTRNL

SEQ ID NO: 5094 - DNA, 2211 bp, Adeno-associated virus 1; identical to SEQ ID NO: 4977
  source 1..2211: mol_type = unassigned DNA

SEQ ID NO: 5095 - protein, 736 aa, Adeno-associated virus 1; identical to SEQ ID NO: 5088

SEQ ID NO: 5096 - DNA, 4718 bp, Adeno-associated virus 1
  source 1..4718: mol_type = unassigned DNA
ttgcccactccctctctgcgcgctcgctcgctcggtggggcctgcggaccaaaggtccgcagacggcagagctctgctctgccggccccaccgagcgagcgagcgcgcagagagggagtgggcaactccatcactaggggtaatcgcgaagcgcctcccacgctgccgcgtcagcgctgacgtaaattacgtcataggggagtggtcctgtattagctgtcacgtgagtgcttttgcgacattttgcgacaccacgtggccatttagggtatatatggccgagtgagcgagcaggatctccattttgaccgcgaaatttgaacgagcagcagccatgccgggcttctacgagatcgtgatcaaggtgccgagcgacctggacgagcacctgccgggcatttctgactcgtttgtgagctgggtggccgagaaggaatgggagctgcccccggattctgacatggatctgaatctgattgagcaggcacccctgaccgtggccgagaagctgcagcgcgacttcctggtccaatggcgccgcgtgagtaaggccccggaggccctcttctttgttcagttcgagaagggcgagtcctacttccacctccatattctggtggagaccacgggggtcaaatccatggtgctgggccgcttcctgagtcagattagggacaagctggtgcagaccatctaccgcgggatcgagccgaccctgcccaactggttcgcggtgaccaagacgcgtaatggcgccggaggggggaacaaggtggtggacgagtgctacatccccaactacctcctgcccaagactcagcccgagctgcagtgggcgtggactaacatggaggagtatataagcgcctgtttgaacctggccgagcgcaaacggctcgtggcgcagcacctgacccacgtcagccagacccaggagcagaacaaggagaatctgaaccccaattctgacgcgcctgtcatccggtcaaaaacctccgcgcgctacatggagctggtcgggtggctggtggaccggggcatcacctccgagaagcagtggatccaggaggaccaggcctcgtacatctccttcaacgccgcttccaactcgcggtcccagatcaaggccgctctggacaatgccggcaagatcatggcgctgaccaaatccgcgcccgactacctggtaggccccgctccgcccgcggacattaaaaccaaccgcatctaccgcatcctggagctgaacggctacgaacctgcctacgccggctccgtctttctcggctgggcccagaaaaggttcgggaagcgcaacaccatctggctgtttgggccggccaccacgggcaagaccaacatcgcggaagccatcgcccacgccgtgcccttctacggctgcgtcaactggaccaatgagaactttcccttcaatgattgcgtcgacaagatggtgatctggtgggaggagggcaagatgacggccaaggtcgtggagtccgccaaggccattctcggcggcagcaaggtgcgcgtggaccaaaagtgcaagtcgtccgcccagatcgaccccacccccgtgatcgtcacctccaacaccaacatgtgcgccgtgattgacgggaacagcaccaccttcgagcaccagcagccgttgcaggaccggatgttcaaatttgaactcacccgccgtctggagcatgactttggcaaggtgacaaagcaggaagtcaaagagttcttccgctgggcgcaggatcacgtgaccgaggtggcgcatgagttctacgtcagaaagggtggagccaacaaaagacccgcccccgatgacgcggataaaagcgagcccaagcgggcctgcccctcagtcgcggatccatcgacgtcagacgcggaaggagctccggtggactttgccgacaggtaccaaaacaaatgttctcgtcacgcgggcatgcttcagatgctgtttccctgcaagacatgcgagagaatgaatcagaatttcaacatttgcttcacgcacgggacgagagactgttcagagtgcttccccggcgtgtcagaatctcaaccggtcgtcagaaagaggacgtatcggaaactctgtgccattcatcatctgctggggcgggctcccgagattgcttgctcggcctgcgatctggtcaacgtggacctggatgactgtgtttctgagcaataaatgacttaaaccaggtatggctgccgatggttatcttccagattggctcgaggacaacctctctgagggcattcgcgagtggtgggacttgaaacctggagccccgaagcccaaagccaaccagcaaaagcaggacgacggccggggtctggtgcttcctggctacaagtacctcggacccttcaacggactcgacaagggggagcccgtcaacgcggcggacgcagcggccctcgagcacgacaaggcctacgaccagcagctcaaagcgggtgacaatccgtacctgcggtataaccacgccgacgccgagtttcaggagcgtctgcaagaagatacgtcttttgggggcaacctcgggcgagcagtcttccaggccaagaagcgggttctcgaacctctcggtctggttgaggaaggcgctaagacggctcctggaaagaaacgtccggtagagcagtcgccacaagagccagactcctcctcgggcatcggcaagacaggccagcagcccgctaaaaagagactcaattttggtcagactggcgactcagagtcagtccccgatccacaacctctcggagaacctccagcaacccccgctgctgtgggacctactacaatggcttcaggcggtggcgcaccaatggcagacaataacgaaggcgccgacggagtgggtaatgcctcaggaaattggcattgcgattccacatggctgggcgacagagtcatcaccaccagcacccgcacctgggccttgcccacctacaataaccacctctacaagcaaatctccagtgcttcaacgggggccagcaacgacaaccactacttcggctacagcaccccctgggggtattttgatttcaacagattccactgccacttttcaccacgtgactggcagcgactcatcaacaacaattggggattccggcccaagagactcaacttcaaactcttcaacatccaagtcaaggaggtcacgacgaatgatggcgtcacaaccatcgctaataaccttaccagcacggttcaagtcttctcggactcggagtaccagcttccgtacgtcctcggctctgcgcaccagggctgcctccctccgttcccggcggacgtgttcatgattccgcaatacggctacctgacgctcaacaatggcagccaagccgtgggacgttcatccttttactgcctggaatatttcccttctcagatgctgagaacgggcaacaactttaccttcagctacacctttgaggaagtgcctttccacagcagctacgcgcacagccagagcctggaccggctgatgaatcctctcatcgaccaatacctgtattacctgaacagaactcaaaatcagtccggaagtgcccaaaacaaggacttgctgtttagccgtgggtctccagctggcatgtctgttcagcccaaaaactggctacctggaccctgttatcggcagcagcgcgtttctaaaacaaaaacagacaacaacaacagcaattttacctggactggtgcttcaaaatataacctcaatgggcgtgaatccatcatcaaccctggcactgctatggcctcacacaaagacgacgaagacaagttctttcccatgagcggtgtcatgatttttggaaaagagagcgccggagcttcaaacactgcattggacaatgtcatgattacagacgaagaggaaattaaagccactaaccctgtggccaccgaaagatttgggaccgtggcagtcaatttccagagcagcagcacagaccctgcgaccggagatgtgcatgctatgggagcattacctggcatggtgtggcaagatagagacgtgtacctgcagggtcccatttgggccaaaattcctcacacagatggacactttcacccgtctcctcttatgggcggctttggactcaagaacccgcctcctcagatcctcatcaaaaacacgcctgttcctgcgaatcctccggcggagttttcagctacaaagtttgcttcattcatcacccaatactccacaggacaagtgagtgtggaaattgaatgggagctgcagaaagaaaacagcaagcgctggaatcccgaagtgcagtacacatccaattatgcaaaatctgccaacgttgattttactgtggacaacaatggactttatactgagcctcgccccattggcacccgttaccttacccgtcccctgtaattacgtgttaatcaataaaccggttgattcgtttcagttgaactttggtctcctgtccttcttatcttatcggttaccatggttatagcttacacattaactgcttggttgcgcttcgcgataaaagacttacgtcatcgggttacccctagtgatggagttgcccactccctctctgcgcgctcgctcgctcggtggggcctgcggaccaaaggtccgcagacggcagagctctgctctgccggccccaccgagcgagcgagcgcgcagagagggagtgggcaa

SEQ ID NO: 5097 - DNA, 255 bp, Adeno-associated virus 10
  source 1..255: mol_type = unassigned DNA
ggtaattcctccggaaattggcattgcgattccacatggctgggcgacagagtcatcaccaccagcacccgaacctgggtcctgcccacctacaacaaccacatctacaagcaaatctccagcgagacaggagccaccaacgacaaccactacttcggctacagcaccccctgggggtattttgactttaacagattccactgccacttttcaccacgtgactggcagcgactcatcaacaacaactggggattc

SEQ ID NO: 5098 - protein, 738 aa, Adeno-associated virus 10
MAADGYLPDWLEDNLSEGIREWWDLKPGAPKPKANQQKQDDGRGLVLPGYKYLGPFNGLDKGEPVNAADAAALEHDKAYDQQLKAGDNPYLRYNHADAEFQERLQEDTSFGGNLGRAVFQAKKRVLEPLGLVEEAAKTAPGKKRPVEPSPQRSPDSSTGIGKKGQQPAKKRLNFGQTGESESVPDPQPIGEPPAGPSGLGSGTMAAGGGAPMADNNEGADGVGSSSGNWHCDSTWLGDRVITTSTRTWALPTYNNHLYKQISNGTSGGSTNDNTYFGYSTPWGYFDFNRFHCHFSPRDWQRLINNNWGFRPKRLSFKLFNIQVKEVTQNEGTKTIANNLTSTIQVFTDSEYQLPYVLGSAHQGCLPPFPADVFMIPQYGYLTLNNGSQAVGRSSFYCLEYFPSQMLRTGNNFEFSYTFEDVPFHSSYAHSQSLDRLMNPLIDQYLYYLSRTQSTGGTQGTQQLLFSQAGPANMSAQAKNWLPGPCYRQQRVSTTLSQNNNSNFAWTGATKYHLNGRDSLVNPGVAMATHKDDEERFFPSSGVLMFGKQGAGRDNVDYSSVMLTSEEEIKTTNPVATEQYGVVADNLQQANTGPIVGNVNSQGALPGMVWQNRDVYLQGPIWAKIPHTDGNFHPSPLMGGFGLKHPPPQILIKNTPVPADPPTTFSQAKLASFITQYSTGQVSVEIEWELQKENSKRWNPEIQYTSNYYKSTNVDFAVNTEGTYSEPRPIGTRYLTRNL

SEQ ID NO: 5099 - protein, 738 aa, Adeno-associated virus 10; identical to SEQ ID NO: 4793

SEQ ID NO: 5100 - DNA, 258 bp, Adeno-associated virus 11
  source 1..258: mol_type = unassigned DNA
ggtaattcctccggaaattggcattgcgattccacatggctgggcgacagagtcatcaccaccagcacccgaacctgggccctgccaacctacaacaaccacctctacaaacaaatctccagcgcttcaacgggggccagcaacgacaaccactactttggctacagcaccccctgggggtattttgactttaacagattccactgccacttctcaccacgtgactggcagcgactcatcaacaacaactggggattc

SEQ ID NO: 5101 - DNA, 255 bp, Adeno-associated virus 12
  source 1..255: mol_type = unassigned DNA
ggtaattcctccggaaattggcattgcgattccacatggctgggcgaccgagtcattaccaccagcacccggacttgggccctgcccacctacaacaaccacctctacaagcaaatctccagccaatcgggtgccaccaacgacaaccactacttcggctacagcaccccttgggggtattttgatttcaacagattccactgccatttctcaccacgtgactggcagcgactcatcaacaacaactggggattc

SEQ ID NO: 5102 - DNA, 2208 bp, Adeno-associated virus 2
  source 1..2208: mol_type = unassigned DNA
atggctgccgatggttatcttccagattggctcgaggacactctctctgaaggaataagacagtggtggaagctcaaacctggcccaccaccaccaaagcccgcagagcggcataaggacgacagcaggggtcttgtgcttcctgggtacaagtacctcggacccttcaacggactcgacaagggagagccggtcaacgaggcagacgccgcggccctcgagcacgacaaagcctacgaccggcagctcgacagcggagacaacccgtacctcaagtacaaccacgccgacgcggagtttcaggagcgccttaaagaagatacgtcttttgggggcaacctcggacgagcagtcttccaggcgaaaaagagggttcttgaacctctgggcctggttgaggaacctgttaagacggctccgggaaaaaagaggccggtagagcactctcctgtggagccagactcctcctcgggaaccggaaaggcgggccagcagcctgcaagaaaaagattgaattttggtcagactggagacgcagactcagtacctgacccccagcctctcggacagccaccagcagccccctctggtctgggaactaatacgatggctacaggcagtggcgcaccaatggcagacaataacgagggcgccgacggagtgggtaattcctcgggaaattggcattgcgattccacatggatgggcgacagagtcatcaccaccagcacccgaacctgggccctgcccacctacaacaaccacctctacaaacaaatttccagccaatcaggagcctcgaacgacaatcactactttggctacagcaccccttgggggtattttgacttcaacagattccactgccacttttcaccacgtgactggcaaagactcatcaacaacaactggggattccgacccaagagactcaacttcaagctctttaacattcaagtcaaagaggtcacgcagaatgacggtacgacgacgattgccaataaccttaccagcacggttcaggtgtttactgactcggagtaccagctcccgtacgtcctcggctcggcgcatcaaggatgcctcccgccgttcccagcagacgtcttcatggtgccacagtatggatacctcaccctgaacaacgggagtcaggcagtaggacgctcttcattttactgcctggagtactttccttctcagatgctgcgtaccggaaacaactttaccttcagctacacttttgaggacgttcctttccacagcagctacgctcacagccagagtctggaccgtctcatgaatcctctcatcgaccagtacctgtattacttgagcagaacaaacactccaagtggaaccaccacgcagtcaaggcttcagttttctcaggccggagcgagtgacattcgggaccagtctaggaactggcttcctggaccctgttaccgccagcagcgagtatcaaagacatctgcggataacaacaacagtgaatactcgtggactggagctaccaagtaccacctcaatggcagagactctctggtgaatccgggcccggccatggcaagccacaaggacgatgaagaaaagttttttcctcagagcggggttctcatctttgggaagcaaggctcagagaaaacaaatgtggacattgaaaaggtcatgattacagacgaagaggaaatcaggacaaccaatcccgtggctacggagcagtatggttctgtatctaccaacctccagagaggcaacagacaagcagctaccgcagatgtcaacacacaaggcgttcttccaggcatggtctggcaggacagagatgtgtaccttcaggggcccatctgggcaaagattccacacacggacggacattttcacccctctcccctcatgggtggattcggacttaaacaccctcctccacagattctcatcaagaacaccccggtacctgcgaatccttcgaccaccttcagtgcggcaaagtttgcttccttcatcacacagtactccacgggacaggtcagcgtggagatcgagtgggagctgcagaaggaaaacagcaaacgctggaatcccgaaattcagtacacttccaactacaacaagtctgttaatgtggactttactgtggacactaatggcgtgtattcagagcctcgccccattggcaccagatacctgactcgtaatctgtaa

SEQ ID NO: 5103 - protein, 735 aa, Adeno-associated virus 2 [sequence omitted]

SEQ ID NO: 5104 - protein, 621 aa, Adeno-associated virus 2
MPGFYEIVIKVPSDLDGHLPGISDSFVNWVAEKEWELPPDSDMDLNLIEQAPLTVAEKLQRDFLTEWRRVSKAPEALFFVQFEKGESYFHMHVLVETTGVKSMVLGRFLSQIREKLIQRIYRGIEPTLPNWFAVTKTRNGAGGGNKVVDECYIPNYLLPKTQPELQWAWTNMEQYLSACLNLTERKRLVAQHLTHVSQTQEQNKENQNPNSDAPVIRSKTSARYMELVGWLVDKGITSEKQWIQEDQASYISFNAASNSRSQIKAALDNAGKIMSLTKTAPDYLVGQQPVEDISSNRIYKILELNGYDPQYAASVFLGWATKKFGKRNTIWLFGPATTGKTNIAEAIAHTVPFYGCVNWTNENFPFNDCVDKMVIWWEEGKMTAKVVESAKAILGGSKVRVDQKCKSSAQIDPTPVIVTSNTNMCAVIDGNSTTFEHQQPLQDRMFKFELTRRLDHDFGKVTKQEVKDFFRWAKDHVVEVEHEFYVKKGGAKKRPAPSDADISEPKRVRESVAQPSTSDAEASINYADRYQNKCSRHVGMNLMLFPCRQCERMNQNSNICFTHGQKDCLECFPVSESQPVSVVKKAYQKLCYIHHIMGKVPDACTACDLVNVDLDDCIFEQ

SEQ ID NO: 5105 - DNA, 4675 bp, Adeno-associated virus 2
  source 1..4675: mol_type = unassigned DNA
ttggccactccctctctgcgcgctcgctcgctcactgaggccgggcgaccaaaggtcgcccgacgcccgggctttgcccgggcggcctcagtgagcgagcgagcgcgcagagagggagtggccaactccatcactaggggttcctggaggggtggagtcgtgacgtgaattacgtcatagggttagggaggtcctgtattagaggtcacgtgagtgttttgcgacattttgcgacaccatgtggtcacgctgggtatttaagcccgagtgagcacgcagggtctccattttgaagcgggaggtttgaacgcgcagccgccatgccggggttttacgagattgtgattaaggtccccagcgaccttgacgggcatctgcccggcatttctgacagctttgtgaactgggtggccgagaaggaatgggagttgccgccagattctgacatggatctgaatctgattgagcaggcacccctgaccgtggccgagaagctgcagcgcgactttctgacggaatggcgccgtgtgagtaaggccccggaggcccttttctttgtgcaatttgagaagggagagagctacttccacatgcacgtgctcgtggaaaccaccggggtgaaatccatggttttgggacgtttcctgagtcagattcgcgaaaaactgattcagagaatttaccgcgggatcgagccgactttgccaaactggttcgcggtcacaaagaccagaaatggcgccggaggcgggaacaaggtggtggatgagtgctacatccccaattacttgctccccaaaacccagcctgagctccagtgggcgtggactaatatggaacagtatttaagcgcctgtttgaatctcacggagcgtaaacggttggtggcgcagcatctgacgcacgtgtcgcagacgcaggagcagaacaaagagaatcagaatcccaattctgatgcgccggtgatcagatcaaaaacttcagccaggtacatggagctggtcgggtggctcgtggacaaggggattacctcggagaagcagtggatccaggaggaccaggcctcatacatctccttcaatgcggcctccaactcgcggtcccaaatcaaggctgccttggacaatgcgggaaagattatgagcctgactaaaaccgcccccgactacctggtgggccagcagcccgtggaggacatttccagcaatcggatttataaaattttggaactaaacgggtacgatccccaatatgcggcttccgtctttctgggatgggccacgaaaaagttcggcaagaggaacaccatctggctgtttgggcctgcaactaccgggaagaccaacatcgcggaggccatagcccacactgtgcccttctacgggtgcgtaaactggaccaatgagaactttcccttcaacgactgtgtcgacaagatggtgatctggtgggaggaggggaagatgaccgccaaggtcgtggagtcggccaaagccattctcggaggaagcaaggtgcgcgtggaccagaaatgcaagtcctcggcccagatagacccgactcccgtgatcgtcacctccaacaccaacatgtgcgccgtgattgacgggaactcaacgaccttcgaacaccagcagccgttgcaagaccggatgttcaaatttgaactcacccgccgtctggatcatgactttgggaaggtcaccaagcaggaagtcaaagactttttccggtgggcaaaggatcacgtggttgaggtggagcatgaattctacgtcaaaaagggtggagccaagaaaagacccgcccccagtgacgcagatataagtgagcccaaacgggtgcgcgagtcagttgcgcagccatcgacgtcagacgcggaagcttcgatcaactacgcagacaggtaccaaaacaaatgttctcgtcacgtgggcatgaatctgatgctgtttccctgcagacaatgcgagagaatgaatcagaattcaaatatctgcttcactcacggacagaaagactgtttagagtgctttcccgtgtcagaatctcaacccgtttctgtcgtcaaaaaggcgtatcagaaactgtgctacattcatcatatcatgggaaaggtgccagacgcttgcactgcctgcgatctggtcaatgtggatttggatgactgcatctttgaacaataaatgatttaaatcaggtatggctgccgatggttatcttccagattggctcgaggacactctctctgaaggaataagacagtggtggaagctcaaacctggcccaccaccaccaaagcccgcagagcggcataaggacgacagcaggggtcttgtgcttcctgggtacaagtacctcggacccttcaacggactcgacaagggagagccggtcaacgaggcagacgccgcggccctcgagcacgtacaaagcctacgaccggcagctcgacagcggagacaacccgtacctcaagtacaaccacgccgacgcggagtttcaggagcgccttaaagaagatacgtcttttgggggcaacctcggacgagcagtcttccaggcgaaaaagagggttcttgaacctctgggcctggttgaggaacctgttaagacggctccgggaaaaaagaggccggtagagcactctcctgtggagccagactcctcctcgggaaccggaaaggcgggccagcagcctgcaagaaaaagattgaattttggtcagactggagacgcagactcagtacctgacccccagcctctcggacagccaccagcagccccctctggtctgggaactaatacgatggctacaggcagtggcgcaccaatggcagacaataacgagggcgccgacggagtgggtaattcctccggaaattggcattgcgattccacatggatgggcgacagagtcatcaccaccagcacccgaacctgggccctgcccacctacaacaaccacctctacaaacaaatttccagccaatcaggagcctcgaacgacaatcactactttggctacagcaccccttgggggtattttgacttcaacagattccactgccacttttcaccacgtgactggcaaagactcatcaacaacaactggggattccgacccaagagactcaacttcaagctctttaacattcaagtcaaagaggtcacgcagaatgacggtacgacgacgattgccaataaccttaccagcacggttcaggtgtttactgactcggagtaccagctcccgtacgtcctcggctcggcgcatcaaggatgcctcccgccgttcccagcagacgtcttcatggtgccacagtatggatacctcaccctgaacaacgggagtcaggcagtaggacgctcttcattttactgcctggagtactttccttctcagatgctgcgtaccggaaacaactttaccttcagctacacttttgaggacgttcctttccacagcagctacgctcacagccagagtctggaccgtctcatgaatcctctcatcgaccagtacctgtattacttgagcagaacaaacactccaagtggaaccaccacgcagtcaaggcttcagttttctcaggccggagcgagtgacattcgggaccagtctaggaactggcttcctggaccctgttaccgccagcagcgagtatcaaagacatctgcggataacaacaacagtgaatactcgtggactggagctaccaagtaccacctcaatggcagagactctctggtgaatccggccatggcaagccacaaggacgatgaagaaaagttttttcctcagagcggggttctcatctttgggaagcaaggctcagagaaaacaaatgtgaacattgaaaaggtcatgattacagacgaagaggaaatcggaacaaccaatcccgtggctacggagcagtatggttctgtatctaccaacctccagagaggcaacagacaagcagctaccgcagatgtcaacacacaaggcgttcttccaggcatggtctggcaggacagagatgtgtaccttcaggggcccatctgggcaaagattccacacacggacggacattttcacccctctcccctcatgggtggattcggacttaaacaccctcctccacagattctcatcaagaacaccccggtacctgcgaatccttcgaccaccttcagtgcggcaaagtttgcttccttcatcacacagtactccacgggacacggtcagcgtggagatcgagtgggagctgcagaaggaaaacagcaaacgctggaatcccgaaattcagtacacttccaactacaacaagtctgttaatcgtggacttaccgtggatactaatggcgtgtattcagagcctcgccccattggcaccagatacctgactcgtaatctgtaattgcttgttaatcaataaaccgtttaattcgtttcagttgaactttggtctctgcgtatttctttcttatctagtttccatggctacgtagataagtagcatggcgggttaatcattaactacaaggaacccctagtgatggagttggccactccctctctgcgcgctcgctcgctcactgaggccgggcgaccaaaggtcgcccgacgcccgggctttgcccgggcggcctcagtgagcgagcgagcgcgcagagagggagtggccaa

SEQ ID NO: 5106 - DNA, 4679 bp, Adeno-associated virus 2
  source 1..4679: mol_type = unassigned DNA
ttggccactccctctctgcgcgctcgctcgctcactgaggccgggcgaccaaaggtcgcccgacgcccgggctttgcccgggcggcctcagtgagcgagcgagcgcgcagagagggagtggccaactccatcactaggggttcctggaggggtggagtcgtgacgtgaattacgtcatagggttagggaggtcctgtattagaggtcacgtgagtgttttgcgacattttgcgacaccatgtggtcacgctgggtatttaagcccgagtgagcacgcagggtctccattttgaagcgggaggtttgaacgcgcagccgccatgccggggttttacgagattgtgattaaggtccccagcgaccttgacgggcatctgcccggcatttctgacagctttgtgaactgggtggccgagaaggaatgggagttgccgccagattctgacatggatctgaatctgattgagcaggcacccctgaccgtggccgagaagctgcagcgcgactttctgacggaatggcgccgtgtgagtaaggccccggaggcccttttctttgtgcaatttgagaagggagagagctacttccacatgcacgtgctcgtggaaaccaccggggtgaaatccatggttttgggacgtttcctgagtcagattcgcgaaaaactgattcagagaatttaccgcgggatcgagccgactttgccaaactggttcgcggtcacaaagaccagaaatggcgccggaggcgggaacaaggtggtggatgagtgctacatccccaattacttgctccccaaaacccagcctgagctccagtgggcgtggactaatatggaacagtatttaagcgcctgtttgaatctcacggagcgtaaacggttggtggcgcagcatctgacgcacgtgtcgcagacgcaggagcagaacaaagagaatcagaatcccaattctgatgcgccggtgatcagatcaaaaacttcagccaggtacatggagctggtcgggtggctcgtggacaaggggattacctcggagaagcagtggatccaggaggaccaggcctcatacatctccttcaatgcggcctccaactcgcggtcccaaatcaaggctgccttggacaatgcgggaaagattatgagcctgactaaaaccgcccccgactacctggtgggccagcagcccgtggaggacatttccagcaatcggatttataaaattttggaactaaacgggtacgatccccaatatgcggcttccgtctttctgggatgggccacgaaaaagttcggcaagaggaacaccatctggctgtttgggcctgcaactaccgggaagaccaacatcgcggaggccatagcccacactgtgcccttctacgggtgcgtaaactggaccaatgagaactttcccttcaacgactgtgtcgacaagatggtgatctggtgggaggaggggaagatgaccgccaaggtcgtggagtcggccaaagccattctcggaggaagcaaggtgcgcgtggaccagaaatgcaagtcctcggcccagatagacccgactcccgtgatcgtcacctccaacaccaacatgtgcgccgtgattgacgggaactcaacgaccttcgaacaccagcagccgttgcaagaccggatgttcaaatttgaactcacccgccgtctggatcatgactttgggaaggtcaccaagcaggaagtcaaagactttttccggtgggcaaaggatcacgtggttgaggtggagcatgaattctacgtcaaaaagggtggagccaagaaaagacccgcccccagtgacgcagatataagtgagcccaaacgggtgcgcgagtcagttgcgcagccatcgacgtcagacgcggaagcttcgatcaactacgcagacaggtaccaaaacaaatgttctcgtcacgtgggcatgaatctgatgctgtttccctgcagacaatgcgagagaatgaatcagaattcaaatatctgcttcactcacggacagaaagactgtttagagtgctttcccgtgtcagaatctcaacccgtttctgtcgtcaaaaaggcgtatcagaaactgtgctacattcatcatatcatgggaaaggtgccagacgcttgcactgcctgcgatctggtcaatgtggatttggatgactgcatctttgaacaataaatgatttaaatcaggtatggctgccgatggttatcttccagattggctcgaggacactctctctgaaggaataagacagtggtggaagctcaaacctggcccaccaccaccaaagcccgcagagcggcataaggacgacagcaggggtcttgtgcttcctgggtacaagtacctcggacccttcaacggactcgacaagggagagccggtcaacgaggcagacgccgcggccctcgagcacgacaaagcctacgaccggcagctcgacagcggagacaacccgtacctcaagtacaaccacgccgacgcggagtttcaggagcgccttaaagaagatacgtcttttgggggcaacctcggacgagcagtcttccaggcgaaaaagagggttcttgaacctctgggcctggttgaggaacctgttaagacggctccgggaaaaaagaggccggtagagcactctcctgtggagccagactcctcctcgggaaccggaaaggcgggccagcagcctgcaagaaaaagattgaattttggtcagactggagacgcagactcagtacctgacccccagcctctcggacagccaccagcagccccctctggtctgggaactaatacgatggctacaggcagtggcgcaccaatggcagacaataacgagggcgccgacggagtgggtaattcctccggaaattggcattgcgattccacatggatgggcgacagagtcatcaccaccagcacccgaacctgggccctgcccacctacaacaaccacctctacaaacaaatttccagccaatcaggagcctcgaacgacaatcactactttggctacagcaccccttgggggtattttgacttcaacagattccactgccacttttcaccacgtgactggcaaagactcatcaacaacaactggggattccgacccaagagactcaacttcaagctctttaacattcaagtcaaagaggtcacgcagaatgacggtacgacgacgattgccaataaccttaccagcacggttcaggtgtttactgactcggagtaccagctcccgtacgtcctcggctcggcgcatcaaggatgcctcccgccgttcccagcagacgtcttcatggtgccacagtatggatacctcaccctgaacaacgggagtcaggcagtaggacgctcttcattttactgcctggagtactttccttctcagatgctgcgtaccggaaacaactttaccttcagctacacttttgaggacgttcctttccacagcagctacgctcacagccagagtctggaccgtctcatgaatcctctcatcgaccagtacctgtattacttgagcagaacaaacactccaagtggaaccaccacgcagtcaaggcttcagttttctcaggccggagcgagtgacattcgggaccagtctaggaactggcttcctggaccctgttaccgccagcagcgagtatcaaagacatctgcggataacaacaacagtgaatactcgtggactggagctaccaagtaccacctcaatggcagagactctctggtgaatccgggcccggccatggcaagccacaaggacgatgaagaaaagttttttcctcagagcggggttctcatctttgggaagcaaggctcagagaaaacaaatgtggacattgaaaaggtcatgattacagacgaagaggaaatcaggacaaccaatcccgtggctacggagcagtatggttctgtatctaccaacctccagagaggcaacagacaagcagctaccgcagatgtcaacacacaaggcgttcttccaggcatggtctggcaggacagagatgtgtaccttcaggggcccatctgggcaaagattccacacacggacggacattttcacccctctcccctcatgggtggattcggacttaaacaccctcctccacagattctcatcaagaacaccccggtacctgcgaatccttcgaccaccttcagtgcggcaaagtttgcttccttcatcacacagtactccacgggacaggtcagcgtggagatcgagtgggagctgcagaaggaaaacagcaaacgctggaatcccgaaattcagtacacttccaactacaacaagtctgttaatgtggactttactgtggacactaatggcgtgtattcagagcctcgccccattggcaccagatacctgactcgtaatctgtaattgcttgttaatcaataaaccgtttaattcgtttcagttgaactttggtctctgcgtatttctttcttatctagtttccatggctacgtagataagtagcatggcgggttaatcattaactacaaggaacccctagtgatggagttggccactccctctctgcgcgctcgctcgctcactgaggccgggcgaccaaaggtcgcccgacgcccgggctttgcccgggcggcctcagtgagcgagcgagcgcgcagagagggagtggccaa

SEQ ID NO: 5107 - protein, 735 aa, Adeno-associated virus 2
MAADGYLPDWLEDTLSEGIRQWWKLKPGPPPPKPAERHKDDSRGLVLPGYKYLGPFNGLDKGEPVNEADAAALEHDKAYDRQLDSGDNPYLKYNHADAEFQERLKEDTSFGGNLGRAVFQAKKRVLEPLGLVEEPVKTAPGKKRPVEHSPVEPDSSSGTGKAGQQPARKRLNFGQTGDADSVPDPQPLGEPPATPAAVGPTTMASGGGAPMADNNEGADGVGNASGNWHCDSTWLGDRVITTSTRTWALPTYNNHLYKQISSASTGASNDNHYFGYSTPWGYFDFNRFHCHFSPRDWQRLINNNWGFRPKRLNFKLFNIQVKEVTQNDGTTTIANNLTSTVQVFTDSEYQLPYVLGSAHQGCLPPFPADVFMIPQYGYLTLNNGSQAVGRSSFYCLEYFPSQMLRTGNNFTFSYTFEDVPFHSSYAHSQSLDRLMNPLIDQYLYYLNRTQNQSGSAQDKALLFSRGSPAGMSVQPKNWLPGPCYRQQRVSKTKTDNNNSNFTWTGASKYNLNGRESIINPGTAMASHKDDKDKFFPMSGVMIFGKESAGASNTALDNVMITDEEEIKATNPVATERFGTVAVNFQSSSTDPATGDVHVMGALPGMVWQDRDVYLQGPIWAKIPHTDGHFHPSPLMGGFGLKHPPPQILIKNTPVPANPPAEFSATKFASFITQYSTGQVSVEIEWELQKENSKRWNPEVQYTSNYAKSANVDFTVDNNGLYTEPRPIGTRYLTRP

SEQ ID NO: 5108 - protein, 740 aa, Adeno-associated virus 2
MAADGYLPDWLEDTLSEGIRQWWKLKPGPPPPKPAERHKDDSRGLVLPGYKYLGPFNGLDKGEPVNAADAAALEHDKAYDRQLDSGDNPYLKYNHADAEFQERLKEDTSFGGNLGRAVFQAKKRVLEPLGLVEEPVKTAPGKKRPVEHSPVEPDSSSGTGKAGQQPARKRLNFGQTGDADSVPDPQPLGQPPAAPSGLGTNTMATGSGAPMADNNEGADGVGNSSGNWHCDSTWMGDRVITTSTRTWALPTYNNHLYKQISSQSGASNDNHYFGYSTPWGYFDFNRFHCHFSPRDWQRLINNNWGFRPKRLNFKLFNIQVKEVTQNDGTTTIANNLTSTVQVFTDSEYQLPYVLGSAHQGCLPPFPADVFMVPQYGYLTLNNGSQAVGRSSFYCLEYFPSQMLRTGNNFTFSYTFEDVPFHSSYAHSQSLDRLMNPLIDQYLYYLSRTNTPSGTTTQSGLQFSQAGASDIRDQSRNWLPGPCYRQQRVSKTSADNNNSEYSWTGATKYHLNGRDSLVNPGPAMASHKDDEEKFFPQSGVLIFGKQGSEKTNVDIEKVMITDEEEIRTTNPVATEQYGSVSTNLQRGNRQAATADVNTQGVLPGMVWQDRDVYLQGPIWAKIPHTDGHFHPSPLMGGFGLKHPPPQILIKNTPVPANPSTTFSAAKFASFITQYSTGQVSVEIEWELQKENSKRWNPEIQYTSNYNKSVNVDFTVDTNGVYSEPRPIGTRYLTRNLLLAAA

SEQ ID NO: 5109 - protein, 734 aa, Adeno-associated virus 2
MAADGYLPDWLEDTLSEGIRQWWKLKPGPPPPKPAERHKDDSRGLVLPGYKYLGPFNGLDKGEPVNEADAAALEHDKAYDRQLDSGDNPYLKYNHADAEFQERLKEDTSFGGNLGRAVFQAKKRVLEPLGLVEEPVKTAPGKKRPVEHSPVEPDSSSGTGKAGQQPARKRLNFGQTGDADSVPDPQPLGQPPAAPSGLGTNTMATGSGAPMADNNEGADGVGNSSGNWHCDSTWMGDRVITTSTRTWALPTYNNHLYKQISSQSGASNDNHYFGYSTPWGYFDFNRFHCHFSPRDWQRLINNNWGFRPKRLNFKLFNIQVKEVTQNDGTTTIANNLTSTVQVFTDSEYQLPYVLGSAHQGCLPPFPADVFMVPQYGYLTLNNGSQAVGRSSFYCLEYFPSQMLRTGNNFTFSYTFEDVPFHSSYAHSQSLDRLMNPLIDQYLYYLSRTNTPSGTTTQSGLQFSQAGASDIRDQSRNWLPGPCYRQQRVSKTSADNNNSEYSWTGATMYHLNGRDSLVNPGPAMASHKDDEEKFFPQSGVLIFGKQGSEKTNVDIEKVMITDEEEIRTTNPVATEQYGSVSTNLQRGNRQAATADVNTQGVLPGMVWQDRDVYLQGPIWAKIPHTDGHFHPSPLMGGFGLKHPPPQILIKNTPVPANPSTTFSAAKFASFITQYSTGQVSVEIEWELQKENSKRWNPEIQYTSNYNKSINVDFTVDTNGVYSEPRPIGTRYLTRN

SEQ ID NO: 5110 - protein, 734 aa, Adeno-associated virus 2
MAADGYLPDWLEDTLSEGIRQWWKLKPGPPPPKPAERHKDDSRGLVLPGYKYLGPFNGLDKGEPVNEADAAALEHDKAYDRQLDSGDNPYLKYNHADAEFQERLKEDTSFGGNLGRAVFQAKKRVLEPLGLVEEPVKTAPGKKRPVEHSPVEPDSSSGTGKAGQQPARKRLNFGQTGDADSVPDPQPLGQPPAAPSGLGTNTMATGSGAPMADNNEGADGVGNSSGNWHCDSTWMGDRVITTSTRTWALPTYNNHLYKQISSQSGASNDNHYFGYSTPWGYFDFNRFHCHFSPRDWQRLINNNWGFRPKRLNFKLFNIQVKEVTQNDGTTTIANNLTSTVQVFTDSEYQLPYVLGSAHQGCLPPFPADVFMVPQYGYLTLNNGSQAVGRSSFYCLEYFPSQMLRTGNNFTFSYTFEDVPFHSSYAHSQSLDRLMNPLIDQYLYYLSRTNTPSGTTTQSGLQFSQAGASDIRDQSRNWLPGPCYRQQRVSKTSADNNNSEYSWTGATKYHLNGRDSLVNPGPAMASHKDDEEKFFPQSGVLIFGKQGSEKTNVDIEKVMITDEEEIRTTNPVATEQYGSVSTNLQRGNRQAATADVNTQGVLPGMVWQDRDVYLQGPIWAKIPHTDGHFHPSPLMGGFGLKHPPPQILIKNTPVPANPSTTFSEAKFASFITQYSTGQVSVEIEWELQKENSKRWNPEIQYTSNYNKSVNVDFTVDTNGVYSEPRPIGTRYLTRN

SEQ ID NO: 5111 - protein, 739 aa, Adeno-associated virus 2
MAADGYLPDWLEDTLSEGIRQWWKLKPGPPPPKPAERHKDDSRGLVLPGYKYLGPFNGLDKGEPVNEADAAALEHDKAYDRQLDSGDNPYLKYNHADAEFQERLKEDTSFGGNLGRAVFQAKKRVLEPLGLVEEPVKTAPGKKRPVEHSPVEPDSSSGTGKAGQQPARKRLNFGQTGDADSVPDPQPLGQPPAAPSGLGTNTMATGSGAPMADNNEGADGVGNSSGNWHCDSTWMGDRVITTSTRTWALPTYNNHLYKQISSQSGASNDNHYFGYSTPWGYFDFNRFHCHFSPRDWQRLINNNWGFRPKRLNFKLFNIQVKEVTQNDGTTTIANNLTSTVQVFTDSEYQLPYVLGSAHQGCLPPFPADVFMVPQYGYLTLNNGSQAVGRSSFYCLEYFPSQMLRTGNNFTFSYTFEDVPFHSSYAHSQSLDRLMNPLIDQYLYYLSRTNTPSGTTTQSGLQFSQAGASDIRDQSRNWLPGPCYRQQRVSKTSADNNNSEYSWTGATKYHLNGRDSLVNPGPAMASHKDDEEKFFPQSGVLIFGKQGSEKTNVDIEKVMITDEEEIRTTNPVATEQYGSVSTNLQRGNRQAATADVNTQGVLPGMVWQDRDVYLQGPIWAKIPHTDGHFHPSPLMGGFGLKHPPPQILIKNTPVPANPSTTFSAAKFASFITQYSTGQVSVEIEWELQKENSKRWNPEIQYTSNYNKSVNVDFTVDTNGVYSEPRPIGTRYLTRNLLLAA

SEQ ID NO: 5112 - protein, 725 aa, Adeno-associated virus 2
MAADGYLPDWLEDTLSEGIRQWWKLKPGPPPPKPAERHKDDSRGLVLPGYKYLGPFNGLDKGEPVNEADAAALEHDKAYDRQLDSGDNPYLKYNHADAEFQERLKEDTSFGGNLGRAVFQAKKRVLEPLGLVEEPVKTAPGKKRPVEHSPVEPDSSSGTGKAGQQPARKRLNFGQTGDADSVPDPQPLGQPPAAPSGLGTNTMATGSGAPMADNNEGADGVGNSSGNWHCDSTWMGDRVITTSTRTWALPTYNNHLYKQISSQSGASNDNHYFGYSTPWGYFDFNRFHCHFSPRDWQRLINNNWGFRPKRLNFKLFNIQVKEVTQNDGTTTIANNLTSTVQVFTDSEYQLPYVLGSAHQGCLPPFPADVFMVPQYGYLTLNNGSQAVGRSSFYCLEYFPSQMLRTGNNFTFSYTFEDVPFHSSYAHSQSLDRLMNPLIDQYLYYLSRTNTPSGTTTQSGLQFSQAGASDIRDQSRNWLPGPCYRQQRVSKTSADNNNSEYSWTGATKYHLNGRDSLVNPGPAMASHKDDEEKFFPQSGVLIFGKQGSEKTNVDIEKVMITDEEEIRTTNPVATEQYGSVSTNLQRGNRQAATADVNTQGVLPGMVWQDRDVYLQGPIWAKIPHTDGHFHPSPLMGGFGLKHPPPQILIKNTPVPANPSTTFSAAKFASFITQYSTGQVSVEIEWELQKENSKRWNPEIQYTSNYNKSVNVDFTVDTNGVYSEPRP

SEQ ID NO: 5113 - protein, 707 aa, Adeno-associated virus 2
MAADGYLPDWLEDTLSEGIRQWWKLKPGPPPPKPAERHKDDSRGLVLPGYKYLGPFNGLDKGEPVNEADAAALEHDKAYDRQLDSGDNPYLKYNHADAEFQERLKEDTSFGGNLGRAVFQAKKRVLEPLGLVEEPVKTAPGKKRPVEHSPVEPDSSSGTGKAGQQPARKRLNFGQTGDADSVPDPQPLGQPPAAPSGLGTNTMATGSGAPMADNNEGADGVGNSSGNWHCDSTWMGDRVITTSTRTWALPTYNNHLYKQISSQSGASNDNHYFGYSTPWGYFDFNRFHCHFSPRDWQRLINNNWGFRPKRLNFKLFNIQVKEVTQNDGTTTIANNLTSTVQVFTDSEYQLPYVLGSAHQGCLPPFPADVFMVPQYGYLTLNNGSQAVGRSSFYCLEYFPSQMLRTGNNFTFSYTFEDVPFHSSYAHSQSLDRLMNPLIDQYLYYLSRTNTPSGTTTQSGLQFSQAGASDIRDQSRNWLPGPCYRQQRVSKTSADNNNSEYSWTGATKYHLNGRDSLVNPGPAMASHKDDEEKFFPQSGVLIFGKQGSEKTNVDIEKVMITDEEEIRTTNPVATEQYGSCIYQPPERQQTSSYRRCQHTRRSSRHGLAGQRCVPSGAHLGKDSTHGRTFSPLSPHGWIRTTPSSTDSHQEHPGTCESFDHLQCGKVCFLHHTVLHGTGQRGDRVRAAEGKQQTLESRNSVHFQLQQVC

SEQ ID NO: 5114 - protein, 739 aa, Adeno-associated virus 2; identical to SEQ ID NO: 5111

SEQ ID NO: 5115 - protein, 737 aa, Adeno-associated virus 2
MASDGYLPDWLEDNLSEGIREWWDLKPGAPKPKANQQKQDDGRGLVLPGYKYLGPFNGLDKGEPVNAADAAALEHDKAYDQQLKAGDNPYLRYNHADAEFQERLQEDTSFGGNLGRAVFQAKKRVLEPFGLVEEGAKTAPGKKRPVEQSPQEPDSSSGIGKTGQQPAKKRLNFGQTGDSESVPDPQPLGEPPATPAAVGPTTMASGGGAPMADNNEGADGVGNASGNWHCDSTWLGDRVITTSTRTWALPTYNNHLYKQISSASTGASNDNHYFGYSTPWGYFDFNRFHCHFSPRDWQRLINNNWGFRPKRLNFKLFNIQVKEVTTNDGTTTIANNLTSTVQVFTDSEYQLPYVLGSAHQGCLPPFPADVFMVPQYGYLTLNNGSQAVGRSSFYCLEYFPSQMLRTGNNFTFSYTFEDVPFHSSYAHSQSLDRLMNPLIDQYLYYLSRTNTPSGTTTQSGLQFSQAGASDIRDQSRNWLPGPCYRQQRVSKTSADNNNSEYSWTGATKYHLNGRDSLVNPGPAMASHKDDEEKFFPQSGVLIFGKQGSEKTNVDIEKVMITDEEEIRTTNPVATEQYGSVSTNLQRGNRQAATADVNTQGVLPGMVWQDRDVYLQGPIWAKIPHTDGHFHPSPLMGGFGLKHHPPQILIKNTPVPANPSTTFSAAKFASFITQYSTGQVSVEIEWELQKENSKRWNPEIQYTSNYNKSVNVDFTVDTNGVYSEPRPIGTRYLTRNLL

SEQ ID NO: 5116 - protein, 741 aa, Adeno-associated virus 2
MAADGYLPDWLEDTLSEGIREWWALKPGAPKPKANQQKQDDGRGLVLPGYKYLGPFNGLDKGEPVNEADAAALEHDKAYDQQLQAGDNPYLRYNHADAEFQERLQEDTSFGGNLGRAVFQAKKRVLEPLGLVEEPVKTAPGKKRPVEHSPVEPDSSSGTGKSGQQPARKRLNFGQTGDADSVPDPQPLGQPPAAPSGLGTNTMATGSGAPMADNNEGADGVGNSSGNWHCDSTWMGDRVITTSTRTWALPTYNNHLYKQISSQSGASNDNHYFGYSTPWGYFDFNRFHCHFSPRDWQRLINNNWGFRPKRLNFKLFNIQVKEVTQNDGTTTIANNLTSTVQVFTDSEYQLPYVLGSAHQGCLPPFPADVFMVPQYGYLTLNNGSQAVGRSSFYCLEYFPSQMLRTGNNFTFSYTFEDVPFHSSYAHSQSLDRLMNPLIDQYLYYLSRTNTPSGTTTQSGLQFSQAGASDIRDQSRNWLPGPCYRQQRVSKTSADNNNSEYSWTGATKYHLNGRDSLVNPGPAMASHKDDEEKFFPQSGVLIFGKQGSEKTNVDIEKVMITDEEEIRTTNPVATEQYGSVSTNLQRGNLANHNNTTNARQAATADVNTQGVLPGMVWQDRDVYLQGPIWAKIPHTDGHFHPSPLMGGFGLKHPPPQILIKNTPVPANPSTTFSAAKFASFITQYSTGQVSVEIEWELQKENSKRWNPEIQYTSNYNKSINVDFTVDTNGVYSEPRPIGTRYL

SEQ ID NO: 5117 - protein, 730 aa, Adeno-associated virus 2
MASDGYLPDWLEDNLSEGIREWWDLKPGAPKPKANQQKQDDGRGLVLPGYKYLGPFNGLDKGEPVNAADAAALEHDKAYDQQLKAGDNPYLRYNHADAEFQERLQEDTSFGGNLGRAVFQAKKRVLEPFGLVEEGAKTAPGKKRPVEQSPQEPDSSSGIGKTGQQPAKKRLNFGQTGDSESVPDPQPLGEPPATPAAVGPTTMASGGGAPMADNNEGADGVGNASGNWHCDSTWLGDRVITTSTRTWALPTYNNHLYKQISSASTGASNDNHYFGYSTPWGYFDFNRFHCHFSPRDWQRLINNNWGFRPKRLNFKLFNIQVKEVTTNDGVTTIANNLTSTVQVFSDSEYQLPYVLGSAHQGCLPPFPADVFMIPQYGYLTLNNGSQAVGRSSFYCLEYFPSQMLRTGNNFTFSYTFEDVPFHSSYAHSQSLDRLMNPLIDQYLYYLNRTQNQSGSAQNNDLLFSRGSPAGMSVQPKNWLPGPCYRQQRVSKTKTDNNNSNFTWTGASKYNLNGRESIINPGTAMASHKDDKDKFFPMSGVMIFGKESAGASNTALDNVMITDEEEIKATNPVATERFGTVAVNLQSSSTDPATGDVHVMGALPGMVWQDRDVYLQGPIWAKIPHTDGHFHPSPLMGGFGLKNPPPQILIKNTPVPANPPAEFSATKFASFITQYSTGQVSVEIEWELQKENSKRWNPEVQYTSNYAKSANVDFTVDNNGLYTEPRPIGTR

SEQ ID NO: 5118 - protein, 735 aa, Adeno-associated virus 2
  VARIANT 239: note = MOD_RES - Any amino acid
MASDGYLPDWLEDNLSEGIREWWDLKPGAPKPKANQQKQDDGRGLVLPGYKYLGPFNGLDKGEPVNAADAAALEHDKAYDQQLKAGDNPYLRYNHADAEFQERLQEDTSFGGNLGRAVFQAKKRVLEPFGLVEEGAKTAPGKKRPVEQSPQEPDSSSGIGKTGQQPAKKRLNFGQTGDSESVPDPQPLGEPPATPAAVGPTTMASGGGAPMADNNEGADGVGNASGNWHCDSTWLGDRXITTSTRTWALPTYNNHLYKQISSASTGASNDNHYFGYSTPWGYFDFNRFHCHFSPRDWQRLINNNWGFRPKRLNFKLFNIQVKEVTTNDGVTTIANNLTSTVQVFSDSEYQLPYVLGSAHQGCLPPFPADVFMIPQYGYLTLNNGSQAVGRSSFYCLEYFPSQMLRTGNNFTFSYTFEDVPFHSSYAHSQSLDRLMNPLIDQYLYYLNRTQNQSGSAQNNDLLFSRGSPAGMSVQPKNWLPGPCYRQQRVSKTKTDNNNSNFTWTGASKYNLNGRESIINPGTAMASHKDDKDKFFPMSGVMIFGKESAGASNTALDNVMITDEEEIKATNPVATERFGTVAVNLQSSSTDPATGDVHVMGALPGMVWQDRDVYLQGPIWAKIPHTDGHFHPSPLMGGFGLKNPPPQILIKNTPVPANPPAEFSATKFASFITQYSTGQVSVEIEWELQKENSKRWNPEVQYTSNYAKSANVDFTVDNNGLYTEPRPIGTRYLTRP

SEQ ID NO: 5119 - protein, 733 aa, Adeno-associated virus 2
MASDGYLPDWLEDNLSEGIREWWDLKPGAPKPKANQQKQDDGRGLVLPGYKYLGPFNGLDKGEPVNAADAAALEHDKAYDQQLKAGDNPYLRYNHADAEFQERLQEDTSFGGNLGRAVFLAKKRVLEPFGLVEEGAKTAPGKKRPVEQSPQEPDSSSGIGKTGQQPAKKRLNFGQTGDSESVPDPQPLGEPPATPAAVGPTTMASGGGAPMADNNEGADGVGNASGNWHCDSTWLGDRVITTSTRTWALPTYNNHLYKQISSASTGASNDNHYFGYSTPWGYFDFNRFHCHFSPRDWQRLINNNWGFRPKRLNFKLFNIQVKEVTTNDGVTTIANNLTSTVQVFSDSEYQLPYVLGSAHQGCLPPFPADVFMIPQYGYLTLNNGSQAVGRSSFYCLEYFPSQMLRTGNNFTFSYTFEDVPFHSSYAHSQSLDRLMNPLIDQYLYYLNRTQNQSGSAQNNDLLFSRGSPAGMSVQPKNWLPGPCYRQQRVSKTKTDNNNSNFTWTGASKYNLNGRESIINPGTAMASHKDDKDKFFPMSGVMIFGKESAGASNTALDNVMITDEEEIKATNPVATERFGTVAVNLQSSSTDPATGDVHVMGALPGMVWQDRDVYLQGPIWAKIPHTDGHFHPSPLMGGFGLKNPPPQILIKNTPVPANPPAEFSATKFASFITQYSTGQVSVEIEWELQKENSKRWNPEVQYTSNYAKSANVDFTVDNNGLYTEPRPIGTRYLT

SEQ ID NO: 5120 - protein, 734 aa, Adeno-associated virus 2
MAADGYLPDWLEDTLSEGIRQWWKLKPGPPPPKPAERHKDDSRGLVLPGCKYLGPFNGLDKGEPVNEADAAALEHDKAYDRQLDSGDNPYLKYNHADAEFQERLKEDTSFGGNLGRAVFQAKKRVLEPLGLVEEPVKTAPGKKRPVEHSPVEPDSSSGTGKAGQQPARKRLNFGQTGDADSVPDPQPLGQPPAAPSGLGTNTMATGSGAPMADNNEGADGVGNSSGNWHCDSTWMGDRVITTSTRTWALPTYNNHLYKQISSQSGASNDNHYFGYSTPWGYFDFNRFHCHFSPRDWQRLINNNWGFRPKRLNFKLFNIQVKEVTQNDGTTTIANNLTSTVQVFSDSEYQLPYVLGSAHQGCLPPFPADVFMIPQYGYLTLNNGSQAVGRSSFYCLEYFPSQMLRTGNNFTFNYTFEDVPFHSSYAHSQSLDRLMNPLIDQYLYYLNRTQNQSGSAQNNDLLFSRGSPAGMSVQPKNWLPGPCYRQQRVSKTKTDNNNSNFTWTGASKYNLNGRESIINPGTAMASHKDDKDKFFPMSGVMIFGKESAGASNTALDNVMITDEEEIKATNPVATERFGTVAVNLQSSSTDPATGDVHVMGALPGMVWQDRDVYLQGPIWAKIPHTDGHFHPSPLMGGFGLKNPPPQILIKNTPVPANPPAEFSATKFASFITQYSTGQVSVEIEWELQKENSKRWNPEVQYTSNYAKSANVDFTVDNNGLYTEPRPIGTRYLTRP

SEQ ID NO: 5121 - protein, 734 aa, Adeno-associated virus 2
MAADGYLPDWLEDTLSEGIRQWWKLKPGPPPPKPAERHKDDSRGLVLPGYKYLGPFNGLDKGEPVNEADAAALEHDKAYDRQLDSGDNPYLKYNHADAEFQERLKEDTSFGGNLGRAVFQAKKRVLEPLGLVEEPVKTAPGKKRPVEHSPVEPDSSSGTGKAGQQPARKRLNFGQTGDADSVPDPQPLGQPPAAPSGLGTNTMATGSGAPMADNNEGADGVGNSSGNWHCDSTWMGDRVITTSTRTWALSTYNNHLYKQISSQSGASNDNHYFGYSTPWGYFDFNRFHCHFSPRDWQRLINNNWGFRPKRLNFKLFNIQVKEVTQNDGTTTIANNLTSTVQVFTDSEYQLPYVLGSAHQGCLPPFPADVFMVPQYGYLTLNNGSQAVGRSSFYCLEYFPSQMLRTGNNFTFSYTFEDVPFHSSYAHSQSLDRLMNPLIDQYLYYLSRTNTPSGTTTQSRLQFSQAGASDIRDQSRNWLPGPCYRQQRVSKTSADNNNSEYSWTGATKYHLNGRDSLVNPGPAMASHKDDEEKFFPQSGVLIFGKQGSEKTNVDIEKVMITDEEEIRTTNPVATEQYGSVSTNLQRGNRQAATADVNTQGVLPGMVWQDRDVYLQGPIWAKIPHTDGHFHPSPLMGGFGLKHPPPQILIKNTPVPANPSTTFSAAKFASFITQYSTGQVSVEIEWELQKENSKRWNPEIQYTSNYNKSINVDFTVDTNGVYSEPRPIGTRYLTRN

SEQ ID NO: 5122 - protein, 738 aa, Adeno-associated virus 2
MAADGYLPDWLEDTLSEGIRQWWKLKPGPPPPKPAERHKDDSRGLVLPGYKYLGPFNGLDKGEPVNEADAAALEHDKAYDRQLDGGDNPYLKYNHADAEFQERLKEDTSFGGNLGRAVFQAKKRVLEPLGLVEEPVKTAPGKKRPVEHSPVEPDSSSGTGKAGQQPARKRLNFGQTGDADSVPDPQPLGQPPAAPSGLGTNTMATGSGAPMADNNEGADGVGNSSGNWHCDSTWMGDRVITTSTRTWALPTYNNHLYKQISSQSGASNDNHYFGYSTPWGYFDFNRFHCHFSPRDWQRLINNNWGFRPKRLNFKLFNIQVKEVTQNDGTTTIANNLTSTVQVFTDSEYQLPYVLGSAHQGCLPPFPADVFMVPQYGYLTLNNGSQAVGRSSFYCLEYFPSQMLRTGNNFTFSYTFEDVPFHSSYAHSQSLDRLMNPLIDQYLYYLSRTNTPSGTTTQSGLQFSQAGASDIRDQSRNWLPGPCYRQQRVSKTSADNNNSEYSWTGATKYHLNGRDSLVNPGPAMASHKDDEEKFFPQSGVLIFGKQGSEKTNVDIEKVMITDEEEIRTTNPVATEQYGSVSTNLQRGNRQAATADVNTQGVLPGMVWQDRDVYLQGPIWAKIPHTDGHFHPSPLMGGFGLKHPPPQILIKNTPVPANPSTTFSAAKFASFITQYSTGQVSVEIEWELQKENSKRWNPEIQYTSNYNKSVNVDFTVDTNGVYSEPRPIGTRYLTRNLLRP

SEQ ID NO: 5123 - protein, 736 aa, Adeno-associated virus 3; identical to SEQ ID NO: 4757

SEQ ID NO: 5124 - DNA, 4726 bp, Adeno-associated virus 3
  source 1..4726: mol_type = unassigned DNA
ttggccactccctctatgcgcactcgctcgctcggtggggcctggcgaccaaaggtcgccagacggacgtgctttgcacgtccggccccaccgagcgagcgagtgcgcatagagggagtggccaactccatcactagaggtatggcagtgacgtaacgcgaagcgcgcgaagcgagaccacgcctaccagctgcgtcagcagtcaggtgacccttttgcgacagtttgcgacaccacgtggccgctgagggtatatattctcgagtgagcgaaccaggagctccattttgaccgcgaaatttgaacgagcagcagccatgccggggttctacgagattgtcctgaaggtcccgagtgacctggacgagcgcctgccgggcatttctaactcgtttgttaactgggtggccgagaaggaatgggacgtgccgccggattctgacatggatccgaatctgattgagcaggcacccctgaccgtggccgaaaagcttcagcgcgagttcctggtggagtggcgccgcgtgagtaaggccccggaggccctcttttttgtccagttcgaaaagggggagacctacttccacctgcacgtgctgattgagaccatcggggtcaaatccatggtggtcggccgctacgtgagccagattaaagagaagctggtgacccgcatctaccgcggggtcgagccgcagcttccgaactggttcgcggtgaccaaaacgcgaaatggcgccgggggcgggaacaaggtggtggacgactgctacatccccaactacctgctccccaagacccagcccgagctccagtgggcgtggactaacatggaccagtatttaagcgcctgtttgaatctcgcggagcgtaaacggctggtggcgcagcatctgacgcacgtgtcgcagacgcaggagcagaacaaagagaatcagaaccccaattctgacgcgccggtcatcaggtcaaaaacctcagccaggtacatggagctggtcgggtggctggtggaccgcgggatcacgtcagaaaagcaatggattcaggaggaccaggcctcgtacatctccttcaacgccgcctccaactcgcggtcccagatcaaggccgcgctggacaatgcctccaagatcatgagcctgacaaagacggctccggactacctggtgggcagcaacccgccggaggacattaccaaaaatcggatctaccaaatcctggagctgaacgggtacgatccgcagtacgcggcctccgtcttcctgggctgggcgcaaaagaagttcgggaagaggaacaccatctggctctttgggccggccacgacgggtaaaaccaacatcgcggaagccatcgcccacgccgtgcccttctacggctgcgtaaactggaccaatgagaactttcccttcaacgattgcgtcgacaagatggtgatctggtgggaggagggcaagatgacggccaaggtcgtggagagcgccaaggccattctgggcggaagcaaggtgcgcgtggaccaaaagtgcaagtcatcggcccagatcgaacccactcccgtgatcgtcacctccaacaccaacatgtgcgccgtgattgacgggaacagcaccaccttcgagcatcagcagccgctgcaggaccggatgtttgaatttgaacttacccgccgtttggaccatgactttgggaaggtcaccaaacaggaagtaaaggactttttccggtgggcttccgatcacgtgactgacgtggctcatgagttctacgtcagaaagggtggagctaagaaacgccccgcctccaatgacgcggatgtaagcgagccaaaacgggagtgcacgtcacttgcgcagccgacaacgtcagacgcggaagcaccggcggactacgcggacaggtaccaaaacaaatgttctcgtcacgtgggcatgaatctgatgctttttccctgtaaaacatgcgagagaatgaatcaaatttccaatgtctgttttacgcatggtcaaagagactgtggggaatgcttccctggaatgtcagaatctcaacccgtttctgtcgtcaaaaagaagacttatcagaaactgtgtccaattcatcatatcctgggaagggcacccgagattgcctgttcggcctgcgatttggccaatgtggacttggatgactgtgtttctgagcaataaatgacttaaaccaggtatggctgctgacggttatcttccagattggctcgaggacaacctttctgaaggcattcgtgagtggtgggctctgaaacctggagtccctcaacccaaagcgaaccaacaacaccaggacaaccgtcggggtcttgtgcttccgggttacaaatacctcggacccggtaacggactcgacaaaggagagccggtcaacgaggcggacgcggcagccctcgaacacgacaaagcttacgaccagcagctcaaggccggtgacaacccgtacctcaagtacaaccacgccgacgccgagtttcaggagcgtcttcaagaagatacgtcttttgggggcaaccttggcagagcagtcttccaggccaaaaagaggatccttgagcctcttggtctggttgaggaagcagctaaaacggctcctggaaagaagggggctgtagatcagtctcctcaggaaccggactcatcatctggtgttggcaaatcgggcaaacagcctgccagaaaaagactaaatttcggtcagactggagactcagagtcagtcccagaccctcaacctctcggagaaccaccagcagcccccacaagtttgggatctaatacaatggcttcaggcggtggcgcaccaatggcagacaataacgagggtgccgatggagtgggtaattcctcaggaaattggcattgcgattcccaatggctgggcgacagagtcatcaccaccagcaccagaacctgggccctgcccacttacaacaaccatctctacaagcaaatctccagccaatcaggagcttcaaacgacaaccactactttggctacagcaccccttgggggtattttgactttaacagattccactgccacttctcaccacgtgactggcagcgactcattaacaacaactggggattccggcccaagaaactcagcttcaagctcttcaacatccaagttagaggggtcacgcagaacgatggcacgacgactattgccaataaccttaccagcacggttcaagtgtttacggactcggagtatcagctcccgtacgtgctcgggtcggcgcaccaaggctgtctcccgccgtttccagcggacgtcttcatggtccctcagtatggatacctcaccctgaacaacggaagtcaagcggtgggacgctcatccttttactgcctggagtacttcccttcgcagatgctaaggactggaaataacttccaattcagctataccttcgaggatgtaccttttcacagcagctacgctcacagccagagtttggatcgcttgatgaatcctcttattgatcagtatctgtactacctgaacagaacgcaaggaacaacctctggaacaaccaaccaatcacggctgctttttagccaggctgggcctcagtctatgtctttgcaggccagaaattggctacctgggccctgctaccggcaacagagactttcaaagactgctaacgacaacaacaacagtaactttccttggacagcggccagcaaatatcatctcaatggccgcgactcgctggtgaatccaggaccagctatggccagtcacaaggacgatgaagaaaaatttttccctatgcacggcaatctaatatttggcaaagaagggacaacggcaagtaacgcagaattagataatgtaatgattacggatgaagaagagattcgtaccaccaatcctgtggcaacagagcagtatggaactgtggcaaataacttgcagagctcaaatacagctcccacgactggaactgtcaatcatcagggggccttacctggcatggtgtggcaagatcgtgacgtgtaccttcaaggacctatctgggcaaagattcctcacacggatggacactttcatccttctcctctgatgggaggctttggactgaaacatccgcctcctcaaatcatgatcaaaaatactccggtaccggcaaatcctccgacgactttcagcccggccaagtttgcttcatttatcactcagtactccactggacaggtcagcgtggaaattgagtgggagctacagaaagaaaacagcaaacgttggaatccagagattcagtacacttccaactacaacaagtctgttaatgtggactttactgtagacactaatggtgtttatagtgaacctcgccctattggaacccggtatctcacacgaaacttgtgaatcctggttaatcaataaaccgtttaattcgtttcagttgaactttggctcttgtgcacttctttatctttatcttgtttccatggctactgcgtagataagcagcggcctgcggcgcttgcgcttcgcggtttacaactgctggttaatatttaactctcgccatacctctagtgatggagttggccactccctctatgcgcactcgctcgctcggtggggcctggcgaccaaaggtcgccagacggacgtgctttgcacgtccggccccaccgagcgagcgagtgcgcatagagggagtggccaa

SEQ ID NO: 5125 - protein, 736 aa, Adeno-associated virus 3; identical to SEQ ID NO: 4757
  source 1..736: note = Adeno-associated virus 3A

SEQ ID NO: 5126 - protein, 624 aa, Adeno-associated virus 3
  source 1..624: note = Adeno-associated virus 3A
MPGFYEIVLKVPSDLDERLPGISNSFVNWVAEKEWDVPPDSDMDPNLIEQAPLTVAEKLQREFLVEWRRVSKAPEALFFVQFEKGETYFHLHVLIETIGVKSMVVGRYVSQIKEKLVTRIYRGVEPQLPNWFAVTKTRNGAGGGNKVVDDCYIPNYLLPKTQPELQWAWTNMDQYLSACLNLAERKRLVAQHLTHVSQTQEQNKENQNPNSDAPVIRSKTSARYMELVGWLVDRGITSEKQWIQEDQASYISFNAASNSRSQIKAALDNASKIMSLTKTAPDYLVGSNPPEDITKNRIYQILELNGYDPQYAASVFLGWAQKKFGKRNTIWLFGPATTGKTNIAEAIAHAVPFYGCVNWTNENFPFNDCVDKMVIWWEEGKMTAKVVESAKAILGGSKVRVDQKCKSSAQIEPTPVIVTSNTNMCAVIDGNSTTFEHQQPLQDRMFEFELTRRLDHDFGKVTKQEVKDFFRWASDHVTDVAHEFYVRKGGAKKRPASNDADVSEPKRECTSLAQPTTSDAEAPADYADRYQNKCSRHVGMNLMLFPCKTCERMNQISNVCFTHGQRDCGECFPGMSESQPVSVVKKKTYQKLCPIHHILGRAPEIACSACDLANVDLDDCVSEQ

SEQ ID NO: 5127 - protein, 736 aa, Adeno-associated virus 3
  source 1..736: note = Adeno-associated virus 3B
MAADGYLPDWLEDNLSEGIREWWALKPGVPQPKANQQHQDNRRGLVLPGYKYLGPGNGLDKGEPVNEADAAALEHDKAYDQQLKAGDNPYLKYNHADAEFQERLQEDTSFGGNLGRAVFQAKKRILEPLGLVEEAAKTAPGKKRPVDQSPQEPDSSSGVGKSGKQPARKRLNFGQTGDSESVPDPQPLGEPPAAPTSLGSNTMASGGGAPMADNNEGADGVGNSSGNWHCDSQWLGDRVITTSTRTWALPTYNNHLYKQISSQSGASNDNHYFGYSTPWGYFDFNRFHCHFSPRDWQRLINNNWGFRPKKLSFKLFNIQVKEVTQNDGTTTIANNLTSTVQVFTDSEYQLPYVLGSAHQGCLPPFPADVFMVPQYGYLTLNNGSQAVGRSSFYCLEYFPSQMLRTGNNFQFSYTFEDVPFHSSYAHSQSLDRLMNPLIDQYLYYLNRTQGTTSGTTNQSRLLFSQAGPQSMSLQARNWLPGPCYRQQRLSKTANDNNNSNFPWTAASKYHLNGRDSLVNPGPAMASHKDDEEKFFPMHGNLIFGKEGTTASNAELDNVMITDEEEIRTTNPVATEQYGTVANNLQSSNTAPTTRTVNDQGALPGMVWQDRDVYLQGPIWAKIPHTDGHFHPSPLMGGFGLKHPPPQIMIKNTPVPANPPTTFSPAKFASFITQYSTGQVSVEIEWELQKENSKRWNPEIQYTSNYNKSVNVDFTVDTNGVYSEPRPIGTRYLTRNL

SEQ ID NO: 5128 - protein, 624 aa, Adeno-associated virus 3
  source 1..624: note = Adeno-associated virus 3B
MPGFYEIVLKVPSDLDEHLPGISNSFVNWVAEKEWELPPDSDMDPNLIEQAPLTVAEKLQREFLVEWRRVSKAPEALFFVQFEKGETYFHLHVLIETIGVKSMVVGRYVSQIKEKLVTRIYRGVEPQLPNWFAVTKTRNGAGGGNKVVDDCYIPNYLLPKTQPELQWAWTNMDQYLSACLNLAERKRLVAQHLTHVSQTQEQNKENQNPNSDAPVIRSKTSARYMELVGWLVDRGITSEKQWIQEDQASYISFNAASNSRSQIKAALDNASKIMSLTKTAPDYLVGSNPPEDITKNRIYQILELNGYDPQYAASVFLGWAQKKFGKRNTIWLFGPATTGKTNIAEAIAHAVPFYGCVNWTNENFPFNDCVDKMVIWWEEGKMTAKVVESAKAILGGSKVRVDQKCKSSAQIEPTPVIVTSNTNMCAVIDGNSTTFEHQQPLQDRMFKFELTRRLDHDFGKVTKQEVKDFFRWASDHVTDVAHEFYVRKGGAKKRPASNDADVSEPKRQCTSLAQPTTSDAEAPADYADRYQNKCSRHVGMNLMLFPCKTCERMNQISNVCFTHGQRDCGECFPGMSESQPVSVVKKKTYQKLCPIHHILGRAPEIACSACDLANVDLDDCVSEQ

SEQ ID NO: 5129 - DNA, 4722 bp, Adeno-associated virus 3
  source 1..4722: mol_type = unassigned DNA; note = Adeno-associated virus 3B
tggccactccctctatgcgcactcgctcgctcggtggggcctggcgaccaaaggtcgccagacggacgtgctttgcacgtccggccccaccgagcgagcgagtgcgcatagagggagtggccaactccatcactagaggtatggcagtgacgtaacgcgaagcgcgcgaagcgagaccacgcctaccagctgcgtcagcagtcaggtgacccttttgcgacagtttgcgacaccacgtggccgctgagggtatatattctcgagtgagcgaaccaggagctccattttgaccgcgaaatttgaacgagcagcagccatgccggggttctacgagattgtcctgaaggtcccgagtgacctggacgagcacctgccgggcatttctaactcgtttgttaactgggtggccgagaaggaatgggagctgccgccggattctgacatggatccgaatctgattgagcaggcacccctgaccgtggccgaaaagcttcagcgcgagttcctggtggagtggcgccgcgtgagtaaggccccggaggccctcttttttgtccagttcgaaaagggggagacctacttccacctgcacgtgctgattgagaccatcggggtcaaatccatggtggtcggccgctacgtgagccagattaaagagaagctggtgacccgcatctaccgcggggtcgagccgcagcttccgaactggttcgcggtgaccaaaacgcgaaatggcgccgggggcgggaacaaggtggtggacgactgctacatccccaactacctgctccccaagacccagcccgagctccagtgggcgtggactaacatggaccagtatttaagcgcctgtttgaatctcgcggagcgtaaacggctggtggcgcagcatctgacgcacgtgtcgcagacgcaggagcagaacaaagagaatcagaaccccaattctgacgcgccggtcatcaggtcaaaaacctcagccaggtacatggagctggtcgggtggctggtggaccgcgggatcacgtcagaaaagcaatggattcaggaggaccaggcctcgtacatctccttcaacgccgcctccaactcgcggtcccagatcaaggccgcgctggacaatgcctccaagatcatgagcctgacaaagacggctccggactacctggtgggcagcaacccgccggaggacattaccaaaaatcggatctaccaaatcctggagctgaacgggtacgatccgcagtacgcggcctccgtcttcctgggctgggcgcaaaagaagttcgggaagaggaacaccatctggctctttgggccggccacgacgggtaaaaccaacatcgcggaagccatcgcccacgccgtgcccttctacggctgcgtaaactggaccaatgagaactttcccttcaacgattgcgtcgacaagatggtgatctggtgggaggagggcaagatgacggccaaggtcgtggagagcgccaaggccattctgggcggaagcaaggtgcgcgtggaccaaaagtgcaagtcatcggcccagatcgaacccactcccgtgatcgtcacctccaacaccaacatgtgcgccgtgattgacgggaacagcaccaccttcgagcatcagcagccgctgcaggaccggatgtttaaatttgaacttacccgccgtttggaccatgactttgggaaggtcaccaaacaggaagtaaaggactttttccggtgggcttccgatcacgtgactgacgtggctcatgagttctacgtcagaaagggtggagctaagaaacgccccgcctccaatgacgcggatgtaagcgagccaaaacggcagtgcacgtcacttgcgcagccgacaacgtcagacgcggaagcaccggcggactacgcggacaggtaccaaaacaaatgttctcgtcacgtgggcatgaatctgatgctttttccctgtaaaacatgcgagagaatgaatcaaatttccaatgtctgttttacgcatggtcaaagagactgtggggaatgcttccctggaatgtcagaatctcaacccgtttctgtcgtcaaaaagaagacttatcagaaactgtgtccaattcatcatatcctgggaagggcacccgagattgcctgttcggcctgcgatttggccaatgtggacttggatgactgtgtttctgagcaataaatgacttaaaccaggtatggctgctgacggttatcttccagattggctcgaggacaacctttctgaaggcattcgtgagtggtgggctctgaaacctggagtccctcaacccaaagcgaaccaacaacaccaggacaaccgtcggggtcttgtgcttccgggttacaaatacctcggacccggtaacggactcgacaaaggagagccggtcaacgaggcggacgcggcagccctcgaacacgacaaagcttacgaccagcagctcaaggccggtgacaacccgtacctcaagtacaaccacgccgacgccgagtttcaggagcgtcttcaagaagatacgtcttttgggggcaaccttggcagagcagtcttccaggccaaaaagaggatccttgagcctcttggtctggttgaggaagcagctaaaacggctcctggaaagaagaggcctgtagatcagtctcctcaggaaccggactcatcatctggtgttggcaaatcgggcaaacagcctgccagaaaaagactaaatttcggtcagactggcgactcagagtcagtcccagaccctcaacctctcggagaaccaccagcagcccccacaagtttgggatctaatacaatggcttcaggcggtggcgcaccaatggcagacaataacgagggtgccgatggagtgggtaattcctcaggaaattggcattgcgattcccaatggctgggcgacagagtcatcaccaccagcaccagaacctgggccctgcccacttacaacaaccatctctacaagcaaatctccagccaatcaggagcttcaaacgacaaccactactttggctacagcaccccttgggggtattttgactttaacagattccactgccacttctcaccacgtgactggcagcgactcattaacaacaactggggattccggcccaagaaactcagcttcaagctcttcaacatccaagttaaagaggtcacgcagaacgatggcacgacgactattgccaataaccttaccagcacggttcaagtgtttacggactcggagtatcagctcccgtacgtgctcgggtcggcgcaccaaggctgtctcccgccgtttccagcggacgtcttcatggtccctcagtatggatacctcaccctgaacaacggaagtcaagcggtgggacgctcatccttttactgcctggagtacttcccttcgcagatgctaaggactggaaataacttccaattcagctataccttcgaggatgtaccttttcacagcagctacgctcacagccagagtttggatcgcttgatgaatcctcttattgatcagtatctgtactacctgaacagaacgcaaggaacaacctctggaacaaccaaccaatcacggctgctttttagccaggctgggcctcagtctatgtctttgcaggccagaaattggctacctgggccctgctaccggcaacagagactttcaaagactgctaacgacaacaacaacagtaactttccttggacagcggccagcaaatatcatctcaatggccgcgactcgctggtgaatccaggaccagctatggccagtcacaaggacgatgaagaaaaatttttccctatgcacggcaatctaatatttggcaaagaagggacaacggcaagtaacgcagaattagataatgtaatgattacggatgaagaagagattcgtaccaccaatcctgtggcaacagagcagtatggaactgtggcaaataacttgcagagctcaaatacagctcccacgactagaactgtcaatgatcagggggccttacctggcatggtgtggcaagatcgtgacgtgtaccttcaaggacctatctgggcaaagattcctcacacggatggacactttcatccttctcctctgatgggaggctttggactgaaacatccgcctcctcaaatcatgatcaaaaatactccggtaccggcaaatcctccgacgactttcagcccggccaagtttgcttcatttatcactcagtactccactggacaggtcagcgtggaaattgagtgggagctacagaaagaaaacagcaaacgttggaatccagagattcagtacacttccaactacaacaagtctgttaatgtggactttactgtagacactaatggtgtttatagtgaacctcgccctattggaacccggtatctcacacgaaacttgtaatcctggttaatcaataaaccgtttaattcgtttcagttgaactttggctcttgtgcacttcttatcttatcttgtttccatggctactgcgtagataagcagcggcctgcggcgcttgcgcttcgcggtttacaactgctggttaatatttaactctcgccatacctctagtgatggagttggccactccctctatgcgcactcgctcgctcggtggggccggacgtgcaaagcacgtccgtctggcgacctttggtcgccaggccccaccgagcgagcgagtgcgcatagagggagtggccaa

SEQ ID NO: 5130 - DNA, 1800 bp, Adeno-associated virus 4
  misc_difference 342: note = modified_base - a, c, t or g
  source 1..1800: mol_type = unassigned DNA
acggctcctggaaagaagagaccgttgattgaatccccccagcagcccgactcctccacgggtatcggcaaaaaaggcaagcagccggctaaaaagaagctcgttttcgaagacgaaactggagcaggcgacggaccccctgagggatcaacttccggagccatgtctgatgacagtgagatgcgtgcagcagctggcggagctgcagtcgagggsggacaaggtgccgatggagtgggtaatgcctcgggtgattggcattgcgattccacctggtctgagggccacgtcacgaccaccagcaccagaacctgggtcttgcccacctacaacaaccacctntacaagcgactcggagagagcctgcagtccaacacctacaacggattctccaccccctggggatactttgacttcaaccgcttccactgccacttctcaccacgtgactggcagcgactcatcaacaacaactggggcatgcgacccaaagccatgcgggtcaaaatcttcaacatccaggtcaaggaggtcacgacgtcgaacggcgagacaacggtggctaataaccttaccagcacggttcagatctttgcggactcgtcgtacgaactgccgtacgtgatggatgcgggtcaagagggcagcctgcctccttttcccaacgacgtctttatggtgccccagtacggctactgtggactggtgaccggcaacacttcgcagcaacagactgacagaaatgccttctactgcctggagtactttccttcgcagatgctgcggactggcaacaactttgaaattacgtacagttttgagaaggtgcctttccactcgatgtacgcgcacagccagagcctggaccggctgatgaaccctctcatcgaccagtacctgtggggactgcaatcgaccaccaccggaaccaccctgaatgccgggactgccaccaccaactttaccaagctgcggcctaccaacttttccaactttaaaaagaactggctgcccgggccttcaatcaagcagcagggcttctcaaagactgccaatcaaaactacaagatccctgccaccgggtcagacagtctcatcaaatacgagacgcacagcactctggacggaagatggagtgccctgacccccggacctccaatggccacggctggacctgcggacagcaagttcagcaacagccagctcatctttgcggggcctaaacagaacggcaacacggccaccgtacccgggactctgatcttcacctctgaggaggagctggcagccaccaacgccaccgatacggacatgtggggcaacctacctggcggtgaccagagcaacagcaacctgccgaccgtggacagactgacagccttgggagccgtgcctggaatggtctggcaaaacagagacatttactaccagggtcccatttgggccaagattcctcataccgatggacactttcacccctcaccgctgattggtgggtttgggctgaaacacccgcctcctcaaatttttatcaagaacaccccggtacctgcgaatcctgcaacgaccttcagctctactccggtaaactccttcattactcagtacagcactggccaggtgtcggtgcagattgactgggagatccagaaggagcggtccaaacgctggaaccccgaggtccagtttacctccaactacggacagcaaaactctctgttgtgggctcccgatgcggctgggaaatacactgagcctagggctatcggtacccgctacctcacccaccacctgtaataa

SEQ ID NO: 5131 - DNA, 2208 bp, Adeno-associated virus 4
  misc_difference 750: note = modified_base - a, c, t or g
  source 1..2208: mol_type = unassigned DNA
atgactgacggttaccttccagattggctagaggacaacctctctgaaggcgttcgagagtggtgggcgctgcaacctggagcccctaaacccaaggcaaatcaacaacatcaggacaacgctcggggtcttgtgcttccgggttacaaatacctcggacccggcaacggactcgacaagggggaacccgtcaacgcagcggacgcggcagccctcgagcacgacaaggcctacgaccagcagctcaaggccggtgacaacccctacctcaagtacaaccacgccgacgcggagttccagcagcggcttcagggcgacacatcgtttgggggcaacctcggcagagcagtcttccaggccaaaaagagggttcttgaacctcttggtctggttgagcaagcgggtgagacggctcctggaaagaagagaccgttgattgaatccccccagcagcccgactcctccacgggtatcggcaaaaaaggcaagcagccggctaaaaagaagctcgttttcgaagacgaaactggagcaggcgacggaccccctgagggatcaacttccggagccatgtctgatgacagtgagatgcgtgcagcagctggcggagctgcagtcgagggsggacaaggtgccgatggagtgggtaatgcctcgggtgattggcattgcgattccacctggtctgagggccacgtcacgaccaccagcaccagaacctgggtcttgcccacctacaacaaccacctntacaagcgactcggagagagcctgcagtccaacacctacaacggattctccaccccctggggatactttgacttcaaccgcttccactgccacttctcaccacgtgactggcagcgactcatcaacaacaactggggcatgcgacccaaagccatgcgggtcaaaatcttcaacatccaggtcaaggaggtcacgacgtcgaacggcgagacaacggtggctaataaccttaccagcacggttcagatctttgcggactcgtcgtacgaactgccgtacgtgatggatgcgggtcaagagggcagcctgcctccttttcccaacgacgtctttatggtgccccagtacggctactgtggactggtgaccggcaacacttcgcagcaacagactgacagaaatgccttctactgcctggagtactttccttcgcagatgctgcggactggcaacaactttgaaattacgtacagttttgagaaggtgcctttccactcgatgtacgcgcacagccagagcctggaccggctgatgaaccctctcatcgaccagtacctgtggggactgcaatcgaccaccaccggaaccaccctgaatgccgggactgccaccaccaactttaccaagctgcggcctaccaacttttccaactttaaaaagaactggctgcccgggccttcaatcaagcagcagggcttctcaaagactgccaatcaaaactacaagatccctgccaccgggtcagacagtctcatcaaatacgagacgcacagcactctggacggaagatggagtgccctgacccccggacctccaatggccacggctggacctgcggacagcaagttcagcaacagccagctcatctttgcggggcctaaacagaacggcaacacggccaccgtacccgggactctgatcttcacctctgaggaggagctggcagccaccaacgccaccgatacggacatgtggggcaacctacctggcggtgaccagagcaacagcaacctgccgaccgtggacagactgacagccttgggagccgtgcctggaatggtctggcaaaacagagacatttactaccagggtcccatttgggccaagattcctcataccgatggacactttcacccctcaccgctgattggtgggtttgggctgaaacacccgcctcctcaaatttttatcaagaacaccccggtacctgcgaatcctgcaacgaccttcagctctactccggtaaactccttcattactcagtacagcactggccaggtgtcggtgcagattgactgggagatccagaaggagcggtccaaacgctggaaccccgaggtccagtttacctccaactacggacagcaaaactctctgttgtgggctcccgatgcggctgggaaatacactgagcctagggctatcggtacccgctacctcacccaccacctgtaataa

SEQ ID NO: 5132 - DNA, 1872 bp, Adeno-associated virus 4
  source 1..1872: mol_type = unassigned DNA
atgccggggttctacgagatcgtgctgaaggtgcccagcgacctggacgagcacctgcccggcatttctgactcttttgtgagctgggtggccgagaaggaatgggagctgccgccggattctgacatggacttgaatctgattgagcaggcacccctgaccgtggccgaaaagctgcaacgcgagttcctggtcgagtggcgccgcgtgagtaaggccccggaggccctcttctttgtccagttcgagaagggggacagctacttccacctgcacatcctggtggagaccgtgggcgtcaaatccatggtggtgggccgctacgtgagccagattaaagagaagctggtgacccgcatctaccgcggggtcgagccgcagcttccgaactggttcgcggtgaccaagacgcgtaatggcgccggaggcgggaacaaggtggtggacgactgctacatccccaactacctgctccccaagacccagcccgagctccagtgggcgtggactaacatggaccagtatataagcgcctgtttgaatctcgcggagcgtaaacggctggtggcgcagcatctgacgcacgtgtcgcagacgcaggagcagaacaaggaaaaccagaaccccaattctgacgcgccggtcatcaggtcaaaaacctccgccaggtacatggagctggtcgggtggctggtggaccgcgggatcacgtcagaaaagcaatggatccaggaggaccaggcgtcctacatctccttcaacgccgcctccaactcgcggtcacaaatcaaggccgcgctggacaatgcctccaaaatcatgagcctgacaaagacggctccggactacctggtgggccagaacccgccggaggacatttccagcaaccgcatctaccgaatcctcgagatgaacgggtacgatccgcagtacgcggcctccgtcttcctgggctgggcgcaaaagaagttcgggaagaggaacaccatctggctctttgggccggccacgacgggtaaaaccaacatcgcggaagccatcgcccacgccgtgcccttctacggctgcgtgaactggaccaatgagaactttccgttcaacgattgcgtcgacaagatggtgatctggtgggaggagggcaagatgacggccaaggtcgtagagagcgccaaggccatcctgggcggaagcaaggtgcgcgtggaccaaaagtgcaagtcatcggcccagatcgacccaactcccgtgatcgtcacctccaacaccaacatgtgcgcggtcatcgacggaaactcgaccaccttcgagcaccaacaaccactccaggaccggatgttcaagttcgagctcaccaagcgcctggagcacgactttggcaaggtcaccaagcaggaagtcaaagactttttccggtgggcgtcagatcacgtgaccgaggtgactcacgagttttacgtcagaaagggtggagctagaaagaggcccgcccccaatgacgcagatataagtgagcccaagcgggcctgtccgtcagttgcgcagccatcgacgtcagacgcggaagctccggtggactacgcggacaggtaccaaaacaaatgttctcgtcacgtgggtatgaatctgatgctttttccctgccggcaatgcgagagaatgaatcagaatgtggacatttgcttcacgcacggggtcatggactgtgccgagtgcttccccgtgtcagaatctcaacccgtgtctgtcgtcagaaagcggacgtatcagaaactgtgtccgattcatcacatcatggggagggcgcccgaggtggcctgctcggcctgcgaactggccaatgtggacttggatgactgtgacatggaacaataa

SEQ ID NO: 5133 - DNA, 1611 bp, Adeno-associated virus 4
  source 1..1611: mol_type = unassigned DNA
atgccggggttctacgagatcgtgctgaaggtgcccagcgacctggacgagcacctgcccggcatttctgactcttttgtgagctgggtggccgagaaggaatgggagctgccgccggattctgacatggacttgaatctgattgagcaggcacccctgaccgtggccgaaaagctgcaacgcgagttcctggtcgagtggcgccgcgtgagtaaggccccggaggccctcttctttgtccagttcgagaagggggacagctacttccacctgcacatcctggtggagaccgtgggcgtcaaatccatggtggtgggccgctacgtgagccagattaaagagaagctggtgacccgcatctaccgcggggtcgagccgcagcttccgaactggttcgcggtgaccaagacgcgtaatggcgccggaggcgggaacaaggtggtggacgactgctacatccccaactacctgctccccaagacccagcccgagctccagtgggcgtggactaacatggaccagtatataagcgcctgtttgaatctcgcggagcgtaaacggctggtggcgcagcatctgacgcacgtgtcgcagacgcaggagcagaacaaggaaaaccagaaccccaattctgacgcgccggtcatcaggtcaaaaacctccgccaggtacatggagctggtcgggtggctggtggaccgcgggatcacgtcagaaaagcaatggatccaggaggaccaggcgtcctacatctccttcaacgccgcctccaactcgcggtcacaaatcaaggccgcgctggacaatgcctccaaaatcatgagcctgacaaagacggctccggactacctggtgggccagaacccgccggaggacatttccagcaaccgcatctaccgaatcctcgagatgaacgggtacgatccgcagtacgcggcctccgtcttcctgggctgggcgcaaaagaagttcgggaagaggaacaccatctggctctttgggccggccacgacgggtaaaaccaacatcgcggaagccatcgcccacgccgtgcccttctacggctgcgtgaactggaccaatgagaactttccgttcaacgattgcgtcgacaagatggtgatctggtgggaggagggcaagatgacggccaaggtcgtagagagcgccaaggccatcctgggcggaagcaaggtgcgcgtggaccaaaagtgcaagtcatcggcccagatcgacccaactcccgtgatcgtcacctccaacaccaacatgtgcgcggtcatcgacggaaactcgaccaccttcgagcaccaacaaccactccaggaccggatgttcaagttcgagctcaccaagcgcctggagcacgactttggcaaggtcaccaagcaggaagtcaaagactttttccggtgggcgtcagatcacgtgaccgaggtgactcacgagttttacgtcagaaagggtggagctagaaagaggcccgcccccaatgacgcagatataagtgagcccaagcgggcctgtccgtcagttgcgcagccatcgacgtcagacgcggaagctccggtggactacgcggacagattggctagaggacaacctctctga

SEQ ID NO: 5134 - DNA, 1872 bp, Adeno-associated virus 4; identical to SEQ ID NO: 5132
  source 1..1872: mol_type = unassigned DNA

SEQ ID NO: 5135 - DNA, 1617 bp, Adeno-associated virus 4
  misc_difference 162: note = modified_base - a, c, t or g
  source 1..1617: mol_type = unassigned DNA
atgcgtgcagcagctggcggagctgcagtcgagggsggacaaggtgccgatggagtgggtaatgcctcgggtgattggcattgcgattccacctggtctgagggccacgtcacgaccaccagcaccagaacctgggtcttgcccacctacaacaaccacctntacaagcgactcggagagagcctgcagtccaacacctacaacggattctccaccccctggggatactttgacttcaaccgcttccactgccacttctcaccacgtgactggcagcgactcatcaacaacaactggggcatgcgacccaaagccatgcgggtcaaaatcttcaacatccaggtcaaggaggtcacgacgtcgaacggcgagacaacggtggctaataaccttaccagcacggttcagatctttgcggactcgtcgtacgaactgccgtacgtgatggatgcgggtcaagagggcagcctgcctccttttcccaacgacgtctttatggtgccccagtacggctactgtggactggtgaccggcaacacttcgcagcaacagactgacagaaatgccttctactgcctggagtactttccttcgcagatgctgcggactggcaacaactttgaaattacgtacagttttgagaaggtgcctttccactcgatgtacgcgcacagccagagcctggaccggctgatgaaccctctcatcgaccagtacctgtggggactgcaatcgaccaccaccggaaccaccctgaatgccgggactgccaccaccaactttaccaagctgcggcctaccaacttttccaactttaaaaagaactggctgcccgggccttcaatcaagcagcagggcttctcaaagactgccaatcaaaactacaagatccctgccaccgggtcagacagtctcatcaaatacgagacgcacagcactctggacggaagatggagtgccctgacccccggacctccaatggccacggctggacctgcggacagcaagttcagcaacagccagctcatctttgcggggcctaaacagaacggcaacacggccaccgtacccgggactctgatcttcacctctgaggaggagctggcagccaccaacgccaccgatacggacatgtggggcaacctacctggcggtgaccagagcaacagcaacctgccgaccgtggacagactgacagccttgggagccgtgcctggaatggtctggcaaaacagagacatttactaccagggtcccatttgggccaagattcctcataccgatggacactttcacccctcaccgctgattggtgggtttgggctgaaacacccgcctcctcaaatttttatcaagaacaccccggtacctgcgaatcctgcaacgaccttcagctctactccggtaaactccttcattactcagtacagcactggccaggtgtcggtgcagattgactgggagatccagaaggagcggtccaaacgctggaaccccgaggtccagtttacctccaactacggacagcaaaactctctgttgtgggctcccgatgcggctgggaaatacactgagcctagggctatcggtacccgctacctcacccaccacctgtaa

SEQ ID NO: 5136 - DNA, 939 bp, Adeno-associated virus 4
  source 1..939: mol_type = unassigned DNA
atggagctggtcgggtggctggtggaccgcgggatcacgtcagaaaagcaatggatccaggaggaccaggcgtcctacatctccttcaacgccgcctccaactcgcggtcacaaatcaaggccgcgctggacaatgcctccaaaatcatgagcctgacaaagacggctccggactacctggtgggccagaacccgccggaggacatttccagcaaccgcatctaccgaatcctcgagatgaacgggtacgatccgcagtacgcggcctccgtcttcctgggctgggcgcaaaagaagttcgggaagaggaacaccatctggctctttgggccggccacgacgggtaaaaccaacatcgcggaagccatcgcccacgccgtgcccttctacggctgcgtgaactggaccaatgagaactttccgttcaacgattgcgtcgacaagatggtgatctggtgggaggagggcaagatgacggccaaggtcgtagagagcgccaaggccatcctgggcggaagcaaggtgcgcgtggaccaaaagtgcaagtcatcggcccagatcgacccaactcccgtgatcgtcacctccaacaccaacatgtgcgcggtcatcgacggaaactcgaccaccttcgagcaccaacaaccactccaggaccggatgttcaagttcgagctcaccaagcgcctggagcacgactttggcaaggtcaccaagcaggaagtcaaagactttttccggtgggcgtcagatcacgtgaccgaggtgactcacgagttttacgtcagaaagggtggagctagaaagaggcccgcccccaatgacgcagatataagtgagcccaagcgggcctgtccgtcagttgcgcagccatcgacgtcagacgcggaagctccggtggactacgcggacagattggctagaggacaacctctctga

SEQ ID NO: 5137 - DNA, 1197 bp, Adeno-associated virus 4
  source 1..1197: mol_type = unassigned DNA
atggagctggtcgggtggctggtggaccgcgggatcacgtcagaaaagcaatggatccaggaggaccaggcgtcctacatctccttcaacgccgcctccaactcgcggtcacaaatcaaggccgcgctggacaatgcctccaaaatcatgagcctgacaaagacggctccggactacctggtgggccagaacccgccggaggacatttccagcaaccgcatctaccgaatcctcgagatgaacgggtacgatccgcagtacgcggcctccgtcttcctgggctgggcgcaaaagaagttcgggaagaggaacaccatctggctctttgggccggccacgacgggtaaaaccaacatcgcggaagccatcgcccacgccgtgcccttctacggctgcgtgaactggaccaatgagaactttccgttcaacgattgcgtcgacaagatggtgatctggtgggaggagggcaagatgacggccaaggtcgtagagagcgccaaggccatcctgggcggaagcaaggtgcgcgtggaccaaaagtgcaagtcatcggcccagatcgacccaactcccgtgatcgtcacctccaacaccaacatgtgcgcggtcatcgacggaaactcgaccaccttcgagcaccaacaaccactccaggaccggatgttcaagttcgagctcaccaagcgcctggagcacgactttggcaaggtcaccaagcaggaagtcaaagactttttccggtgggcgtcagatcacgtgaccgaggtgactcacgagttttacgtcagaaagggtggagctagaaagaggcccgcccccaatgacgcagatataagtgagcccaagcgggcctgtccgtcagttgcgcagccatcgacgtcagacgcggaagctccggtggactacgcggacaggtaccaaaacaaatgttctcgtcacgtgggtatgaatctgatgctttttccctgccggcaatgcgagagaatgaatcagaatgtggacatttgcttcacgcacggggtcatggactgtgccgagtgcttccccgtgtcagaatctcaacccgtgtctgtcgtcagaaagcggacgtatcagaaactgtgtccgattcatcacatcatggggagggcgcccgaggtggcctgctcggcctgcgaactggccaatgtggacttggatgactgtgacatggaacaa

SEQ ID NO: 5138 - DNA, 245 bp, Adeno-associated virus 4
  source 1..245: mol_type = unassigned DNA
ctccatcatctaggtttgcccactgacgtcaatgtgacgtcctagggttagggaggtccctgtattagcagtcacgtgagtgtcgtatttcgcggagcgtagcggagcgcataccaagctgccacgtcacagccacgtggtccgtttgcgacagtttgcgacaccatgtggtcaggagggtatataaccgcgagtgagccagcgaggagctccattttgcccgcgaattttgaacgagcagcagc

SEQ ID NO: 5139 - protein, 313 aa, Adeno-associated virus 4
  VARIANT 313: note = MOD_RES - Any amino acid
MELVGWLVDRGITSEKQWIQEDQASYISFNAASNSRSQIKAALDNASKIMSLTKTAPDYLVGQNPPEDISSNRIYRILEMNGYDPQYAASVFLGWAQKKFGKRNTIWLFGPATTGKTNIAEAIAHAVPFYGCVNWTNENFPFNDCVDKMVIWWEEGKMTAKVVESAKAILGGSKVRVDQKCKSSAQIDPTPVIVTSNTNMCAVIDGNSTTFEHQQPLQDRMFKFELTKRLEHDFGKVTKQEVKDFFRWASDHVTEVTHEFYVRKGGARKRPAPNDADISEPKRACPSVAQPSTSDAEAPVDYADRLARGQPLX

SEQ ID NO: 5140 - protein, 399 aa, Adeno-associated virus 4
MELVGWLVDRGITSEKQWIQEDQASYISFNAASNSRSQIKAALDNASKIMSLTKTAPDYLVGQNPPEDISSNRIYRILEMNGYDPQYAASVFLGWAQKKFGKRNTIWLFGPATTGKTNIAEAIAHAVPFYGCVNWTNENFPFNDCVDKMVIWWEEGKMTAKVVESAKAILGGSKVRVDQKCKSSAQIDPTPVIVTSNTNMCAVIDGNSTTFEHQQPLQDRMFKFELTKRLEHDFGKVTKQEVKDFFRWASDHVTEVTHEFYVRKGGARKRPAPNDADISEPKRACPSVAQPSTSDAEAPVDYADRYQNKCSRHVGMNLMLFPCRQCERMNQNVDICFTHGVMDCAECFPVSESQPVSVVRKRTYQKLCPIHHIMGRAPEVACSACELANVDLDDCDMEQ

SEQ ID NO: 5141 - protein, 623 aa, Adeno-associated virus 4
MPGFYEIVLKVPSDLDEHLPGISDSFVSWVAEKEWELPPDSDMDLNLIEQAPLTVAEKLQREFLVEWRRVSKAPEALFFVQFEKGDSYFHLHILVETVGVKSMVVGRYVSQIKEKLVTRIYRGVEPQLPNWFAVTKTRNGAGGGNKVVDDCYIPNYLLPKTQPELQWAWTNMDQYISACLNLAERKRLVAQHLTHVSQTQEQNKENQNPNSDAPVIRSKTSARYMELVGWLVDRGITSEKQWIQEDQASYISFNAASNSRSQIKAALDNASKIMSLTKTAPDYLVGQNPPEDISSNRIYRILEMNGYDPQYAASVFLGWAQKKFGKRNTIWLFGPATTGKTNIAEAIAHAVPFYGCVNWTNENFPFNDCVDKMVIWWEEGKMTAKVVESAKAILGGSKVRVDQKCKSSAQIDPTPVIVTSNTNMCAVIDGNSTTFEHQQPLQDRMFKFELTKRLEHDFGKVTKQEVKDFFRWASDHVTEVTHEFYVRKGGARKRPAPNDADISEPKRACPSVAQPSTSDAEAPVDYADRYQNKCSRHVGMNLMLFPCRQCERMNQNVDICFTHGVMDCAECFPVSESQPVSVVRKRTYQKLCPIHHIMGRAPEVACSACELANVDLDDCDMEQ

SEQ ID NO: 5142 - protein, 537 aa, Adeno-associated virus 4
  VARIANT 537: note = MOD_RES - Any amino acid
MPGFYEIVLKVPSDLDEHLPGISDSFVSWVAEKEWELPPDSDMDLNLIEQAPLTVAEKLQREFLVEWRRVSKAPEALFFVQFEKGDSYFHLHILVETVGVKSMVVGRYVSQIKEKLVTRIYRGVEPQLPNWFAVTKTRNGAGGGNKVVDDCYIPNYLLPKTQPELQWAWTNMDQYISACLNLAERKRLVAQHLTHVSQTQEQNKENQNPNSDAPVIRSKTSARYMELVGWLVDRGITSEKQWIQEDQASYISFNAASNSRSQIKAALDNASKIMSLTKTAPDYLVGQNPPEDISSNRIYRILEMNGYDPQYAASVFLGWAQKKFGKRNTIWLFGPATTGKTNIAEAIAHAVPFYGCVNWTNENFPFNDCVDKMVIWWEEGKMTAKVVESAKAILGGSKVRVDQKCKSSAQIDPTPVIVTSNTNMCAVIDGNSTTFEHQQPLQDRMFKFELTKRLEHDFGKVTKQEVKDFFRWASDHVTEVTHEFYVRKGGARKRPAPNDADISEPKRACPSVAQPSTSDAEAPVDYADRLARGQPLX

SEQ ID NO: 5143 - protein, 623 aa, Adeno-associated virus 4; identical to SEQ ID NO: 5141

SEQ ID NO: 5144 - protein, 544 aa, Adeno-associated virus 4
MSDDSEMRAAAGGAAVEGGQGADGVGNASGDWHCDSTWSEGHVTTTSTRTWVLPTYNNHLYKRLGESLQSNTYNGFSTPWGYFDFNRFHCHFSPRDWQRLINNNWGMRPKAMRVKIFNIQVKEVTTSNGETTVANNLTSTVQIFADSSYELPYVMDAGQEGSLPPFPNDVFMVPQYGYCGLVTGNTSQQQTDRNAFYCLEYFPSQMLRTGNNFEITYSFEKVPFHSMYAHSQSLDRLMNPLIDQYLWGLQSTTTGTTLNAGTATTNFTKLRPTNFSNFKKNWLPGPSIKQQGFSKTANQNYKIPATGSDSLIKYETHSTLDGRWSALTPGPPMATAGPADSKFSNSQLIFAGPKQNGNTATVPGTLIFTSEEELAATNATDTDMWGNLPGGDQSNSNLPTVDRLTALGAVPGMVWQNRDIYYQGPIWAKIPHTDGHFHPSPLIGGFGLKHPPPQIFIKNTPVPANPATTFSSTPVNSFITQYSTGQVSVQIDWEIQKERSKRWNPEVQFTSNYGQQNSLLWAPDAAGKYTEPRAIGTRYLTHHL

SEQ ID NO: 5145 - protein, 734 aa, Adeno-associated virus 4; identical to SEQ ID NO: 4791

SEQ ID NO: 5146 - protein, 598 aa, Adeno-associated virus 4
TAPGKKRPLIESPQQPDSSTGIGKKGKQPAKKKLVFEDETGAGDGPPEGSTSGAMSDDSEMRAAAGGAAVEGGQGADGVGNASGDWHCDSTWSEGHVTTTSTRTWVLPTYNNHLYKRLGESLQSNTYNGFSTPWGYFDFNRFHCHFSPRDWQRLINNNWGMRPKAMRVKIFNIQVKEVTTSNGETTVANNLTSTVQIFADSSYELPYVMDAGQEGSLPPFPNDVFMVPQYGYCGLVTGNTSQQQTDRNAFYCLEYFPSQMLRTGNNFEITYSFEKVPFHSMYAHSQSLDRLMNPLIDQYLWGLQSTTTGTTLNAGTATTNFTKLRPTNFSNFKKNWLPGPSIKQQGFSKTANQNYKIPATGSDSLIKYETHSTLDGRWSALTPGPPMATAGPADSKFSNSQLIFAGPKQNGNTATVPGTLIFTSEEELAATNATDTDMWGNLPGGDQSNSNLPTVDRLTALGAVPGMVWQNRDIYYQGPIWAKIPHTDGHFHPSPLIGGFGLKHPPPQIFIKNTPVPANPATTFSSTPVNSFITQYSTGQVSVQIDWEIQKERSKRWNPEVQFTSNYGQQNSLLWAPDAAGKYTEPRAIGTRYLTHHL

SEQ ID NO: 5147 - DNA, 129 bp, Adeno-associated virus 4
  source 1..129: mol_type = unassigned DNA
ttggccactccctctatgcgcgctcgctcactcactcggccctgcggccagaggccggcagtctggagacctttggtgtccagggcagggccgagtgagtgagcgagcgcgcatagagggagtggccaa

SEQ ID NO: 5148 - DNA, 125 bp, Adeno-associated virus 4
  source 1..125: mol_type = unassigned DNA
ttggccactccctctatgcgcgctcgctcactcactcggccctggagaccaaaggtctccagactgccggcctctggccggcagggccgagtgagtgagcgagcgcgcatagagggagtggccaa

SEQ ID NO: 5149 - DNA, 4768 bp, Adeno-associated virus 4
  misc_difference 3009: note = modified_base - a, c, t or g
  source 1..4768: mol_type = unassigned DNA
ttggccactccctctatgcgcgctcgctcactcactcggccctggagaccaaaggtctccagactgccggcctctggccggcagggccgagtgagtgagcgagcgcgcatagagggagtggccaactccatcatctaggtttgcccactgacgtcaatgtgacgtcctagggttagggaggtccctgtattagcagtcacgtgagtgtcgtatttcgcggagcgtagcggagcgcataccaagctgccacgtcacagccacgtggtccgtttgcgacagtttgcgacaccatgtggtcaggagggtatataaccgcgagtgagccagcgaggagctccattttgcccgcgaattttgaacgagcagcagccatgccggggttctacgagatcgtgctgaaggtgcccagcgacctggacgagcacctgcccggcatttctgactcttttgtgagctgggtggccgagaaggaatgggagctgccgccggattctgacatggacttgaatctgattgagcaggcacccctgaccgtggccgaaaagctgcaacgcgagttcctggtcgagtggcgccgcgtgagtaaggccccggaggccctcttctttgtccagttcgagaagggggacagctacttccacctgcacatcctggtggagaccgtgggcgtcaaatccatggtggtgggccgctacgtgagccagattaaagagaagctggtgacccgcatctaccgcggggtcgagccgcagcttccgaactggttcgcggtgaccaagacgcgtaatggcgccggaggcgggaacaaggtggtggacgactgctacatccccaactacctgctccccaagacccagcccgagctccagtgggcgtggactaacatggaccagtatataagcgcctgtttgaatctcgcggagcgtaaacggctggtggcgcagcatctgacgcacgtgtcgcagacgcaggagcagaacaaggaaaaccagaaccccaattctgacgcgccggtcatcaggtcaaaaacctccgccaggtacatggagctggtcgggtggctggtggaccgcgggatcacgtcagaaaagcaatggatccaggaggaccaggcgtcctacatctccttcaacgccgcctccaactcgcggtcacaaatcaaggccgcgctggacaatgcctccaaaatcatgagcctgacaaagacggctccggactacctggtgggccagaacccgccggaggacatttccagcaaccgcatctaccgaatcctcgagatgaacgggtacgatccgcagtacgcggcctccgtcttcctgggctgggcgcaaaagaagttcgggaagaggaacaccatctggctctttgggccggccacgacgggtaaaaccaacatcgcggaagccatcgcccacgccgtgcccttctacggctgcgtgaactggaccaatgagaactttccgttcaacgattgcgtcgacaagatggtgatctggtgggaggagggcaagatgacggccaaggtcgtagagagcgccaaggccatcctgggcggaagcaaggtgcgcgtggaccaaaagtgcaagtcatcggcccagatcgacccaactcccgtgatcgtcacctccaacaccaacatgtgcgcggtcatcgacggaaactcgaccaccttcgagcaccaacaaccactccaggaccggatgttcaagttcgagctcaccaagcgcctggagcacgactttggcaaggtcaccaagcaggaagtcaaagactttttccggtgggcgtcagatcacgtgaccgaggtgactcacgagttttacgtcagaaagggtggagctagaaagaggcccgcccccaatgacgcagatataagtgagcccaagcgggcctgtccgtcagttgcgcagccatcgacgtcagacgcggaagctccggtggactacgcggacaggtaccaaaacaaatgttctcgtcacgtgggtatgaatctgatgctttttccctgccggcaatgcgagagaatgaatcagaatgtggacatttgcttcacgcacggggtcatggactgtgccgagtgcttccccgtgtcagaatctcaacccgtgtctgtcgtcagaaagcggacgtatcagaaactgtgtccgattcatcacatcatggggagggcgcccgaggtggcctgctcggcctgcgaactggccaatgtggacttggatgactgtgacatggaacaataaatgactcaaaccagatatgactgacggttaccttccagattggctagaggacaacctctctgaaggcgttcgagagtggtgggcgctgcaacctggagcccctaaacccaaggcaaatcaacaacatcaggacaacgctcggggtcttgtgcttccgggttacaaatacctcggacccggcaacggactcgacaagggggaacccgtcaacgcagcggacgcggcagccctcgagcacgacaaggcctacgaccagcagctcaaggccggtgacaacccctacctcaagtacaaccacgccgacgcggagttccagcagcggcttcagggcgacacaccgtttgggggcaacctcggcagagcagtcttccaggccaaaaagagggttcttgaacctcttggtctggttgagcaagcgggtgagacggctcctggaaagaagagaccgttgattgaatccccccagcagcccgactcctccacgggtatcggcaaaaaaggcaagcagccggctaaaaagaagctcgttttcgaagacgaaactggagcaggcgacggaccccctgagggatcaacttccggagccatgtctgatgacagtgagatgcgtgcagcagctggcggagctgcagtcgagggsggacaaggtgccgatggagtgggtaatgcctcgggtgattggcattgcgattccacctggtctgagggccacgtcacgaccaccagcaccagaacctgggtcttgcccacctacaacaaccacctntacaagcgactcggagagagcctgcagtccaacacctacaacggattctccaccccctggggatactttgacttcaaccgcttccactgccacttctcaccacgtgactggcagcgactcatcaacaacaactggggcatgcgacccaaagccatgcgggtcaaaatcttcaacatccaggtcaaggaggtcacgacgtcgaacggcgagacaacggtggctaataaccttaccagcacggttcagatctttgcggactcgtcgtacgaactgccgtacgtgatggatgcgggtcaagagggcagcctgcctccttttcccaacgacgtctttatggtgccccagtacggctactgtggactggtgaccggcaacacttcgcagcaacagactgacagaaatgccttctactgcctggagtactttccttcgcagatgctgcggactggcaacaactttgaaattacgtacagttttgagaaggtgcctttccactcgatgtacgcgcacagccagagcctggaccggctgatgaaccctctcatcgaccagtacctgtggggactgcaatcgaccaccaccggaaccaccctgaatgccgggactgccaccaccaactttaccaagctgcggcctaccaacttttccaactttaaaaagaactggctgcccgggccttcaatcaagcagcagggcttctcaaagactgccaatcaaaactacaagatccctgccaccgggtcagacagtctcatcaaatacgagacgcacagcactctggacggaagatggagtgccctgacccccggacctccaatggccacggctggacctgcggacagcaagttcagcaacagccagctcatctttgcggggcctaaacagaacggcaacacggccaccgtacccgggactctgatcttcacctctgaggaggagctggcagccaccaacgccaccgatacggacatgtggggcaacctacctggcggtgaccagagcaacagcaacctgccgaccgtggacagactgacagccttgggagccgtgcctggaatggtctggcaaaacagagacatttactaccagggtcccatttgggccaagattcctcataccgatggacactttcacccctcaccgctgattggtgggtttgggctgaaacacccgcctcctcaaatttttatcaagaacaccccggtacctgcgaatcctgcaacgaccttcagctctactccggtaaactccttcattactcagtacagcactggccaggtgtcggtgcagattgactgggagatccagaaggagcggtccaaacgctggaaccccgaggtccagtttacctccaactacggacagcaaaactctctgttgtgggctcccgatgcggctgggaaatacactgagcctagggctatcggtacccgctacctcacccaccacctgtaataacctgttaatcaataaaccggtttattcgtttcagttgaactttggtctccgtgtccttcttatcttatctcgtttccatggctactgcgtacataagcagcggcctgcggcgcttgcgcttcgcggtttacaactgccggttaatcagtaacttctggcaaaccatgatgatggagttggccactccctctatgcgcgctcgctcactcactcggccctggagaccaaaggtctccagactgccggcctctggccggcagggccgagtgagtgagcgagcgcgcatagagggagtggccaa

SEQ ID NO: 5150 - protein, 725 aa, Adeno-associated virus 5
MAADGYLPDWLEDTLSEGIRQWWKLKPGPPPPKPAERHKDDSRGLVLPGYKYLGPFNGLDKGEPVNEADAAALEHDKAYDRQLDSGDNPYLKYNHADAEFQERLKEDTSFGGNLGRAVFQAKKRVLEPFGLVEEGAKTAPTGKRIDDHFPKRKKARTEEDSKPSTSSDAEAGPSGSQQLQIPAQPASSLGADTMSAGGGGPLGDNNQGADGVGNASGDWHCDSTWMGDRVVTKSTRTWVLPSYNNHQYREIKSGSVDGSNANAYFGYSTPWGYFDFNRFHSHWSPRDWQRLINNYWGFRPRSLRVKIFNIQVKEVTVQDSTTTIANNLTSTVQVFTDDDYQLPYVVGNGTEGCLPAFPPQVFTLPQYGYATLNRDNTENPTERSSFFCLEYFPSKMLRTGNNFEFTYNFEEVPFHSSFAPSQNLFKLANPLVDQYLYRFVSTNNTGGVQFNKNLAGRYANTYKNWFPGPMGRTQGWNLGSGVNRASVSAFATTNRMELEGASYQVPPQPNGMTNNLQGSNTYALENTMIFNSQPANPGTTATYLEGNMLITSESETQPVNRVAYNVGGQMATNNQSSTTAPTTGTYNLQEIVPGSVWMERDVYLQGPIWAKIPETGAHFHPSPAMGGFGLKHPPPMMLIKNTPVPGNITSFSDVPVSSFITQYSTGQVTVEMEWELKKENSKRWNPEIQYTNNYNDPQFVDFAPDSTGEYRTTRPIGTRYLTRPL

SEQ ID NO: 5151 - protein, 724 aa, Adeno-associated virus 5
MSFVDHPPDWLEEVGEGLREFLGLEAGPPKPKPNQQHQDQARGLVLPGYNYLGPGNGLDRGEPVNRADEVAREHDISYNEQLEAGDNPYLKYNHADAEFQEKLADDTSFGGNLGKAVFQAKKRVLEPFGLVEEGAKTAPTGKRIDDHFPKRKKARTEEDSKPSTSSDAEAGPSGSQQLQIPAQPASSLGADTMSAGGGGPLGDNNQGADGVGNASGDWHCDSTWMGDRVVTKSTRTWVLPSYNNHQYREIKSGSVDGSNANAYFGYSTPWGYFDFNRFHSHWSPRDWQRLINNYWGFRPRSLRVKIFNIQVKEVTVQDSTTTIANNLTSTVQVFTDDDYQLPYVVGNGTEGCLPAFPPQVFTLPQYGYATLNRDNTENPTERSSFFCLEYFPSKMLRTGNNFEFTYNFEEVPFHSSFAPSQNLFKLANPLVDQYLYRFVSTNNTGGVQFNKNLAGRYANTYKNWFPGPMGRTQGWNLGSGVNRASVSAFATTNRMELEGASYQVPPQPNGMTNNLQGSNTYALENTMIFNSQPANPGTTATYLEGNMLITSESETQPVNRVAYNVGGQMATNNQSSTTAPATGTYNLQEIVPGSVWMERDVYLQGPIWAKIPETGAHFHPSPAMGGFGLKHPPPMMLIKNTPVPGNITSFSDVPVSSFITQYSTGQVTVEMEWELKKENSKRWNPEIQYTNNYNDPQFVDFAPDSTGEYRTTRPIGTRYLTRPL

SEQ ID NO: 5152 - DNA, 2175 bp, Adeno-associated virus 5
  source 1..2175: mol_type = unassigned DNA
atgtcttttgttgatcaccctccagattggttggaagaagttggtgaaggtcttcgcgagtttttgggccttgaagcgggcccaccgaaaccaaaacccaatcagcagcatcaagatcaagcccgtggtcttgtgctgcctggttataactatctcggacccggaaacggtctcgatcgaggagagcctgtcaacagggcagacgaggtcgcgcgagagcacgacatctcgtacaacgagcagcttgaggcgggagacaacccctacctcaagtacaaccacgcggacgccgagtttcaggagaagctcgccgacgacacatccttcgggggaaacctcggaaaggcagtctttcaggccaagaaaagggttctcgaaccttttggcctggttgaagagggtgctaagacggcccctaccggaaagcggatagacgaccactttccaaaaagaaagaaggctcggaccgaagaggactccaagccttccacctcgtcagacgccgaagctggacccagcggatcccagcagctgcaaatcccagcccaaccagcctcaagtttgggagctgatacaatgtctgcgggaggtggcggcccattgggcgacaataaccaaggtgccgatggagtgggcaatgcctcgggagattggcattgcgattccacgtggatgggggacagagtcgtcaccaagtccacccgaacctgggtgctgcccagctacaacaaccaccagtaccgagagatcaaaagcggctccgtcgacggaagcaacgccaacgcctactttggatacagcaccccctgggggtactttgactttaaccgcttccacagccactggagcccccgagactggcaaagactcatcaacaactactggggcttcagaccccggtccctcagagtcaaaatcttcaacattcaagtcaaagaggtcacggtgcaggactccaccaccaccatcgccaacaacctcacctccaccgtccaagtgtttacggacgacgactaccagctgccctacgtcgtcggcaacgggaccgagggatgcctgccggccttccctccgcaggtctttacgctgccgcagtacggttacgcgacgctgaaccgcgacaacacagaaaatcccaccgagaggagcagcttcttctgcctagagtactttcccagcaagatgctgagaacgggcaacaactttgagtttacctacaactttgaggaggtgcccttccactccagcttcgctcccagtcagaacctgttcaagctggccaacccgctggtggaccagtacttgtaccgcttcgtgagcacaaataacactggcggagtccagttcaacaagaacctggccgggagatacgccaacacctacaaaaactggttcccggggcccatgggccgaacccagggctggaacctgggctccggggtcaaccgcgccagtgtcagcgccttcgccacgaccaataggatggagctcgagggcgcgagttaccaggtgcccccgcagccgaacggcatgaccaacaacctccagggcagcaacacctatgccctggagaacactatgatcttcaacagccagccggcgaacccgggcaccaccgccacgtacctcgagggcaacatgctcatcaccagcgagagcgagacgcagccggtgaaccgcgtggcgtacaacgtcggcgggcagatggccaccaacaaccagagctccaccactgcccccgcgaccggcacgtacaacctccaggaaatcgtgcccggcagcgtgtggatggagagggacgtgtacctccaaggacccatctgggccaagatcccagagacgggggcgcactttcacccctctccggccatgggcggattcggactcaaacacccaccgcccatgatgctcatcaagaacacgcctgtgcccggaaatatcaccagcttctcggacgtgcccgtcagcagcttcatcacccagtacagcaccgggcaggtcaccgtggagatggagtgggagctcaagaaggaaaactccaagaggtggaacccagagatccagtacacaaacaactacaacgacccccagtttgtggactttgccccggacagcaccggggaatacagaaccaccagacctatcggaacccgataccttacccgacccctttaa

SEQ ID NO: 5153 - DNA, 2208 bp, Adeno-associated virus 6
  source 1..2208: mol_type = unassigned DNA
atggctgccgatggttatcttccagattggctcgaggacaacctctctgagggcattcgcgagtggtgggacttgaaacctggagccccgaaacccaaagccaaccagcaaaagcaggacgacggccggggtctggtgcttcctggctacaagtacctcggacccttcaacggactcgacaagggggagcccgtcaacgcggcggatgcagcggccctcgagcacgacaaggcctacgaccagcagctcaaagcgggtgacaatccgtacctgcggtataaccacgccgacgccgagtttcaggagcgtctgcaagaagatacgtcttttgggggcaacctcgggcgagcagtcttccaggccaagaagagggttctcgaaccttttggtctggttgaggaaggtgctaagacggctcctggaaagaaacgtccggtagagcagtcgccacaagagccagactcctcctcgggcattggcaagacaggccagcagcccgctaaaaagagactcaattttggtcagactggcgactcagagtcagtccccgacccacaacctctcggagaacctccagcaacccccgctgctgtgggacctactacaatggcttcaggcggtggcgcaccaatggcagacaataacgaaggcgccgacggagtgggtaatgcctcaggaaattggcattgcgattccacatggctgggcgacagagtcatcaccaccagcacccgaacatgggccttgcccacctataacaaccacctctacaagcaaatctccagtgcttcaacgggggccagcaacgacaaccactacttcggctacagcaccccctgggggtattttgatttcaacagattccactgccatttctcaccacgtgactggcagcgactcatcaacaacaattggggattccggcccaagagactcaacttcaagctcttcaacatccaagtcaaggaggtcacgacgaatgatggcgtcacgaccatcgctaataaccttaccagcacggttcaagtcttctcggactcggagtaccagttgccgtacgtcctcggctctgcgcaccagggctgcctccctccgttcccggcggacgtgttcatgattccgcagtacggctacctaacgctcaacaatggcagccaggcagtgggacggtcatccttttactgcctggaatatttcccatcgcagatgctgagaacgggcaataactttaccttcagctacaccttcgaggacgtgcctttccacagcagctacgcgcacagccagagcctggaccggctgatgaatcctctcatcgaccagtacctgtattacctgaacagaactcagaatcagtccggaagtgcccaaaacaaggacttgctgtttagccgggggtctccagctggcatgtctgttcagcccaaaaactggctacctggaccctgttaccggcagcagcgcgtttctaaaacaaaaacagacaacaacaacagcaactttacctggactggtgcttcaaaatataaccttaatgggcgtgaatctataatcaaccctggcactgctatggcctcacacaaagacgacaaagacaagttctttcccatgagcggtgtcatgatttttggaaaggagagcgccggagcttcaaacactgcattggacaatgtcatgatcacagacgaagaggaaatcaaagccactaaccccgtggccaccgaaagatttgggactgtggcagtcaatctccagagcagcagcacagaccctgcgaccggagatgtgcatgttatgggagccttacctggaatggtgtggcaagacagagacgtatacctgcagggtcctatttgggccaaaattcctcacacggatggacactttcacccgtctcctctcatgggcggctttggacttaagcacccgcctcctcagatcctcatcaaaaacacgcctgttcctgcgaatcctccggcagagttttcggctacaaagtttgcttcattcatcacccagtattccacaggacaagtgagcgtggagattgaatgggagctgcagaaagaaaacagcaaacgctggaatcccgaagtgcagtatacatctaactatgcaaaatctgccaacgttgatttcactgtggacaacaatggactttatactgagcctcgccccattggcacccgttacctcacccgtcccctg

SEQ ID NO: 5154 - protein, 736 aa, Adeno-associated virus 6; identical to SEQ ID NO: 4799

SEQ ID NO: 5155 - protein, 623 aa, Adeno-associated virus 6
MPGFYEIVIKVPSDLDEHLPGISDSFVNWVAEKEWELPPDSDMDLNLIEQAPLTVAEKLQRDFLVQWRRVSKAPEALFFVQFEKGESYFHLHILVETTGVKSMVLGRFLSQIRDKLVQTIYRGIEPTLPNWFAVTKTRNGAGGGNKVVDECYIPNYLLPKTQPELQWAWTNMEEYISACLNLAERKRLVAHDLTHVSQTQEQNKENLNPNSDAPVIRSKTSARYMELVGWLVDRGITSEKQWIQEDQASYISFNAASNSRSQIKAALDNAGKIMALTKSAPDYLVGPAPPADIKTNRIYRILELNGYDPAYAGSVFLGWAQKRFGKRNTIWLFGPATTGKTNIAEAIAHAVPFYGCVNWTNENFPFNDCVDKMVIWWEEGKMTAKVVESAKAILGGSKVRVDQKCKSSAQIDPTPVIVTSNTNMCAVIDGNSTTFEHQQPLQDRMFKFELTRRLEHDFGKVTKQEVKEFFRWAQDHVTEVAHEFYVRKGGANKRPAPDDADKSEPKRACPSVADPSTSDAEGAPVDFADRYQNKCSRHAGMLQMLFPCKTCERMNQNFNICFTHGTRDCSECFPGVSESQPVVRKRTYRKLCAIHHLLGRAPEIACSACDLVNVDLDDCVSEQ

SEQ ID NO: 5156 - DNA, 4683 bp, Adeno-associated virus 6
  source 1..4683: mol_type = unassigned DNA
ttggccactccctctctgcgcgctcgctcgctcactgaggccgggcgaccaaaggtcgcccgacgcccgggctttgcccgggcggcctcagtgagcgagcgagcgcgcagagagggagtggccaactccatcactaggggttcctggaggggtggagtcgtgacgtgaattacgtcatagggttagggaggtcctgtattagaggtcacgtgagtgttttgcgacattttgcgacaccatgtggtcacgctgggtatttaagcccgagtgagcacgcagggtctccattttgaagcgggaggtttgaacgcgcagcgccatgccggggttttacgagattgtgattaaggtccccagcgaccttgacgagcatctgcccggcatttctgacagctttgtgaactgggtggccgagaaggaatgggagttgccgccagattctgacatggatctgaatctgattgagcaggcacccctgaccgtggccgagaagctgcagcgcgacttcctggtccagtggcgccgcgtgagtaaggccccggaggccctcttctttgttcagttcgagaagggcgagtcctacttccacctccatattctggtggagaccacgggggtcaaatccatggtgctgggccgcttcctgagtcagattagggacaagctggtgcagaccatctaccgcgggatcgagccgaccctgcccaactggttcgcggtgaccaagacgcgtaatggcgccggaggggggaacaaggtggtggacgagtgctacatccccaactacctcctgcccaagactcagcccgagctgcagtgggcgtggactaacatggaggagtatataagcgcgtgtttaaacctggccgagcgcaaacggctcgtggcgcacgacctgacccacgtcagccagacccaggagcagaacaaggagaatctgaaccccaattctgacgcgcctgtcatccggtcaaaaacctccgcacgctacatggagctggtcgggtggctggtggaccggggcatcacctccgagaagcagtggatccaggaggaccaggcctcgtacatctccttcaacgccgcctccaactcgcggtcccagatcaaggccgctctggacaatgccggcaagatcatggcgctgaccaaatccgcgcccgactacctggtaggccccgctccgcccgccgacattaaaaccaaccgcatttaccgcatcctggagctgaacggctacgaccctgcctacgccggctccgtctttctcggctgggcccagaaaaggttcggaaaacgcaacaccatctggctgtttgggccggccaccacgggcaagaccaacatcgcggaagccatcgcccacgccgtgcccttctacggctgcgtcaactggaccaatgagaactttcccttcaacgattgcgtcgacaagatggtgatctggtgggaggagggcaagatgacggccaaggtcgtggagtccgccaaggccattctcggcggcagcaaggtgcgcgtggaccaaaagtgcaagtcgtccgcccagatcgatcccacccccgtgatcgtcacctccaacaccaacatgtgcgccgtgattgacgggaacagcaccaccttcgagcaccagcagccgttgcaggaccggatgttcaaatttgaactcacccgccgtctggagcatgactttggcaaggtgacaaagcaggaagtcaaagagttcttccgctgggcgcaggatcacgtgaccgaggtggcgcatgagttctacgtcagaaagggtggagccaacaagagacccgcccccgatgacgcggataaaagcgagcccaagcgggcctgcccctcagtcgcggatccatcgacgtcagacgcggaaggagctccggtggactttgccgacaggtaccaaaacaaatgttctcgtcacgcgggcatgcttcagatgctgtttccctgcaaaacatgcgagagaatgaatcagaatttcaacatttgcttcacgcacgggaccagagactgttcagaatgtttccccggcgtgtcagaatctcaaccggtcgtcagaaagaggacgtatcggaaactctgtgccattcatcatctgctggggcgggctcccgagattgcttgctcggcctgcgatctggtcaacgtggatctggatgactgtgtttctgagcaataaatgacttaaaccaggtatggctgccgatggttatcttccagattggctcgaggacaacctctctgagggcattcgcgagtggtgggacttgaaacctggagccccgaaacccaaagccaaccagcaaaagcaggacgacggccggggtctggtgcttcctggctacaagtacctcggacccttcaacggactcgacaagggggagcccgtcaacgcggcggatgcagcggccctcgagcacgacaaggcctacgaccagcagctcaaagcgggtgacaatccgtacctgcggtataaccacgccgacgccgagtttcaggagcgtctgcaagaagatacgtcttttgggggcaacctcgggcgagcagtcttccaggccaagaagagggttctcgaaccttttggtctggttgaggaaggtgctaagacggctcctggaaagaaacgtccggtagagcagtcgccacaagagccagactcctcctcgggcattggcaagacaggccagcagcccgctaaaaagagactcaattttggtcagactggcgactcagagtcagtccccgacccacaacctctcggagaacctccagcaacccccgctgctgtgggacctactacaatggcttcaggcggtggcgcaccaatggcagacaataacgaaggcgccgacggagtgggtaatgcctcaggaaattggcattgcgattccacatggctgggcgacagagtcatcaccaccagcacccgaacatgggccttgcccacctataacaaccacctctacaagcaaatctccagtgcttcaacgggggccagcaacgacaaccactacttcggctacagcaccccctgggggtattttgatttcaacagattccactgccatttctcaccacgtgactggcagcgactcatcaacaacaattggggattccggcccaagagactcaacttcaagctcttcaacatccaagtcaaggaggtcacgacgaatgatggcgtcacgaccatcgctaataaccttaccagcacggttcaagtcttctcggactcggagtaccagttgccgtacgtcctcggctctgcgcaccagggctgcctccctccgttcccggcggacgtgttcatgattccgcagtacggctacctaacgctcaacaatggcagccaggcagtgggacggtcatccttttactgcctggaatatttcccatcgcagatgctgagaacgggcaataactttaccttcagctacaccttcgaggacgtgcctttccacagcagctacgcgcacagccagagcctggaccggctgatgaatcctctcatcgaccagtacctgtattacctgaacagaactcagaatcagtccggaagtgcccaaaacaaggacttgctgtttagccgggggtctccagctggcatgtctgttcagcccaaaaactggctacctggaccctgttaccggcagcagcgcgtttctaaaacaaaaacagacaacaacaacagcaactttacctggactggtgcttcaaaatataaccttaatgggcgtgaatctataatcaaccctggcactgctatggcctcacacaaagacgacaaagacaagttctttcccatgagcggtgtcatgatttttggaaaggagagcgccggagcttcaaacactgcattggacaatgtcatgatcacagacgaagaggaaatcaaagccactaaccccgtggccaccgaaagatttgggactgtggcagtcaatctccagagcagcagcacagaccctgcgaccggagatgtgcatgttatgggagccttacctggaatggtgtggcaagacagagacgtatacctgcagggtcctatttgggccaaaattcctcacacggatggacactttcacccgtctcctctcatgggcggctttggacttaagcacccgcctcctcagatcctcatcaaaaacacgcctgttcctgcgaatcctccggcagagttttcggctacaaagtttgcttcattcatcacccagtattccacaggacaagtgagcgtggagattgaatgggagctgcagaaagaaaacagcaaacgctggaatcccgaagtgcagtatacatctaactatgcaaaatctgccaacgttgatttcactgtggacaacaatggactttatactgagcctcgccccattggcacccgttacctcacccgtcccctgtaattgtgtgttaatcaataaaccggttaattcgtgtcagttgaactttggtctcatgtcgttattatcttatctggtcaccatagcaaccggttacacattaactgcttagttgcgcttcgcgaatacccctagtgatggagttgcccactccctctatgcgcgctcgctcgctcggtggggccggcagagcagagctctgccgtctgcggacctttggtccgcaggccccaccgagcgagcgagcgcgcatagagggagtgggcaa

SEQ ID NO: 5157 - DNA, 2211 bp, Adeno-associated virus 6
  source 1..2211: mol_type = unassigned DNA
atggctgccgatggttatcttccagattggctcgaggacaacctctctgagggcattcgcgagtggtgggacttgaaacctggagccccgaaacccaaagccaaccagcaaaagcaggacgacggccggggtctggtgcttcctggctacaagtacctcggacccttcaacggactcgacaagggggagcccgtcaacgcggcggatgcagcggccctcgagcacgacaaggcctacgaccagcagctcaaagcgggtgacaatccgtacctgcggtataaccacgccgacgccgagtttcaggagcgtctgcaagaagatacgtcttttgggggcaacctcgggcgagcagtcttccaggccaagaagagggttctcgaaccttttggtctggttgaggaaggtgctaagacggctcctggaaagaaacgtccggtagagcagtcgccacaagagccagactcctcctcgggcattggcaagacaggccagcagcccgctaaaaagagactcaattttggtcagactggcgactcagagtcagtccccgacccacaacctctcggagaacctccagcaacccccgctgctgtgggacctactacaatggcttcaggcggtggcgcaccaatggcagacaataacgaaggcgccgacggagtgggtaatgcctcaggaaattggcattgcgattccacatggctgggcgacagagtcatcaccaccagcacccgaacatgggccttgcccacctataacaaccacctctacaagcaaatctccagtgcttcaacgggggccagcaacgacaaccactacttcggctacagcaccccctgggggtattttgatttcaacagattccactgccatttctcaccacgtgactggcagcgactcatcaacaacaattggggattccggcccaagagactcaacttcaagctcttcaacatccaagtcaaggaggtcacgacgaatgatggcgtcacgaccatcgctaataaccttaccagcacggttcaagtcttctcggactcggagtaccagttgccgtacgtcctcggctctgcgcaccagggctgcctccctccgttcccggcggacgtgttcatgattccgcagtacggctacctaacgctcaacaatggcagccaggcagtgggacggtcatccttttactgcctggaatatttcccatcgcagatgctgagaacgggcaataactttaccttcagctacaccttcgaggacgtgcctttccacagcagctacgcgcacagccagagcctggaccggctgatgaatcctctcatcgaccagtacctgtattacctgaacagaactcagaatcagtccggaagtgcccaaaacaaggacttgctgtttagccgggggtctccagctggcatgtctgttcagcccaaaaactggctacctggaccctgttaccggcagcagcgcgtttctaaaacaaaaacagacaacaacaacagcaactttacctggactggtgcttcaaaatataaccttaatgggcgtgaatctataatcaaccctggcactgctatggcctcacacaaagacgacaaagacaagttctttcccatgagcggtgtcatgatttttggaaaggagagcgccggagcttcaaacactgcattggacaatgtcatgatcacagacgaagaggaaatcaaagccactaaccccgtggccaccgaaagatttgggactgtggcagtcaatctccagagcagcagcacagaccctgcgaccggagatgtgcatgttatgggagccttacctggaatggtgtggcaagacagagacgtatacctgcagggtcctatttgggccaaaattcctcacacggatggacactttcacccgtctcctctcatgggcggctttggacttaagcacccgcctcctcagatcctcatcaaaaacacgcctgttcctgcgaatcctccggcagagttttcggctacaaagtttgcttcattcatcacccagtattccacaggacaagtgagcgtggagattgaatgggagctgcagaaagaaaacagcaaacgctggaatcccgaagtgcagtatacatctaactatgcaaaatctgccaacgttgatttcactgtggacaacaatggactttatactgagcctcgccccattggcacccgttacctcacccgtcccctgtaa

SEQ ID NO: 5158 - DNA, 2214 bp, Adeno-associated virus 7
  source 1..2214: mol_type = unassigned DNA
atggctgccgatggttatcttccagattggctcgaggacaacctctctgagggcattcgcgagtggtgggacctgaaacctggagccccgaaacccaaagccaaccagcaaaagcaggacaacggccggggtctggtgcttcctggctacaagtacctcggacccttcaacggactcgacaagggggagcccgtcaacgcggcggacgcagcggccctcgagcacgacaaggcctacgaccagcagctcaaagcgggtgacaatccgtacctgcggtataaccacgccgacgccgagtttcaggagcgtctgcaagaagatacgtcatttgggggcaacctcgggcgagcagtcttccaggccaagaagcgggttctcgaacctctcggtctggttgaggaaggcgctaagacggctcctgcaaagaagagaccggtagagccgtcacctcagcgttcccccgactcctccacgggcatcggcaagaaaggccagcagcccgccagaaagagactcaatttcggtcagactggcgactcagagtcagtccccgaccctcaacctctcggagaacctccagcagcgccctctagtgtgggatctggtacagtggctgcaggcggtggcgcaccaatggcagacaataacgaaggtgccgacggagtgggtaatgcctcaggaaattggcattgcgattccacatggctgggcgacagagtcattaccaccagcacccgaacctgggccctgcccacctacaacaaccacctctacaagcaaatctccagtgaaactgcaggtagtaccaacgacaacacctacttcggctacagcaccccctgggggtattttgactttaacagattccactgccacttctcaccacgtgactggcagcgactcatcaacaacaactggggattccggcccaagaagctgcggttcaagctcttcaacatccaggtcaaggaggtcacgacgaatgacggcgttacgaccatcgctaataaccttaccagcacgattcaggtattctcggactcggaataccagctgccgtacgtcctcggctctgcgcaccagggctgcctgcctccgttcccggcggacgtcttcatgattcctcagtacggctacctgactctcaacaatggcagtcagtctgtgggacgttcctccttctactgcctggagtacttcccctctcagatgctgagaacgggcaacaactttgagttcagctacagcttcgaggacgtgcctttccacagcagctacgcacacagccagagcctggaccggctgatgaatcccctcatcgaccagtacttgtactacctggccagaacacagagtaacccaggaggcacagctggcaatcgggaactgcagttttaccagggcgggccttcaactatggccgaacaagccaagaattggttacctggaccttgcttccggcaacaaagagtctccaaaacgctggatcaaaacaacaacagcaactttgcttggactggtgccaccaaatatcacctgaacggcagaaactcgttggttaatcccggcgtcgccatggcaactcacaaggacgacgaggaccgctttttcccatccagcggagtcctgatttttggaaaaactggagcaactaacaaaactacattggaaaatgtgttaatgacaaatgaagaagaaattcgtcctactaatcctgtagccacggaagaatacgggatagtcagcagcaacttacaagcggctaatactgcagcccagacacaagttgtcaacaaccagggagccttacctggcatggtctggcagaaccgggacgtgtacctgcagggtcccatctgggccaagattcctcacacggatggcaactttcacccgtctcctttgatgggcggctttggacttaaacatccgcctcctcagatcctgatcaagaacactcccgttcccgctaatcctccggaggtgtttactcctgccaagtttgcttcgttcatcacacagtacagcaccggacaagtcagcgtggaaatcgagtgggagctgcagaaggaaaacagcaagcgctggaacccggagattcagtacacctccaactttgaaaagcagactggtgtggactttgccgttgacagccagggtgtttactctgagcctcgccctattggcactcgttacctcacccgtaatctgtaa

SEQ ID NO: 5159 - protein, 738 aa, Adeno-associated virus 7
MAADGYLPDWLEDNLSEGIREWWALKPGAPKPKANQQKQDDGRGLVLPGYKYLGPFNGLDKGEPVNAADAAALEHDKAYDQQLQAGDNPYLRYNHADAEFQERLQEDTSFGGNLGRAVFQAKKRVLEPLGLVEEGAKTAPGKKRPVEPSPQRSPDSSTGIGKKGQQPARKRLNFGQTGDSESVPDPQPLGEPPAAPSGVGPNTMAAGGGAPMADNNEGADGVGSSSGNWHCDSTWLGDRVITTSTRTWALPTYNNHLYKQISNGTSGGATNDNTYFGYSTPWGYFDFNRFHCHFSPRDWQRLINNNWGFRPKRLSFKLFNIQVKEVTQNEGTKTIANNLTSTIQVFTDSEYQLPYVLGSAHQGCLPPFPADVFMIPQYGYLTLNNGSQAVGRSSFYCLEYFPSQMLRTGNNFQFTYTFEDVPFHSSYAHSQSLDRLMNPLIDQYLYYLSRTQTTGGTANTQTLGFSQGGPNTMANQAKNWLPGPCYRQQRVSTTTGQNNNSNFAWTAGTKYHLNGRNSLANPGIAMATHKDDEERFFPSNGILIFGKQNAARDNADYSDVMLTSEEEIKTTNPVATEEYGIVADNLQQQNTAPQIGTVNSQGALPGMVWQNRDVYLQGPIWAKIPHTDGNFHPSPLMGGFGLKHPPPQILIKNTPVPADPPTTFNQSKLNSFITQYSTGQVSVEIEWELQKENSKRWNPEIQYTSNYYKSTSVDFAVNTEGVYSEPRPIGTRYLTRNL

SEQ ID NO: 5160 - protein, 737 aa, Adeno-associated virus 7
MAADGYLPDWLEDNLSEGIREWWDLKPGAPKPKANQQKQDNGRGLVLPGYKYLGPFNGLDKGEPVNAADAAALEHDKAYDQQLKAGDNPYLRYNHADAEFQERLQEDTSFGGNLGRAVFQAKKRVLEPLGLVEEGAKTAPAKKRPVEPSPQRSPDSSTGIGKKGQQPARKRLNFGQTGDSESVPDPQPLGEPPAAPSSVGSGTVAAGGGAPMADNNEGADGVGNASGNWHCDSTWLGDRVITTSTRTWALPTYNNHLYKQISSETAGSTNDNTYFGYSTPWGYFDFNRFHCHFSPRDWQRLINNNWGFRPKKLRFKLFNIQVKEVTTNDGVTTIANNLTSTIQVFSDSEYQLPYVLGSAHQGCLPPFPADVFMIPQYGYLTLNNGSQSVGRSSFYCLEYFPSQMLRTGNNFEFSYSFEDVPFHSSYAHSQSLDRLMNPLIDQYLYYLARTQSNPGGTAGNRELQFYQGGPSTMAEQAKNWLPGPCFRQQRVSKTLDQNNNSNFAWTGATKYHLNGRNSLVNPGVAMATHKDDEDRFFPSSGVLIFGKTGATNKTTLENVLMTNEEEIRPTNPVATEEYGIVSSNLQAANTAAQTQVVNNQGALPGMVWQNRDVYLQGPIWAKIPHTDGNFHPSPLMGGFGLKHPPPQILIKNTPVPANPPEVFTPAKFASFITQYSTGQVSVEIEWELQKENSKRWNPEIQYTSNFEKQTGVDFAVDSQGVYSEPRPIGTRYLTRNL

SEQ ID NO: 5161 - protein, 623 aa, Adeno-associated virus 7
MPGFYEIVIKVPSDLDEHLPGISDSFVNWVAEKEWELPPDSDMDLNLIEQAPLTVAEKLQRDFLVQWRRVSKAPEALFFVQFEKGESYFHLHVLVETTGVKSMVLGRFLSQIREKLVQTIYRGVEPTLPNWFAVTKTRNGAGGGNKVVDECYIPNYLLPKTQPELQWAWTNMEEYISACLNLAERKRLVAQHLTHVSQTQEQNKENLNPNSDAPVIRSKTSARYMELVGWLVDRGITSEKQWIQEDQASYISFNAASNSRSQIKAALDNAGKIMALTKSAPDYLVGPSLPADIKTNRIYRILELNGYDPAYAGSVFLGWAQKKFGKRNTIWLFGPATTGKTNIAEAIAHAVPFYGCVNWTNENFPFNDCVDKMVIWWEEGKMTAKVVESAKAILGGSKVRVDQKCKSSAQIDPTPVIVTSNTNMCAVIDGNSTTFEHQQPLQDRMFKFELTRRLEHDFGKVTKQEVKEFFRWASDHVTEVAHEFYVRKGGASKRPAPDDADISEPKRACPSVADPSTSDAEGAPVDFADRYQNKCSRHAGMIQMLFPCKTCERMNQNFNICFTHGVRDCLECFPGVSESQPVVRKKTYRKLCAIHHLLGRAPEIACSACDLVNVDLDDCVSEQ

SEQ ID NO: 5162 - DNA, 4721 bp, Adeno-associated virus 7
  source 1..4721: mol_type = unassigned DNA
ttggccactccctctatgcgcgctcgctcgctcggtggggcctgcggaccaaaggtccgcagacggcagagctctgctctgccggccccaccgagcgagcgagcgcgcatagagggagtggccaactccatcactaggggtaccgcgaagcgcctcccacgctgccgcgtcagcgctgacgtaaatcacgtcataggggagtggtcctgtattagctgtcacgtgagtgcttttgcgacattttgcgacaccacgtggccatttgaggtatatatggccgagtgagcgagcaggatctccattttgaccgcgaaatttgaacgagcagcagccatgccgggtttctacgagatcgtgatcaaggtgccgagcgacctggacgagcacctgccgggcatttctgactcgtttgtgaactgggtggccgagaaggaatgggagctgcccccggattctgacatggatctgaatctgatcgagcaggcacccctgaccgtggccgagaagctgcagcgcgacttcctggtccaatggcgccgcgtgagtaaggccccggaggccctgttctttgttcagttcgagaagggcgagagctacttccaccttcacgttctggtggagaccacgggggtcaagtccatggtgctaggccgcttcctgagtcagattcgggagaagctggtccagaccatctaccgcggggtcgagcccacgctgcccaactggttcgcggtgaccaagacgcgtaatggcgccggcggggggaacaaggtggtggacgagtgctacatccccaactacctcctgcccaagacccagcccgagctgcagtgggcgtggactaacatggaggagtatataagcgcgtgtttgaacctggccgaacgcaaacggctcgtggcgcagcacctgacccacgtcagccagacgcaggagcagaacaaggagaatctgaaccccaattctgacgcgcccgtgatcaggtcaaaaacctccgcgcgctacatggagctggtcgggtggctggtggaccggggcatcacctccgagaagcagtggatccaggaggaccaggcctcgtacatctccttcaacgccgcctccaactcgcggtcccagatcaaggccgcgctggacaatgccggcaagatcatggcgctgaccaaatccgcgcccgactacctggtggggccctcgctgcccgcggacattaaaaccaaccgcatctaccgcatcctggagctgaacgggtacgatcctgcctacgccggctccgtctttctcggctgggcccagaaaaagttcgggaagcgcaacaccatctggctgtttgggcccgccaccaccggcaagaccaacattgcggaagccatcgcccacgccgtgcccttctacggctgcgtcaactggaccaatgagaactttcccttcaacgattgcgtcgacaagatggtgatctggtgggaggagggcaagatgacggccaaggtcgtggagtccgccaaggccattctcggcggcagcaaggtgcgcgtggaccaaaagtgcaagtcgtccgcccagatcgaccccacccccgtgatcgtcacctccaacaccaacatgtgcgccgtgattgacgggaacagcaccaccttcgagcaccagcagccgttgcaggaccggatgttcaaatttgaactcacccgccgtctggagcacgactttggcaaggtgacgaagcaggaagtcaaagagttcttccgctgggccagtgatcacgtgaccgaggtggcgcatgagttctacgtcagaaagggcggagccagcaaaagacccgcccccgatgacgcggatataagcgagcccaagcgggcctgcccctcagtcgcggatccatcgacgtcagacgcggaaggagctccggtggactttgccgacaggtaccaaaacaaatgttctcgtcacgcgggcatgattcagatgctgtttccctgcaaaacgtgcgagagaatgaatcagaatttcaacatttgcttcacacacggggtcagagactgtttagagtgtttccccggcgtgtcagaatctcaaccggtcgtcagaaaaaagacgtatcggaaactctgcgcgattcatcatctgctggggcgggcgcccgagattgcttgctcggcctgcgacctggtcaacgtggacctggacgactgcgtttctgagcaataaatgacttaaaccaggtatggctgccgatggttatcttccagattggctcgaggacaacctctctgagggcattcgcgagtggtgggacctgaaacctggagccccgaaacccaaagccaaccagcaaaagcaggacaacggccggggtctggtgcttcctggctacaagtacctcggacccttcaacggactcgacaagggggagcccgtcaacgcggcggacgcagcggccctcgagcacgacaaggcctacgaccagcagctcaaagcgggtgacaatccgtacctgcggtataaccacgccgacgccgagtttcaggagcgtctgcaagaagatacgtcatttgggggcaacctcgggcgagcagtcttccaggccaagaagcgggttctcgaacctctcggtctggttgaggaaggcgctaagacggctcctgcaaagaagagaccggtagagccgtcacctcagcgttcccccgactcctccacgggcatcggcaagaaaggccagcagcccgccagaaagagactcaatttcggtcagactggcgactcagagtcagtccccgaccctcaacctctcggagaacctccagcagcgccctctagtgtgggatctggtacagtggctgcaggcggtggcgcaccaatggcagacaataacgaaggtgccgacggagtgggtaatgcctcaggaaattggcattgcgattccacatggctgggcgacagagtcattaccaccagcacccgaacctgggccctgcccacctacaacaaccacctctacaagcaaatctccagtgaaactgcaggtagtaccaacgacaacacctacttcggctacagcaccccctgggggtattttgactttaacagattccactgccacttctcaccacgtgactggcagcgactcatcaacaacaactggggattccggcccaagaagctgcggttcaagctcttcaacatccaggtcaaggaggtcacgacgaatgacggcgttacgaccatcgctaataaccttaccagcacgattcaggtattctcggactcggaataccagctgccgtacgtcctcggctctgcgcaccagggctgcctgcctccgttcccggcggacgtcttcatgattcctcagtacggctacctgactctcaacaatggcagtcagtctgtgggacgttcctccttctactgcctggagtacttcccctctcagatgctgagaacgggcaacaactttgagttcagctacagcttcgaggacgtgcctttccacagcagctacgcacacagccagagcctggaccggctgatgaatcccctcatcgaccagtacttgtactacctggccagaacacagagtaacccaggaggcacagctggcaatcgggaactgcagttttaccagggcgggccttcaactatggccgaacaagccaagaattggttacctggaccttgcttccggcaacaaagagtctccaaaacgctggatcaaaacaacaacagcaactttgcttggactggtgccaccaaatatcacctgaacggcagaaactcgttggttaatcccggcgtcgccatggcaactcacaaggacgacgaggaccgctttttcccatccagcggagtcctgatttttggaaaaactggagcaactaacaaaactacattggaaaatgtgttaatgacaaatgaagaagaaattcgtcctactaatcctgtagccacggaagaatacgggatagtcagcagcaacttacaagcggctaatactgcagcccagacacaagttgtcaacaaccagggagccttacctggcatggtctggcagaaccgggacgtgtacctgcagggtcccatctgggccaagattcctcacacggatggcaactttcacccgtctcctttgatgggcggctttggacttaaacatccgcctcctcagatcctgatcaagaacactcccgttcccgctaatcctccggaggtgtttactcctgccaagtttgcttcgttcatcacacagtacagcaccggacaagtcagcgtggaaatcgagtgggagctgcagaaggaaaacagcaagcgctggaacccggagattcagtacacctccaactttgaaaagcagactggtgtggactttgccgttgacagccagggtgtttactctgagcctcgccctattggcactcgttacctcacccgtaatctgtaattgcatgttaatcaataaaccggttgattcgtttcagttgaactttggtctcctgtgcttcttatcttatcggtttccatagcaactggttacacattaactgcttgggtgcgcttcacgataagaacactgacgtcaccgcggtacccctagtgatggagttggccactccctctatgcgcgctcgctcgctcggtggggcctgcggaccaaaggtccgcagacggcagagctctgctctgccggccccaccgagcgagcgagcgcgcatagagggagtggccaa

SEQ ID NO: 5163 - DNA, 2214 bp, Adeno-associated virus 7; identical to SEQ ID NO: 5158
  source 1..2214: mol_type = unassigned DNA

SEQ ID NO: 5164 - protein, 737 aa, Adeno-associated virus 7; identical to SEQ ID NO: 5160

SEQ ID NO: 5165 - DNA, 2217 bp, Adeno-associated virus 8
  source 1..2217: mol_type = unassigned DNA
atggctgccgatggttatcttccagattggctcgaggacaacctctctgagggcattcgcgagtggtgggcgctgaaacctggagccccgaagcccaaagccaaccagcaaaagcaggacgacggccggggtctggtgcttcctggctacaagtacctcggacccttcaacggactcgacaagggggagcccgtcaacgcggcggacgcagcggccctcgagcacgacaaggcctacgaccagcagctgcaggcgggtgacaatccgtacctgcggtataaccacgccgacgccgagtttcaggagcgtctgcaagaagatacgtcttttgggggcaacctcgggcgagcagtcttccaggccaagaagcgggttctcgaacctctcggtctggttgaggaaggcgctaagacggctcctggaaagaagagaccggtagagccatcaccccagcgttctccagactcctctacgggcatcggcaagaaaggccaacagcccgccagaaaaagactcaattttggtcagactggcgactcagagtcagttccagaccctcaacctctcggagaacctccagcagcgccctctggtgtgggacctaatacaatggctgcaggcggtggcgcaccaatggcagacaataacgaaggcgccgacggagtgggtagttcctcgggaaattggcattgcgattccacatggctgggcgacagagtcatcaccaccagcacccgaacctgggccctgcccacctacaacaaccacctctacaagcaaatctccaacgggacatcgggaggagccaccaacgacaacacctacttcggctacagcaccccctgggggtattttgactttaacagattccactgccacttttcaccacgtgactggcagcgactcatcaacaacaactggggattccggcccaagagactcagcttcaagctcttcaacatccaggtcaaggaggtcacgcagaatgaaggcaccaagaccatcgccaataacctcaccagcaccatccaggtgtttacggactcggagtaccagctgccgtacgttctcggctctgcccaccagggctgcctgcctccgttcccggcggacgtgttcatgattccccagtacggctacctaacactcaacaacggtagtcaggccgtgggacgctcctccttctactgcctggaatactttccttcgcagatgctgagaaccggcaacaacttccagtttacttacaccttcgaggacgtgcctttccacagcagctacgcccacagccagagcttggaccggctgatgaatcctctgattgaccagtacctgtactacttgtctcggactcaaacaacaggaggcacggcaaatacgcagactctgggcttcagccaaggtgggcctaatacaatggccaatcaggcaaagaactggctgccaggaccctgttaccgccaacaacgcgtctcaacgacaaccgggcaaaacaacaatagcaactttgcctggactgctgggaccaaataccatctgaatggaagaaattcattggctaatcctggcatcgctatggcaacacacaaagacgacgaggagcgtttttttcccagtaacgggatcctgatttttggcaaacaaaatgctgccagagacaatgcggattacagcgatgtcatgctcaccagcgaggaagaaatcaaaaccactaaccctgtggctacagaggaatacggtatcgtggcagataacttgcagcagcaaaacacggctcctcaaattggaactgtcaacagccagggggccttacccggtatggtctggcagaaccgggacgtgtacctgcagggtcccatctgggccaagattcctcacacggacggcaacttccacccgtctccgctgatgggcggctttggcctgaaacatcctccgcctcagatcctgatcaagaacacgcctgtacctgcggatcctccgaccaccttcaaccagtcaaagctgaactctttcatcacgcaatacagcaccggacaggtcagcgtggaaattgaatgggagctgcagaaggaaaacagcaagcgctggaaccccgagatccagtacacctccaactactacaaatctacaagtgtggactttgctgttaatacagaaggcgtgtactctgaaccccgccccattggcacccgttacctcacccgtaatctgtaa

SEQ ID NO: 5166 - DNA, 2213 bp, Adeno-associated virus 8
  source 1..2213: mol_type = unassigned DNA
atggctgccgatggttatcttccagattggctcgaggacaacctctctgagggcattcgcgagtggtgggcgctgaaacctggagccccgaagcccaaagccaaccagcaaaagcaggacgacggccggggtctggtgcttcctggctacaagtacctcggacccttcaacggactcgacaagggggagcccgtcaacgcggcggacgcagcggccctcgagcacgacaaggcctacgaccagcagctgcaggcgggtgacaatccgtacctgcggtataaccacgccgacgccgagtttcaggagcgtctgcaagaagatacgtcttttgggggcaacctcgggcgagcagtcttccaggccaagaagcgggttctcgaacctctcggtctggttgaggaaggcgctaagacggctcctggaaagaagagaccggtagagccatcaccccagcgttctccagactcctctacgggcatcggcaagaaaggccaacagcccgccagaaaaagactcaattttggtcagactggcgactcagagtcagttccagaccctcaacctctcggagaacctccagcagcgccctctggtgtgggacctaatacaatggctgcaggcggtggcgcaccaatggcagacaataacgaaggcgccgacggagtgggtagttcctcgggaaattggcattgcgattccacatggctgggcgacagagtcatcaccaccagcacccgaacctgggccctgcccacctacaacaaccacctctacaagcaaatctccaacgggacatcgggaggagccaccaacgacaacacctacttcggctacagcaccccctgggggtattttgactttaacagattccactgccacttttcaccacgtgactggcagcgactcatcaacaacaactggggattccggcccaagagactcagcttcaagctcttcaacatccaggtcaaggaggtcacgcagaatgaaggcaccaagaccatcgccaataacctcaccagcaccatccaggtgtttacggactcggagtaccagctgccgtacgttctcggctctgcccaccagggctgcctgcctccgttcccggcggacgtgttcatgattccccagtacggctacctaacactcaacaacggtagtcaggccgtgggacgctcctccttctactgcctggaatactttccttcgcagatgctgagaaccggcaacaacttccagtttacttacaccttcgaggacgtgcctttccacagcagctacgcccacagccagagcttggaccggctgatgaatcctctgattgaccagtacctgtactacttgtctcggactcaaacaacaggaggcacggcaaatacgcagactctgggcttcagccaaggtgggcctaatacaatggccaatcaggcaaagaactggctgccaggaccctgttaccgccaacaacgcgtctcaacgacaaccgggcaaaacaacaatagcaactttgcctggactgctgggaccaaataccatctgaatggaagaaattcattggctaatcctggcatcgctatggcaacacacaaagacgacgaggagcgtttttttcccagtaacgggatcctgatttttggcaaacaaaatgctgccagagacaatgcggattacagcgatgtcatgctcaccagcgaggaagaaatcaaaaccactaaccctgtggctacagaggaatacggtatcgtggcagataacttgcagcagcaaaacacggctcctcaaattggaactgtcaacagccagggggccttacccggtatggtctggcagaaccgggacgtgtacctgcagggtcccatctgggccaagattcctcacacggacggcaacttccacccgtctccgctgatgggcggctttggcctgaaacatcctccgcctcagatcctgatcaagaacacgcctgtacctgcggatcctccgaccaccttcaaccagtcaaagctgaactctttcatcacgcaatacagcaccggacaggtcagcgtggaaattgaatgggagctgcagaaggaaaacagcaagcgctggaaccccgagatccagtacacctccaactactacaaatctacaagtgtggactttgctgtaatacagaaggcgtgtactctgaaccccgccccattggcacccgttacctcacccgtaatctg

SEQ ID NO: 5167 - DNA, 4393 bp, Adeno-associated virus 8
  source 1..4393: mol_type = unassigned DNA
cagagagggagtggccaactccatcactaggggtagcgcgaagcgcctcccacgctgccgcgtcagcgctgacgtaaattacgtcataggggagtggtcctgtattagctgtcacgtgagtgcttttgcggcattttgcgacaccacgtggccatttgaggtatatatggccgagtgagcgagcaggatctccattttgaccgcgaaatttgaacgagcagcagccatgccgggcttctacgagatcgtgatcaaggtgccgagcgacctggacgagcacctgccgggcatttctgactcgtttgtgaactgggtggccgagaaggaatgggagctgcccccggattctgacatggatcggaatctgatcgagcaggcacccctgaccgtggccgagaagctgcagcgcgacttcctggtccaatggcgccgcgtgagtaaggccccggaggccctcttctttgttcagttcgagaagggcgagagctactttcacctgcacgttctggtcgagaccacgggggtcaagtccatggtgctaggccgcttcctgagtcagattcgggaaaagcttggtccagaccatctacccgcggggtcgagccccaccttgcccaactggttcgcggtgaccaaagacgcggtaatggcgccggcgggggggaacaaggtggtggacgagtgctacatccccaactacctcctgcccaagactcagcccgagctgcagtgggcgtggactaacatggaggagtatataagcgcgtgcttgaacctggccgagcgcaaacggctcgtggcgcagcacctgacccacgtcagccagacgcaggagcagaacaaggagaatctgaaccccaattctgacgcgcccgtgatcaggtcaaaaacctccgcgcgctatatggagctggtcgggtggctggtggaccggggcatcacctccgagaagcagtggatccaggaggaccaggcctcgtacatctccttcaacgccgcctccaactcgcggtcccagatcaaggccgcgctggacaatgccggcaagatcatggcgctgaccaaatccgcgcccgactacctggtggggccctcgctgcccgcggacattacccagaaccgcatctaccgcatcctcgctctcaacggctacgaccctgcctacgccggctccgtctttctcggctgggctcagaaaaagttcgggaaacgcaacaccatctggctgtttggacccgccaccaccggcaagaccaacattgcggaagccatcgcccacgccgtgcccttctacggctgcgtcaactggaccaatgagaactttcccttcaatgattgcgtcgacaagatggtgatctggtgggaggagggcaagatgacggccaaggtcgtggagtccgccaaggccattctcggcggcagcaaggtgcgcgtggaccaaaagtgcaagtcgtccgcccagatcgaccccacccccgtgatcgtcacctccaacaccaacatgtgcgccgtgattgacgggaacagcaccaccttcgagcaccagcagcctctccaggaccggatgtttaagttcgaactcacccgccgtctggagcacgactttggcaaggtgacaaagcaggaagtcaaagagttcttccgctgggccagtgatcacgtgaccgaggtggcgcatgagttttacgtcagaaagggcggagccagcaaaagacccgcccccgatgacgcggataaaagcgagcccaagcgggcctgcccctcagtcgcggatccatcgacgtcagacgcggaaggagctccggtggactttgccgacaggtaccaaaacaaatgttctcgtcacgcgggcatgcttcagatgctgtttccctgcaaaacgtgcgagagaatgaatcagaatttcaacatttgcttcacacacggggtcagagactgctcagagtgtttccccggcgtgtcagaatctcaaccggtcgtcagaaagaggacgtatcggaaactctgtgcgattcatcatctgctggggcgggctcccgagattgcttgctcggcctgcgatctggtcaacgtggacctggatgactgtgtttctgagcaataaatgacttaaaccaggtatggctgccgatggttatcttccagattggctcgaggacaacctctctgagggcattcgcgagtggtgggcgctgaaacctggagccccgaagcccaaagccaaccagcaaaagcaggacgacggccggggtctggtgcttcctggctacaagtacctcggacccttcaacggactcgacaagggggagcccgtcaacgcggcggacgcagcggccctcgagcacgacaaggcctacgaccagcagctgcaggcgggtgacaatccgtacctgcggtataaccacgccgacgccgagtttcaggagcgtctgcaagaagatacgtcttttgggggcaacctcgggcgagcagtcttccaggccaagaagcgggttctcgaacctctcggtctggttgaggaaggcgctaagacggctcctggaaagaagagaccggtagagccatcaccccagcgttctccagactcctctacgggcatcggcaagaaaggccaacagcccgccagaaaaagactcaattttggtcagactggcgactcagagtcagttccagaccctcaacctctcggagaacctccagcagcgccctctggtgtgggacctaatacaatggctgcaggcggtggcgcaccaatggcagacaataacgaaggcgccgacggagtgggtagttcctcgggaaattggcattgcgattccacatggctgggcgacagagtcatcaccaccagcacccgaacctgggccctgcccacctacaacaaccacctctacaagcaaatctccaacgggacatcgggaggagccaccaacgacaacacctacttcggctacagcaccccctgggggtattttgactttaacagattccactgccacttttcaccacgtgactggcagcgactcatcaacaacaactggggattccggcccaagagactcagcttcaagctcttcaacatccaggtcaaggaggtcacgcagaatgaaggcaccaagaccatcgccaataacctcaccagcaccatccaggtgtttacggactcggagtaccagctgccgtacgttctcggctctgcccaccagggctgcctgcctccgttcccggcggacgtgttcatgattccccagtacggctacctaacactcaacaacggtagtcaggccgtgggacgctcctccttctactgcctggaatactttccttcgcagatgctgagaaccggcaacaacttccagtttacttacaccttcgaggacgtgcctttccacagcagctacgcccacagccagagcttggaccggctgatgaatcctctgattgaccagtacctgtactacttgtctcggactcaaacaacaggaggcacggcaaatacgcagactctgggcttcagccaaggtgggcctaatacaatggccaatcaggcaaagaactggctgccaggaccctgttaccgccaacaacgcgtctcaacgacaaccgggcaaaacaacaatagcaactttgcctggactgctgggaccaaataccatctgaatggaagaaattcattggctaatcctggcatcgctatggcaacacacaaagacgacgaggagcgtttttttcccagtaacgggatcctgatttttggcaaacaaaatgctgccagagacaatgcggattacagcgatgtcatgctcaccagcgaggaagaaatcaaaaccactaaccctgtggctacagaggaatacggtatcgtggcagataacttgcagcagcaaaacacggctcctcaaattggaactgtcaacagccagggggccttacccggtatggtctggcagaaccgggacgtgtacctgcagggtcccatctgggccaagattcctcacacggacggcaacttccacccgtctccgctgatgggcggctttggcctgaaacatcctccgcctcagatcctgatcaagaacacgcctgtacctgcggatcctccgaccaccttcaaccagtcaaagctgaactctttcatcacgcaatacagcaccggacaggtcagcgtggaaattgaatgggagctgcagaaggaaaacagcaagcgctggaaccccgagatccagtacacctccaactactacaaatctacaagtgtggactttgctgttaatacagaaggcgtgtactctgaaccccgccccattggcacccgttacctcacccgtaatctgtaattgcctgttaatcaataaaccggttgattcgtttcagttgaactttggtctctgcg

SEQ ID NO: 5168 - protein, 738 aa, Adeno-associated virus 8; identical to SEQ ID NO: 5159

SEQ ID NO: 5169 - protein, 737 aa, Adeno-associated virus 8
MAADGYLPDWLEDNLSEGIREWWALKPGAPKPKANQQKQDDGRGLVLPGYKYLGPFNGLDKGEPVNAADAAALEHDKAYDQQLQAGDNPYLRYNHADAEFQERLQEDTSFGGNLGRAVFQAKKRVLEPLGLVEEGAKTAPGKKRPVEPSPQRSPDSSTGIGKKGQQPARKRLNFGQTGDSESVPDPQPLGEPPAAPSGVGPNTMAAGGGAPMADNNEGADGVGSSSGNWHCDSTWLGDRVITTSTRTWALPTYNNHLYKQISNGTSGGATNDNTYFGYSTPWGYFDFNRFHCHFSPRDWQRLINNNWGFRPKRLSFKLFNIQVKEVTQNEGTKTIANNLTSTIQVFTDSEYQLPYVLGSAHQGCLPPFPADVFMIPQYGYLTLNNGSQAVGRSSFYCLEYFPSQMLRTGNNFQFTYTFEDVPFHSSYAHSQSLDRLMNPLIDQYLYYLSRTQTTGGTANTQTLGFSQGGPNTMANQAKNWLPGPCYRQQRVSTTTGQNNNSNFAWTAGTKYHLNGRNSLANPGIAMATHKDDEERFFPSNGILIFGKQNAARDNADYSDVMLTSEEEIKTTNPVATEEYGIVADNLQQQNTAPQIGTVNSQGALPGMVWQNRDVYLQGPIWAKIPHTDGNFHPSPLMGGFGLKHPPPQILIKNTPVPADPPTTFNQSKLNSFITQYSTGQVSVEIEWELQKENSKRWNPEIQYTSNYYKSTSVDFAVIQKACTLNPAPLAPVTSPVI

SEQ ID NO: 5170 - DNA, 2217 bp, Adeno-associated virus 8; identical to SEQ ID NO: 5165
  source 1..2217: mol_type = unassigned DNA

SEQ ID NO: 5171 - DNA, 4385 bp, Adeno-associated virus 9
  source 1..4385: mol_type = unassigned DNA
cagagagggagtggccaactccatcactaggggtaatcgcgaagcgcctcccacgctgccgcgtcagcgctgacgtagattacgtcataggggagtggtcctgtattagctgtcacgtgagtgcttttgcgacattttgcgacaccacatggccatttgaggtatatatggccgagtgagcgagcaggatctccattttgaccgcgaaatttgaacgagcagcagccatgccgggcttctacgagattgtgatcaaggtgccgagcgacctggacgagcacctgccgggcatttctgactcttttgtgaactgggtggccgagaaggaatgggagctgcccccggattctgacatggatcggaatctgatcgagcaggcacccctgaccgtggccgagaagctgcagcgcgacttcctggtccaatggcgccgcgtgagtaaggccccggaggccctcttctttgttcagttcgagaagggcgagagctactttcacctgcacgttctggtcgagaccacgggggtcaagtccatggtgctaggccgcttcctgagtcagattcgggagaagctggtccagaccatctaccgcgggatcgagccgaccctgcccaactggttcgcggtgaccaagacgcgtaatggcgccggcggggggaacaaggtggtggacgagtgctacatccccaactacctcctgcccaagactcagcccgagctgcagtgggcgtggactaacatggaggagtatataagcgcgtgcttgaacctggccgagcgcaaacggctcgtggcgcagcacctgacccacgtcagccagacgcaggagcagaacaaggagaatctgaaccccaattctgacgcgcccgtgatcaggtcaaaaacctccgcgcgctacatggagctggtcgggtggctggtggaccggggcatcacctccgagaagcagtggatccaggaggaccaggcctcgtacatctccttcaacgccgcctccaactcgcggtcccagatcaaggccgcgctggacaatgccggcaagatcatggcgctgaccaaatccgcgcccgactacctggtaggcccttcacttccggtggacattacgcagaaccgcatctaccgcatcctgcagctcaacggctacgaccctgcctacgccggctccgtctttctcggctgggcacaaaagaagttcgggaaacgcaacaccatctggctgtttgggccggccaccacgggaaagaccaacatcgcagaagccattgcccacgccgtgcccttctacggctgcgtcaactggaccaatgagaactttcccttcaacgattgcgtcgacaagatggtgatctggtgggaggagggcaagatgacggccaaggtcgtggagtccgccaaggccattctcggcggcagcaaggtgcgcgtggaccaaaagtgcaagtcgtccgcccagatcgaccccactcccgtgatcgtcacctccaacaccaacatgtgcgccgtgattgacgggaacagcaccaccttcgagcaccagcagcctctccaggaccggatgtttaagttcgaactcacccgccgtctggagcacgactttggcaaggtgacaaagcaggaagtcaaagagttcttccgctgggccagtgatcacgtgaccgaggtggcgcatgagttttacgtcagaaagggcggagccagcaaaagacccgcccccgatgacgcggataaaagcgagcccaagcgggcctgcccctcagtcgcggatccatcgacgtcagacgcggaaggagctccggtggactttgccgacaggtaccaaaacaaatgttctcgtcacgcgggcatgcttcagatgctgcttccctgcaaaacgtgcgagagaatgaatcagaatttcaacatttgcttcacacacggggtcagagactgctcagagtgtttccccggcgtgtcagaatctcaaccggtcgtcagaaagaggacgtatcggaaactctgtgcgattcatcatctgctggggcgggctcccgagattgcttgctcggcctgcgatctggtcaacgtggacctggatgactgtgtttctgagcaataaatgacttaaaccaggtatggctgccgatggttatcttccagattggctcgaggacaacctctctgagggcattcgcgagtggtgggcgctgaaacctggagccccgaagcccaaagccaaccagcaaaagcaggacgacggccggggtctggtgcttcctggctacaagtacctcggacccttcaacggactcgacaagggggagcccgtcaacgcggcggacgcagcggccctcgagcacggcaaggcctacgaccagcagctgcaggcgggtgacaatccgtacctgcggtataaccacgccgacgccgagtttcaggagcgtctgcaagaagatacgtcttttgggggcaacctcgggcgagcagtcttccaggccaagaagcgggttctcgaacctctcggtctggttgaggaaggcgctaagacggctcctggaaagaagagaccggtagagccatcaccccagcgttctccagactcctctacgggcatcggcaagaaaggccaacagcccgccagaaaaagactcaattttggtcagactggcgactcagagtcagttccagaccctcaacctctcggagaacctccagcagcgccctctggtgtgggacctaatacaatggctgcaggcggtggcgcaccaatggcagacaataacgaaggcgccgacggagtgggtaattcctcgggaaattggcattgcgattccacatggctgggggacagagtcatcaccaccagcacccgaacctgggcattgcccacctacaacaaccacctctacaagcaaatctccaatggaacatcgggaggaagcaccaacgacaacacctactttggctacagcaccccctgggggtattttgacttcaacagattccactgccacttctcaccacgtgactggcagcgactcatcaacaacaactggggattccggccaaagagactcaacttcaagctgttcaacatccaggtcaaggaggttacgacgaacgaaggcaccaagaccatcgccaataaccttaccagcaccgtccaggtctttacggactcggagtaccagctaccgtacgtcctaggctctgcccaccaaggatgcctgccaccgtttcctgcagacgtcttcatggttcctcagtacggctacctgacgctcaacaatggaagtcaagcgttaggacgttcttctttctactgtctggaatacttcccttctcagatgctgagaaccggcaacaactttcagttcagctacactttcgaggacgtgcctttccacagcagctacgcacacagccagagtctagatcgactgatgaaccccctcatcgaccagtacctatactacctggtcagaacacagacaactggaactgggggaactcaaactttggcattcagccaagcaggccctagctcaatggccaatcaggctagaaactgggtacccgggccttgctaccgtcagcagcgcgtctccacaaccaccaaccaaaataacaacagcaactttgcgtggacgggagctgctaaattcaagctgaacgggagagactcgctaatgaatcctggcgtggctatggcatcgcacaaagacgacgaggaccgcttctttccatcaagtggcgttctcatatttggcaagcaaggagccgggaacgatggagtcgactacagccaggtgctgattacagatgaggaagaaattaaagccaccaaccctgtagccacagaggaatacggagcagtggccatcaacaaccaggccgctaacacgcaggcgcaaactggacttgtgcataaccagggagttattcctggtatggtctggcagaaccgggacgtgtacctgcagggccctatttgggctaaaatacctcacacagatggcaactttcacccgtctcctctgatgggtggatttggactgaaacacccacctccacagattctaattaaaaatacaccagtgccggcagatcctcctcttaccttcaatcaagccaagctgaactctttcatcacgcagtacagcacgggacaagtcagcgtggaaatcgagtgggagctgcagaaagaaaacagcaagcgctggaatccagagatccagtatacttcaaactactacaaatctacaaatgtggactttgctgtcaataccaaaggtgtttactctgagcctcgccccattggtactcgttacctcacccgtaatttgtaattgcctgttaatcaataaaccggttaattcgtttcagttgaactttggtctctgcg

SEQ ID NO: 5172 - DNA, 4382 bp, Adeno-associated virus 9
  source 1..4382: mol_type = unassigned DNA
cagagagggagtggccaactccatcactaggggtaatcgcgaagcgcctcccacgctgccgcgtcagcgctgacgtagattacgtcataggggagtggtcctgtattagctgtcacgtgagtgcttttgcgacattttgcgacaccacatggccatttgaggtatatatggccgagtgagcgagcaggatctccattttgaccgcgaaatttgaacgagcagcagccatgccgggcttctacgagattgtgatcaaggtgccgagcgacctggacgagcacctgccgggcatttctgactcttttgtgaactgggtggccgagaaggaatgggagctgcccccggattctgacatggatcggaatctgatcgagcaggcacccctgaccgtggccgagaagctgtagcgcgacttcctggtccaatggcgccgcgtgagtaaggccccggaggccctcttctttgttcagttcgagaagggcgagagctactttcacctgcacgttctggtcgagaccacgggggtcaagtccatggtgctaggccgcttcctgagtcagattcgggagaagctggtccagaccatctaccgcgggatcgagccgaccctgcccaactggttcgcggtgaccaagacgcgtaatggcgccggcggggggaacaaggtggtggacgagtgctacatccccaactacctcctgcccaagactcagcccgagctgcagtgggcgtggactaacatggaggagtatataagcgcgtgcttgaacctggccgagcgcaaacggctcgtggcgcagcacctgacccacgtcagccagacgcaggagcagaacaaggagaatctgaaccccaattctgacgcgcccgtgatcaggtcaaaaacctccgcgcgctacatggagctggtcgggtggctggtggaccggggcatcacctccgagaagcagtggatccaggaggaccaggcctcgtacatctccttcaacgccgcctccaactcgcggtcccagatcaaggccgcgctggacaatgccggcaagatcatggcgctgaccaaatccgcgcccgactacctggtaggcccttcacttccggtggacattacgcagaaccgcatctaccgcatcctgcagctcaacggctacgaccctgcctacgccggctccgtctttctcggctgggcacaaaagaagttcgggaaacgcaacaccatctggctgtttgggccggccaccacgggaaagaccaacatcgcagaagccattgcccacgccgtgcccttctacggctgcgtcaactggaccaatgagaactttcccttcaacgattgcgtcgacaagatggtgatctggtgggaggagggcaagatgacggccaaggtcgtggagtccgccaaggccattctcggcggcagcaaggtgcgcgtggaccaaaagtgcaagtcgtccgcccagatcgaccccactcccgtgatcgtcacctccaacaccaacatgtgcgccgtgattgacgggaacagcaccaccttcgagcaccagcagcctctccaggaccggatgtttaagttcgaactcacccgccgtctggagcacgactttggcaaggtgacaaagcaggaagtcaaagagttcttccgctgggccagtgatcacgtgaccgaggtggcgcatgagttttacgtcagaaagggcggagccagcaaaagacccgcccccgatgacgcggataaaagcgagcccaagcgggcctgcccctcagtcgcggatccatcgacgtcagacgcggaaggagctccggtggactttgccgacaggtaccaaaacaaatgttctcgtcacgcgggcatgcttcagatgctgcttccctgcaaaacgtgcgagagaatgaatcagaatttcaacatttgcttcacacacggggtcagagactgctcagagtgtttccccggcgtgtcagaatctcaaccggtcgtcagaaagaggacgtatcggaaactctgtgcgattcatcatctgctggggcgggctcccgagattgcttgctcggcctgcgatctggtcaacgtggacctggatgactgtgtttctgagcaataaatgacttaaaccaggtatggctgccgatggttatcttccagattggctcgaggacaacctctctgagggcattcgcgagtggtgggacctgaaacctggagccccgaaacccaaagccaaccagcaaaagcaggacgacggccggggtctggtgcttcctggctacaagtacctcggacccttcaacggactcgacaagggggagcccgtcaacgcggcggacgcagcggccctcgagcacgacaaggcctacgaccagcagctcaaagcgggtgacaatccgtacctgcggtataaccacgccgacgccgagtttcaggagcgtctgcaagaagatacgtcttttgggggcaacctcgggcgagcagtcttccaggccaagaagcgggttctcgaacctctcggtctggttgaggaaggcgctaagacggctcctggaaagaagagaccggtagagcagtcaccccaagaaccagactcatcctcgggcatcggcaaatcaggccagcagcccgctaaaaagagactcaattttggtcagactggcgactcagagtcagtccccgacccacaacctctcggagaacctccagaagccccctcaggtctgggacctaatacaatggcttcaggcggtggcgctccaatggcagacaataacgaaggcgccgacggagtgggtaattcctcgggaaattggcattgcgattccacatggctgggggacagagtcatcaccaccagcacccgaacctgggcattgcccacctacaacaaccacctctacaagcaaatctccaatggaacatcgggaggaagcaccaacgacaacacctactttggctacagcaccccctgggggtattttgacttcaacagattccactgccacttctcaccacgtgactggcagcgactcatcaacaacaactggggattccggccaaagagactcaacttcaagctgttcaacatccaggtcaaggaggttacgacgaacgaaggcaccaagaccatcgccaataaccttaccagcaccgtccaggtctttacggactcggagtaccagctaccgtacgtcctaggctctgcccaccaaggatgcctgccaccgtttcctgcagacgtcttcatggttcctcagtacggctacctgacgctcaacaatggaagtcaagcgttaggacgttcttctttctactgtctggaatacttcccttctcagatgctgagaaccggcaacaactttcagttcagctacactttcgaggacgtgcctttccacagcagctacgcacacagccagagtctagatcgactgatgaaccccctcatcgaccagtacctatactacctggtcagaacacagacaactggaactgggggaactcaaactttggcattcagccaagcaggccctagctcaatggccaatcaggctagaaactgggtacccgggccttgctaccgtcagcagcgcgtctccacaaccaccaaccaaaataacaacagcaactttgcgtggacgggagctgctaaattcaagctgaacgggagagactcgctaatgaatcctggcgtggctatggcatcgcacaaagacgacgaggaccgcttctttccatcaagtggcgttctcatatttggcaagcaaggagccgggaacgatggagtcgactacagccaggtgctgattacagatgaggaagaaattaaagccaccaaccctgtagccacagaggaatacggagcagtggccatcaacaaccaggccgctaacacgcaggcgcaaactggacttgtgcataaccagggagttattcctggtatggtctggcagaaccgggacgtgtacctgcagggccctatttgggctaaaatacctcacacagatggcaactttcacccgtctcctctgatgggtggatttggactgaaacacccacctccacagattctaattaaaaatacaccagtgccggcagatcctcctcttaccttcaatcaagccaagctgaactctttcatcacgcagtacagcacgggacaagtcagcgtggaaatcgagtgggagctgcagaaagaaaacagcaagcgctggaatccagagatccagtatacttcaaactactacaaatctacaaatgtggactttgctgtcaataccgaaggtgtttactctgagcctcgccccattggtactcgttacctcacccgtaatttgtaattgcctgttaatcaataaaccggttaattcgtttcagttgaactttggtctctgcg

SEQ ID NO: 5173 - protein, 736 aa, Adeno-associated virus 9; identical to SEQ ID NO: 4805

SEQ ID NO: 5174 - protein, 736 aa, Adeno-associated virus 9
MAADGYLPDWLEDNLSEGIREWWDLKPGAPKPKANQQKQDDGRGLVLPGYKYLGPFNGLDKGEPVNAADAAALEHDKAYDQQLKAGDNPYLRYNHADAEFQERLQEDTSFGGNLGRAVFQAKKRVLEPLGLVEEGAKTAPGKKRPVEQSPQEPDSSSGIGKSGQQPAKKRLNFGQTGDSESVPDPQPLGEPPEAPSGLGPNTMASGGGAPMADNNEGADGVGNSSGNWHCDSTWLGDRVITTSTRTWALPTYNNHLYKQISNGTSGGSTNDNTYFGYSTPWGYFDFNRFHCHFSPRDWQRLINNNWGFRPKRLNFKLFNIQVKEVTTNEGTKTIANNLTSTVQVFTDSEYQLPYVLGSAHQGCLPPFPADVFMVPQYGYLTLNNGSQALGRSSFYCLEYFPSQMLRTGNNFQFSYTFEDVPFHSSYAHSQSLDRLMNPLIDQYLYYLVRTQTTGTGGTQTLAFSQAGPSSMANQARNWVPGPCYRQQRVSTTTNQNNNSNFAWTGAAKFKLNGRDSLMNPGVAMASHKDDEDRFFPSSGVLIFGKQGAGNDGVDYSQVLITDEEEIKATNPVATEEYGAVAINNQAANTQAQTGLVHNQGVIPGMVWQNRDVYLQGPIWAKIPHTDGNFHPSPLMGGFGLKHPPPQILIKNTPVPADPPLTFNQAKLNSFITQYSTGQVSVEIEWELQKENSKRWNPEIQYTSNYYKSTNVDFAVNTEGVYSEPRPIGTRYLTRNL

SEQ ID NO: 5175 - protein, 623 aa, Adeno-associated virus 9
MPGFYEIVIKVPSDLDEHLPGISDSFVNWVAEKEWELPPDSDMDRNLIEQAPLTVAEKLQRDFLVQWRRVSKAPEALFFVQFEKGESYFHLHVLVETTGVKSMVLGRFLSQIREKLVQTIYRGIEPTLPNWFAVTKTRNGAGGGNKVVDECYIPNYLLPKTQPELQWAWTNMEEYISACLNLAERKRLVAQHLTHVSQTQEQNKENLNPNSDAPVIRSKTSARYMELVGWLVDRGITSEKQWIQEDQASYISFNAASNSRSQIKAALDNAGKIMALTKSAPDYLVGPSLPVDITQNRIYRILQLNGYDPAYAGSVFLGWAQKKFGKRNTIWLFGPATTGKTNIAEAIAHAVPFYGCVNWTNENFPFNDCVDKMVIWWEEGKMTAKVVESAKAILGGSKVRVDQKCKSSAQIDPTPVIVTSNTNMCAVIDGNSTTFEHQQPLQDRMFKFELTRRLEHDFGKVTKQEVKEFFRWASDHVTEVAHEFYVRKGGASKRPAPDDADKSEPKRACPSVADPSTSDAEGAPVDFADRYQNKCSRHAGMLQMLLPCKTCERMNQNFNICFTHGVRDCSECFPGVSESQPVVRKRTYRKLCAIHHLLGRAPEIACSACDLVNVDLDDCVSEQ

SEQ ID NO: 5176 - DNA, 1797 bp, synthetic construct
  misc_feature 1..1797: note = Description of Artificial Sequence: Synthetic polynucleotide
  source 1..1797: mol_type = other DNA
acggctccgaccggagacaagcggaaaggcgaagacgaacctcgtttgcccgacacttcttcacagactcccaagaaaaacaagaagcctcgcaaggaaagaccttccggcggggcagaagatccgggcgaaggcacctcttccaacgctggagcagcagcacccgcctctagtgtgggatcatctatcatggctgaaggaggtggcggcccagtgggcgatgcaggccagggtgccgatggagtgggcaattcctccggaaattggcattgcgattcccaatggctggaaaacggagtcgtcactcgaaccacccgaacctgggtcttgcccagctacaacaaccacctgtacaaacgaatccaaggacccagcggaggcgacaacaacaacaaattctttggattcagcaccccctggggatactttgactacaatcgattccactgccacttttccccgcgagactggcaacgactcatcaacaacaactggggcatccgtcccaaagcgatgcgctttagactctttaacatccaggttaaagaggtcacggtccaagacttcaacaccaccatcggcaacaacctcaccagtacggtccaggtctttgcggacaaggactaccaactgccgtacgtcctcggatcggctaccgaaggcaccttcccgccgttcccagcggatatctacacgatcccgcagtacgggtactgcacgctaaactacaacaacgaggcggtggatcgttcggccttctactgtctggactactttccctcagacatgctgcggacaggaaataactttgagtttacttacaccttcgaggacgttcctttccatagcatgtttgcccacaaccagacgctagaccggctgatgaatcccctcgtggatcagtacctctgggctttcagctccgtcagccaagcaggctcatctggacgagctcttcattactcgcgggcgactaaaaccaacatggcggctcaatataggaactggttacctgggcctttcttccgtgatcagcaaatctttacgggcgctagcaacatcactaaaaataacgtctttagcgtttgggaaaaaggcaagcaatgggaactcgacaatcggaccaacctaatgcagcccggtcctgcggcagcgaccacctttagcggagaacctgaccgtcaagccatgcaaaacacgctggcttttagcaggaccgtctacgatcaaacgaccgccacgaccgatcgtaaccagatactcatcaccaacgaagacgaaatcagacccaccaactcggtcggtatcgacgcgtggggagcagttcccaccaacaaccagtcgatcgtgacccccggcactcgcgcggccgtcaacaatcaaggggcgcttcccgggatggtgtggcaaaacagagacatttaccctacagggacccatttggccaaaattcccgacactgacaatcacttccatccgtccccgcttattgggcggtttggctgcaagcatccccctccccagattttcattaaaaacacacccgtccctgccaacccttcggaaacgttccagacggccaaagtggcctccttcatcaaccagtactcgaccggacagtgcaccgtcgaaatcttttgggaactcaagaaggaaacctccaagcgctggaaccccgaaatccagttcacctccaactttggcaacgcggccgacatccagtttgccgtctccgacacgggatcctattccgaacctcgtcccatcggtacccgttaccttaccaaacctctgtaa

SEQ ID NO: 5177 - DNA, 1989 bp, synthetic construct
  misc_feature 1..1989: note = Description of Artificial Sequence: Synthetic polynucleotide
  source 1..1989: mol_type = other DNA
atgaggtcgtactacgaggtcatcgttcagctgcccaacgacgtcgagagtcaggtacctggaatctccgattcgttcgtcaactggattacgtcgcgagaatggacgttgcctgaggacgccgattgggatttggaccaggtcgatcaagttcaactgacgctcggcgacaaaatccaacgggagattcgaactcattgggggacgatggccaaagaaccggactttcactattttatccaactggaacaaggtgaggtgttctttcatttacacgtcctgctggaaacgtgttccgtaaagccgatggtactcggaagatatatccgacatattcaacaaaaaattgtgagtaaagtctactgcgccacgagcctacgatggaaggatggatgcgtggtgaccaagaccaaaaatttcgggggcgcgaacaaggtccgggccgagtcgtatattcccgcctacctgatcccgaaacagcaaccggaagtgcagtgggcgtggactaacgtgcccgagtatataaaagcgtgcttgcaccgagaactgcgtgccagtctcgcgcgacttcacttcgaggaggcgggcgtctcgcaatccaaggaaaatctcgcgagaactgcagacggcgctcccgtgatgccgacccgcgtcagcaaacgctacatggagctcgtggattggctcgtggagaaggggatcaccaccgagaaggaatggctgctggaaaacagagaaagctttcggagctttcaggcctcgagcaactcggcgcgtcagatcaagacggccctgcaaggcgccattcaggagatgcttctgaccaagacggcggaggactacctcgtcggaaaggatcccgtctcggacgacgacatccgtcagaaccgcatctacaagattctggaactgaaccactacgacccagcgtacgtggggagtattttggtcgggtggtgccagaagaaatggggcaagcgaaacacgctgtggctgttcggacatgcgaccaccggcaagaccaacatcgcggaggctattgcccatgctgtgccgttctatggatgcgttaactggaccaacgagaactttccgttcaacgactgcgtcgaaaaaatgattatctggtgggaggagggcaaaatgaccgccaaagtggtggaaacagccaaggcgattctgggaggatctcgggtgagagtggaccaaaaatgcaaagcttcggttccgatcgaaccgacgccggtcattattaccagtaacaccaacatgtgttatgtcatcgacgggaacacgaccacgttcgagcataagcagccgttggaggacaggatgtttaagctcgaattgctgactcggttgcctgatgactttggtaaggtgaccaaacaggaggtgcgtcaattcttcaggtggtctcaggatcacctgacccctgtgatcccagaattcctagtgcggaaggcggagtctcgcaaaagacccgccccttccggggaaggctatataagcccgacaaagcggcccgcgctcgcagagcagcagcaggcgtcggagagcgcggacccggttcccaccaggtatcgtatcaaatgctcgaaacattgcggtatggataaaatgttgtttccttgccaaatttgtgaatcgatgaacagagatattaatatttgtgctattcataaaacgaccgactgtaaagagtgtttccccgactacggggataaagatgatgtagaactacccccctgtacagaacacaacgtgtctcgttgttatcaatgtcattcgggcgaattgtatcgcgtgacttcggactctgacgagaaacctgcccccgagagtgatgaaggcaccgagccatcctatgctccctgcacgattcaccacctgatgggcaagagtcacgggttagtcacttgcgcggcgtgtcggttgaaaaatagtacgttgcatgatgacttggatgacggtgatctcgaacaataa

SEQ ID NO: 5178 - DNA, 1626 bp, synthetic construct
  misc_feature 1..1626: note = Description of Artificial Sequence: Synthetic polynucleotide
  source 1..1626: mol_type = other DNA
atgaggtcgtactacgaggtcatcgttcagctgcccaacgacgtcgagagtcaggtacctggaatctccgattcgttcgtcaactggattacgtcgcgagaatggacgttgcctgaggacgccgattgggatttggaccaggtcgatcaagttcaactgacgctcggcgacaaaatccaacgggagattcgaactcattgggggacgatggccaaagaaccggactttcactattttatccaactggaacaaggtgaggtgttctttcatttacacgtcctgctggaaacgtgttccgtaaagccgatggtactcggaagatatatccgacatattcaacaaaaaattgtgagtaaagtctactgcgccacgagcctacgatggaaggatggatgcgtggtgaccaagaccaaaaatttcgggggcgcgaacaaggtccgggccgagtcgtatattcccgcctacctgatcccgaaacagcaaccggaagtgcagtgggcgtggactaacgtgcccgagtatataaaagcgtgcttgcaccgagaactgcgtgccagtctcgcgcgacttcacttcgaggaggcgggcgtctcgcaatccaaggaaaatctcgcgagaactgcagacggcgctcccgtgatgccgacccgcgtcagcaaacgctacatggagctcgtggattggctcgtggagaaggggatcaccaccgagaaggaatggctgctggaaaacagagaaagctttcggagctttcaggcctcgagcaactcggcgcgtcagatcaagacggccctgcaaggcgccattcaggagatgcttctgaccaagacggcggaggactacctcgtcggaaaggatcccgtctcggacgacgacatccgtcagaaccgcatctacaagattctggaactgaaccactacgacccagcgtacgtggggagtattttggtcgggtggtgccagaagaaatggggcaagcgaaacacgctgtggctgttcggacatgcgaccaccggcaagaccaacatcgcggaggctattgcccatgctgtgccgttctatggatgcgttaactggaccaacgagaactttccgttcaacgactgcgtcgaaaaaatgattatctggtgggaggagggcaaaatgaccgccaaagtggtggaaacagccaaggcgattctgggaggatctcgggtgagagtggaccaaaaatgcaaagcttcggttccgatcgaaccgacgccggtcattattaccagtaacaccaacatgtgttatgtcatcgacgggaacacgaccacgttcgagcataagcagccgttggaggacaggatgtttaagctcgaattgctgactcggttgcctgatgactttggtaaggtgaccaaacaggaggtgcgtcaattcttcaggtggtctcaggatcacctgacccctgtgatcccagaattcctagtgcggaaggcggagtctcgcaaaagacccgccccttccggggaaggctatataagcccgacaaagcggcccgcgctcgcagagcagcagcaggcgtcggagagcgcggacccggttcccaccagattggttggagcggttggtcaaaaagggagtgaatgctgcagctga

SEQ ID NO: 5179 - DNA, 1323 bp, synthetic construct
  misc_feature 1..1323: note = Description of Artificial Sequence: Synthetic polynucleotide
  source 1..1323: mol_type = other DNA
atggagctcgtggattggctcgtggagaaggggatcaccaccgagaaggaatggctgctggaaaacagagaaagctttcggagctttcaggcctcgagcaactcggcgcgtcagatcaagacggccctgcaaggcgccattcaggagatgcttctgaccaagacggcggaggactacctcgtcggaaaggatcccgtctcggacgacgacatccgtcagaaccgcatctacaagattctggaactgaaccactacgacccagcgtacgtggggagtattttggtcgggtggtgccagaagaaatggggcaagcgaaacacgctgtggctgttcggacatgcgaccaccggcaagaccaacatcgcggaggctattgcccatgctgtgccgttctatggatgcgttaactggaccaacgagaactttccgttcaacgactgcgtcgaaaaaatgattatctggtgggaggagggcaaaatgaccgccaaagtggtggaaacagccaaggcgattctgggaggatctcgggtgagagtggaccaaaaatgcaaagcttcggttccgatcgaaccgacgccggtcattattaccagtaacaccaacatgtgttatgtcatcgacgggaacacgaccacgttcgagcataagcagccgttggaggacaggatgtttaagctcgaattgctgactcggttgcctgatgactttggtaaggtgaccaaacaggaggtgcgtcaattcttcaggtggtctcaggatcacctgacccctgtgatcccagaattcctagtgcggaaggcggagtctcgcaaaagacccgccccttccggggaaggctatataagcccgacaaagcggcccgcgctcgcagagcagcagcaggcgtcggagagcgcggacccggttcccaccaggtatcgtatcaaatgctcgaaacattgcggtatggataaaatgttgtttccttgccaaatttgtgaatcgatgaacagagatattaatatttgtgctattcataaaacgaccgactgtaaagagtgtttccccgactacggggataaagatgatgtagaactacccccctgtacagaacacaacgtgtctcgttgttatcaatgtcattcgggcgaattgtatcgcgtgacttcggactctgacgagaaacctgcccccgagagtgatgaaggcaccgagccatcctatgctccctgcacgattcaccacctgatgggcaagagtcacgggttagtcacttgcgcggcgtgtcggttgaaaaatagtacgttgcatgatgacttggatgacggtgatctcgaacaataa

SEQ ID NO: 5180 - DNA, 960 bp, synthetic construct
  misc_feature 1..960: note = Description of Artificial Sequence: Synthetic polynucleotide
  source 1..960: mol_type = other DNA
atggagctcgtggattggctcgtggagaaggggatcaccaccgagaaggaatggctgctggaaaacagagaaagctttcggagctttcaggcctcgagcaactcggcgcgtcagatcaagacggccctgcaaggcgccattcaggagatgcttctgaccaagacggcggaggactacctcgtcggaaaggatcccgtctcggacgacgacatccgtcagaaccgcatctacaagattctggaactgaaccactacgacccagcgtacgtggggagtattttggtcgggtggtgccagaagaaatggggcaagcgaaacacgctgtggctgttcggacatgcgaccaccggcaagaccaacatcgcggaggctattgcccatgctgtgccgttctatggatgcgttaactggaccaacgagaactttccgttcaacgactgcgtcgaaaaaatgattatctggtgggaggagggcaaaatgaccgccaaagtggtggaaacagccaaggcgattctgggaggatctcgggtgagagtggaccaaaaatgcaaagcttcggttccgatcgaaccgacgccggtcattattaccagtaacaccaacatgtgttatgtcatcgacgggaacacgaccacgttcgagcataagcagccgttggaggacaggatgtttaagctcgaattgctgactcggttgcctgatgactttggtaaggtgaccaaacaggaggtgcgtcaattcttcaggtggtctcaggatcacctgacccctgtgatcccagaattcctagtgcggaaggcggagtctcgcaaaagacccgccccttccggggaaggctatataagcccgacaaagcggcccgcgctcgcagagcagcagcaggcgtcggagagcgcggacccggttcccaccagattggttggagcggttggtcaaaaagggagtgaatgctgcagctga

SEQ ID NO: 5181 - DNA, 1608 bp, synthetic construct
  misc_feature 1..1608: note = Description of Artificial Sequence: Synthetic polynucleotide
  source 1..1608: mol_type = other DNA
atggctgaaggaggtggcggcccagtgggcgatgcaggccagggtgccgatggagtgggcaattcctccggaaattggcattgcgattcccaatggctggaaaacggagtcgtcactcgaaccacccgaacctgggtcttgcccagctacaacaaccacctgtacaaacgaatccaaggacccagcggaggcgacaacaacaacaaattctttggattcagcaccccctggggatactttgactacaatcgattccactgccacttttccccgcgagactggcaacgactcatcaacaacaactggggcatccgtcccaaagcgatgcgctttagactctttaacatccaggttaaagaggtcacggtccaagacttcaacaccaccatcggcaacaacctcaccagtacggtccaggtctttgcggacaaggactaccaactgccgtacgtcctcggatcggctaccgaaggcaccttcccgccgttcccagcggatatctacacgatcccgcagtacgggtactgcacgctaaactacaacaacgaggcggtggatcgttcggccttctactgtctggactactttccctcagacatgctgcggacaggaaataactttgagtttacttacaccttcgaggacgttcctttccatagcatgtttgcccacaaccagacgctagaccggctgatgaatcccctcgtggatcagtacctctgggctttcagctccgtcagccaagcaggctcatctggacgagctcttcattactcgcgggcgactaaaaccaacatggcggctcaatataggaactggttacctgggcctttcttccgtgatcagcaaatctttacgggcgctagcaacatcactaaaaataacgtctttagcgtttgggaaaaaggcaagcaatgggaactcgacaatcggaccaacctaatgcagcccggtcctgcggcagcgaccacctttagcggagaacctgaccgtcaagccatgcaaaacacgctggcttttagcaggaccgtctacgatcaaacgaccgccacgaccgatcgtaaccagatactcatcaccaacgaagacgaaatcagacccaccaactcggtcggtatcgacgcgtggggagcagttcccaccaacaaccagtcgatcgtgacccccggcactcgcgcggccgtcaacaatcaaggggcgcttcccgggatggtgtggcaaaacagagacatttaccctacagggacccatttggccaaaattcccgacactgacaatcacttccatccgtccccgcttattgggcggtttggctgcaagcatccccctccccagattttcattaaaaacacacccgtccctgccaacccttcggaaacgttccagacggccaaagtggcctccttcatcaaccagtactcgaccggacagtgcaccgtcgaaatcttttgggaactcaagaaggaaacctccaagcgctggaaccccgaaatccagttcacctccaactttggcaacgcggccgacatccagtttgccgtctccgacacgggatcctattccgaacctcgtcccatcggtacccgttaccttaccaaacctctgtaa

SEQ ID NO: 5182 - DNA, 2232 bp, synthetic construct
  misc_feature 1..2232: note = Description of Artificial Sequence: Synthetic polynucleotide
  source 1..2232: mol_type = other DNA
atgtctctcatttctgatgcgattccagattggttggagcggttggtcaaaaagggagtgaatgctgcagctgatttctaccatttggaaagcggtcctcctcgtcctaaggcaaatcagcaaactcaagaatctcttgaaaaggacgattcgagaggtctcgtgttcccaggctacaattatctaggccctttcaacggtctagataaaggagaacccgtcaacgaggcagacgctgccgccttagaacacgacaaggcttacgacctcgaaatcaaggacgggcacaacccgtactttgagtacaacgaggccgacagacgtttccaggaacgtctcaaagacgatacctcctttggaggcaatttaggtaaagccatcttccaggccaaaaagagggttctcgaaccctttggtctggtggaagactcaaagacggctccgaccggagacaagcggaaaggcgaagacgaacctcgtttgcccgacacttcttcacagactcccaagaaaaacaagaagcctcgcaaggaaagaccttccggcggggcagaagatccgggcgaaggcacctcttccaacgctggagcagcagcacccgcctctagtgtgggatcatctatcatggctgaaggaggtggcggcccagtgggcgatgcaggccagggtgccgatggagtgggcaattcctccggaaattggcattgcgattcccaatggctggaaaacggagtcgtcactcgaaccacccgaacctgggtcttgcccagctacaacaaccacctgtacaaacgaatccaaggacccagcggaggcgacaacaacaacaaattctttggattcagcaccccctggggatactttgactacaatcgattccactgccacttttccccgcgagactggcaacgactcatcaacaacaactggggcatccgtcccaaagcgatgcgctttagactctttaacatccaggttaaagaggtcacggtccaagacttcaacaccaccatcggcaacaacctcaccagtacggtccaggtctttgcggacaaggactaccaactgccgtacgtcctcggatcggctaccgaaggcaccttcccgccgttcccagcggatatctacacgatcccgcagtacgggtactgcacgctaaactacaacaacgaggcggtggatcgttcggccttctactgtctggactactttccctcagacatgctgcggacaggaaataactttgagtttacttacaccttcgaggacgttcctttccatagcatgtttgcccacaaccagacgctagaccggctgatgaatcccctcgtggatcagtacctctgggctttcagctccgtcagccaagcaggctcatctggacgagctcttcattactcgcgggcgactaaaaccaacatggcggctcaatataggaactggttacctgggcctttcttccgtgatcagcaaatctttacgggcgctagcaacatcactaaaaataacgtctttagcgtttgggaaaaaggcaagcaatgggaactcgacaatcggaccaacctaatgcagcccggtcctgcggcagcgaccacctttagcggagaacctgaccgtcaagccatgcaaaacacgctggcttttagcaggaccgtctacgatcaaacgaccgccacgaccgatcgtaaccagatactcatcaccaacgaagacgaaatcagacccaccaactcggtcggtatcgacgcgtggggagcagttcccaccaacaaccagtcgatcgtgacccccggcactcgcgcggccgtcaacaatcaaggggcgcttcccgggatggtgtggcaaaacagagacatttaccctacagggacccatttggccaaaattcccgacactgacaatcacttccatccgtccccgcttattgggcggtttggctgcaagcatccccctccccagattttcattaaaaacacacccgtccctgccaacccttcggaaacgttccagacggccaaagtggcctccttcatcaaccagtactcgaccggacagtgcaccgtcgaaatcttttgggaactcaagaaggaaacctccaagcgctggaaccccgaaatccagttcacctccaactttggcaacgcggccgacatccagtttgccgtctccgacacgggatcctattccgaacctcgtcccatcggtacccgttaccttaccaaacctctgtaa

SEQ ID NO: 5183 - protein, 535 aa, synthetic construct
  REGION 1..535: note = Description of Artificial Sequence: Synthetic polypeptide
MAEGGGGPVGDAGQGADGVGNSSGNWHCDSQWLENGVVTRTTRTWVLPSYNNHLYKRIQGPSGGDNNNKFFGFSTPWGYFDYNRFHCHFSPRDWQRLINNNWGIRPKAMRFRLFNIQVKEVTVQDFNTTIGNNLTSTVQVFADKDYQLPYVLGSATEGTFPPFPADIYTIPQYGYCTLNYNNEAVDRSAFYCLDYFPSDMLRTGNNFEFTYTFEDVPFHSMFAHNQTLDRLMNPLVDQYLWAFSSVSQAGSSGRALHYSRATKTNMAAQYRNWLPGPFFRDQQIFTGASNITKNNVFSVWEKGKQWELDNRTNLMQPGPAAATTFSGEPDRQAMQNTLAFSRTVYDQTTATTDRNQILITNEDEIRPTNSVGIDAWGAVPTNNQSIVTPGTRAAVNNQGALPGMVWQNRDIYPTGTHLAKIPDTDNHFHPSPLIGRFGCKHPPPQIFIKNTPVPANPSETFQTAKVASFINQYSTGQCTVEIFWELKKETSKRWNPEIQFTSNFGNAADIQFAVSDTGSYSEPRPIGTRYLTKPL

SEQ ID NO: 5184 - protein, 440 aa, synthetic construct
  REGION 1..440: note = Description of Artificial Sequence: Synthetic polypeptide
MELVDWLVEKGITTEKEWLLENRESFRSFQASSNSARQIKTALQGAIQEMLLTKTAEDYLVGKDPVSDDDIRQNRIYKILELNHYDPAYVGSILVGWCQKKWGKRNTLWLFGHATTGKTNIAEAIAHAVPFYGCVNWTNENFPFNDCVEKMIIWWEEGKMTAKVVETAKAILGGSRVRVDQKCKASVPIEPTPVIITSNTNMCYVIDGNTTTFEHKQPLEDRMFKLELLTRLPDDFGKVTKQEVRQFFRWSQDHLTPVIPEFLVRKAESRKRPAPSGEGYISPTKRPALAEQQQASESADPVPTRYRIKCSKHCGMDKMLFPCQICESMNRDINICAIHKTTDCKECFPDYGDKDDVELPPCTEHNVSRCYQCHSGELYRVTSDSDEKPAPESDEGTEPSYAPCTIHHLMGKSHGLVTCAACRLKNSTLHDDLDDGDLEQ

SEQ ID NO: 5185 - protein, 319 aa, synthetic construct
  REGION 1..319: note = Description of Artificial Sequence: Synthetic polypeptide
MELVDWLVEKGITTEKEWLLENRESFRSFQASSNSARQIKTALQGAIQEMLLTKTAEDYLVGKDPVSDDDIRQNRIYKILELNHYDPAYVGSILVGWCQKKWGKRNTLWLFGHATTGKTNIAEAIAHAVPFYGCVNWTNENFPFNDCVEKMIIWWEEGKMTAKVVETAKAILGGSRVRVDQKCKASVPIEPTPVIITSNTNMCYVIDGNTTTFEHKQPLEDRMFKLELLTRLPDDFGKVTKQEVRQFFRWSQDHLTPVIPEFLVRKAESRKRPAPSGEGYISPTKRPALAEQQQASESADPVPTRLVGAVGQKGSECCS

SEQ ID NO: 5186 - protein, 662 aa, synthetic construct
  REGION 1..662: note = Description of Artificial Sequence: Synthetic polypeptide
MRSYYEVIVQLPNDVESQVPGISDSFVNWITSREWTLPEDADWDLDQVDQVQLTLGDKIQREIRTHWGTMAKEPDFHYFIQLEQGEVFFHLHVLLETCSVKPMVLGRYIRHIQQKIVSKVYCATSLRWKDGCVVTKTKNFGGANKVRAESYIPAYLIPKQQPEVQWAWTNVPEYIKACLHRELRASLARLHFEEAGVSQSKENLARTADGAPVMPTRVSKRYMELVDWLVEKGITTEKEWLLENRESFRSFQASSNSARQIKTALQGAIQEMLLTKTAEDYLVGKDPVSDDDIRQNRIYKILELNHYDPAYVGSILVGWCQKKWGKRNTLWLFGHATTGKTNIAEAIAHAVPFYGCVNWTNENFPFNDCVEKMIIWWEEGKMTAKVVETAKAILGGSRVRVDQKCKASVPIEPTPVIITSNTNMCYVIDGNTTTFEHKQPLEDRMFKLELLTRLPDDFGKVTKQEVRQFFRWSQDHLTPVIPEFLVRKAESRKRPAPSGEGYISPTKRPALAEQQQASESADPVPTRYRIKCSKHCGMDKMLFPCQICESMNRDINICAIHKTTDCKECFPDYGDKDDVELPPCTEHNVSRCYQCHSGELYRVTSDSDEKPAPESDEGTEPSYAPCTIHHLMGKSHGLVTCAACRLKNSTLHDDLDDGDLEQ

SEQ ID NO: 5187 - protein, 541 aa, synthetic construct
  REGION 1..541: note = Description of Artificial Sequence: Synthetic polypeptide
MRSYYEVIVQLPNDVESQVPGISDSFVNWITSREWTLPEDADWDLDQVDQVQLTLGDKIQREIRTHWGTMAKEPDFHYFIQLEQGEVFFHLHVLLETCSVKPMVLGRYIRHIQQKIVSKVYCATSLRWKDGCVVTKTKNFGGANKVRAESYIPAYLIPKQQPEVQWAWTNVPEYIKACLHRELRASLARLHFEEAGVSQSKENLARTADGAPVMPTRVSKRYMELVDWLVEKGITTEKEWLLENRESFRSFQASSNSARQIKTALQGAIQEMLLTKTAEDYLVGKDPVSDDDIRQNRIYKILELNHYDPAYVGSILVGWCQKKWGKRNTLWLFGHATTGKTNIAEAIAHAVPFYGCVNWTNENFPFNDCVEKMIIWWEEGKMTAKVVETAKAILGGSRVRVDQKCKASVPIEPTPVIITSNTNMCYVIDGNTTTFEHKQPLEDRMFKLELLTRLPDDFGKVTKQEVRQFFRWSQDHLTPVIPEFLVRKAESRKRPAPSGEGYISPTKRPALAEQQQASESADPVPTRLVGAVGQKGSECCS

SEQ ID NO: 5188 - protein, 743 aa, synthetic construct
  REGION 1..743: note = Description of Artificial Sequence: Synthetic polypeptide
MSLISDAIPDWLERLVKKGVNAAADFYHLESGPPRPKANQQTQESLEKDDSRGLVFPGYNYLGPFNGLDKGEPVNEADAAALEHDKAYDLEIKDGHNPYFEYNEADRRFQERLKDDTSFGGNLGKAIFQAKKRVLEPFGLVEDSKTAPTGDKRKGEDEPRLPDTSSQTPKKNKKPRKERPSGGAEDPGEGTSSNAGAAAPASSVGSSIMAEGGGGPVGDAGQGADGVGNSSGNWHCDSQWLENGVVTRTTRTWVLPSYNNHLYKRIQGPSGGDNNNKFFGFSTPWGYFDYNRFHCHFSPRDWQRLINNNWGIRPKAMRFRLFNIQVKEVTVQDFNTTIGNNLTSTVQVFADKDYQLPYVLGSATEGTFPPFPADIYTIPQYGYCTLNYNNEAVDRSAFYCLDYFPSDMLRTGNNFEFTYTFEDVPFHSMFAHNQTLDRLMNPLVDQYLWAFSSVSQAGSSGRALHYSRATKTNMAAQYRNWLPGPFFRDQQIFTGASNITKNNVFSVWEKGKQWELDNRTNLMQPGPAAATTFSGEPDRQAMQNTLAFSRTVYDQTTATTDRNQILITNEDEIRPTNSVGIDAWGAVPTNNQSIVTPGTRAAVNNQGALPGMVWQNRDIYPTGTHLAKIPDTDNHFHPSPLIGRFGCKHPPPQIFIKNTPVPANPSETFQTAKVASFINQYSTGQCTVEIFWELKKETSKRWNPEIQFTSNFGNAADIQFAVSDTGSYSEPRPIGTRYLTKPL

SEQ ID NO: 5189 - protein, 598 aa, synthetic construct
  REGION 1..598: note = Description of Artificial Sequence: Synthetic polypeptide
TAPTGDKRKGEDEPRLPDTSSQTPKKNKKPRKERPSGGAEDPGEGTSSNAGAAAPASSVGSSIMAEGGGGPVGDAGQGADGVGNSSGNWHCDSQWLENGVVTRTTRTWVLPSYNNHLYKRIQGPSGGDNNNKFFGFSTPWGYFDYNRFHCHFSPRDWQRLINNNWGIRPKAMRFRLFNIQVKEVTVQDFNTTIGNNLTSTVQVFADKDYQLPYVLGSATEGTFPPFPADIYTIPQYGYCTLNYNNEAVDRSAFYCLDYFPSDMLRTGNNFEFTYTFEDVPFHSMFAHNQTLDRLMNPLVDQYLWAFSSVSQAGSSGRALHYSRATKTNMAAQYRNWLPGPFFRDQQIFTGASNITKNNVFSVWEKGKQWELDNRTNLMQPGPAAATTFSGEPDRQAMQNTLAFSRTVYDQTTATTDRNQILITNEDEIRPTNSVGIDAWGAVPTNNQSIVTPGTRAAVNNQGALPGMVWQNRDIYPTGTHLAKIPDTDNHFHPSPLIGRFGCKHPPPQIFIKNTPVPANPSETFQTAKVASFINQYSTGQCTVEIFWELKKETSKRWNPEIQFTSNFGNAADIQFAVSDTGSYSEPRPIGTRYLTKPL

SEQ ID NO: 5190 - DNA, 4694 bp, synthetic construct
  misc_feature 1..4694: note = Description of Artificial Sequence: Synthetic polynucleotide
  source 1..4694: mol_type = other DNA
tggccagtttccaagacaggctcgctcgctcactcgggccggggccccaaaggggcccctagcgaccgcttcgcggtcgcggcccgagtgagcgagcgagcctgtcttggaaactggccagcactccggtgaggtaatgccgtcacgtggtcgggaatgggaacgggaaatctcgcgagaacgtaaacaaatataagacggcgccacacggcgctgcgtcatacgcgcgcgcgcaccggcgagatgaggtcgtactacgaggtcatcgttcagctgcccaacgacgtcgagagtcaggtacctggaatctccgattcgttcgtcaactggattacgtcgcgagaatggacgttgcctgaggacgccgattgggatttggaccaggtcgatcaagttcaactgacgctcggcgacaaaatccaacgggagattcgaactcattgggggacgatggccaaagaaccggactttcactattttatccaactggaacaaggtgaggtgttctttcatttacacgtcctgctggaaacgtgttccgtaaagccgatggtactcggaagatatatccgacatattcaacaaaaaattgtgagtaaagtctactgcgccacgagcctacgatggaaggatggatgcgtggtgaccaagaccaaaaatttcgggggcgcgaacaaggtccgggccgagtcgtatattcccgcctacctgatcccgaaacagcaaccggaagtgcagtgggcgtggactaacgtgcccgagtatataaaagcgtgcttgcaccgagaactgcgtgccagtctcgcgcgacttcacttcgaggaggcgggcgtctcgcaatccaaggaaaatctcgcgagaactgcagacggcgctcccgtgatgccgacccgcgtcagcaaacgctacatggagctcgtggattggctcgtggagaaggggatcaccaccgagaaggaatggctgctggaaaacagagaaagctttcggagctttcaggcctcgagcaactcggcgcgtcagatcaagacggccctgcaaggcgccattcaggagatgcttctgaccaagacggcggaggactacctcgtcggaaaggatcccgtctcggacgacgacatccgtcagaaccgcatctacaagattctggaactgaaccactacgacccagcgtacgtggggagtattttggtcgggtggtgccagaagaaatggggcaagcgaaacacgctgtggctgttcggacatgcgaccaccggcaagaccaacatcgcggaggctattgcccatgctgtgccgttctatggatgcgttaactggaccaacgagaactttccgttcaacgactgcgtcgaaaaaatgattatctggtgggaggagggcaaaatgaccgccaaagtggtggaaacagccaaggcgattctgggaggatctcgggtgagagtggaccaaaaatgcaaagcttcggttccgatcgaaccgacgccggtcattattaccagtaacaccaacatgtgttatgtcatcgacgggaacacgaccacgttcgagcataagcagccgttggaggacaggatgtttaagctcgaattgctgactcggttgcctgatgactttggtaaggtgaccaaacaggaggtgcgtcaattcttcaggtggtctcaggatcacctgacccctgtgatcccagaattcctagtgcggaaggcggagtctcgcaaaagacccgccccttccggggaaggctatataagcccgacaaagcggcccgcgctcgcagagcagcagcaggcgtcggagagcgcggacccggttcccaccaggtatcgtatcaaatgctcgaaacattgcggtatggataaaatgttgtttccttgccaaatttgtgaatcgatgaacagagatattaatatttgtgctattcataaaacgaccgactgtaaagagtgtttccccgactacggggataaagatgatgtagaactacccccctgtacagaacacaacgtgtctcgttgttatcaatgtcattcgggcgaattgtatcgcgtgacttcggactctgacgagaaacctgcccccgagagtgatgaaggcaccgagccatcctatgctccctgcacgattcaccacctgatgggcaagagtcacgggttagtcacttgcgcggcgtgtcggttgaaaaatagtacgttgcatgatgacttggatgacggtgatctcgaacaataaatgattgaaatgtagccatgtctctcatttctgatgcgattccagattggttggagcggttggtcaaaaagggagtgaatgctgcagctgatttctaccatttggaaagcggtcctcctcgtcctaaggcaaatcagcaaactcaagaatctcttgaaaaggacgattcgagaggtctcgtgttcccaggctacaattatctaggccctttcaacggtctagataaaggagaacccgtcaacgaggcagacgctgccgccttagaacacgacaaggcttacgacctcgaaatcaaggacgggcacaacccgtactttgagtacaacgaggccgacagacgtttccaggaacgtctcaaagacgatacctcctttggaggcaatttaggtaaagccatcttccaggccaaaaagagggttctcgaaccctttggtctggtggaagactcaaagacggctccgaccggagacaagcggaaaggcgaagacgaacctcgtttgcccgacacttcttcacagactcccaagaaaaacaagaagcctcgcaaggaaagaccttccggcggggcagaagatccgggcgaaggcacctcttccaacgctggagcagcagcacccgcctctagtgtgggatcatctatcatggctgaaggaggtggcggcccagtgggcgatgcaggccagggtgccgatggagtgggcaattcctccggaaattggcattgcgattcccaatggctggaaaacggagtcgtcactcgaaccacccgaacctgggtcttgcccagctacaacaaccacctgtacaaacgaatccaaggacccagcggaggcgacaacaacaacaaattctttggattcagcaccccctggggatactttgactacaatcgattccactgccacttttccccgcgagactggcaacgactcatcaacaacaactggggcatccgtcccaaagcgatgcgctttagactctttaacatccaggttaaagaggtcacggtccaagacttcaacaccaccatcggcaacaacctcaccagtacggtccaggtctttgcggacaaggactaccaactgccgtacgtcctcggatcggctaccgaaggcaccttcccgccgttcccagcggatatctacacgatcccgcagtacgggtactgcacgctaaactacaacaacgaggcggtggatcgttcggccttctactgtctggactactttccctcagacatgctgcggacaggaaataactttgagtttacttacaccttcgaggacgttcctttccatagcatgtttgcccacaaccagacgctagaccggctgatgaatcccctcgtggatcagtacctctgggctttcagctccgtcagccaagcaggctcatctggacgagctcttcattactcgcgggcgactaaaaccaacatggcggctcaatataggaactggttacctgggcctttcttccgtgatcagcaaatctttacgggcgctagcaacatcactaaaaataacgtctttagcgtttgggaaaaaggcaagcaatgggaactcgacaatcggaccaacctaatgcagcccggtcctgcggcagcgaccacctttagcggagaacctgaccgtcaagccatgcaaaacacgctggcttttagcaggaccgtctacgatcaaacgaccgccacgaccgatcgtaaccagatactcatcaccaacgaagacgaaatcagacccaccaactcggtcggtatcgacgcgtggggagcagttcccaccaacaaccagtcgatcgtgacccccggcactcgcgcggccgtcaacaatcaaggggcgcttcccgggatggtgtggcaaaacagagacatttaccctacagggacccatttggccaaaattcccgacactgacaatcacttccatccgtccccgcttattgggcggtttggctgcaagcatccccctccccagattttcattaaaaacacacccgtccctgccaacccttcggaaacgttccagacggccaaagtggcctccttcatcaaccagtactcgaccggacagtgcaccgtcgaaatcttttgggaactcaagaaggaaacctccaagcgctggaaccccgaaatccagttcacctccaactttggcaacgcggccgacatccagtttgccgtctccgacacgggatcctattccgaacctcgtcccatcggtacccgttaccttaccaaacctctgtaaattaaacccttcaataaaccgtttatgcgtaactgtatttccgtctcctgtcgttattcagtcacatgatgcggcattacctcaccggagtgctggccagtttccaagacaggctcgctcgctcactcgggccggggccccaaaggggcccctagcgaccgcttcgcggtcgcggcccgagtgagcgagcgagcctgtcttggaaactggcca

SEQ ID NO: 5191 - DNA, 2211 bp, synthetic construct
  misc_feature 1..2211: note = Description of Artificial Sequence: Synthetic polynucleotide
  source 1..2211: mol_type = other DNA
atggctgctgatggttatcttccagattggctcgaggacactctctctgaaggaataagacagtggtggaagctcaaacctggcccaccaccaccaaagcccgcagagcggcataaggacgacagcaggggtcttgtgcttcctgggtacaagtacctcggacccttcaacggactcgacaagggagagccggtcaacgaggcagacgcagcggccctcgagcacgacaaggcctacgaccagcagctcaaggccggtgacaacccctacctcaagtacaaccacgccgacgcggagttccagcagcggcttcagggcgacacatcgtttgggggcaacctcggcagagcagtcttccaggccaaaaagagggttcttgaacctcttggtctggttgagcaagcgggtgagacggctcctggaaagaagagaccgttgattgaatccccccagcagcccgactcctccacgggtatcggcaaaaaaggcaagcagccggctaaaaagagactcaattttggtcagactggcgactcagagtcagtccccgacccacaacctctcggagaacctccagcaacccccgctgctgtgggacctactacaatggcttcaggtggtggcgcaccaatggcagacaataacgaaggcgccgacggagtgggtaatgcctcaggaaattggcattgcgattccacatggctgggcgacagagtcatcaccaccagcacccgcacctgggccttgcccacctacaataaccacctctacaagcaaatctccagtgcttcaacgggggccagcaacgacaaccactacttcggctacagcaccccctgggggtattttgacttcaacagattccactgccacttttcaccacgtgactggcagcgactcatcaacaacaattggggattccggcccaagagactcaacttcaaactcttcaacatccaagtcaaggaggtcacgacgaatgatggcgtcacaaccatcgctaataaccttaccagcacggttcaagtcttctcggactcagactatcagctcccgtacgtgctcgggtcggctcacgagggctgcctcccgccgttcccagcagacgtcttcatggtgccacagtatggatacctcaccctgaacaacgggagtcaggcagtaggacgctcttcattttactgcctggagtactttccttctcagatgctgcgtaccggaaacaactttaccttcagctacacttttgaggacgttcctttccacagcagctacgctcacagccagagtctggaccgtctcatgaatcctctcatcgaccagtacctgtattacctgaacagaactcagaatcagtccggaagtgcccaaaacaaggacttgctgtttagccgggggtctccagctggcatgtctgttcagcccaaaaactggctacctggaccctgttatcggcagcagcgcgtttctaaaacaaaaacagacaacaacaacagcaactttacctggactggtgcttcaaaatataaccttaatgggcgtgaatctataatcaaccctggcactgctatggcctcacacaaagacgacaaagacaagttctttcccatgagcggtgtcatgatttttggaaaggagagcgccggagcttcaaacactgcattggacaatgtcatgatcacagacgaagaggaaatcaaagccactaaccccgtggccaccgaaagatttgggactgtggcagtcaatctccagagcagcagcacagaccctgcgaccggagatgtgcatgttatgggagccttacctggaatggtgtggcaagacagagacgtatacctgcagggtcccatttgggccaaaattcctcacacagatggacactttcacccgtctcctcttatgggcggctttggactcaagaacccgcctcctcagatcctcatcaaaaacacgcctgttcctgcgaatcctccggcggagttttcagctacaaagtttgcttcattcatcacccaatactccacaggacaagtgagtgtggaaattgaatgggagctgcagaaagaaaacagcaagcgctggaatcccgaagtgcagtacacatccaattatgcaaaatctgccaacgttgattttactgtggacaacaatggactttatactgagcctcgccccattggcacccgttacctcacccgtcccctgtaa

SEQ ID NO: 5192 - protein, 736 aa, synthetic construct
  REGION 1..736: note = Description of Artificial Sequence: Synthetic polypeptide
MAADGYLPDWLEDTLSEGIRQWWKLKPGPPPPKPAERHKDDSRGLVLPGYKYLGPFNGLDKGEPVNEADAAALEHDKAYDQQLKAGDNPYLKYNHADAEFQQRLQGDTSFGGNLGRAVFQAKKRVLEPLGLVEQAGETAPGKKRPLIESPQQPDSSTGIGKKGKQPAKKRLNFGQTGDSESVPDPQPLGEPPATPAAVGPTTMASGGGAPMADNNEGADGVGNASGNWHCDSTWLGDRVITTSTRTWALPTYNNHLYKQISSASTGASNDNHYFGYSTPWGYFDFNRFHCHFSPRDWQRLINNNWGFRPKRLNFKLFNIQVKEVTTNDGVTTIANNLTSTVQVFSDSDYQLPYVLGSAHEGCLPPFPADVFMVPQYGYLTLNNGSQAVGRSSFYCLEYFPSQMLRTGNNFTFSYTFEDVPFHSSYAHSQSLDRLMNPLIDQYLYYLNRTQNQSGSAQNKDLLFSRGSPAGMSVQPKNWLPGPCYRQQRVSKTKTDNNNSNFTWTGASKYNLNGRESIINPGTAMASHKDDKDKFFPMSGVMIFGKESAGASNTALDNVMITDEEEIKATNPVATERFGTVAVNLQSSSTDPATGDVHVMGALPGMVWQDRDVYLQGPIWAKIPHTDGHFHPSPLMGGFGLKNPPPQILIKNTPVPANPPAEFSATKFASFITQYSTGQVSVEIEWELQKENSKRWNPEVQYTSNYAKSANVDFTVDNNGLYTEPRPIGTRYLTRPL

SEQ ID NO: 5193 - DNA, 2211 bp, synthetic construct
  misc_feature 1..2211: note = Description of Artificial Sequence: Synthetic polynucleotide
  source 1..2211: mol_type = other DNA
atggcttccgatggttatcttccagattggctcgaggacaacctctctgagggcatccgcgagtggtgggacttgaaacctggagccccgaaacccaaagccaaccagcaaaagcaggacgacggccggggtctggtgcttcctggctacaagtacctcggacccttcaacggactcgacaagggggagcccgtcaacgcggcggatgcagcggccctcgagcacgacaaggcctacgaccagcagctcagagcgggtgacaatccgtacctgcggtataaccacgccgacgccgagtttcaggagcgtctgcaagaagatacgtcttttgggggcaacctcgggcgagcagtcttccaggccaagaagagggttctcgaaccttttggtctggttgaggaaggtgctaagacggctcctggaaagaaacgtccggtagagcagtcgccacaagagccagactcctcctcgggcattggcaagacaggccagcagcccgctaaaaagagactcaattttggtcagactggcgactcagagtcagtccccgacccacaacctctcggagaacctccagcaacccccgctgctgtgggacctactacaatggcttcaggcggtggcgcaccaatggcagacaataacgaaggcgccgacggagtgggtaatgcctcaggaaattggcattgcgattccacatggctgggcgacagagtcatcaccaccagcacccgaacatgggccttgcccacctataacaaccacctctacaagcaaatctccagtgcttcaacgggggccagcaacgacaaccactacttcggctacagcaccccctgggggtattttgatttcaacagattccactgccatttctcaccacgtgactggcagcgactcatcaacaacaattggggattccggcccaagagactcaacttcaaactcttcaacatccaagtcaaggaggtcacgacgaatgatggcgtcacaaccatcgctaataaccttaccagcacggttcaagtcttctcggactcggagtaccagcttccgtacgtcctcggctctgcgcaccagggctgcctccctccgttcccggcggacgtgttcatgattccgcagtacggctacctaacgctcaacaatggcagccaggcagtgggacggtcatccttttactgcctggaatatttcccatcgcagatgctgagaacgggcaataactttaccttcagctacaccttcgaggacgtgcctttccacagcagctacgcgcacagccagagcctggaccggctgatgaatcctctcatcgaccagtacctgtattacctgaacagaactcagaatcagtccggaagtgcccaaaacaaggacttgctgtttagccgggggtctccagctggcatgtctgttcagcccaaaaactggctacctggaccctgttaccggcagcagcgcgtttctaaaacaaaaacagacaacaacaacagcaactttacctggactggtgcttcaaaatataaccttaatgggcgtgaatctataatcaaccctggcactgctatggcctcacacaaagacgacaaagacaagttctttcccatgagcggtgtcatgatttttggaaaggagagcgccggagcttcaaacactgcattggacaatgtcatgatcacagacgaagaggaaatcaaagccactaaccccgtggccaccgaaagatttgggactgtggcagtcaatctccagagcagcagcacagaccctgcgaccggagatgtgcatgttatgggagccttacctggaatggtgtggcaagacagagacgtatacctgcagggtcccatttgggccaaaattcctcacacagatggacactttcacccgtctcctcttatgggcggctttggacttaagcacccgcctcctcagatcctcatcaaaaacacgcctgttcctgcgaatcctccggcagagttttcggctacaaagtttgcttcattcatcacccagtattctactggccaagtcagcgtggagattgaatgggagctgcagaaagaaaacagcaaacgctggaatcccgaagtgcagtatacatctaactatgcaaaatctgccaacgttgatttcactgtggacaacaatggactttatactgagcctcgtcccattggcacccgttacctcacccgtcccctgtaa

SEQ ID NO: 5194 - protein, 736 aa, synthetic construct
  REGION 1..736: note = Description of Artificial Sequence: Synthetic polypeptide
MASDGYLPDWLEDNLSEGIREWWDLKPGAPKPKANQQKQDDGRGLVLPGYKYLGPFNGLDKGEPVNAADAAALEHDKAYDQQLRAGDNPYLRYNHADAEFQERLQEDTSFGGNLGRAVFQAKKRVLEPFGLVEEGAKTAPGKKRPVEQSPQEPDSSSGIGKTGQQPAKKRLNFGQTGDSESVPDPQPLGEPPATPAAVGPTTMASGGGAPMADNNEGADGVGNASGNWHCDSTWLGDRVITTSTRTWALPTYNNHLYKQISSASTGASNDNHYFGYSTPWGYFDFNRFHCHFSPRDWQRLINNNWGFRPKRLNFKLFNIQVKEVTTNDGVTTIANNLTSTVQVFSDSEYQLPYVLGSAHQGCLPPFPADVFMIPQYGYLTLNNGSQAVGRSSFYCLEYFPSQMLRTGNNFTFSYTFEDVPFHSSYAHSQSLDRLMNPLIDQYLYYLNRTQNQSGSAQNKDLLFSRGSPAGMSVQPKNWLPGPCYRQQRVSKTKTDNNNSNFTWTGASKYNLNGRESIINPGTAMASHKDDKDKFFPMSGVMIFGKESAGASNTALDNVMITDEEEIKATNPVATERFGTVAVNLQSSSTDPATGDVHVMGALPGMVWQDRDVYLQGPIWAKIPHTDGHFHPSPLMGGFGLKHPPPQILIKNTPVPANPPAEFSATKFASFITQYSTGQVSVEIEWELQKENSKRWNPEVQYTSNYAKSANVDFTVDNNGLYTEPRPIGTRYLTRPL

SEQ ID NO: 5195 - DNA, 2211 bp, synthetic construct
  misc_feature 1..2211: note = Description of Artificial Sequence: Synthetic polynucleotide
  source 1..2211: mol_type = other DNA
atggctgctgatggttatcttccagattggctcgaggacactctctctgaaggaataagacagtggtggaagctcaaacctggcccaccaccaccaaagcccgcagagcggcataaggacgacagcaggggtcttgtgcttcctgggtacaagtacctcggacccttcaacggactcgacaagggagagccggtcaacgaggcagacgcagcggccctcgagcacgacaaggcctacgaccagcagctcaaggccggtgacaacccctacctcaagtacaaccacgccgacgcggagttccagcagcggcttcagggcgacacatcgtttgggggcaacctcggcagagcagtcttccaggccaaaaagagggttcttgaacctcttggtctggttgagcaagcgggtgagacggctcctggaaagaagagaccgttgattgaatccccccagcagcccgactcctccacgggtatcggcaaaaaaggcaagcagccggctaaaaagagactcaattttggtcagactggcgactcagagtcagtccccgacccacaacctctcggagaacctccagcaacccccgctgctgtgggacctactacaatggcttcaggtggtggcgcaccaatggcagacaataacgaaggcgccgacggagtgggtaatgcctcaggaaattggcattgcgattccacatggctgggcgacagagtcatcaccaccagcacccgcacctgggccttgcccacctacaataaccacctctacaagcaaatctccagtgcttcaacgggggccagcaacgacaaccactacttcggctacagcaccccctgggggtattttgacttcaacagattccactgccacttttcaccacgtgactggcagcgactcatcaacaacaattggggattccggcccaagagactcaacttcaaactcttcaacatccaagtcaaggaggtcacgacgaatgatggcgtcacaaccatcgctaataaccttaccagcacggttcaagtcttctcggactcagactatcagctcccgtacgtgctcgggtcggctcacgagggctgcctcccgccgttcccagcagacgtcttcatggtgccacagtatggatacctcaccctgaacaacgggagtcaggcagtaggacgctcttcattttactgcctggagtactttccttctcagatgctgcgtaccggaaacaactttaccttcagctacacttttgaggacgttcctttccacagcagctacgctcacagccagagtctggaccgtctcatgaatcctctcatcgaccagtacctgtattacctgaacagaactcagaatcagtccggaagtgcccaaaacaaggacttgctgtttagccgggggtctccaactggcatgtctgttcagcccaaaaactggctacctggaccctgttatcggcagcagcgcgtttctaaaacaaaaacagacaacaacaacagcaactttacctggactggtgcttcaaaatataaccttaatgggcgtgaatctataatcaaccctggcactgctatggcctcacacaaagacgacaaagacaagttctttcccatgagcggtgtcatgatttttggaaaggagagcgccggagcttcaaacactgcattggacaatgtcatgatcacagacgaagaggaaatcaaagccactaaccccgtggccactgaaagatttgggactgtggcagtcaatctccagagcagcagcacagaccctgcgaccggagatgtgcatgccatgggagccttacctggaatggtgtggcaagacagagacgtatacctgcagggtcctatttgggccaaaattcctcacacggatggacactttcacccgtctcctctcatgggcggctttggactcaagaacccgcctcctcagatcctcatcaaaaacacgcctgttcctgcgaatcctccggcggagttttcagctacaaagtttgcttcattcatcacccagtattccacaggacaagtgagcgtggagattgaatgggagctgcagaaagaaaacagcaaacgctggaatcccgaagtgcagtatacatctaactatgcaaaatctgccaacgttgatttcactgtggacaacaatggactttatactgagcctcgccccattggcacccgttacctcacccgtcccctgtaa

SEQ ID NO: 5196 - protein, 736 aa, synthetic construct
  REGION 1..736: note = Description of Artificial Sequence: Synthetic polypeptide
MAADGYLPDWLEDTLSEGIRQWWKLKPGPPPPKPAERHKDDSRGLVLPGYKYLGPFNGLDKGEPVNEADAAALEHDKAYDQQLKAGDNPYLKYNHADAEFQQRLQGDTSFGGNLGRAVFQAKKRVLEPLGLVEQAGETAPGKKRPLIESPQQPDSSTGIGKKGKQPAKKRLNFGQTGDSESVPDPQPLGEPPATPAAVGPTTMASGGGAPMADNNEGADGVGNASGNWHCDSTWLGDRVITTSTRTWALPTYNNHLYKQISSASTGASNDNHYFGYSTPWGYFDFNRFHCHFSPRDWQRLINNNWGFRPKRLNFKLFNIQVKEVTTNDGVTTIANNLTSTVQVFSDSDYQLPYVLGSAHEGCLPPFPADVFMVPQYGYLTLNNGSQAVGRSSFYCLEYFPSQMLRTGNNFTFSYTFEDVPFHSSYAHSQSLDRLMNPLIDQYLYYLNRTQNQSGSAQNKDLLFSRGSPTGMSVQPKNWLPGPCYRQQRVSKTKTDNNNSNFTWTGASKYNLNGRESIINPGTAMASHKDDKDKFFPMSGVMIFGKESAGASNTALDNVMITDEEEIKATNPVATERFGTVAVNLQSSSTDPATGDVHAMGALPGMVWQDRDVYLQGPIWAKIPHTDGHFHPSPLMGGFGLKNPPPQILIKNTPVPANPPAEFSATKFASFITQYSTGQVSVEIEWELQKENSKRWNPEVQYTSNYAKSANVDFTVDNNGLYTEPRPIGTRYLTRPL

SEQ ID NO: 5197 - DNA, 2211 bp, synthetic construct
  misc_feature 1..2211: note = Description of Artificial Sequence: Synthetic polynucleotide
  source 1..2211: mol_type = other DNA
atggctgccgatggttatcttccagattggctcgaggacaacctctctgagggcattcgcgagtggtgggcgctgaaacctggagccccgaagcccaaagccaaccagcaaaagcaggacgacggccggggtctggtgcttcctggctacaagtacctcggacccttcaacggactcgacaagggggagcccgtcaacgcggcggatgcagcggccctcgagcacgacaaggcctacgaccagcagctcaaagcgggtgacaatccgtacctgcggtataaccacgccgacgccgagtttcaggagcgtctgcaagaagatacgtcttttgggggcaacctcgggcgagcagtcttccaggccaagaagcgggttctcgaacctctcggtctggttgaggaaggcgctaagacggctcctggaaagaaacgtccggtagagcaatcgccacaagagccagactcctcctcgggcatcggcaagacaggccagcagcccgctaaaaagagactcaattttggtcagactggcgactcagagtcagtccccgacccacaacctctcggagaacctccagcaacccccgctgctgtgggacctactacaatggcttcaggcggtggcgcaccaatggcagacaataacgaaggcgccgacggagtgggtaatgcctcaggaaattggcattgcgattccacatggctgggcgacagagtcatcaccaccagcacccgaacatgggccttgcccacctataacaaccacctctacaagcaaatctccagtgcttcgacgggggccagcaacgacaaccactacttcggctacagcaccccctgggggtattttgactttaacagattccactgccacttttcaccacgtgactggcagcgactcatcaacaacaactggggattccggcccaagagactcagcttcaagctcttcaacatccaggtcaaggaggtcacgacgaatgatggcgtcacaaccatcgctaataaccttaccagcacggttcaagtcttctcggactcggagtaccagcttccgtacgtcctcggctctgcgcaccagggctgcctccctccgttcccggcggacgtgttcatgattccgcaatacggctacctgacgctcaacaatggcagccaagccgtgggacgttcatccttttactgcctggaatatttcccttctcagatgctgagaacgggcaacaactttaccttcagctacacctttgaggaagtgcctttccacagcagctacgcgcacagccagagcctggaccggctgatgaatcctctcatcgatcaatacctgtattacctgaacagaactcaaaatcagtccggaagtgcccaaaacaaggacttgctgtttagccgtgggtctccagctggcatgtctgttcagcccaaaaactggctacctggaccctgttatcggcagcagcgcgtttctaaaacaaaaacagacaacaacaacagcaattttacctggactggtgcttcaaaatataacctcaatgggcgtgaatccatcatcaaccctggcactgctatggcctcacataaagacgacgaagacaagttctttcccatgagcggtgtcatgatttttggaaaagagagcgccggagcttcaaacactgcattggacaatgtcatgattacagacgaagaggaaattaaagccactaaccctgtggccaccgaaagatttgggaccgtggcagtcaatttccagagcagcagcacagaccctgcgaccggagatgtgcatgctatgggagcattacctggcatggtgtggcaagatagagacgtgtacctgcagggtcccatttgggccaaaattcctcacacagatggacactttcacccgtctcctcttatgggcggctttggactcaagaacccgcctcctcagatcctcatcaaaaacacgcctgttcctgcgaatcctccggcggagttttcagctacaaagtttgcttcattcatcacccaatactccacaggacaagtgagcgtggagattgaatgggagctgcagaaagaaaacagcaaacgctggaatcccgaagtgcagtatacatctaactatgcaaaatctgccaacattgatttcactgtggacaacaatggactttatactgagcctcgccccattggcacccgttacctcacccgtccccagtaa

SEQ ID NO: 5198 - protein, 736 aa, synthetic construct
  REGION 1..736: note = Description of Artificial Sequence: Synthetic polypeptide
MAADGYLPDWLEDNLSEGIREWWALKPGAPKPKANQQKQDDGRGLVLPGYKYLGPFNGLDKGEPVNAADAAALEHDKAYDQQLKAGDNPYLRYNHADAEFQERLQEDTSFGGNLGRAVFQAKKRVLEPLGLVEEGAKTAPGKKRPVEQSPQEPDSSSGIGKTGQQPAKKRLNFGQTGDSESVPDPQPLGEPPATPAAVGPTTMASGGGAPMADNNEGADGVGNASGNWHCDSTWLGDRVITTSTRTWALPTYNNHLYKQISSASTGASNDNHYFGYSTPWGYFDFNRFHCHFSPRDWQRLINNNWGFRPKRLSFKLFNIQVKEVTTNDGVTTIANNLTSTVQVFSDSEYQLPYVLGSAHQGCLPPFPADVFMIPQYGYLTLNNGSQAVGRSSFYCLEYFPSQMLRTGNNFTFSYTFEEVPFHSSYAHSQSLDRLMNPLIDQYLYYLNRTQNQSGSAQNKDLLFSRGSPAGMSVQPKNWLPGPCYRQQRVSKTKTDNNNSNFTWTGASKYNLNGRESIINPGTAMASHKDDEDKFFPMSGVMIFGKESAGASNTALDNVMITDEEEIKATNPVATERFGTVAVNFQSSSTDPATGDVHAMGALPGMVWQDRDVYLQGPIWAKIPHTDGHFHPSPLMGGFGLKNPPPQILIKNTPVPANPPAEFSATKFASFITQYSTGQVSVEIEWELQKENSKRWNPEVQYTSNYAKSANIDFTVDNNGLYTEPRPIGTRYLTRPQ

SEQ ID NO: 5199 - DNA, 2211 bp, synthetic construct
  misc_feature 1..2211: note = Description of Artificial Sequence: Synthetic polynucleotide
  source 1..2211: mol_type = other DNA
atggctgccgatggttatcttccagattggctcgaggacaacctctctgagggcattcgcgagtggtgggacttgaaacctggagccccgaaacccaaagccaaccagcaaaagcaggacgacggccggggtctggtgcttcctggctacaagtacctcggacccttcaacggactcgacaagggggagcccgtcaacgcggcggatgcagcggccctcgagcacgacaaggcctacgaccagcagctcaaagcgggtgacaatccgtaccttcggtataaccacgccgacgccgagtttcaggagcgtctgcaagaagatacgtcttttgggggcaacctcgggcgagcagtcttccaggccaaaaagagggttctcgaacctctcggtctggttgaggaagcggctaagacggctcctggaaagaaacgtccggtagagcagtcgccacaagagccagactcctcctcgggcattggcaagacaggccagcagcccgctaaaaagagactcaattttggtcagactggcgactcagagtcagtccccgacccacaacctctcggagaacctcccgcagccccctcaggtgtgggatctcttacaatggcttcaggtggtggcgcaccaatggcagacaataacgaaggcgccgacggagtgggtaatgcctcaggaaattggcattgcgattccacatggctgggcgacagagtcatcaccaccagcacccgcacctgggccttgcccacctacaataaccacctctacaagcaaatctccagtgcttcaacgggggccagcaacgacaaccactacttcggctacagcaccccctgggggtattttgacttcaacagattccactgccacttttcaccacgtgactggcaaagactcatcaacaacaattggggattccggcccaagagactcaacttcaagctcttcaacatccaagtcaaggaggtcacgacgaatgatggcgtcacgaccatcgctaataaccttaccagcacggttcaagtcttctcggactcggagtaccagttgccgtacgtcctcggctctgcgcaccagggctgcctccctccgttcccggcggacgtgttcatgattccgcagtacggctacctaacgctcaacaatggcagccaggcagtgggacggtcatccttttactgcctggaatatttcccatcgcagatgctgagaacgggcaacaactttaccttcagctacacctttgaggaagtgcctttccacagcagctacgcgcacagccagagcctggaccggctgatgaatcctctcatcgaccagtacctgtattacctgaacagaactcaaaatcagtccggaagtgcccaaaacaaggacttgctgtttagccgtgggtctccagctggcatgtctgttcagcccaaaaactggctacctggaccctgttaccggcagcagtgcgtttctaaaacaaaaacagacaacaacaacagcaactttacctggactggtgcttcaaaatataaccttaatgggcgtgaatctataatcaaccctggcactgctatggcctcacacaaagacgacaaagacaagttctttcccatgagcggtgtcatgatttttggaaaggagagcgccggagcttcaaacactgcattggacaatgtcatgatcacagacgaagaggaaatcaaagccactaaccccgtggccaccgaaagatttgggactgtggcagtcaatctccagagcagcagcacagaccctgcgaccggagatgtgcatgttatgggagccttacctggaatggtgtggcaagacagagacgtatacctgcagggtcctatttgggccaaaattcctcacacagatggacactttcacccgtctcctcttatgggcggctttggactcaagaacccgcctcctcagatcctcatcaaaaacacgcctgttcctgcgaatcctccggcggagttttcagctacaaagtttgcttcattcatcacccaatactccacaggacaagtgagcgtggagattgaatgggagctgcagaaagaaaacagcaagcgctggaatcccgaagtgcagtacacatccaattatgcaaaatctgccaacgttgatttcactgtggacaacaatggactttatactgagcctcgccccattggcacccgttacctcacccgtcccctgtaa

SEQ ID NO: 5200 - protein, 736 aa, synthetic construct
  REGION 1..736: note = Description of Artificial Sequence: Synthetic polypeptide
MAADGYLPDWLEDNLSEGIREWWDLKPGAPKPKANQQKQDDGRGLVLPGYKYLGPFNGLDKGEPVNAADAAALEHDKAYDQQLKAGDNPYLRYNHADAEFQERLQEDTSFGGNLGRAVFQAKKRVLEPLGLVEEAAKTAPGKKRPVEQSPQEPDSSSGIGKTGQQPAKKRLNFGQTGDSESVPDPQPLGEPPAAPSGVGSLTMASGGGAPMADNNEGADGVGNASGNWHCDSTWLGDRVITTSTRTWALPTYNNHLYKQISSASTGASNDNHYFGYSTPWGYFDFNRFHCHFSPRDWQRLINNNWGFRPKRLNFKLFNIQVKEVTTNDGVTTIANNLTSTVQVFSDSEYQLPYVLGSAHQGCLPPFPADVFMIPQYGYLTLNNGSQAVGRSSFYCLEYFPSQMLRTGNNFTFSYTFEEVPFHSSYAHSQSLDRLMNPLIDQYLYYLNRTQNQSGSAQNKDLLFSRGSPAGMSVQPKNWLPGPCYRQQCVSKTKTDNNNSNFTWTGASKYNLNGRESIINPGTAMASHKDDKDKFFPMSGVMIFGKESAGASNTALDNVMITDEEEIKATNPVATERFGTVAVNLQSSSTDPATGDVHVMGALPGMVWQDRDVYLQGPIWAKIPHTDGHFHPSPLMGGFGLKNPPPQILIKNTPVPANPPAEFSATKFASFITQYSTGQVSVEIEWELQKENSKRWNPEVQYTSNYAKSANVDFTVDNNGLYTEPRPIGTRYLTRPL

SEQ ID NO: 5201 - DNA, 2211 bp, synthetic construct
  misc_feature 1..2211: note = Description of Artificial Sequence: Synthetic polynucleotide
  source 1..2211: mol_type = other DNA
atggctgccgatggttatcttccagattggctcgaggacaacctctctgagggcattcgcgaatggtgggacttgaaacctggagccccgaaacccaaagtcaaccagcaaaagcaggacaacgctcggggtcttgtgcttccgggttacaaatacctcggacccttcaacggactcgacaagggggagcccgtcaacgcggcggacgcagcggccctcgagcacgacaaggcctacgaccagcagctcaaagcgggtgacaatccgtaccttcggtataaccacgccgacgccgagtttcaggagcgtctgcaagaagatacgtcttttgggggcaaccttggacgagcagtcttccaggccaagaagagggttctcgaaccttttggtctggttgaggaaggtgctaagacggctcctggaaagaaacgtccggtagagcagtcgccacaagagccagactcctcctcgggcattggcaagacaggccagcagcccgctaaaaagagactcaattttggtcagactggcgactcagagtcagtccccgacccacaacctctcggagaacctccagcaacccccgctgctgtgggacctactacaatggcttcaggcggtggcgcaccaatggcagacaataacgaaggcgccgacggagtgggtaatgcctcaggaaattggcattgcgattccacatggctgggcgacagagtcatcaccaccagcacccgcacctgggccttgcccacctacaataaccacctctacaagcaaatctccagtgcttcaacgggggccagcaacgacaaccactacttcggctacagcaccccctgggggtattttgacttcaacagattccactgccacttttcaccacgtgactggcaaagactcatcaacaacaattggggattccggcccaagagactcaacttcaagctcttcaacatccaagtcaaggaggtcacgacgaatgatggcgtcacgaccatcgctaataaccttaccagcacggttcaagtcttctcggactcggagtaccagttgccgtacgtcctcggctctgcgcaccagggctgcctccctccgttcccggcggacgtgttcatgattccgcaatacggctacctgacgctcaacaatggcagccaggcagtgggacggtcatccttttactgcctggaatatttcccatcgcagatgctgagaacgggcaataactttaccttcagctacacttttgaggacgttcctttccacagcagctacgctcacagccagagcctggaccggctgatgaatcctctcatcgaccagtacctgtattacctgaacagaactcagaatcagtccggaagtgcccaaaacaaggacttgctgtttagccgtgggtctccaactggcatgtctgttcagcccaaaaactggctacctggaccctgttatcggcagcagcgcgtttctaaaacaaaaacagacaacaacaacagcaactttacctggactggtgcttcaaaatataaccttaatgggcgtgaatctataatcaaccctggcactgctatggcctcacacaaagacgacgaagacaagttctttcccatgagcggtgtcatgatttttggaaaggagagcgccggagcttcaaacactgcattggacaatgtcatgatcacagacgaagaggaaatcaaagccactaaccccgtggccactgaaagatttgggactgtggcagtcaatctccagagcagcagcacagaccctgcgaccggagatgtgcatgccatgggagccttacctggaatggtgtggcaagacagagacgtatacctgcagggtcctatttgggccaaaattcctcacacggatggacactttcacccgtctcctctcatgggcggctttggacttaagcacccgcctcctcagatcctcatcaaaaacacgcctgttcctgcgaatcctccggcagagttttcggctacaaagtttgcttcattcatcacccagtattccacaggacaagtgagcgtggagattgaatgggagctgcagaaagaaaacagcaaacgctggaatcccgaagtgcagtatacatctaactatgcaaaatctgccaacgttgatttcactgtggacaacaatggactttatactgagcctcgccccattggcacccgttacctcacccgtcccctgtaa

SEQ ID NO: 5202 - protein, 736 aa, synthetic construct
  REGION 1..736: note = Description of Artificial Sequence: Synthetic polypeptide
MAADGYLPDWLEDNLSEGIREWWDLKPGAPKPKVNQQKQDNARGLVLPGYKYLGPFNGLDKGEPVNAADAAALEHDKAYDQQLKAGDNPYLRYNHADAEFQERLQEDTSFGGNLGRAVFQAKKRVLEPFGLVEEGAKTAPGKKRPVEQSPQEPDSSSGIGKTGQQPAKKRLNFGQTGDSESVPDPQPLGEPPATPAAVGPTTMASGGGAPMADNNEGADGVGNASGNWHCDSTWLGDRVITTSTRTWALPTYNNHLYKQISSASTGASNDNHYFGYSTPWGYFDFNRFHCHFSPRDWQRLINNNWGFRPKRLNFKLFNIQVKEVTTNDGVTTIANNLTSTVQVFSDSEYQLPYVLGSAHQGCLPPFPADVFMIPQYGYLTLNNGSQAVGRSSFYCLEYFPSQMLRTGNNFTFSYTFEDVPFHSSYAHSQSLDRLMNPLIDQYLYYLNRTQNQSGSAQNKDLLFSRGSPTGMSVQPKNWLPGPCYRQQRVSKTKTDNNNSNFTWTGASKYNLNGRESIINPGTAMASHKDDEDKFFPMSGVMIFGKESAGASNTALDNVMITDEEEIKATNPVATERFGTVAVNLQSSSTDPATGDVHAMGALPGMVWQDRDVYLQGPIWAKIPHTDGHFHPSPLMGGFGLKHPPPQILIKNTPVPANPPAEFSATKFASFITQYSTGQVSVEIEWELQKENSKRWNPEVQYTSNYAKSANVDFTVDNNGLYTEPRPIGTRYLTRPL

SEQ ID NO: 5203 - DNA, 2208 bp, synthetic construct
  misc_feature 1..2208: note = Description of Artificial Sequence: Synthetic polynucleotide
  misc_difference 955: note = modified_base - a, c, t or g
  misc_difference 971..972: note = modified_base - a, c, t or g
  misc_difference 981: note = modified_base - a, c, t or g
  misc_difference 986: note = modified_base - a, c, t or g
  misc_difference 1235: note = modified_base - a, c, t or g
  misc_difference 1694..1696: note = modified_base - a, c, t or g
  misc_difference 1698: note = modified_base - a, c, t or g
  misc_difference 1763..1765: note = modified_base - a, c, t or g
  misc_difference 1778: note = modified_base - a, c, t or g
  misc_difference 2204: note = modified_base - a, c, t or g
  source 1..2208: mol_type = other DNA
atggctgccgatggttatcttccagattggctcgaggacaacctctctgagggcattcgcgaatggtgggacttgaaacctggagccccgaaacccaaagtcaaccagcaaaagcaggacaacgctcggggtcttgtgcttccgggttacaaatacctcggacccttcaacggactcgacaagggggagcccgtcaacgcggcggacgcagcggccctcgagcacgacaaggcctacgaccagcagctcaaagcgggtgacaatccgtaccttcggtataaccacgccgacgccgagtttcaggagcgtctgcaagaagatacgtcttttgggggcaaccttggacgagcagtcttccaggccaagaagagggttctcgaaccttttggtctggttgaggaaggtgctaagacggctcctggaaagaaacgtccggtagagcagtcgccacaagagccagactcctcctcgggcattggcaagacaggccagcagcccgctaaaaagagactcaattttggtcagactggcgactcagagtcagtccccgacccacaacctctcggagaacctccagcaacccccgctgctgtgggacctactacaatggcttcaggcggtggcgcaccaatggcagacaataacgaaggcgccgacggagtgggtaatgcctcaggaaattggcattgcgattccacatggctgggcgacagagtcatcaccaccagcacccgaacatgggccttgcccacctataacaaccacctctacaagcaaatctccagtgcttcaacgggggccagcaacgacaaccactacttcggctacagcaccccctgggggtattttgatttcaacagattccactgccacttttcaccacgtgactggcagcgactcatcaataacaattggggattccggcccaagagactcaacttcaaactcttcaacntccaagtcaaggaggnnacgacgaangatgncgtcacaaccatcgctaataaccttaccagcacggttcaagtcttctcggactcggagtaccagcttccgtacgtcctcggctctgcgcaccagggctgcctccctccgttcccggcggacgtgttcatgattccgcaatacggctacctgacgctcaacaatggcagccaggcagtgggacggtcatccttttactgcctggaatatttcccatcgcagatgctgagaacgggcaataactttacctncagctacacttttgaggacgttcctttccacagcagctacgctcacagccagagcctggaccggctgatgaatcctctcatcgaccagtacctgtattacctgaacagaactcagaatcagtccggaagtgcccaaaacaaggacttgctgtttagccgtgggtctccaactggcatgtctgttcagcccaaaaactggctacctggaccctgttatcggcagcagcgcgtttctaaaacaaaaacagacaacaacaacagcaactttacctggactggtgcttcaaaatataaccttaatgggcgtgaatctataatcaaccctggcactgctatggcctcacacaaagacgacgaagacaagttctttcccatgagcggtgtcatgatttttggaaaggagagcgccggagcttcaaacactgcattggacaatgtcatgatcacagacgaagagannncnaagccactaaccccgtggccactgaaagatttgggactgtggcagtcaatctccaagcagcacannnaccctgcgaccgnagatgtgcatgccatgggagccttacctggaatggtgtggcaagacagagacgtatacctgcagggtcctatttgggccaaaattcctcacacggatggacactttcacccgtctcctctcatgggcggctttggacttaagcacccgcctcctcagatcctcatcaaaaacacgcctgttcctgcgaatcctccggcagagttttcggctacaaagtttgcttcattcatcacccagtattccacaggacaagtgagcgtggagattgaatgggagctgcagaaagaaaacagcaaacgctggaatcccgaagtgcagtatacatctaactatgcaaaatctgccaacgttgatttcactgtggacaacaatggactttatactgagcctcgccccattggcacccgttacctcacccgtccccngtaa

SEQ ID NO: 5204 - protein, 723 aa, synthetic construct
  REGION 1..723: note = Description of Artificial Sequence: Synthetic polypeptide
MAADGYLPDWLEDNLSEGIREWWDLKPGAPKPKVNQQKQDNARGLVLPGYKYLGPFNGLDKGEPVNAADAAALEHDKAYDQQLKAGDNPYLRYNHADAEFQERLQEDTSFGGNLGRAVFQAKKRVLEPFGLVEEGAKTAPGKKRPVEQSPQEPDSSSGIGKTGQQPAKKRLNFGQTGDSESVPDPQPLGEPPATPAAVGPTTMASGGGAPMADNNEGADGVGNASGNWHCDSTWLGDRVITTSTRTWALPTYNNHLYKQISSASTGASNDNHYFGYSTPWGYFDFNRFHCHFSPRDWQRLINNNWGFRPKRLNFKLFNQVKETTDVTTIANNLTSTVQVFSDSEYQLPYVLGSAHQGCLPPFPADVFMIPQYGYLTLNNGSQAVGRSSFYCLEYFPSQMLRTGNNFTSYTFEDVPFHSSYAHSQSLDRLMNPLIDQYLYYLNRTQNQSGSAQNKDLLFSRGSPTGMSVQPKNWLPGPCYRQQRVSKTKTDNNNSNFTWTGASKYNLNGRESIINPGTAMASHKDDEDKFFPMSGVMIFGKESAGASNTALDNVMITDEEATNPVATERFGTVAVNLQSSPATDVHAMGALPGMVWQDRDVYLQGPIWAKIPHTDGHFHPSPLMGGFGLKHPPPQILIKNTPVPANPPAEFSATKFASFITQYSTGQVSVEIEWELQKENSKRWNPEVQYTSNYAKSANVDFTVDNNGLYTEPRPIGTRYLTRP

SEQ ID NO: 5205 - DNA, 2208 bp, synthetic construct
  misc_feature 1..2208: note = Description of Artificial Sequence: Synthetic polynucleotide
  source 1..2208: mol_type = other DNA
atggctgccgatggttatcttccagattggctcgaggacactctctctgaaggaataagacagtggtggaagctcaaacctggcccaccaccaccaaagcccgcagagcggcataaggacgacagcaggggtcttgtgcttcctgggtacaagtacctcggacccttcaacggactcgacaagggagagccggtcaacgaggcagacgccgcggccctcgagcacgacaaagcctatgaccggcagctcgacagcggagacaacccgtacctcaagtacaaccacgccgacgcggagtttcaggagcgccttaaagaagatacgtcttttgggggcaacctcggacgagcagtcttccaggcgaaaaagagggttcttgaacctctgggcctggttgaggaacctgttaagacggctccgggaaaaaagaggccggtagagcactctcctgtggagccagactcctcctcgggaaccggaaaggcgggtcagcagcctgcaagaaaaagattgaattttggtcagactggagacgcagactcagtacctgacccccagcctctcggacagccaccagcagccccctctggtctgggaactaatacgatggctacaggcagtggcgcaccaatggcagacaataacgagggcgccgacggagtgggtaattcctcgggaaattggcattgcgattccacatggatgggcgacagagtcatcaccaccagcacccgaacctgggccctgcccacctacaacaaccacctctacaaacaaatttccagccaatcaggagcctcgaacgacaatcactactttggctacagcaccccttgggggtattttgacttcaacagattccactgccacttttcaccacgtgactggcaaagactcatcaacaacaactggggattccgacccaagagactcaagttcaagctctttaacattcaagtcaaagaggtcacgcagaatgacggtacgacgacgattgccaataaccttaccagcacggttcaggtgtttactgactcggagtaccagctcccgtacgtcctcggctcggcgcatcaaggatgcctcccgccgttcccagcagacgtcttcatggtgccacagtatggatacctcaccctgaacaacgggagtcaggcagtaggacgctcttcattttactgcctggagtactttccttctcagatgctgcgtaccggtaacaactttaccttcagctacacttttgaggacgttcctttccacagcagctacgctcacagccagagtctggaccgtctcatgaatcctctcatcgaccagtacctgtattacttgagcagaacagacgctccaagtggaaccaccacgcagtcaaggcttcagttttctcaggccggagcgagtgacattcgggaccagtctaggaactggcttcctggaccctgttaccgccagcagcgagtatcaaagacatctgcggataacaacaacagtgaatactcgtggactggagctaccaagtaccacctcaatggcagagactctctggtgaatccgggcccggccatggcaagccacaaggacgatgaagaaaagttttttcctcagagcggggttctcatctttgggaagcaaggctcagagaaaacaagtgtggacattgaaaaggtcatgattacagacgaagaggaaatcaggacaaccaatcccgtggctacggagcagtatggttctgtatctaccaacctccagagaggcaacagacaagcagctaccgcagatgtcaacacacaaggcgttcttccaggcatggtctggcaggacagagatgtgtaccttcaggggcccatctgggcaaagattccacacacggacggacattttcacccctctcccctcatgggtggattcggacttaaacaccctcctccacagattctcatcaagaacaccccggtacctgcgaatccttcgaccaccttcagtgcggcaaagtttgcttccttcatcacacagtactccacgggacaggtcagcgtggagatcgagtgggagctgcagaaggaaaacagcaaacgctggaatcccgaagttcagtacacttccaactacaacaagtctgttaatgtggactttactgtggacactaatggcgtgtattcagagcctcgccccattggcaccagatacctgactcgtaatctgtaa

SEQ ID NO: 5206 - protein, 735 aa, synthetic construct
  REGION 1..735: note = Description of Artificial Sequence: Synthetic polypeptide
MAADGYLPDWLEDTLSEGIRQWWKLKPGPPPPKPAERHKDDSRGLVLPGYKYLGPFNGLDKGEPVNEADAAALEHDKAYDRQLDSGDNPYLKYNHADAEFQERLKEDTSFGGNLGRAVFQAKKRVLEPLGLVEEPVKTAPGKKRPVEHSPVEPDSSSGTGKAGQQPARKRLNFGQTGDADSVPDPQPLGQPPAAPSGLGTNTMATGSGAPMADNNEGADGVGNSSGNWHCDSTWMGDRVITTSTRTWALPTYNNHLYKQISSQSGASNDNHYFGYSTPWGYFDFNRFHCHFSPRDWQRLINNNWGFRPKRLKFKLFNIQVKEVTQNDGTTTIANNLTSTVQVFTDSEYQLPYVLGSAHQGCLPPFPADVFMVPQYGYLTLNNGSQAVGRSSFYCLEYFPSQMLRTGNNFTFSYTFEDVPFHSSYAHSQSLDRLMNPLIDQYLYYLSRTDAPSGTTTQSRLQFSQAGASDIRDQSRNWLPGPCYRQQRVSKTSADNNNSEYSWTGATKYHLNGRDSLVNPGPAMASHKDDEEKFFPQSGVLIFGKQGSEKTSVDIEKVMITDEEEIRTTNPVATEQYGSVSTNLQRGNRQAATADVNTQGVLPGMVWQDRDVYLQGPIWAKIPHTDGHFHPSPLMGGFGLKHPPPQILIKNTPVPANPSTTFSAAKFASFITQYSTGQVSVEIEWELQKENSKRWNPEVQYTSNYNKSVNVDFTVDTNGVYSEPRPIGTRYLTRNL

SEQ ID NO: 5207 - DNA, 2208 bp, synthetic construct
  misc_feature 1..2208: note = Description of Artificial Sequence: Synthetic polynucleotide
  source 1..2208: mol_type = other DNA
atggctgccgatggttatcttccagattggctcgaggacactctctctgaaggaataagacagtggtggaagctcaaacctggcccaccaccaccaaagcccgcagagcggcataaggacgacagcaggggtcttgtgcttcctgggtacaagtacctcggacccttcaacggactcgacaagggagagccggtcaacgaggcagacgccgcggccctcgagcacgacaaagcctatgaccggcagctcgacagcggagacaacccgtacctcaagtacaaccacgccgacgcggagtttcaggagcgccttaaagaagatacgtcttttgggggcaacctcggacgagcagtcttccaggcgaaaaagagggttcttgaacctctgggcctggttgaggaacctgttaagacggctccgggaaaaaagaggccggtagagcactctcctgtggagccagactcctcctcgggaaccggaaaggcgggccagcagcctgcaagaaaaagattgaattttggtcagactggagacgcaaactcagtacctgacccccagcctctcggacagccaccagcagccccctctggtctgggaactaatacgatggctacaggcagtggcgcaccaatggcagacaataacgagggcgccgacggagtgggtaattcctcgggaaattggcattgcgattccacatggatgggcgacagagtcatcaccaccagcacccgaacctgggccctgcccacctacaacaaccacctctacaaacaaatttccagccaatcaggagcctcgaacgacaatcactactttggctacagcaccccttgggggtattttgacttcaacagattccactgccacttttcaccacgtgactggcaaagactcatcaacaacaactggggattccgacccaagagactcaagttcaagctctttaacattcaagtcaaagaggtcacgcagaatgacggtacgacgacgattgccaataaccttaccagcacggttcaggtgtttactgactcggagtaccagctcccgtacgtcctcggctcggcgcatcaaggatgcctcccgccgttcccagcagacgtcttcatggtgccacagtatggatacctcaccctgaacaacgggagtcgggcagtaggacgctcttcattttactgcctggagtactttccttctcagatgctgcgtaccggtaacaactttaccttcagctacacttttgaggacgttcctttccacagcagctacgctcacagccagagtctggaccgtctcatgaatcctctcatcgaccagtacctgtattacttgagcagaacagacactccaagtggaaccaccacgcagtcaaggcttcagttttctcaggccggagcgagtgacattcgggaccagtctaggaactggcttcctggaccctgttaccgccagcagcgagtatcaaagacatctgcggataacaacaacagtgaatactcgtggactggagctaccaagtaccacctcaatggcagagactctctggtgaatccgggcccggccatggcaagccacaaggacgatgaagaaaagttttttcctcagagcggggttctcatctttgggaagcaaggctcagagaaaacaagtgtggacattgaaaaggtcatgattacagacgaagaggaaatcaggacgaccaatcccgtggctacggagcagtatggttctgtatctaccaacctccagagaggcaacagacaagcagctaccgcagatgtcaacacacaaggcgttcttccaggcatggtctggcaggacagagatgtgtaccttcaggggcccatctgggcaaagattccacacacggacggacattttcacccctctcccctcatgggtggattcggacttaaacaccctcctccacagattctcatcaagaacaccccggtacctgcgaatccttcgaccaccttcagtgcggcaaagtttgcttccttcatcacacagtactccacgggacaggtcagcgtggagatcgagtgggagctgcagaaggaaaacagcaaacgctggaatcccgaagttcagtacacttccaactacaacaagtctgttaatgtggactttactgtggacactaatggcgtgtatacagagcctcgccccattggcaccagatacctgactcgtaatctgtaa

SEQ ID NO: 5208 - protein, 735 aa, synthetic construct
  REGION 1..735: note = Description of Artificial Sequence: Synthetic polypeptide
MAADGYLPDWLEDTLSEGIRQWWKLKPGPPPPKPAERHKDDSRGLVLPGYKYLGPFNGLDKGEPVNEADAAALEHDKAYDRQLDSGDNPYLKYNHADAEFQERLKEDTSFGGNLGRAVFQAKKRVLEPLGLVEEPVKTAPGKKRPVEHSPVEPDSSSGTGKAGQQPARKRLNFGQTGDANSVPDPQPLGQPPAAPSGLGTNTMATGSGAPMADNNEGADGVGNSSGNWHCDSTWMGDRVITTSTRTWALPTYNNHLYKQISSQSGASNDNHYFGYSTPWGYFDFNRFHCHFSPRDWQRLINNNWGFRPKRLKFKLFNIQVKEVTQNDGTTTIANNLTSTVQVFTDSEYQLPYVLGSAHQGCLPPFPADVFMVPQYGYLTLNNGSRAVGRSSFYCLEYFPSQMLRTGNNFTFSYTFEDVPFHSSYAHSQSLDRLMNPLIDQYLYYLSRTDTPSGTTTQSRLQFSQAGASDIRDQSRNWLPGPCYRQQRVSKTSADNNNSEYSWTGATKYHLNGRDSLVNPGPAMASHKDDEEKFFPQSGVLIFGKQGSEKTSVDIEKVMITDEEEIRTTNPVATEQYGSVSTNLQRGNRQAATADVNTQGVLPGMVWQDRDVYLQGPIWAKIPHTDGHFHPSPLMGGFGLKHPPPQILIKNTPVPANPSTTFSAAKFASFITQYSTGQVSVEIEWELQKENSKRWNPEVQYTSNYNKSVNVDFTVDTNGVYTEPRPIGTRYLTRNL

SEQ ID NO: 5209 - DNA, 2211 bp, synthetic construct
  misc_feature 1..2211: note = Description of Artificial Sequence: Synthetic polynucleotide
  source 1..2211: mol_type = other DNA
atggctgccgatggttatcttccagattggctcgaggacactctctctgaaggaataagacagtggtggaagctcaaacctggcccaccaccaccaaagcccgcagagcggcataaggacgacagcaggggtcttgtgcttcctgggtacaagtacctcggacccttcaacggactcgacaagggagagccggtcaacgaggcagacgccgcggccctcgagcacgacaaggcctacgaccagcagctcaaagcgggtgacaatccgtacctgcggtataaccacgccgacgccgagtttcaggagcgtctgcaagaagatacgtcttttgggggcaacctcgggcgagcagtcttccaggccaagaagcgggttctcgaacctctcggtctggttgaggaaggcgctaagacggctcctggaaagaaacgtccggtagagcagtcgccacaagagccagactcctcctcgggcatcggcaagacaggccagcagcccgctaaaaagagactcaattttggtcagactggcgactcagagtcagtccccgacccacaacctctcggagaacctccagcaacccccgctgctgtgggacctactacaatggcttcaggcggtggcgcaccaatggcagacaataacgaaggcgccgacggagtgggtaatgcctcaggaaattggcattgcgattccacatggctgggcgacagagtcatcaccaccagcacccgaacatgggccttgcccacctataacaaccacctctacaagcaaatctccagtgcttcgacgggggccagcaacgacaaccactacttcggctacagcaccccctgggggtattttgactttaacagattccactgccacttttcaccacgtgactggcagcgactcatcaacaataactggggattccggcccaagagactcagcttcaagctcttcaacatccaggtcaaggaggtcacgacgaatgatggcgtcacaaccatcgctaataaccttaccagcacggttcaagtcttctcggactcggagtaccagcttccgtacgtcctcggctctgcgcaccagggctgcctccctccgttcccggcggacgtgttcatgattccgcaatacggctacctgacgctcaacaatggcagccaagccgtgggacgttcatccttttactgcctggaatatttcccttctcagatgctgagaacgggcaacaactttaccttcagctacacctttgaggaagtgcctttccacagcagctacgcgcacagccagagcctggaccggctgatgaatcctctcatcgatcaatacctgtattacctgaacagaactcaaaatcagtccggaagtgcccaaaacaaggacttgctgtttagccgtgggtctccagctggcatgtctgttcagcccaaaaactggctacctggaccctgttatcggcagcagcgcgtttctaaaacaaaaacagacaacaacaacagcaattttacctggactggtgcttcaaaatataacctcaatgggcgtgaatccatcatcaaccctggcactgctatggcctcacacaaagacgacgaagacaagttctttcccatgagcggtgtcatgatttttggaaaagagagcgccggagcttcaaacactgcattggacaatgtcatgattacggacgaagaggaaattaaagccactaaccctgtggccaccgaaagatttgggaccgtggcagtcaatttccagagcagcagcacagaccctgcgaccggagatgtgcatgctatgggagcattacctggcatggtgtggcaagatagagacgtgtacctgcagggtcccatttgggccaaaattcctcacacagatggacactttcacccgtctcctcttatgggcggctttggactcaagaacccgcctcctcagatcctcatcaaaaacacgcctgttcctgcgaatcctccggcggagttttcagctacaaagtttgcttcattcatcactcaatactccacaggacaagtgagcgtggaaattgaatgggagctgcagaaagaaaacagcaaacgctggaatcccgaagtgcagtatacatctaactatgcaaaatctgccaacgttgatttcactgtggacaacaatggactttatactgagcctcgccccattggcacccgttacctcacccgtcccctgtaa

SEQ ID NO: 5210 - protein, 736 aa, synthetic construct
  REGION 1..736: note = Description of Artificial Sequence: Synthetic polypeptide
MAADGYLPDWLEDTLSEGIRQWWKLKPGPPPPKPAERHKDDSRGLVLPGYKYLGPFNGLDKGEPVNEADAAALEHDKAYDQQLKAGDNPYLRYNHADAEFQERLQEDTSFGGNLGRAVFQAKKRVLEPLGLVEEGAKTAPGKKRPVEQSPQEPDSSSGIGKTGQQPAKKRLNFGQTGDSESVPDPQPLGEPPATPAAVGPTTMASGGGAPMADNNEGADGVGNASGNWHCDSTWLGDRVITTSTRTWALPTYNNHLYKQISSASTGASNDNHYFGYSTPWGYFDFNRFHCHFSPRDWQRLINNNWGFRPKRLSFKLFNIQVKEVTTNDGVTTIANNLTSTVQVFSDSEYQLPYVLGSAHQGCLPPFPADVFMIPQYGYLTLNNGSQAVGRSSFYCLEYFPSQMLRTGNNFTFSYTFEEVPFHSSYAHSQSLDRLMNPLIDQYLYYLNRTQNQSGSAQNKDLLFSRGSPAGMSVQPKNWLPGPCYRQQRVSKTKTDNNNSNFTWTGASKYNLNGRESIINPGTAMASHKDDEDKFFPMSGVMIFGKESAGASNTALDNVMITDEEEIKATNPVATERFGTVAVNFQSSSTDPATGDVHAMGALPGMVWQDRDVYLQGPIWAKIPHTDGHFHPSPLMGGFGLKNPPPQILIKNTPVPANPPAEFSATKFASFITQYSTGQVSVEIEWELQKENSKRWNPEVQYTSNYAKSANVDFTVDNNGLYTEPRPIGTRYLTRPL

SEQ ID NO: 5211 - protein, 735 aa, synthetic construct
  REGION 1..735: note = Description of Artificial Sequence: Synthetic polypeptide
MAADGYLPDWLEDTLSEGIRQWWKLKPGPPPPKPAERHKDDSRGLVLPGYKYLGPFNGLDKGEPVNEADAAALEHDKAYDRQLDSGDNPYLKYNHADAEFQERLKEDTSFGGNLGRAVFQAKKRVLEPLGLVEEPVKTAPGKKRPVEHSPVEPDSSSGTGKAGQQPARKRLNFGQTGDADSVPDPQPLGQPPAAPSGLGTNTMATGSGAPMADNNEGADGVGNSSGNWHCDSTWMGDRVITTSTRTWALPTYNNHLYKQISSQSGASNDNHYFGYSTPWGYFDFNRFHCHFSPRDWQRLINNNWGFRPKRLKFKLFNIQVKEVTQNDGTTTIANNLTSTVQVFTDSEYQLPYVLGSAHQGCLPPFPADVFMVPQYGYLTLNNGSQAVGRSSFYCLEYFPSQMLRTGNNFTFSYTFEDVPFHSSYAHSQSLDRLMNPLIDQYLYYLSRTDTPSGTTTQSRLQFSQAGASDIRNQSRNWLPGPCYRQQRVSKTSADNNNSEYSWTGATKYHLNGRDSLVNPGPAMASHKDDEEKFFPQSGVLIFGKQGSEKTSVDIEKVMITDEEEIRTTNPVATEQYGSVSTNLQRGNRQAATADVNTQGVLPGMVWQDRDVYLQGPIWAKIPHTDGHFHPSPLMGGFGLKHPPPQILIKNTPVPANPSTTFSAAKFASFITQYSTGQVSVEIEWELQKENSKRWNPEVQYTSNYNKSVNVDFTVDTNGVYSEPRPIGTRYLTRNQ

SEQ ID NO: 5212 - DNA, 2208 bp, synthetic construct
  misc_feature 1..2208: note = Description of Artificial Sequence: Synthetic polynucleotide
  source 1..2208: mol_type = other DNA
atggctgccgatggttatcttccagattggctcgaggacactctctctgaaggaataagacagtggtggaagctcaaacctggcccaccaccaccaaagcccgcagagcggcataaggacgacagcaggggtcttgtgcttcctgggtacaagtacctcggacccttcaacggactcgacaagggagagccggtcaacgaggcagacgccgcggccctcgagcacgacaaagcctatgaccggcagctcgacagcggagacaacccgtacctcaagtacaaccacgccgacgcggagtttcaggaacgccttaaagaagatacgtcttttgggggcaacctcggacgagcagtcttccaggcgaaaaagagggttcttgaacctctgggcctggttgaggaacctgttaagacggctccgggaaaaaagaggccggtagagcactctcctgtggagccagactcctcctcgggaaccggaaaggcgggccagcagcctgcaagaaaaagattgaattttggtcagactggagacgcagactcagtacctgacccccagcctctcggacagccaccagcagccccctctggtctgggaactaatacgatggctacaggcagtggcgcaccaatggcagacaataacgagggcgccgacggagtgggtaattcctcgggaaattggcattgcgattccacatggatgggcgacagagtcatcaccaccagcacccgaacctgggccctgcccacctacaacaaccacctctacaaacaaatttccagccaatcaggagcctcgaacgacaatcactactttggctacagcaccccttgggggtattttgacttcaacagattccactgccacttttcaccacgtgactggcaaagactcatcaacaacaactggggattccgacccaagagactcaagttcaagctctttaacattcaagtcaaagaggtcacgcagaatgacggtacgacgacgattgccaataaccttaccagcacggttcaggtgtttactgactcggagtaccagctcccgtacgtcctcggctcggcgcatcaaggatgcctcccgccgttcccagcagacgtcttcatggtgccacagtatggatacctcaccctgaacaacgggagtcaggcagtaggacgctcttcattttactgcctggagtactttccttctcagatgctgcgtaccggtaacaactttaccttcagctacacttttgaggacgttcctttccacagcagctacgctcacagccagagtctggaccgtctcatgaatcctctcatcgaccagtacctgtattacttgagcagaacagacactccaagtggaaccaccacgcagtcaaggcttcagttttctcaggccggagcgagtgacattcggaaccagtctaggaactggcttcctggaccctgttaccgccagcagcgagtatcaaagacatctgcggataacaacaacagtgaatactcgtggactggagctaccaagtaccacctcaatggcagagactctctggtgaatccgggcccggccatggcaagccacaaggacgatgaagaaaagttttttcctcagagcggggttctcatctttgggaagcaaggctcagagaaaacaagtgtggacattgaaaaggtcatgattacagacgaagaggaaatcaggacaaccaatcccgtggctacggagcagtatggttctgtatctaccaacctccagagaggcaacagacaagcagctaccgcagatgtcaacacacaaggcgttcttccaggcatggtctggcaggacagagatgtgtaccttcaggggcccatctgggcaaagattccacacacggacggacattttcacccctctcccctcatgggtggattcggacttaaacaccctcctccacagattctcatcaagaacaccccggtacctgcgaatccttcgaccaccttcagtgcggcaaagtttgcttccttcatcacacagtactccacgggacaggtcagcgtggagatcgagtgggagctgcagaaggaaaacagcaaacgctggaatcccgaagttcagtacacttccaactacaacaagtctgttaatgtggactttactgtggacactaatggcgtgtattcagagcctcgccccattggcaccagatacctgactcgtaatcagtaa

SEQ ID NO: 5213 - DNA, 2208 bp, synthetic construct
  misc_feature 1..2208: note = Description of Artificial Sequence: Synthetic polynucleotide
  source 1..2208: mol_type = other DNA
atggctgccgatggttatcttccagattggctcgaggacactctctctgaaggaataagacagtggtggaagctcaaacctggcccaccaccaccaaagcccgcagagcggcataaggacgacagcaggggtcttgtgcttcctgggtacaagtacctcggacccttcaacggactcgacaagggagagccggtcaacgaggcagacgccgcggccctcgagcacgacaaagcctatgaccggcagctcgacagcggagacaacccgtacctcaagtacaaccacgccgacgcggagtttcaggagcgccttaaagaagatacgtcttttgggggcaacctcggacgagcagtcttccaggcgaaaaagagggttcttgaacctctgggcctggttgaggaacctgttaagacggctccgggaaaaaagaggccggtagagcactctcctgtggagccagactcctcctcgggaaccggaaaggcgggccagcagcctgcaagaaaaagattgaattttggtcagactggagacgcagactcagtacctgatccccagcctctcggacagccaccagcagccccctctggtctgggaactaatacgatggctacaggcagtggcgcaccaatggcagacaataacgagggcgccgacggagtgggtaattcctcgggaaattggcattgcgattccacatggatgggcgacagagtcatcaccaccagcacccgaacctgggccctgcccacctacaacaaccacctctacaaacaaatttccagccaatcaggagcctcgaacgacaatcactactttggctacagcaccccttgggggtattttgacttcaacagattccactgccacttttcaccacgtgactggcaaagactcatcaacaacaactggggattccgacccaagagactcaagttcaagctctttaacattcaagtcaaagaggtcacgcagaatgacggtacgacgacgattgccaataaccttaccagcacggttcaggtgtttactgactcggagtaccagctcccgtatgtcctcggctcggcgcatcaaggatgcctcccgccgttcccagcagacgtcttcatggtgccacagtatggatacctcaccctgaacaacgggagtcaggcagtaggacgctcttcattttactgcctggagtactttccttctcagatgctgcgtaccggtaacaactttaccttcagctacacttttgaggacgttcctttccacagcagctacgctcacagccagagtctggaccgtctcatgaatcctctcatcgaccagtacctgtattacttgagcagaacagacactccaagtggaaccaccacgcagtcaaggcttcagttttctcaggccggagcgagtgacattcgggaccagtctaggaactggcttcctggaccctgttaccgccagcagcgagtatcaaagacatctgcggataacaacaacagtgaatactcgtggactggagctaccaagtaccacctcaatggcagagactctctggtgaatccgggcccggccatggcaagccacaaggacgatgaagaaaagttttttcctcagagcggggttctcatctttgggaagcaaggctcagagaaaacaagtgtggacattgaaaaggtcatgattacagacgaagaggaaatcaggacaaccaatcccgtggctacggagcagtatggttctgtatctaccaacctccagagaggcaacagacaagcagctaccgcagatgtcaacacacaaggcgttcttccaggcatggtctggcaggacagagatgtgtaccttcaggggcccatctgggcaaagattccacacacggacggacattttcacccctctcccctcatgggtggattcggacttaaacaccctcctccacagattctcatcaagaacaccccggtacctgcgaatccttcgaccaccttcagtgcggcaaagtttgcttccttcatcacacagtactccacgggacaggtcagcgtggagatcgagtgggagctgcagaaggaaaacagcaaacgctggaatcccgaagttcagtacacttccaactacaacaagtctgttaatgtggactttactgtggacactaatggcgtgtattcagagcctcgccccattggcaccagatacctgactcgtaatctgtaa

SEQ ID NO: 5214 - protein, 735 aa, synthetic construct
  REGION 1..735: note = Description of Artificial Sequence: Synthetic polypeptide
MAADGYLPDWLEDTLSEGIRQWWKLKPGPPPPKPAERHKDDSRGLVLPGYKYLGPFNGLDKGEPVNEADAAALEHDKAYDRQLDSGDNPYLKYNHADAEFQERLKEDTSFGGNLGRAVFQAKKRVLEPLGLVEEPVKTAPGKKRPVEHSPVEPDSSSGTGKAGQQPARKRLNFGQTGDADSVPDPQPLGQPPAAPSGLGTNTMATGSGAPMADNNEGADGVGNSSGNWHCDSTWMGDRVITTSTRTWALPTYNNHLYKQISSQSGASNDNHYFGYSTPWGYFDFNRFHCHFSPRDWQRLINNNWGFRPKRLKFKLFNIQVKEVTQNDGTTTIANNLTSTVQVFTDSEYQLPYVLGSAHQGCLPPFPADVFMVPQYGYLTLNNGSQAVGRSSFYCLEYFPSQMLRTGNNFTFSYTFEDVPFHSSYAHSQSLDRLMNPLIDQYLYYLSRTDTPSGTTTQSRLQFSQAGASDIRDQSRNWLPGPCYRQQRVSKTSADNNNSEYSWTGATKYHLNGRDSLVNPGPAMASHKDDEEKFFPQSGVLIFGKQGSEKTSVDIEKVMITDEEEIRTTNPVATEQYGSVSTNLQRGNRQAATADVNTQGVLPGMVWQDRDVYLQGPIWAKIPHTDGHFHPSPLMGGFGLKHPPPQILIKNTPVPANPSTTFSAAKFASFITQYSTGQVSVEIEWELQKENSKRWNPEVQYTSNYNKSVNVDFTVDTNGVYSEPRPIGTRYLTRNL

SEQ ID NO: 5215 - DNA, 2172 bp, synthetic construct
  misc_feature 1..2172: note = Description of Artificial Sequence: Synthetic polynucleotide
  source 1..2172: mol_type = other DNA
atgtcttttgttgatcaccctccagattggttggaagaagttggtgaaggtcttcgcgagtttttgggccttgaagcgggcccaccgaaaccaaaacccaatcagcagcatcaagatcaagcccgtggtcttgtgctgcctggttataactatctcggacccggaaacggtctcgatcgaggagagcctgtcaacagggcagacgaggtcgcgcgagagcacgacatctcgtacaacgagcagcttgaggcgggagacaacccctacctcaagtacaaccacgcggacgccgagtttcaggagaagctcgccgacgacacatccttcgggggaaacctcggaaaggcagtctttcaggccaagaaaagggttctcgaaccttttggcctggttgaagagggtgctaagacggcccctaccggaaagcggatagacgaccactttccaaaaagaaagaaggctcggaccgaagaggactccaagccttccacctcgtcagacgccgaagctggacccagcggatcccagcagctgcaaatcccagcccaaccagcctcaagtttgggagctgatacaatgtctgcgggaggtggcggcccattgggcgacaataaccaaggtgccgatggagtgggcaatgcctcgggagattggcattgcgattccacgtggatgggggacagagtcgtcaccaagtccacccgaacctgggtgctgcccagctacaacaaccaccagtaccgagagatcaaaagcggctccgtcgacggaagcaacgccaacgcctactttggatacagcaccccctgggggtactttgactttaaccgcttccacagccactggagcccccgagactggcaaagactcatcaacaactactggggcttcagaccccggtccctcagagtcaaaatcttcaacattcaagtcaaagaggtcacggtgcaggactccaccaccaccatcgccaacaacctcacctccaccgtccaagtgtttacggacgacgactaccagctgccctacgtcgtcggcaacgggaccgagggatgcctgccggccttccctccgcaggtctttacgctgccgcagtacggttacgcgacgctgaaccgcgacaacacagaaaatcccaccgagaggagcagcttcttctgcctagagtactttcccagcaagatgctgagaacgggcaacaactttgagtttacctacaactttgaggaggtgcccttccactccagcttcgctcccagtcagaacctgttcaagctggccaacccgctggtggaccagtacttgtaccgcttcgtgagcacaaataacactggcggagtccagttcaacaagaacctggccgggagatacgccaacacctacaaaaactggttcccggggcccatgggccgaacccagggctggaacctgggctccggggtcaaccgcgccagtgtcagcgccttcgccacgaccaataggatggagctcgagggcgcgagttaccaggtgcccccgcagccgaacggcatgaccaacaacctccagggcagcaacacctatgccctggagaacactatgatcttcaacagccagccggcgaacccgggcaccaccgccacgtacctcgagggcaacatgctcatcaccagcgagagcgagacgcagccggtgaaccgcgtggcgtacaacgtcggcgggcagatggccaccaacaaccagagctccaccactgcccccgcgaccggcacgtacaacctccaggaaatcgtgcccggcagcgtgtggatggagagggacgtgtacctccaaggacccatctgggccaagatcccagagacgggggcgcactttcacccctctccggccatgggcggattcggactcaaacacccaccgcccatgatgctcatcaagaacacgcctgtgcccggaaatatcaccagcttctcggacgtgcccgtcagcagcttcatcacccagtacagcaccgggcaggtcaccgtggagatggagtgggagctcaagaaggaaaactccaagaggtggaacccagagatccagtacacaaacaactacaacgacccccagtttgtggactttgccccggacagcaccggggaatacagaaccaccagacctatcggaacccgataccttacccgacccctt

SEQ ID NO: 5216 - DNA, 2214 bp, synthetic construct
  misc_feature 1..2214: note = Description of Artificial Sequence: Synthetic polynucleotide
  source 1..2214: mol_type = other DNA
atggctgccgatggttatcttccagattggctcgaggacaacctctctgagggcattcgcgagtggtgggcgctgaaacctggagccccgaagcccaaagccaaccagcaaaagcaggacgacggccggggtctggtgcttcctggctacaagtacctcggacccttcaacggactcgacaagggggagcccgtcaacgcggcggacgcagcggccctcgagcacgacaaggcctacgaccagcagctgcaggcgggtgacaatccgtacctgcggtataaccacgccgacgccgagtttcaggagcgtctgcaagaagatacgtcttttgggggcaacctcgggcgagcagtcttccaggccaagaagcgggttctcgaacctctcggtctggttgaggaaggcgctaagacggctcctggaaagaagagaccggtagagccatcaccccagcgttctccagactcctctacgggcatcggcaagaaaggccaacagcccgccagaaaaagactcaattttggtcagactggcgactcagagtcagttccagaccctcaacctctcggagaacctccagcagcgccctctggtgtgggacctaatacaatggctgcaggcggtggcgcaccaatggcagacaataacgaaggcgccgacggagtgggtagttcctcgggaaattggcattgcgattccacatggctgggcgacagagtcatcaccaccagcacccgaacctgggccctgcccacctacaacaaccacctctacaagcaaatctccaacgggacatcgggaggagccaccaacgacaacacctacttcggctacagcaccccctgggggtattttgactttaacagattccactgccacttttcaccacgtgactggcagcgactcatcaacaacaactggggattccggcccaagagactcagcttcaagctcttcaacatccaggtcaaggaggtcacgcagaatgaaggcaccaagaccatcgccaataacctcaccagcaccatccaggtgtttacggactcggagtaccagctgccgtacgttctcggctctgcccaccagggctgcctgcctccgttcccggcggacgtgttcatgattccccagtacggctacctaacactcaacaacggtagtcaggccgtgggacgctcctccttctactgcctggaatactttccttcgcagatgctgagaaccggcaacaacttccagtttacttacaccttcgaggacgtgcctttccacagcagctacgcccacagccagagcttggaccggctgatgaatcctctgattgaccagtacctgtactacttgtctcggactcaaacaacaggaggcacggcaaatacgcagactctgggcttcagccaaggtgggcctaatacaatggccaatcaggcaaagaactggctgccaggaccctgttaccgccaacaacgcgtctcaacgacaaccgggcaaaacaacaatagcaactttgcctggactgctgggaccaaataccatctgaatggaagaaattcattggctaatcctggcatcgctatggcaacacacaaagacgacgaggagcgtttttttcccagtaacgggatcctgatttttggcaaacaaaatgctgccagagacaatgcggattacagcgatgtcatgctcaccagcgaggaagaaatcaaaaccactaaccctgtggctacagaggaatacggtatcgtggcagataacttgcctgagcggacggcgatgagtcttccgggaactgtcaacagccagggggccttacccggtatggtctggcagaaccgggacgtgtacctgcagggtcccatctgggccaagattcctcacacggacggcaacttccacccgtctccgctgatgggcggctttggcctgaaacatcctccgcctcagatcctgatcaagaacacgcctgtacctgcggatcctccgaccaccttcaaccagtcaaagctgaactctttcatcacgcaatacagcaccggacaggtcagcgtggaaattgaatgggagctgcagaaggaaaacagcaagcgctggaaccccgagatccagtacacctccaactactacaaatctacaagtgtggactttgctgttaatacagaaggcgtgtactctgaaccccgccccattggcacccgttacctcacccgtaatctg

SEQ ID NO: 5217 - protein, 738 aa, synthetic construct
  REGION 1..738: note = Description of Artificial Sequence: Synthetic polypeptide
MAADGYLPDWLEDNLSEGIREWWALKPGAPKPKANQQKQDDGRGLVLPGYKYLGPFNGLDKGEPVNAADAAALEHDKAYDQQLQAGDNPYLRYNHADAEFQERLQEDTSFGGNLGRAVFQAKKRVLEPLGLVEEGAKTAPGKKRPVEPSPQRSPDSSTGIGKKGQQPARKRLNFGQTGDSESVPDPQPLGEPPAAPSGVGPNTMAAGGGAPMADNNEGADGVGSSSGNWHCDSTWLGDRVITTSTRTWALPTYNNHLYKQISNGTSGGATNDNTYFGYSTPWGYFDFNRFHCHFSPRDWQRLINNNWGFRPKRLSFKLFNIQVKEVTQNEGTKTIANNLTSTIQVFTDSEYQLPYVLGSAHQGCLPPFPADVFMIPQYGYLTLNNGSQAVGRSSFYCLEYFPSQMLRTGNNFQFTYTFEDVPFHSSYAHSQSLDRLMNPLIDQYLYYLSRTQTTGGTANTQTLGFSQGGPNTMANQAKNWLPGPCYRQQRVSTTTGQNNNSNFAWTAGTKYHLNGRNSLANPGIAMATHKDDEERFFPSNGILIFGKQNAARDNADYSDVMLTSEEEIKTTNPVATEEYGIVADNLPERTAMSLPGTVNSQGALPGMVWQNRDVYLQGPIWAKIPHTDGNFHPSPLMGGFGLKHPPPQILIKNTPVPADPPTTFNQSKLNSFITQYSTGQVSVEIEWELQKENSKRWNPEIQYTSNYYKSTSVDFAVNTEGVYSEPRPIGTRYLTRNL

SEQ ID NO: 5218 - DNA, 2214 bp, synthetic construct
  misc_feature 1..2214: note = Description of Artificial Sequence: Synthetic polynucleotide
  source 1..2214: mol_type = other DNA
atggctgccgatggttatcttccagattggctcgaggacaacctctctgagggcattcgcgagtggtgggcgctgaaacctggagccccgaagcccaaagccaaccagcaaaagcaggacgacggccggggtctggtgcttcctggctacaagtacctcggacccttcaacggactcgacaagggggagcccgtcaacgcggcggacgcagcggccctcgagcacgacaaggcctacgaccagcagctgcaggcgggtgacaatccgtacctgcggtataaccacgccgacgccgagtttcaggagcgtctgcaagaagatacgtcttttgggggcaacctcgggcgagcagtcttccaggccaagaagcgggttctcgaacctctcggtctggttgaggaaggcgctaagacggctcctggaaagaagagaccggtagagccatcaccccagcgttctccagactcctctacgggcatcggcaagaaaggccaacagcccgccagaaaaagactcaattttggtcagactggcgactcagagtcagttccagaccctcaacctctcggagaacctccagcagcgccctctggtgtgggacctaatacaatggctgcaggcggtggcgcaccaatggcagacaataacgaaggcgccgacggagtgggtagttcctcgggaaattggcattgcgattccacatggctgggcgacagagtcatcaccaccagcacccgaacctgggccctgcccacctacaacaaccacctctacaagcaaatctccaacgggacatcgggaggagccaccaacgacaacacctacttcggctacagcaccccctgggggtattttgactttaacagattccactgccacttttcaccacgtgactggcagcgactcatcaacaacaactggggattccggcccaagagactcagcttcaagctcttcaacatccaggtcaaggaggtcacgcagaatgaaggcaccaagaccatcgccaataacctcaccagcaccatccaggtgtttacggactcggagtaccagctgccgtacgttctcggctctgcccaccagggctgcctgcctccgttcccggcggacgtgttcatgattccccagtacggctacctaacactcaacaacggtagtcaggccgtgggacgctcctccttctactgcctggaatactttccttcgcagatgctgagaaccggcaacaacttccagtttacttacaccttcgaggacgtgcctttccacagcagctacgcccacagccagagcttggaccggctgatgaatcctctgattgaccagtacctgtactacttgtctcggactcaaacaacaggaggcacggcaaatacgcagactctgggcttcagccaaggtgggcctaatacaatggccaatcaggcaaagaactggctgccaggaccctgttaccgccaacaacgcgtctcaacgacaaccgggcaaaacaacaatagcaactttgcctggactgctgggaccaaataccatctgaatggaagaaattcattggctaatcctggcatcgctatggcaacacacaaagacgacgaggagcgtttttttcccagtaacgggatcctgatttttggcaaacaaaatgctgccagagacaatgcggattacagcgatgtcatgctcaccagcgaggaagaaatcaaaaccactaaccctgtggctacagaggaatacggtatcgtggcagataacttgagttttagtcgtgcggttctttgtgatggaactgtcaacagccagggggccttacccggtatggtctggcagaaccgggacgtgtacctgcagggtcccatctgggccaagattcctcacacggacggcaacttccacccgtctccgctgatgggcggctttggcctgaaacatcctccgcctcagatcctgatcaagaacacgcctgtacctgcggatcctccgaccaccttcaaccagtcaaagctgaactctttcatcacgcaatacagcaccggacaggtcagcgtggaaattgaatgggagctgcagaaggaaaacagcaagcgctggaaccccgagatccagtacacctccaactactacaaatctacaagtgtggactttgctgttaatacagaaggcgtgtactctgaaccccgccccattggcacccgttacctcacccgtaatctg

SEQ ID NO: 5219 - protein, 738 aa, synthetic construct
  REGION 1..738: note = Description of Artificial Sequence: Synthetic polypeptide
MAADGYLPDWLEDNLSEGIREWWALKPGAPKPKANQQKQDDGRGLVLPGYKYLGPFNGLDKGEPVNAADAAALEHDKAYDQQLQAGDNPYLRYNHADAEFQERLQEDTSFGGNLGRAVFQAKKRVLEPLGLVEEGAKTAPGKKRPVEPSPQRSPDSSTGIGKKGQQPARKRLNFGQTGDSESVPDPQPLGEPPAAPSGVGPNTMAAGGGAPMADNNEGADGVGSSSGNWHCDSTWLGDRVITTSTRTWALPTYNNHLYKQISNGTSGGATNDNTYFGYSTPWGYFDFNRFHCHFSPRDWQRLINNNWGFRPKRLSFKLFNIQVKEVTQNEGTKTIANNLTSTIQVFTDSEYQLPYVLGSAHQGCLPPFPADVFMIPQYGYLTLNNGSQAVGRSSFYCLEYFPSQMLRTGNNFQFTYTFEDVPFHSSYAHSQSLDRLMNPLIDQYLYYLSRTQTTGGTANTQTLGFSQGGPNTMANQAKNWLPGPCYRQQRVSTTTGQNNNSNFAWTAGTKYHLNGRNSLANPGIAMATHKDDEERFFPSNGILIFGKQNAARDNADYSDVMLTSEEEIKTTNPVATEEYGIVADNLSFSRAVLCDGTVNSQGALPGMVWQNRDVYLQGPIWAKIPHTDGNFHPSPLMGGFGLKHPPPQILIKNTPVPADPPTTFNQSKLNSFITQYSTGQVSVEIEWELQKENSKRWNPEIQYTSNYYKSTSVDFAVNTEGVYSEPRPIGTRYLTRNL

SEQ ID NO: 5220 - DNA, 2215 bp, synthetic construct
  misc_feature 1..2215: note = Description of Artificial Sequence: Synthetic polynucleotide
  source 1..2215: mol_type = other DNA
atggctgccgatggttatcttccagattggctcgaggacactctctctgaaggaataagacagtggtggaagctcaaacctggcccaccaccaccaaagcccgcagagcggcataaggacgacagcaggggtcttgtgcttcctgggtacaagtacctcggacccttcaacggactcgacaagggagagccggtcaacgaggcagacgccgcggccctcgagcacgacaaagcctacgaccggcagctcgacagcggagacaacccgtacctcaagtacaaccacgccgacgccgagttccaggagcggctcaaagaagatacgtcttttgggggcaacctcgggcgagcagtcttccaggccaaaaagaggcttcttgaacctcttggtctggttgaggaagcggctaagacggctcctggaaagaagaggcctgtagagcactctcctgtggagccagactcctcctcgggaaccggaaaggcgggccagcagcctgcaagaaaaagattgaattttggtcagactggagacgcagactcagtcccagaccctcaaccaatcggagaacctcccgcagccccctcaggtgtgggatctcttacaatggctgcaggcggtggcgcaccaatggcagacaataacgagggcgccgacggagtgggtaattcctcgggaaattggcattgcgattccacatggatgggcgacagagtcatcaccaccagcacccgaacctgggccctgcccacctacaacaaccacctctacaagcaaatctccaacagcacatctggaggatcttcaaatgacaacgcctacttcggctacagcaccccctgggggtattttgactttaacagattccactgccacttttcaccacgtgactggcagcgactcatcaacaacaactggggattccggcccaagagactcagcttcaagctcttcaacatccaggtcaaggaggtcacgcagaatgaaggcaccaagaccatcgccaataacctcaccagcaccatccaggtgtttacggactcggagtaccagctgccgtacgttctcggctctgcccaccagggctgcctgcctccgttcccggcggacgtgttcatgattccccagtacggctacctaacactcaacaacggtagtcaggccgtgggacgctcctccttctactgcctggaatactttccttcgcagatgctgagaaccggcaacaacttccagtttacttacaccttcgaggacgtgcctttccacagcagctacgcccacagccagagcttggaccggctgatgaatcctctgattgaccagtacctgtactacttgtctcggactcaaacaacaggaggcacgacaaatacgcagactctgggcttcagccaaggtgggcctaatacaatggccaatcaggcaaagaactggctgccaggaccctgttaccgccagcagcgagtatcaaagacatctgcggataacaacaacagtgaatactcgtggactggagctaccaagtaccacctcaatggcagagactctctggtgaatccgggcccggccatggcaagccacaaggacgatgaagaaaagtttttttcctcagagcggggttctcatctttgggaagcaaggctcagagaaaacaaatgtggacattgaaaaggtcatgattacagacgaagaggaaatcaggacaaccaatcccgtggctacggagcagtatggttctgtatctaccaacctccagagaggcaacagacaagcagctaccgcagatgtcaacacacaaggcgttcttccaggcatggtctggcaggacagagatgtgtaccttcaggggcccatctgggcaaagattccacacacggacggacattttcacccctctcccctcatgggtggattcggacttaaacaccctccgcctcagatcctgatcaagaacacgcctgtacctgcggatcctccgaccaccttcaaccagtcaaagctgaactctttcatcacccagtattctactggccaagtcagcgtggagatcgagtgggagctgcagaaggaaaacagcaagcgctggaaccccgagatccagtacacctccaactactacaaatctacaagtgtggactttgctgttaatacagaaggcgtgtactctgaaccccgccccattggcacccgttacctcacccgtaatctgtaa

SEQ ID NO: 5221 - protein, 737 aa, synthetic construct
  REGION 1..737: note = Description of Artificial Sequence: Synthetic polypeptide
MAADGYLPDWLEDTLSEGIRQWWKLKPGPPPPKPAERHKDDSRGLVLPGYKYLGPFNGLDKGEPVNEADAAALEHDKAYDRQLDSGDNPYLKYNHADAEFQERLKEDTSFGGNLGRAVFQAKKRLLEPLGLVEEAAKTAPGKKRPVEHSPVEPDSSSGTGKAGQQPARKRLNFGQTGDADSVPDPQPIGEPPAAPSGVGSLTMAAGGGAPMADNNEGADGVGNSSGNWHCDSTWMGDRVITTSTRTWALPTYNNHLYKQISNSTSGGSSNDNAYFGYSTPWGYFDFNRFHCHFSPRDWQRLINNNWGFRPKRLSFKLFNIQVKEVTQNEGTKTIANNLTSTIQVFTDSEYQLPYVLGSAHQGCLPPFPADVFMIPQYGYLTLNNGSQAVGRSSFYCLEYFPSQMLKTGNNFQFTYTFEDVPFHSSYAHSQSLDRLMNPLIDQYLYYLSRTQTTGGTTNTQTLGFSQGGPNTMANQAKNWLPGPCYRQQRVSKTSADNNNSEYSWTGATKYHLNGRDSLVNPGPAMASHKDDEEKFFPQSGVLIFGKQGSEKTNVDIEKVMITDEEEIRTTNPVATEQYGSVSTNLQRGNRQAATADVNTQGVLPGMVWQDRDVYLQGPIWAKIPHTDGHFHPSPLMGGFGLKHPPPQILIKNTPVPADPPTTFNQSKLNSFITQYSTGQVSVEIEWELQKENSKRWNPEIQYTSNYYKSTSVDFAVNTEGVYSEPRPIGTRYLTRNL

SEQ ID NO: 5222 - protein, 737 aa, synthetic construct
  REGION 1..737: note = Description of Artificial Sequence: Synthetic polypeptide
MAADGYLPDWLEDTLSEGIRQWWKLKPGPPPPKPAERHKDDSRGLVLPGYKYLGPFNGLDKGEPVNEADAAALEHDKAYDRQLDSGDNPYLKYNHADAEFQERLKEDTSFGGNLGRAVFQAKKRLLEPLGLVEEAAKTAPGKKRPVEHSPVEPDSSSGTGKAGQQPARKRLNFGQTGDADSVPDPQPIGEPPAAPSGVGSLTMAAGGGAPMADNNEGADGVGNSSGNWHCDSTWMGDRVITTSTRTWALPTYNNHLYKQISNSTSGGSSNDNAYFGYSTPWGYFDFNRFHCHFSPRDWQRLINNNWGFRPKRLSFKLFNIQVKEVTQNEGTKTIANNLTSTIQVFTDSEYQLPYVLGSAHQGCLPPFPADVFMIPQYGYLTLNNGSQAVGRSSFYCLEYFPSQMLKTGNNFQFTYTFEDVPFHSSYAHSQSLDRLMNPLIDQYLYYLSRTQTTGGTTNTQTLGFSQGGPNTMANQAKNWLPGPCYRQQRVSKTSADNNNSEYSWTGATKYHLNGRDSLVNPGPAMASHKDDEEKFFPQSGVLIFGKQGSEKTNVDIEKVMITDEEEIRTTNPVATEQYGSVSTNLQQGNTQAATADVNTQGVLPGMVWQDRDVYLQGPIWAKIPHTDGHFHPSPLMGGFGLKHPPPQILIKNTPVPADPPTTFNQSKLNSFITQYSTGQVSVEIEWELQKENSKRWNPEIQYTSNYYKSTSVDFAVNTEGVYSEPRPIGTRYLTRNL

SEQ ID NO: 5223 - protein, 737 aa, synthetic construct
  REGION 1..737: note = Description of Artificial Sequence: Synthetic polypeptide
MAADGYLPDWLEDTLSEGIRQWWKLKPGPPPPKPAERHKDDSRGLVLPGYKYLGPFNGLDKGEPVNEADAAALEHDKAYDRQLDSGDNPYLKYNHADAEFQERLKEDTSFGGNLGRAVFQAKKRLLEPLGLVEEAAKTAPGKKRPVEHSPVEPDSSSGTGKAGQQPARKRLNFGQTGDADSVPDPQPIGEPPAAPSGVGSLTMAAGGGAPMADNNEGADGVGNSSGNWHCDSTWMGDRVITTSTRTWALPTYNNHLYKQISNSTSGGSSNDNAYFGYSTPWGYFDFNRFHCHFSPRDWQRLINNNWGFRPKRLSFKLFNIQVKEVTQNEGTKTIANNLTSTIQVFTDSEYQLPYVLGSAHQGCLPPFPADVFMIPQYGYLTLNNGSQAVGRSSFYCLEYFPSQMLRTGNNFQFTYTFEDVPFHSSYAHSQSLDRLMNPLIDQYLYYLSRTQTTGGTTNTQTLGFSQGGPNTMANQAKNWLPGPCYRQQRVSKTSADNNNSEYSWTGATKYHLNGRDSLVNPGPAMASHKDDEEKFFPQSGVLIFGKQGSEKTNVDIEKVMITDEEEIRTTNPVATEQYGSVSTNLQQGNTQAATADVNTQGVLPGMVWQDRDVYLQGPIWAKIPHTDGHFHPSPLMGGFGLKHPPPQILIKNTPVPADPPTTFNQSKLNSFITQYSTGQVSVEIEWELQKENSKRWNPEIQYTSNYYKSTSVDFAVNTEGVYSEPRPIGTRYLTRNL

SEQ ID NO: 5224 - DNA, 2214 bp, synthetic construct
  misc_feature 1..2214: note = Description of Artificial Sequence: Synthetic polynucleotide
  source 1..2214: mol_type = other DNA
atggctgccgatggttatcttccagattggctcgaggacaaccttagtgaaggaattcgcgagtggtgggctttgaaacctggagcccctcaacccaaggcaaatcaacaacatcaagacaacgctcgaggtcttgtgcttccgggttacaaataccttggacccggcaacggactcgacaagggggagccggtcaacgcagcagacgcggcggccctcgagcacgacaaggcctacgaccagcagctgcaggcgggtgacaatccgtacctgcggtataaccacgccgacgccgagtttcaggagcgtctgcaagaagatacgtcttttgggggcaaccttggcagagcagtcttccaggccaaaaagaggatccttgagcctcttggtctggttgaggaagcagctaaaacggctcctggaaagaagaggcctgtagatcagtctcctcaggaaccggactcatcatctggtgttggcaaatcgggcaaacagcctgccagaaaaagactaaatttcggtcagactggcgactcagagtcagtcccagaccctcaacctctcggagaaccaccagcagcccccacaagtttgggatctaatacaatggcttcaggcggtggcgcaccaatggcagacaataacgagggtgccgatggggtgggtagttcctcgggaaattggcattgcgattcccaatggctgggggacagagtcatcaccaccagcacccgaacctgggccctgcccacctacaacaatcacctctacaagcaaatctccaacgggacatcgggaggagccaccaacgacaacacctacttcggctacagcaccccctgggggtattttgactttaacagattccactgccacttttcaccacgtgactggcagcgactcatcaacaacaactggggattccggcccaagagactcagcttcaagctcttcaacatccaggtcaaggaggtcacgcagaatgaaggcaccaagaccatcgccaataacctcaccagcaccatccaggtgtttacggactcggagtaccagctgccgtacgttctcggctctgcgcaccagggctgcctccctccgttcccggcggacgtgttcatgattccgcaatacggctacctgacgctcaacaatggcagccaagccgtgggacgttcatccttttactgcctggaatatttcccttctcagatgctgagaacgggcaacaactttaccttcagctacacctttgaggaagtgcctttccacagcagctacgcgcacagccagagcttggaccggctgatgaatcctctgattgaccagtacctgtactacttgtctcggactcaaacaacaggaggcacggcaaatacgcagactctgggcttcagccaaggtgggcctaatacaatggccaatcaggcaaagaactggctgccaggaccctgttaccgccaacaacgcgtctcaacgacaaccgggcaaaacaacaatagcaactttgcctggactgctgggaccaaataccatctgaatggaagaaattcattggctaatcctggcatcgctatggcaacacacaaagacgacgaggagcgtttttttcccagtaacgggatcctgatttttggcaaacaaaatgctgccagagacaatgcggattacagcgatgtcatgctcaccagcgaggaagaaatcaaaaccactaaccctgtggctacagaggaatacggtatcgtggcagataacttgcagcagcaaaacacggctcctcaaattggaactgtcaacagccagggggccttacccggtatggtctggcagaaccgggacgtgtacctgcagggtcccatctgggccaagattcctcacacggacggcaacttccacccgtctccgctgatgggcggctttggcctgaaacatcctccgcctcagatcctgatcaagaacacgcctgtacctgcggatcctccgaccaccttcaaccagtcaaagctgaactctttcatcacgcaatacagcaccggacaggtcagcgtggagatcgagtgggagctgcagaaggaaaacagcaagcgctggaacccggagatccagtacacttccaactattacaagtctaataatgttgaatttgctgttaatactgaaggtgtatatagtgaaccccgccccattggcaccagatacctgactcgtaatctgtaa

SEQ ID NO: 5225 - protein, 737 aa, synthetic construct
  REGION 1..737: note = Description of Artificial Sequence: Synthetic polypeptide
MAADGYLPDWLEDNLSEGIREWWALKPGAPQPKANQQHQDNARGLVLPGYKYLGPGNGLDKGEPVNAADAAALEHDKAYDQQLQAGDNPYLRYNHADAEFQERLQEDTSFGGNLGRAVFQAKKRILEPLGLVEEAAKTAPGKKRPVDQSPQEPDSSSGVGKSGKQPARKRLNFGQTGDSESVPDPQPLGEPPAAPTSLGSNTMASGGGAPMADNNEGADGVGSSSGNWHCDSQWLGDRVITTSTRTWALPTYNNHLYKQISNGTSGGATNDNTYFGYSTPWGYFDFNRFHCHFSPRDWQRLINNNWGFRPKRLSFKLFNIQVKEVTQNEGTKTIANNLTSTIQVFTDSEYQLPYVLGSAHQGCLPPFPADVFMIPQYGYLTLNNGSQAVGRSSFYCLEYFPSQMLRTGNNFTFSYTFEEVPFHSSYAHSQSLDRLMNPLIDQYLYYLSRTQTTGGTANTQTLGFSQGGPNTMANQAKNWLPGPCYRQQRVSTTTGQNNNSNFAWTAGTKYHLNGRNSLANPGIAMATHKDDEERFFPSNGILIFGKQNAARDNADYSDVMLTSEEEIKTTNPVATEEYGIVADNLQQQNTAPQIGTVNSQGALPGMVWQNRDVYLQGPIWAKIPHTDGNFHPSPLMGGFGLKHPPPQILIKNTPVPADPPTTFNQSKLNSFITQYSTGQVSVEIEWELQKENSKRWNPEIQYTSNYYKSNNVEFAVNTEGVYSEPRPIGTRYLTRNL

SEQ ID NO: 5226 - DNA, 2211 bp, synthetic construct
  misc_feature 1..2211: note = Description of Artificial Sequence: Synthetic polynucleotide
  source 1..2211: mol_type = other DNA
atggctgccgatggttatcttccagattggctcgaggacaacctctctgagggcattcgcgagtggtgggacttgaaacctggagccccgaagcccaaagccaaccagcaaaagcaggacgacggccggggtctggtgcttcctggctacaagtacctcggacccttcaacggactcgacaagggggagcccgtcaacgcggcggacgcagcggccctcgagcacgacaaggcctacgaccagcagctcaaagcgggtgacaatccgtacctgcggtataaccacgccgacgccgagtttcaggagcgtctgcaagaagatacgtcttttgggggcaacctcgggcgagcagtcttccaggccaagaagcgggttctcgaacctctcggtctggttgaggaaggcgctaagacggctcctggaaagaaacgtccggtagagcagtcgccacaagagccagactcctcctcgggcatcggcaagacaggccagcagcccgctaaaaagagactcaattttggtcagactggcgactcagagtcagtccccgacccacaacctctcggagaacctccagcaacccccgctgctgtgggacctactacaatggcttcaggcggtggcgcaccaatggcagacaataacgaaggcgccgacggagtgggtaatgcctcaggaaattggcattgcgattccacatggctgggcgacagagtcatcaccaccagcacccgaacatgggccttgcccacctataacaaccacctctacaagcaaatctccagtgcttcaacgggggccagcaacgacaaccactacttcggctacagcaccccctgggggtattttgatttcaacagattccactgccatttctcaccacgtgactggcagcgactcatcaacaacaattggggattccggcccaagagactcaacttcaagctcttcaacatccaagtcaaggaggtcacgacgaatgatggcgtcacgaccatcgctaataaccttaccagcacggttcaagtcttctcggactcggagtaccagctgccgtacgttctcggctctgcccaccagggctgcctgcctccgttcccggcggacgtgttcatgattccccagtacggctacctaacactcaacaacggtagtcaggccgtgggacgctcctccttctactgcctggaatactttccttcgcagatgctgagaaccggcaacaacttccagtttacttacaccttcgaggacgtgcctttccacagcagctacgcccacagccagagcttggaccggctgatgaatcctctgattgaccagtacctgtactacttgtctcggactcaaacaacaggaggcacggcaaatacgcagactctgggcttcagccaaggtgggcctaatacaatggccaatcaggcaaagaactggctgccaggaccctgttaccgccaacaacgcgtctcaacgacaaccgggcaaaacaacaatagcaattttacctggactggtgcttcaaaatataacctcaatgggcgtgaatccatcatcaaccctggcactgctatggcctcacacaaagacgacgaagacaagttctttcccatgagcggtgtcatgatttttggaaaagagagcgccggagcttcaaacactgcattggacaatgtcatgattacagacgaagaggaaattaaagccactaaccctgtggccaccgaaagatttgggaccgtggcagtcaatttccagagcagcagcacagaccctgcgaccggagatgtgcatgctatgggagcattacctggcatggtgtggcaagatagagacgtgtacctgcagggtcccatttgggccaaaattcctcacacagatggacactttcacccgtctcctcttatgggcggctttggactcaagaacccgcctcctcagatcctcatcaaaaacacgcctgttcctgcgaatcctccggcggagttttcagctacaaagtttgcttcattcatcacccaatactccacaggacaagtgagtgtggaaattgaatgggagctgcagaaagaaaacagcaagcgctggaatcccgaagtgcagtacacatccaattatgcaaaatctgccaacgttgattttactgtggacaacaatggactttatactgagcctcgccccattggcacccgttacctcacccgtcccctgtaa

SEQ ID NO: 5227 - protein, 736 aa, synthetic construct
  REGION 1..736: note = Description of Artificial Sequence: Synthetic polypeptide
MAADGYLPDWLEDNLSEGIREWWDLKPGAPKPKANQQKQDDGRGLVLPGYKYLGPFNGLDKGEPVNAADAAALEHDKAYDQQLKAGDNPYLRYNHADAEFQERLQEDTSFGGNLGRAVFQAKKRVLEPLGLVEEGAKTAPGKKRPVEQSPQEPDSSSGIGKTGQQPAKKRLNFGQTGDSESVPDPQPLGEPPATPAAVGPTTMASGGGAPMADNNEGADGVGNASGNWHCDSTWLGDRVITTSTRTWALPTYNNHLYKQISSASTGASNDNHYFGYSTPWGYFDFNRFHCHFSPRDWQRLINNNWGFRPKRLNFKLFNIQVKEVTTNDGVTTIANNLTSTVQVFSDSEYQLPYVLGSAHQGCLPPFPADVFMIPQYGYLTLNNGSQAVGRSSFYCLEYFPSQMLRTGNNFQFTYTFEDVPFHSSYAHSQSLDRLMNPLIDQYLYYLSRTQTTGGTANTQTLGFSQGGPNTMANQAKNWLPGPCYRQQRVSTTTGQNNNSNFTWTGASKYNLNGRESIINPGTAMASHKDDEDKFFPMSGVMIFGKESAGASNTALDNVMITDEEEIKATNPVATERFGTVAVNFQSSSTDPATGDVHAMGALPGMVWQDRDVYLQGPIWAKIPHTDGHFHPSPLMGGFGLKNPPPQILIKNTPVPANPPAEFSATKFASFITQYSTGQVSVEIEWELQKENSKRWNPEVQYTSNYAKSANVDFTVDNNGLYTEPRPIGTRYLTRPL

SEQ ID NO: 5228 - DNA, 2211 bp, synthetic construct
  misc_feature 1..2211: note = Description of Artificial Sequence: Synthetic polynucleotide
  source 1..2211: mol_type = other DNA
atggctgctgacggttatcttccagattggctcgaggacaacctttctgaaggcattcgagagtggtgggcgctgcaacctggagcccctaaacccaaggcaaatcaacaacatcaggacaacgctcggggtcttgtgcttccgggttacaaatacctcggacccggcaacggactcgacaagggggaacccgtcaacgcagcggacgcggcagccctcgagcacgacaaggcctacgaccagcagctcaaggccggtgacaacccctacctcaagtacaaccacgccgacgccgagttccaggagcggctcaaagaagatacgtcttttgggggcaacctcgggcgagcagtcttccaggccaaaaagaggcttcttgaacctcttggtctggttgaggaagcggctaagacggctcctggaaagaagaggcctgtagatcagtctcctcaggaaccggactcatcatctggtgttggcaaatcgggcaaacagcctgccagaaaaagactaaatttcggtcagactggcgactcagagtcagtcccagaccctcaacctctcggagaaccaccagcagcccccacaagtttgggatctaatacaatggcttcaggcggtggcgcaccaatggcagacaataacgagggtgccgatggagtgggtaattcctcaggaaattggcattgcgattcccaatggctgggcgacagagtcatcaccaccagcaccagaacctgggccctgcccacttacaacaaccatctctacaagcaaatctccagccaatcaggagcttcaaacgacaaccactactttggctacagcaccccttgggggtattttgactttaacagattccactgccacttctcaccacgtgactggcagcgactcattaacaacaactggggattccggcccaagaaactcagcttcaagctcttcaacatccaagttaaagaggtcacgcagaacgatggcacgacgactattgccaataaccttaccagcacggttcaagtgtttacggactcggagtatcagctcccgtacgtgctcgggtcggcgcaccaaggctgtctcccgccgtttccagcggacgtcttcatggtccctcagtatggatacctcaccctgaacaacggaagtcaagcggtgggacgctcatccttttactgcctggagtacttcccttcgcagatgctaaggactggaaataacttccaattcagctataccttcgaggatgtaccttttcacagcagctacgctcacagccagagtttggatcgcttgatgaatcctcttattgatcagtatctgtactacctgaacagaacgcaaggaacaacctctggaacaaccaaccaatcacggctgctttttagccaggctgggcctcagtctatgtctttgcaggccagaaattggctacctgggccctgctaccggcaacagagactttcaaagactgctaacgacaacaacaacagtaactttccttggacagcggccagcaaatatcatctcaatggccgcgactcgctggtgaatccaggaccagctatggccagtcacaaggacgatgaagaaaaatttttccctatgcacggcaatctaatatttggcaaagaagggacaacggcaagtaacgcagaattagataatgtaatgattacggatgaagaagagattcgtaccaccaatcctgtggcaacagagcagtatggaactgtggcaaataacttgcagagctcaaatacagctcccacgactagaactgtcaatgatcagggggccttacctggcatggtgtggcaagatcgtgacgtgtaccttcaaggacctatctgggcaaagattcctcacacggatggacactttcatccttctcctctgatgggaggctttggactgaaacatccgcctcctcaaatcatgatcaaaaatactccggtaccggcaaatcctccgacgactttcagcccggccaagtttgcttcatttatcactcagtactccactggacaggtcagcgtggaaattgagtgggagctacagaaagaaaacagcaaacgttggaatccagagattcagtacacttccaactacaacaagtctgttaatgtggactttactgtagacactaatggtgtttatagtgaacctcgccccattggcacccgttaccttacccgtcccctgtaa

SEQ ID NO: 5229 - protein, 736 aa, synthetic construct
  REGION 1..736: note = Description of Artificial Sequence: Synthetic polypeptide
MAADGYLPDWLEDNLSEGIREWWALQPGAPKPKANQQHQDNARGLVLPGYKYLGPGNGLDKGEPVNAADAAALEHDKAYDQQLKAGDNPYLKYNHADAEFQERLKEDTSFGGNLGRAVFQAKKRLLEPLGLVEEAAKTAPGKKRPVDQSPQEPDSSSGVGKSGKQPARKRLNFGQTGDSESVPDPQPLGEPPAAPTSLGSNTMASGGGAPMADNNEGADGVGNSSGNWHCDSQWLGDRVITTSTRTWALPTYNNHLYKQISSQSGASNDNHYFGYSTPWGYFDFNRFHCHFSPRDWQRLINNNWGFRPKKLSFKLFNIQVKEVTQNDGTTTIANNLTSTVQVFTDSEYQLPYVLGSAHQGCLPPFPADVFMVPQYGYLTLNNGSQAVGRSSFYCLEYFPSQMLRTGNNFQFSYTFEDVPFHSSYAHSQSLDRLMNPLIDQYLYYLNRTQGTTSGTTNQSRLLFSQAGPQSMSLQARNWLPGPCYRQQRLSKTANDNNNSNFPWTAASKYHLNGRDSLVNPGPAMASHKDDEEKFFPMHGNLIFGKEGTTASNAELDNVMITDEEEIRTTNPVATEQYGTVANNLQSSNTAPTTRTVNDQGALPGMVWQDRDVYLQGPIWAKIPHTDGHFHPSPLMGGFGLKHPPPQIMIKNTPVPANPPTTFSPAKFASFITQYSTGQVSVEIEWELQKENSKRWNPEIQYTSNYNKSVNVDFTVDTNGVYSEPRPIGTRYLTRPL

SEQ ID NO: 5230 - DNA, 2211 bp, synthetic construct
  misc_feature 1..2211: note = Description of Artificial Sequence: Synthetic polynucleotide
  source 1..2211: mol_type = other DNA
atggctgccgatggttatcttccagattggctcgaggacaaccttagtgaaggaattcgcgagtggtgggctttgaaacctggagcccctcaacccaaggcaaatcaacaacatcaagacaacgctcgaggtcttgtgcttccgggttacaaataccttggacccggcaacggactcgacaagggggagccggtcaacgcagcagacgcggcggccctcgagcacgacaaggcctacgaccagcagctcaaggccggagacaacccgtacctcaagtacaaccacgccgacgccgagttccaggagcggctcaaagaagatacgtcttttgggggcaacctcgggcgagcagtcttccaggccaaaaagaggcttcttgaacctcttggtctggttgaggaagcggctaagacggctcctggaaagaagagaccggtagagccatcaccccagcgttctccagactcctctacgggcatcggcaagaaaggccaacagcccgctaaaaagagactcaattttggtcagactggcgactcagagtcagtccccgacccacaacctctcggagaacctccagcaacccccgctgctgtgggacctactacaatggcttcaggcggtggcgcaccaatggcagacaataacgagggtgccgatggagtgggtaattcctcaggaaattggcattgcgattcccaatggctgggcgacagagtcatcaccaccagcaccagaacctgggccctgcccacttacaacaaccatctctacaagcaaatctccagccaatcaggagcttcaaacgacaaccactactttggctacagcaccccttgggggtattttgactttaacagattccactgccacttttcaccacgtgactggcaaagactcatcaacaacaactggggattccgacccaagagactcaacttcaagctcttcaacatccaagtcaaggaggtcacgacgaatgatggcgtcacgaccatcgctaataaccttaccagcacggttcaagtcttctcggactcggagtaccagttgccgtacgtcctcggctctgcgcaccagggctgcctccctccgttcccggcggacgtgttcatgattccgcagtacggctacctaacgctcaacaatggcagccaagccgtgggacgttcatccttttactgcctggaatatttcccttctcagatgctgagaacgggcaacaactttaccttcagctacacttttgaggacgttcctttccacagcagctacgctcacagccagagtctggaccgtctcatgaatcctctcatcgaccagtacctgtattacttgagcagaacaaacactccaagtggaaccaccacgcagtcaaggcttcagttttctcaggccggagcgagtgacattcgggaccagtctaggaactggcttcctggaccctgttaccgccagcagcgcgtttctaaaacaaaaacagacaacaacaacagcaattttacctggactggtgcttcaaaatataaccttaatgggcgtgaatctataatcaaccctggcactgctatggcctcacacaaagacgacgaagacaagttctttcccatgagcggtgtcatgatttttggaaaagagagcgccggagcttcaaacactgcattggacaatgtcatgattacagacgaagaggaaattaaagccactaaccctgtggccaccgaaagatttgggaccgtggcagtcaatttccagagcagcagcacagaccctgcgaccggagatgtgcatgttatgggagccttacctggaatggtgtggcaagacagagacgtatacctgcagggtcctatttgggccaaaattcctcacacggatggacactttcacccgtctcctcttatgggcggctttggactcaagaacccgcctcctcagatcctcatcaaaaacacgcctgttcctgcgaatcctccggcggagttttcagctacaaagtttgcttcattcatcacccaatactccacaggacaagtgagtgtggaaattgaatgggagctgcagaaagaaaacagcaagcgctggaatcccgaagtgcagtacacatccaattatgcaaaatctgccaacgttgattttactgtggacaacaatggactttatactgagcctcgccccattggcacccgttaccttacccgtcccctgtaa

SEQ ID NO: 5231 - protein, 736 aa, synthetic construct
  REGION 1..736: note = Description of Artificial Sequence: Synthetic polypeptide
MAADGYLPDWLEDNLSEGIREWWALKPGAPQPKANQQHQDNARGLVLPGYKYLGPGNGLDKGEPVNAADAAALEHDKAYDQQLKAGDNPYLKYNHADAEFQERLKEDTSFGGNLGRAVFQAKKRLLEPLGLVEEAAKTAPGKKRPVEPSPQRSPDSSTGIGKKGQQPAKKRLNFGQTGDSESVPDPQPLGEPPATPAAVGPTTMASGGGAPMADNNEGADGVGNSSGNWHCDSQWLGDRVITTSTRTWALPTYNNHLYKQISSQSGASNDNHYFGYSTPWGYFDFNRFHCHFSPRDWQRLINNNWGFRPKRLNFKLFNIQVKEVTTNDGVTTIANNLTSTVQVFSDSEYQLPYVLGSAHQGCLPPFPADVFMIPQYGYLTLNNGSQAVGRSSFYCLEYFPSQMLRTGNNFTFSYTFEDVPFHSSYAHSQSLDRLMNPLIDQYLYYLSRTNTPSGTTTQSRLQFSQAGASDIRDQSRNWLPGPCYRQQRVSKTKTDNNNSNFTWTGASKYNLNGRESIINPGTAMASHKDDEDKFFPMSGVMIFGKESAGASNTALDNVMITDEEEIKATNPVATERFGTVAVNFQSSSTDPATGDVHVMGALPGMVWQDRDVYLQGPIWAKIPHTDGHFHPSPLMGGFGLKNPPPQILIKNTPVPANPPAEFSATKFASFITQYSTGQVSVEIEWELQKENSKRWNPEVQYTSNYAKSANVDFTVDNNGLYTEPRPIGTRYLTRPL

SEQ ID NO: 5232 - DNA, 2211 bp, synthetic construct
  misc_feature 1..2211: note = Description of Artificial Sequence: Synthetic polynucleotide
  source 1..2211: mol_type = other DNA
atggctgccgatggttatcttccagattggctcgaggacaacctctctgagggcattcgcgagtggtgggacttgaaacctggagcccctaaacccaaggcaaatcaacaacatcaggacaacgctcgaggtcttgtgcttccgggttacaaataccttggacccggcaacggactcgacaagggggagccggtcaacgcagcagacgcggcggccctcgagcacgacaaggcctacgaccagcagctcaaggccggagacaacccgtacctcaagtacaaccacgccgacgccgagttccaggagcggctcaaagaagatacgtcttttgggggcaacctcgggcgagcagtcttccaggccaaaaagaggcttcttgaacctcttggtctggttgaggaagcggctaagacggctcctggaaagaagagaccggtagagccatcaccccagcgttctccagactcctctacgggcatcggcaagaaaggccaacagcccgctaaaaagagactcaattttggtcagactggcgactcagagtcagtccccgacccacaacctctcggagaacctccagcaacccccgctgctgtgggacctactacaatggcttcaggcggtggcgcaccaatggcagacaataacgagggtgccgatggagtgggtaattcctcaggaaattggcattgcgattcccaatggctgggcgacagagtcatcaccaccagcaccagaacctgggccctgcccacttacaacaaccatctctacaagcaaatctccagccaatcaggagcttcaaacgacaaccactactttggctacagcaccccttgggggtattttgactttaacagattccactgccacttttcaccacgtgactggcaaagactcatcaacaacaactggggattccgacccaagagactcaacttcaagctcttcaacatccaagtcaaggaggtcacgacgaatgatggcgtcacgaccatcgctaataaccttaccagcacggttcaagtcttctcggactcggagtaccagttgccgtacgtcctcggctctgcgcaccagggctgcctccctccgttcccggcggacgtgttcatgattccgcagtacggctacctaacgctcaacaatggcagccaagccgtgggacgttcatccttttactgcctggaatatttcccttctcagatgctgagaacgggcaacaactttaccttcagctacacttttgaggacgttcctttccacagcagctacgctcacagccagagtctggaccgtctcatgaatcccctcatcgaccagtacctgtattacttgagcagaacaaacactccaagtggaaccaccacgcagtcaaggcttcagttttctcaggccggagcgagtgacattcgggaccagtctaggaactggcttcctggaccctgttaccggcagcagcgcgtttctaaaacaaaaacagacaacaacaacagcaactttacctggactggtgcttcaaaatataaccttaatgggcgtgaatctataatcaaccctggcactgctatggcctcacacaaagacgacgaagacaagttctttcccatgagcggtgtcatgatttttggaaaggagagcgccggagcttcaaacactgcattggacaatgtcatgatcacagacgaagaggaaatcaaagccactaaccccgtggccaccgaaagatttgggactgtggcagtcaatctccagagcagcagcacagaccctgcgaccggagatgtgcatgttatgggagccttacctggaatggtgtggcaagacagagacgtgtacctgcagggtcctatttgggccaaaattcctcacacggatggacactttcacccgtctcctctcatgggcggctttggacttaagcacccgcctcctcagatcctcatcaaaaacacgcctgttcctgcgaatcctccggcagagttttcggctacaaagtttgcttcattcatcacccagtattccacaggacaagtgagtgtggaaattgaatgggagctgcagaaagaaaacagcaagcgctggaatcccgaagtgcagtacacatccaattatgcaaaatctgccaacgttgattttactgtggacaacaatggactttatactgagcctcgccccattggcacccgttacctcacccgtcccctgtaa

SEQ ID NO: 5233 - protein, 736 aa, synthetic construct
  REGION 1..736: note = Description of Artificial Sequence: Synthetic polypeptide
MAADGYLPDWLEDNLSEGIREWWDLKPGAPKPKANQQHQDNARGLVLPGYKYLGPGNGLDKGEPVNAADAAALEHDKAYDQQLKAGDNPYLKYNHADAEFQERLKEDTSFGGNLGRAVFQAKKRLLEPLGLVEEAAKTAPGKKRPVEPSPQRSPDSSTGIGKKGQQPAKKRLNFGQTGDSESVPDPQPLGEPPATPAAVGPTTMASGGGAPMADNNEGADGVGNSSGNWHCDSQWLGDRVITTSTRTWALPTYNNHLYKQISSQSGASNDNHYFGYSTPWGYFDFNRFHCHFSPRDWQRLINNNWGFRPKRLNFKLFNIQVKEVTTNDGVTTIANNLTSTVQVFSDSEYQLPYVLGSAHQGCLPPFPADVFMIPQYGYLTLNNGSQAVGRSSFYCLEYFPSQMLRTGNNFTFSYTFEDVPFHSSYAHSQSLDRLMNPLIDQYLYYLSRTNTPSGTTTQSRLQFSQAGASDIRDQSRNWLPGPCYRQQRVSKTKTDNNNSNFTWTGASKYNLNGRESIINPGTAMASHKDDEDKFFPMSGVMIFGKESAGASNTALDNVMITDEEEIKATNPVATERFGTVAVNLQSSSTDPATGDVHVMGALPGMVWQDRDVYLQGPIWAKIPHTDGHFHPSPLMGGFGLKHPPPQILIKNTPVPANPPAEFSATKFASFITQYSTGQVSVEIEWELQKENSKRWNPEVQYTSNYAKSANVDFTVDNNGLYTEPRPIGTRYLTRPL

SEQ ID NO: 5234 - DNA, 2214 bp, synthetic construct
  misc_feature 1..2214: note = Description of Artificial Sequence: Synthetic polynucleotide
  source 1..2214: mol_type = other DNA
atggctgccgatggttatcttccagattggctcgaggacaaccttagtgaaggaattcgcgagtggtgggctttgaaacctggagcccctcaacccaaggcaaatcaacaacatcaagacaacgctcgaggtcttgtgcttccgggttacaaataccttggacccggcaacggactcgacaagggggagccggtcaacgcagcagacgcggcggccctcgagcacgacaaggcctacgaccagcagctgcaggcgggtgacaatccgtacctgcggtataaccacgccgacgccgagtttcaggagcgtctgcaagaagatacgtcttttgggggcaaccttggcagagcagtcttccaggccaaaaagaggatccttgagcctcttggtctggttgaggaagcagctaaaacggctcctggaaagaagaggcctgtagatcagtctcctcaggaaccggactcatcatctggtgttggcaaatcgggcaaacagcctgccagaaaaagactaaatttcggtcagactggcgactcagagtcagtcccagaccctcaacctctcggagaaccaccagcagcccccacaagtttgggatctaatacaatggcttcaggcggtggcgcaccaatggcagacaataacgagggtgccgatggggtgggtagttcctcgggaaattggcattgcgattcccaatgactgggggacagagtcatcaccaccagcacccgaacctgggccctgcccacctacaacaatcacctctacaagcaaatctccaacgggacatcgggaggagccaccaacgacaacacctacttcggctacagcaccccctgggggtattttgactttaacagattccactgccacttttcaccacgtgactggcagcgactcatcaacaacaactggggattccggcccaagagactcagcttcaagctcttcaacatccaggtcaaggaggtcacgcagaatgaaggcaccaagaccatcgccaataacctcaccagcaccatccaggtgtttacggactcggagtaccagctgccgtacgttctcggctctgcgcaccagggctgcctccctccgttcccggcggacgtgttcatgattccgcaatacggctacctgacgctcaacaatggcagccaagccgtgggacgttcatccttttactgcctggaatatttcccttctcagatgctgagaacgggcaacaactttaccttcagctacacctttgaggaagtgcctttccacagcagctacgcgcacagccagagcttggaccggctgatgaatcctctgattgaccagtacctgtactacttgtctcggactcaaacaacaggaggcacggcaaatacgcagactctgggcttcagccaaggtgggcctaatacaatggccaatcaggcaaagaactggctgccaggaccctgttaccgccaacaacgcgtctcaacgacaaccgggcaaaacaacaatagcaactttgcctggactgctgggaccaaataccatctgaatggaagaaattcattggctaatcctggcatcgctatggcaacacacaaagacgacgaggagcgtttttttcccagtaacgggatcctgatttttggcaaacaaaatgctgccagagacaatgcggattacagcgatgtcatgctcaccagcgaggaagaaatcaaaaccactaaccctgtggctacagaggaatacggtatcgtggcagataacttgcagcagcaaaacacggctcctcaaattggaactgtcaacagccagggggccttacccggtatggtctggcagaaccgggacgtgtacctgcagggtcccatctgggccaagattcctcacacggacggcaacttccacccgtctccgctgatgggcggctttggcctgaaacatcctccgcctcagatcctgatcaagaacacgcctgtacctgcggatcctccgaccaccttcaaccagtcaaagctgaactctttcatcacgcaatacagcaccggacaggtcagcgtggagatcgagtgggagctgcagaaggaaaacagcaagcgctggaacccggagatccagtacacttccaactattacaagtctaataatgttgaatttgctgttaatactgaaggtgtatatagtgaaccccgccccattggcaccagatacctgactcgtaatctgtaa

SEQ ID NO: 5235 - protein, 736 aa, synthetic construct
  REGION 1..736: note = Description of Artificial Sequence: Synthetic polypeptide
MAADGYLPDWLEDNLSEGIREWWALKPGAPQPKANQQHQDNARGLVLPGYKYLGPGNGLDKGEPVNAADAAALEHDKAYDQQLQAGDNPYLRYNHADAEFQERLQEDTSFGGNLGRAVFQAKKRILEPLGLVEEAAKTAPGKKRPVDQSPQEPDSSSGVGKSGKQPARKRLNFGQTGDSESVPDPQPLGEPPAAPTSLGSNTMASGGGAPMADNNEGADGVGSSSGNWHCDSQLGDRVITTSTRTWALPTYNNHLYKQISNGTSGGATNDNTYFGYSTPWGYFDFNRFHCHFSPRDWQRLINNNWGFRPKRLSFKLFNIQVKEVTQNEGTKTIANNLTSTIQVFTDSEYQLPYVLGSAHQGCLPPFPADVFMIPQYGYLTLNNGSQAVGRSSFYCLEYFPSQMLRTGNNFTFSYTFEEVPFHSSYAHSQSLDRLMNPLIDQYLYYLSRTQTTGGTANTQTLGFSQGGPNTMANQAKNWLPGPCYRQQRVSTTTGQNNNSNFAWTAGTKYHLNGRNSLANPGIAMATHKDDEERFFPSNGILIFGKQNAARDNADYSDVMLTSEEEIKTTNPVATEEYGIVADNLQQQNTAPQIGTVNSQGALPGMVWQNRDVYLQGPIWAKIPHTDGNFHPSPLMGGFGLKHPPPQILIKNTPVPADPPTTFNQSKLNSFITQYSTGQVSVEIEWELQKENSKRWNPEIQYTSNYYKSNNVEFAVNTEGVYSEPRPIGTRYLTRNL

SEQ ID NO: 5236 - DNA, 2214 bp, synthetic construct
  misc_feature 1..2214: note = Description of Artificial Sequence: Synthetic polynucleotide
  source 1..2214: mol_type = other DNA
atggctgccgatggttatcttccagattggctcgaggacaaccttagtgaaggaattcgcgagtggtgggctttgaaacctggagcccctcaacccaaggcaaatcaacaacatcaagacaacgctcgaggtcttgtgcttccgggttacaaataccttggacccggcaacggactcgacaagggggagccggtcaacgcagcagacgcggcggccctcgagcacgacaaggcctacgaccagcagctgcaggcgggtgacaatccgtacctgcggtataaccacgccgacgccgagtttcaggagcgtctgcaagaagatacgtcttttgggggcaaccttggcagagcagtcttccaggccaaaaagaggatccttgagcctcttggtctggttgaggaagcagctaaaacggctcctggaaagaagaggcctgtagatcagtctcctcaggaaccggactcatcatctggtgttggcaaatcgggcaaacagcctgccagaaaaagactaaatttcggtcagactggcgactcagagtcagtcccagaccctcaacctctcggagaaccaccagcagcccccacaagtttgggatctaatacaatggcttcaggcggtggcgcaccaatggcagacaataacgagggtgccgatggggtgggtagttcctcgggaaattggcattgcgattcccaatggctgggggacagagtcatcaccaccagcacccgaacctgggccctgcccacctacaacaatcacctctacaagcaaatctccaacgggacatcgggaggagccaccaacgacaacacctacttcggctacagcaccccctgggggtattttgactttaacagattccactgccacttttcaccacgtgactggcagcgactcatcaacaacaactggggattccggcccaagagactcagcttcaagctcttcaacatccaggtcaaggaggtcacgcagaatgaaggcaccaagaccatcgccaataacctcaccagcaccatccaggtgtttacggactcggagtaccagctgccgtacgttctcggctctgcgcaccagggctgcctccctccgttcccggcggacgtgttcatgattccgcaatacggctacctgacgctcaacaatggcagccaagccgtgggacgttcatccttttactgcctggaatatttcccttctcagatgctgagaacgggcaacaactttaccttcagctacacctttgaggaagtgccttttcacagcagctacgcgcacagccagagcttggaccggctgatgaatcctctgattgaccagtacctgtactacttgtctcggactcaaacaacaggaggcacggcaaatacgcagactctgggcttcagccaaggtgggcctaatacaatggccaatcaggcaaagaactggctgccaggaccctgttaccgccaacaacgcgtctcaacgacaaccgggcaaaacaacaatagcaactttgcctggactgctgggaccaaataccatctgaatggaagaaattcattggctaatcctggcatcgctatggcaacacacaaagacgacgaggagcgtttttttcccagtaacgggatcctgatttttggcaaacaaaatgctgccagagacaatgcggattacagcgatgtcatgctcaccagcgaggaagaaatcaaaaccactaaccctgtggctacagaggaatacggtatcgtggcagataacttgcagcagcaaaacacggctcctcaaattggaactgtcaacagccagggggccttacccggtatggtctggcagaaccgggacgtgtacctgcagggtcccatctgggccaagattcctcacacggacggcaacttccacccgtctccgctgatgggcggctttggcctgaaacatcctccgcctcagatcctgatcaagaacacgcctgtacctgcggatcctccgaccaccttcaaccagtcaaagctgaactctttcatcacgcaatacagcaccggacaggtcagcgtggagatcgagtgggagctgcagaaggaaaacagcaagcgctggaacccggagatccagtacacttccaactattacaagtctaataatgttgaatttgctgttaatactgaaggtgtatatagtgaaccccgccccattggcaccagatacctgactcgtaatctgtaa

SEQ ID NO: 5237 - protein, 737 aa, synthetic construct; identical to SEQ ID NO: 5225
  REGION 1..737: note = Description of Artificial Sequence: Synthetic polypeptide

SEQ ID NO: 5238 - DNA, 2211 bp, synthetic construct
  misc_feature 1..2211: note = Description of Artificial Sequence: Synthetic polynucleotide
  source 1..2211: mol_type = other DNA
atggctgccgatggttatcttccagattggctcgaggacaacctctctgagggcattcgcgagtggtgggacttgaaacctggagcccctaaacccaaggcaaatcaacaacatcaggacaacgctcgaggtcttgtgcttccgggttacaaataccttggacccggcaacggactcgacaagggggagccggtcaacgcagcagacgcggcggccctcgagcacgacaaggcctacgaccagcagctcaaggccggagacaacccgtacctcaagtacaaccacgccgacgccgagttccaggagcggctcaaagaagatacgtcttttgggggcaacctcgggcgagcagtcttccaggccaaaaagaggcttcttgaacctcttggtctggttgaggaagcggctaagacggctcctggaaagaagagaccggtagagccatcaccccagcgttctccagactcctctacgggcatcggcaagaaaggccaacagcccgctaaaaagagactcaattttggtcagactggcgactcagagtcagtccccgacccacaacctctcggagaacctccagcaacccccgctgctgtgggacctactacaatggcttcaggcggtggcgcaccaatggcagacaataacgagggtgccgatggagtgggtaattcctcaggaaattggcattgcgattcccaatggctgggcgacagagtcatcaccaccagcaccagaacctgggccctgcccacttacaacaaccatctctacaagcaaatctccagccaatcaggagcttcaaacgacaaccactactttggctacagcaccccttgggggtattttgactttaacagattccactgccacttttcaccacgtgactggcaaagactcatcaacaacaactggggattccgacccaagagactcaacttcaagctcttcaacatccaagtcaaggaggtcacgacgaatgatggcgtcacgaccatcgctaataaccttaccagcacggttcaagtcttctcggactcggagtaccagttgccgtacgtcctcggctctgcgcaccagggctgcctccctccgttcccggcggacgtgttcatgattccgcagtacggctacctaacgctcaacaatggcagccaagccgtgggacgttcatccttttactgcctggaatatttcccttctcagatgctgagaacgggcaacaactttaccttcagctacacttttgaggacgttcctttccacagcagctacgctcacagccagagtctggaccgtctcatgaatcctctcatcgaccagtacctgtattacttgagcagaacaaacactccaagtggaaccaccacgcagtcaaggcttcagttttctcaggccggagcgagtgacattcgggaccagtctaggaactggcttcctggaccctgttaccgccagcagcgcgtttctaaaacaaaaacagacaacaacaacagcaattttacctggactggtgcttcaaaatataaccttaatgggcgtgaatctataatcaaccctggcactgctatggcctcacacaaagacgacgaagacaagttctttcccatgagcggtgtcatgatttttggaaaagagagcgccggagcttcaaacactgcattggacaatgtcatgattacagacgaagaggaaattaaagccactaaccctgtggccaccgaaagatttgggaccgtggcagtcaatttccagagcagcagcacagaccctgcgaccggagatgtgcatgctatgggagcattacctggcatggtgtggcaagatagagacgtgtacctgcagggtcccatttgggccaaaattcctcacacagatggacactttcacccgtctcctcttatgggcggctttggactcaagaacccgcctcctcagatcctcatcaaaaacacgcctgttcctgcgaatcctccggcggagttttcagctacaaagtttgcttcattcatcacccaatactccacaggacaagtgagtgtggaaattgaatgggagctgcagaaagaaaacagcaagcgctggaatcccgaagtgcagtacacatccaattatgcaaaatctgccaacgttgattttactgtggacaacaatggactttatactgagcctcgccccattggcacccgttaccttacccgtcccctgtaa

SEQ ID NO: 5239 - protein, 736 aa, synthetic construct
  REGION 1..736: note = Description of Artificial Sequence: Synthetic polypeptide
MAADGYLPDWLEDNLSEGIREWWDLKPGAPKPKANQQHQDNARGLVLPGYKYLGPGNGLDKGEPVNAADAAALEHDKAYDQQLKAGDNPYLKYNHADAEFQERLKEDTSFGGNLGRAVFQAKKRLLEPLGLVEEAAKTAPGKKRPVEPSPQRSPDSSTGIGKKGQQPAKKRLNFGQTGDSESVPDPQPLGEPPATPAAVGPTTMASGGGAPMADNNEGADGVGNSSGNWHCDSQWLGDRVITTSTRTWALPTYNNHLYKQISSQSGASNDNHYFGYSTPWGYFDFNRFHCHFSPRDWQRLINNNWGFRPKRLNFKLFNIQVKEVTTNDGVTTIANNLTSTVQVFSDSEYQLPYVLGSAHQGCLPPFPADVFMIPQYGYLTLNNGSQAVGRSSFYCLEYFPSQMLRTGNNFTFSYTFEDVPFHSSYAHSQSLDRLMNPLIDQYLYYLSRTNTPSGTTTQSRLQFSQAGASDIRDQSRNWLPGPCYRQQRVSKTKTDNNNSNFTWTGASKYNLNGRESIINPGTAMASHKDDEDKFFPMSGVMIFGKESAGASNTALDNVMITDEEEIKATNPVATERFGTVAVNFQSSSTDPATGDVHAMGALPGMVWQDRDVYLQGPIWAKIPHTDGHFHPSPLMGGFGLKNPPPQILIKNTPVPANPPAEFSATKFASFITQYSTGQVSVEIEWELQKENSKRWNPEVQYTSNYAKSANVDFTVDNNGLYTEPRPIGTRYLTRPL

SEQ ID NO: 5240 - DNA, 2211 bp, synthetic construct
  misc_feature 1..2211: note = Description of Artificial Sequence: Synthetic polynucleotide
  source 1..2211: mol_type = other DNA
atggctgccgatggttatcttccagattggctcgaggacaaccttagtgaaggaattcgcgagtggtgggcgctgaaacctggagccccgaagcccaaagccaaccagcaaaagcaggacgacggccggggtctggtgcttccgggttacaaatacctcggacccggtaacggactcgacaaaggagagccggtcaacgaggcggacgcggcagccctcgagcacgacaaggcctacgaccagcagctcaaagcgggtgacaatccgtacctgcggtataaccacgccgacgccgagtttcaggagcgtctgcaagaagatacgtcttttgggggcaacctcgggcgagcagtcttccaggccaagaagcgggttctcgaacctctcggtctggttgaggaaggcgctaagacggctcccggaaagaaacgtccggtagagcagtcgccacaagagccagactcctctacgggcatcggcaagaaaggccaacagcccgccagaaaaagactcaatttcggtcagactggcgactcagagtcagttccagaccctcaacctctcggagaacctccagcagcgccctctggtgtgggacctactacaatggcttcaggcggtggcgcaccaatggcagacaataacgaaggcgccgacggagtgggtaatgcctcaggaaattggcattgcgattccacatggctgggcgacagagtcatcaccaccagcacccgaacatgggccttgcccacctataacaaccacctctacaagcaaatctccagtgcttcaacgggggccagcaacgacaacacctacttcggctacagcaccccctgggggtattttgatttcaacagattccactgccatttctcaccacgtgactggcagcgactcatcaacaacaattggggattccggcccaagagactcaacttcaaactcttcaacatccaagtcaaggaggtcacgacgaatgatggcgtcacgaccatcgctaataaccttaccagcacggttcaagtcttctcggactcggagtaccagttgccgtacgtcctcggctctgcgcaccagggctgcctccctccgttcccggcggacgtgttcatgattccgcagtacggctacctaacgctcaacaatggcagccaggcagtgggacggtcatccttttactgcctggaatatttcccatcgcagatgctgagaacgggcaataactttaccttcagctacaccttcgaggacgtgcctttccacagcagctacgcgcacagccagagcctggaccggctgatgaatcctctcatcgaccagtacctgtattacctgaacagaactcagaatcagtccggaagtgcccaaaacaaggacttgctgtttagccgggggtctccagctggcatgtctgttcagcccaaaaactggctacctggaccctgttatcggcagcagcgcgtttctaaaacaaaaacagacaacaacaacagcaattttacctggactggtgcttcaaaatataacctcaatgggcgtgaatccatcatcaaccctggcactgctatggcctcacacaaagacgacgaagacaagttctttcccatgagcggtgtcatgatttttggaaaagagagcgccggagcttcaaacactgcattggacaatgtcatgattacagacgaagaggaaattaaagccactaaccctgtggccaccgaaagatttgggaccgtggcagtcaatttccagagcagcagcacagaccctgcgaccggagatgtgcatgttatgggagccttacctggaatggtgtggcaagacagagacgtatacctgcagggtcctatttgggccaaaattcctcacacagatggacactttcacccgtctcctcttatgggcggctttggactcaagaacccgcctcctcagatcctcatcaaaaacacgcctgttcctgcgaatcctccggcagagttttcggctacaaagtttgcttcattcatcacccagtattccacaggacaagtgagcgtggagattgaatgggagctgcagaaagaaaacagcaaacgctggaatcccgaagtgcagtatacatctaactatgcaaaatctgccaacgttgatttcactgtggacaacaatggactttatactgagcctcgccccattggcacccgttacctcacccgtcccctgtaa

SEQ ID NO: 5241 - protein, 736 aa, synthetic construct
  REGION 1..736: note = Description of Artificial Sequence: Synthetic polypeptide
MAADGYLPDWLEDNLSEGIREWWALKPGAPKPKANQQKQDDGRGLVLPGYKYLGPGNGLDKGEPVNEADAAALEHDKAYDQQLKAGDNPYLRYNHADAEFQERLQEDTSFGGNLGRAVFQAKKRVLEPLGLVEEGAKTAPGKKRPVEQSPQEPDSSTGIGKKGQQPARKRLNFGQTGDSESVPDPQPLGEPPAAPSGVGPTTMASGGGAPMADNNEGADGVGNASGNWHCDSTWLGDRVITTSTRTWALPTYNNHLYKQISSASTGASNDNTYFGYSTPWGYFDFNRFHCHFSPRDWQRLINNNWGFRPKRLNFKLFNIQVKEVTTNDGVTTIANNLTSTVQVFSDSEYQLPYVLGSAHQGCLPPFPADVFMIPQYGYLTLNNGSQAVGRSSFYCLEYFPSQMLRTGNNFTFSYTFEDVPFHSSYAHSQSLDRLMNPLIDQYLYYLNRTQNQSGSAQNKDLLFSRGSPAGMSVQPKNWLPGPCYRQQRVSKTKTDNNNSNFTWTGASKYNLNGRESIINPGTAMASHKDDEDKFFPMSGVMIFGKESAGASNTALDNVMITDEEEIKATNPVATERFGTVAVNFQSSSTDPATGDVHVMGALPGMVWQDRDVYLQGPIWAKIPHTDGHFHPSPLMGGFGLKNPPPQILIKNTPVPANPPAEFSATKFASFITQYSTGQVSVEIEWELQKENSKRWNPEVQYTSNYAKSANVDFTVDNNGLYTEPRPIGTRYLTRPL

SEQ ID NO: 5242 - DNA, 2205 bp, synthetic construct
  misc_feature 1..2205: note = Description of Artificial Sequence: Synthetic polynucleotide
  source 1..2205: mol_type = other DNA
atggctgctgacggttatcttccagattggctcgaggacaacctttctgaaggcattcgtgagtggtgggctctgaaacctggagtccctcaacccaaagcgaaccaacaacaccaggacaaccgtcggggtcttgtgcttccgggttacaaatacctcggacccggtaacggactcgacaaaggagagccggtcaacgaggcggacgcggcagccctcgaacacgacaaggcctacgaccagcagctcaaggccggagacaacccgtacctcaagtacaaccacgccgacgccgagttccaggagcggctcaaagaagatacgtcttttgggggcaacctcgggcgagcagtcttccaggccaaaaagaggcttcttgaacctcttggtctggttgaggaagcggctaagacggctcctggaaagaagaggcctgtagagcagtctcctcaggaaccggactcctccgcgggtattggcaaatcgggtgcacagcccgctaaaaagagactcaatttcggtcagactggcgacacagagtcagtcccagaccctcaaccaatcggagaacctcccgcagccccctcaggtgtgggatctcttacaatggcttcaggtggtggcgcaccagtggcagacaataacgaaggtgccgatggagtgggtagttcctcgggaaattggcattgcgattcccaatggctgggggacagagtcatcaccaccagcacccgaacctgggccctgcccacctacaacaaccacctctacaaacaaatttccagccaatcaggagcctcgaacgacaatcactactttggctacagcaccccttgggggtattttgacttcaacagattccactgccacttttcaccacgtgactggcagcgactcatcaacaacaactggggattccggcccaagagactcagcttcaagctcttcaacatccaggtcaaagaggttacggacaacaatggagtcaagaccatcgccaataaccttaccagcacggtccaggtcttcacggactcagactatcagctcccgtacgtgctcgggtcggctcacgagggctgcctcccgccgttcccagcggacgttttcatgattcctcagtacgggtatctgacgcttaatgatggaagccaggccgtgggtcgttcgtccttttactgcctggaatatttcccgtcgcaaatgctaagaacgggtaacaacttccagttcagctacgagtttgagaacgtacctttccatagcagctacgctcacagccaaagcctggaccgactaatgaatccactcatcgaccaatacttgtactatctctcaaagactattaacggttctggacagaatcaacaaacgctaaaattcagtgtggccggacccagcaacatggctgtccagggaagaaactacatacctggacccagctaccgacaacaacgtgtctcaaccactgtgactcaaaacaacaacagcgaatttgcttggcctggagcttcttcttgggctctcaatggacgtaatagcttgatgaatcctggacctgctatggccagccacaaagaaggagaggaccgtttctttcctttgtctggatctttaatttttggcaaacaaggaactggaagagacaacgtggatgcggacaaagtcatgataaccaacgaagaagaaattaaaactactaacccggtagcaacggagtcctatggacaagtggccacaaaccaccagagtgcccaagcacaggcgcagaccggctgggttcaaaaccaaggaatacttccgggtatggtttggcaggacagagatgtgtacctgcaaggacccatctgggccaagattcctcacacggacggcaacttccacccgtctccgctgatgggcggctttggcctgaaacatcctccgcctcagatcctgatcaagaacacgcctgtacctgcggatcctccgaccaccttcaaccagtcaaagctgaactctttcatcacgcaatacagcaccggacaggtcagcgtggaaattgaatgggagctgcagaaggaaaacagcaagcgctggaatcccgaagtgcagtatacatctaactatgcaaaatctgccaacgttgatttcactgtggacaacaatggactttatactgagcctcgccccattggcacccgttacctcacccgtcccctgtaa

SEQ ID NO: 5243 - protein, 734 aa, synthetic construct
  REGION 1..734: note = Description of Artificial Sequence: Synthetic polypeptide
MAADGYLPDWLEDNLSEGIREWWALKPGVPQPKANQQHQDNRRGLVLPGYKYLGPGNGLDKGEPVNEADAAALEHDKAYDQQLKAGDNPYLKYNHADAEFQERLKEDTSFGGNLGRAVFQAKKRLLEPLGLVEEAAKTAPGKKRPVEQSPQEPDSSAGIGKSGAQPAKKRLNFGQTGDTESVPDPQPIGEPPAAPSGVGSLTMASGGGAPVADNNEGADGVGSSSGNWHCDSQWLGDRVITTSTRTWALPTYNNHLYKQISSQSGASNDNHYFGYSTPWGYFDFNRFHCHFSPRDWQRLINNNWGFRPKRLSFKLFNIQVKEVTDNNGVKTIANNLTSTVQVFTDSDYQLPYVLGSAHEGCLPPFPADVFMIPQYGYLTLNDGSQAVGRSSFYCLEYFPSQMLRTGNNFQFSYEFENVPFHSSYAHSQSLDRLMNPLIDQYLYYLSKTINGSGQNQQTLKFSVAGPSNMAVQGRNYIPGPSYRQQRVSTTVTQNNNSEFAWPGASSWALNGRNSLMNPGPAMASHKEGEDRFFPLSGSLIFGKQGTGRDNVDADKVMITNEEEIKTTNPVATESYGQVATNHQSAQAQAQTGWVQNQGILPGMVWQDRDVYLQGPIWAKIPHTDGNFHPSPLMGGFGLKHPPPQILIKNTPVPADPPTTFNQSKLNSFITQYSTGQVSVEIEWELQKENSKRWNPEVQYTSNYAKSANVDFTVDNNGLYTEPRPIGTRYLTRPL

SEQ ID NO: 5244 - DNA, 2211 bp, synthetic construct
  misc_feature 1..2211: note = Description of Artificial Sequence: Synthetic polynucleotide
  source 1..2211: mol_type = other DNA
atggctgccgatggttatcttccagattggctcgaggacaacctctctgagggcattcgcgagtggtgggcgctgaaacctggagccccgaagcccaaagccaaccagcaaaagcaggacgacggccggggtctggtgcttcctggctacaagtacctcggacccttcaacggactcgacaagggggagcccgtcaacgcggcggacgcagcggccctcgagcacgacaaggcctacgaccagcagctgcaggcgggtgacaatccgtacctgcggtataaccacgccgacgccgagtttcaggagcgtctgcaagaagatacgtcttttgggggcaacctcgggcgagcagtcttccaggccaagaagtgggttctcgaacctctcggtctggttgaggaaggcgctaagacggctcctggaaagaaacgtccggtagagcagtcgccacaagagccagactcctcctcgggcatcggcaagacaggccagcagcccgctaaaaagagactcaattttggtcagactggcgactcagagtcagtccccgacccacaacctctcggagaacctccagcaacccccgctgctgtgggacctactacaatggcttcaggcggtggcgcaccaatggcagacaataacgaaggcgccgacggagtgggtaatgcctcaggaaattggcattgcgattccacatggctgggcgacagagtcatcaccaccagcacccgcacctgggccttgcccacctacaataaccacctctacaagcaaatctccagtgcttcaacgggggccagcaacgacaaccactacttcggctacagcaccccctgggggtattttgatttcaacagattccactgccatttctcaccacgtgactggcagcgactcatcaacaacaattggggattccggcccaagagactcaacttcaagctcttcaacatccaagtcaaggaggtcacgacgaatgatggcgtcacaaccatcgctaataaccttaccagcacggttcaagtcttctcggactcggagtaccagcttccgtacgtcctcggctctgcgcaccagggctgcctccctccgttcccggcggacgtgttcatgattccgcaatacggctacctgacgctcaacaatggcagccaagccgtgggacgttcatccttttactgcctggaatatttcccttctcagatgctgagaacgggcaacaactttaccttcagctacacctttgaggaagtgcctttccacagcagctacgcgcacagccagagcctggaccggctgatgaatcctctcatcgaccaatacctgtattacctgaacagaactcaaaatcagtccggaagtgcccaaaacaaggacttgctgtttagccgtgggtctccagctggcatgtctgttcagcccaaaaactggctacctggaccctgttatcggcagcagcgcgtttctaaaacaaaaacagacaacaacaacagcaattttacctggactggtgcttcaaaatataacctcaatgggcgtgaatccatcatcaaccctggcactgctatggcctcacacaaagacgacgaagacaagttctttcccatgagcggtgtcatgatttttggaaaggagagcgccggagcttcaaacactgcattggacaatgtcatgatcaccgacgaagaggaaatcaaagccactaaccccgtggccaccgaaagatttgggactgtggcagtcaatctccagagcagcagcacagaccctgcgaccggagatgtgcatgttatgggagccttacctggcatggtgtggcaagatagagacgtgtacctgcagggtcccatttgggccaaaattcctcacacagatggacactttcacccgtctcctcttatgggcggctttggactcaagaacccgcctcctcagatcctcatcaaaaacacgcctgttcctgcgaatcctccggcggagttttcagctacaaagtttgcttcattcatcacccaatactccacaggacaagtgagtgtggaaattgaatgggagctgcagaaagaaaacagcaagcgctggaatcccgaagtgcagtacacatccaattatgcaaaatctgccaacgttgattttactgtggacaacaatggactttatactgagcctcgccccattggcacccgttacctcacccgtcccctgtaa

SEQ ID NO: 5245 - protein, 736 aa, synthetic construct
  REGION 1..736: note = Description of Artificial Sequence: Synthetic polypeptide
MAADGYLPDWLEDNLSEGIREWWALKPGAPKPKANQQKQDDGRGLVLPGYKYLGPFNGLDKGEPVNAADAAALEHDKAYDQQLQAGDNPYLRYNHADAEFQERLQEDTSFGGNLGRAVFQAKKWVLEPLGLVEEGAKTAPGKKRPVEQSPQEPDSSSGIGKTGQQPAKKRLNFGQTGDSESVPDPQPLGEPPATPAAVGPTTMASGGGAPMADNNEGADGVGNASGNWHCDSTWLGDRVITTSTRTWALPTYNNHLYKQISSASTGASNDNHYFGYSTPWGYFDFNRFHCHFSPRDWQRLINNNWGFRPKRLNFKLFNIQVKEVTTNDGVTTIANNLTSTVQVFSDSEYQLPYVLGSAHQGCLPPFPADVFMIPQYGYLTLNNGSQAVGRSSFYCLEYFPSQMLRTGNNFTFSYTFEEVPFHSSYAHSQSLDRLMNPLIDQYLYYLNRTQNQSGSAQNKDLLFSRGSPAGMSVQPKNWLPGPCYRQQRVSKTKTDNNNSNFTWTGASKYNLNGRESIINPGTAMASHKDDEDKFFPMSGVMIFGKESAGASNTALDNVMITDEEEIKATNPVATERFGTVAVNLQSSSTDPATGDVHVMGALPGMVWQDRDVYLQGPIWAKIPHTDGHFHPSPLMGGFGLKNPPPQILIKNTPVPANPPAEFSATKFASFITQYSTGQVSVEIEWELQKENSKRWNPEVQYTSNYAKSANVDFTVDNNGLYTEPRPIGTRYLTRPL

SEQ ID NO: 5246 - DNA, 2214 bp, synthetic construct
  misc_feature 1..2214: note = Description of Artificial Sequence: Synthetic polynucleotide
  source 1..2214: mol_type = other DNA
atggctgccgatggttatcttccagattggctcgaggacaaccttagtgaaggaattcgcgagtggtgggctttgaaacctggagcccctcaacccaaggcaaatcaacaacatcaagacaacgctcgaggtcttgtgcttccgggttacaaataccttggacccggcaacggactcgacaagggggagccggtcaacgcagcagacgcggcggccctcgagcacgacaaggcctacgaccagcagctgcaggcgggtgacaatccgtacctgcggtataaccacgccgacgccgagtttcaggagcgtctgcaagaagatacgtcttttgggggcaaccttggcagagcagtcttccaggccaaaaagaggatccttgagcctcttggtctggttgaggaagcagctaaaacggctcctggaaagaagaggcctgtagatcagtctcctcaggaaccggactcatcatctggtgttggcaaatcgggcaaacagcctgccagaaaaagactaaatttcggtcagactggcgactcagagtcagtcccagaccctcaacctctcggagaaccaccagcagcccccacaagtttgggatctaatacaatggcttcaggcggtggcgcaccaatggcagacaataacgagggtgccgatggggtgggtagttcctcgggaaattggcattgcgattcccaatggctgggggacagagtcatcaccaccagcacccgaacctgggccctgcccacctacaacaatcacctctacaagcaaatctccaacgggacatcgggaggagccaccaacgacaacacctacttcggctacagcaccccctgggggtattttgactttaacagattccactgccacttttcaccacgtgactggcagcgactcatcaacaacaactggggattccggcccaagagactcagcttcaagctcttcaacatccaggtcaaggaggtcacgcagaatgaaggcaccaagaccatcgccaataacctcaccagcaccatccaggtgtttacggactcggagtaccagctgccgtacgttctcggctcggcgcaccagggctgcctccctccgttcccggcggacgtcttcatggtgccacagtatggatacctgacgctcaacaatggcagccaagccgtgggacgttcatccttttactgcctggaatatttcccttctcagatgctgagaacgggcaacaactttaccttcagctacacctttgaggaagtgcctttccacagcagctacgcgcacagccagagcttggaccggctgatgaatcctctgattgaccagtacctgtactacttgtctcggactcaaacaacaggaggcacggcaaatacgcagactctgggcttcagccaaggtgggcctaatacaatggccaatcaggcaaagaactggctgccaggaccctgttaccgccaacaacgcgtctcaacgacaaccgggcaaaacaacaatagcaactttgcctggactgctgggaccaaataccatctgaatggaagaaattcattggctaatcctggcatcgctatggcaacacacaaagacgacgaggagcgtttttttcccagtaacgggatcctgatttttggcaaacaaaatgctgccagagacaatgcggattacagcgatgtcatgctcaccagcgaggaagaaatcaaaaccactaaccctgtggctacagaggaatacggtatcgtggcagataacttgcagcagcaaaacacggctcctcaaattggaactgtcaacagccagggggacttacccggtatggtctggcagaaccgggacgtgtacctgcagggtcccatctgggccaagattcctcacacggacggcaacttccacccgtctccgctgatgggcggctttggcctgaaacatcctccgcctcagatcctgatcaagaacacgcctgtacctgcggatcctccgaccaccttcaaccagtcaaagctgaactctttcatcacgcaatacagcaccggacaggtcagcgtggagatcgagtgggagctgcagaaggaaaacagcaagcgctggaacccggagatccagtacacttccaactattacaagtctaataatgttgaatttgctgttaatactgaaggtgtatatagtgaaccccgccccattggcaccagatacctgactcgtaatctgtaa

SEQ ID NO: 5247 - protein, 737 aa, synthetic construct
  REGION 1..737: note = Description of Artificial Sequence: Synthetic polypeptide
MAADGYLPDWLEDNLSEGIREWWALKPGAPQPKANQQHQDNARGLVLPGYKYLGPGNGLDKGEPVNAADAAALEHDKAYDQQLQAGDNPYLRYNHADAEFQERLQEDTSFGGNLGRAVFQAKKRILEPLGLVEEAAKTAPGKKRPVDQSPQEPDSSSGVGKSGKQPARKRLNFGQTGDSESVPDPQPLGEPPAAPTSLGSNTMASGGGAPMADNNEGADGVGSSSGNWHCDSQWLGDRVITTSTRTWALPTYNNHLYKQISNGTSGGATNDNTYFGYSTPWGYFDFNRFHCHFSPRDWQRLINNNWGFRPKRLSFKLFNIQVKEVTQNEGTKTIANNLTSTIQVFTDSEYQLPYVLGSAHQGCLPPFPADVFMVPQYGYLTLNNGSQAVGRSSFYCLEYFPSQMLRTGNNFTFSYTFEEVPFHSSYAHSQSLDRLMNPLIDQYLYYLSRTQTTGGTANTQTLGFSQGGPNTMANQAKNWLPGPCYRQQRVSTTTGQNNNSNFAWTAGTKYHLNGRNSLANPGIAMATHKDDEERFFPSNGILIFGKQNAARDNADYSDVMLTSEEEIKTTNPVATEEYGIVADNLQQQNTAPQIGTVNSQGDLPGMVWQNRDVYLQGPIWAKIPHTDGNFHPSPLMGGFGLKHPPPQILIKNTPVPADPPTTFNQSKLNSFITQYSTGQVSVEIEWELQKENSKRWNPEIQYTSNYYKSNNVEFAVNTEGVYSEPRPIGTRYLTRNL

SEQ ID NO: 5248 - DNA, 2205 bp, synthetic construct
  misc_feature 1..2205: note = Description of Artificial Sequence: Synthetic polynucleotide
  source 1..2205: mol_type = other DNA
atggctgctgacggttatcttccagattggctcgaggacaacctttctgaaggcattcgtgagtggtgggctctgaaacctggagtccctcaacccaaagcgaaccaacaacaccaggacaactgtcggggtcttgtgcttccgggttacaaatacctcggacccggtaacggactcgacaaaggagagccggtcaacgaggcggacgcggcagccctcgaacacgacaaggcctacgaccagcagctcaaggccggagacaacccgtacctcaagtacaaccacgccgacgccgagttccaggagcggctcaaagaagatacgtcttttgggggcaacctcgggcgagcagtcttccagaccaaaaagaggcttcttgaacctcttggtctggttgaggaagcggctaagacggctcctggaaagaagaggcctgtagagcagtctcctcaggaaccggactcctccgcgggtattggcaaatcgggtgcacagcccgctaaaaagagactcaatttcggtcagactggcgacacagagtcagtcccagaccctcaaccaatcggagaacctcccgcagccccctcaggtgtgggatctcttacaatggcttcaggtggtggcgcaccagtggcagacaataacgaaggtgccgatggagtgggtagttcctcgggaaattggcattgcgattcccaatggctgggggacagagtcatcaccaccagcacccgaacctgggccctgcccacctacaacaaccacctctacaaacaaatttccagccaatcaggagcctcgaacgacaatcactactttggctacagcaccccttgggggtattttgacttcaacagattccactgccacttttcaccacgtgactggcagcgactcatcaacaacaactggggattccggcccaagagactcagcttcaagctcttcaacatccaggtcaaagaggttacggacaacaatggagtcaagaccatcgccaataaccttaccagcacggtccaggtcttcacggactcagactatcagctcccgtacgtgctcgggtcggctcacgagggctgcctcccgccgttcccagcggacgttttcatgattcctcagtacgggtatctgacgcttaatgatggaagccaggccgtgggtcgttcgtccttttactgcctggaatatttcccgtcgcaaatgctaagaacgggtaacaacttccagttcagctacgagtttgagaacgtacctttccatagcagctacgctcacagccaaagcctggaccgactaatgaatccactcatcgaccaatacttgtactatctctcaaagactattaacggttctggacagaatcaacaaacgctaaaattcagtgtggccggacccagcaacatggctgtccagggaagaaactacatacctggacccagctaccgacaacaacgtgtctcaaccactgtgactcaaaacaacaacagcgaatttgcttggcctggagcttcttcttgggctctcaatggacgtaatagcttgatgaatcctggacctgctatggccagccacaaagaaggagaggaccgtttctttcctttgtctggatctttaatttttggcaaacaaggaactggaagagacaacgtggatgcggacaaagtcatgataaccaacgaagaagaaattaaaactactaacccggtagcaacggagtcctatggacaagtggccacaaaccaccagagtgcccaagcacaggcgcagaccggctgggttcaaaaccaaggaatacttccgggtatggtttggcaggacagagatgtgtacctgcaaggacccatctgggccaagattcctcacacggacggcaacttccacccgtctccgctgatgggcggctttggcctgaaacatcctccgcctcagatcctgatcaagaacacgcctgttcctgcgaatcctccggcggagttttcagctacaaagtttgcttcattcatcacccagtactccacaggacaagtgagtgtggaaattgaatgggagctgcagaaagaaaacagcaagcgctggaatcccgaagtgcagtacacatccaattatgcaaaatctgccaacgttgattttactgtggacaacaatggactttatactgagcctcgccccattggcacccgttaccttaccaaacctctgtaa

SEQ ID NO: 5249 - protein, 734 aa, synthetic construct
  REGION 1..734: note = Description of Artificial Sequence: Synthetic polypeptide
MAADGYLPDWLEDNLSEGIREWWALKPGVPQPKANQQHQDNCRGLVLPGYKYLGPGNGLDKGEPVNEADAAALEHDKAYDQQLKAGDNPYLKYNHADAEFQERLKEDTSFGGNLGRAVFQTKKRLLEPLGLVEEAAKTAPGKKRPVEQSPQEPDSSAGIGKSGAQPAKKRLNFGQTGDTESVPDPQPIGEPPAAPSGVGSLTMASGGGAPVADNNEGADGVGSSSGNWHCDSQWLGDRVITTSTRTWALPTYNNHLYKQISSQSGASNDNHYFGYSTPWGYFDFNRFHCHFSPRDWQRLINNNWGFRPKRLSFKLFNIQVKEVTDNNGVKTIANNLTSTVQVFTDSDYQLPYVLGSAHEGCLPPFPADVFMIPQYGYLTLNDGSQAVGRSSFYCLEYFPSQMLRTGNNFQFSYEFENVPFHSSYAHSQSLDRLMNPLIDQYLYYLSKTINGSGQNQQTLKFSVAGPSNMAVQGRNYIPGPSYRQQRVSTTVTQNNNSEFAWPGASSWALNGRNSLMNPGPAMASHKEGEDRFFPLSGSLIFGKQGTGRDNVDADKVMITNEEEIKTTNPVATESYGQVATNHQSAQAQAQTGWVQNQGILPGMVWQDRDVYLQGPIWAKIPHTDGNFHPSPLMGGFGLKHPPPQILIKNTPVPANPPAEFSATKFASFITQYSTGQVSVEIEWELQKENSKRWNPEVQYTSNYAKSANVDFTVDNNGLYTEPRPIGTRYLTKPL

SEQ ID NO: 5250 - DNA, 2211 bp, synthetic construct
  misc_feature 1..2211: note = Description of Artificial Sequence: Synthetic polynucleotide
  source 1..2211: mol_type = other DNA
atggctgccgatggttatcttccagattggctcgaggacaacctctctgagggcattcgcgagtggtgggacttgaaacctggagcccctaaacccaaggcaaatcaacaacatcaggacaacgctcgaggtcttgtgcttccgggttacaaataccttggacccggcaacggactcgacaagggggagccggtcaacgcagcagacgcggcggccctcgagcacgacaaggcctacgaccagcagctcaaggccggagacaacccgtacctcaagtacaaccacgccgacgccgagttccaggagcggctcaaagaagatacgtcttttgggggcaacctcgggcgagcagtcttccaggccaaaaagaggcttcttgaacctcttggtctggttgaggaagcggctaagacggctcctggaaagaagagaccggtagagccatcaccccagcgttctccagactcctctacgggcatcggcaagaaaggccaacagcccgctaaaaagagactcaattttggtcagactggcgactcagagtcagtccccgacccacaacctctcggagaacctccagcaacccccgctgctgtgggacctactacaatggcttcaggcggtggcgcaccaatggcagacaataacgagggtgccgatggagtgggtaattcctcaggaaattggcattgcgattcccaatggctgggcgacagagtcatcaccaccagcaccagaacctgggccctgcccacttacaacaaccatctctacaagcaaatctccagccaatcaggagcttcaaacgacaaccactactttggctacagcaccccttgggggtattttgactttaacagattccactgccacttttcaccacgtgactggcaaagactcatcaacaacaactggggattccgacccaagagactcaacttcaagctcttcaacatccaagtcaaggaggtcacgacgaatgatggcgtcacgaccatcgctaataaccttaccagcacggttcaagtcttctcggactcggagtaccagttgccgtacgtcctcggctctgcgcaccagggctgcctccctccgttcccggcggacgtgttcatgattccgcagtacggctacctaacgctcaacaatggcagccaagccgtgggacgttcatccttttactgcctggaatatttcccttctcagatgctgagaacgggcaacaactttaccttcagctacacttttgaggacgttcctttccacagcagctacgctcacagccagagtctggaccgtctcatgaatcctctcatcgaccagtacctgtattacttgagcagaacaaacactccaagtggaaccaccacgcagtcaaggcttcagttttctcaggccggagcgagtgacattcgggaccagtctaggaactggcttcctggaccctgttaccgccagcagcgcgtttctaaaacaaaaacagacaacaacaacagcaattttacctggactggtgcttcaaaatataaccttaatgggcgtgaatctataatcaaccctggcactgctatggcctcacacaaagacgacgaagacaagttctttcccatgagcggtgtcatgatttttggaaaagagagcgccggagcttcaaacactgcattggacaatgtcatgatcacagacgaagaggaaatcaaagccactaaccccgtggccaccgaaagatttgggactgtggcagtcaatctccagagcagcagcacagaccctgcgaccggagatgtgcatgttatgggagcattacctggcatggtgtggcaagatagagacgtgtacctgcagggtcccatttgggccaaaattcctcacacagatggacactttcacccgtctcctcttatgggcggctttggactcaagaacccgcctcctcagatcctcatcaaaaacacgcctgttcctgcgaatcctccggcggagttttcagctacaaagtttgcttcattcatcacccaatactccacaggacaagtgagtgtggaaattgaatgggagctgcagaaagaaaacagcaagcgctggaatcccgaagtgcagtacacatccaattatgcaaaatctgccaacgttgattttactgtggacaacaatggactttatactgagcctcgccccattggcacccgttaccttacccgtcccctgtaa

SEQ ID NO: 5251 - protein, 736 aa, synthetic construct
  REGION 1..736: note = Description of Artificial Sequence: Synthetic polypeptide
MAADGYLPDWLEDNLSEGIREWWDLKPGAPKPKANQQHQDNARGLVLPGYKYLGPGNGLDKGEPVNAADAAALEHDKAYDQQLKAGDNPYLKYNHADAEFQERLKEDTSFGGNLGRAVFQAKKRLLEPLGLVEEAAKTAPGKKRPVEPSPQRSPDSSTGIGKKGQQPAKKRLNFGQTGDSESVPDPQPLGEPPATPAAVGPTTMASGGGAPMADNNEGADGVGNSSGNWHCDSQWLGDRVITTSTRTWALPTYNNHLYKQISSQSGASNDNHYFGYSTPWGYFDFNRFHCHFSPRDWQRLINNNWGFRPKRLNFKLFNIQVKEVTTNDGVTTIANNLTSTVQVFSDSEYQLPYVLGSAHQGCLPPFPADVFMIPQYGYLTLNNGSQAVGRSSFYCLEYFPSQMLRTGNNFTFSYTFEDVPFHSSYAHSQSLDRLMNPLIDQYLYYLSRTNTPSGTTTQSRLQFSQAGASDIRDQSRNWLPGPCYRQQRVSKTKTDNNNSNFTWTGASKYNLNGRESIINPGTAMASHKDDEDKFFPMSGVMIFGKESAGASNTALDNVMITDEEEIKATNPVATERFGTVAVNLQSSSTDPATGDVHVMGALPGMVWQDRDVYLQGPIWAKIPHTDGHFHPSPLMGGFGLKNPPPQILIKNTPVPANPPAEFSATKFASFITQYSTGQVSVEIEWELQKENSKRWNPEVQYTSNYAKSANVDFTVDNNGLYTEPRPIGTRYLTRPL

SEQ ID NO: 5252 - DNA, 2214 bp, synthetic construct; identical to SEQ ID NO: 5224
  misc_feature 1..2214: note = Description of Artificial Sequence: Synthetic polynucleotide
  source 1..2214: mol_type = other DNA

SEQ ID NO: 5253 - protein, 737 aa, synthetic construct; identical to SEQ ID NO: 5225
  REGION 1..737: note = Description of Artificial Sequence: Synthetic polypeptide

SEQ ID NO: 5254 - DNA, 2205 bp, synthetic construct
  misc_feature 1..2205: note = Description of Artificial Sequence: Synthetic polynucleotide
  source 1..2205: mol_type = other DNA
atggctgctgacggttatcttccagattggctcgaggacaacctttctgaaggcattcgtgagtggtgggctctgaaacctggagtccctcaacccaaagcgaaccaacaacaccaggacaaccgtcggggtcttgtgcttccgggttacaaatacctcggacccggtaacggactcgacaaaggagagccggtcaacgaggcggacgcggcagccctcgaacacgacaaggcctacgaccagcagctcaaggccggagacaacccgtacctcaagtacaaccacgccgacgccgagttccaggagcggctcaaagaagatacgtcttttgggggcaacctcgggcgagcagtcttccaggccaaaaagaggcttcttgaacctcttggtctggttgaggaagcggctaagacggctcctggaaagaagaggcctgtagagcagtctcctcaggaaccggactcctccgcgggtattggcaaatcgggtgcacagcccgctaaaaagagactcaatttcggtcagactggcgacacagagtcagtcccagaccctcaaccaatcggagaacctcccgcagccccctcaggtgtgggatctcttacaatggcttcaggtggtggcgcaccagtggcagacaataacgaaggtgccgatggagtgggtagttcctcgggaaattggcattgcgattcccaatggctgggggacagagtcatcaccaccagcacccgaacctgggccctgcccacctacaacaaccacctctacaaacaaatttccagccaatcaggagcctcgaacgacaatcactactttggctacagcaccccttgggggtattttgacttcaacagattccactgccacttttcaccacgtgactggcagcgactcatcaacaacaactggggattccggcccaagagactcagcttcaagctcttcaacatccaggtcaaagaggttacggacaacaatggagtcaagaccatcgccaataaccttaccagcacggtccaggtcttcacggactcagactatcagctcccgtacgtgctcgggtcggctcacgagggctgcctcccgccgttcccagcggacgttttcatgattcctcagtacgggtatctgacgcttaatgatggaagccaggccgtgggtcgttcgtccttttactgcctggaatatttcccgtcgcaaatgctaagaacgggtaacaacttccagttcagctacgagtttgagaacgtacctttccatagcagctacgctcacagccaaagcctggaccgactaatgaatccactcatcgaccaatacttgtactatctctcaaagactattaacggttctggacagaatcaacaaacgctaaaattcagtgtggccggacccagcaacatggctgtccagggaagaaactacatacctggacccagctaccgacaacaacgtgtctcaaccactgtgactcaaaacaacaacagcgaatttgcttggcctggagcttcttcttgggctctcaatggacgtaatagcttgatgaatcctggacctgctatggccagccacaaagaaggagaggaccgtttctttcctttgtctggatctttaatttttggcaaacaaggaactggaagagacaacgtggatgcggacaaagtcatgataaccaacgaagaagaaattaaaactactaacccggtagcaacggagtcctatggacaagtggccacaaaccaccagagtgcccaagcacaggcgcagaccggctgggttcaaaaccaaggaatacttccgggtatggtttggcaggacagagatgtgtacctgcaaggacccatttgggccaaaattcctcacacggacggcaactttcacccttctccgctgatgggagggtttggaatgaaacacccgcctcctcagatcctcatcaaaaacacacctgtacctgcggatcctccaacggccttcaacaaggacaagctgaactctttcatcacccagtattctactggccaagtcagcgtggagatcgagtgggagctgcagaaggaaaacagcaagcgctggaaccccgagatccagtacacctccaactactacaaatctacaagtgtggactttgctgttaatacagaaggcgtgtactctgaaccccgccccattggcacccgttacctcacccgtaatctgtaa

SEQ ID NO: 5255 - protein, 734 aa, synthetic construct
  REGION 1..734: note = Description of Artificial Sequence: Synthetic polypeptide
MAADGYLPDWLEDNLSEGIREWWALKPGVPQPKANQQHQDNRRGLVLPGYKYLGPGNGLDKGEPVNEADAAALEHDKAYDQQLKAGDNPYLKYNHADAEFQERLKEDTSFGGNLGRAVFQAKKRLLEPLGLVEEAAKTAPGKKRPVEQSPQEPDSSAGIGKSGAQPAKKRLNFGQTGDTESVPDPQPIGEPPAAPSGVGSLTMASGGGAPVADNNEGADGVGSSSGNWHCDSQWLGDRVITTSTRTWALPTYNNHLYKQISSQSGASNDNHYFGYSTPWGYFDFNRFHCHFSPRDWQRLINNNWGFRPKRLSFKLFNIQVKEVTDNNGVKTIANNLTSTVQVFTDSDYQLPYVLGSAHEGCLPPFPADVFMIPQYGYLTLNDGSQAVGRSSFYCLEYFPSQMLRTGNNFQFSYEFENVPFHSSYAHSQSLDRLMNPLIDQYLYYLSKTINGSGQNQQTLKFSVAGPSNMAVQGRNYIPGPSYRQQRVSTTVTQNNNSEFAWPGASSWALNGRNSLMNPGPAMASHKEGEDRFFPLSGSLIFGKQGTGRDNVDADKVMITNEEEIKTTNPVATESYGQVATNHQSAQAQAQTGWVQNQGILPGMVWQDRDVYLQGPIWAKIPHTDGNFHPSPLMGGFGMKHPPPQILIKNTPVPADPPTAFNKDKLNSFITQYSTGQVSVEIEWELQKENSKRWNPEIQYTSNYYKSTSVDFAVNTEGVYSEPRPIGTRYLTRNL

SEQ ID NO: 5256 - DNA, 2217 bp, synthetic construct
  misc_feature 1..2217: note = Description of Artificial Sequence: Synthetic polynucleotide
  source 1..2217: mol_type = other DNA
atggctgccgatggttatcttccagattggctcgaggacaacctctctgagggcattcgcgagtggtgggcgctgaaacctggagccccgaagcccaaagccaaccagcaaaagcaggacgacggccggggtctggtgcttcctggctacaagtacctcggacccttcaacggactcgacaagggggagcccgtcaacgcggcggacgcagcggccctcgagcacgacaaggcctacgaccagcagctgcaggcgggtgacaatccgtacctgcggtataaccacgccgacgccgagtttcaggagcgtctgcaagaagatacgtcttttgggggcaacctcgggcgagcagtcttccaggccaagaagcgggttctcgaacctctcggtctggttgaggaaggcgctaagacggctcctggaaagaagagaccggtagagccatcaccccagcgttctccagactcctctacgggcatcggcaagaaaggccaacagcccgccagaaaaagactcaattttggtcagactggcgactcagagtcagttccagaccctcaacctctcggagaacctccagcagcgccctctggtgtgggacctaatacaatggctgcaggcggtggcgcaccaatggcagacaataacgaaggcgccgacggagtgggtagttcctcgggaaattggcattgcgattccacatggctgggcgacagagtcatcaccaccagcacccgaacctgggccctgcccacctacaacaaccacctctacaagcaaatctccaacgggacatcgggaggagccaccaacgacaacacctacttcggctacagcaccccctgggggtattttgactttaacagattccactgccacttttcaccacgtgactggcagcgactcatcaacaacaactggggattccggcccaagagactcagcttcaagctcttcaacatccaggtcaaggaggtcacgcagaatgaaggcaccaagaccatcgccaataacctcaccagcaccatccaggtgtttacggactcggagtaccagctgccgtacgttctcggctctgcccaccagggctgcctgcctccgttcccggcggacgtgttcatgattccccagtacggctacctaacactcaacaacggtagtcaggccgtgggacgctcctccttctactgcctggaatactttccttcgcagatgctgagaaccggcaacaacttccagtttacttacaccttcgaggacgtgcctttccacagcagctacgcccacagccagagcttggaccggctgatgaatcctctgattgaccagtacctgtactacttgtctcggactcaaacaacaggaggcacggcaaatacgcagactctgggcttcagccaaggtgggcctaatacaatggccaatcaggcaaagaactggctgccaggaccctgttaccgccaacaacgcgtctcaacgacaaccgggcaaaacaacaatagcaactttgcctggactgctgggaccaaataccatctgaatggaagaaattcattggctaatcctggcatcgctatggcaacacacaaagacgacgaggagcgtttttttcccagtaacgggatcctgatttttggcaaacaaaatgctgccagagacaatgcggattacagcgatgtcatgctcaccagcgaggaagaaatcaaaaccactaaccctgtggctacagaggaatacggtatcgtggcagataacttgcagcagcaaaacacggctcctcaaattggaactgtcaacagccagggggccttacccggtatggtctggcagaaccgggacgtgtacctgcagggtcccatctgggccaagattcctcacacggacggcaacttccacccctctcccctcatgggtggattcggacttaaacatcctccgcctcagatcctgatcaagaacacgcctgtacctgcggatcctccgaccaccttcaaccagtcaaagctgaactctttcatcacgcaatacagcaccggacaggtcagcgtggaaattgaatgggagctgcagaaggaaaacagcaagcgctggaaccccgagatccagtacacctccaactactacaaatctacaagtgtggactttgctgttaatacagaaggcgtgtactctgaaccccgccccattggcacccgttacctcacccgtaatctgtaa

SEQ ID NO: 5257 - protein, 738 aa, synthetic construct; identical to SEQ ID NO: 5159
  REGION 1..738: note = Description of Artificial Sequence: Synthetic polypeptide

SEQ ID NO: 5258 - DNA, 2211 bp, synthetic construct
  misc_feature 1..2211: note = Description of Artificial Sequence: Synthetic polynucleotide
  source 1..2211: mol_type = other DNA
atggctgctgacggttatcttccagattggctcgaggacaacctttctgaaggcattcgagagtggtgggcgctgcaacctggagcccctaaacccaaggcaaatcaacaacatcaggacaacgctcggggtcttgtgcttccgggttacaaatacctcggacccggcaacggactcgacaagggggaacccgtcaacgcagcggacgcggcagccctcgagcacgacaaggcctacgaccagcagctcaaggccggtgacaacccctacctcaagtacaaccacgccgacgccgagttccaggagcggctcaaagaagatacgtcttttgggggcaacctcgggcgagcagtcttccaggccaaaaagaggcttcttgaacctcttggtctggttgaggaagcggctaagacggctcctggaaagaagaggcctgtagatcagtctcctcaggaaccggactcatcatctggtgttggcaaatcgggcaaacagcctgccagaaaaagactaaatttcggtcagactggcgactcagagtcagtcccagaccctcaacctctcggagaaccaccagcagcccccacaagtttgggatctaatacaatggcttcaggcggtggcgcaccaatggcagacaataacgagggtgccgatggagtgggtaattcctcaggaaattggcattgcgattcccaatggctgggcgacagagtcatcaccaccagcaccagaacctgggccctgcccacttacaacaaccatctctacaagcaaatctccagccaatcaggagcttcaaacgacaaccactactttggctacagcaccccttgggggtattttgactttaacagattccactgccacttctcaccacgtgactggcagcgactcattaacaacaactggggattccggcccaagaaactcagcttcaagctcttcaacatccaagttaaagaggtcacgcagaacgatggcacgacgactattgccaataaccttaccagcacggttcaggtgtttacggactcggagtatcagctcccgtacgtgctcgggtcggcgcaccaaggctgtctcccgccgtttccagcggacgtcttcatggtccctcagtatggatacctcaccctgaacaacggaagtcaagcggtgggacgctcatccttttactgcctggagtacttcccttcgcagatgctaaggactggaaataacttccaattcagctataccttcgaggatgtaccttttcacagcagctacgctcacagccagagtttggatcgcttgatgaatcctcttattgatcagtatctgtactacctgaacagaacgcaaggaacaacctctggaacaaccaaccaatcacggctgctttttagccaggctgggcctcagtctatgtctttgcaggccagaaattggctacctgggccctgctaccggcaacagagactttcaaagactgctaacgacaacaacaacagtaactttccttggacagcggccagcaaatatcatctcaatggccgcgactcgctggtgaatccaggaccagctatggccagtcacaaggacgatgaagaaaaatttttccctatgcacggcaatctaatatttggcaaagaagggacaacggcaagtaacgcagaattagataatgtaatgattacggatgaagaagagattcgtaccaccaatcctgtggcaacagagcagtatggaactgtggcaaataacttgcagagctcaaatacagctcccacgactagaactgtcaatgatcagggggccttacctggcatggtgtggcaagatcgtgacgtgtaccttcaaggacctatctgggcaaagattcctcacacggatggacactttcatccttctcctctgatgggaggctttggactgaaacatccgcctcctcaaatcatgatcaaaaatactccggtaccggcaaatcctccgacgactttcagcccggccaagtttgcttcatttatcactcagtactccactggacaggtcagcgtggaaattgagtgggagctacagaaagaaaacagcaaacgttggaatccagagattcagtacacttccaactacaacaagtctgttaatgtggactttactgtagacactaatggtgtttatagtgaacctcgccccattggcacccgttaccttacccgtcccctgtaa

SEQ ID NO: 5259 - protein, 736 aa, synthetic construct; identical to SEQ ID NO: 5229
  REGION 1..736: note = Description of Artificial Sequence: Synthetic polypeptide

SEQ ID NO: 5260 - DNA, 2211 bp, synthetic construct; identical to SEQ ID NO: 5228
  misc_feature 1..2211: note = Description of Artificial Sequence: Synthetic polynucleotide
  source 1..2211: mol_type = other DNA

SEQ ID NO: 5261 - protein, 736 aa, synthetic construct; identical to SEQ ID NO: 5229
  REGION 1..736: note = Description of Artificial Sequence: Synthetic polypeptide

SEQ ID NO: 5262 - DNA, 2211 bp, synthetic construct
  misc_feature 1..2211: note = Description of Artificial Sequence: Synthetic polynucleotide
  source 1..2211: mol_type = other DNA
atggctgctgacggttatcttccagattggctcgaggacaacctttctgaaggcattcgtgagtggtgggctctgaaacctggagtccctcaacccaaagcgaaccaacaacaccaggacaaccgtcggggtcttgtgcttccgggttacaaatacctcggacccggtaacggactcgacaaaggagagcccgtcaacgcggcggatgcagcggccctcgagcacgacaaggcctacgaccagcagctcaaagcgggtgacaatccgtacctgcggtataaccacgccgacgccgagtttcaggagcgtctgcaagaagatacgtcttttgggggcaacctcgggcgagcagtcttccaggccaagaagagggttctcgaaccttttggtctggttgaggaaggtgctaagacggctcctggaaagaaacgtccggtagagcagtcgccacaagagccagactcctcctcgggcatcggcaagacaggccagcagcccgctaaaaagagactcaattttggtcagactggcgactcagagtcagtccccgacccacaacctctcggagaacctccagcaacccccgctgctgtgggacctactacaatggcttcaggcggtggcgcaccaatggcagacaataacgaaggcgccgacggagtgggtaatgcctcaggaaattggcattgcgattccacatggctgggcgacagagtcatcaccaccagcacccgcacctgggccttgcccacctacaataaccacctctacaagcaaatctccagtgcttcaacgggggccagcaacgacaaccactacttcggctacagcaccccctgggggtattttgatttcaacagattccactgccatttctcaccacgtgactggcagcgactcatcaacaacaattggggattccggcccaagagactcaacttcaagctcttcaacatccaagtcaaggaggtcacgacgaatgatggcgtcacgaccatcgctaataaccttaccagcacggttcaagtcttctcggactcggagtaccagcttccgtacgtcctcggctctgcgcaccagggctgcctccctccgttcccggcggacgtgttcatgattccgcaatacggctacctgacgctcaacaatggcagccaagccgtgggacgttcatccttttactgcctggaatatttcccttctcagatgctgagaacgggcaacaactttaccttcagctacacctttgaggaagtgcctttccacagcagctacgcgcacagccagagcctggaccggctgatgaatcctctcatcgaccaatacctgtattacctgaacagaactcaaaatcagtccggaagtgcccaaaacaaggacttgctgtttagccgtgggtctccagctggcatgtctgttcagcccaaaaactggctacctggaccctgttatcggcagcagcgcgtttctaaaacaaaaacagacaacaacaacagcaattttacctggactggtgcttcaaaatataacctcaatgggcgtgaatccatcatcaaccctggcactgctatggcctcacacaaagacgacgaagacaagttctttcccatgagcggtgtcatgatttttggaaaagagagcgccggagcttcaaacactgcattggacaatgtcatgattacagacgaagaggaaattaaagccactaaccctgtggccaccgaaagatttgggaccgtggcagtcaatttccagagcagcagcacagaccctgcgaccggagatgtgcatgttatgggagccttacctggaatggtgtggcaagacagagacgtatacctgcagggtcctatttgggccaaaattcctcacacggatggacactttcacccgtctcctctcatgggcggctttggacttaagcacccgcctcctcagatcctcatcaaaaacacgcctgttcctgcgaatcctccggcagagttttcggctacaaagtttgcttcattcatcacccagtattccacaggacaagtgagcgtggagattgaatgggagctgcagaaagaaaacagcaaacgctggaatcccgaagtgcagtatacatctaactatgcaaaatctgccaacgttgatttcactgtggacaacaatggactttatactgagcctcgccccattggcacccgttacctcacccgtcccctgtaa

SEQ ID NO: 5263 - protein, 736 aa, synthetic construct
  REGION 1..736: note = Description of Artificial Sequence: Synthetic polypeptide
MAADGYLPDWLEDNLSEGIREWWALKPGVPQPKANQQHQDNRRGLVLPGYKYLGPGNGLDKGEPVNAADAAALEHDKAYDQQLKAGDNPYLRYNHADAEFQERLQEDTSFGGNLGRAVFQAKKRVLEPFGLVEEGAKTAPGKKRPVEQSPQEPDSSSGIGKTGQQPAKKRLNFGQTGDSESVPDPQPLGEPPATPAAVGPTTMASGGGAPMADNNEGADGVGNASGNWHCDSTWLGDRVITTSTRTWALPTYNNHLYKQISSASTGASNDNHYFGYSTPWGYFDFNRFHCHFSPRDWQRLINNNWGFRPKRLNFKLFNIQVKEVTTNDGVTTIANNLTSTVQVFSDSEYQLPYVLGSAHQGCLPPFPADVFMIPQYGYLTLNNGSQAVGRSSFYCLEYFPSQMLRTGNNFTFSYTFEEVPFHSSYAHSQSLDRLMNPLIDQYLYYLNRTQNQSGSAQNKDLLFSRGSPAGMSVQPKNWLPGPCYRQQRVSKTKTDNNNSNFTWTGASKYNLNGRESIINPGTAMASHKDDEDKFFPMSGVMIFGKESAGASNTALDNVMITDEEEIKATNPVATERFGTVAVNFQSSSTDPATGDVHVMGALPGMVWQDRDVYLQGPIWAKIPHTDGHFHPSPLMGGFGLKHPPPQILIKNTPVPANPPAEFSATKFASFITQYSTGQVSVEIEWELQKENSKRWNPEVQYTSNYAKSANVDFTVDNNGLYTEPRPIGTRYLTRPL

SEQ ID NO: 5264 - DNA, 2217 bp, synthetic construct
  misc_feature 1..2217: note = Description of Artificial Sequence: Synthetic polynucleotide
  source 1..2217: mol_type = other DNA
atggctgccgatggttatcttccagattggctcgaggacaacctctctgagggcattcgcgagtggtgggacttgaaacctggagccccgaaacccaaagccaaccagcaaaagcaggacgacggccggggtctggtgcttcctggctacaagtacctcggacccttcaacggactcgacaagggggagcccgtcaacgcggcggatgcaacggccctcgagcacgacaaggcctacgaccagcagctgcaggcgggtgacaatccgtacctgcggtataaccacgccgacgccgagtttcaggagcgtctgcaagaagatacgtcttttgggggcaacctcgggcgagcagtcttccaggccaagaagcgggttctcgaacctctcggtctggttgaggaaggcgctaagacggctcctggaaagaagagaccggtagagccatcaccccagcgttctccagactcctctacgggcatcggcaagaaaggccaacagcccgccagaaaaagactcaattttggtcagactggcgactcagagtcagttccagaccctcaacctctcggagaaccaccagcagcccccacaagtttgggatctaatacaatggcttcaggcggtggcgcaccaatggcagacaataacgagggtgccgatggagtgggtaattcctcaggaaattggcattgcgattcccaatggctgggcgacagagtcatcaccaccagcacccgcacctgggccttgcccacctacaataaccacctctacaagcaaatctccagtgcttcaacgggggccagcaacgacaaccactacttcggctacagcaccccctgggggtattttgactttaaccgcttccactgccacttctcgccaagagactggcaaagactcatcaacaacaattggggattccggcccaagagactcaacttcaaactcttcaacatccaagtcaaggaggtcacgacgaatgatggcgtcacgaccatcgccaataacctcaccagcaccatccaggtgtttacggactcggagtaccagctgccgtacgttctcggctctgcccaccagggctgcctgcctccgttcccggcggacgtgttcatgattccccagtatggatacctcaccctgaacaacggaagtcaagcggtgggacgctcatccttttactgcctggagtacttcccttcgcagatgctaaggactggaaataacttccaattcagctataccttcgaggatgtaccttttcacagcagctacgctcacagccagagtttggatcgcttgatgaatcctcttattgatcagtatctgtactacctgaacagaacgcaaggaacaacctctggaacaaccaaccaatcacggctgctttttagccaggctgggcctcagtctatgtctttgcaggccagaaattggctacctgggccctgctaccggcaacagagactttcaaagactgctaacgacaacaacaacagtaactttccttggacagcagccagcaaatatcatctcaatggccgcgactcgctggtgaatccaggaccagctatggccagtcacaaggacgatgaagaaaaatttttccctatgcacggcaatctaatatttggcaaagaagggacaacggcaagtaacgcagaattagataatgtaatgattacggatgaagaagagattcgtaccaccaatcctgtggcaacagagcagtatggaactgtggcaaataacttgcagagctcaaatacagctcccacgactagaactgtcaatgatcagggggccttacctggcatggtgtggcaagatcgtgacgtgtaccttcaggggcccatctgggcaaagattccacacacggacggacattttcacccctctcccctcatgggtggattcggacttaaacaccctcctccgcagattctcatcaagaacaccccggtacctgcgaatccttcgaccaccttcagtgcggcaaagtttgcttccttcatcacacagtactccacgggacaggtcagcgtggagatcgagtgggagctgcagaaggaaaacagcaagcgctggaacccggagatccagtacacttccaactattacaagtctaataatgttgaatttgctgttaatactgaaggtgtatatagtgaaccccgccccattggcaccagatacctgactcgtaatctgtaa

SEQ ID NO: 5265 - protein, 738 aa, synthetic construct
  REGION 1..738: note = Description of Artificial Sequence: Synthetic polypeptide
MAADGYLPDWLEDNLSEGIREWWDLKPGAPKPKANQQKQDDGRGLVLPGYKYLGPFNGLDKGEPVNAADATALEHDKAYDQQLQAGDNPYLRYNHADAEFQERLQEDTSFGGNLGRAVFQAKKRVLEPLGLVEEGAKTAPGKKRPVEPSPQRSPDSSTGIGKKGQQPARKRLNFGQTGDSESVPDPQPLGEPPAAPTSLGSNTMASGGGAPMADNNEGADGVGNSSGNWHCDSQWLGDRVITTSTRTWALPTYNNHLYKQISSASTGASNDNHYFGYSTPWGYFDFNRFHCHFSPRDWQRLINNNWGFRPKRLNFKLFNIQVKEVTTNDGVTTIANNLTSTIQVFTDSEYQLPYVLGSAHQGCLPPFPADVFMIPQYGYLTLNNGSQAVGRSSFYCLEYFPSQMLRTGNNFQFSYTFEDVPFHSSYAHSQSLDRLMNPLIDQYLYYLNRTQGTTSGTTNQSRLLFSQAGPQSMSLQARNWLPGPCYRQQRLSKTANDNNNSNFPWTAASKYHLNGRDSLVNPGPAMASHKDDEEKFFPMHGNLIFGKEGTTASNAELDNVMITDEEEIRTTNPVATEQYGTVANNLQSSNTAPTTRTVNDQGALPGMVWQDRDVYLQGPIWAKIPHTDGHFHPSPLMGGFGLKHPPPQILIKNTPVPANPSTTFSAAKFASFITQYSTGQVSVEIEWELQKENSKRWNPEIQYTSNYYKSNNVEFAVNTEGVYSEPRPIGTRYLTRNL

SEQ ID NO: 5266 - DNA, 2208 bp, synthetic construct
  misc_feature 1..2208: note = Description of Artificial Sequence: Synthetic polynucleotide
  source 1..2208: mol_type = other DNA
atggctgccgatggttatcttccagattggctcgaggacaaccttagtgaaggaattcgcgagtggtgggacttgaaacctggagccccgaagcccaaagccaaccagcaaaagcaggacgacggccggggtctggtgcttcctggctacaagtacctcggacccttcaacggactcgacaagggggagcccgtcaacgcggcggacgcagcggccctcgagcacgacaaggcctacgaccagcagctcaaagcgggtgacaatccgtacctgcggtataaccacgccgacgccgagtttcaggagcgtctgcaagaagatacgtcttttgggggcaacctcgggcgagcagtcttccaggccaagaagcgggttctcgaacctctcggtctggttgaggaaggtgctaagacggctcctggaaagaaacgtccggtagagcagtcgccacaagagccagactcctcctcgggcattggcaagacaggccagcagcccgctaaaaagagactcaattttggtcagactggcgactcagagtcagtccccgacccacaacctctcggagaacctccagcaacccccgctgctgtgggacctactacaatggcttcaggcggtggcgcaccaatggcagacaataacgaaggcgccgacggagtgggtaatgcctcaggaaattggcattgcgattccacatggctgggcgacagagtcatcaccaccagcacccgaacctgggccctgcccacctacaacaaccacctctacaaacaaatttccagccaatcaggagcctcgaacgacaatcactactttggctacagcaccccttgggggtattttgatttcaacagattccactgccacttttcaccacgtgactggcagcgactcatcaacaacaattggggattccggcccaagagactcagcttcaagctcttcaacatccaggtcaaggaggtcacgcagaatgaaggcaccaagaccatcgccaataaccttaccagcacggttcaagtgtttacggactcggagtatcagctcccgtacgtgctcggctcggcgcatcaaggatgcctcccgccgttcccagcagacgtcttcatggtgccacagtatggatacctcaccctgaacaacgggagtcaggcagtaggacgctcttcattttactgcctggagtactttccttctcagatgctgcgtaccggaaacaactttaccttcagctacacttttgaggacgttcctttccacagcagctacgctcacagccagagtctggaccgtctcatgaatcctctgattgaccagtacctgtattacttgagcagaacaaacactccaagtggaaccaccacgcagtcaaggcttcagttttctcaggccggagcgagtgacattcgggaccagtctaggaactggcttcctggaccctgttaccgccagcagcgagtatcaaagacatctgcggataacaacaacagtgaatactcgtggactggagctaccaagtaccacctcaatggcagagactctctggtgaatccgggcccggccatggcaagccacaaggactatgaagaaaagttttttcctcagagcggggttctcatctttgggaagcaaggctcagagaaaacaaatgtggacattgaaaaggtcatgattacagacgaagaggaaatcaggacaaccaatcccgtggctacggagcagtatggttctgtatctaccaacctccagagaggcaacagacaagcagctaccgcagatgtcaacacacaaggcgttcttccaggcatggtctggcaggacagagatgtgtaccttcaggggcccatctgggcaaagattccacacacggacggacattttcacccgtctccgctgatgggcggctttggcctgaaacatcctccgcctcagatcctgatcaagaacacgcctgtacctgcggatcctccgaccaccttcaaccagtcaaagctgaactctttcatcactcagtattctactggccaagtcagcgtggagatcgagtgggagctgcagaaggaaaacagcaagcgctggaaccccgagatccagtacacctccaactactacaaatctacaagtgtggactttgctgttaatacagaaggcgtgtactctgaaccccgccccattggcacccgttacctcacccgtaatctgtaa

SEQ ID NO: 5267 - protein, 735 aa, synthetic construct
  REGION 1..735: note = Description of Artificial Sequence: Synthetic polypeptide
MAADGYLPDWLEDNLSEGIREWWDLKPGAPKPKANQQKQDDGRGLVLPGYKYLGPFNGLDKGEPVNAADAAALEHDKAYDQQLKAGDNPYLRYNHADAEFQERLQEDTSFGGNLGRAVFQAKKRVLEPLGLVEEGAKTAPGKKRPVEQSPQEPDSSSGIGKTGQQPAKKRLNFGQTGDSESVPDPQPLGEPPATPAAVGPTTMASGGGAPMADNNEGADGVGNASGNWHCDSTWLGDRVITTSTRTWALPTYNNHLYKQISSQSGASNDNHYFGYSTPWGYFDFNRFHCHFSPRDWQRLINNNWGFRPKRLSFKLFNIQVKEVTQNEGTKTIANNLTSTVQVFTDSEYQLPYVLGSAHQGCLPPFPADVFMVPQYGYLTLNNGSQAVGRSSFYCLEYFPSQMLRTGNNFTFSYTFEDVPFHSSYAHSQSLDRLMNPLIDQYLYYLSRTNTPSGTTTQSRLQFSQAGASDIRDQSRNWLPGPCYRQQRVSKTSADNNNSEYSWTGATKYHLNGRDSLVNPGPAMASHKDYEEKFFPQSGVLIFGKQGSEKTNVDIEKVMITDEEEIRTTNPVATEQYGSVSTNLQRGNRQAATADVNTQGVLPGMVWQDRDVYLQGPIWAKIPHTDGHFHPSPLMGGFGLKHPPPQILIKNTPVPADPPTTFNQSKLNSFITQYSTGQVSVEIEWELQKENSKRWNPEIQYTSNYYKSTSVDFAVNTEGVYSEPRPIGTRYLTRNL

SEQ ID NO: 5268 - DNA, 2214 bp, synthetic construct
  misc_feature 1..2214: note = Description of Artificial Sequence: Synthetic polynucleotide
  source 1..2214: mol_type = other DNA
atggctgccgatggttatcttccagattggctcgaggacaacctctctgagggcattcgcgagtggtgggacttgaaacctggagccccgaaacccaaagccaaccagcaaaagcaggacgacggccggggtctggtgcttcctggctacaagtacctcggacccttcaacggactcgacaagggggagcccgtcaacgcggcggatgcagcggccctcgagcacgacaaggcctacgaccagcagctcaaagcgggtgacaatccgtacctgcggtataaccacgccgacgccgagtttcaggagcgtctgcaagaagatacgtcttttgggggcaacctcgggcgagcagtcttccaggccaagaagagggttctcgaaccttttggtctggttgaggaaggtgctaagacggctcctggaaagaaacgtccggtagagcagtcgccacaagagccagactcctcctcgggcattggcaagacaggccagcagcctgcaagaaaaagattgaattttggtcagactggagacgcagactcagtacctgacccccagcctctcggacagccaccagcagccccctctggtctgggaactaatacgatggctacaggcagtggcgcaccaatggcagacaataacgagggcgccgacggagtgggtaattcctcgggaaattggcattgcgattcccaatggctgggggacagagtcatcaccaccagcacccgaacctgggccctgcccacctacaacaatcacctctacaagcaaatctccaacagcacatctggaggatcttcaaatgacaacgcctacttcggctacagcaccccctgggggtattttgatttcaacagattccactgccatttctcaccacgtgactggcagcgactcatcaacaacaattggggattccggcccaagagactcaacttcaagctcttcaacatccaggtcaaggaggtcacgcagaatgaaggcaccaagaccatcgccaataacctcaccagcaccatccaggtgtttacggactcggagtaccagctgccgtacgttctcggctctgcccaccagggctgcctgcctccgttcccggcggacgtgttcatgattccccagtacggctacctaacactcaacaacggtagtcaggccgtgggacgctcctccttctactgcctggaatactttccttcgcagatgctgagaaccggcaacaacttccagtttacttacaccttcgaggacgtgcctttccacagcagctacgcccacagccagagcttggaccggctgatgaatcctctgattgaccagtacctgtactacttgtctcggactcaaacaacaggaggcacgacaaatacgcagactctgggcttcagccaaggtgggcctaatacaatggccaatcaggcaaagaactggctgccaggaccctgttaccgccagcagcgagtatcaaagacatttgcggataacaacaacagtgaatactcgtggactggagctaccaagtaccacctcaatggcagagactctctggtgaatccgggcccggccatggcaagccacaaggacgatgaagaaaagttttttcctcagagcggggttctcatctttgggaagcaaggctcagagaaaacaaatgtggacattgaaaaggtcatgattacagacgaagaggaaatcaggacaaccaatcccgtggctacggagcagtatggttctgtatctaccaacctccagagaggcaacagacaagcagctaccgcagatgtcaacacacaaggcgttcttccaggcatggtctggcaggacagagatgtgtaccttcaggggcccatctgggcaaagattccacacacggacggacattttcacccctctcccctcatgggtggattcggacttaaacaccctccgcctcagatcctgatcaagaacacgcctgtacccgcggatcctccgaccaccttcaaccagtcaaagctgaactctttcatcacccagtattctactggccaagtcagcgtggagatcgagtgggagctgcagaaggaaaacagcaagcgctggaaccccgagatccagtacacctccaactactacaaatctacaagtgtggactttgctgttaatacagaaggcgtgtactctgaaccccgccccattggcacccgttacctcacccgtaatctgtaa

SEQ ID NO: 5269 - protein, 737 aa, synthetic construct
  REGION 1..737: note = Description of Artificial Sequence: Synthetic polypeptide
MAADGYLPDWLEDNLSEGIREWWDLKPGAPKPKANQQKQDDGRGLVLPGYKYLGPFNGLDKGEPVNAADAAALEHDKAYDQQLKAGDNPYLRYNHADAEFQERLQEDTSFGGNLGRAVFQAKKRVLEPFGLVEEGAKTAPGKKRPVEQSPQEPDSSSGIGKTGQQPARKRLNFGQTGDADSVPDPQPLGQPPAAPSGLGTNTMATGSGAPMADNNEGADGVGNSSGNWHCDSQWLGDRVITTSTRTWALPTYNNHLYKQISNSTSGGSSNDNAYFGYSTPWGYFDFNRFHCHFSPRDWQRLINNNWGFRPKRLNFKLFNIQVKEVTQNEGTKTIANNLTSTIQVFTDSEYQLPYVLGSAHQGCLPPFPADVFMIPQYGYLTLNNGSQAVGRSSFYCLEYFPSQMLRTGNNFQFTYTFEDVPFHSSYAHSQSLDRLMNPLIDQYLYYLSRTQTTGGTTNTQTLGFSQGGPNTMANQAKNWLPGPCYRQQRVSKTFADNNNSEYSWTGATKYHLNGRDSLVNPGPAMASHKDDEEKFFPQSGVLIFGKQGSEKTNVDIEKVMITDEEEIRTTNPVATEQYGSVSTNLQRGNRQAATADVNTQGVLPGMVWQDRDVYLQGPIWAKIPHTDGHFHPSPLMGGFGLKHPPPQILIKNTPVPADPPTTFNQSKLNSFITQYSTGQVSVEIEWELQKENSKRWNPEIQYTSNYYKSTSVDFAVNTEGVYSEPRPIGTRYLTRNL

SEQ ID NO: 5270 - DNA, 2217 bp, synthetic construct
  misc_feature 1..2217: note = Description of Artificial Sequence: Synthetic polynucleotide
  source 1..2217: mol_type = other DNA
atggctgccgatggttatcttccagattggctcgaggacactctctctgaaggaataagacagtggtgggcgctgaaacctggagccccgaagcccaaagccaaccagcaaaagcaggacgacggccggggtctggtgcttcctggctacaagtacctcggacccttcaacggactcgacaagggggagcccgtcaacgcggcggatgcagcggccctcgagcacgacaaggcctacgaccagcagctcaaagcgggtgacaatccgtacctgcggtataaccacgccgacgccgagtttcaggagcgtctgcaagaagatacgtcttttgggggcaacctcgggcgagcagtcttccaggccaagaagcgggttctcgaacctctcggtctggttgaggaaggcgctaagacggctcctggaaagaagagaccggtagagccatcaccccagcgttctccagactcctctacgggcatcggcaagaaaggccaacagcccgccagaaaaagactcaattttggtcagactggcgactcagagtcagttccagaccctcaacctctcggagaaccaccagcagcccccacaagtttgggatctaatacaatggcttcaggcggtggcgcaccaatggcagacaataacgagggtgccgatggagtgggtaattcctcaggaaattggcattgcgattcccaatggctgggcgacagagtcatcaccaccagcacccgcacctgggccttgcccacctacaataaccacctctacaagcaaatctccagtgcttcaacgggggccagcaacgacaaccactacttcggctacagcaccccctgggggtattttgactttaaccgcttccactgccacttctcgccaagagactggcaaagactcatcaacaacaattggggattccggcccaagagactcaacttcaaactcttcaacatccaagtcaaggaggtcacgacgaatgatggcgtcacgaccatcgccaataacctcaccagcaccatccaggtgtttacggactcggagtaccagctgccgtacgttctcggctctgcccaccagggctgcctgcctccgttcccggcggacgtgttcatgattccccagtatggatacctcaccctgaacaacggaagtcaagcggtgggacgctcatccttttactgcctggagtacttcccttcgcagatgctaaggactggaaataacttccaattcagctataccttcgaggatgtaccttttcacagcagctacgctcacagccagagtttggatcgcttgatgaatcctcttattgatcagtatctgtactacctgaacagaacgcaaggaacaacctctggaacaaccaaccaatcacggctgctttttagccaggctgggcctcagtctatgtctttgcaggccagaaattggctacctgggccctgctaccggcaacagagactttcaaagactgctaacgacaacaacaacagtaactttccttggacagcagccagcaaatatcatctcaatggccgcgactcgctggtgaatccaggaccagctatggccagtcacaaggacgatgaagaaaaatttttccctatgcacggcaatctaatatttggcaaagaagggacaacggcaagtaacgcagaattagataatgtaatgattacggatgaagaagagattcgtaccaccaatcctgtggcaacagagcagtatggaactgtggcaaataacttgcagagctcaaatacagctcccacgactagaactgtcaatgatcagggggccttacctggcatggtgtggcaagatcgtgacgtgtaccttcaggggcccatctgggcaaagattccacacacggacggacattttcacccctctcccctcatgggtggattcggacttaaacaccctcctccgcagattctcatcaagaacaccccggtacctgcgaatccttcgaccaccttcagtgcggcaaagtttgcttccttcatcacacagtactccacgggacaggtcagcgtggagatcgagtgggagctgcagaaggaaaacagcaagcgctggaacccggagatccagtacacttccaactattacaagtctaataatgttgaatttgctgttaatactgaaggtgtatatagtgaaccccgccccattggcaccagatacctgactcgtaatctgtaa

SEQ ID NO: 5271 - protein, 738 aa, synthetic construct
  REGION 1..738: note = Description of Artificial Sequence: Synthetic polypeptide
MAADGYLPDWLEDTLSEGIRQWWALKPGAPKPKANQQKQDDGRGLVLPGYKYLGPFNGLDKGEPVNAADAAALEHDKAYDQQLKAGDNPYLRYNHADAEFQERLQEDTSFGGNLGRAVFQAKKRVLEPLGLVEEGAKTAPGKKRPVEPSPQRSPDSSTGIGKKGQQPARKRLNFGQTGDSESVPDPQPLGEPPAAPTSLGSNTMASGGGAPMADNNEGADGVGNSSGNWHCDSQWLGDRVITTSTRTWALPTYNNHLYKQISSASTGASNDNHYFGYSTPWGYFDFNRFHCHFSPRDWQRLINNNWGFRPKRLNFKLFNIQVKEVTTNDGVTTIANNLTSTIQVFTDSEYQLPYVLGSAHQGCLPPFPADVFMIPQYGYLTLNNGSQAVGRSSFYCLEYFPSQMLRTGNNFQFSYTFEDVPFHSSYAHSQSLDRLMNPLIDQYLYYLNRTQGTTSGTTNQSRLLFSQAGPQSMSLQARNWLPGPCYRQQRLSKTANDNNNSNFPWTAASKYHLNGRDSLVNPGPAMASHKDDEEKFFPMHGNLIFGKEGTTASNAELDNVMITDEEEIRTTNPVATEQYGTVANNLQSSNTAPTTRTVNDQGALPGMVWQDRDVYLQGPIWAKIPHTDGHFHPSPLMGGFGLKHPPPQILIKNTPVPANPSTTFSAAKFASFITQYSTGQVSVEIEWELQKENSKRWNPEIQYTSNYYKSNNVEFAVNTEGVYSEPRPIGTRYLTRNL

SEQ ID NO: 5272 - DNA, 2208 bp, synthetic construct; identical to SEQ ID NO: 5102
  misc_feature 1..2208: note = Description of Artificial Sequence: Synthetic polynucleotide
  source 1..2208: mol_type = other DNA

SEQ ID NO: 5273 - protein, 735 aa, synthetic construct [sequence omitted]

SEQ ID NO: 5274 - DNA, 2208 bp, synthetic construct
  misc_feature 1..2208: note = Description of Artificial Sequence: Synthetic polynucleotide
  source 1..2208: mol_type = other DNA
atggctgccgatggttatcttccagattggctcgaggacaacctctctgagggcattcgcgagtggtgggcgctgaaacctggagccccgaagcccaaagccaaccagcaaaagcaggacgacggccggggtctggtgcttcctggctacaagtacctcggacccttcaacggactcgacaagggggagcccgtcaacgcggcggacgccgcggccctcgagcacgacaaggcctacgaccagcagctgcaggcgggtgacaatccgtacctgcggtataaccacgccgacgccgagtttcaggagcgtctgcaagaagatacgtcttttgggggcaacctcgggcgagcagtcttccaggccaaaaagaggcttcttgaacctcttggtctggttgaggaagcagctaaaacggctcctggaaagaagaggcctgtagagcagtctcctcaggaaccggactcctccgcgggtattggcaaatcgggtgcacagcccgccaaaaagagactcaatttcggtcagactggcgactcagagtcagtcccagaccctcaacctctcggagaaccaccagcagcccccacaagtttgggatctaatacaatggcttcaggcggtggcgcaccaatggcagacaataacgaaggcgccgacggagtgggtaatgcctcaggaaattggcattgcgattccacatggctgggcgacagagtcatcaccaccagcacccgcacctgggccttgcccacctacagcaaccatctctacaagcaaatctccagccaatcaggagcttcaaacgacaacgactactttggctacagcaccccttgggggtattttgatttcaacagattccactgccacttttcaccacgtgactggcaaagactcatcaacaacaactggggattccgacccaagagactcaacttcaagctctttaacattcaagtcaaagaggtcacgcagaatgacggtacgacgacgattgccaataaccttaccagcacggttcaggtgtttactgactcggagtaccagctcccgtacgtcctcggctcggcgcatcaaggatgcctcccgccgttcccagcagacgtcttcatggtgccacagtatggatacctcaccctgaacaacgggagtcaggcagtaggacgctcttcattttactgcctggagtactttccttctcagatgctgcgtaccggaaacaactttaccttcagctacacttttgaggacgttcctttccacagcagctacgctcacagccagagtctggaccgtctcatgaatcctctcatcgaccagtacctgtattacttgagcagaacaaacactccaagtggaaccaccacgcagtcaaggcttcagttttctcaggccggagcgagtgacattcgggaccagtctaggaactggcttcctggaccctgttaccgccagcagcgagtatcaaagacatctgaggataacaacaacagtgaatactcgtggactggagctaccaagtaccacctcaatggcagagactctctggtgaatccgggcccggccatggcaagccacaaggacgatgaagaaaagttttttcctcagagcggggttctcatctttgggaagcaaggctcagagaaaacaaatgtggacattgaaaaggtcatgattacagacgaagaggaaatcaggacaaccaatcccgtggctacggagcagtatggttctgtatctaccaacctccagagaggcaacagacaagcagctaccgcagatgtcaacacacaaggcgttcttccaggcatggtctggcaggacagagatgtgtaccttcaggggcccatctgggcaaagattccacacacggacggacattttcacccctctcccctcatgggtggattcggacttaaacaccctcctccacagattctcatcaagaacaccccggtacctgcgaatccttcgaccaccttcagtgcggcaaagtttgcttccttcatcacacagtactccacgggacaggtcagcgtggagatcgagtgggagctgcagaaggaaaacagcaaacgctggaatcccgaaattcagtacacttccaactacaacaagtctgttaatgtggactttactgtggacactaatggcgtgtattcagagcctcgccccattggcaccagatacctgactcgtaatctgtaa

SEQ ID NO: 5275 - protein, 735 aa, synthetic construct
  REGION 1..735: note = Description of Artificial Sequence: Synthetic polypeptide
MAADGYLPDWLEDNLSEGIREWWALKPGAPKPKANQQKQDDGRGLVLPGYKYLGPFNGLDKGEPVNAADAAALEHDKAYDQQLQAGDNPYLRYNHADAEFQERLQEDTSFGGNLGRAVFQAKKRLLEPLGLVEEAAKTAPGKKRPVEQSPQEPDSSAGIGKSGAQPAKKRLNFGQTGDSESVPDPQPLGEPPAAPTSLGSNTMASGGGAPMADNNEGADGVGNASGNWHCDSTWLGDRVITTSTRTWALPTYSNHLYKQISSQSGASNDNDYFGYSTPWGYFDFNRFHCHFSPRDWQRLINNNWGFRPKRLNFKLFNIQVKEVTQNDGTTTIANNLTSTVQVFTDSEYQLPYVLGSAHQGCLPPFPADVFMVPQYGYLTLNNGSQAVGRSSFYCLEYFPSQMLRTGNNFTFSYTFEDVPFHSSYAHSQSLDRLMNPLIDQYLYYLSRTNTPSGTTTQSRLQFSQAGASDIRDQSRNWLPGPCYRQQRVSKTSEDNNNSEYSWTGATKYHLNGRDSLVNPGPAMASHKDDEEKFFPQSGVLIFGKQGSEKTNVDIEKVMITDEEEIRTTNPVATEQYGSVSTNLQRGNRQAATADVNTQGVLPGMVWQDRDVYLQGPIWAKIPHTDGHFHPSPLMGGFGLKHPPPQILIKNTPVPANPSTTFSAAKFASFITQYSTGQVSVEIEWELQKENSKRWNPEIQYTSNYNKSVNVDFTVDTNGVYSEPRPIGTRYLTRNL

SEQ ID NO: 5276 - DNA, 2208 bp, synthetic construct
  misc_feature 1..2208: note = Description of Artificial Sequence: Synthetic polynucleotide
  source 1..2208: mol_type = other DNA
atggctgccgatggttatcttccagattggctcgaggacaacctctctgagggcattcgcgagtggtgggcgctgaaacctggagccccgaagcccaaagccaaccagcaaaagcaggacgacggccggggtctggtgcttcctggctacaagtacctcggacccttcaacggactcgacaagggggagcccgtcaacgcggcggacgcagcggccctcgagcacgacaaggcctacgaccagcagctgcaggcgggtgacaatccgtacctgcggtataaccacgccgacgccgagttccaggagcgtctgcaagaagatacgtcttttgggggcaacctcgggcgagcagtcttccaggccaagaagagggttctcgaaccttttggtctggttgaggaaggtgctaagacggctcctggaaagaaacgtccggtagagcagtcgccacaagagccagactcctcctcgggcattggcaagacaggccagcagcccgctaaaaagagactcaattttggtcagactggcgactcagagtcagtcccagaccctcaacctctcggagaaccaccagcagcccccacaagtttgggatctaatacaatggcttcaggcggtggcgcaccaatggcagacaataacgagggcgccgacggagtgggtaattcctcgggaaattggcattgcgattccacatggatgggcgacagagtcatcaccaccagcacccgaacctgggccctgcccacctacaacaaccacctctacaaacaaatttccagccaatcaggagcttcaaacgacaaccactactttggctacagcaccccttgggggtattttgactttaacagattccactgccacttttcaccacgtgactggcagcgactcattaacaacaactggggattccggcccaagaaactcaacttcaagctctttaacatccaggtcaaggaggtcacgcagaatgaaggcaccaagaccatcgccaataacctcaccagcaccatccaggtgtttacggactcggagtaccagctgccgtacgttctcggctctgcccaccagggctgcctgcctccgttcccggcggacgtgttcatgattccccagtacggctacctaacactcaacaacggtagtcaggccgtgggacgctcctccttctactgcctggaatactttccttcgcagatgctgagaaccggcaacaacttccagtttacttacaccttcgaggacgtgcctttccacagcagctacgcccacagccagagcttggaccggctgatgaatcctctgattgaccagtacctgtattacttgtctcggactcaaacaacaggaggcacgacaaatacgcagactctgggcttcagccaaggtgggcctaatacaatggccaatcaggcaaagaactggctgcctggaccctgttaccgccagcagcgagtatcaaagacatctgcggataacaacaacagtgaatactcgtggactggagctaccaagtaccacctcaatggcagagactctctggtgaatccgggcccggccatggcaagccacaaggacgatgaagaaaagttttttcctcagagcggggttctcatctttgggaagcaaggctcagagaaaacaaatgtggacattgaaaaggttatgattacagacgaagaggaaatcaggacaaccaatcccgtggctacggagcagtatggttctgtatctaccaacctccagagaggcaacagacaagcagctaccgcagatgtcaacacacagggcgttcttccaggcatggtctggcaggacagagatgtgtaccttcagggtcccatttgggccaaaattcctcacacagatggacactttcacccgtcccctcttatgggcggctttggactcaagaacccgcctcctcagatcctcatcaaaaacacgcctgttcctgcgaatcctccggcagagttttcagctacaaagtttgcttcattcatcacccaatactccacaggacaagtgagtgtggaaattgaatgggagctgcagaaagaaaacagcaagcgctggaatcccgaagtgcagtacacatccaattatgcaaaatctgccaacgttgattttactgtggacactaatggcgtgtattcagagcctcgccccattggcaccagatacctcacccgtaatctgtaa

SEQ ID NO: 5277 - protein, 735 aa, synthetic construct
  REGION 1..735: note = Description of Artificial Sequence: Synthetic polypeptide
MAADGYLPDWLEDNLSEGIREWWALKPGAPKPKANQQKQDDGRGLVLPGYKYLGPFNGLDKGEPVNAADAAALEHDKAYDQQLQAGDNPYLRYNHADAEFQERLQEDTSFGGNLGRAVFQAKKRVLEPFGLVEEGAKTAPGKKRPVEQSPQEPDSSSGIGKTGQQPAKKRLNFGQTGDSESVPDPQPLGEPPAAPTSLGSNTMASGGGAPMADNNEGADGVGNSSGNWHCDSTWMGDRVITTSTRTWALPTYNNHLYKQISSQSGASNDNHYFGYSTPWGYFDFNRFHCHFSPRDWQRLINNNWGFRPKKLNFKLFNIQVKEVTQNEGTKTIANNLTSTIQVFTDSEYQLPYVLGSAHQGCLPPFPADVFMIPQYGYLTLNNGSQAVGRSSFYCLEYFPSQMLRTGNNFQFTYTFEDVPFHSSYAHSQSLDRLMNPLIDQYLYYLSRTQTTGGTTNTQTLGFSQGGPNTMANQAKNWLPGPCYRQQRVSKTSADNNNSEYSWTGATKYHLNGRDSLVNPGPAMASHKDDEEKFFPQSGVLIFGKQGSEKTNVDIEKVMITDEEEIRTTNPVATEQYGSVSTNLQRGNRQAATADVNTQGVLPGMVWQDRDVYLQGPIWAKIPHTDGHFHPSPLMGGFGLKNPPPQILIKNTPVPANPPAEFSATKFASFITQYSTGQVSVEIEWELQKENSKRWNPEVQYTSNYAKSANVDFTVDTNGVYSEPRPIGTRYLTRNL

SEQ ID NO: 5278 - DNA, 2214 bp, synthetic construct; identical to SEQ ID NO: 5268
  misc_feature 1..2214: note = Description of Artificial Sequence: Synthetic polynucleotide
  source 1..2214: mol_type = other DNA

SEQ ID NO: 5279 - protein, 737 aa, synthetic construct; identical to SEQ ID NO: 5269
  REGION 1..737: note = Description of Artificial Sequence: Synthetic polypeptide

SEQ ID NO: 5280 - protein, 736 aa, synthetic construct; identical to SEQ ID NO: 5093
  REGION 1..736: note = Description of Artificial Sequence: Synthetic polypeptide

SEQ ID NO: 5281 - protein, 736 aa, synthetic construct
  REGION 1..736: note = Description of Artificial Sequence: Synthetic polypeptide
MAADGYLPDWLEDNLSEGIREWWDLKPGAPKPKANQQKQDDGRGLVLPGYKYLGPFNGLDKGEPVNAADAAALEHDKAYDQQLKAGDNPYLRYNHADAEFQERLQEDTSFGGNLGRAVFQAKKRVLEPLGLVEEGAKTAPGKKRPVEQSPQEPDSSSGIGKTGQQPAKKRLNFGQTGDSESVPDPQPLGEPPAAPSGLGPNTMASGGGAPMADNNEGADGVGNSSGNWHCDSTWLGDRVITTSTRTWALPTYNNHLYKQISNGTSGGSTNDNTYFGYSTPWGYFDFNRFHCHFSPRDWQRLINNNWGFRPKRLNFKLFNIQVKEVTTNEGTKTIANNLTSTVQVFTDSEYQLPYVLGSAHQGCLPPFPADVFMVPQYGYLTLNNGSQALGRSSFYCLEYFPSQMLRTGNNFQFSYTFEDVPFHSSYAHSQSLDRLMNPLIDQYLYYLVRTQTTGTGGTQTLAFSQAGPSSMANQARNWVPGPCYRQQRVSTTTNQNNNSNFAWTGAAKFKLNGRDSLMNPGVAMASHKDDEDRFFPSSGVLIFGKQGAGNDGVDYSQVLITDEEEIKATNPVATEEYGAVAINNQRANTQAQTGLVHNQGVIPGMVWQNRDVYLQGPIWAKIPHTDGNFHPSPLMGGFGLKHPPPQILIKNTPVPADPPLTFNQAKLNSFITQYSTGQVSVEIEWELQKENSKRWNPEIQYTSNYYKSTNVDFAVNTEGVYSEPRPIGTRYLTRNL

SEQ ID NO: 5282 - protein, 736 aa, synthetic construct
  REGION 1..736: note = Description of Artificial Sequence: Synthetic polypeptide
MAADGYLPDWLEDNLSEGIREWWDLKPGAPKPKANQQKQDDGRGLVLPGYKYLGPFNGLDKGEPVNAADAAALEHDKAYDQQLKAGDNPYLRYNHADAEFQERLQEDTSFGGNLGRAVFQAKKRVLEPLGLVEEGAKTAPGKKRPVEQSPQEPDSSSGIGKTGQQPAKKRLNFGQTGDSESVPDPQPLGEPPAAPSGLGPNTMASGGGAPMADNNEGADGVGNSSGNWHCDSTWLGDRVITTSTRTWALPTYNNHLYKQISNGTSGGSTNDNTYFGYSTPWGYFDFNRFHCHFSPRDWQRLINNNWGFRPKRLNFKLFNIQVKEVTTNEGTKTIANNLTSTVQVFTDSEYQLPYVLGSAHQGCLPPFPADVFMVPQYGYLTLNNGSQALGRSSFYCLEYFPSQMLRTGNNFQFSYTFEDVPFHSSYAHSQSLDRLMNPLIDQYLYYLVRTQTTGTGGTQTLAFSQAGPSSMANQARNWVPGPCYRQQRVSTTTNQNNNSNFAWTGAAKFKLNGRDSLMNPGVAMASHKDDEDAFFPSSGVLIFGKQGAGNDGVDYSQVLITDEEEIKATNPVATEEYGAVAINNQAANTQAQTGLVHNQGVIPGMVWQNRDVYLQGPIWAKIPHTDGNFHPSPLMGGFGLKHPPPQILIKNTPVPADPPLTFNQAKLNSFITQYSTGQVSVEIEWELQKENSKRWNPEIQYTSNYYKSTNVDFAVNTEGVYSEPRPIGTRYLTRNL

SEQ ID NO: 5283 - protein, 538 aa, synthetic construct
  REGION 1..538: note = Description of Artificial Sequence: Synthetic polypeptide
MRAAAGGNGGDAGQGAEGVGNASGDWHCDSTWSESHVTTTSTRTWVLPTYNNHLYLRLGSSNASDTFNGFSTPWGYFDFNRFHCHFSPRDWQRLINNHWGLRPKSMQVRIFNIQVKEVTTSNGETTVSNNLTSTVQIFADSTYELPYVMDAGQEGSLPPFPNDVFMVPQYGYCGLVTGGSSQNQTDRNAFYCLEYFPSQMLRTGNNFEMVYKFENVPFHSMYAHSQSLDRLMNPLLDQYLWELQSTTSGGTLNQGNSATNFAKLTKTNFSGYRKNWLPGPMMKQQRFSKTASQNYKIPQGRNNSLLHYETRTTLDGRWSNFAPGTAMATAANDATDFSQAQLIFAGPNITGNTTTDANNLMFTSEDELRATNPRDTDLFGHLATNQQNATTVPTVDDVDGVGVYPGMVWQDRDIYYQGPIWAKIPHTDGHFHPSPLIGGFGLKSPPPQIFIKNTPVPANPATTFSPARINSFITQYSTGQVAVKIEWEIQKERSKRWNPEVQFTSNYGAQDSLLWAPDNAGAYKEPRAIGSRYLTNHL

SEQ ID NO: 5284 - protein, 736 aa, synthetic construct
  REGION 1..736: note = Description of Artificial Sequence: Synthetic polypeptide
MSFVDHPPDWLESIGDGFREFLGLEAGPPKPKANQQKQDNARGLVLPGYKYLGPGNGLDKGDPVNFADEVAREHDLSYQKQLEAGDNPYLKYNHADAEFQEKLASDTSFGGNLGKAVFQAKKRILEPLGLVETPDKTAPAAKKRPLEQSPQEPDSSSGVGKKGKQPARKRLNFDDEPGAGDGPPPEGPSSGAMSTETEMRAAAGGNGGDAGQGAEGVGNASGDWHCDSTWSESHVTTTSTRTWVLPTYNNHLYLRLGSSNASDTFNGFSTPWGYFDFNRFHCHFSPRDWQRLINNHWGLRPKSMQVRIFNIQVKEVTTSNGETTVSNNLTSTVHIFADSTYELPYVMDAGQEGSLPPFPNDVFMVPQYGYCGLVTGGSSQNQTDRNAFYCLEYFPSQMLRTGNNFEMVYKFENVPFHSMYAHSQSLDRLMNPLLDQYLWELQSTTSGGTLNQGNSATNFAKLTNKNFSGYRKNWLPGPMMKQQRFSKTASQNYKIPQGGNNSLLHYETRTTLDRRWSNFAPGTAMATAANDATDFSQAQLIFAGPNITGNTTTDANNLMFTSEDELRATNPRDTDLFGHLATNQQNATTVPTVDDVDGVGVYPGMVWQDRDIYYQGPIWAKIPHTDGHFHPSPLIGGFGLKSPPPQIFIKNTPVPANPATTFSPARINSFITQYSTGQVAVKIEWEIQKERSKRWNPEVQFTSNYGAQDSLLWAPDNAGAYKEPRAIGSRYLTNHL

SEQ ID NO: 5285 - protein, 736 aa, synthetic construct
  REGION 1..736: note = Description of Artificial Sequence: Synthetic polypeptide
MSFVDHPPDWLESIGDGFREFLGLEAGPPKPKANQQKQDNARGLVLPGYKYLGPGNGLDKGDPVNFADEVAREHDLSYQKQLEAGDNPYLKYNHADAEFQEKLASDTSFGGNLGKAVFQAKKRILEPLGLVETPDKTAPAAKKRPLEQSPQEPDSSSGVGKKGKQPARKRLNFDDEPGAGDGPPPEGPSSGAMSTETEMRAAAGGNGGDAGQGAEGVGNASGDWHCDSTWSESHVTTTSTRTWVLPTYNNHLYLRLGSSNASDTFNGFSTPWGYFDFNRFHCHFSPRDWQRLINNHWGLRPKSMQVRIFNIQVKEVTTSNGETTVSNNLTSTVQIFADSTYELPYVMDAGQEGSLPPFPNDVFMVPQYGYCGLVTGGSSQNQTDRNAFYCLEYFPSQMLRTGNNFEMVYKFENVPFHSMYAHSQSLDRLMNPLLDQYLWELQSTTSGGTLNQGNSATNFAKLTKTNFSGYRKNWLPGPMMKQQRFSKTASQNYKIPQGRNNSLLHYETRTTLDGRWSNFAPGTAMATAANDATDFSQAQLIFAGPNITGNTTTDANNLMFTSEDELRATNPRDTDLFGHLATNQQNATTVPTVDDVDGVGVYPGMVWQDRDIYYQGPIWAKIPHTDGHFHPSPLIGGFGLKSPPPQIFIKNTPVPANPATTFSPARINSFITQYSTGQVAVKIEWEIQKERSKRWNPEVQFTSNYGAQDSLLWAPDNAGAYKEPRAIGSRYLTNHL

SEQ ID NO: 5286 - DNA, 2214 bp, synthetic construct
  misc_feature 1..2214: note = Description of Artificial Sequence: Synthetic polynucleotide
  source 1..2214: mol_type = other DNA
atggctgccgatggttatcttccagattggctcgaggacactctctctgaaggaataagacagtggtggaagctcaaacctggcccaccaccaccaaagcccgcagagcggcataaggacgacagcaggggtcttgtgcttcctgggtacaagtacctcggacccttcaacggactcgacaagggagagccggtcaacgaggcagacgccgcggccctcgagcacgacaaagcctacgaccggcagctcgacagcggagacaacccgtacctcaagtacaaccacgccgacgcggagtttcaggagcgccttaaagaagatacgtcttttgggggcaacctcgggcgagcagtcttccaggccaaaaagaggcttcttgaacctcttggtctggttgaggaagcggctaagacggctcctggaaagaagaggcctgtagagcagtctcctcaggaaccggactcctcctcgggcatcggcaagacaggccagcagcccgctaaaaagagactcaatttcggtcagactggcgacacagagtcagtcccagaccctcaaccaatcggagaacctcccgcagccccctcaggtgtgggatctcttacaatggcttcaggtggtggcgcaccagtggcagacaataacgaaggtgccgatggagtgggtagttcctcgggaaattggcattgcgattcccaatggctgggggacagagtcatcaccaccagcacccgaacctgggccctgcccacctacaacaatcacctctacaagcaaatctccaacgggacatcgggaggagccaccaacgacaacacctacttcggctacagcaccccctgggggtattttgactttaacagattccactgccacttttcaccacgtgactggcagcgactcatcaacaacaactggggattccggcccaagagactcagcttcaagctcttcaacatccaggtcaaggaggtcacgcagaatgaaggcaccaagaccatcgccaataaccttaccagcacggtccaggtcttcacggactcggagtaccagctgccgtacgttctcggctctgcccaccagggctgcctgcctccgttcccggcggacgtgttcatgattccccagtacggctacctaacactcaacaacggtagtcaggccgtgggacgctcctccttctactgcctggaatactttccttcgcagatgctgagaaccggcaacaacttccagtttacttacaccttcgaggacgtgcctttccacagcagctacgcccacagccagagcttggaccggctgatgaatcctctgattgaccagtacctgtactacttgtctcggactcaaacaacaggaggcacggcaaatacgcagactctgggcttcagccaaggtgggcctaatacaatggccaatcaggcaaagaactggctgccaggaccctgttaccgccaacaacgcgtctcaacgacaaccgggcaaaacaacaatagcaactttgcctggactgctgggaccaaataccatctgaatggaagaaattcattggctaatcctggcatcgctatggcaacacacaaagacgacaaggagcgtttttttcccagtaacgggatcctgatttttggcaaacaaaatgctgccagagacaatgcggattacagcgatgtcatgctcaccagcgaggaagaaatcaaaaccactaaccctgtggctacagaggaatacggtatcgtggcagataacttgcagcagcaaaacacggctcctcaaattggaactgtcaacagccagggggccttacccggtatggtttggcagaaccgggacgtgtacctgcagggtcccatctgggccaagattcctcacacggacggcaacttccacccgtctccgctgatgggcggctttggcctgaaacatcctccgcctcagatcctgatcaagaacacgcctgtacctgcggatcctccgaccaccttcaaccagtcaaagctgaactctttcatcacgcaatacagcaccggacaggtcagcgtggaaattgaatgggagctgcagaaggaaaacagcaagcgctggaaccccgagatccagtacacctccaactactacaaatctacaagtgtggactttgctgttaatacagaaggcgtgtactctgaaccccaccccattggcacccgttacctcacccgtcccctgtaa

SEQ ID NO: 5287 - protein, 737 aa, synthetic construct
  REGION 1..737: note = Description of Artificial Sequence: Synthetic polypeptide
MAADGYLPDWLEDTLSEGIRQWWKLKPGPPPPKPAERHKDDSRGLVLPGYKYLGPFNGLDKGEPVNEADAAALEHDKAYDRQLDSGDNPYLKYNHADAEFQERLKEDTSFGGNLGRAVFQAKKRLLEPLGLVEEAAKTAPGKKRPVEQSPQEPDSSSGIGKTGQQPAKKRLNFGQTGDTESVPDPQPIGEPPAAPSGVGSLTMASGGGAPVADNNEGADGVGSSSGNWHCDSQWLGDRVITTSTRTWALPTYNNHLYKQISNGTSGGATNDNTYFGYSTPWGYFDFNRFHCHFSPRDWQRLINNNWGFRPKRLSFKLFNIQVKEVTQNEGTKTIANNLTSTVQVFTDSEYQLPYVLGSAHQGCLPPFPADVFMIPQYGYLTLNNGSQAVGRSSFYCLEYFPSQMLRTGNNFQFTYTFEDVPFHSSYAHSQSLDRLMNPLIDQYLYYLSRTQTTGGTANTQTLGFSQGGPNTMANQAKNWLPGPCYRQQRVSTTTGQNNNSNFAWTAGTKYHLNGRNSLANPGIAMATHKDDKERFFPSNGILIFGKQNAARDNADYSDVMLTSEEEIKTTNPVATEEYGIVADNLQQQNTAPQIGTVNSQGALPGMVWQNRDVYLQGPIWAKIPHTDGNFHPSPLMGGFGLKHPPPQILIKNTPVPADPPTTFNQSKLNSFITQYSTGQVSVEIEWELQKENSKRWNPEIQYTSNYYKSTSVDFAVNTEGVYSEPHPIGTRYLTRPL

SEQ ID NO: 5288 - protein, 736 aa, synthetic construct
  REGION 1..736: note = Description of Artificial Sequence: Synthetic polypeptide
MAADGYLPDWLEDNLSEGIREWWDLKPGAPKPKANQQKQDDGRGLVLPGYKYLGPFNGLDKGEPVNAADAAALEHDKAYDQQLKAGDNPYLRYNHADAEFQERLQEDTSFGGNLGRAVFQAKKRVLEPLGLVEEGAKTAPGKKRPVEQSPQEPDSSSGIGKTGQQPAKKRLNFGQTGDTESVPDPQPIGEPPAAPSGVGSLTMASGGGAPVADNNEGADGVGSSSGNWHCDSQWLGDRVITTSTRTWALPTYNNHLYKQISSASTGASNDNHYFGYSTPWGYFDFNRFHCHFSPRDWQRLINNNWGFRPKRLNFKLFNIQVKEVTDNNGVKTIANNLTSTVQVFTDSDYQLPYVLGSAHQGCLPPFPADVFMIPQYGYLTLNNGSQAVGRSSFYCLEYFPSQMLRTGNNFQFTYTFEDVPFHSSYAHSQSLDRLMNPLIDQYLYYLSRTQTTGGTANTQTLGFSQGGPNTMANQAKNWLPGPCYRQQRVSTTTGQNNNSNFAWTAGTKYHLNGRNSLANPGIAMATHKDDKERFFPSNGILIFGKQNAARDNADYSDVMLTSEEEIKTTNPVATEEYGIVADNLQQQNTAPQIGTVNSQGALPGMVWQNRDVYLQGPIWAKIPHTDGNFHPSPLMGGFGLKHPPPQILIKNTPVPADPPTTFNQSKLNSFITQYSTGQVSVEIEWELQKENSKRWNPEIQYTSNYYKSTSVDFAVNTEGVYSEPHPIGTRYLTRPL

SEQ ID NO: 5289 - protein, 736 aa, synthetic construct
  REGION 1..736: note = Description of Artificial Sequence: Synthetic polypeptide
MAADGYLPDWLEDTLSEGIRQWWKLKPGPPPPKPAERHKDDSRGLVLPGYKYLGPFNGLDKGEPVNEADAAALEHDKAYDRQLDSGDNPYLKYNHADAEFQERLQGDTSFGGNLGRAVFQAKKRVLEPLGLVEEGAKTAPGKKRPVEQSPQEPDSSSGIGETGQQPAKKRLNFGQTGDSESVPDPQPLGEPPATPAAVGPTTMASGGGAPMADNNEGADGVGSSSGNWHCDSQWLGDRVITTSTRTWALPTYNNHLYKQISSASTGASNDNHYFGYSTPWGYFDFNRFHCHFSPRDWQRLINNNWGFRPKRLSFKLFNIQVKEVTDNNGVKTIANNLTSTVQVFTDSEYQLPYVLGSAHQGCLPPFPADVFMIPQYGYLTLNNGSQAVGRSSFYCLEYFPSQMLRTGNNFTFSYTFEDVPFHSSYAHSQSLDRLMNPLIDQYLYYLSRTQTTGGTANTQTLGFSQGGPNTMANQAKNWLPGPCYRQQRVSTTTGQNNNSNFAWTAGTKYHLNGRNSLANPGIAMATHKDDKERFFPSNGILIFGKQNAARDNADYSDVMLTSEEEIKTTNPVATEEYGIVADNLQQQNTAPQIGTVNSQGALPGMVWQNRDVYLQGPIWAKIPHTDGNFHPSPLMGGFGLKHPPPQILIKNTPVPADPPTTFNQSKLNSFITQYSTGQVSVEIEWELQKENSKRWNPEIQYTSNYYKSTSVDFAVNTEGVYSEPHPIGTRYLTRPL

SEQ ID NO: 5290 - DNA, 2181 bp, synthetic construct
  misc_feature 1..2181: note = Description of Artificial Sequence: Synthetic polynucleotide
  source 1..2181: mol_type = other DNA
atgtcttttgttgatcaccctccagattggttggaagaagttggtgaaggtcttcgcgagtttttgggccttgaagcgggcccaccgaaaccaaaacccaatcagcagcatcaagatcaagcccgtggtcttgtgctgcctggttataactatctcggacccggaaacggtctcgatcgaggagagcctgtcaacagggcagacgaggtcgcgcgagagcacgacatctcgtacaacgagcagcttgaggcgggagacaacccctacctcaagtacaaccacgcggacgccgagtttcaggagaagctcgccgacgacacatccttcgggggaaacctcggaaaggcagtctttcaggccaagaaaagggttctcgaaccttttggcctggttgaagagggtgctaagacggcccctaccggaaagcggatagacgaccactttccaaaaagaaagaaggctcggaccgaagaggactccaagccttccacctcgtcagacgccgaagctggacccagcggatcccagcagctgcaaatcccagcacaaccagcctcaagtttgggagctgatacaatgtctgcgggaggtggcggcccattgggcgacaataaccaaggtgccgatggagtgggcaatgcctcgggagattggcattgcgattccacgtggatgggggacagagtcgtcaccaagtccacccgcacctgggtgctgcccagctacaacaaccaccagtaccgagagatcaaaagcggctccgtcgacggaagcaacgccaacgcctactttggatacagcaccccctgggggtactttgactttaaccgcttccacagccactggagcccccgagactggcaaagactcatcaacaactattggggcttcagaccccggtctctcagagtcaaaatcttcaacatccaagtcaaagaggtcacggtgcaggactccaccaccaccatcgccaacaacctcacctccaccgtccaagtgtttacggacgacgactaccaactcccgtacgtcgtcggcaacgggaccgagggatgcctgccggccttccccccgcaggtctttacgctgccgcagtacggctacgcgacgctgaaccgagacaacggagacaacccgacagagcggagcagcttcttttgcctagagtactttcccagcaagatgctgaggacgggcaacaactttgagtttacctacagctttgaagaggtgcccttccactgcagcttcgccccgagccagaacctctttaagctggccaacccgctggtggaccagtacctgtaccgcttcgtgagcacctcggccacgggcgccatccagttccaaaagaacctggcgggcagatacgccaacacctacaaaaactggttcccggggcccatgggccgaacccagggctggaacacgagctctggggtcagcagcaccaacagagtcagcgtcaacaacttttccgtctcaaaccggatgaacctggagggggccagctaccaagtgaacccccagcccaacgggatgacaaacacgctccaaggcagcaaccgctacgcgctggaaaacaccatgatcttcaacgctcaaaacgccacgccgggaactacctcggtgtacccagaggacaatctactgctgaccagcgagagcgagactcagcccgtcaaccgggtggcttacaacacgggcggtcagatggccaccaacgcccagaacgccaccacggctcccacggtcgggacctacaacctccaggaagtgcttcctggcagcgtatggatggagagggacgtgtacctccaaggacccatctgggccaagatcccagagacgggggcgcactttcacccctctccggccatgggcggattcggactcaaacacccgccgcccatgatgctcatcaaaaacacgccggtgcccggcaacatcaccagcttctcggacgtgcccgtcagcagcttcatcacccagtacagcaccgggcaggtcaccgtggagatggaatgggagctcaaaaaggaaaactccaagaggtggaacccagagatccagtacaccaacaactacaacgacccccagtttgtggactttgctccagacggctccggcgaatacagaaccaccagagccatcggaacccgatacctcacccgacccctt

SEQ ID NO: 5291 - protein, 726 aa, synthetic construct
  REGION 1..726: note = Description of Artificial Sequence: Synthetic polypeptide
MSFVDHPPDWLEEVGEGLREFLGLEAGPPKPKPNQQHQDQARGLVLPGYNYLGPGNGLDRGEPVNRADEVAREHDISYNEQLEAGDNPYLKYNHADAEFQEKLADDTSFGGNLGKAVFQAKKRVLEPFGLVEEGAKTAPTGKRIDDHFPKRKKARTEEDSKPSTSSDAEAGPSGSQQLQIPAQPASSLGADTMSAGGGGPLGDNNQGADGVGNASGDWHCDSTWMGDRVVTKSTRTWVLPSYNNHQYREIKSGSVDGSNANAYFGYSTPWGYFDFNRFHSHWSPRDWQRLINNYWGFRPRSLRVKIFNIQVKEVTVQDSTTTIANNLTSTVQVFTDDDYQLPYVVGNGTEGCLPAFPPQVFTLPQYGYATLNRDNGDNPTERSSFFCLEYFPSKMLRTGNNFEFTYSFEEVPFHCSFAPSQNLFKLANPLVDQYLYRFVSTSATGAIQFQKNLAGRYANTYKNWFPGPMGRTQGWNTSSGSSTNRVSVNNFSVSNRMNLEGASYQVNPQPNGMTNTLQGSNRYALENTMIFNAQNATPGTTSVYPEDNLLLTSESETQPVNRVAYNTGGQMATNAQNATTAPTVGTYNLQEVLPGSVWMERDVYLQGPIWAKIPETGAHFHPSPAMGGFGLKHPPPMMLIKNTPVPGNITSFSDVPVSSFITQYSTGQVTVEMEWELKKENSKRWNPEIQYTNNYNDPQFVDFAPDGSGEYRTTRAIGTRYLTRPL

SEQ ID NO: 5292 - protein, 735 aa, synthetic construct
  REGION 1..735: note = Description of Artificial Sequence: Synthetic polypeptide
MAADGYLPDWLEDTLSEGIRQWWKLKPGPPPPKPAERHKDDSRGLVLPGYKYLGPFNGLDKGEPVNEADAAALEHDKAYDRQLDSGDNPYLKYNHADAEFQERLKEDTSFGGNLGRAVFQAKKRILEPLGLVEEPVKTAPGKKRPVEHSPAEPDSSSGTGKSGQQPARKRLNFGQTGDADSVPDPQPLGQPPAAPSGLGTNTMASGSGAPMADNNEGADGVGNSSGNWHCDSTWMGDRVITTSTRTWALPTYNNHLYKQISSQSGASNDNHYFGYSTPWGYFDFNRFHCHFSPRDWQRLINNNWGFRPKRLSFKLFNIQVKEVTQNDGTTTIANNLTSTVQVFTDSEYQLPYVLGSAHQGCLPPFPADVFMVPQYGYLTLNNGSQAVGRSSFYCLEYFPSQMLRTGNNFTFSYTFEDVPFHSSYAHSQSLDRLMNPLIDQYLYYLSRTNTPSGTTTMSRLQFSQAGASDIRDQSRNWLPGPCYRQQRVSKTAADNNNSDYSWTGATKYHLNGRDSLVNPGPAMASHKDDEEKYFPQSGVLIFGKQDSGKTNVDIEKVMITDEEEIRTTNPVATEQYGSVSTNLQSGNTQAATSDVNTQGVLPGMVWQDRDVYLQGPIWAKIPHTDGHFHPSPLMGGFGLKHPPPQILIKNTPVPANPSTTFSAAKFASFITQYSTGQVSVEIEWELQKENSKRWNPEIQYTSNYNKSVNVDFTVDTNGVYSEPRPIGTRYLTRNL

SEQ ID NO: 5293 - DNA, 1803 bp, unidentified
  source 1..1803: mol_type = unassigned DNA; note = Bovine adeno-associated virus
acggcgcctgcggcaaaaaagaggcctctagagcagagtcctcaagagccagactcctcgagcggagttggcaagaaaggcaaacagcctgccagaaagagactcaactttgacgacgaacctggagccggagacgggcctcccccagaaggaccatcttccggagctatgtctactgagactgaaatgcgtgcagcagctggcggaaatggtggcgatgcgggacaaggtgccgagggagtgggtaatgcctccggtgattggcattgcgattccacttggtcagagagccacgtcaccaccacctcaacccgcacctgggtcctgccgacctacaacaaccacctgtacctgcggctcggctcgagcaacgccagcgacaccttcaacggattctccaccccctggggatactttgactttaaccgcttccactgccacttctcgccaagagactggcaaaggctcatcaacaaccactggggactgcgccccaaaagcatgcaagtccgcatcttcaacatccaagttaaggaggtcacgacgtctaacggggagacgaccgtatccaacaacctcaccagcacggtccagatctttgcggacagcacgtacgagctcccgtacgtgatggatgcaggtcaggagggcagcttgcctcctttccccaacgacgtgttcatggtgcctcagtacgggtactgcggactggtaaccggaggcagctctcaaaaccagacagacagaaatgccttctactgtctggagtactttcccagccagatgctgagaaccggaaacaactttgagatggtgtacaagtttgaaaacgtgcccttccactccatgtacgctcacagccagagcctggataggctgatgaacccgctgctggaccagtacctgtgggagctccagtctaccacctctggaggaactctcaaccagggcaattcagccaccaactttgccaagctgaccaaaacaaacttttctggctaccgcaaaaactggctcccggggcccatgatgaagcagcagagattctccaagactgccagtcaaaactacaagattccccagggaagaaacaacagtctgctccattatgagaccagaactaccctcgacggaagatggagcaattttgccccgggaacggccatggcaaccgcagccaacgacgccaccgacttctctcaggcccagctcatctttgcggggcccaacatcaccggcaacaccaccacagatgccaataacctgatgttcacttcagaagatgaacttagggccaccaacccccgggacactgacctgtttggccacctggcaaccaaccagcaaaacgccaccaccgttcctaccgtagacgacgtggacggagtcggcgtgtacccgggaatggtgtggcaggacagagacatttactaccaagggcccatttgggccaaaattccacacacggatggacactttcacccgtctcctctcattggcggatttggactgaaaagcccgcctccacaaatattcatcaaaaacactcctgtacccgccaatcccgcaacgaccttctctccggccagaatcaacagcttcatcacccagtacagcaccggacaggtggctgtcaaaatagaatgggaaatccagaaggagcggtccaagagatggaacccagaggtccagttcacgtccaactacggagcacaggactcgcttctctgggctcccgacaacgccggagcctacaaagagcccagggccattggatcccgatacctcaccaaccacctctag

SEQ ID NO: 5294 - DNA, 1617 bp, unidentified
  source 1..1617: mol_type = unassigned DNA; note = Bovine adeno-associated virus
atgcgtgcagcagctggcggaaatggtggcgatgcgggacaaggtgccgagggagtgggtaatgcctccggtgattggcattgcgattccacttggtcagagagccacgtcaccaccacctcaacccgcacctgggtcctgccgacctacaacaaccacctgtacctgcggctcggctcgagcaacgccagcgacaccttcaacggattctccaccccctggggatactttgactttaaccgcttccactgccacttctcgccaagagactggcaaaggctcatcaacaaccactggggactgcgccccaaaagcatgcaagtccgcatcttcaacatccaagttaaggaggtcacgacgtctaacggggagacgaccgtatccaacaacctcaccagcacggtccagatctttgcggacagcacgtacgagctcccgtacgtgatggatgcaggtcaggagggcagcttgcctcctttccccaacgacgtgttcatggtgcctcagtacgggtactgcggactggtaaccggaggcagctctcaaaaccagacagacagaaatgccttctactgtctggagtactttcccagccagatgctgagaaccggaaacaactttgagatggtgtacaagtttgaaaacgtgcccttccactccatgtacgctcacagccagagcctggataggctgatgaacccgctgctggaccagtacctgtgggagctccagtctaccacctctggaggaactctcaaccagggcaattcagccaccaactttgccaagctgaccaaaacaaacttttctggctaccgcaaaaactggctcccggggcccatgatgaagcagcagagattctccaagactgccagtcaaaactacaagattccccagggaagaaacaacagtctgctccattatgagaccagaactaccctcgacggaagatggagcaattttgccccgggaacggccatggcaaccgcagccaacgacgccaccgacttctctcaggcccagctcatctttgcggggcccaacatcaccggcaacaccaccacagatgccaataacctgatgttcacttcagaagatgaacttagggccaccaacccccgggacactgacctgtttggccacctggcaaccaaccagcaaaacgccaccaccgttcctaccgtagacgacgtggacggagtcggcgtgtacccgggaatggtgtggcaggacagagacatttactaccaagggcccatttgggccaaaattccacacacggatggacactttcacccgtctcctctcattggcggatttggactgaaaagcccgcctccacaaatattcatcaaaaacactcctgtacccgccaatcccgcaacgaccttctctccggccagaatcaacagcttcatcacccagtacagcaccggacaggtggctgtcaaaatagaatgggaaatccagaaggagcggtccaagagatggaacccagaggtccagttcacgtccaactacggagcacaggactcgcttctctgggctcccgacaacgccggagcctacaaagagcccagggccattggatcccgatacctcaccaaccacctctag

SEQ ID NO: 5295 - DNA, 1173 bp, unidentified
  source 1..1173: mol_type = unassigned DNA; note = Bovine adeno-associated virus
atggcgctggtaagctggctggtggaacatggcatcacttccgagaagcagtggattcaggagaatcaggagagctacctgtccttcaactccacgggaaactctcggagccagattaaagccgcgcttgacaacgcgtcaaaaattatgagtctgaccaaatctgcctcagactatctcgtgggacagactgttccagaggacatttctgaaaacagaatctggcagatttttgatctcaacggctacgacccggcatacgcgggctctgttctctacggctggtgcactcgcgcctttggaaagaggaacaccgtctggctgtatggacccgcgaccaccggaaagaccaacatcgcggaagccatctctcacaccgtgcccttttatggctgtgtgaactggactaatgagaactttccctttaatgactgtgtggaaaaaatgttgatctggtgggaggagggaaagatgaccagcaaggtggtggaacccgccaaggccatcttgggggggtctagagtacgagtggatcaaaaatgtaaatcctctgtacaagtagactctaccccggtgattatcacctccaatactaacatgtgtgtggtggtggatgggaactccacgacctttgaacaccagcagccgctggaagaccgcatgttcagatttgaactcatgcggcggctcccgccagattttggcaagattaccaagcaggaagtcaaagacttttttgcttgggcaaaggtcaaccaggtgccggtgactcacgagtttatggttcccaagaaagtggcgggaactgagagggcggagacttctagaaaacgcccactggatgacgtcaccaataccaactataaaagtccggagaagcgggcccggctctcagttgttcctgagacgcctcgcagttcagacgtgcctgtagagcccgctcctctgcgacctctcaactggtcttccaggtatgaatgcagatgtgactatcatgctaaatttgactctgtaacgggggaatgtgacgagtgtgaatatttgaatcggggcaaaaatggctgtatctttcataatgctacacattgtcaaatttgtcacgctgttcctccatgggaaaaggaaaatgtgtcagattttaatgattttgatgactgtaataaagagcagtaa

SEQ ID NO: 5296 - DNA, 1833 bp, unidentified
  source 1..1833: mol_type = unassigned DNA; note = Bovine adeno-associated virus
atggctaccttctatgaagtcattgttcgcgttccatttgatgtggaagagcacctgcctggaatttctgacaactttgtagactgggtaactggtcaaatttgggagctgcctcccgagtcagatttgaatttgactctgattgagcagcctcagctgacggtggctgacagaattcgccgcgtgttcctgtacgagtggaacaaattttccaagcaggagagcaaattctttgtgcagtttgaaaagggatctgaatattttcatctgcacacgctcgtggagacctccggcatctcttctatggtccttggccgctacgtgagtcagattcgcgcccagctggtgaaggtggtgttccagaacattgagccgcggattaacgactgggtcgccatcaccaaggtaaagaagggcggagccaataaggtggtggattctgggtatattcccgcctacctgctgccgaaggtccaaccagagcttcagtgggcgtggactaacctcgaagagtataaattggccgccctcaatctggaggagcgcaaacggctcgtcgctcagtttcagcttgagtcctcgcagcgctcgcaagaggcatcttcccagagggacgtttcggctgacccggtcatcaagagcaagacttcccagaaatacatggcgctggtaagctggctggtggaacatggcatcacttccgagaagcagtggattcaggagaatcaggagagctacctgtccttcaactccacgggaaactctcggagccagattaaagccgcgcttgacaacgcgtcaaaaattatgagtctgaccaaatctgcctcagactatctcgtgggacagactgttccagaggacatttctgaaaacagaatctggcagatttttgatctcaacggctacgacccggcatacgcgggctctgttctctacggctggtgcactcgcgcctttggaaagaggaacaccgtctggctgtatggacccgcgaccaccggaaagaccaacatcgcggaagccatctctcacaccgtgcccttttatggctgtgtgaactggactaatgagaactttccctttaatgactgtgtggaaaaaatgttgatctggtgggaggagggaaagatgaccagcaaggtggtggaacccgccaaggccatcttgggggggtctagagtacgagtggatcaaaaatgtaaatcctctgtacaagtagactctaccccggtgattatcacctccaatactaacatgtgtgtggtggtggatgggaactccacgacctttgaacaccagcagccgctggaagaccgcatgttcagatttgaactcatgcggcggctcccgccagattttggcaagattaccaagcaggaagtcaaagacttttttgcttgggcaaaggtcaaccaggtgccggtgactcacgagtttatggttcccaagaaagtggcgggaactgagagggcggagacttctagaaaacgcccactggatgacgtcaccaataccaactataaaagtccggagaagcgggcccggctctcagttgttcctgagacgcctcgcagttcagacgtgcctgtagagcccgctcctctgcgacctctcaactggtcttccaggtatgaatgcagatgtgactatcatgctaaatttgactctgtaacgggggaatgtgacgagtgtgaatatttgaatcggggcaaaaatggctgtatctttcataatgctacacattgtcaaatttgtcacgctgttcctccatgggaaaaggaaaatgtgtcagattttaatgattttgatgactgtaataaagagcagtaa

SEQ ID NO: 5297 - DNA, 2211 bp, unidentified
  source 1..2211: mol_type = unassigned DNA; note = Bovine adeno-associated virus
atgtcttttgttgaccaccctccagattggttggaatcgatcggcgacggctttcgtgaatttctcggccttgaggcgggtcccccgaaacccaaggccaatcaacagaagcaagataacgctcgaggtcttgtgcttcctgggtacaagtatcttggtcctgggaacggccttgataagggcgatcctgtcaattttgctgacgaggttgcccgagagcacgacctctcctaccagaaacagcttgaggcgggcgataacccttacctcaagtacaaccacgcggacgcagagtttcaggagaaactcgcttctgacacttcttttgggggaaaccttgggaaggctgttttccaggctaaaaagaggattctcgaacctcttggcctggttgagacgccggataaaacggcgcctgcggcaaaaaagaggcctctagagcagagtcctcaagagccagactcctcgagcggagttggcaagaaaggcaaacagcctgccagaaagagactcaactttgacgacgaacctggagccggagacgggcctcccccagaaggaccatcttccggagctatgtctactgagactgaaatgcgtgcagcagctggcggaaatggtggcgatgcgggacaaggtgccgagggagtgggtaatgcctccggtgattggcattgcgattccacttggtcagagagccacgtcaccaccacctcaacccgcacctgggtcctgccgacctacaacaaccacctgtacctgcggctcggctcgagcaacgccagcgacaccttcaacggattctccaccccctggggatactttgactttaaccgcttccactgccacttctcgccaagagactggcaaaggctcatcaacaaccactggggactgcgccccaaaagcatgcaagtccgcatcttcaacatccaagttaaggaggtcacgacgtctaacggggagacgaccgtatccaacaacctcaccagcacggtccagatctttgcggacagcacgtacgagctcccgtacgtgatggatgcaggtcaggagggcagcttgcctcctttccccaacgacgtgttcatggtgcctcagtacgggtactgcggactggtaaccggaggcagctctcaaaaccagacagacagaaatgccttctactgtctggagtactttcccagccagatgctgagaaccggaaacaactttgagatggtgtacaagtttgaaaacgtgcccttccactccatgtacgctcacagccagagcctggataggctgatgaacccgctgctggaccagtacctgtgggagctccagtctaccacctctggaggaactctcaaccagggcaattcagccaccaactttgccaagctgaccaaaacaaacttttctggctaccgcaaaaactggctcccggggcccatgatgaagcagcagagattctccaagactgccagtcaaaactacaagattccccagggaagaaacaacagtctgctccattatgagaccagaactaccctcgacggaagatggagcaattttgccccgggaacggccatggcaaccgcagccaacgacgccaccgacttctctcaggcccagctcatctttgcggggcccaacatcaccggcaacaccaccacagatgccaataacctgatgttcacttcagaagatgaacttagggccaccaacccccgggacactgacctgtttggccacctggcaaccaaccagcaaaacgccaccaccgttcctaccgtagacgacgtggacggagtcggcgtgtacccgggaatggtgtggcaggacagagacatttactaccaagggcccatttgggccaaaattccacacacggatggacactttcacccgtctcctctcattggcggatttggactgaaaagcccgcctccacaaatattcatcaaaaacactcctgtacccgccaatcccgcaacgaccttctctccggccagaatcaacagcttcatcacccagtacagcaccggacaggtggctgtcaaaatagaatgggaaatccagaaggagcggtccaagagatggaacccagaggtccagttcacgtccaactacggagcacaggactcgcttctctgggctcccgacaacgccggagcctacaaagagcccagggccattggatcccgatacctcaccaaccacctctag

SEQ ID NO: 5298 - DNA, 4694 bp, unidentified
  source 1..4694: mol_type = unassigned DNA; note = Bovine adeno-associated virus
gtggcactcccccccctgtcgcgttcgctcgttcgctggctcgattgggggggtggcagctcaaagagctgccagacgacggccctctgggccgtcgcccccccaatcgagccagcgaacgagcgaacgcgacaggggggggagtgccacactctctagcaagggggttttgtaggtggtgatgtcattgttgatgtcattatagttgtcacgcgatagttaatgattaacagtcatgtgatgtgtgttatccaataggatgaaagcgcgcgaatgagatctcgcgagacttccggggtataaaaggggtgagtgaacgagcccgccgccattctctgctctggactgctagaggaccctcgctgccatggctaccttctatgaagtcattgttcgcgttccatttgatgtggaagagcacctgcctggaatttctgacaactttgtagactgggtaactggtcaaatttgggagctgcctcccgagtcagatttgaatttgactctgattgagcagcctcagctgacggtggctgacagaattcgccgcgtgttcctgtacgagtggaacaaattttccaagcaggagagcaaattctttgtgcagtttgaaaagggatctgaatattttcatctgcacacgctcgtggagacctccggcatctcttctatggtccttggccgctacgtgagtcagattcgcgcccagctggtgaaggtggtgttccagaacattgagccgcggattaacgactgggtcgccatcaccaaggtaaagaagggcggagccaataaggtggtggattctgggtatattcccgcctacctgctgccgaaggtccaaccagagcttcagtgggcgtggactaacctcgaagagtataaattggccgccctcaatctggaggagcgcaaacggctcgtcgctcagtttcagcttgagtcctcgcagcgctcgcaagaggcatcttcccagagggacgtttcggctgacccggtcatcaagagcaagacttcccagaaatacatggcgctggtaagctggctggtggaacatggcatcacttccgagaagcagtggattcaggagaatcaggagagctacctgtccttcaactccacgggaaactctcggagccagattaaagccgcgcttgacaacgcgtcaaaaattatgagtctgaccaaatctgcctcagactatctcgtgggacagactgttccagaggacatttctgaaaacagaatctggcagatttttgatctcaacggctacgacccggcatacgcgggctctgttctctacggctggtgcactcgcgcctttggaaagaggaacaccgtctggctgtatggacccgcgaccaccggaaagaccaacatcgcggaagccatctctcacaccgtgcccttttatggctgtgtgaactggactaatgagaactttccctttaatgactgtgtggaaaaaatgttgatctggtgggaggagggaaagatgaccagcaaggtggtggaacccgccaaggccatcttgggggggtctagagtacgagtggatcaaaaatgtaaatcctctgtacaagtagactctaccccggtgattatcacctccaatactaacatgtgtgtggtggtggatgggaactccacgacctttgaacaccagcagccgctggaagaccgcatgttcagatttgaactcatgcggcggctcccgccagattttggcaagattaccaagcaggaagtcaaagacttttttgcttgggcaaaggtcaaccaggtgccggtgactcacgagtttatggttcccaagaaagtggcgggaactgagagggcggagacttctagaaaacgcccactggatgacgtcaccaataccaactataaaagtccggagaagcgggcccggctctcagttgttcctgagacgcctcgcagttcagacgtgcctgtagagcccgctcctctgcgacctctcaactggtcttccaggtatgaatgcagatgtgactatcatgctaaatttgactctgtaacgggggaatgtgacgagtgtgaatatttgaatcggggcaaaaatggctgtatctttcataatgctacacattgtcaaatttgtcacgctgttcctccatgggaaaaggaaaatgtgtcagattttaatgattttgatgactgtaataaagagcagtaaataaagtgagtagtcatgtcttttgttgaccaccctccagattggttggaatcgatcggcgacggctttcgtgaatttctcggccttgaggcgggtcccccgaaacccaaggccaatcaacagaagcaagataacgctcgaggtcttgtgcttcctgggtacaagtatcttggtcctgggaacggccttgataagggcgatcctgtcaattttgctgacgaggttgcccgagagcacgacctctcctaccagaaacagcttgaggcgggcgataacccttacctcaagtacaaccacgcggacgcagagtttcaggagaaactcgcttctgacacttcttttgggggaaaccttgggaaggctgttttccaggctaaaaagaggattctcgaacctcttggcctggttgagacgccggataaaacggcgcctgcggcaaaaaagaggcctctagagcagagtcctcaagagccagactcctcgagcggagttggcaagaaaggcaaacagcctgccagaaagagactcaactttgacgacgaacctggagccggagacgggcctcccccagaaggaccatcttccggagctatgtctactgagactgaaatgcgtgcagcagctggcggaaatggtggcgatgcgggacaaggtgccgagggagtgggtaatgcctccggtgattggcattgcgattccacttggtcagagagccacgtcaccaccacctcaacccgcacctgggtcctgccgacctacaacaaccacctgtacctgcggctcggctcgagcaacgccagcgacaccttcaacggattctccaccccctggggatactttgactttaaccgcttccactgccacttctcgccaagagactggcaaaggctcatcaacaaccactggggactgcgccccaaaagcatgcaagtccgcatcttcaacatccaagttaaggaggtcacgacgtctaacggggagacgaccgtatccaacaacctcaccagcacggtccagatctttgcggacagcacgtacgagctcccgtacgtgatggatgcaggtcaggagggcagcttgcctcctttccccaacgacgtgttcatggtgcctcagtacgggtactgcggactggtaaccggaggcagctctcaaaaccagacagacagaaatgccttctactgtctggagtactttcccagccagatgctgagaaccggaaacaactttgagatggtgtacaagtttgaaaacgtgcccttccactccatgtacgctcacagccagagcctggataggctgatgaacccgctgctggaccagtacctgtgggagctccagtctaccacctctggaggaactctcaaccagggcaattcagccaccaactttgccaagctgaccaaaacaaacttttctggctaccgcaaaaactggctcccggggcccatgatgaagcagcagagattctccaagactgccagtcaaaactacaagattccccagggaagaaacaacagtctgctccattatgagaccagaactaccctcgacggaagatggagcaattttgccccgggaacggccatggcaaccgcagccaacgacgccaccgacttctctcaggcccagctcatctttgcggggcccaacatcaccggcaacaccaccacagatgccaataacctgatgttcacttcagaagatgaacttagggccaccaacccccgggacactgacctgtttggccacctggcaaccaaccagcaaaacgccaccaccgttcctaccgtagacgacgtggacggagtcggcgtgtacccgggaatggtgtggcaggacagagacatttactaccaagggcccatttgggccaaaattccacacacggatggacactttcacccgtctcctctcattggcggatttggactgaaaagcccgcctccacaaatattcatcaaaaacactcctgtacccgccaatcccgcaacgaccttctctccggccagaatcaacagcttcatcacccagtacagcaccggacaggtggctgtcaaaatagaatgggaaatccagaaggagcggtccaagagatggaacccagaggtccagttcacgtccaactacggagcacaggactcgcttctctgggctcccgacaacgccggagcctacaaagagcccagggccattggatcccgatacctcaccaaccacctctagcccaattctgttgcataccctcaataaaccgtgtattcgtttcagtaaaatactgcctcttgtggtcattcggcgtacaacagcttacaacaacaacaaaacccccttgctagagagtgtggcactcccccccctgtcgcgttcgctcgttcgctggctcgattgggggggtggcagctcaaagagctgccagacgacggccctctgggccgtcgcccccccaatcgagccagcgaacgagcgaacgcgacaggggggggagtgccac

SEQ ID NO: 5299 - protein, 390 aa, unidentified
  source 1..390: note = Bovine adeno-associated virus
MALVSWLVEHGITSEKQWIQENQESYLSFNSTGNSRSQIKAALDNASKIMSLTKSASDYLVGQTVPEDISENRIWQIFDLNGYDPAYAGSVLYGWCTRAFGKRNTVWLYGPATTGKTNIAEAISHTVPFYGCVNWTNENFPFNDCVEKMLIWWEEGKMTSKVVEPAKAILGGSRVRVDQKCKSSVQVDSTPVIITSNTNMCVVVDGNSTTFEHQQPLEDRMFRFELMRRLPPDFGKITKQEVKDFFAWAKVNQVPVTHEFMVPKKVAGTERAETSRKRPLDDVTNTNYKSPEKRARLSVVPETPRSSDVPVEPAPLRPLNWSSRYECRCDYHAKFDSVTGECDECEYLNRGKNGCIFHNATHCQICHAVPPWEKENVSDFNDFDDCNKEQ

SEQ ID NO: 5300 - protein, 610 aa, unidentified
  source 1..610: note = Bovine adeno-associated virus
MATFYEVIVRVPFDVEEHLPGISDNFVDWVTGQIWELPPESDLNLTLIEQPQLTVADRIRRVFLYEWNKFSKQESKFFVQFEKGSEYFHLHTLVETSGISSMVLGRYVSQIRAQLVKVVFQNIEPRINDWVAITKVKKGGANKVVDSGYIPAYLLPKVQPELQWAWTNLEEYKLAALNLEERKRLVAQFQLESSQRSQEASSQRDVSADPVIKSKTSQKYMALVSWLVEHGITSEKQWIQENQESYLSFNSTGNSRSQIKAALDNASKIMSLTKSASDYLVGQTVPEDISENRIWQIFDLNGYDPAYAGSVLYGWCTRAFGKRNTVWLYGPATTGKTNIAEAISHTVPFYGCVNWTNENFPFNDCVEKMLIWWEEGKMTSKVVEPAKAILGGSRVRVDQKCKSSVQVDSTPVIITSNTNMCVVVDGNSTTFEHQQPLEDRMFRFELMRRLPPDFGKITKQEVKDFFAWAKVNQVPVTHEFMVPKKVAGTERAETSRKRPLDDVTNTNYKSPEKRARLSVVPETPRSSDVPVEPAPLRPLNWSSRYECRCDYHAKFDSVTGECDECEYLNRGKNGCIFHNATHCQICHAVPPWEKENVSDFNDFDDCNKEQ

SEQ ID NO: 5301 - protein, 736 aa, unidentified; identical to SEQ ID NO: 5285
  source 1..736: note = Bovine adeno-associated virus

SEQ ID NO: 5302 - protein, 600 aa, unidentified
  source 1..600: note = Bovine adeno-associated virus
TAPAAKKRPLEQSPQEPDSSSGVGKKGKQPARKRLNFDDEPGAGDGPPPEGPSSGAMSTETEMRAAAGGNGGDAGQGAEGVGNASGDWHCDSTWSESHVTTTSTRTWVLPTYNNHLYLRLGSSNASDTFNGFSTPWGYFDFNRFHCHFSPRDWQRLINNHWGLRPKSMQVRIFNIQVKEVTTSNGETTVSNNLTSTVQIFADSTYELPYVMDAGQEGSLPPFPNDVFMVPQYGYCGLVTGGSSQNQTDRNAFYCLEYFPSQMLRTGNNFEMVYKFENVPFHSMYAHSQSLDRLMNPLLDQYLWELQSTTSGGTLNQGNSATNFAKLTKTNFSGYRKNWLPGPMMKQQRFSKTASQNYKIPQGRNNSLLHYETRTTLDGRWSNFAPGTAMATAANDATDFSQAQLIFAGPNITGNTTTDANNLMFTSEDELRATNPRDTDLFGHLATNQQNATTVPTVDDVDGVGVYPGMVWQDRDIYYQGPIWAKIPHTDGHFHPSPLIGGFGLKSPPPQIFIKNTPVPANPATTFSPARINSFITQYSTGQVAVKIEWEIQKERSKRWNPEVQFTSNYGAQDSLLWAPDNAGAYKEPRAIGSRYLTNHL

SEQ ID NO: 5303 - DNA, 97209 bp, Homo sapiens
  source 1..97209: mol_type = unassigned DNA
atggaattccccattggatccctcgaaactaacaacttccgtcgctttactccggagtcactggtggagatagagaagcaaattgctgccaagcagggaacaaagaaagccagagagaagcatagggagcagaaggaccaagaagagaagcctcggccccagctggacttgaaagcctgcaaccagctgcccaagttctatggtgagctcccagcagaactgatcggggagcccctggaggatctagatccgttctacagcacacaccgggtaagagctactagtaggaatgtctgctctcagctcttggagaggaagtctcggtcccacccagcccagaaagtcctccttggccctgggtgatgtggcagtctgctaaagattccgttaacaaccaaaaaaaatatatatatatatctctaacttatttgatgatctctttgaatttttatgacatttatgatagaaactaactaaacccacatcttcaaaagcagataactgctgcagagctttcagggaaagttggctgttcccttggatgacctctggcctggggcctccagaggagttgggtctctttgcaggtggagagcagacatcttgaggttgggggaggagcatggcggtgaggacagaaagcaggatgaatttaagccagtggtcctcaactatgatcttggaacccctggtgtccccaaaactgttttagtgggtttataaaatgaaaactattgtataacaatacttggatgtaatttgtctttttcacacactttctcttatgatcatacattggtgaatatagaggctattgatgggggatgatgtcatcactctaaaagctactggaatgtgtgcctgtatattcccgtgttttaaaatttcctgagttttgaatttctaatatgagatatatatacacacacatatgatgtatatatgtgtgtatacatctatacactatatatatacatacaactatgtatatacatacaactagaccatgtagctagttatgtatatataggtatataagcatatatacatatatattaatttctaatatgatatacatatatctggcataaacaaaaaggtatcaacataaacaaaagttatttggggtcctcaataaggtttgagagtaataatccctgaaatcaaaaagtttgagaatcagtagtttaaacaagagcttcttcatgacaattatctcacctgtgttgtatttttgatgttctacgagccaaaaaatggtgaatgcatgtttgggagttaggaggacaggaatcagccatctcaaatatggctagcagagtaaataaaaaggcactgaatatctttcttcctcctctcccatgccaagagttcatatcctcctaaatcctcagagggagaaaccaggagaggatttaagagacagagatgtagaaggtggagacagaagaaacattacaaaacaaggatggttctcttgtcagaagagaaattaaatgcaaccataacttcaccatcctgttgccagagtcctcccctgggcataacacctcttaccagcctgaggattggctgtctgtccattaaagtaccctcagtgggctcatcttggtgcactgtcagtcccagagatgaggatcttgctgagagggtgaggatatggcttttagtccttgatcctctctgcctctctgtacctgcatttgactctcattgacctgtagttcccagagcccttcttgctcataagcctgagataatgcctctcatgtttaaaaacatggttgtataaggaatcttgtttctcattggaggtccactttctgttttgttttgtttcagacatttatggtgctgaacaaagggaggaccatttcccggtttagtgccactcgggccctgtggctattcagtcctttcaacctgatcagaagaacggccatcaaagtgtctgtccactcatatcctttgcacgattgcctcttccacgtgttacaattagaccttgcctactgtgtccagtaccttctttagaggttagcaacagagcccttatccaattgaatcccaaaagtacaatgaggtcattagattgaaaaaatggcttgggcctttaatgtgtcccacaccccaaagcagtcccaagacacagaagaagtgtttatgcaacacacaggtggtttggattcacctcagactaatctagacacacctgtggatgcacaacttgaaaaacatcctctttatgaggggaggtttgctgatgcccccagacacattctcaccacggtgtgtggtccgctttccccacaacacaacaggcagtaagagggcccaagccttctttgggcagatgagataggcatgagttgttgctctgtgccatagccatgctgagaagtggctgcttactgggcaaaagagcagcacctcccagagggcaaggaaaacagaccatgatgggaagagcacacatagtctcaatgggacctcattggtcatggggcactgttaacatcacaaattactcaaaaactactagcaggtttaaaatgtcaataatctgatgttcatgccatacaagactgtaatgattagagacacattggtcaaatgtctactatatgaattgttttaggtaatgtcagaagctgctttcaggggattttgcaaggcaagccaaactagtagaaaaaagatactttggtttggtttcctaagatcttcctgggtgatcctaatggaaagatcctaatgacctaagatccttggtcatcggaaggattggaagttctttatgacaaatttagccctggcttgcaggaggttgatgtacaagaatacacctgcctcagttgcctgacaaatggtaaccagccttttcttagaaggcttcagtaaaaaagagttctaccctgctccctaactctgaggcagattgttggatttctggacagttgtcattgagctggtaaccttggcacagtcatctatctgcacactcaacatgaagctgcacagcttgatgaagttgcattacgttttctctttttacatttttttctttctggctggccagcaagaattacgttttctgagctgaatcttgaattttcagattctacagaaggatatttaatgacaatacagtctctcacttgctaaatacttcctaagtgtcaataccatcatcagttcaaaagcctctgaagtagagattaccatccccattttacagataatgaaactgacacacagaggcattaagtaaattatccaagaccatgtagctagttaagaagtccagcctgcatcctgcgtagagcagtatctacagtgaggaagtagggtggaaagtaatcagggtaattattctctcaatgtgtcgtctctgcttgggtagttgttgctttttcaaaatatatacaattacatggaaattacaaataaagagaaatcacaaacatacaaactcctctttatggattctggttgaattacatctggataagtaagaaacagctaattagaaataaaatcccctaaaaagaaccaagtgaccagtgaatattctcttcatcttgagatttgatgagtaaataattgcttggtagagtcacagctggacagaaaagctgttgagggggtctcttcctcacaaaagtctgcatttaaatctcataaatttggtaactccagccccaaaagatactagaattctcagggccctattattaatatttcaccaaaaatataattctaatcacatttgctatgaatgttttcataactaatattatacataagatatattacttttaaatatttgtagaattggagacacgattttagtttaatccttggattaacatttccccccatgtgagcatatttcttaatttaattgtaagtcagcaggaaaatgtggtttaattaatagaattttccttttcataatagatgtgttcctaagtaactgtaaaactagacacatcaaggcatttacagaaaactaaaatacatttaaatacttctgctcaaattgaaaaatgagtgttgtactctctctgtaggtcaagtttatcttcaagttttatttttccttaggaagcactgttgggagcccagctattcctaagaaaaatgtccaagtgggaacaatttacctttagattctccccaccaacatttcttcccttctattttccccttccacccaccttcctttcaatgtctccctccccttttgataatccctttgcccatagtctgctgtcaatattctccactctagctattcagagttctccactccagcctaatcctacttggggttttcttcctgagccagtatttcatttccctgtgcctgcctccaccgttcctacccagaagaccatttcctcggtggaactgatctcaactaagttacccaaacaatctgatgaaactaattcccatgaaagtttgtacctcttcacttatctccaagtttctaacttttctttgtcttttagaataaaaaagacatttgccagatgaaatttcaggccattttgtatactgaaatgaaggcttcggggcagaaggacattttggaaaagggagtctgtttccttctatcttgctcagagtttgttatcaaacagataagagttcacatctctgcagcatggttgactagctgcatgacctgagaaaagttatttaacttttattttttgtcagcctgtttctcagcttcaaaatgtagatatttatacccacctgtagatcagttgtattagaagtaacatggacaaagtactcagcctagcttaggcactcagtaaatgttagtggttattatgtgacaagatcataaagctaatattggctaagatttatgaatgtaatcattcagcatcaaggtgatcctagatgacatcacagagacttggtgatctcagcttttccttaacacaggcctttcaggtggttcagtttatttattacggtcactattttggttaattgtgtgtgcatgacccgaactgaccttccagagaaaattgagtgagtagatttgctatcattattgtaccatctctttttgctttcttttcttccttcacttggcagtctttgtcttttatttatcctgccatgcctcatgtgggtaatgctgaatctcattgtctatatgtctttgtaataaccaggtctctccttctgtgagatttgtttcataaacatacatgattttcagtttcaaagagatacagattagtggttctcaactttggctgcatattgcaatttttggggagattttttaaatgcctgagtcccagccccagaaagtctaaggtggcctgggaagatgagtctcctcgcccccacccccccccaacacacacacactcactcacctgctagatgcacacacaaatgtatgccttagagaaggtatgcttttgagaaggcctgctatgaaagagagacaggagcaaaactgagacagaactaagaacaaatggctctggagtatatttagaaaataactcataaatgaagctgtttaagttatcatgcttcatatgcctcaaagtaaccttagtattcctgaagttattctatttccctaggttagtgggtgaaacccctatagtttcagaatctgggagttttccaaaaacattccatatccacacatctgggagggatgcttccactccagcttgaacctaacatacctttggttataataacaggtgctttgcagagctttctttttttttttttttttttttttgctaatcataacagtaatgcatgccacaacagaaaatacgttatatttttattaatagattaaaggaaaaggatcacatagtcttcttaattgatgctaaaatcatttgataaagtttaatttccatttataattttaaattcttagaaaagttgaaatagaagggaataaatgtggcacatatacaccatggaatgctatgcagtcataaaaaaggatgagttcatgtcctttgcagggacatggatgaagctggaaaccatcattctcagcaaactaacacaagaacagaaaaccaaacaccgtatgttctcactcataagtgggagttgaacaatgagaacacatggacacagggaggggaacacactggggcctgttgaggggtggggggctaggggagggatagcattaggagaaatacctaatgtaaatgacgggttgaagggtgcagcaaaccaccatggcacgggtacacctatgtaacaaaccggcacgttctgcacatgtaccccagaacttaaagtataataattttaaaaaggggattgcatcactctgataaagggtattcattgttttaaagtatcaagcgtcatacttaattgtgaacatggaaagctttccctttgagatcaaaagaaaaaaaaaccaaagatgtctgttcttctcagttccactttgtaaaggaggtctcagccagcatagtaaagcaaagaaaaaaaaagtgcaagaagaaaaaagtaccgaagatgtaatttacagataataagattgtatacataaaatatccaacataacctagagataaacagtaagaattaataaaagagtatagtaaggtagctgggtacaaattaacatacataaatcaattgtgtatagacactagcaacaaacagaaaatagtttttaaaaataccatttacactggcattttaaaatgtcaagtatctaggaataagattatcaaagtataagtgagatctctataaggaaaattataataagtattgtgtaaagtttttaaagaaaaccaaatcagtggggagacatgttctcagattcaaagtctcaatattgtaaagactcccaaaaatgattaataaatttaatatgatcctcaaatcaatatttcaacaggcttcttttggtattacttgacaaactttaaactttaaattttcttcctcaaaagtttacatgaaattttaaagagcaaattatagccaagaaacttttgaggaagaaatacaaagtgggagaactcattctactggatgtcgagatttactataaagctctaattgaagcagtgtgccattggtgtaagattggtcagaataatgtaacagcatagacagtccataaacagaccaacacatatgtaaacatctaatgtgtgaaaaggtggcaccccagaacagcagggaaaaggcggtcttcaaaaaatgatgctgaagaattaggaatctcactggaaaaactacattaaacatccaactttgcaccacacacaagaatcaattctaggtggatcaacacctcacttgctttgtgaaatgcaaatatataaagcccttttttaaattttactttaagttctggggtacatgtgcagaaagtgcaggtttgttacataggtatacacatgtcatggtggtttgctgcacccatcaacccatcatctacattaggtatttctcctaatgctatccctcccctagcccccaacccctcaacaggccctggtgtgtgatgtccccctccctgtatccacgtgctctcattgttcatctcccacctatgagtgagaacatgcggtgtttggttttctgttcttatgtcagtttgctgagaatgatggtttccagcttcatccatgtccctgcaaagaacatgaactcacccttttttatggctgcatagtattccatggtgtatatgtgccatattttctttatccagtctatcactgatgggcgtttgggttagttccaagtctttgctattgtcaatagtgccacaataaacatacgcatgcttgtatctttatagtagaataatttataatcctttgggtatatacccagtaatggaattgctgggtcaaatggtgtttctggttctagatccttgaggaatcaccacactgtcttccacaatggttgaactaatttacactcccaccaacagtgtaaaagcattcctatctctccacatcctctccagcatctgttgtttcctgactttttaatgatctccattctaactggtatgagactccatctcattgtggttttgactggcatttctctaatgaccagtgatgatgagctttttatcatatgtttattggctgcataaatgtcttcttttgagaagtgtctgttcatatcctttgcccactttttgatggagttgttttttcttgtaaatttgtttaagttttttgtagattctggatattagccctttgtcagattgatagattgcaaaaattttctcccattctgtaggttacctattcactctgatgatagtttcttttgctgtgcagaagctctttagtttaattggattccatttgtcaattttggcttttgtcaccattgcttttgatgtgttagtcataaagcctttgcccatgcctatgtcctgaagggtattgcctaggttttcttctagggtttttatggttttaggtcttatgtttaagtctttaatctatcttgagttaatttttgtgtaaggtataaggaagggatctagtttcaattttctgcctaaggctagccagttttccccacaccatttattaaatagggaatcctttccccattgcttgcttttgtcaagtttgtcaaagatcagatggttgtagatatgcggtgttacttctgaggcctctgttctgttccattggtctagatatctgttttggtaccagtacctcgctgttttggttactgtagctttgtagtatagcttgaagtcaggtagcgtgatgcctccaactttcttctttttgcttagaattgtcttgactatgcgggctcttttttgttccacatgaaatttaaagtagatttttctaattctgtgaagaaagtcagtggtagcttgatggggataacattgaatctataaattactttgggcagtatggccattttcacaatattgatttttcctatccatgagcatggaatgtttttccatttatttgtgtcctctcttatttccttgagcagtgatttttagttctccttgaagaggtccttcacatcccttgtaagttgtatttctagatattttattctctttgttgcaattgtgaatgggagttcactcatgatttggctctcggtttgtctgttattggtgtatgggaatgcttgtgatttttgcacattgattttgtatcctgagactttgctgaagttgcttatcagcttaaggagattttgggctgagatgatggggttttctaaatatacagtcatgtcatctgcaaacagagacaatttgacttcctcttttcctatttgaataccccttatttctttctcttgcctgatcgccctggccagaacttccaatactatgttgaataagagtggtgagatagggcattcttgtcttgtgctggttttcaaaggaaatgcttccagtttttgcccattcagtatgatattggctgggggcttgtcataaatagttcttattattttgagatacattccatcaatacctagtttattgagagcttttagcatgaatgggtgttgaattttgtcgaagaccttttctgcatctattgagataatcacgtggtttttgtcattggttctgtttgtgtgatggattacgtttattgacttgcgtatgttgaaccagctttgatcccaggtatgaagccgacttgatcgtggtggataagctttttgaaaggaaaaaacaaagaggaatatctttatgacctcagactaagaaaaactttattacatatgacacaagaagcactaactatacaggaaaaaactgatacattttagtatactataattaagaatgttcatcagaagacaactttaagagcatgaaaaagcaagtgcttatattcagagtaatgaactctacaaatcaattagaaaaatgtcagaacaaccacttgtaaaatagcacaaaatttgaataggcactttacaaaagtggaaatccaaatggccataaacatatgaaagtattcttaacctttttttaaatcaaagagttgcaaattaaaatcacactgagattttattacatgttcatcatagaagggaaattttttaaagtgtcacaataccaagtattgggaatgacatggagcaacagaaactcacacactgctggtgggagtgtaaatttggacaacctctttggaaagcaaggggtattatctagtaaaggtgtaagcatacatatgctgtattcttctattacacccttaggtacctatgtttaacagaaatatgtacttgtggacaccagattacagctacaagaaagtttatgaacatttgcccataaaaaccccaaaccggaaaccactcaaatgtccataaactttgagtacattaactatttctgttatattctaaaatgagaaaacttacagcaataaaaattaataaactttagtgctgcacaacaataaggatgagtcttaagaaagtaatattgaacaaaaaaagccaaatgcaaaggattacataaacaaggttcatttatataaagtttgaaatcaagcaaaactaaactattttgtttaggaatgcatacttatgaagtaaaaagcatcaataaagtaaggcaagaaaaagtaccaaaaattaggagaatagtggcctccagggcagaagagggaggatgtaattgggaaggagctggtgaagtgctggtcacgttccattttatggcatgggtagttgtcacacaagctgctatggagtgaattttgtcccctcaaaattcaaatgttgaaacaaaccccccatgttgctatgttggagattgggcctctaaggaggtgattgggttaaatgaagtcacaagagtagagcccttaagtggtagaactggtgtccttataagagaaagagacagctttctcccctttgtgtgagaacacaaggacaaggtagacatctataagctagaaagagagtctttcccagacccaactatgctgacatcccaatctcaggcttcaacctccagatttgtgagaaaataaatttctgttgcataagccacccagtctatggtattttgttaaggcaacaaaggctgactaatacacaaacatttgttttaaaataattaatttatgttttatgtacatttttattatgcatgttacatatcataataaaaacccaataattttttaaaataaatgaccattgcaaaaaatgcagaacactgaaaatataaatcagaagatggttactaagtagagaaatcacaaaatcatgaaattatatttaatattgttgagatcatatagcatgtaaaatgtctatgcttcttttggagttttaatgtaaaacatttttttgcaaaatgagttatttgggagttatttggagattgtggttaaatatggaagatagaatgcatatgttttaccccaccctctcaaaatgccaatagaatgacagcacgggggaaagaacagtataaatatacaagaacaaagagaaagagaatggaaaacacagaggacaaatgatgtcaaaacacttggaagaccaaaagtgggtggagaagtggtaaatcacttagcagatcagggtttgttaaaccacggtgcctccagagggggataaaaatgagaataaaggcattttaccgcccccgctgcccaacaagccccagaggccctgcaagtgttgacatgatacaaatagcaagaaatggaagcagaaagaggaaagaacatgtgagcagagtatgttcacttactgctgcttctataataacaagaagttaaagagtattatttaaagttgacaaataaagaaatggacaaaataattacacttgacagtacaaaggtaagcacaaaaagatattattaaatacagtcagataatggataaaacagagaggaaaggaatcaccaaatggaaatgagagattttgattaaagaaatagtacactaaggacaatgtattacacggttttaattataattataaatttataataagtttttacttataaagacaaccactaggataaagatacaaactctttagtaatctatatatttgtaacaaataatatgacaaactctaaatactggaagaattgtacatcaaaaaataaaaagcaaataagagatgccaaataatgaaaaggtacaaaagtaattggggtttcagaccataaatattaaatcattataactaggctcaaacacatctttattaatcaaagtaggaaccattacaatcaacacatttttgccaatgagaaatgagtttgtttattcctgtagcataaaaatccatgctttgggattcaatgaactcttggaaggcattttctgcatcccgctggttatggaagtgtttcacctgcaaaaagttgttcagatgcttgaagaagtggtagttggttggtgagaggtcaggtgaatatggtggatgaggcaaaacttcatagcccaattcattcaacttttgaagtaactgttggttgtgtgacatgcagtcggttgttgtggagaagaattgggccctttctgttgaccaatgccagctgcaggccttgcagttttctgtgcatctcatcgatttgctgaacatatttctcagatgtaatggctttgctgggattcagaaagctgtagtagatcagaccggcagcagaccaccaagcagtgaccacgactttttttggtgcaagttgggttttgggaagtgctttggagcttcttctcagtccagccaccaagctggtcattgccagttgtcaagtaaaattcactttttatcgcacatcacaatctgattaagaaatagttcatttttgttgcatagaataagagacgacaacacttcaaaatgacgattttttaaacatttttccttagcttatgaggcacccatttatggagctgtttcacctttccaatttgcttcaactgccgaatgaccgtagaatggtcaacgatgagttcttcctcagcttcttgtgcagttgtaagaggatcaacttcgatgattgctctcaattggtcattgtcaacttccaatggccagccactactctcctcatcttcaaggttctcatctcctttgcaaaacttcttgaaccaccactgcactgtacctttgttagcaatccctgggccaaatgcgttgttgatgttgagttgtctctgctgctttacaacccattttgaactcaaataagaaaatcgctcgaatttgctttttgtataacataatttccatagtctaaaataaatataaaataaacagcaagtaataagtcattagcaaaaaaaaaagtgagaaatgcacattaaaatgatgtataacatggtcacatttatttaagaatgtattccaatatcaaacggcaaatttcaacaatgcaaaaaccacaattacttttgtaccaacctaatattttaaaaactaaatacgtcatatgaaataatataaacaagctaagactaagcaaatctgtcatgtcactaaatataaatggattttactcacctatttttaaaaatgcctattacattacaaagcaatacccaactctatgttgaataaaaaaaatactcctcacggtgatacagaaaggctaaaattatagaattcaaaagacataagcaaaggcaaacaaagaaagcaggatccatgattttaatatcagagaaagtggaatctcggtcaaaaagcatgaaataggacaaaaattgcacagacatattaatattaaagacgatagtaatctatatctttgcaacaaataagatggcaacaatatttataaatcagaaattattagagtaggaggataaataaaaacattgtaggaatagaaattttcaattaattttagccaataacagatcaaatgtattaaaaagtatgtaaaattatagatgacctagtaatataattaatataatgtatctgattaatatatagcaaactaccttccctaacaatagaaaatgcacctccttttcaaaaaaccaaacatatcaaaccaaatattaagccatgacaaaaacctcaataagctccagaaagtggaaataatatagaaaacattctctgatcataatgaaatagagttaaaaaaaataaccaaatttaatgaaatgagaggactttccacttgataatttttaaaaatctctcttaaagaattcttggacaaaagacaaactataaactaaaattatataatttcgagggaaggaaagataaaaaacagtttaatcagaacctagagagtgcagttaaagacatacatattcagggaataagtcacagcatggaagcatagaatatttatatcagtaaaagctgaaaagaaattatttaaagacctaacaaaactagaaaaaggataacaaatgaaagaaagaagttaataattataaaaagcaataaattacaaaatagaaaaacagtagatctaataaatccaaatgctgttgtaaaaatatgcacaagacctttatactaaaaaataatacagcattattgagagaaattttaaagtacctaaatgaattaaaggatgtctcatgtgactggattagaagattcataattgttagaatgtcagtgctgcccaaattagtctataaattcaatgacatccccaaaaaaatcccagcagcagctgttttatagaaattagctgaacagatttcatttgcatggatgaagtgaagtttatttaactattttcctattgatagacattcacatttatcataattaacataatcctcatattttgccaccacatattaattttttggtgagtatccttacacatgtatctttgtacacataatatgagtaaaattaaggatgaatttctagaagtagaattgccaggtcaaaggggtgtacattttaatttttgagatattgccaaatcgtcttccaaagttggatcctttccattcccagtaattatcaaatccattctttaggagattttgtattaactgaactgttgacataattccctttatatgcacactatgaaaagtataacatatacaaatctacctatatggtcacaatcctgggaatttatgtgacaggtattggatgatgttcagcatccttggcctcgtggaaataatcagactagattttctttttgaaatgcaaattgataatagccattagttgtttcctatgttgctgagaacccagaggaagataataaatgtccttgggatagactggggctccaaagatcatgctgtatacttttgaaaaagcattaaattgtagccagtgaggaatcagaaaccaatcttattgccatgttcttaacacaatctttttccttatcttccctcccttccattattccttgctgaaacattagctttgcacaattacctgctgataatggtagctctatgtctttctgcgtgcctgcctatctgtctgcttgtggaaagataaagatagatattccattttctaatcccctcttttgcttgggaagaaactagaggttcttcctcagattgggcaccagaaggtaaagagagcagggggtcaaaaattgttaagaagggcaagactagaactttcctactctccccatgccctggtttcagagaatcattgaaggggctctttgatgaccctaggacactcacctctaagcataacaatattctggaaaacctttgacaaattatagcaatttggttgtagagaagataaatgttttctcacctggcaaagaacatgtgaaatgaagctgaatctactgcaaacggggaagtgggtgtttaacactgcatgcataaagtattgatttgtatcttttcaaatttatggaactgttatcattttatatgtgtgctttatctgatgttttaaaattatgtttttgggatttgcccaaatggatacatgtagacctaattcattcattttttattgccatatagtattccataaagatattatcctgtgttttctcctcaaagttacagttttcctttctacatttaggtatttcaatctcctagaatttatttttgtatgtgtgtggtatgagataggcttccaatatttttccatatggattattccaacatttttttcaatacatcatttcccaagtggttcctaccactgcttctgccatgcaccagattcccatgtctactgaatctgtttctcccagtaatctcattgtcacatcctgagtcaacaccacgtggatttaaatgctctatagtaagatttgacctggtcgattcacatgcccctccttatttgtcttcttgaaaattattttggttcttgtttctttacttttccatatcagtttaagggtcacattttccagctcttttcttacaactctgtggaaactttgtttggtaatgcactgaattgatttatcaccacaggaagaatcgccacatttacaatacgaagccttcccacacatcagtatggcagatctcttaatttatacaggtcttctttaatatttttctacattttataatgtctttttcctaggtacattgcaattttggttgccctattgaatacttattattgctaaactgtcttaatattattaatttctatatagtgattttgcatccagcaaccctgctgagctccttaaagttaaatttttctgtagattcccttggacttcctatttagacagttatattatctgcaaataatgacaaacttgtttcttcctttatgattcttataccacttttttatttttcctgtcttattgaattggccgggaccttcaacaagatggtaattcaaagctatgacagtgagcatatttattttgctcttgattttaaagtgtgtgcttctaatgtttcactattatgatgtttatgagagtctcataattactttttatatcaattttttccatttcttgtttgttgagactttcatcatgaatgggtgttggcttctatcagtatttttatatttattgaggttatcatatagtctttcatctgttagtatagtaaatctgtaaactaacaggtttgttagtctatttttaatggttccagctgatcattttgctggattcaattaggtgtatttcattttatctattttgctaaatgaggctggcctgtaatcttctttcataaactgtccctttgggatgttccaactctctcctcaattgtccctgggaactccaacttattcttactttgtttagcagagcaattcatctctctccatctcctacaatgtttctcaacaagtgatctaaggatctctatgcacatataattttaaaatctaacatgtaagattaattattatattcatagaatttctaactttttatgttttcaaaaacagtgtatgtgcttcaaaaactgatttcattcataatggttaacatggagttaatcataggcagtttatcttgactaatgtattttattgtcacctgacagttatttacacttgtcagacttgcatttgccattattactgtcgctttgcataatatcacaattcaaaaaaaagagtcatcacttcgaaagtggttttctgaagcataacaataatgataaaaatagaaatataaatcctacaatgtgaaataaggtcacaatgtaagtaatgaatggcctccattgtaaaaatacaaagcatgaatctgtttgtcatgagacaagtggataatggatgtggataatctcccaaaaccagacaaaaatatataagaaaatgggagccatgacaatgaataatgataattgaattttattggaccaatgatccttttgtcctagtacccaatttattatctgctaacgtttttgtcaagtaatgatataaagctatcaaaacttccatattattttccaataaagtttatcaaccccacttttaaaccaattgaatatctctactacaagcacaaaataaggctttcccagtataaaattgtgaaaattttatgttaaaggttgagaagacaacaaaactatagagtcatcattcatcctcatatcaaaaataagcacaattgcactcctgctggtaagatacaaaaccagtttccaaatcaattacaaatattgtggttggagaagaaacaagaaaaacaattggtataattccttaattagaagtattgcattccttataatgtgactggcatttaaagtcaatgactgttaggtatacgagcagacattttattttatagttgaacaaaactatgaataagtaagttgtcagcatatcttcactatatatatgggaaagactcagtgactttttgttctatttatcatgaagctaattttaaaagaagagctctctggtttaattaaaaattagtttgaacctatgaaacagactttaaaaggtatgttggcttatgcactaatgtttgtagcagcgttattcacaatagccaaatatgtccatcaacagatgaatggataaaaaatgtagtatatatgtaaacaattgaatatcattcagttttaaaaatgaatgagattctgatacatgccacaacattgacaaagcattgtgctaagtaaaataactcaaacgcaaaagaacaaatgttgcatgattccacctttagtaggtacctagaacaggcaaattcatggagacagaaagtagaatggaagttgccagagagggggaatggggagttattatttaatgggtacatttctgttcgggattataaaaaagtttggaaacagatagtggtgatagttccacaatactgaatgtacttaatgccactaaattgtgtacttaaaaatggtgaaagtggtaaattttatgttatgtatattatgcatattttaccaaaacttttttttaaaagaggaaaggtgttaaattgccattgaagaaactccagccacatggtcagcaaggaaaggtatcactatccagatagaagatgctgctcccagatcccaatgctagtgcataccttattcacggaacgcagctgggggtctgtaatatgcctccagattctgatttgctgttgaggtacacagtggaaattgtgaatacaaactgattgtggtcacttagtgtacatctctttggcctactgggctgaaatgaaaagtgagtaagagaggctgctctcccacactgaattgctttggctggcaaatgggaagggcttacacagagttttaaaaataaggaatgaaatgttttaaattaccatttttatgaatacaagttgggtatctcagtgatccattcagaatttgaatattatgaatctttgttttcagagcctgaatatcgggatttgtaacaatcagacatcagtggtgcaagtggctcaacggctgagaacttgactttttcccaatacccaatgattttcttcattcaccagaaaaagcacttaggaaataacacattgggcttattaaaaattacatctgaatgctgcaacccaacatcaagaaataccttgcagagccaaataccaccaaagagaggatgcaactccattagctgctgttgagctggggcacttgccttctggtgaagcactgaaaatagtctttagagagcactctctccataatttctgggtctgtgtttgatttgacaaaccagaaatatccatcaaagcttcccaacaacctataattctgagttaagattttctaatttagaaaacataaagagtgtgggggggaaaccaacaagatatggaagctgacagctcaagcagctatgcaaccagatatagattcctaaatgatttcaaacacgatttctcctctcacagatgtgaaaaaaaattattcactttttaacttgacttttacttttatttaagacatatatgttcataatttaaaaggtcacagagttttataaagattctgacaaaaaaaacagcaatttcatttttctcatctcttctttccagaggccaccacttttagctttttttacctgtgtcttctgatacctccctatctccaataatatactcataatactaatttttaatttttcaatttctgatgttatttattggcttcctattatgagaaaaaacttaaggccacatccacaaactcatttcctctcaccctcatcttcctgttacagttatattgtaatcttcagttagatcatcagataatatatccattgtatgactacatatataattacattacattgctaagtaaacactgtttacagctgtgtcatgcagtgtactttgactatatttcctttttgcacaatgtttttgctttccttggagttaataaggattttatttttttgtttgctcagttttctatttatccctaatttgttcccaaactcttctccagatgtttaattgttgcttcaatttatttgcacacatcaggtgcatgtgtatcatttttttcctatgggaatcacagctagagtacttcatcttctgcctcattctgacctagatgttttctaggcctgatgcacagctgttttctagagattttttcttcttcattctttttttggattccttttgcctcttccctggatcgcatatatgtttcttgtttgaatggagcatatcctctagtaacatttttttttaagacaaagtctctctatgctgcccaggctgttggcctcaaactcctgggttcaagtgatcctcctgcctcaacctcccaagtagttaggactacaggtacataccaccatgcccagcttctagtaactttattagaagggtaactaagaagtacatttcccaagacttcatatattctaccttctttgacagtttggctagggaaagacttctgtattagaaattatttccctcttaattttgaaggccttgctcattgtcttctaatttctttctagacctcctattagtcaaacaatatacctcctagtctgattctctaattttcaaactttttatcacttcctatccatttctgcttttttgttccacttcctgtgagatttccaaaactttatttacaagtccgcctattagtgttttacttttgctatcatatttttgttttcaaaattccattttgtctttgaaggtactttttacatccttctgctcttgttctatacgtggagcctcttctcacctcttaactctctaaaaatattagtacaggtttttttttttttgtttttgtttttgttgttgttgttgttgctgttgttgttgttgttttggagacgaagtcttgctctgtcacccagactggagtgcagtgacgcgatctaggctcactgcaagctccgcctcccgggttcacgccattctcccgcctcagcctccggagtagctggaactacaggtgcccgccaaggcgcccggctaattttttgtatttttagtagagacggggtttcaccgcgttagccaggatggtctcgatctcctgacctcgtaatctgcccgcctcggcctcccaaagtgctgcgattacaggcgtgagccacagcgcctggccaatacagttttatttctctaactcttcttctgccctctttattgtctctttttcttttcttttcttttcttttttttttttttttcagttgtttggttgctttggtttctggtgttagaagcatccttcaaattcctgatgctccttggctggctgttcatgttaaaagtgcagcatcttcatgggctctaaaccagattatcttctggaaacttaacgaggagcagaagtgaatagggaggggagttgtttgcctttcagtaggtaaacttttctttatatgcatttttcagtatgcaactgtttccctcttcttcaactcttaagaaaatgagcatccaatccatttctggagcagaaacagtttctcattgaatggatggcataaagcagcatctagaaagctcaactggttcctgtaaaaaactttcaagcaattctttcagccctacttatcaccctcccccaaaccttgctttcagagatacttagcatctctaagttccaagcagttctggggctctgcagcatagcttggcttgcttctgggtattccctgcttcagccagttttcagctttcttaggtctgctctgtcagttaccactcatcagtctgcactccagtttctaaaaactgggagtttttagatgagcctccagcttcttgcaggatagggaggccctggcagacataaacaggagaatccttgctcttcacccgctactgccctctgcctaaccccagaacagcagaagctgctggctgtcccagccacacacatccctccccactccatctatttgtgtggcccttctttttccctcagtctgtgtcttgtttcctctccttaccttcttccccctcatcaccttggtgatattctttgcatgttttttcttggagcagtcagagcaggtcatccctccctcctggaagaaggaaccccctgagtacactccatggcacagttgacactccttttctaccctccttcccagatatgtcttcactgtcatttacacctttgaagccttgataaagatactggcaagaggattttgtctaaatgagttcacgtacctgagagatccttggaactggctggattttagcgtcattaccctggcgtgagtatatctctatgcagatctgcatgtgtgataggagaggggacaaaatggtgggtaggagacagggctaacatgcaggtcccacttggacagagtgtggagactcacaccatgaacgtttgctccaagaaccactgcaggaatataccaggagaactgaaagaattcatagatccttttaaataagtggcacactgctggaaattctgcaagacaggtgaaaaactgtgagctcccaaagtgtgagggggggaaacctgcctccaaacatacatcccaactgggtaatctgaaaatccagatcacaggagaagaatttacccttacctggaatgtaaataaatttaggaagccacacaaaatataaaagtagaaacagcaaagggaagtgccttgtaggcactcccagtctccagcttgagaccagggaatccatccctgactatgtctcacaggcacccttggggaaggcagccagtggaatcagggaggggtcacaggatgaaagaagtttcaactaaaattagtaataatttcaactgggcacaaattttcttgagcagaatccagggggcaaatgggaactgcaagcagacagtgagggatgcggtccaaaagtcatgctttctttctcagtggggaagctcacagcctggggcaaggtctgagtagggcactgcaggagcaagaccagcctcaccaactacatgagagctaggtgaggcctctcactagcagctatcccccacttccctggagaactctatggcacagcagaggcagccaaaattccctctggaacacaaccccactggcctgagaaccaacccccatccaccacagtggccacagcaatccctacccaagaagggtctgagtctagactcacctacccctgcccccacctgatggtatttccctacctgccttggtagctgaacacaaaacccagaaactctcggaagctttatggccctgctcatcacctaagaaactaaaatatttaccctggccaacttagggtgagcttagatcccccttctactaatgcactagtgctctcttgaaagcatcacctaccggctggaggtcaaacagctcaggccattaaagcaactcatgacagaataactttgatcccaggaaaaagaaaacaacaaccagttgcactgcctgcaacatcctggctaaccagacgtcctgagtctgtccatatgacaacttcactgctaacataactagcattcaagaaagccagcacactaaatctatctacagcctaggactctcacagactctacttcattcctctgccaccttcaccagaacagatgctgatatccatggctgggagacttcaagatcaatcacatcacaggactcttgcaggcatttcccagtactaccccagagcctggtagcccctctgtgtggctaggcccagaagaacaataacgatcactgcagtccagctctcaggaagccccatccccaggggattggggagagcaccacatcaagagatcacccatgaaacaaaagaatctgcacaacagccattcagttccagatcttttctctgaaatagtctactcaaatgagaaggaaccagaaaagcaattctggtaatatgacaaaagagggttcaataacacccctcaaaagatcaaactagctccccaacaatggatccaaactaagaagaaatctctgaattgccagataaagaattcagggctgggcacagtagctcacgcctgtaatctcagcactttgggaggccaaggtgggcagatcacctgaggtcagaagttcaagaccagcctgaagccaacatggagaaaccccgtctctactaaaaaatacaaaattagctagatgtggtggtgcatgcctgtaatcccagctactcaggagactgaggcaggagaattgcttgaacctgggaggcagaggttgcggtgagctgagatcgcgccattgcactccagcctgggcaacaagagtgaaaatccatctcaaaaaaaaaaaaaaaagaattcagaaggctgattattaagtgattcaaggagacaccagagaaagataaaaaccaacttaaagaaatttttaaaacaacaagatatggatggaaaattctccagagaaatagatataaagaaaaaacaatcacaacttctggaaatggaagactcacttagagaaatacaaaatgcagtggaaagtttcaacaatagactagaacaagtagaagaaagaacttcagagctcgaagacaaagcttttaatagacccaaactaagacacacaaaaagaaagaatttttaaaaaaatgacaaatcggccaataaatttggaatcatgtgaaacaaccaaacctaagaataatgggtgttcccaaggaagaatagaaatctaaaagtttggaaaacttatttgagggaataattgaggaaaacttccctggccttgttagaaatatagatatccaaatacaagaagctcaaagaatacctctgaaatgtgtcacaaaaaagatcatcacctaggcaaatagacatcaggttatctaaagtcaagacaaagaaaagaatcttaagagctgtgagacaaaagcctcagataacctataaaggaaaggttatctgatttacataagattaacagcagatttctcaactgaaaccttgcaagccagaagggattagggtcccatctttagcctcctgaaacaaaataattgccagccaagaatattgtatgaagagaaactaagcttcataagtgaagacaagataaagtttttttcagacaaacaaatggtgagagaattttccactaccaagccagcactacaagaaatgctaaaaggaattctaaatcttgaaataaaaccttaaaatacaccaaaatagaacctccttaaagcataaatatcaaaggacctataaaacaataacacaataaaaaaaggaattaaggcaataactagcataatgaatagaagagtacctcacatctcaatactgatgttgagtgtaaatgccctaaatgatccacttaaaatatacagaagggcagaaaggaaaaaaaaaatccaccaaccaagtatctactgtcttcaagagactcacctaacacataaggagccacataaacttaaggtaaagagatgggaaaagatattccatgcaaatggaaaccaaaagcaagcaggagtagctattcttatatcagagaaaacagaccttaaagcaacaacagttaaaaaaagacaaagagggacatatataatgataaaataattggtctaatggaaaaatatcataatcctaaatacatatgcacctaacactggagctcccaaatttataaaacaattactactagacctaagaaatgaaatagacagcaatataataatagtgggggatcaatattccactgacagcactagacaggtcatcaagacagaaagtcaacaaagaaacaatgaacttaaactgtaacctagaacaaatggacttaacagatatttaaaaaacattctaccaaacaactgcagaatatacattcttttcatcagcacatggaatattctctaagatagaccacgtgatagataacataacaaatctcaataaatttaagaaaatagaaattatgtcaggtatcctctcagagcacagtcgaataaacctcggagttaactccaaaagaaaccctcaaaactatacaaatacatgaaaactaaacaatctgctcttgaatgatctttgggtcaacaatgaaatcaagatggaagtttaaaaattttttgaactgaatgataatagtcacacaacttatcaaaacctctgggatacagctaaagcagtgctaagaggaaagctcatagcattaaatacctacatcaaaaagtatgaaagaggacaaatagataatctaaggtcacacctcaaggaattagagaaacaagaacaaaacagacccaaaccaagcagaagaaaaggaataacaaagatcagggcagtactaaatgaaattcaaataaaaataataataatacaaaagataagtgaaacaaaaagcgggttctttaaaaagatatagaaaattgattgaccattggcaagattaaccaagaaaagaagagagaagatccaaataagctcaattagaaataaaatgggagatattacaactgataccacagaaatacaaaaaaaaaatcattcaaggctactatgaacacctttatttgcacaaactagaaaatttagaggagatgaataaattcctggaaatatacaactgtcttagattaaatcagaaagtaatagaaactctaaacagaccaataacaagtagcgagattgaaacagtaattcaaaaattgccaaggaaaaaaagtccaggagcagactggattcacagctgaattctatcagacattcaaagaagaattggtaccaattttattgaaactattccaaaagatgcagaaagagggaatcctcctaaatcattttatgaagccagtatcaccctaataccaaaaccagaaaaggacttttaaaaaagaactacagacaatatccctgatgaacatagatgcaaaaatcctcaacaaaatgctagctaattgaatccaacacatatccaaaagataacacaccatgatcaagggggtttcataccagggaggtagggatgatttaacatacacaagtcaataaatgctgcacgtcacataaacagaattaaaaacaaaaatcatatgatcatctcaataggtgcaggaaaagcatttgacaaaatccagcatcccattatgattaaaaccctcaaccaaattggcatagaagggacatactccaaggtaataaaagccatctatgacaaatccacagccaacattataccaaacagggaaaagttgaaagcattccccctgagaactgaaacaagacaaggatgcccactttcaccatttctatccaacatagtactggaagtcctagccagagcaatcagacaagagaaataaataaagggaatccaaatcagtaaaggggaagtcaaactgttgctgttcaccaatgatatgatcgtatgcctaggaaaccctaaagactcatccaaaaagctcctagatctaataaatgaattcagtaaagtttcaggatacaaaaacaatgtatacaaatcagcagcactactgtacaccaccagaaaccaagctgaggaacaaatcaagaactcaatcccttttacaacagctgcaaaaaaaaaacaaaaataaaaacaaaaaaatcttaggaatatacctaaccaaaaaggtgaaagatttctacaaggaaaactacaaaacactgctaaaataaatcacagatgacacaaacaaatgggaacacatcccatgctcatggatggataaaatcaatattgtgaaaatgaccttactgccaaaagcaatatacagattcaatacaatttccattgaagtaccacatcattcttcacagaaatagaaataacaaccctaaaattcatagggaaccaaaaaggaatccacatagccaaagcaagactaagcaagaataacaaatctggaggcatcaccttagctgatttcaaactatactacaaggctatagtatagcctgtaccaaaacagcatgatactggtataaaaataagcacatagaccaatggaaaagaatagagaactcagaaataaagccaaatacttacaagcaactgatctttgaaaaagcaaacaaaaacgtaagtggggaaaggacaccctattcaacaaatggtgctgggataattagcaagccacatgtggaagaaagaaactgaatcttcatctctcaccttatacaaaaatcaattcaagatggataaaaggcttaaatctaagacctgaaattataaaaaattctagaagataacattggaaaaactcttctagacattggcttaggcaaaacgttcctgaccaaggacccaaagcaaatccaacaaaaacaaaaataaatagatgggatctaattaaactaaaaagctgttgcacagcaagagaaataatcatccaagtaaacagacaacccataggatgagagaaaaatctttgttatctatgcttccagcaaaagactaatatccagcatctataagaaacacaaataaatcagcaagaaaacaaacaaataatcccatccaaaagtgggcaaaggacaagaatacgcaattctcaaaagaagatatataaatggccaatgaacaggaaaaaaaaatgctcaacatcattaattatcagggaaatgcaaattaaaaccacaatgagataccaccttactcctgcaagaatggccataaccaaaaaataatagatgttggcatggatgtaatgaaaaggaaacaattttacactgctggtgggaatgtaaactagtacaaccactaaggaaaacgttatggagattccttaaagaactaaaagtagaactaccatttggtccagcaatcccactactgggtatctacccagaggaaaataagccattattaaaaagacacttgcatatgcatgcttatagcagcacagtttacaactgcaaaaatatggaaccagcctaaatgcccatcaaccaacaagtgcataaagaaaatatggtgtatgcataccatggaatactactcagttgtaaaaaggaatgaaataatggcattggcagcaagctggatggagttggagactattattctaaatgaagtaactcaggaatagaaagtcaagcatcatgtgttcttaattacaagcaggagctaagctgtgaggatgcaaaggcataacaatgacataatggactttggggacttgggaggaaaggtgagacgaaggtaagggataagagactacacactgggtacagtgtacactgctcgggtgatggtgcaccaaaatctcagaaatcagcgttaaagaatttttctgtgcaacccaacaccacctgtttcccaaaactattgaaatacaaataaagaacttattcatgtaaccaaaaaccacctgttccctcaaaactattgaaataaaataaaataaaaagatttgcatgggtgtccatgtggggcttatgggtgtatccaggctcacactctgaagaaggttcttcatctcagttcagcttcctcatttggaattgtatggcctggggttcttgccacagagtaccgcttcgggggttgctttccaagattagtcccatgcccatgaggagatgtcagagacctcaaatctgagataacagttagcctgtcacagtggatcagaaaaggcccagccttgtacccccctgacatggcggtctccttctgagaaatcagtgtctgaggagactggttggtcaaactcctgtgtttgaagatccgtccacatgcagtgttgcctagatcacaatgcatcttctcaaagggtccactctgaaagatgttgcaataatgaaatcagtgtcagtgtcagtctatagatggcagtgtcactagattctaagtgtccattctgcatcctttctaggctaatgataccccaggttatccttatttatgctgcatgcatccccaggacccttgcttgcagagatgctgactaacttctggtcctacagatatgttggcacagcaatagatctccgtgggatctcaggcctgcggacattcagagttcttagagcattaaaaacagtttctgtgatcccaggtgagcatttattcacagagcatatgttggttttcacagcctaactcccttctctaattttcacaagaaccctgtaaggttccagggcaaagactattgtccccacttacaagacaaaggaactgaggcctggagtataggaaacataaacccaaggcctcttcactagtaagagacagtgtgacctggaagcctattgtcccaactcctaggccagtgctcttcccacataccacatggcctcacaatcaatacgtaacaggaggggcatgtcttcactttctgttctggttgtgggattcaggcaagacccctcagttgaatttttatttataccttaaactaaaggattaaacttggaaatggggaggaagggagaaagcagtcccagtatcttcactgtttccgtaggtctaaaatcctgtctttagacacccagaggaaaaaagaattaggcaattcttgattactgagaattcagaaacaaaagtagtccatcaaagctcattgtgtggggcctctaagatctccactgtcaccagtagcccagcgactactcttcagcccccatgaggttgatggtgaggatggggaggccagagacaaggcaaactttctgaaatgggacttgatgcttcccctctgtggcctgataggttctctcctctcaccccaagaattcgttctcttatctgtaaacagaaacacccattctagagtggaagtcttttctaccatttcttgtctggctctgcagggaaagataggaaactctctgccaattcccactggacacacctcttgaagagagccctggtcctgccccttcatatctctctcacttactctcaactgggaagaccctgagtcttatttgcaagacctggtctgtccatactgtctcttctgcctcatctctcacctctcctcacatctcaccatgctctggaatccacctacggttctgcaaatactccacaccattgctcacctcccagccttctactgtgctgccccttcttctgggatatccttcctcctctctttactcaactcacactcattcctcagggctctgccaaggttttacctcctccctggttttcccaccttcctcacactccacccaccccattcccacctctggaacttcagttaagggctgctcccctgtgtgcccatctgctcagtaatgctacagactttcccctcaattgtcagacaacggcactcgacatgctgctgccttagccatcactcagctcccagtccagggactgacacatgtagtgctcagtggattatttgctgaccaaaatgactaaccaaaaataaatcctagattgcttccctggtcagagctctttctgctacctgcgaagctgctctcccaaagaagttgattttacttaccagagcaacaaatcatccctccttaaacaagcaggtgtatccttctttgctgccagctgtgcttggcacaagttctatttatgccccagtgactgtctcagtgtttcttatagtctctttctattgctaaactcacctctctgtttctctgtgtctctttctttttctttctcttggtctatttttgtttcactctatctctcttgcatctctctctctctctctttctctctctctctctctctctctctctcacacacacacacacacacacactcacacacagtgaggttcatgtgtcccaagtctcaagctgcctcccagatgcatgcagaaagacagatgccaaattactggggtgaagttagtagcttcatgcctagcacagtgcctggaaaaagtaggtactcagcataaattatttaaattgaattgctagtgtcaggaattttattagcctcaagatgataaaaaatgcattgcctgggtctcagttgcatcgtctttataatgagaatagcccctgactctctgcctgcctctcagagtaaatgcaagcttcggatgagaaaggtcttggaactgccctggagtgtgtacatacttcactcctgtatgtagagatgaaggaggatggctaagatgaagaagtgtgctccgtgtgtgctacctcatccatgtggtcataccactgtcatcttcccgcaggcctgaaggtcattgtgggggccctgattcactcagtgaagaaactggctgatgtgaccatcctcaccatcttctgcctaagtgtttttgccttggtggggctgcaactcttcaagggcaacctcaaaaataaatgtgtcaagaatgacatggctgtcaatgagacaaccaactactcatctcacagaaaacgtgagtggagtctcttccatagggaccaaggtctggttggacccttggtatcatatagggacaggggatatggagcccctgtgtgtgtgtatagacatatattttgactcccctttcctgccaaaatggttctcttgagttgtgttttacttttgggtattctatttcctgttgctcagcatccctcttgcaaggaaatgagccataaatctagaggcaagtcattctacctctgctgggggagattgagagccgaagtcactgcttagctcttctcttttcagatgtgactttacaacttccatgtggcccagcatgcccactgagtacatgtagccaaaggagctcactttggaagacttgggaatattgcattcaccacacaaggcttgggttggagggttcagaaccatctgtgaggctttcttttcttcctttcttcagcagatatctacataaataagcgaggcacttctgaccccttactgtgtggcaatggatctgactcagggtgagttcccaacttatgacaaagcacgagtgcccaacaattccttctccatcttgtccttggcatattatgggcacagatggggttgcaggtcctgggaaagatgtataaataaataaatcatggcctttgccaacccagagctcatggggagggaatgtatgagttagctttcgctgtgtaacaaatgaccccaaaattttgtgaattaaaacaacaatgtatttaattcatgattctgtgcatcagcattttggactgggatcagatgggcattgggtgacattgactaggctcattcatgcatatgcagacagcatattaacttggagatggctggtctaggacgtcctgtctctgctcatgtggcctctcacccccaaacaggttagcctgggcctgttctcatggcagtgttcccagaaaaacagtggaagtttgcaaggcttcttcaggcctaggcttagaaccaacacaatgtaccttttgtacattctgatacattcttgactaaagcaagttgcagtccagtagagatccaagagacagagaaatagacttcatcactcaatggaaagagctgaaaagtcacattggaaagggtgtggatacatagagacaagaattatagccattttaataaataatctaccccaggaaggaaccaatacttatttgtgtcaaatgctctacacttaatcatcacagctaactccattctatagccacattaccctcacaagtagaggaaaaaacacatgtatcagactttgcaatttcgaattcttacagaggccagattcataacaacaaatgagtggagtgggccaggagggaacctaggagctgagagttcatgcctcctctaaaggggacagccccactgctcggtccagcttttggttgccatgtggaaatgtgggttcactgtttccagctcttccaacttttaaaatagagataggaaatttagatttttatataaaatctcccaaccgtaaacattggctacctattccaaaaaatgtctacatattgttgggccaaacaaaatatttctgtgggccaaatccagcctataagctgctagtttgcaatttctcattcatagacataaagatgctaccctgtggaaaacaagttctttactagaggcttcataggctgggcaaacacagtgaggtggcggtgtgaggcaagagagaaagtagggaaggcttcctggaggtggtgtttgaggtgagctttcaagggcaggtaggatgtctccaggctgggtgaatacgagatagtttcagcgaagaccattccaggtggcagaacagaatgtgagacaaagctaagggatgaggacccctcagctctgcctgctgctttggccactggaggaaggcatgagcagaaagactttaggcaaaagatcaaaaaggcccatctcacccacctccatggctgagagcttggaaaagcagagctcacaacacccccagtgcctgagaggctgacggctccatgttgcccaggtcgacctgtgtggagcctgcatgaggctccaccttcatcagctcactaggaaaactatctcagttggagctgaggactggaaacaagcaggagcatttggtcaacatcaggttccttggactgttctttcacaaatgcacttggcatttggttctttggctcatgagagggttgttctgacatcagttttcatttgcctttgacttaaatgtaaaccaagagcccctcagcatccttctgtctagataatggcatttctcaaggcaatggctccagagcagctcaagtcctttttgtggtaaagttgttgggtccatctacacacctctacagctcagctccctgagaggccaggcctgctattgggcaggtgccagccaggcagtgggggagtggaccaggctgggatggcagagagaggccagctcaggataacggacagagtgaaccctgccggggcatgccgtgaaagctaaacctgggtcctctgtggggctgcagagaagccagagtcctgaggaaaggcccacattggccaatggcactgtgggaggaaggtcaggggtctcaaggcagaaaatggataccagaaaatagttgataattttcagtgttcttccacatatattattccagtttatcctttcagcagcttccaaggttaaaaacaataggaattttcctttgcagtttatatacaatatttactatgcagaagtgcaagacactatacagtgatctcatttaatcctcagagcagtgaactgtttatatgcagtggctatggtggatttctacagaagacatagaaacaaggctgccctcagagttaattaagaaacctacaggaaatgggttgcctagccccttggaagagcaaaccaagagcctatctttaaatgtgggtctacaaagccagggaacttgcaatcttcaatcgaagtggagatagacttggaactgattagaattaagttgtcagagctctaatccatggtatgggttgttcacatggatgtctgggataaggagagccccagaggttggagttcatggagaaatcctgggagtaaaagaattccatgtattcacaaggaatgcaggtaaataaaacaggagaaaaagaaaaaaatttaaaaaaataattctggacttcaaacgaggcattgctgtttcattgatcaggccatctctgctagggtggatgagagcactttacgctccctgagctgacagatgcttcttgacatcgactcatcctcctattatgagagagaggaaggagttcagcattcccacctcaatactcaccaggcagtcatttttaatctggccttccttcataggccatcttcaggaggaggctaggctgactcaagtattgggctacttgacagttatatttctccttttaataaatatattgacacctgcgtagttttaggcaactgacttctttctgacccccagattccttatctgtaaagaaagaacattgagtgattaaattatagtgtttgtaaagcacttaaagggagagagaagaacacagaaagtgctcagtaagtggaaagtgttatttccactgttacatataattaatcagtgaacttggctaatgtgagacctcccttgatagacaactctgcagatgatgccaacaggctcaggttttaagtctgcgttattgctactgactctcatttccctggtatgaactggcaaagagcttatagtatcgtgtctgggcagtcagctgccttccccaggccactcccctgtgtatgaaattctgacgtgaaagtattagcgtccccgttttatggataacagaaaccaatacctaaacagaccaagtgtccaagatcatcctgctaataagaggaagactaggtcttgaactctgatctctgacataaaactctgtggttgtctcgcagccctgggctaccttgtctgcaataagcaggggatgaccttctctgttcttgctgcagccactgccctgatggttatatctgccttaaaacttctgacaacccggattttaactacaccagctttgattcctttgcttgggctttcctctcactgttccgcctcatgacacaggattcctgggaacgcctctaccagcaggtactgagctgcattcccccacgcagacttggttggaggctggtgggtcagctgcatggctgtgcttttcctggaggaggctgacttaaattcaggggtccatgtgctatgggtacaggtttctcttctttcccttgaacctgcagaccctgaggacttctgggaaaatctatatgatcttttttgtgctcgtaatcttcctgggatctttctacctggtcaacttgatcttggctgtagtcaccatggcgtatgaggagcagaaccaggcaaccactgatgaaattgaagcaaaggagaagaagttccaggaggccctcgagatgctccggaaggagcaggaggtttgtgaggagtggaagctttgtgaagaaggttgcagactgtccattcttggatactgttctggactagccacttcaattagggcaccgtttagggagctataggaggaatcatcttgcctcagggaccatattagatcaggttttctcaaagaagaagctaagtgaggattcttgtgcaagtgacctattgagggagtgctctcaggagaaagcgaatgaagcaaaacagaatggggcagagggtggaactaaacaaggagtgttctcagctagagaccagcttcagcttgatcccatggggaactctggggcatgacctgtaccacagttagtcctaccttgaggcaagggggccagctttttttttttaccctccccatacctatcccagaagcaggcagccaaaagagactttttttgtagaatgctgcaagtatgagccatcagctgctgccatgcaagcagctcgggatagctgtgctgacctggtgaaagggatctgggtggggcaccaacagagtaccccatgaatgagtgggggtgacccgaggtgtctgttcctgccatggcctaatcccaccaccaccctggtcctaacccttcagcttctctgtttcagatctctcacccctggcaccccatgtctgggggacacattcatgctaagtccaagcaaatactattggctacacctgctgttctctcttcgcaggtgctagcagcactagggattgacacaacctctctccactcccacaatggatcacctttaacctccaaaaatgccagtgagagaaggcatagaataaagccaagagtgtcagagggctccacagaagacaacaaatcaccccgctctgatccttacaaccagcgcaggatggtaagaggctcaggtttgtgctctaaagattacccaccattgcagctgccgtagacaatgagttggagtgggaagaggtgtgtggcagagaaagagctggaggcatagagcctaaaaggatccagacacccctccaaaatggtgtcttaaactaggaaagtgtaattatagatggggaaaaggggtgaattataaggacaccttagggaagtggatcaacaagattgggattgtggactgtggaaaaaggaaaggggagtccaatttgactcccaggtttcaggattgggcaatcaaatgggtggtgattccaagatgaggacactggaggaagaaccccggtttgtaggaaaggtgggaagcccatactgaacatgccaatcttaaggtgtctgcggacatcaaaggtcagcttccttctgaggctctggtctgcagttctagagtgcaaggttccctgtccgtggtgctgagatccttcatgcaccttttttttttctgatgcgtcgaggtggtttttatttttttacttagttttttttaattgacacttcacaattttatataattattgggtataatttctgacctccttcctaaggtcctgcaattcaagctgtcacctgttgttatcagaaaagtttccagcacccatctctgtgacacaatccagcctgggaatggcttcagcacctcacctcagaccctgtagcaattcttttccccccataataactttctgcctcccactctaaaatttgcactgcaactttcctcgccacgcttcctcccaccaccttcctgccccttgaaagtccttttaccccaaatatgccctttctataggtctgacagataatatctgctgtgtgggagggtggctccacactaacagtgtggaaaaggggatcaacatggctatttttttatgctttatacctctcacttccctctcaatctcttttcctgtgctaagccgaaggatattttacttttttgcaataccatctctccaaccctcagatttatgtgtgcatatacaaacacagacacacttgcatgcacactgacctcatgacacatccacacttcagcatttatctgcatctgtgccctcctctttcttgctttgccccttttgagcagcacctggcatacatggggcacagttcagacaatcacagaacaggatgaatcacagcttccatggaaatgtcaatgacactgaattgggctttaatttcccccattctgtcagccccacacagattagcacttggatgtccaataattggtatgtgtgcttgtctctccagtgatgcttactttcaaagggaaaaaagaggagctgtaacttgttcattcaacaatactaggtgcttggtataaagagatgactagaacatgttcttttccctaaggatttccatttgggtggaggaggcagatataaacacagctatgtgttaaatagtgtattagagacacatacatggtgttttgagaatcagggaagaaacatccactcttatggggctggataggtatcagaaaaggcttcctggaggaaggcataattgggatcaacaataaatagcatgtaggggttcttctagtaattgaagacttgagagagtttggggaggagtattttcctggcagaaagaacaacatgtatgtgcaaagacagggaggcaccatttaagtacttctttaatgctaattgatttattggagcccactcaggaaggcatcctctccctcttttcccaggtacattcatgtggtaaatagacctaatgcagtttttatctaaagccattttataaccaatagaaattaaatagaggaatatatagaagagacccaggagggtttttgtggaaaatcacagaccagttggtctcgttagaggatgaattttaaagcaattctaatgcttatactcagaagacattgcccaccatttgtcaaaaccttaattctaaaataactcgtggccaaggagacactgctgtcaaatatgcaaccaaaattttcttctcagtttcttcattggtttgcttggtgctcaagtgcaaataatgtagtattcccttccttaatatggatgtgtcaatttttctcatttgcttcaaaaattggaaggatttttgcattttatgagttctatagtccttgggcatgtattacaggcagagagtactctatttataatactgagcttttaataatggttgctaaacaggatcaggcttcaaattatcaagagaggaaacttcagttctgtgagataaggggattagtaaggagaaccccaattggcaagattctccactttagtagcttagtaataaaaaggagttaaggaaggtgagtggaataaatcggtatgatcagagtttggtatgaagtcaatgtttagattttgtacatactatagaccacctgaggacacaaatgatggtttattatggtcaagtttcactatggtcatgggaactacctaacccagcacactaattctctgagggctctgggtttatgaattagctcttttctctggcaactttaagccacacagttccctcaatggaagattttgatgggaaatgtttattgatttggaggaatgacattattcttccaggaaattaggctgcaacccttccttcagtctctccattgttgactgttcaagcctcgagggatcctagaaactcattgcactgtacagctcttgtctcctcctttgcaacacaaactctcacattcatacagatgggatctaatgaattgtactacctaattttcagacaatgaagtgcacttattcattcaacaaccacttaccaagtatgttccagtactggtgtgcatagtagcctccttaggtcacaactttgcatgtggaaaagtgaacttaggacagctttgtctagccctgtggccaaaggttggcaatcaactgaactatccaggtgacaaggtttcctctgacatgttcctgaccatgataacctatttgctgagcatcagcacgctgtaatctctcctctctcctggtctttcccggagtctatctagagtctccttttttctttttccccaccatgcatacctagaataccccttagatttgtgcctttacttagtgactgaaaggtcataaagacaggggcagggaaatgggagtaggtagagggaagtgttgggctctagatttcccagaggaccagtttccagccttcttgctcctttggggcaatgcccagtcttttctaggcctcgcctctggaaaacgccgggctagtcatggcagtgtgttccatttccggtcccctggccgagatatctcactccctgagggagtcacagatgatggagtctttcctggagaccacgaaagccatcggggctctctgctgctgggtgggggtgctggccagcaaggccccctccctagaagccctcttcctcaacccagcaaccctgactccaggcatggagaagatgaacaccaaccgccgcccactagtgagcttgcccctggagctgtcgatgtctcggtgagtttgtgaatgcttcagactccctcaggctgtcttccacctagaagccttgagccaagaagcctgagtatcaccaatggaagggatctttagccatcatcctgtccaatgcctccccattctactccttttttacagacatagaagatgagacccagagagagagagagattgagttggcctgaggtcaaacaggtttcctggtttattctgcagtagtgatgcaaattatattccatttgaccccatatttcttatcagtgcttctctgtccccactcaacatcactgcctcagtgataggcctgctttcttgttggacaggtatgagaaaaactgaaggacccttctcttcctgcttatggctctatgcaaactcttctaggctgggcaaatggcacccagagaaattcaggaagtttcttaggacagatctgaatagaagcacagtattccttgctttactcacagaagaaataatttgccaaaatgagcaaattaggcaacagtgactaactggccagcactctttaatagaataatcgcagagtgtaatggcaagtcagggattcctcattggattgggagctgtgagttaatgtgagctctcccctccagtttcagcaatgatgtttctagtgtttttcatttgccctctctggctagccagggatacagcgcaattgcagacagaattgtaaagagaccaataaatggttccactgatacagataagtcttagagttgccttagctcagtctctgactcaatgtcatgtgattcagggtcccagcaagaaacagatggaccactccgatgggctaatagagagagtttagtaaagtatttacagaggtgtgggctgggcttagggaatgaataagggacagtgaggcacctagaaactagtaacagggggaagctgttacatgcctaggctgaagggatgaaggaaaggaccagaattagactacagcagcagctgccctcatgtgtcagagaggctgcctggcagaacttgtgatcttagtagaggatcacagctctgctactcagccatagcacaggagagaagaagccaggggaaaatacctgacttgtctctccttctatccttgaatgtcctgcctatgtctcccattaaccaaacctggccagaaccagagggtaaggataacacattttgtacaggtctccctccccaggaacagagacagtggagaaggtagagagtaggtctccagggcaaatggaatcaccaaaacagagccttaaagtcaaaggcatcctgcagggctcgctgggagtgcattagcactctagaaaatgcctcactgaaggcatttatgcctctcttgtgatgggcccccaccctcctttctctgttcctgagattatcatgtgtctagatattctgaccttgattcattctagttaaattaccaggctagtgaaagattgactctttaggcccttctgtttagtatggacctatattttagtcccaactgtgccagttaccacctgagtcacatttagcaagtcctttaaattatccaagcctccttatctccccttgtaaaaaggtttctaaatagctggagggttaaatgaaataacaaagtgcctacatttttatacatgtctgacagataacaataaatagtgactactagtatcatttgcttagtcctcatggttggaagctttataaactttctttatgtttattaactgtttatacttacagtattcagcaataacatgctgtacagatttgtagcctaggagcaataggccacactatttagcctagatgtatagaaggctatagcatttgtttgtgtaaatacaatgtaggatattcacagaatgatgaaatcacctaatgatgtatttgtcagaacatatctctatctgtaagtgacatatgactatatatgagattggccaataagaggctgaatgatccaactttgccatgaagatgtcaggttaaaggagcgtcctgactctgtttgtgtctcaacaggcattcgatgcaggacaaaagaagactttcttgtcagcagaatacttagatgaacctttccgggcccaaagggcaatgagtgttgtcagtatcataacctccgtccttgagggtaagtgctgctcactgcattgttcatccactgtgtcatgatgaattcccatgtgagcagcagaagcaatgtctctaactcgtgtcaaagcgtccatctctgtgtactggaattcctaatactcctcattcttatgtcttaggccccaccatcttttatcaatgtggttttttagatgcataatttttcaaaaacaaaataatttgatgaataaaatatcctagctcatctcttgttcaaattagcatctgctttgcatgcatcacaaaactagatttttaaaagtgatctggcaggcatcagagaatttcaggccagctctccggtgtacaagaaatttaaccatccttaattttccaacatggcaaaattatccttttcatggtttcataattatatttttcatggttgtaacttacacagttgtaatttaatttcttgttcaagcccacattatgctgaatattggtagacaatttaagtccattaatcagtcaatttaactaagtccttgttaatttagaattctaccaatcaagtgggaatccactcagtctccccagcaatgtatctaagttccaagccaaagggtagaggaagagagtggcaatggtcatggccacctatccacacactttgccatagagcgtgattgcatccctctaaccttgagcaggaggtctgttctaatccagcctttttttgccttagggtatggagaatgcaaccttcatcatttccagttatcttactcccctagacaaattaaactgacctaggctggaggagttgtaagggagcttgagtgctggtgtgcccctgagaaggagtcctgtgtgttttcctcccagccctaggctgaatcctaatttgaggggaagaagtggtgagcaatagaaaccaaaaaaatgtttgagggatttcaaaacagagccaatgtgtgccctactttctaggtaaagccagaggtggcaagccttagagagagattcacatgcacagaaactgtagagtagaactagccagtaatttaccagatatgcagagatgtatctgttttgctcacagctggatctccattacctagaagagcagtgcattaacaaaggtgatatctggggggtgatgctactttatagtggtgtaaactgataaaaaggaagaaaataaggaatagtcaggtatcttggggtaggatagacttccgctcaaggaagatactgtgagagtagagtaagaaaggcaggagaaacaaagacgtttttaagaaaatctggggaaaggcaaccttagcttaggtcaaccttaggttagagaaggcctgaagcagcctcagagagagccctgtggctccagaatggcagagaggagctgggtgatgacttagcccccagtgaaggctatggaaaaagatgagtgagacccatagagggaaactagagagagaagagccatcttcatggactctcccaccagggaccagatgggagctacaactcaggcaaaatacgcttagcaatgacaaaggaccagctcaactctcctccaggtttgagccctacaaaactcagacacagactcagatattgaaatagtacccaacattgacttaacaagagacagttcccatggtgaggacttgaagcataaattgaattcaactaagttacatttcttgcatacctgagtttgtgctttgagaaatgtgtactcatttctcaacaacaacgtgtacagactctcttctattattttttctcattgataattatttaatatcactgttcattgtaatagagtctgtacttctaacatttttcatggcatagaatttgaccaagctgctattcccacaatttctttcttggccagataggtttcttggtttttgtttgtttgttttggtttttgttttgctattagtcatcaaacagcaaacattgaatacaaacagtttgtttttttcatttattctcgaaaactgttaagcttcctccttctctcttctttcatttattctcttatcaacaagcatttgttgagcccctgttgtgtgtgtggcattgcttcaggtgctgggattcagtggtgaactgatataagcttgcgctcatggaatctacatcctagcagggaaggggacatgaaagatgaatagatattcagatataagaagtaggagaaaaaataaagtaggaaaggagatggaaaattctctccaagaagaacagaaatttgaattaaataaaggaatcagctatgtaagaagctgaggagaaagttcgcagacacaaatagcaagtacaatgcattctgcaagaatgagatagcaacaagcaaaatgcatgtcccaaacacatcccagtgtaggtaagacaaaagaaggtcatgggatgaatgagaggcaacagagggtagtagttagaacactgctctggaacccggctgcctgggtttgcatcctagctcttccacttatggtacacagtgtgaccttggagcttcagtaacttttctgtgcctcagatttttagcctgtaaagtagtgagaatatacttatcttgtagagttttgtgaggattaaatgagtcaggtcaagcaaaatgcttagaaccacgactggcatgtagtaaatactcatcacatttggctattatgatttactaggttgtaaaatctatgagggcggagatgtgtctgttttgctcacagcctgacctccattacccagaagacaagtgcatgcacaaaggtgatatttgggtggttggcggcgggagtgatgctaatttataacagtgtgaactgataaaaaggaagaaaataagtaataggcaaatatgttggggtagggtagacttcccctcaaggaagatgctgtgacagtagagtaagaaaggccagagaaacaatgatgttttaaagaaaatctgaggagaggaaaccttaggttaaataaaagaggtcaaagttttctgagcatagggcacatcatcttctctggttggatgttatattcattacacacatgagacacctgaaggatgcttcatgctgccagagtcgtaataggatttataaaggccacctctttaagagggattatgcttaagaaagtttggcccaaaccaacaggagtttgacaattcactgaactcaaagcatgtgaaccttctatgcttggcatgcaagctgagatttcactgttgtccaagccagaattccagaagctgggtcacagcagtgagcttactggagtggtgagtgccttaaagaggaagtgcaggatactaagtgaaatatggtaagatttgcctggagccagggaattatcccaggctgaaaggactgcaaagcagaagagagaataacatttgaaggaatgaaaaagcctaatgtagctgtaacctagagaaccaggagaactgaaaataaggctagagggatgagttggggccagatcccaagaaactcctagactgcattaaggatatgggacttcatgctaagaggagtgaggtgccattaaaggattggaggcagggaagttacatttgcattttataaaagttactctggatacttgtagatataagaggggaagtatgttgtcagggaaaccagttaggaggaagccaagtacaagatggcagtgcttgaactctggggtagtgacagtggggctgatgggaaatggaaggatatgagagctatctaaggggcataagattcaggacttgatgatgcatatggttctggtataagtgccttaagatatgctgatacaataactcataaagggagcattttaggggaagaagggggctttaatggggaaagatgaaagaagattatgagttgagtctgggatatattgggtttcaggtgcccttggagcatctaggtaggggtgtccagtaggaagttgactttaggatataggggtctagaacttagatgacaaagatggcatatatatatatatatatatatatatatatatatatacacatacacacacatatatatatgtatatatatatatttgaaagcagtttgaatgtaagtggtaattttgaaaagatgcaactggatgagttaacacagaagggttgaagtaagaagagaagaaggcctcagacacagttctaacaaactaaatgtttaatagttaagcagaagagatggacccagcagaggagactgaaaaggaaggtacagaaataggaaaagatctagaagaatacaatgcagagccaagagtaaaaatttcttcagaaagaatagaaaggccaacagaggcaatgctgtggaaaggtcaggtaaaatgaaacatgaaaaggtccaggggctttagtcacatggatgtctttggtgatctaagcaaaagaggattaatggagtaaaagggtaggcagaggtcatattgaaggggcttaaagagcgggtgagaggtgaagaaatggagatatggtgtacagacaattttttcaagaagtttgcctgtgaggaaaaggagatagtaagatggcactagggagtagggagaattgaaagaagactttttggtttttgtgtttgggggagtttttgtttgtttgtttgttttgagcatatttgcatgctaatgggaaggatctgggagaataagagagactgaagattaagggaagaaagggtatattcaacagactcctgcagtggcaggagagaatgcacagtggagacactggtgttaacaggagcagggggacctctttaagcgtaacaggatgaagggaggaaagttctctctgttatcaattttatataggagatccttttgaggtggggccatggtcatgttttaagctggcaagtagatacttttagtctctgtgtctctgcaatcaatcaagttcaacaatgtcaaggctgtttacaaagatgcctctcttttcccatcatgcctcacaggtggctgcttcctgccaaaatggcacatctaaagtgtcctcattcatgactacttcctgtgcttctttttagtgccaaaataggtccagggaagttcttgcttttgttccaaacagggattgttgattttggtcccaggatgtgccaacttctttagagaactatgctttgccagtttggacatctgtagtttctaaaatccagtcagtgattaaaacagcatgacagtgaaaataaatagtctgatctgtggaagagaaatggacatgtgtatatgaaaacacatgaacataaatggtaataacatgacaaaaatgacatttcaaatcttgggaaaatgaaaaattattcaataagtaatgttgatataaataatcagagacaggaaaaaataaaccacatcaatatcttactctttacccaaaataaatttcaaatgcaccaaagttttaagtgaaaaaagtgaaactacaaaagaaagaaaaaaacatggagaaggtattttccaagccttgtagtgagaaaagcttcatatgtaaggcatgtatgcatatgtggctaacctgcataatgtgcacatttaccctaaaacttaaagtataatttaaaaaaagaaaaaaatttaaaataaaaaaatgaagaaaattgaaaaaaaaagaaaacaaataaaaatactactgataaatcttgactacatacacatttttaaattatcaggaaaaaacactgttagcaaaatttgggggcacacagttatttctctaaactgatttttcaagtgcatatagtaaaaaaaaccctaaacactgcaagtgtgtatgcaatgacaactatgtctccttcccactatagacccttcctgctccccagactcctggtgcacccccctcccactccagtttatcttatattcttcaagcaatgttctatgcatatataagcacatgcatgcacatacacacactacacatacatatttttctacatcaccacaaataaatctgcctcattctttttcacaatgtattatgctttatcagttgttgttttccattattattataaacaatggacatcatctttctttgcccacataggctgatatctgttcaagatgcatgtcttgccgaggaatttatagataaacctaaagctaagaaattgccctccatcgaggtgaacacagttacacatccacatggagatttaacggaggcaggtagagagataagcctagtgttcaggaagggatcagaaattggacacataatttggtgggaattggcatagagatggttttttagggctatgagattcaaaaacacagagaagctaaggtgagaatgcttgagttattcaacatttacaagcaggaaaggaaaagggagacaaaaacagaaagtgaaaagaagtggagaaatatgggagaaaaagcaagagatgatgcagtccccagagccaaatgaacactggtttcaaagagaacaatataaattctgtcaaatgttataagggtaagatgagaactggaaatcaattatttgaatttggaagcagttaaagtcagattccaggggctgcagagaaaaaaagaggtaaggagctgtagaaggttaagtgtagaaaactcttgcaaggaattttactgtcaaagaagcagtaatgaaagagagcatggggtccagagagactttttcaaagccgcgagataattaaagcatgtttacctgctcatggcaatggtctggaagggagacaggtctggatgatgcaggccttgaataggtgggagaggaaagagcccggcacaagtgggaggggtagagccacccacgcactgtgtggggcacgaagacagaataccaggtggacttgcagatatgccagagatttagtggtaggaagaaggggaagttcttttgtgaactagtctatattctgagtgaaataaaagggagctcatcaacagagagtaagtagaaagaagagccggaggttagacgggggaagaggaagtgagaaacagtcatctggaagaatgaaggaatggaatataatatagaaacacagccagatttctgggcagggcaaggctggggctcacagatctctaggagggttggtaagcatagttgtgtattttttccagccaggtccagctggttgggtgcaagtacagagtagtctacaaattgggtctattcacagttcaggttttgccaggcaagtacaatgaaggaggagaggggcaaaggaattgagggtgcctacaagggagtagttagagagatggatgtgaaatctaagctgggcaaattgagaagtaaggacatgatataggtgatgggcagtaaaaatatgtaatgtcagcagtttaaaggactggatggggcagatattaattggagttgcaggactaaaggagttcaaaatataggaaatgaataccagagacagagagagggctgaagtcaaaatgttggaggtggtacttattattaacaacaaggtctagaggatgaccgcagaattggggtccaaggtgacacatggctgacagctgtcattgaccacactataatgcagaactcgaggagtctgaacagaagtgcccaccctgcttgaccagcttgtctcagaagtatctgatctgggattgctgccccatgtgggtgaagctcaagacaattctctttgggcttgtgacggatccctttgcagagctcaccatcaccttgtgcatcgtggtgaacaccatcttcatggccatggagcaccatggcatgagccctaccttcgaagccatgctccagataggcaacatcgtgagtgctctggctggtactgccctcactggcgtggtcggggcggggtggggatgatggcagggtgcagttcgggtggggtggggcatgcccttattggttagtgtgttgagccagttagctgagagcagagcagcagtgcaggagacatgtggacactgggttcaggaggtcaagtgtgggaggacccaggctgagctggtgggaatggctttgggatgaacaagcacaggaaagtgaaccaggagagcctggagccagaggcagctagttgccctttacaaaacataggacaaccacttgaattttctggatctcagttgcctctaccttgaaatgaggataaatgtcacttttttatctaaagacaatctttggacttgtctgtttccttccaatgtaattacttttatgaccacaattaacagtagccacgattttcaatgttgtcacttaaggagaaaaagagttggggagggaaggggaagacagtggaagggaggaaacatggaaacaaggttgctgttgtaacaaaagcatcaggaagtcggaacttttctttggcatctagtttagacatcatgctgctttaaattttcctccatcacttgttagtattatttactcttaacaagatacaatccatactggatttcactatatactggataaagtatctgactcagagggacaacaactgctccaaccttgccccacccacaggaatagtaataatactcagatgcttctcatggattatctcattttattttcacaacaaccctacatggtaggcactcttgttattccctttcccagatggaaaaatggagatgcaaaaggttaaataatcttcccaagatcatagagttgagtttagtggccacatcagaatttgaacccagacagaccggctgccaagcccgcttttcttaacccctgaattaagccacctcacaagacttgcgtgtgtgtgtgtgtgtgtgtgtgtgtgtgtgtgttcaaacacacgcacacatgataggcagaagctagaaagggtcagcatcctgccttcatgtccgcagcagggtccaccaagctggaggtgacctactggattcaccagaactgtctggctttggggtccagcttcttataggctgcagacttaggtggagggggaaggcccagaggaaatgtgactacttgtccctagaaaccactccctccgccataatccagggctgtgaaaggggcagcagtaggttctggaacatggtggaatcagcatgcctcatgttttggcagcacctaggctgaggtcacatcctaaagttgatatgaaaaggaaaaatggaaagagaagagaatgcttattcccaagaagtcagcctaagaccacagagggccttatggaatagacatttgagcccacaccctcattctacagttagaaaagtggaagcaagagagagaaaaggcctttcccacagtgtcagaggaaagtgccacttttttaaagcaagaaagtcatgtgcttggtgcctgcaatgagtcaggtgctttatgaatgttatttcagtgtcacaacaacattatgaggttaacatcaccctcacatgacaaaagagagcactaagactcagagaggttaaatatcctgcccaaaattgtatagctggtgagggtggatccagggtggacccaggtctctggaagacacaagacctcaaccctaccccccaccacaccacactgacttgcctacaagggacactccatagatactctttgaatcagtcttgtggcatgagaaagtcacttaaactctcagcctgttttcttctccataagaaggatgcattgtctgtttctcaggctggtgaggggctcagataaaaagatatgaaggaaaagcacctgaccctggtcgttgctttcctccttctctgtctcccttccctgctggttgttgtgttacccgagcctggttctgacctctctcagtgtcagaattctgtcctatttaagacaattagagacacacagagcctaaaagaatcttagaggcaatgaatcattgttcttactagtcactgttacttatgaatgaattactgtctgccaggccctttgttaagaactgcacatgcattggctcattttatgcccattatacagatgaggaaattgaggtacaggaaggatgcattatttgtccaagcttacataagctaggaaatgtctgggctgggattttaatccaggtctgtgatgtcccacaacccacacgttttaactactgaaccagactgactcttcactgacaaaatgatattataataatgatcttaaagactatccgcttattccactcccaccaccattcacgtggaaaaactgcagcatgcacagcccctgagaatggtgcagaaatgtctccattctgtcacgttgactgttaccctggccaatcctcaggagcccacagataacatagcaactgaacaaaacaaaaggattttctattttgtaaataagacattttcttgctgccatttttatcattgcctccgaccccacagatcccactgtgatgaaagcttgtttccactcctaggtctttaccatattttttactgctgaaatggtcttcaaaatcattgccttcgacccatactattatttccagaagaagtggaatatctttgactgcatcatcgtcactgtgagtctgctagagctgggcgtggccaagaagggaagcctgtctgtgctgcggagcttccgcttggtaatgtttttctcttgatggcttggggaaactcccacccagattcagggaagacactgtgctctggggactgcaccagccagctcccccttcctctcctgtccttgtgggagggagcagggtctgactcctgggcgactggagacttgggtctgtggccccagcttttcgctgactcagagtggggacatgccttctcctttctgggccttggctcccttatctgcaccaagaggggacttccaagcactgtcctcgtctcttatcaaataacaataacagcaataatcacagcagctaatacttactgagcacttacaatgtgtcaggcatagcactggacacttgaaaaaacgcacctcattttatgctcacaacaaccctgagagatagtcgtttttaagatcctcaggggtgggtgaggaaaaagaatggttccatgatgacccgaaagtctcccatctgccaagcaagcgaataagccacagacctggatctcaaatccaggttgtctgactccagagccccagctccttccagcctcaaggaagtcattctctgattcccttgtgcccgaaatcacagccccaatgtctcaagcaccttcaacctgcctattagtctcactcacatgcaatgatggctcttctctaaactcagctccaggacgccctctacaggagaagtgccacaggccacccacttttatcagagccacaggtttgtcagccaaacctgtcagattcccaggagtgtcgggtcactaggtctccaggccatctggaggaagcttggcatctcactgactcttgggaataggaaagaggcctgaagaaatgtcacggcttgttagcgcaggccgcctgctctcaggaatctctcagtattaactgggagccctgcatctagacttgaagagaggtgacaaaacaaaggggagtatccaacaatcttcccaaggtcctgacaagtgttggcatccagaggttgaagggggtgcatggttcaggaggcaacgagactctaggacagatctgcttgggaccctatcacaggggccagtgagacagtgctgagcccctgaacttggcgtacctggattaggggtggcaaactcaaatgcccatgtgcagtgacatagagccagccatggaagagatgtgggcactggatatttgcctcaggtagacaggcaaagatgactccatttcacctaggcagacccaaagcagtgcacaactcctgggagggatgtttacatagaaatcaatgtgaccatctcaggccaggtgcagtggctcacacctgtaatcctagtactttgggaggccgaggcaggcagatcgcttgagcccaggagttcaagggcaacatggtgaaaccccgtctctacaaaaaatgaaaaaattagccaggcatggtggtgcacatctgttatcctagctactcagaagactgaggtgggaggatcacctgagaccagggaggtggaggctgcagtgcaccatgatcgtgccactgcactccagcctgggagacagagtaagaacctgtctcaaaaaagaaaggagacacagagagagaggaataaagatagaaaaagcgagagaaagacagatgaaagaaagagagagagcaagagggagagagaaagaaaaagagaaagaaagaaagaagaaagagaaagaaagaaagaaagaaagaaagaaagaaagaggaagggagggagggagggagagagagagggagggagggagggagagagagagggagggagggagggaaggacgagctatggcctgtccattattgtcagagttactaattttccaaaaaagtcagaaatccagatttttgtgcaaatgtctttaatattggctactaatccagtttttaaaaacactctaaagaccaaataaagcatgtcctgagacacagctgtgccatgaaacgctggttgatggcatctgcctaagctgatggtactgtcaccatcccagggaggagaagggtagagtaggcctggtaggactctttatccataacttgaaaatcttacaaggtcagaattaaatcacatttttagaaggacagatttctctaggtatctagaaattgatgtcaagatgtaggcccctaagctaatggtcaatataaggtacctatgcacaatcgtcaagagagcaggagatatcacacccccataccctggcaggcccacagttagttttctaataaaatacgaggctgggcgcggtggctcacgcctgtaatcccagcactttgggaggccgaggcaggcggatcacaaggtcaggagatcgagaccatcttggctaacacggtgaaaccccgtctctactaaaaatacaaaaaattagccgggcacggtggcgggcgcctgtagtcccagctactcgggaggctgaggcaggagaatggcgtgaacctgggaggcggagcttacagtgagccgagattgcgccactgcaatccggcctgggctaaacagcgggactccgtctcaaaaaaaaaaaaaaaaaaaaaaaaacgaacatttctgctacacttggggaagcagaagcttagtgttttaaggtctatgtgctacttttgttctgatcccacagtctaaagtcccaaacaaccaaaaataggcaagtttacttcacagtctgcccctacaggattctgcaggggaatgctaccctgtccccacctcgctgatttaacatgctgatcagtgctcaattccctaaccacacccaccaactacacactttcttgggatctattccacttccctcatgacctagcttagatttcacagcccaccaatattattatgcccttgaaaacaaactcaatcaccttttccctctgcctctttgcgtttttgtgtttgccaaaacctcaccggagagtctaagtcaaatatttctctccaccttgtctgcacctgagctgtgagaaatgctggagaaaaatcaccgccagctggtcagtttcctggttttaattaatagactttattttcaggacagttttcagttttcagaaaactggagcagattgaacagaaagctttcatataccatcaatcccacaacacacacacacacacacacacacacacacacacacacacacacagagtttccctattaccaacatcttatgttagtacctacatttgttacaaataacttcactggtttcccattgctctgagaataaaatccagactcctcatgatggtgtacaaagttctgcataatcaggacctgccagttcaccagtctccgtcttgcccactttgctccagccaaaaaggcctactctctcttcttcacacataacagagaacttcttggctttgggcctttgaagtttttttcgctgtgcctggaatacttttcctttagtcttcacttagctcacttattctcaaactctgtgttcaatgcacttgtcacctccttagaggggacctccccaaccacactatctaaagttggattccttcatcaaattaacctggcatttacaattgtcctgctatcccatgaggcaaaaaccagagtttcttgtctaccgttttatcccaagggcctagcacaaggcccagcacatacataggaactcaataaacacctgttgattgattgaaggaaggaaagaaagagaggaaggtggagggaaaaaggaagaaataaaaagtctgtcttccttctctcccaaaatagcattgcttctcctcccgtcacttaaagccttgctccatttgctctgttagtccattggtctatcctggcaccaatatcagtcttaattatggcagctttaaatatatctgtgtctgtaaatcaagtaatccacctaatttacttcaagaatatcttggcctgcacactttcatattcactttagaattatcttgccaagttacatacccacatacacacaaaactgctattgtttttcccattagggactgctgtaattgataggtcaatttgggaagacttataatctttacataattcagtcttctgatctatgaagatagtatacgctgtataccagtctttcaataaagtttaaaaatgtttccatgaggtttttataattttctccataggatcttgcatatcttcttaaatgttcttttctggcatttttggctagcattttgatatttaacatttttgtatctagaaatgtctcttattaattctaataatttatctatacaatgttttaaattttctaacataatcacatcatgtgaaaataacaatgagtttaatttcttcttttctttcttttttttttttttttttttgagacagagtctcgctctgtcacccaggctagagtgcagtggcgtgatctcggctcattgccagctccacctcccgggttcacgccattctcctgcctcagcctcctgagtagctgggactacaggcacccaccaccatgcctggctaattctttgtatttttagtagagacggggtttcaccgtgttagccaggatggtctcgatctcctgacctcatgatctgcctgccttggcctcctaaagtgctgggattacaggcatgagccacccacgcccagcctaatttcttcttttctaatccttatgccattaggttctttttactagatcactgtgctagttaggacatccagtacactgttgaaaagaagtgttaataacaggtatctttatcaattttctgatcccaaaaagaatcctttcaatatttcaccacctctaacaattgtggcaggctttttttaaagataagaaatctttatcagttcaggaagttctcttttatcaagaatatttatcatgaatggatgtttaattttatcagacaattattctacatgtattgagataatcatgtattttctccttcaatctgttaaagtggtgaattatattaattgattttctaatgttaaatcaactttacattcccagctcaaacctagcttgatcgtgatgcattttttaatacattggaagatttagtttgctaaaaatttgcttaagatttttttatccatatcaatgagtaatatttgatctataattttcctgactttcattgtccttgccaggttttggtatcaaggttccaagattatgccattttttttttaaagccaagggggccaggtggggtggctcacgcctgtaatcccagaattttgggaggccaaggtgggaggattgcttgaggacaggagttggagaccagcctggccaacaggagaaaaccccatctctactaaaaatatataaattagctgggtgtggtggcacacacctgtaatcccagctactcaggagggtgaggcatgagaattgcttgaatcccagagacagaggttgcagtgagctgagatcatgccactgcactccagcctgggcaacagagcgagactccgtctcattgaaaacaataaaaagaaggccaggggcagtggttaatgcctgtaatcccagcactgttggaggcgcaggcaggcggatcacctgaggtcgggagttcgagaccagcctgaccaacatggagaagacccatctctaccaaaaatacaaaattagccaggtgtgatggtgcatacttttaatcccagctacttgggaggctgagggaggagaattgcttgaacccgggaggcggaggttgcggtgagctgagattgcaccattgcactccagcctgggcaacaagggcaaaactccatctcaaaaataaataaataaataaataaattttaaatttaaaaaagaaaaggaaagaaattagctgggcatgatggcacgtgtctgtagtctcagctatttgggaggctgaggtgggaggatgacttgagcccaggaggtcgtggctgcagaaattacagcataaattaactctccattagttaacttaatcaaagccaaaagttagctaaaatctttaaccttcctccaagacaacttttcattccagatatcctttcccaatttattgtaatgataagtattttaattttatcttgtttataaaaatttttattaatcaatgaaaaataaagctacctattatacagacaatctctaaaactgagtaactgaccccaataaaggtttatttctcactcgtatcatagcctaatgcaagccagacagctctaggtgggactccaagaagtgactttgccatgcctgaaggaggccaatataacttcaaagtttgcctcctgcttgtgggaaaatggaaagccaaggtttgttttaaggtttaaacagtgaaaggctttttcagtcagggattttgatttatttcacaatacaattacttcaaaaacttagatggcttcagacctctcattgccacacaaagtgctttctttgacaaagttctcaattgttctttatttctttgctttcctttccccatgcctttctcttgcacaagaaacagtggctacaccattactacaagctttgctaagagttgtttcatttaattggaaaatttaactagtcttcaacatttgaagacttaatcccattgctcactgcctggaatctagaagcagtacagttccctaaatcgtcaaggctctaaacttctggattatattttcttttattcttataaaccagctaaatctttcctgagctaatctctttcttgtactgtcttgaccaacatagccaattacaactgacccacaatactaaggtttaataaacccttcccctagggttgctggttcatgaggctcgtgctctgcctcaaaatttttgccagcaatatttttgtcactgaataacatagattgacattccaagccttctcctatcagcttccttgttgcccaccacatgatcattaagccagtgccacatagttgatgcttttgaaaaggcaataccttttttcaatgaagcaatttctccattactcaagataagtacaactagctgcagtgataccctctaaatctgtgagttaacataatagagatgtatgtctcacagcacattcagtgcttgttgggaagctctcctgggagtgtctacttcaagtagcgcctcaaggatctaggattatcccatatcgtgatgtcaccatcttcagttagtgacctttatggtgaacatgaaagggaaagaaaaagttcagggggtttaaggctatgcctaaaagtcatgtatattacttctgtctccatctccattccaccagacagaacccactaacatgaccccaactatttgcaagcaaaactggaaaacagtcttccgttgtgtctgggaggagaaaagtgaatggagactatatgaccagtctcttccacatctcacaagacattgttgttgtgtccactcaatgtttatttagattcactctcatgcttagcactttcttgctctttatacctttgttatagagccagtgggggctcactgcccaatgctctagaagccaatactatgactttggaagccaagacgaggacaccaggcttttgagaaaagaaaagcttaatactgcaagctggctggcaagaagacaggaggtcaagctcagatctgtctccctgtgctgtcttcaaggcagtatttttattagaaaatgtttagtgggtggataccgggatttgcaggtgattggtggaaggaaaggggaggtttggagagtccatgggcctgcacagttatctcttcatgcttactcatgggttgcatatgcaaatctggggggagttagtatgcaatatgaagtggaaattcagtccatgacgtcagcaagctcattctgcacaaactccagtcggccatcctggttccaattgatttcagcctgttttttcatcatcacacaaggggagggagtttcagtgtctcagcaagttgtttctttacctatctgctatcctaaaaactcaagaatttttgtaagttactgatttcttactctttggaacacagtttgagtttcagattttcagtgagttatttcttatctggtatcctgtaagcctaaaaatttagttattgatttcttcaaccctttggagcacagtttcacattcttgtatattacacattacatattacttctgggatcactttctatctacctgaagtacctcctttagaatttcttttagtaagtgccttctggccataacctctttgtttatctgaaatttgctcttcagtttgcccgtgtctttgagagacatttcttatgaatgtaaaattctagttgatactttatcttccttcagtgaagatagtattccaacaattagcctccattgttgctaatgagcagtcagctttcaatttaactgttattccttcctttctggatgctttttaaatcttctatccatctttggtgttctgcagtttcactgtaatatgtctaggtgtggacttctttccatttataatgcttaagatatactgacttcttgaatctttagttttgtaattttcttcaattctggaaagttcccagacatgatgtgggcagtcatagcctccacgccattctattttttctccttctggactttggttagatagatgttaaactctctcattctatcctctatgtctcttacactattttgttatttttcatcttatgtctctctaggttacattctgaataatttattctgatatatcctcagttcactaattctctcccaaactgtgtcaaatctgatgcaaaccttcttcataatatttttaattttaagtattatatttttcatttctaagagtgtatttttcacaacttgttattgttatctatagtttttttattctctgcacatagtttcaagttattattttatttctttaacatattatatctaattatactgttatctctgactaataattctatcatctgaagaaatggaatgactatttccacatctgtggtttcttcaagatctcattcactcttgatgactcattccttctgtttttgtttgtttttttactgcaactcttaaacaatttttgagggaatagtttgaaacctgagataaaggcaggttcctccagaggtatttgcatttaattctgcagagcactttgtagaattgctctaaattaaattctcaacttaaaatacctaggtagtgtgaattccagataaaatcctatatgagcaccactttgttgtttcaaatgctcagcgtcaattttcctcctgtagctggtacctaacaccagccattcaattttccttgcattctcctgggattgtttgtggttcatccttacatgaagggtatagctctttgggatctagtcttaaagcagggagaaattcctgctaggcttacaaccttcggcaggccatggactacgtttcctgctccccatactagttactaatgctcagtttttatttgtgtttatcagctgcctctgtgaccagtccacagagttgttgttttaagctctgcttcccatatgaggagagtaacttccagattgggtgtaaggtgaacgtggacccgctctcccccatcacataaagaggtgcatacagcacttactgtataacaggattaaacctcctcccgtgggatttactcacggatatgggtgataaaattgtagctacactgttgtgttcagcattgcatcctagcacctaagccacagcctggctcttagtaggtgctccataaacacaccttgactgacagactgacagttgagctcagattttttttcctgacaaattagagaaccatacaaatatattttaaaacacatacatttttatgcttgatgattttgctgtcttgtgggacttagcatatttgagtttacagtgaagacttttgagacttcatcttttctcagtaactaaaccattggttccatgagagcaagagcccacacacctctcttcatacacctcataggctagcacactgccatgcacctgcacggctggagttctggggggtaggttcgttggtcaattaaatcaacttatgaatgctgagtccatgaaatcatggacatttgcagtttcaaagctggtgggagcaacagatgttgtccactgccccaagatgagaaatgccctaagagatgttttgccaatacctatcgaatgcagtgggtcatcccctacccgaaggaggctggtctctcttcagtcataaataagcttgttctcacttatttgtgagccccatcacacccaccccacctccacagaagaggcccatattcaggagggatcaggcctgtggctatagaacagagtacagatcgcaaggccaccaccccagtagaagaccctgactcagccacagtcaatgaagcacattgatacttatgaaccatagaaggcagatcatatttttgagtaatttatagcataggaagaaaggtctccaaaagcagtgtccagaaaacgccctggtttaatgggatgagaggccttgtgtttttcccagatctttggtttccaggcaaaactttagatgaaaggtaatgagcacagctaccaaaacctgacggtctctgtttctctgcagctgcgcgtattcaagctggccaaatcctggcccaccttaaacacactcatcaagatcatcggaaactcagtgggggcactggggaacctcaccatcatcctggccatcattgtctttgtctttgctctggttggcaagcagctcctaggggaaaactaccgtaacaaccgaaaaaatatctccgcgccccatgaagactggccccgctggcacatgcacgacttcttccactctttcctcattgtcttccgtatcctctgtggagagtggattgagaacatgtgggcctgcatggaagttggccaaaaatccatatgcctcatccttttcttgacggtgatggtgctagggaacctggtggtgagtggtgaaccctgctgggggcactgtctcctggggaaaggagaaggcttctgggttatctgaaaaagctttgatctgcatttttatgcccagattgtacttctctggttgaaaagtcttcaaacttttcaaattcatgtgggattcattacaagaagtgtgccttgggaggcagtctgacttgcaggaatgagaacatatgattagaaaagaaagacctggtgtagaatctctgctccaccatttactaggtgggtgaccccaggcaagagacttaatctcctcaagatctaatttccttaaaatcaagaaaataatgcttactcatgggtttactgggagaattaaatgacaggagatgacatatgcaaattgcctaatgcaatgtctgggctgaggcaggaactcaataaacggtgtctattagctgttaaaggaaaaatgtccttccccaatctgagggggctcagaaaacatttttattcagggaagtaagagctgactgatttctccaagctgcacaggtcctagctgggagcagggggagaggctgcagggagggggcacaatgggtcacggacaacatccaaggccacagaaataataacaaaatctactccatgtttggaggaagcccctctggagactcacttgccaataagccccaataccccttctccgccccagcctggccccctgccctcagcttgtctccacccactctggtcatggtggggtccttgccctcctgggactgactggttgtgtgggaggatgcagtcttccagaagcccctttcttattgccctggacatcaaccaacttgggttctttcctcatgagttttatagacagaagaaagctaaaccaagaaaagggaagcaacaacaaatccagactctttagtcttttccaccctggtgcctgagccagggatgcctctgcctgcatcccagaaactctgttcttccaggctgagcccaccatccctgcagagccacagatgcccctcaccctcagacaggaagtttacccctctgagcacttttacatttctcatatcattttgtcttcacaaccgctcttcatctgctctcaagtgaagaactggaagcagcaagatgtgcccaggattccagagtcaggaacagagcccagggctttggcacatgagggtggttgcaggaagggctggtgccttctctctgttgtccctaaatgtccctctgctcagcggggggctcctcctttatggtggaaaatatgcttccaagcctcgtccactgaggcgggtcactccaggacatccccaaactttccctcaactgctctcagaaagtccattcccccaaaagggacagcatcccgggtgggcaggaagaggcccaggccgtggctgtcttgccagccagctgctaacccggtaggccaatgtggggctcagcttagagattgatcaatcttcccttccattccttctcttcaggtgcttaacctgttcatcgccctgctattgaactctttcagtgctgacaacctcacagccccggaggacgatggggaggtgaacaacctgcaggtggccctggcacggatccaggtctttggccatcgtaccaaacaggctctttgcagcttcttcagcaggtcctgcccattcccccagcccaaggcagagcctgagctggtggtgaaactcccactctccagctccaaggctgagaaccacattgctgccaacactgccagggggagctctggagggctccaagctcccagaggccccagggatgagcacagtgacttcatcgctaatccgactgtgtgggtctctgtgcccattgctgagggtgaatctgatcttgatgacttggaggatgatggtggggaagatgctcagagcttccagcaggaagtgatccccaaaggacaggtaagagttatccccaagggacagccacaggcagtggggaggggcttcagggcttgagtgacaaagggcaaaagggaaatgcagaggagaccttgacataaagaagtttaaaccatgccaagctttccagaggagttggcgtttgagcagggcctggaagaaaaagtcagaattccccaggcagacaaacagggagtggggggcagcaggtgagcaaaaggccaccttgaggtgcttggggattgtctttcacacagctgtcccatgcgctctgcccaacccaggctctgtgcatgagatgctaatgagatttctctaagaacaggatgttgtccaagagcaaggctcatctaatctttaccagcatcctaagaagtcctgattcttatgtgactcatttagccagcttttccccacaagtggtatcacagggaaatgacacgctccttttggcaccaactaatttaaagcacatttgagccatttgataatatatatttttaaatacttggcactattccttactaccttaagctggtatatcaaccctcgctaacctcttctcagtaactcagggcattcacctctgcccaacgtgggaaggcagggaaccctgtgaggcctcaggaacatgcagggctgctggccaggttactaagtggtccagaaaagctgtgctttgagtctgtagctctcccatagccttcttccctgcagtcgtcacttgtgttccagcagctgctgttatcagctgccatattttacatgcctttgtctaggtaacagcagagagcatgaactctgtgacagctgtctgccactcagaagcattttcagttactttggggctcttagggagctccaggtggccaagttccctacaattttgacctctggacaaataacaatggtcatggctaaaatctattgagccaagcacttcgtgcaaagtgttttacaagcgctaacatatttagtcatcaaaacagctgaatgatgcagatctagccttttcaattttgaagctgggaaaaatgaagattagagaggttaaacaacttgcctaaggtcacacatcttataattaatggagcccaaggataaaacataggtctatctagctatagtcttcatgctcacttcacacacgtgtatgtatatatgtatgtacatgagttgcatatatgaaactcttggctctggcagcctgtgatgtgcaagatcccttcaaatttagaactggtcatctaagggtggggccaggcacccagttgggaccctctctcactagcaggagcagctgcagcaagtcgagaggtgtggggaccacctgacacccaggagcccaggcactggaacatcttctgaggacctggctccatccctgggtgagacgtggaaagatgagtctgttcctcaggtccctgctgaggtaggtatgtcagcttcctggagaggttggacagccagccagacactgagcagtgggctggtagaggctggagggtggcggtgaaggtggggtattccagactgcactcaatcacataacctcatttcttatcctgggaatttttaaagtccctcccaacctccggctaatccgcacaatttcaactttcaccatataccattgccacaatctcactccagggtggttctaggtatagaaagaaagagtgagactccacaagctgtgggacctaagatcagttcccaaacctctctgagccgccatttattcatctatgaaactgaatggtaatgcctacttggtaggattattttgaagcttaaatgagatgctgcttgtcaaatgtttaggtcctgcctgagacaaagtaagtgcccaggaaatgacagccaagaaaaaaggaaacgaaagacaacgcacaaagaaagtcaaatatctttcagagccagcaaataagagttggaggtgctcacagatgaagaagttttcccttgtgattctcccccactttcttttgtccacatcattttctctaggcaaaagtagcctggggctagggagaggctctctataggtgagtagtgaagtgacagcctcacagagactgagctggaagattagaggtttaggattgtcttatacaaggtaaaaataaatgtggtttcacttacaaatcttgaaggaaacaagctatagggaaagaggcatctataaaagtttagcatctttaataacactgccttcaattcaagaatttaatttgacacctagccactgagtgctgactttgtgacaggcactgggctcaacagagataaggaagtcataattcatccccaaagttatcaagcccttcagcttgaagaatgtcagctactggctgtgtgccctaggcaaggctgaccacagcagggtaagataagagggagggctgggacgggatttgggggctgtgggtgaacagaagccgcttggttcccactgggtgagggctgtcacattctgcacgtggatgtcatgcttcttcccaaatgttccaaggactcccctggctagttgtccctactcaatgttttcagtacacaacttctgggtgttggttttttgtttttgttttcttgtccatgaccccggctaggcaggaggggcctgacagcgacaaatggggacccgccccaccatttgggtccattagcaaagctatcaggtttactaatatgagagcaacttcaacccctaattgaattcatctggagacattatagggctggagctgccaggagggcagcaggcccctgcagcattactccatgattaaatattcaagcccagtgaatgctgagagtcgttatgggtgtaattacggtgtctcgggccattgccagcactccatcaggggccccgaaggtttacagtctcacacagctaagcctctggggctccagggagaagagcagtgttccaggcctcagctggcgaggcaccaaacatgggtgcagttgaacctgcagtgaccgtgtgcaattccccgggccccgcggagagacgagttcactgccctgggcttctcccctgcagggagtggacgacacaagctcctctgagggcagcacggtggactgcctagatcctgaggaaatcctgaggaagatccctgagctggcagatgacctggaagaaccagatgactgcttcacagaaggtgaagggacagccacaggccccctcacactgatgttaattagggccagaatccagttgagcgaacactcacctgggatccacagaagacaaacaagctgtgcccacttgctgcctcactcccaggcttgagggcgcccgcatcagacacacatgccccaggtggcagcagcctggccgtggtatctgcatctcatgccctatcagacactacggagagacgtgggccttcctctttaccctcaaaaacccctccgtgagttctaaaccagccctcttgagttgaaagggggaaacgtagtcaccaccataaacaccactgaaaactcttgatttggaccatgaaggacccagaggaaggccatgatgtatctgcttccctcaatcttttgtttagctctcaaaagcagaacctgtgtcttagtcatctttcctctcagtgtttagaacagtgaggcacattacattctcaataaatatttgtgcaatgaatgaatcaagagtccattctataaagggaattgtggcctcaatgctttctaaaaatacaaagaaaaattttttaaatacttgagtttttattaatagttttatttgaccctgggctgggctgagctgggctggacccaatccccatcccagccacgtcgtggccctcagttcagcttgggcttggagcatatccccctcaggcacccccaggctcatacgccgtagcttgtctgttttccaggtataggtgggcagaaggacagggaccactggtgtcatctgtaagaaggatatggctaggaaaaacatcagagtgggcaagactgatgatggagaggaacacctgttggtctggattgagggactccctggaagggacccctcttcacccatattccaggaaagaatttttttccaagggcatgacaagtgggtttcctagcagaatggtttctctgcagcaggagcagaaattatcccctttgcccactggccatcacccaccatcagtcacctctccccacaggatgcattcgccactgtccctgctgcaaactggataccaccaagagtccatgggatgtgggctggcaggtgcgcaagacttgctaccgtatcgtggagcacagctggtttgagagcttcatcatcttcatgatcctgctcagcagtggatctctggtaaggggaggcatagtccctgcccccaaatcctccagataggaatctcctacaatccaaaggccctggagctgcatcagtgggttctcctgactactgagctgaaagtccccaaccttgtcactagaaggagagctgcagcccagggcgagggcccctcttagcagcagagcatgggaggtgttcaaggtgcccgtgccatggcctgccaaacctggctgcaagcatttgagtgagtgagtgtatgcctcccactatatagatggggaaactgacactcaaaatgtttaaaaggcttgtccaaggtcacccaacttgtcagtagcaaaacccagctttgcccttatttaatcccgaagcccctggcttcccaccctctgacctccccaacacacggccttctctgaaggcctacaatacaaaaaggactatctttccttatcaaaccacttccaaatgctactaattactcctttaaagctcacagaaaatcattacaatagcacttctcaaaatttaatctcccaggagcttgttcaaatgcagattctcattccataaatctgtggcagggcctgagaatttgcatttctaacaagctcccaggtgatgcttgcactgccctcagtgacccacactttgaataacaaggccttatgggaatagagattcagagttgggagacatctctaaggccctggctgaatactgggctttgtagagcaaagaaggaaggttctctctgtactgtggcttaagctccttacacaatctcaactactccgccaatagaccaaggtagacatagacacaggaaggaacttaacatcctcagttgtttgcattttctaaatgaggaagtcaaagcccaaaggcatgaggggcttcaggtaattagttgaagggctgggaatagagagttcagggtggcagctaattagttgaagggctaggactacagtcccgctcttccgattcacggctgcagtgttttcactcatcttgcgcctcatgtgtcatttactctctaaaaacaacctactaaatatctaggcctccatctaaatgccagattgtccaggaagggtgacaaaactgctcggtgcatggcctcagctttagggaggagcacaggtgcgggacgaggcaggatctgagaggtgggaggaaaactagggtggcaatgacgcaaagccaagggagaagagagtttcggggcagggactggtctgccatcctgggtggagggggaactgtgtgacagcggctgcaggtgcccagtgccctggcacagggcagtgattgtccacacggacctcagcacagtgtagaggccaaattgcaggggcaagagagggctgggcagtgctttctccacacctatgctcttctccttccagtcctgctggattaaagtaataaccacatgtgctgttggccaggtgctctcctcactacgtcattggcttgtgggccttctctcctcattttgcttctctgctctcccttgctccctcccttctctctctagcccccttctcttcacaccccggtccaccccccacattcccaggaggaagctcagacctgcagcactgcgccagcccagcccgccccctgcagctctcccttccctcccatctccttcccctgggactgaacaggctggcaccaaatttagccttctttaggctttcactttgagtaccttttaaaaataacatgcattttcatctgacaaagtaaagtaccaaaaaaatacttggaaattatagaaaaaggtaaagaaaaaaaaatcatccatttccctatcactcaaagagaaactcacttgaaaacatgctggtatacctctttctcatcttgcttatgcataaaatatacacatattacaaaaataaaaccacatttatgcattctataacctcagtacatttttctcagtaaatagtctcatattatctcatttaatggctataacatattcctttataatttactcaaccaatctctatgtttacttctaatacacattgaatattccctgtgtgtactcccttagagacgttggataatctcccatcttagtcctcgtcctagacacagaatcggaagctgagaaaagatgtgggttcagttgaaatccggcttcagctgatcccatggaaagccctgaagcacaaaggacaccaaagagctgtcccaccttgaggcaaagaagacagccttgtaaatccccctgtcactgtccctggctgagggctgccccagcggggaggataagcatttcccaaggtggacacagtttcctccagcccagcgaagccatcaggaagggggtgtctgcatccatgaactattagcagccgacactcccagcagatgaaggataggggcactggccccttaaagaggacctgagtgggcaccaacagcctccagtgtccttaggattagtgcttgaaggaggaattgctaggttcctgaaacctctgagtcacattgccaatttggcttcacacaggactggccaggttttcactcctgccagtcacttgtaagagtggccgggcgcggtggctcacgcctgtaatcccagcactttgggaggctgaggcgggcggatcatgaggtcaggagatcgagaccatcccggctaaaacggtgaaaccccgtctctactaaaaatacaaaaaattagccgggcgtagtggcgggcgcctgtagtcccagctacttgggaggctgaggcaggagaatggcgtgaacctgggaggcagagcttgcagtgagccgagatcccgctactgcactccagcctgggcgacagagcgagactccgtctcaaaaaaaaaaaaaaaaaaaaaaaaaaaaaaaaaaaaaaaaaaaagagtggcagccccccacagccacagcatcctagggtttcccctattcttttccatctccaccagtctgataaaagaaaaacagcatcttcttttaatttgaatttccttgattaccagtgagatagaacattctttttcagaggtgtgttggcgattcttactttcatttttgtaaactgcctgtgaacatccgttgatgcttttatttttaaacaaagtcactgttagcatccctttggttcacttccaaaatccaatttgagaaggttttctttctcccttgcattcagcatccctgcaagtatcagcagggctgtttgtccccattggccctgaagaagtcatgctttggatctcacagtacctcctccactatcccactttacctccccacagcaaacaaaatgctactggcaagctgactaccaaatccccttccagggactgtggtcagggctggctgggtccttccctatcagtctgggccccagtgctgtgggtccaggcagcctgccattctgcatcctttcttccttccaggcctttgaagactattacctggaccagaagcccacggtgaaagctttgctggagtacactgacagggtcttcacctttatctttgtgttcgagatgctgcttaagtgggtggcctatggcttcaaaaagtacttcaccaatgcctggtgctggctggacttcctcattgtgaatgtgagtggctcagtgggaacacgtggggtttggggtcctcccctctgactcctggctacagctagggcaaaggaagctcagagacctggccctcaagggctactccaaagaaaagttttgagcatttagtgaggagtctgagaatagccctgacacccatgagtggtaaagtccaggcagtatgtgactgtgacacaatagtgactgttaggtgagttattaggtctccattcagaaagatccctgcaatcctctgcatttttacatccaaagtgagatgacacatgcagctctcagaggtcttatggccctgcatccatagatgggtcttctggaccttggggagccatgaactgtgagcacagagaatcttcccacctgcggttctgtggtcctcacacctggctgcacttgagaatcacctggggagctatgaaatatgcagtgaccgaccaccactaccccagagattctgatcttattggtcttgggtggtgcccaggcacctgtattttataaatgctcccaggcatttccaaggtgcagccatggcttagaaccactgagcttatactgctgcctcctccccagtggcattgaaaagaacagagggcgcatttggagaggtaatgagctggagttcatgtgttcacactcatggtaacctgtggccagtaatccctgcattagagaattgactgtgtgcttctcacacatcagacatgtgattcctcagtcatctcttcctcatcttaaccaccacattgcactatcactgtctaggccactaccttctttgctttgcagcatggttaactgagttatctgttcactgccgcatagctgagggtttctgcaagcagggtgaggcatgtgctgtgttggtctctgcctgccccactcaagcagctgccagcagcaaggtctgcccagcagaggtgtcaggaaatgtgtctgtatttggtgcttgcctcctgaagctggatgaggttcagcacagaacattctgtccagcctcctgtgctggcaggtcctccatagcaggcctgtgcattcaattctcttcttccctgatgccaatgcactagcagcttcaggccactgtaccacaaggattagctgtgaggcctgaaatctgagtcatgggtgataattctgtgcatatgaaataattattcataaatgaaaggaaaattatttattccggtgtcccacccctttgggggcacagtcactcctgcttatgttgatctcaccagtctcagtcctaatcaccttaaacggtcatgcactcatttcatccatcttcctactgattcttccttccaaccatccatccttccttccatacatttcaccttttgtatccaaccattcagtcttcctttttccttcctcccaaacatccatccatctttatttcttccagctgtacatcttcatcagtcctccccttccatccatccattcccattcttctttccctcttctcttctgcccaatcttttattctaaacttccttccatctattcatcatccttaacccttatatctttctatcttttgattcattcttctatccaactgtccaatcatctaacattctgttcactcattcacgcatcttccatccaagcatgcttctactcactcatccttctatccactcattcttctatctttccattcttgtttcaacctatccatctattcttcctttcttccacttatctgttcattcatccctttcccttccattcatcatccattcatccatcctatcaaccttccagtcattcactaatttattccattcatctattctgtccagctccccatctttccattcatgcattagtcattttacccagccatccatccttctcttatccacctatctcatctatccattcactattccctgctttcatacttttcctttcttgtttgtttctcccatccttccattcaactatctatcctatccatctttttgtgtctgttatcttttaaaattttaaaaaatatattttattgtatatatttgtattagtctattttcatgctgctgataaagacatacctaagactgggcaatttataaaagaaagaggtttaattggacttacagcttcacatggctggggaagccttacaatcatggcaaaaggaaaggaggtgcgagtcacgtcttatgtggatggcagcaggcaaagagagaggttgggcagggaaactcccccttataataccgtcacatctcatgaaacttattcactatcatgagaacagcatgggaaagacctgctcccatgattcacttacctcccacagggtccctcccctcccacaacacatgggaattcaagataagatttgggtggggacacagccaaaccatatcaatttttaagggatacaaaatgatgttataagatatatatatatataaatgattactatagtggaacatattaacatatccatcatctcacatagttacccatttctccccctgtggcaagagcagctataattactcagcgagcaaaaatactgaaaacaatatgctattattaactatagtattcatgttatacattaaatctatcctatttatcattgtatcctttaattcatccctctatgcaatcacccttcaacttttcatccagctgtacttctttctttctttccttctagccatcccaatgatcctatttttcttccatttgctatacatctaactattgaatacaggattgtcttatgaagtgctttgtaagaaacagaagcacagaataaatactcactatctccaggatcttacactttagtctttcagcagacaagacacacatggaaataaatgtattataagggtgaatgtgttgagcactgctgggggcaattagtatcttggagacacagagacatgagccttcttccactcttggggtggggtggttgagaattcttcctatgggaggtggcattagatgtggggcatagaaatgagcaggaccaaggagctgcgagaggactggggaaggcccgtcttagctaaaggctgaccttgaacaaaggcacagacacaagtatgctcagggaacaatttgatttgggtagaatgtgtgggtgaaatatgactggaaaagtaggttgtgaccatatgacacaggctacagagtatggagtttatcctgagggtgataaagtaccagtgatgtttgggagtaagagaaagacatgatcataatcagatttgcagtggagaatagatgcatggtgcagtactagggcctggagactacttgggaggctagtgggctgagcagtgggaatggaggtgggcttgggtggacagactttgctggagaggcacagcacctgtctgccccagctgcagattatccatgtgaggcagacttcccagggggctgagcaaaagactgaatagggttcagcatggaactggccccaaacctccctaccctcatgcacccaggcagctgggtctcacctgctgatgtctggagccttgcatgaatgaaggaagagggtcccttccattccggttctttgtcctggtgcaataagccactcatccaaagaatggacattgcttggggctctgccactcaagtataaagcccttcttttctgaagctcctgtgtgcatcccacctaactgccaggataagctgagcctgaattcagcccaccatctgtggtgtggctaagatctcacaggacagggtcatagcccgtatctatgacatctccctggcaccttcaaagttcctagcaggggaacttttttcatgtaagtttctgtcctttgcagtctttggaccaccacttaaagaaaactgacagaccaaaaggggctcacaagtcagtcattatatctcagatatctattgaagctagatctcatggacccataccagaaactttttgaagaactgcagagctatcagaactttggaattctcttagtctgactttttcattttacaaagggtgaaagtaccctggactagccaggcactaacccaagctcacaaaaaatcagggttcaaatgggaattagaccccacccaaaccactattctttccaccccacttctctgagcaaatataattcagattactatattcctcagaatagactctcagcatagcccctaggagggaacatcatgtctccaagtctctgaaaatcagtttcaaggttgttgaggcctgactgctgcccctagaaggaaaaggaagagttgatttaatacactggaagcttggccacctacgtaccagaggttggtgatgttagagactgagtttttcttgcccagattgtttaagagagtggtgaataaaatttttaataaaagggaagagacaaaactctttctagacctctcattggagttccgaataaggtgggagctaggatgatggcttagacgtgtaggaatgggaggctgggcagggagttcctgtctccttccacgaggactgcctttctggaaacctagagtgatgtttctgccctctcctgcactcagatctcactgataagtctcacagcgaagattctggaatattctgaagtggctcccatcaaagcccttcgaacccttcgcgctctgcggccactgcgggctctttctcgatttgaaggcatgcgggtaagtctgatctcaaaacttctctcatctggccaggcacggtggttcatgcctgtaatcccagcactttgggaggctgaggcgggcggatcacctgaggttaggagttcaaaaccaccctggccaacatgccgaaaccctgtctctgctaaaagtacaaaaatcactaccaccacgaggtgtggtggtagtgagccgagattgtgccattatactccagcctgggtgacagagcgagactccgcctcaaaaaacaaacaaaaaacttctctggtctgcaggttttggtaacccttccccctttatgccctccatcccaccaaccctgagctccggggccccacctccaaaggtaggctctgagtcttcacttcctgctctgactttggtggtgctgcatgtcctaactctcttagttctctttcaagtctttttgtgggcccatcttcccttgtcacccataaatattacagccaccaggacccagacctcaccccctttgctcttagtgaagtaatcctgaatcatcgctccacaagcatctattatctcaatcacccaactctgcctcttattgccaacatctccagaacatcccaagttctctgtctttccatgacaaatgagtctttcctctaatactccatgagtgacatcatcagctcattacctcagctgccacccactggaatgcttcttctctcctacttaatgcaatcatcaggtcctgtaaatttttcccttccatccacccctttccttatccaccactgtcagcctccaccttgccctaactgcctccgtcaggacagaatgctcacagccagagccttgtcttagagattgctgattgacacccacctcttcctcataattacaaatggctccccagcagaaagtaaggttttgctttgctccactatcattggctggaagtagtcatcatagcttcaaaaacaaaagtgggcttttgaaattaacttgtacctttacaaacactaggacccgaagattgaaatagtttgaaatttattctattttgtatctaatagattctcatttgcttatttacaaataagctattttgtgaatatggatttaggttttcactggttcttgaccacggcatactttaaattgtatttaaattgtgtttgtgttttatgtatggtatttaaggagaataagtcaaggttctagaagtctgtatgtgcaagtataatacacacactcacacttctaaatgagtgcagtatgcttgtaaactcatccatcttctcactgcaacccaccctgaatgaggttaagggaagaaggtctaaatccatcttcagctgcccaatgtctctcagtcttctgagtctgaattattgcactaattaacccacttctcttgcttcttccaaaggccactggctcatgaagcagcctgaatgagtatagaaagagatagaatccagcagagggggtggggcattgggaggttccaggtctttctctatctcccaccaggtggtggtggatgccctggtgggcgccatcccatccatcatgaatgtcctcctcgtctgcctcatcttctggctcatcttcagcatcatgggtgtgaacctcttcgcagggaagttttggaggtgcatcaactataccgatggagagttttcccttgtacctttgtcgattgtgaataacaagtctgactgcaagattcaaaactccactggcagcttcttctgggtcaatgtgaaagtcaactttgataatgttgcaatgggttaccttgcacttctgcaggtggtgagtcaaccatgagatcaaccatatctcttgctttggccgctcaataaaatggagagtctaggttcccagaagatgctatgtggggactttgcaaggagtagcactcagtgtgaactgaggtcattctctattcctacagactacaccatgaggctagagggccttcctagtgaatatgatatcacagtggtgcaattacacaagtgtgggctagtagaatagcataaagggatgggcctgccatgggattatcaggtggtgagttaaaacacagaacctgtacaaaatagacacggcatagccacatgttcagtcttcaacttcacatcatttcctaaatggtaataaattatgtctcattaggtctattgtaatgatatataatgttggtgataatgacagtcaaacacattcatcctgtctttctttctttcatcatccagtcaatcactcatttcttgccttcatctacctgttcattcagtcctctgttcattcaagtgttaatacaattacttatacatttgtcatgcagttactcttgagtgtctacattccaccattggttcttgcatttattcaacaaataatctctgagtagctctggtatgccaggcatggtactactcagccctgggagatacagtcagaactgggcttggacactgatgctgtatgagaaacagactaataggtgaattaaaacagctcattaagtgctgtaacaggcctaggagtgtaagaactaagatgtcttgcatgctctgaacatgctggaaggcacacccagtttctagacctcaagaatgctaaagctgaaggcaggaacatggaggtcttctattctcaacttctccatctggaagatataccattcttacatcatgtgcataaggtgggaaagtggctgagaaaatggcagccctgagaggggaaaccttaggcaagtgcacagagcagacttgtagcaattggcactagaaccagacacctagacactcagtcctcagtccatactacattctgaaaggctctgtgtctttaatgctactctattcttaaacagccacatgtgggattactttaaatcatcatatgagattagtcaagtaacccaagggaacttttcctttcattctttctgcacaagccctttccaacacaggactctctcctctctcactgggccaccatggcttgggaagggtccagtatagatggatgggcagacactgagtggcctctgctccttgtctccaggcaacctttaaaggctggatggacattatgtatgcagctgttgattcccgggaggtgagtctcagcccactgtccctacagccttcccctctgtgcattctacccatatcagtctgcatttgaaatgaagtgacgatgaccctggtactggaagaggcgatcacccagcaacctcacactgtccctccttgcagcagtgtccagctggctctctgttgagtgtttcagccaccgaggctttccccctttcatctacactccccaggcttctcgaggttttcctctgttcactgttgaggaaagcatcagataacctctaagagacagttcatgtgagccactccctggacaagggtgggagcaaagcaagggtagtagctaaatcaaggtgcatagggaggaatgaggtagaatctcaggaactatcataaaacccaggatgggccaggcgcagtggttcatgcctgtaatcctagcactttgggaggccgaggtgggcagattgcctgagctcaggagaccagcctgggcaatacggtgaaaccccatctctactaaaatatgaaagaaattagcagggcatggcggcttgtgcctgtagtcccagctgctcgggagactgagacaggagaatctcttgaacccgggaggcagaagttgcagtgagctgagattgcgtcactgcactccagcttgggcgagacagcgagactcaatctcaaaaaaaaagaaaagaaaagaaaaagccaggctggggagacactattggggaatgaccacttcctgctgtggcaggcactgtcaattccctgccacctcttcccttagcccacttctgatttcacctgcaggctgcacttctgattctctgtataaagactccagggcttaggagcttgtgcagcaacttctcccccaagtaccagggatttaatgtccctaggggcaacccttaccaataagttttgggagtctgaggataaatactccagtttccctgtcccttggtgatataatcctgcatgtgctctacacagttactcagaggaccccagtaggattgcgcttcagttgcccacaatgatgccctgcttaacaacatcctcttcacaggctcttctcccattcccgcttattcttccccactccctcattcctgcttccttggatcacctcccagataaatcacctgcacccaggtccatgtcttaggcttggctttcagagtgaacctgaactaagacacccaccctccttcccactctcccttgtctggtcacaggtcaacatgcaacccaagtgggaggacaacgtgtacatgtatttgtactttgtcatcttcatcatttttggaggcttcttcacactgaatctctttgttggggtcataattgacaacttcaatcaacagaaaaaaaagataagtggtgctcaggagtttctggtttctgctgtagtggtaagccttatatttcctgttccctgcccagctctggcctcctgacaaaagccaacactactcacagcccatcactttaatatcagtgctaacccttgccctgtgattgctgttgcaggaagagttgcatttctctctgtcagcaatgccccactaacatcctcactcaggattcacatctcaaagggatcttggtcttcccaactggaaccaggtgtgttagatgtgttccaagtgagccctgggagaatacaagcagggaaagaaagggatctagaacttgctgacctgttgggggatatgatccccacaaaggactgagtcagggcacctcaggaaaggccatggcccagcactggcagaatcccaaccctccttgggatggggaggaaggcttgtgcctccaagggtgccgactctgattaataggaatcgaatcccagataacctctcatgtttataagaaaatgtcagggcaataaaggtataaagtattttcctattatcctttcatttaatgccttccatacccctgaggtagataggcgctgttctagatttgcgtaactgagatcccgagagaaaaggggctacatggataagtcacagagtacatgcaaacctgggtttgcattcctgactcaactacttgtggatggctcatgctggcaatattttaaacccctctgagtctcagttttctcattcattcaatggggctaataatacctactctctggattgtggtgaggggtaaacaaaatcctgaacaaagatcactgagcataagacaactttggtggtgcagtttctggcactgtaacagcagaggggagtgtgactggcagcgcctcaagagcaccagatgctgttgctattaacaatttaaaatatatacctactagggcaggcattccacttacaggaaatccttgcccagggttctgagcataagaagaggacaggataggtctgggacaagacagtgctatttagtaccctggggaggtttgagattattgaagcaatcatttctctcattttacagatgagaaaactgaggtcaagaaacagattacagagggagatattaggtaacggaaggagatgagctagtgaccaggctggggtcactgagaaactgcatctactgaatccttggtcagagttctcagcatgacctcacctggagctcacctacccactgcccttgccctttccttctctccccccataaagatggtcctcccaggaagccctttgtgtccacagatcttctcagatctcctttcaaattccacagatctcagcccagtttcccagcatttgcagggactaacttacataaacatgttattaaaataggtggctttcaaattatgtcaggaagctaaaggtgagagtttgaatgaagaaaatccaaagggcccctaaagaaaaactaatacccaatcctaagggaggaaaacatcttcgttggtgcagtttctggcactgtaacagcagagggcagtgtgactggcagggcctcaagagaaccagaggtccctctgagaccaaggacccaaggataaggcagtaattgtcctcatctcctcctctccagaaaagatttgagggcttctgtccctcccagagtctttgcttcaaggtcctcaggaaatctcttgccccctgggagggactgtgactctagaagcccaaagaattttactggaatgaacaggctagatccaaggctcagatttgaaccaacatgtaccttctccttgagtcctgtttaccaaccctccccaccctttatccagcatctctggatccctggagaacagaaactggctttgctttagagacccaggcagggagtcagcaatggaactcagtcccaccgttccgacactggatgtggcaagacactccttgatgctgggcttggtttgtctatctgcagaggaggggagaaggttgatatgatcctttctctcctgcctgttctgattttggtatccgtagggggttcctcttgctttagtaacagtgtggccctctctgcacttagggggccaggacatcttcatgacagaggagcagaagaaatactacaatgccatgaagaagttgggctccaagaagccccagaagcccatcccacggcccctggtgagccccagaggtttcctctagcacagcctgtctgtgaatccaacatgacagtctatgcctgtgtcaggcaggggcctgagggagtgctgtttatggaagagaagatctgggttgacgttgggatgagggtgatgagggttcctaggcccaaggaatgagaagttcaaaagaagcaactctggtcttctggagtaaacataccttttacagctatttgaaatgaatctgttgggggaagcactgagtttctccaacagttttagagttcaagtacaggattggaggcaggttaagctaagtgacagtaagggtagttagaacccagggattaaacttgtgtggttatgtatcatggtctaggtcgcagtagatctccagtatcaccctatattctaccccacgcctacaggtatagagaggaaatgacaacaacccaactcccctgtcaggatccaagatgcagtcatggtagtggtcaagtggcccagtaggaaccaaaagttatcccactcgagtttaaagattgggcaaaaattagggccagactctagtttcactccttttttcataaagatctcaagagacatggctttgcgttcctccattaaatgtactacccataccacacatgatatcacctaagttcttctcagtcttctgccagaagatagaaaacatcaagcctctgagaggccctaagatagcacttttttgggaatggatgaacaggtttgggggtgaagatgttgatgtgtcagaaattattgttgatcgtcttcaaagaatttctgagccatccactccagtgaatggaattggccctgtgtccttctacataaactttctgtggctaagatgcagcattagtgaagaaaatcacaggtattgctgatgacacaatttcattagcccttccccacacaagggaaaagtccaaaggacatttaacaaaggaacaagcctttccctaaatgaattatggagacatgcattctgttagccaagctattagatttttttaaatcaaggtataggatttgcataatttacttcaaactttgtcagaacaaagtgaaaaacatttacaagagaaaaaagtgatgacttttgacactgtattttgaaatagtggtcatgaatttattactagtctagattctgataagaagtattacaatggggagtggggagtgataggaggttcagacctctgtaggggcacagctttcttcctaaatcacccatacaatcaagataactggatttgagtgaacctgagcaaaagtccttaggctcattgagtatccctccatcaacaagttcagtggagaggagcaggctcaaaattaaaattaggtgaaaggctgagtcccaaccacattcaagtcatgggtaatgagaggaggaccctaagacttactgagaagcaagcagctgagtccacactggcctttacttgtggctggagtaagattgaatccacatttgagccagatgccaaggaggtgtgtgctagggacaacccttggcaaaaacatgaaagtttttggcaccttcccccacatactactcaatctctctttgacatcccagcttcttccctgtcatcacccaaccccataggctgccaaagaaagcttcctcccctcaaggaagacaacattcttaggacaagataaatcatatttcaaaaagggaccctggagagggcatctacctacaaaggcatgaccctaatgttgaaattccaggcagtaaataggagtgggagacggagttgatggtcaggcaggaagacctgcaacaaaatcaccatttctcctaattaagctgcaactaagatcctccgaggatggcacagggggagacctccacatgtggaggggaagtgaaacctcataaccaattctgttcctgagattctccatcctttgaatggaagaagagtggattagtaattcactctcaaccttttgctagccttagtggaggaacgtggctctccccttaatattctggcccaagcaaggtaaacactctttcctttgttccctaatttcgcatagctgaggcaaggctagaacatttaaacaaaactttgaagtggcagggatgccaacagagaaatcagcacaaagcagagtccaagcagcacctgcagatggctgcactccaggacccataggtcttggaccatcctagctcctgaccagcatccaaatggcaggcaacatctttgacacccacatgcccagtggcacaagccggatcatcttccctcttcaaagtctagaaccaagaaagaaatccaaggcaaaaggaaattcccactcccaactaagacccttcttcccaggcccagcttgcttttggccagattattggccctggaatgtccaccttctccccttaggagccccaaaggtcaagctggtcataccagcaaagcactgacacaggatttctgccccatcagtgcatgggtgccatttcatgacagagcttacctgggaccacataggagcctcacacacctcctctcacctctgatgatgctcaggctctaaatcttgtttcttccataggaaaagttaaggattccacaagactgggaaattttattctttaacattccctgctacagaaatcaataaaagcagctctcacatactccactttatagaaatataataggctctagagaatatcacataatcaatcacccacttcatcgtctctgagagcaccaagggttgcaaaggtatgatccctgaccgtgggctaatccaagagcagctagcaagctactccattccctaaagtcagaatatccagggcaaacttcacacccagccacttaacgatgccgttgcctgctctgtttaattagaagtcatgtgaccatgaatgggcctgtattttttcaccattttcagtgatgaaatggaagggattagtggctcagcaatccccctcctgccccaggaaagatgtgagccagcagttctgccatgagcaaaggccactttggtctgattctttgctctaacccaacaggatagcaacccatccccaccatgaagcagaaggcaaggatcagcctcatcacagcacttccccctctgcttgctgtgcagctcccgtgggctccctggaagggatcagacaggttcttctcttcctccctcatagccactcatgcagaggcttgcacatcccatacattcagtatgtacccttggtacagaattgaatttagtcaaataaagggtgactttaaattttcatttgagctatggttaactcagagctgcccattctgtcttccattcatttacaaatttgcagagcatctgttgcagccaggcactatgcagacaccagggttagagcagtgagcaagacagacaaagttcctactcttacagtttacagtccagtgacagaggcaaacagttggccaaaagttgcacatatatgttaattcctggctggataaattgtcaagggagaaaaaatggggtgaagagcaaaggatgctcaagactgagcctcgaagaactctgatgtctaaaagttgggtaaaggagactataaaagagcatcacaaatggcaagaaaagaagcagaaatgtaaggcatggtggagaccaagaaagcaacatttcaaggtagaagggtactaggcaatatcagacaagcgtccttggatctaatattatgggaagtcattcatgatcttagtgagaacaatctctgtcaggatagaggcaaaagctctgttgatgtgggctgaggagtgaatgagggacactgattgtacacaactctttcaagaaattttgctttgaaggtgggaagagatctaagatggtagctggagggagatgtaagtttctgaaatattctgctttaagttaggagaaactaggtcattagagatttgtgcaataaaccaagagacaaagagtaatgcacatggacattaatgttgcctaggataatagccaagagtgggcaaatatggccaagagcctcacccatcattactgaggcagagggaccaagagtttggcaagcggcagtaatgaagaagtgacaaaactaggtggcaaagcttcaaagcaagaaggggttttacaagacacaggaagagcagtggtgtggaagggtcagtggtgaacaaggagaacgccaggcctaacccctgaggtacatggggtaggggagaatggcagcctttgaatagggggagatatgtgcagatcaaggcaggtgagctccatagaggtcaggagaagttttgggagaaggtcaaagcgtggggaatggggttgggatcaaggactcacagagcagtaagatgttcacagcactaaaagaagagaagatcacagtaggagctttttaaagacaccataaaaataaccagatataaatgatctcttggttatccaggccactctgcctccttccaagatgcaaacaaccaagacttgaccctacgccctatacctgcatttgcttaggcatttgcacagcaccaggaacagagggaacatttccaagaataagtttcccctttgcacttgactttactctcagcaaagtagctcaaattaatatttcaagcagctcttgaactcttgcaatgtgcagggcactgcagggaaacaaagttaaggaaggtatagcccttgtcctcaaacagctcattgtctagtagagaagacgcatatacaaaatgctagaactcgaggctgactgaaaagtgggatccccaaagggacagggtagtgtgttgtcacgtgactaagggacactccatgcagtaagtggagcttaaaagagatggattactcaagactgttggaatttagacagccaagagaggagataggagggcattgtgaatagaggcaagggcacagaccaggacaaaagaagggcctggtggcatcaaagggccaggagaggtattaaggacttgaactggggcaatgaggtagagtcaactaaaagtgaaattttggaagaggtaaggatagtatttcgcttctgttaagatgtggagtgtgatggagacaaaactcatctacagataacacagatgcctggtttgtgctggcccaaaggccctgatgccactatctcttgttttctcagaacaagttccagggttttgtctttgacatcgtgaccagacaagcttttgacatcaccatcatggtcctcatctgcctcaacatgatcaccatgatggtggagactgatgaccaaagtgaagaaaagacgaaaattctgggcaaaatcaaccagttctttgtggccgtcttcacaggcgaatgtgtcatgaagatgttcgctttgaggcagtactacttcacaaatggctggaatgtgtttgacttcattgtggtggttctctccattgcgagtaagtgggcagccacgtggtggggaagccccacctctgtttgggggtctttgggatgctcttctaaaaccaaggaaataaccaaccaactttttgaaatacgtgtttatgttagaagaaccctgtatttgcagctttccaagagtagcaagttttaaatgccttgggctgctctctcagtgaaatgaagaggttctcttggccttctccatgctcacacgaagtgttttcaggcacctactgtgtgcacagcccatggctagaacctcaggggctgacagggaataatcactcctcctgagaacctcagaccgtaagatgatggagtctccagcagaccttacttttatggtcttgaaagcagggggcaggtggtgtaatgtgagatgagtcttaaaatctgttctggaaaaggagatggattgccatcaaagtgaggaaagactgggaggagattgttcaaaggagattctcaagtctagggtctggaattaaatctctacacaactgttctattagggaacatgagtgatagaaaagtcaagatatcaatgccaagaaattaatactgttaaggcccagtctgggtgttgttgaatgacaggcccagtattttgggtccagtggtgttcagagaaaattactagagttagaggctaacatggggaaatggagctgccttgactgaatacttcctaagttctgagcactgagctgggctccatgaatgttcacagcagccctgtcaagcaggtgttattatccttattttatacatttaaaattgagactcagagatcaagaatattatgcagggtcacagagtttccaagggttgaagctgagtttagaacaggctccaatcttctaatgaacttgctgcctgtcaccaacagccaagagactgtccctgggcttatgggttagctgaagtttgaccctataaaggccaaatcatgctcaccagcttcacctggcattataaatgtatcttgattggttatatcctgacctgcttacttttcatgtcggggtgtagctgtagatttaatttgccactgatttagtaacaagagctgagagtatctaaatacaacttaacagcatttcatcaacctccccaccttggtgctgaaacacagccttgggttgcgtgtatttccggggatttcagtttgtttttgttcttgttttattttgatattgctgctctgttttttaacactttattgaggtatgatccacatgtaaaaagctatacatgtttaatgtacacaactttatgagtttggagataagtatacacccatgaaaccatcaccaccatcaatgccagaaacatgtccataacctccaaatatttcctcctgcctatttatttatttattgggtgctaggaacacttaagatttattctcttggcaaatttttaggtagacaacacggtattgctaactatagggactatgctataagtagagctctaggatttattcatgtcacataactggaagtttgtacactttgacaagtacctccccaatttcccctcctcccagctcctggaaaccaccattctattctctgctcccatgagtttgactattttagattccttatataaatgcaatcatgtcgtttttgtccttctgtgtctggcttatctcacttagcataataggagtttttgttggttggttggttagttgttttcatttttgttttgttttgtttgtcttccaaaatgaaagattccaaaggctattttgattttatattaaagaagggagcttgtttgtgtatcagtaatatagaaataaaacatagccaagtacttagttctatgatggggatatcttaactaccagttcctgtggcttacagggtagcaccatccgctggggcaggaatcccttatagagctggaaaataagcagaaaaaacccacatatcaatctttctaccctctctccttacctccctttcttctttcccaccaacaagaggtgattgagtatctaattgttacaagtacgaggaaccattctcccttaaaataagatcctggagcaaattaaaatgtgctgtagaccagttgtctggcagaaaattttaccagagtatgtagacaaataatgtaccctacacgatgggaacatgtcctagttaaactggaaattcacagaaggtcttccacaaagattttataatccaaaattataattatttcccaagtccccttctactttcttcctctttccaacacaatattgtgacccatgtgcataacaacaaagagcaagtaggggagagggcccagggaacctggcaaggagcgagagcttgctgctacatccctcaccatttttcctgtgagatgttgaaccctctcttacctaaaggccttgcctcatctttggtggaggcctttggtacaaataaggctccccaggtccccaagaccaaaaatcaaacatcttcaagttagacatcatatagagggacatatacattctttatatttccaactttgttcatagttggagttgggggcagtaactgactcccccaaaaaaacctatctccaggccctaacataaagttcaaaaacagctggaaccgaaaaaaaaaaaaaaaaaacaaattaaggcattgtgcagacagctggtcattcaaatcccttatgctttagctgtcagccagttgcccgaatcctcaggcccccttgtaattaacaccaggctccgtacaattagccacaggaccgggtgccagaaacagagtcaatcttcacagtaggaggtagggagaggaatcataaggggtcctggccttcacagagcacaggaccagggtggaggaaagggcatgacccaaaggctgcagtatcagggaggagcagggtctgtgtcataggaaaaaacaggccaaagactgtgagcctgtggaataaactgcagtcacttccagctgaacttggctgcagaagataagtttttgactgtggaggttgaccaagaggatattctaggcggaggcaaagataacatggtaggaagggtaagacggaggaggaagagaggacttatgcaatgggcatttactgagcccctactttgtgctacctaccatgccaggctctgagggcccagagtcctcaaatgtggatgcccaagtggcagtctataccaagcaaagcagagtgtcatcacagccaactttgtcacgtctcatggctggagatactaattagataatttcttccttcttttaaaggcctgattttttctgcaattcttaagtcacttcaaagttacttctccccaacgctcttcagagtcatccgcctggcccgaattggccgcatcctcagactgatccgagcggccaaggggatccgcacactgctctttgccctcatgatgtccctgcctgccctcttcaacatcgggctgttgctattccttgtcatgttcatctactctatcttcggtatgtccagctttccccatgtgaggtgggaggctggcatcgacgacatgttcaacttccagaccttcgccaacagcatgctgtgcctcttccagattaccacgtcggccggctgggatggcctcctcagccccatcctcaacacagggcccccctactgtgaccccaatctgcccaacagcaatggcaccagaggggactgtgggagcccagccgtaggcatcatcttcttcaccacctacatcatcatctccttcctcatcatggtcaacatgtacattgcagtgattctggagaacttcaatgtggccacggaggagagcactgagcccctgagtgaggacgactttgacatgttctatgagacctgggagaagtttgacccagaggccactcagtttattaccttttctgctctctcggactttgcagacactctctctggtcccctgagaatcccaaaacccaatcgaaatatactgatccagatggacctgcctttggtccctggagataagatccactgcttggacatcctttttgctttcaccaagaatgtcctaggagaatccggggagttggattctctgaaggcaaatatggaggagaagtttatggcaactaatctttcaaaatcatcctatgaaccaatagcaaccactctccgatggaagcaagaagacatttcagccactgtcattcaaaaggcctatcggagctatgtgctgcaccgctccatggcactctctaacaccccatgtgtgcccagagctgaggaggaggctgcatcactcccagatgaaggttttgttgcattcacagcaaatgaaaattgtgtactcccagacaaatctgaaactgcttctgccacatcattcccaccgtcctatgagagtgtcactagaggccttagtgatagagtcaacatgaggacatctagctcaatacaaaatgaagatgaagccaccagtatggagctgattgcccctgggccctagtgagaacactccagcctggatatgttcagttatgatgcgtccttctgctctgtgttaactctttcccattgcagatcacacccagctacagcctcaccaatgcatgccactggtcacaatgtcagaactgggcagggaatgcaactggtaaccacctttgaaaaaaccatcatacacaaataggagtcagaagctaagagcacttccactgtgatttcccttctgaatttcaatatcagatcatgggttctcttactctccagaaaatatcccttgtccttttatttttgttgtaatcagattatatttactgagacaaacttctcaggaccagaacttccaaagatatagaacaagaacattactgaaggtccaaggtagtcctctgtggagcaccatacagagattggcaatattatttaggattttgcatgactgcatgtgagagctgtcggacaactgctctgacccagggtaacacctgtggcctatgtcatgaaaagcctttgagatatccattaaaattaatatttttaaatgtatgtcc

SEQ ID NO: 5304 - DNA, 107209 bp, Homo sapiens
  source 1..107209: mol_type = unassigned DNA
aggagtttgagaccagcctggggaacatggaaaaaccccatcaaaaatatgaagattagccaggcgtggtggcacatacctgtagttccactacttgggaggctgaggtgggaggatcacttgaacatgggaggtcaaggctgcaatgagctgtgattgtgccactgcactccagcctggacaacagagtgagaacttgtctcaaaaaaaaaaaaaaaaaaaaaggaggcaaggggaaccaaatatcgctgttggttcatcttgggagggctgaatgcccaccgaatagaaaggcttgcttagcaggaacagctattaaacttaagggaatatacctgcaaaaactcatgcagactgtttgaaagccagggccgagcttggagctaaactagaatagatatttcttggattgtctcctcctcagccattaatccaagaagtgagtatcaggcccagactaatcctataacacatacatttgatatggctacctcacaaaggatgtgctttccccactacattcaactagactctaaaatagggattcccaattaaggttgcaaggactatagccgtcactatctgcaccttgctcatttcccagggatctagaccagaggtcaccagcagacacttcctacatgtgacttcctgcctctgtctgcccagggctttctctggccactgaagtaagttctgtagagttaaaatcccaggacaaccgtcaaccaataagggacaggactggtagataaaaccctagtatccttacccctcagtgaaacaattctgagcccagtttgcccataagagtaaatggctcataaaaatactgctttcttcttcttatgttacttttcctctcttctatgacattcctagaaatagctctcagataaactacttgcaccccaatagttttctcagaatgtcatgtaaagacactgggtaatagatgggaatatagagaaccacttcaatcaagggatcccaagtccagagctatcacttctgatgggaaagtcttaaaagaaggactggtccctcatacctacatcacatcactacaaattcccaccccaatgttgaaaacaattttgtccttagctggagggatttatggtagcccagaataattatggtcatttggcatgaagtcagtctcatagctgagtctgctttgacctcaagctccagctccaggacctggaattctggcttagtcctgttctcaatcctcaacattgcattccagtgtcactgagagaattcttgcattgttactaaacaactgagtcctgggattcaaatttggttccaaactataagtatctcttctcccctagacaaggaagagaaagttaacttaatctttgtttctcagaagggaagaattaaagacactgaagtcaacagtgtttgaatggtcattgcataaatacaccatgttaatcagaatttgggcacacaacacatagaacttctaagttagaagaaaatagaagacagatgttcaattatgtaatgtaggttgactttgaaaagttccgtaagaaacagatcaactacaaataggcaggaggagaggaagagggtgagggaaagctctcagaagaaagtaatggaggacattaaggaagaggaatggtgtcagagcagtgagtgctcctcccaggacttcaatgcatggaaggactggtgacaaccagcagagcctcctacatatgggtattgggtaccagagctgcctctagggctggtgacaataagcagtgtctatatcacagaggtattggattcaagaaatacctctaggtatggtgggagcaagcaggatctccatcataggggtatttgatttaagcactgcctctgccaccatctgcttgactttggggtgtgtgagctttaaaatgtcaatagactcaataatctctttggttccttatattcctattattggatctgtgatttttgctgcatttttctgaacaaaatgttctttagtttttcagctattaagtttcgccattatctctattcatgcaacaactatctattctgtatctagttagttccaggcactgtactaggttctggaaaatcaatgctgaacaaaatagatgtgagtccagctctcactgagcttacaatttggtagaaacaatagaaaggcaaacagaaattacaaatcagatgtttatagagaaagtgcagagagttatgggaacatgaaacaggaatcctaacatagacttcatataggtcagaaatggaagaaattgtctcaaagccaagagtacaagaataagagaggattagccagacaaaataaagtggaaagataattttaggcaaaggaaggggaatatggaaaagccttaacataaaaaagaatgggtcaaattcaaggataaacttataaaagtagtgtggctggggactaccatgctggagaggtcagcgcacagtttgggttatcttgagtgctatggagagctttagaatgattttaaataaagatatcacataaccagattttcattttagaaatatcatttggccactgttggagaataggttagaaaggactaaaggggaatcaaaatgacacatacgaggccagtgagatgacagtgattggaccagcagtatgatggagaggttagagagatatgaagagaagatattaaggaggcagaagcaacagcactagatgtttgattgtatgtggaatgaaatagaaagagcataattatggtacccaggttgtggacagacacagaaacaggctatttggggctaatggcagtaaaaagacatagaagagaggcaggtattagaaagaagtgaggagataattatgagtttagtttggggcatgctgagcttgaggtgctcatgagacactgaagtggagagatcaaatgaagatctgagccccatggacttctgagagctacagataaagactcagtcatctgcatataaatgagaagtgaagatatgggaatgatgagatgtttccaagagattgtggcaaacatacctgagtttaagtaccgttctgccactcattagtaatgtgatcttggaaattttaactttgctgctctggtatcttatttatatattagagataatacttcacaggtacagtgatagttaatgtaataatgcatgaaaattgcttaatccagagtctgaaatacagtggaatctcagtaaatgctagcgctgttgaagttgttactattgttattattctgaaaacaaaagatagagtgccattattcacaatcatgtatgggaaaagctgagaaaggagagactgagaaggagaagagagaaagttaggaaaaccaagagagtgtcatggtagccaaaatatacagtattttaaggaggaaattgtcaaaacagccaataggaccatcaagataagaactgagatgggcctggacaatatagtggtacactgcctacaaaaaaattttttcaaaactagccgagtgtggtgacatgtgcctatagcccagctattcgggaggctgaggtgggagaattgcttgagcccaggagacagaggttgcagtgagcagagattgcaccactgcactctagtccgggtgacagtgataccctgtctcaaaaaaaaaaaaagaaaaagaaaaagaaaaaaacaaaaaagacaagaactgagaagggccccctgactttagccacaaggcaatctcttgtatccctgcaaggaagcattttagtgagataggagggcaaaatccaagcttcaaagactgaaaagtgactggaaacagtgagtagaagtaagtcctttattaaaagccaatagagaacaggagagaggagggaagacctggatgggctctgcatcaagggaaagtttttaaagttggaggaaagttaagcatctttaaatgctgataggaaagagctggcagacaaggagagagaaaaaaatgaggtagatatgagataagatcctaagcagagggaaaggaatggtccttagaatgtaggaagatacctctcatgttgtaagagaagggaaggaggaaagaaggctgcagacacaggtgagttggaggtttgatggtatgaagttggcagagttctgtttttctccatgaactaggaaatatggtcattggcttactgcaagggaagacagggaatagtgagaaaagagtgtatttgaaacctcagactagaagaaactgctgactagggataccatatgattcccaggcaatactgaggttccccataacccctcagcagttcaggggaactgttctagattgacttagccttgggatttaggataagggtgagggagtggcaaaattgtggaccacaggtctaatctggttatggggaaaagtgttcagccacagactgaacctggaggtcccagagaaattggaggtcccaatgaaattctccaataatctggagttctccagtaacttggaggtccaaatgaaattcaaacaggtggagaaatgttgacaatgtcaataaataaaagattgtgataagaaagtagcatgagacttaagataaagtagactataaaccaaagtctttgatgaatatgggagagtgcctggaactcagtggtcctggaaatgaggagagagggcagcatggctaaatctggtggtggtggtaggatggtacaaagtggtgaagaagcaatgacatagaagcacatggggagcaaagacataaccctgaggcacctggaggagggttgaataaacagcctcccctgaatgccttgcaggggaatgggttcctgggaggagccaagtgtgagttcagggaggggccagatatgagggtgggagaagggctgttctgacaatcaagatgggacagatgagagggacagggccagtgggcaagctgtcacctctctgtggttatgtccactcttataagagtataaatacttcctgaagaagaatgagaagatggaattccccattggatccctcgaaactaacaacttccgtcgctttactccggagtcactggtggagatagagaagcaaattgctgccaagcagggaacaaagaaagccagagagaagcatagggagcagaaggaccaagaagagaagcctcggccccagctggacttgaaagcctgcaaccagctgcccaagttctatggtgagctcccagcagaactgatcggggagcccctggaggatctagatccgttctacagcacacaccgggtaagagctactagtaggaatgtctgctctcagctcttggagaggaagtctcggtcccacccagcccagaaagtcctccttggccctgggtgatgtggcagtctgctaaagattccgttaacaaccaaaaaaaatatatatatatatctctaacttatttgatgatctctttgaatttttatgacatttatgatagaaactaactaaacccacatcttcaaaagcagataactgctgcagagctttcagggaaagttggctgttcccttggatgacctctggcctggggcctccagaggagttgggtctctttgcaggtggagagcagacatcttgaggttgggggaggagcatggcggtgaggacagaaagcaggatgaatttaagccagtggtcctcaactatgatcttggaacccctggtgtccccaaaactgttttagtgggtttataaaatgaaaactattgtataacaatacttggatgtaatttgtctttttcacacactttctcttatgatcatacattggtgaatatagaggctattgatgggggatgatgtcatcactctaaaagctactggaatgtgtgcctgtatattcccgtgttttaaaatttcctgagttttgaatttctaatatgagatatatatacacacacatatgatgtatatatgtgtgtatacatctatacactatatatatacatacaactatgtatatacatacaactagaccatgtagctagttatgtatatataggtatataagcatatatacatatatattaatttctaatatgatatacatatatctggcataaacaaaaaggtatcaacataaacaaaagttatttggggtcctcaataaggtttgagagtaataatccctgaaatcaaaaagtttgagaatcagtagtttaaacaagagcttcttcatgacaattatctcacctgtgttgtatttttgatgttctacgagccaaaaaatggtgaatgcatgtttgggagttaggaggacaggaatcagccatctcaaatatggctagcagagtaaataaaaaggcactgaatatctttcttcctcctctcccatgccaagagttcatatcctcctaaatcctcagagggagaaaccaggagaggatttaagagacagagatgtagaaggtggagacagaagaaacattacaaaacaaggatggttctcttgtcagaagagaaattaaatgcaaccataacttcaccatcctgttgccagagtcctcccctgggcataacacctcttaccagcctgaggattggctgtctgtccattaaagtaccctcagtgggctcatcttggtgcactgtcagtcccagagatgaggatcttgctgagagggtgaggatatggcttttagtccttgatcctctctgcctctctgtacctgcatttgactctcattgacctgtagttcccagagcccttcttgctcataagcctgagataatgcctctcatgtttaaaaacatggttgtataaggaatcttgtttctcattggaggtccactttctgttttgttttgtttcagacatttatggtgctgaacaaagggaggaccatttcccggtttagtgccactcgggccctgtggctattcagtcctttcaacctgatcagaagaacggccatcaaagtgtctgtccactcatatcctttgcacgattgcctcttccacgtgttacaattagaccttgcctactgtgtccagtaccttctttagaggttagcaacagagcccttatccaattgaatcccaaaagtacaatgaggtcattagattgaaaaaatggcttgggcctttaatgtgtcccacaccccaaagcagtcccaagacacagaagaagtgtttatgcaacacacaggtggtttggattcacctcagactaatctagacacacctgtggatgcacaacttgaaaaacatcctctttatgaggggaggtttgctgatgcccccagacacattctcaccacggtgtgtggtccgctttccccacaacacaacaggcagtaagagggcccaagccttctttgggcagatgagataggcatgagttgttgctctgtgccatagccatgctgagaagtggctgcttactgggcaaaagagcagcacctcccagagggcaaggaaaacagaccatgatgggaagagcacacatagtctcaatgggacctcattggtcatggggcactgttaacatcacaaattactcaaaaactactagcaggtttaaaatgtcaataatctgatgttcatgccatacaagactgtaatgattagagacacattggtcaaatgtctactatatgaattgttttaggtaatgtcagaagctgctttcaggggattttgcaaggcaagccaaactagtagaaaaaagatactttggtttggtttcctaagatcttcctgggtgatcctaatggaaagatcctaatgacctaagatccttggtcatcggaaggattggaagttctttatgacaaatttagccctggcttgcaggaggttgatgtacaagaatacacctgcctcagttgcctgacaaatggtaaccagccttttcttagaaggcttcagtaaaaaagagttctaccctgctccctaactctgaggcagattgttggatttctggacagttgtcattgagctggtaaccttggcacagtcatctatctgcacactcaacatgaagctgcacagcttgatgaagttgcattacgttttctctttttacatttttttctttctggctggccagcaagaattacgttttctgagctgaatcttgaattttcagattctacagaaggatatttaatgacaatacagtctctcacttgctaaatacttcctaagtgtcaataccatcatcagttcaaaagcctctgaagtagagattaccatccccattttacagataatgaaactgacacacagaggcattaagtaaattatccaagaccatgtagctagttaagaagtccagcctgcatcctgcgtagagcagtatctacagtgaggaagtagggtggaaagtaatcagggtaattattctctcaatgtgtcgtctctgcttgggtagttgttgctttttcaaaatatatacaattacatggaaattacaaataaagagaaatcacaaacatacaaactcctctttatggattctggttgaattacatctggataagtaagaaacagctaattagaaataaaatcccctaaaaagaaccaagtgaccagtgaatattctcttcatcttgagatttgatgagtaaataattgcttggtagagtcacagctggacagaaaagctgttgagggggtctcttcctcacaaaagtctgcatttaaatctcataaatttggtaactccagccccaaaagatactagaattctcagggccctattattaatatttcaccaaaaatataattctaatcacatttgctatgaatgttttcataactaatattatacataagatatattacttttaaatatttgtagaattggagacacgattttagtttaatccttggattaacatttccccccatgtgagcatatttcttaatttaattgtaagtcagcaggaaaatgtggtttaattaatagaattttccttttcataatagatgtgttcctaagtaactgtaaaactagacacatcaaggcatttacagaaaactaaaatacatttaaatacttctgctcaaattgaaaaatgagtgttgtactctctctgtaggtcaagtttatcttcaagttttatttttccttaggaagcactgttgggagcccagctattcctaagaaaaatgtccaagtgggaacaatttacctttagattctccccaccaacatttcttcccttctattttccccttccacccaccttcctttcaatgtctccctccccttttgataatccctttgcccatagtctgctgtcaatattctccactctagctattcagagttctccactccagcctaatcctacttggggttttcttcctgagccagtatttcatttccctgtgcctgcctccaccgttcctacccagaagaccatttcctcggtggaactgatctcaactaagttacccaaacaatctgatgaaactaattcccatgaaagtttgtacctcttcacttatctccaagtttctaacttttctttgtcttttagaataaaaaagacatttgccagatgaaatttcaggccattttgtatactgaaatgaaggcttcggggcagaaggacattttggaaaagggagtctgtttccttctatcttgctcagagtttgttatcaaacagataagagttcacatctctgcagcatggttgactagctgcatgacctgagaaaagttatttaacttttattttttgtcagcctgtttctcagcttcaaaatgtagatatttatacccacctgtagatcagttgtattagaagtaacatggacaaagtactcagcctagcttaggcactcagtaaatgttagtggttattatgtgacaagatcataaagctaatattggctaagatttatgaatgtaatcattcagcatcaaggtgatcctagatgacatcacagagacttggtgatctcagcttttccttaacacaggcctttcaggtggttcagtttatttattacggtcactattttggttaattgtgtgtgcatgacccgaactgaccttccagagaaaattgagtgagtagatttgctatcattattgtaccatctctttttgctttcttttcttccttcacttggcagtctttgtcttttatttatcctgccatgcctcatgtgggtaatgctgaatctcattgtctatatgtctttgtaataaccaggtctctccttctgtgagatttgtttcataaacatacatgattttcagtttcaaagagatacagattagtggttctcaactttggctgcatattgcaatttttggggagattttttaaatgcctgagtcccagccccagaaagtctaaggtggcctgggaagatgagtctcctcgcccccacccccccccaacacacacacactcactcacctgctagatgcacacacaaatgtatgccttagagaaggtatgcttttgagaaggcctgctatgaaagagagacaggagcaaaactgagacagaactaagaacaaatggctctggagtatatttagaaaataactcataaatgaagctgtttaagttatcatgcttcatatgcctcaaagtaaccttagtattcctgaagttattctatttccctaggttagtgggtgaaacccctatagtttcagaatctgggagttttccaaaaacattccatatccacacatctgggagggatgcttccactccagcttgaacctaacatacctttggttataataacaggtgctttgcagagctttctttttttttttttttttttttttgctaatcataacagtaatgcatgccacaacagaaaatacgttatatttttattaatagattaaaggaaaaggatcacatagtcttcttaattgatgctaaaatcatttgataaagtttaatttccatttataattttaaattcttagaaaagttgaaatagaagggaataaatgtggcacatatacaccatggaatgctatgcagtcataaaaaaggatgagttcatgtcctttgcagggacatggatgaagctggaaaccatcattctcagcaaactaacacaagaacagaaaaccaaacaccgtatgttctcactcataagtgggagttgaacaatgagaacacatggacacagggaggggaacacactggggcctgttgaggggtggggggctaggggagggatagcattaggagaaatacctaatgtaaatgacgggttgaagggtgcagcaaaccaccatggcacgggtacacctatgtaacaaaccggcacgttctgcacatgtaccccagaacttaaagtataataattttaaaaaggggattgcatcactctgataaagggtattcattgttttaaagtatcaagcgtcatacttaattgtgaacatggaaagctttccctttgagatcaaaagaaaaaaaaaccaaagatgtctgttcttctcagttccactttgtaaaggaggtctcagccagcatagtaaagcaaagaaaaaaaaagtgcaagaagaaaaaagtaccgaagatgtaatttacagataataagattgtatacataaaatatccaacataacctagagataaacagtaagaattaataaaagagtatagtaaggtagctgggtacaaattaacatacataaatcaattgtgtatagacactagcaacaaacagaaaatagtttttaaaaataccatttacactggcattttaaaatgtcaagtatctaggaataagattatcaaagtataagtgagatctctataaggaaaattataataagtattgtgtaaagtttttaaagaaaaccaaatcagtggggagacatgttctcagattcaaagtctcaatattgtaaagactcccaaaaatgattaataaatttaatatgatcctcaaatcaatatttcaacaggcttcttttggtattacttgacaaactttaaactttaaattttcttcctcaaaagtttacatgaaattttaaagagcaaattatagccaagaaacttttgaggaagaaatacaaagtgggagaactcattctactggatgtcgagatttactataaagctctaattgaagcagtgtgccattggtgtaagattggtcagaataatgtaacagcatagacagtccataaacagaccaacacatatgtaaacatctaatgtgtgaaaaggtggcaccccagaacagcagggaaaaggcggtcttcaaaaaatgatgctgaagaattaggaatctcactggaaaaactacattaaacatccaactttgcaccacacacaagaatcaattctaggtggatcaacacctcacttgctttgtgaaatgcaaatatataaagcccttttttaaattttactttaagttctggggtacatgtgcagaaagtgcaggtttgttacataggtatacacatgtcatggtggtttgctgcacccatcaacccatcatctacattaggtatttctcctaatgctatccctcccctagcccccaacccctcaacaggccctggtgtgtgatgtccccctccctgtatccacgtgctctcattgttcatctcccacctatgagtgagaacatgcggtgtttggttttctgttcttatgtcagtttgctgagaatgatggtttccagcttcatccatgtccctgcaaagaacatgaactcacccttttttatggctgcatagtattccatggtgtatatgtgccatattttctttatccagtctatcactgatgggcgtttgggttagttccaagtctttgctattgtcaatagtgccacaataaacatacgcatgcttgtatctttatagtagaataatttataatcctttgggtatatacccagtaatggaattgctgggtcaaatggtgtttctggttctagatccttgaggaatcaccacactgtcttccacaatggttgaactaatttacactcccaccaacagtgtaaaagcattcctatctctccacatcctctccagcatctgttgtttcctgactttttaatgatctccattctaactggtatgagactccatctcattgtggttttgactggcatttctctaatgaccagtgatgatgagctttttatcatatgtttattggctgcataaatgtcttcttttgagaagtgtctgttcatatcctttgcccactttttgatggagttgttttttcttgtaaatttgtttaagttttttgtagattctggatattagccctttgtcagattgatagattgcaaaaattttctcccattctgtaggttacctattcactctgatgatagtttcttttgctgtgcagaagctctttagtttaattggattccatttgtcaattttggcttttgtcaccattgcttttgatgtgttagtcataaagcctttgcccatgcctatgtcctgaagggtattgcctaggttttcttctagggtttttatggttttaggtcttatgtttaagtctttaatctatcttgagttaatttttgtgtaaggtataaggaagggatctagtttcaattttctgcctaaggctagccagttttccccacaccatttattaaatagggaatcctttccccattgcttgcttttgtcaagtttgtcaaagatcagatggttgtagatatgcggtgttacttctgaggcctctgttctgttccattggtctagatatctgttttggtaccagtacctcgctgttttggttactgtagctttgtagtatagcttgaagtcaggtagcgtgatgcctccaactttcttctttttgcttagaattgtcttgactatgcgggctcttttttgttccacatgaaatttaaagtagatttttctaattctgtgaagaaagtcagtggtagcttgatggggataacattgaatctataaattactttgggcagtatggccattttcacaatattgatttttcctatccatgagcatggaatgtttttccatttatttgtgtcctctcttatttccttgagcagtgatttttagttctccttgaagaggtccttcacatcccttgtaagttgtatttctagatattttattctctttgttgcaattgtgaatgggagttcactcatgatttggctctcggtttgtctgttattggtgtatgggaatgcttgtgatttttgcacattgattttgtatcctgagactttgctgaagttgcttatcagcttaaggagattttgggctgagatgatggggttttctaaatatacagtcatgtcatctgcaaacagagacaatttgacttcctcttttcctatttgaataccccttatttctttctcttgcctgatcgccctggccagaacttccaatactatgttgaataagagtggtgagatagggcattcttgtcttgtgctggttttcaaaggaaatgcttccagtttttgcccattcagtatgatattggctgggggcttgtcataaatagttcttattattttgagatacattccatcaatacctagtttattgagagcttttagcatgaatgggtgttgaattttgtcgaagaccttttctgcatctattgagataatcacgtggtttttgtcattggttctgtttgtgtgatggattacgtttattgacttgcgtatgttgaaccagctttgatcccaggtatgaagccgacttgatcgtggtggataagctttttgaaaggaaaaaacaaagaggaatatctttatgacctcagactaagaaaaactttattacatatgacacaagaagcactaactatacaggaaaaaactgatacattttagtatactataattaagaatgttcatcagaagacaactttaagagcatgaaaaagcaagtgcttatattcagagtaatgaactctacaaatcaattagaaaaatgtcagaacaaccacttgtaaaatagcacaaaatttgaataggcactttacaaaagtggaaatccaaatggccataaacatatgaaagtattcttaacctttttttaaatcaaagagttgcaaattaaaatcacactgagattttattacatgttcatcatagaagggaaattttttaaagtgtcacaataccaagtattgggaatgacatggagcaacagaaactcacacactgctggtgggagtgtaaatttggacaacctctttggaaagcaaggggtattatctagtaaaggtgtaagcatacatatgctgtattcttctattacacccttaggtacctatgtttaacagaaatatgtacttgtggacaccagattacagctacaagaaagtttatgaacatttgcccataaaaaccccaaaccggaaaccactcaaatgtccataaactttgagtacattaactatttctgttatattctaaaatgagaaaacttacagcaataaaaattaataaactttagtgctgcacaacaataaggatgagtcttaagaaagtaatattgaacaaaaaaagccaaatgcaaaggattacataaacaaggttcatttatataaagtttgaaatcaagcaaaactaaactattttgtttaggaatgcatacttatgaagtaaaaagcatcaataaagtaaggcaagaaaaagtaccaaaaattaggagaatagtggcctccagggcagaagagggaggatgtaattgggaaggagctggtgaagtgctggtcacgttccattttatggcatgggtagttgtcacacaagctgctatggagtgaattttgtcccctcaaaattcaaatgttgaaacaaaccccccatgttgctatgttggagattgggcctctaaggaggtgattgggttaaatgaagtcacaagagtagagcccttaagtggtagaactggtgtccttataagagaaagagacagctttctcccctttgtgtgagaacacaaggacaaggtagacatctataagctagaaagagagtctttcccagacccaactatgctgacatcccaatctcaggcttcaacctccagatttgtgagaaaataaatttctgttgcataagccacccagtctatggtattttgttaaggcaacaaaggctgactaatacacaaacatttgttttaaaataattaatttatgttttatgtacatttttattatgcatgttacatatcataataaaaacccaataattttttaaaataaatgaccattgcaaaaaatgcagaacactgaaaatataaatcagaagatggttactaagtagagaaatcacaaaatcatgaaattatatttaatattgttgagatcatatagcatgtaaaatgtctatgcttcttttggagttttaatgtaaaacatttttttgcaaaatgagttatttgggagttatttggagattgtggttaaatatggaagatagaatgcatatgttttaccccaccctctcaaaatgccaatagaatgacagcacgggggaaagaacagtataaatatacaagaacaaagagaaagagaatggaaaacacagaggacaaatgatgtcaaaacacttggaagaccaaaagtgggtggagaagtggtaaatcacttagcagatcagggtttgttaaaccacggtgcctccagagggggataaaaatgagaataaaggcattttaccgcccccgctgcccaacaagccccagaggccctgcaagtgttgacatgatacaaatagcaagaaatggaagcagaaagaggaaagaacatgtgagcagagtatgttcacttactgctgcttctataataacaagaagttaaagagtattatttaaagttgacaaataaagaaatggacaaaataattacacttgacagtacaaaggtaagcacaaaaagatattattaaatacagtcagataatggataaaacagagaggaaaggaatcaccaaatggaaatgagagattttgattaaagaaatagtacactaaggacaatgtattacacggttttaattataattataaatttataataagtttttacttataaagacaaccactaggataaagatacaaactctttagtaatctatatatttgtaacaaataatatgacaaactctaaatactggaagaattgtacatcaaaaaataaaaagcaaataagagatgccaaataatgaaaaggtacaaaagtaattggggtttcagaccataaatattaaatcattataactaggctcaaacacatctttattaatcaaagtaggaaccattacaatcaacacatttttgccaatgagaaatgagtttgtttattcctgtagcataaaaatccatgctttgggattcaatgaactcttggaaggcattttctgcatcccgctggttatggaagtgtttcacctgcaaaaagttgttcagatgcttgaagaagtggtagttggttggtgagaggtcaggtgaatatggtggatgaggcaaaacttcatagcccaattcattcaacttttgaagtaactgttggttgtgtgacatgcagtcggttgttgtggagaagaattgggccctttctgttgaccaatgccagctgcaggccttgcagttttctgtgcatctcatcgatttgctgaacatatttctcagatgtaatggctttgctgggattcagaaagctgtagtagatcagaccggcagcagaccaccaagcagtgaccacgactttttttggtgcaagttgggttttgggaagtgctttggagcttcttctcagtccagccaccaagctggtcattgccagttgtcaagtaaaattcactttttatcgcacatcacaatctgattaagaaatagttcatttttgttgcatagaataagagacgacaacacttcaaaatgacgattttttaaacatttttccttagcttatgaggcacccatttatggagctgtttcacctttccaatttgcttcaactgccgaatgaccgtagaatggtcaacgatgagttcttcctcagcttcttgtgcagttgtaagaggatcaacttcgatgattgctctcaattggtcattgtcaacttccaatggccagccactactctcctcatcttcaaggttctcatctcctttgcaaaacttcttgaaccaccactgcactgtacctttgttagcaatccctgggccaaatgcgttgttgatgttgagttgtctctgctgctttacaacccattttgaactcaaataagaaaatcgctcgaatttgctttttgtataacataatttccatagtctaaaataaatataaaataaacagcaagtaataagtcattagcaaaaaaaaaagtgagaaatgcacattaaaatgatgtataacatggtcacatttatttaagaatgtattccaatatcaaacggcaaatttcaacaatgcaaaaaccacaattacttttgtaccaacctaatattttaaaaactaaatacgtcatatgaaataatataaacaagctaagactaagcaaatctgtcatgtcactaaatataaatggattttactcacctatttttaaaaatgcctattacattacaaagcaatacccaactctatgttgaataaaaaaaatactcctcacggtgatacagaaaggctaaaattatagaattcaaaagacataagcaaaggcaaacaaagaaagcaggatccatgattttaatatcagagaaagtggaatctcggtcaaaaagcatgaaataggacaaaaattgcacagacatattaatattaaagacgatagtaatctatatctttgcaacaaataagatggcaacaatatttataaatcagaaattattagagtaggaggataaataaaaacattgtaggaatagaaattttcaattaattttagccaataacagatcaaatgtattaaaaagtatgtaaaattatagatgacctagtaatataattaatataatgtatctgattaatatatagcaaactaccttccctaacaatagaaaatgcacctccttttcaaaaaaccaaacatatcaaaccaaatattaagccatgacaaaaacctcaataagctccagaaagtggaaataatatagaaaacattctctgatcataatgaaatagagttaaaaaaaataaccaaatttaatgaaatgagaggactttccacttgataatttttaaaaatctctcttaaagaattcttggacaaaagacaaactataaactaaaattatataatttcgagggaaggaaagataaaaaacagtttaatcagaacctagagagtgcagttaaagacatacatattcagggaataagtcacagcatggaagcatagaatatttatatcagtaaaagctgaaaagaaattatttaaagacctaacaaaactagaaaaaggataacaaatgaaagaaagaagttaataattataaaaagcaataaattacaaaatagaaaaacagtagatctaataaatccaaatgctgttgtaaaaatatgcacaagacctttatactaaaaaataatacagcattattgagagaaattttaaagtacctaaatgaattaaaggatgtctcatgtgactggattagaagattcataattgttagaatgtcagtgctgcccaaattagtctataaattcaatgacatccccaaaaaaatcccagcagcagctgttttatagaaattagctgaacagatttcatttgcatggatgaagtgaagtttatttaactattttcctattgatagacattcacatttatcataattaacataatcctcatattttgccaccacatattaattttttggtgagtatccttacacatgtatctttgtacacataatatgagtaaaattaaggatgaatttctagaagtagaattgccaggtcaaaggggtgtacattttaatttttgagatattgccaaatcgtcttccaaagttggatcctttccattcccagtaattatcaaatccattctttaggagattttgtattaactgaactgttgacataattccctttatatgcacactatgaaaagtataacatatacaaatctacctatatggtcacaatcctgggaatttatgtgacaggtattggatgatgttcagcatccttggcctcgtggaaataatcagactagattttctttttgaaatgcaaattgataatagccattagttgtttcctatgttgctgagaacccagaggaagataataaatgtccttgggatagactggggctccaaagatcatgctgtatacttttgaaaaagcattaaattgtagccagtgaggaatcagaaaccaatcttattgccatgttcttaacacaatctttttccttatcttccctcccttccattattccttgctgaaacattagctttgcacaattacctgctgataatggtagctctatgtctttctgcgtgcctgcctatctgtctgcttgtggaaagataaagatagatattccattttctaatcccctcttttgcttgggaagaaactagaggttcttcctcagattgggcaccagaaggtaaagagagcagggggtcaaaaattgttaagaagggcaagactagaactttcctactctccccatgccctggtttcagagaatcattgaaggggctctttgatgaccctaggacactcacctctaagcataacaatattctggaaaacctttgacaaattatagcaatttggttgtagagaagataaatgttttctcacctggcaaagaacatgtgaaatgaagctgaatctactgcaaacggggaagtgggtgtttaacactgcatgcataaagtattgatttgtatcttttcaaatttatggaactgttatcattttatatgtgtgctttatctgatgttttaaaattatgtttttgggatttgcccaaatggatacatgtagacctaattcattcattttttattgccatatagtattccataaagatattatcctgtgttttctcctcaaagttacagttttcctttctacatttaggtatttcaatctcctagaatttatttttgtatgtgtgtggtatgagataggcttccaatatttttccatatggattattccaacatttttttcaatacatcatttcccaagtggttcctaccactgcttctgccatgcaccagattcccatgtctactgaatctgtttctcccagtaatctcattgtcacatcctgagtcaacaccacgtggatttaaatgctctatagtaagatttgacctggtcgattcacatgcccctccttatttgtcttcttgaaaattattttggttcttgtttctttacttttccatatcagtttaagggtcacattttccagctcttttcttacaactctgtggaaactttgtttggtaatgcactgaattgatttatcaccacaggaagaatcgccacatttacaatacgaagccttcccacacatcagtatggcagatctcttaatttatacaggtcttctttaatatttttctacattttataatgtctttttcctaggtacattgcaattttggttgccctattgaatacttattattgctaaactgtcttaatattattaatttctatatagtgattttgcatccagcaaccctgctgagctccttaaagttaaatttttctgtagattcccttggacttcctatttagacagttatattatctgcaaataatgacaaacttgtttcttcctttatgattcttataccacttttttatttttcctgtcttattgaattggccgggaccttcaacaagatggtaattcaaagctatgacagtgagcatatttattttgctcttgattttaaagtgtgtgcttctaatgtttcactattatgatgtttatgagagtctcataattactttttatatcaattttttccatttcttgtttgttgagactttcatcatgaatgggtgttggcttctatcagtatttttatatttattgaggttatcatatagtctttcatctgttagtatagtaaatctgtaaactaacaggtttgttagtctatttttaatggttccagctgatcattttgctggattcaattaggtgtatttcattttatctattttgctaaatgaggctggcctgtaatcttctttcataaactgtccctttgggatgttccaactctctcctcaattgtccctgggaactccaacttattcttactttgtttagcagagcaattcatctctctccatctcctacaatgtttctcaacaagtgatctaaggatctctatgcacatataattttaaaatctaacatgtaagattaattattatattcatagaatttctaactttttatgttttcaaaaacagtgtatgtgcttcaaaaactgatttcattcataatggttaacatggagttaatcataggcagtttatcttgactaatgtattttattgtcacctgacagttatttacacttgtcagacttgcatttgccattattactgtcgctttgcataatatcacaattcaaaaaaaagagtcatcacttcgaaagtggttttctgaagcataacaataatgataaaaatagaaatataaatcctacaatgtgaaataaggtcacaatgtaagtaatgaatggcctccattgtaaaaatacaaagcatgaatctgtttgtcatgagacaagtggataatggatgtggataatctcccaaaaccagacaaaaatatataagaaaatgggagccatgacaatgaataatgataattgaattttattggaccaatgatccttttgtcctagtacccaatttattatctgctaacgtttttgtcaagtaatgatataaagctatcaaaacttccatattattttccaataaagtttatcaaccccacttttaaaccaattgaatatctctactacaagcacaaaataaggctttcccagtataaaattgtgaaaattttatgttaaaggttgagaagacaacaaaactatagagtcatcattcatcctcatatcaaaaataagcacaattgcactcctgctggtaagatacaaaaccagtttccaaatcaattacaaatattgtggttggagaagaaacaagaaaaacaattggtataattccttaattagaagtattgcattccttataatgtgactggcatttaaagtcaatgactgttaggtatacgagcagacattttattttatagttgaacaaaactatgaataagtaagttgtcagcatatcttcactatatatatgggaaagactcagtgactttttgttctatttatcatgaagctaattttaaaagaagagctctctggtttaattaaaaattagtttgaacctatgaaacagactttaaaaggtatgttggcttatgcactaatgtttgtagcagcgttattcacaatagccaaatatgtccatcaacagatgaatggataaaaaatgtagtatatatgtaaacaattgaatatcattcagttttaaaaatgaatgagattctgatacatgccacaacattgacaaagcattgtgctaagtaaaataactcaaacgcaaaagaacaaatgttgcatgattccacctttagtaggtacctagaacaggcaaattcatggagacagaaagtagaatggaagttgccagagagggggaatggggagttattatttaatgggtacatttctgttcgggattataaaaaagtttggaaacagatagtggtgatagttccacaatactgaatgtacttaatgccactaaattgtgtacttaaaaatggtgaaagtggtaaattttatgttatgtatattatgcatattttaccaaaacttttttttaaaagaggaaaggtgttaaattgccattgaagaaactccagccacatggtcagcaaggaaaggtatcactatccagatagaagatgctgctcccagatcccaatgctagtgcataccttattcacggaacgcagctgggggtctgtaatatgcctccagattctgatttgctgttgaggtacacagtggaaattgtgaatacaaactgattgtggtcacttagtgtacatctctttggcctactgggctgaaatgaaaagtgagtaagagaggctgctctcccacactgaattgctttggctggcaaatgggaagggcttacacagagttttaaaaataaggaatgaaatgttttaaattaccatttttatgaatacaagttgggtatctcagtgatccattcagaatttgaatattatgaatctttgttttcagagcctgaatatcgggatttgtaacaatcagacatcagtggtgcaagtggctcaacggctgagaacttgactttttcccaatacccaatgattttcttcattcaccagaaaaagcacttaggaaataacacattgggcttattaaaaattacatctgaatgctgcaacccaacatcaagaaataccttgcagagccaaataccaccaaagagaggatgcaactccattagctgctgttgagctggggcacttgccttctggtgaagcactgaaaatagtctttagagagcactctctccataatttctgggtctgtgtttgatttgacaaaccagaaatatccatcaaagcttcccaacaacctataattctgagttaagattttctaatttagaaaacataaagagtgtgggggggaaaccaacaagatatggaagctgacagctcaagcagctatgcaaccagatatagattcctaaatgatttcaaacacgatttctcctctcacagatgtgaaaaaaaattattcactttttaacttgacttttacttttatttaagacatatatgttcataatttaaaaggtcacagagttttataaagattctgacaaaaaaaacagcaatttcatttttctcatctcttctttccagaggccaccacttttagctttttttacctgtgtcttctgatacctccctatctccaataatatactcataatactaatttttaatttttcaatttctgatgttatttattggcttcctattatgagaaaaaacttaaggccacatccacaaactcatttcctctcaccctcatcttcctgttacagttatattgtaatcttcagttagatcatcagataatatatccattgtatgactacatatataattacattacattgctaagtaaacactgtttacagctgtgtcatgcagtgtactttgactatatttcctttttgcacaatgtttttgctttccttggagttaataaggattttatttttttgtttgctcagttttctatttatccctaatttgttcccaaactcttctccagatgtttaattgttgcttcaatttatttgcacacatcaggtgcatgtgtatcatttttttcctatgggaatcacagctagagtacttcatcttctgcctcattctgacctagatgttttctaggcctgatgcacagctgttttctagagattttttcttcttcattctttttttggattccttttgcctcttccctggatcgcatatatgtttcttgtttgaatggagcatatcctctagtaacatttttttttaagacaaagtctctctatgctgcccaggctgttggcctcaaactcctgggttcaagtgatcctcctgcctcaacctcccaagtagttaggactacaggtacataccaccatgcccagcttctagtaactttattagaagggtaactaagaagtacatttcccaagacttcatatattctaccttctttgacagtttggctagggaaagacttctgtattagaaattatttccctcttaattttgaaggccttgctcattgtcttctaatttctttctagacctcctattagtcaaacaatatacctcctagtctgattctctaattttcaaactttttatcacttcctatccatttctgcttttttgttccacttcctgtgagatttccaaaactttatttacaagtccgcctattagtgttttacttttgctatcatatttttgttttcaaaattccattttgtctttgaaggtactttttacatccttctgctcttgttctatacgtggagcctcttctcacctcttaactctctaaaaatattagtacaggtttttttttttttgtttttgtttttgttgttgttgttgttgctgttgttgttgttgttttggagacgaagtcttgctctgtcacccagactggagtgcagtgacgcgatctaggctcactgcaagctccgcctcccgggttcacgccattctcccgcctcagcctccggagtagctggaactacaggtgcccgccaaggcgcccggctaattttttgtatttttagtagagacggggtttcaccgcgttagccaggatggtctcgatctcctgacctcgtaatctgcccgcctcggcctcccaaagtgctgcgattacaggcgtgagccacagcgcctggccaatacagttttatttctctaactcttcttctgccctctttattgtctctttttcttttcttttcttttcttttttttttttttttcagttgtttggttgctttggtttctggtgttagaagcatccttcaaattcctgatgctccttggctggctgttcatgttaaaagtgcagcatcttcatgggctctaaaccagattatcttctggaaacttaacgaggagcagaagtgaatagggaggggagttgtttgcctttcagtaggtaaacttttctttatatgcatttttcagtatgcaactgtttccctcttcttcaactcttaagaaaatgagcatccaatccatttctggagcagaaacagtttctcattgaatggatggcataaagcagcatctagaaagctcaactggttcctgtaaaaaactttcaagcaattctttcagccctacttatcaccctcccccaaaccttgctttcagagatacttagcatctctaagttccaagcagttctggggctctgcagcatagcttggcttgcttctgggtattccctgcttcagccagttttcagctttcttaggtctgctctgtcagttaccactcatcagtctgcactccagtttctaaaaactgggagtttttagatgagcctccagcttcttgcaggatagggaggccctggcagacataaacaggagaatccttgctcttcacccgctactgccctctgcctaaccccagaacagcagaagctgctggctgtcccagccacacacatccctccccactccatctatttgtgtggcccttctttttccctcagtctgtgtcttgtttcctctccttaccttcttccccctcatcaccttggtgatattctttgcatgttttttcttggagcagtcagagcaggtcatccctccctcctggaagaaggaaccccctgagtacactccatggcacagttgacactccttttctaccctccttcccagatatgtcttcactgtcatttacacctttgaagccttgataaagatactggcaagaggattttgtctaaatgagttcacgtacctgagagatccttggaactggctggattttagcgtcattaccctggcgtgagtatatctctatgcagatctgcatgtgtgataggagaggggacaaaatggtgggtaggagacagggctaacatgcaggtcccacttggacagagtgtggagactcacaccatgaacgtttgctccaagaaccactgcaggaatataccaggagaactgaaagaattcatagatccttttaaataagtggcacactgctggaaattctgcaagacaggtgaaaaactgtgagctcccaaagtgtgagggggggaaacctgcctccaaacatacatcccaactgggtaatctgaaaatccagatcacaggagaagaatttacccttacctggaatgtaaataaatttaggaagccacacaaaatataaaagtagaaacagcaaagggaagtgccttgtaggcactcccagtctccagcttgagaccagggaatccatccctgactatgtctcacaggcacccttggggaaggcagccagtggaatcagggaggggtcacaggatgaaagaagtttcaactaaaattagtaataatttcaactgggcacaaattttcttgagcagaatccagggggcaaatgggaactgcaagcagacagtgagggatgcggtccaaaagtcatgctttctttctcagtggggaagctcacagcctggggcaaggtctgagtagggcactgcaggagcaagaccagcctcaccaactacatgagagctaggtgaggcctctcactagcagctatcccccacttccctggagaactctatggcacagcagaggcagccaaaattccctctggaacacaaccccactggcctgagaaccaacccccatccaccacagtggccacagcaatccctacccaagaagggtctgagtctagactcacctacccctgcccccacctgatggtatttccctacctgccttggtagctgaacacaaaacccagaaactctcggaagctttatggccctgctcatcacctaagaaactaaaatatttaccctggccaacttagggtgagcttagatcccccttctactaatgcactagtgctctcttgaaagcatcacctaccggctggaggtcaaacagctcaggccattaaagcaactcatgacagaataactttgatcccaggaaaaagaaaacaacaaccagttgcactgcctgcaacatcctggctaaccagacgtcctgagtctgtccatatgacaacttcactgctaacataactagcattcaagaaagccagcacactaaatctatctacagcctaggactctcacagactctacttcattcctctgccaccttcaccagaacagatgctgatatccatggctgggagacttcaagatcaatcacatcacaggactcttgcaggcatttcccagtactaccccagagcctggtagcccctctgtgtggctaggcccagaagaacaataacgatcactgcagtccagctctcaggaagccccatccccaggggattggggagagcaccacatcaagagatcacccatgaaacaaaagaatctgcacaacagccattcagttccagatcttttctctgaaatagtctactcaaatgagaaggaaccagaaaagcaattctggtaatatgacaaaagagggttcaataacacccctcaaaagatcaaactagctccccaacaatggatccaaactaagaagaaatctctgaattgccagataaagaattcagggctgggcacagtagctcacgcctgtaatctcagcactttgggaggccaaggtgggcagatcacctgaggtcagaagttcaagaccagcctgaagccaacatggagaaaccccgtctctactaaaaaatacaaaattagctagatgtggtggtgcatgcctgtaatcccagctactcaggagactgaggcaggagaattgcttgaacctgggaggcagaggttgcggtgagctgagatcgcgccattgcactccagcctgggcaacaagagtgaaaatccatctcaaaaaaaaaaaaaaaagaattcagaaggctgattattaagtgattcaaggagacaccagagaaagataaaaaccaacttaaagaaatttttaaaacaacaagatatggatggaaaattctccagagaaatagatataaagaaaaaacaatcacaacttctggaaatggaagactcacttagagaaatacaaaatgcagtggaaagtttcaacaatagactagaacaagtagaagaaagaacttcagagctcgaagacaaagcttttaatagacccaaactaagacacacaaaaagaaagaatttttaaaaaaatgacaaatcggccaataaatttggaatcatgtgaaacaaccaaacctaagaataatgggtgttcccaaggaagaatagaaatctaaaagtttggaaaacttatttgagggaataattgaggaaaacttccctggccttgttagaaatatagatatccaaatacaagaagctcaaagaatacctctgaaatgtgtcacaaaaaagatcatcacctaggcaaatagacatcaggttatctaaagtcaagacaaagaaaagaatcttaagagctgtgagacaaaagcctcagataacctataaaggaaaggttatctgatttacataagattaacagcagatttctcaactgaaaccttgcaagccagaagggattagggtcccatctttagcctcctgaaacaaaataattgccagccaagaatattgtatgaagagaaactaagcttcataagtgaagacaagataaagtttttttcagacaaacaaatggtgagagaattttccactaccaagccagcactacaagaaatgctaaaaggaattctaaatcttgaaataaaaccttaaaatacaccaaaatagaacctccttaaagcataaatatcaaaggacctataaaacaataacacaataaaaaaaggaattaaggcaataactagcataatgaatagaagagtacctcacatctcaatactgatgttgagtgtaaatgccctaaatgatccacttaaaatatacagaagggcagaaaggaaaaaaaaaatccaccaaccaagtatctactgtcttcaagagactcacctaacacataaggagccacataaacttaaggtaaagagatgggaaaagatattccatgcaaatggaaaccaaaagcaagcaggagtagctattcttatatcagagaaaacagaccttaaagcaacaacagttaaaaaaagacaaagagggacatatataatgataaaataattggtctaatggaaaaatatcataatcctaaatacatatgcacctaacactggagctcccaaatttataaaacaattactactagacctaagaaatgaaatagacagcaatataataatagtgggggatcaatattccactgacagcactagacaggtcatcaagacagaaagtcaacaaagaaacaatgaacttaaactgtaacctagaacaaatggacttaacagatatttaaaaaacattctaccaaacaactgcagaatatacattcttttcatcagcacatggaatattctctaagatagaccacgtgatagataacataacaaatctcaataaatttaagaaaatagaaattatgtcaggtatcctctcagagcacagtcgaataaacctcggagttaactccaaaagaaaccctcaaaactatacaaatacatgaaaactaaacaatctgctcttgaatgatctttgggtcaacaatgaaatcaagatggaagtttaaaaattttttgaactgaatgataatagtcacacaacttatcaaaacctctgggatacagctaaagcagtgctaagaggaaagctcatagcattaaatacctacatcaaaaagtatgaaagaggacaaatagataatctaaggtcacacctcaaggaattagagaaacaagaacaaaacagacccaaaccaagcagaagaaaaggaataacaaagatcagggcagtactaaatgaaattcaaataaaaataataataatacaaaagataagtgaaacaaaaagcgggttctttaaaaagatatagaaaattgattgaccattggcaagattaaccaagaaaagaagagagaagatccaaataagctcaattagaaataaaatgggagatattacaactgataccacagaaatacaaaaaaaaaatcattcaaggctactatgaacacctttatttgcacaaactagaaaatttagaggagatgaataaattcctggaaatatacaactgtcttagattaaatcagaaagtaatagaaactctaaacagaccaataacaagtagcgagattgaaacagtaattcaaaaattgccaaggaaaaaaagtccaggagcagactggattcacagctgaattctatcagacattcaaagaagaattggtaccaattttattgaaactattccaaaagatgcagaaagagggaatcctcctaaatcattttatgaagccagtatcaccctaataccaaaaccagaaaaggacttttaaaaaagaactacagacaatatccctgatgaacatagatgcaaaaatcctcaacaaaatgctagctaattgaatccaacacatatccaaaagataacacaccatgatcaagggggtttcataccagggaggtagggatgatttaacatacacaagtcaataaatgctgcacgtcacataaacagaattaaaaacaaaaatcatatgatcatctcaataggtgcaggaaaagcatttgacaaaatccagcatcccattatgattaaaaccctcaaccaaattggcatagaagggacatactccaaggtaataaaagccatctatgacaaatccacagccaacattataccaaacagggaaaagttgaaagcattccccctgagaactgaaacaagacaaggatgcccactttcaccatttctatccaacatagtactggaagtcctagccagagcaatcagacaagagaaataaataaagggaatccaaatcagtaaaggggaagtcaaactgttgctgttcaccaatgatatgatcgtatgcctaggaaaccctaaagactcatccaaaaagctcctagatctaataaatgaattcagtaaagtttcaggatacaaaaacaatgtatacaaatcagcagcactactgtacaccaccagaaaccaagctgaggaacaaatcaagaactcaatcccttttacaacagctgcaaaaaaaaaacaaaaataaaaacaaaaaaatcttaggaatatacctaaccaaaaaggtgaaagatttctacaaggaaaactacaaaacactgctaaaataaatcacagatgacacaaacaaatgggaacacatcccatgctcatggatggataaaatcaatattgtgaaaatgaccttactgccaaaagcaatatacagattcaatacaatttccattgaagtaccacatcattcttcacagaaatagaaataacaaccctaaaattcatagggaaccaaaaaggaatccacatagccaaagcaagactaagcaagaataacaaatctggaggcatcaccttagctgatttcaaactatactacaaggctatagtatagcctgtaccaaaacagcatgatactggtataaaaataagcacatagaccaatggaaaagaatagagaactcagaaataaagccaaatacttacaagcaactgatctttgaaaaagcaaacaaaaacgtaagtggggaaaggacaccctattcaacaaatggtgctgggataattagcaagccacatgtggaagaaagaaactgaatcttcatctctcaccttatacaaaaatcaattcaagatggataaaaggcttaaatctaagacctgaaattataaaaaattctagaagataacattggaaaaactcttctagacattggcttaggcaaaacgttcctgaccaaggacccaaagcaaatccaacaaaaacaaaaataaatagatgggatctaattaaactaaaaagctgttgcacagcaagagaaataatcatccaagtaaacagacaacccataggatgagagaaaaatctttgttatctatgcttccagcaaaagactaatatccagcatctataagaaacacaaataaatcagcaagaaaacaaacaaataatcccatccaaaagtgggcaaaggacaagaatacgcaattctcaaaagaagatatataaatggccaatgaacaggaaaaaaaaatgctcaacatcattaattatcagggaaatgcaaattaaaaccacaatgagataccaccttactcctgcaagaatggccataaccaaaaaataatagatgttggcatggatgtaatgaaaaggaaacaattttacactgctggtgggaatgtaaactagtacaaccactaaggaaaacgttatggagattccttaaagaactaaaagtagaactaccatttggtccagcaatcccactactgggtatctacccagaggaaaataagccattattaaaaagacacttgcatatgcatgcttatagcagcacagtttacaactgcaaaaatatggaaccagcctaaatgcccatcaaccaacaagtgcataaagaaaatatggtgtatgcataccatggaatactactcagttgtaaaaaggaatgaaataatggcattggcagcaagctggatggagttggagactattattctaaatgaagtaactcaggaatagaaagtcaagcatcatgtgttcttaattacaagcaggagctaagctgtgaggatgcaaaggcataacaatgacataatggactttggggacttgggaggaaaggtgagacgaaggtaagggataagagactacacactgggtacagtgtacactgctcgggtgatggtgcaccaaaatctcagaaatcagcgttaaagaatttttctgtgcaacccaacaccacctgtttcccaaaactattgaaatacaaataaagaacttattcatgtaaccaaaaaccacctgttccctcaaaactattgaaataaaataaaataaaaagatttgcatgggtgtccatgtggggcttatgggtgtatccaggctcacactctgaagaaggttcttcatctcagttcagcttcctcatttggaattgtatggcctggggttcttgccacagagtaccgcttcgggggttgctttccaagattagtcccatgcccatgaggagatgtcagagacctcaaatctgagataacagttagcctgtcacagtggatcagaaaaggcccagccttgtacccccctgacatggcggtctccttctgagaaatcagtgtctgaggagactggttggtcaaactcctgtgtttgaagatccgtccacatgcagtgttgcctagatcacaatgcatcttctcaaagggtccactctgaaagatgttgcaataatgaaatcagtgtcagtgtcagtctatagatggcagtgtcactagattctaagtgtccattctgcatcctttctaggctaatgataccccaggttatccttatttatgctgcatgcatccccaggacccttgcttgcagagatgctgactaacttctggtcctacagatatgttggcacagcaatagatctccgtgggatctcaggcctgcggacattcagagttcttagagcattaaaaacagtttctgtgatcccaggtgagcatttattcacagagcatatgttggttttcacagcctaactcccttctctaattttcacaagaaccctgtaaggttccagggcaaagactattgtccccacttacaagacaaaggaactgaggcctggagtataggaaacataaacccaaggcctcttcactagtaagagacagtgtgacctggaagcctattgtcccaactcctaggccagtgctcttcccacataccacatggcctcacaatcaatacgtaacaggaggggcatgtcttcactttctgttctggttgtgggattcaggcaagacccctcagttgaatttttatttataccttaaactaaaggattaaacttggaaatggggaggaagggagaaagcagtcccagtatcttcactgtttccgtaggtctaaaatcctgtctttagacacccagaggaaaaaagaattaggcaattcttgattactgagaattcagaaacaaaagtagtccatcaaagctcattgtgtggggcctctaagatctccactgtcaccagtagcccagcgactactcttcagcccccatgaggttgatggtgaggatggggaggccagagacaaggcaaactttctgaaatgggacttgatgcttcccctctgtggcctgataggttctctcctctcaccccaagaattcgttctcttatctgtaaacagaaacacccattctagagtggaagtcttttctaccatttcttgtctggctctgcagggaaagataggaaactctctgccaattcccactggacacacctcttgaagagagccctggtcctgccccttcatatctctctcacttactctcaactgggaagaccctgagtcttatttgcaagacctggtctgtccatactgtctcttctgcctcatctctcacctctcctcacatctcaccatgctctggaatccacctacggttctgcaaatactccacaccattgctcacctcccagccttctactgtgctgccccttcttctgggatatccttcctcctctctttactcaactcacactcattcctcagggctctgccaaggttttacctcctccctggttttcccaccttcctcacactccacccaccccattcccacctctggaacttcagttaagggctgctcccctgtgtgcccatctgctcagtaatgctacagactttcccctcaattgtcagacaacggcactcgacatgctgctgccttagccatcactcagctcccagtccagggactgacacatgtagtgctcagtggattatttgctgaccaaaatgactaaccaaaaataaatcctagattgcttccctggtcagagctctttctgctacctgcgaagctgctctcccaaagaagttgattttacttaccagagcaacaaatcatccctccttaaacaagcaggtgtatccttctttgctgccagctgtgcttggcacaagttctatttatgccccagtgactgtctcagtgtttcttatagtctctttctattgctaaactcacctctctgtttctctgtgtctctttctttttctttctcttggtctatttttgtttcactctatctctcttgcatctctctctctctctctttctctctctctctctctctctctctctcacacacacacacacacacacactcacacacagtgaggttcatgtgtcccaagtctcaagctgcctcccagatgcatgcagaaagacagatgccaaattactggggtgaagttagtagcttcatgcctagcacagtgcctggaaaaagtaggtactcagcataaattatttaaattgaattgctagtgtcaggaattttattagcctcaagatgataaaaaatgcattgcctgggtctcagttgcatcgtctttataatgagaatagcccctgactctctgcctgcctctcagagtaaatgcaagcttcggatgagaaaggtcttggaactgccctggagtgtgtacatacttcactcctgtatgtagagatgaaggaggatggctaagatgaagaagtgtgctccgtgtgtgctacctcatccatgtggtcataccactgtcatcttcccgcaggcctgaaggtcattgtgggggccctgattcactcagtgaagaaactggctgatgtgaccatcctcaccatcttctgcctaagtgtttttgccttggtggggctgcaactcttcaagggcaacctcaaaaataaatgtgtcaagaatgacatggctgtcaatgagacaaccaactactcatctcacagaaaacgtgagtggagtctcttccatagggaccaaggtctggttggacccttggtatcatatagggacaggggatatggagcccctgtgtgtgtgtatagacatatattttgactcccctttcctgccaaaatggttctcttgagttgtgttttacttttgggtattctatttcctgttgctcagcatccctcttgcaaggaaatgagccataaatctagaggcaagtcattctacctctgctgggggagattgagagccgaagtcactgcttagctcttctcttttcagatgtgactttacaacttccatgtggcccagcatgcccactgagtacatgtagccaaaggagctcactttggaagacttgggaatattgcattcaccacacaaggcttgggttggagggttcagaaccatctgtgaggctttcttttcttcctttcttcagcagatatctacataaataagcgaggcacttctgaccccttactgtgtggcaatggatctgactcagggtgagttcccaacttatgacaaagcacgagtgcccaacaattccttctccatcttgtccttggcatattatgggcacagatggggttgcaggtcctgggaaagatgtataaataaataaatcatggcctttgccaacccagagctcatggggagggaatgtatgagttagctttcgctgtgtaacaaatgaccccaaaattttgtgaattaaaacaacaatgtatttaattcatgattctgtgcatcagcattttggactgggatcagatgggcattgggtgacattgactaggctcattcatgcatatgcagacagcatattaacttggagatggctggtctaggacgtcctgtctctgctcatgtggcctctcacccccaaacaggttagcctgggcctgttctcatggcagtgttcccagaaaaacagtggaagtttgcaaggcttcttcaggcctaggcttagaaccaacacaatgtaccttttgtacattctgatacattcttgactaaagcaagttgcagtccagtagagatccaagagacagagaaatagacttcatcactcaatggaaagagctgaaaagtcacattggaaagggtgtggatacatagagacaagaattatagccattttaataaataatctaccccaggaaggaaccaatacttatttgtgtcaaatgctctacacttaatcatcacagctaactccattctatagccacattaccctcacaagtagaggaaaaaacacatgtatcagactttgcaatttcgaattcttacagaggccagattcataacaacaaatgagtggagtgggccaggagggaacctaggagctgagagttcatgcctcctctaaaggggacagccccactgctcggtccagcttttggttgccatgtggaaatgtgggttcactgtttccagctcttccaacttttaaaatagagataggaaatttagatttttatataaaatctcccaaccgtaaacattggctacctattccaaaaaatgtctacatattgttgggccaaacaaaatatttctgtgggccaaatccagcctataagctgctagtttgcaatttctcattcatagacataaagatgctaccctgtggaaaacaagttctttactagaggcttcataggctgggcaaacacagtgaggtggcggtgtgaggcaagagagaaagtagggaaggcttcctggaggtggtgtttgaggtgagctttcaagggcaggtaggatgtctccaggctgggtgaatacgagatagtttcagcgaagaccattccaggtggcagaacagaatgtgagacaaagctaagggatgaggacccctcagctctgcctgctgctttggccactggaggaaggcatgagcagaaagactttaggcaaaagatcaaaaaggcccatctcacccacctccatggctgagagcttggaaaagcagagctcacaacacccccagtgcctgagaggctgacggctccatgttgcccaggtcgacctgtgtggagcctgcatgaggctccaccttcatcagctcactaggaaaactatctcagttggagctgaggactggaaacaagcaggagcatttggtcaacatcaggttccttggactgttctttcacaaatgcacttggcatttggttctttggctcatgagagggttgttctgacatcagttttcatttgcctttgacttaaatgtaaaccaagagcccctcagcatccttctgtctagataatggcatttctcaaggcaatggctccagagcagctcaagtcctttttgtggtaaagttgttgggtccatctacacacctctacagctcagctccctgagaggccaggcctgctattgggcaggtgccagccaggcagtgggggagtggaccaggctgggatggcagagagaggccagctcaggataacggacagagtgaaccctgccggggcatgccgtgaaagctaaacctgggtcctctgtggggctgcagagaagccagagtcctgaggaaaggcccacattggccaatggcactgtgggaggaaggtcaggggtctcaaggcagaaaatggataccagaaaatagttgataattttcagtgttcttccacatatattattccagtttatcctttcagcagcttccaaggttaaaaacaataggaattttcctttgcagtttatatacaatatttactatgcagaagtgcaagacactatacagtgatctcatttaatcctcagagcagtgaactgtttatatgcagtggctatggtggatttctacagaagacatagaaacaaggctgccctcagagttaattaagaaacctacaggaaatgggttgcctagccccttggaagagcaaaccaagagcctatctttaaatgtgggtctacaaagccagggaacttgcaatcttcaatcgaagtggagatagacttggaactgattagaattaagttgtcagagctctaatccatggtatgggttgttcacatggatgtctgggataaggagagccccagaggttggagttcatggagaaatcctgggagtaaaagaattccatgtattcacaaggaatgcaggtaaataaaacaggagaaaaagaaaaaaatttaaaaaaataattctggacttcaaacgaggcattgctgtttcattgatcaggccatctctgctagggtggatgagagcactttacgctccctgagctgacagatgcttcttgacatcgactcatcctcctattatgagagagaggaaggagttcagcattcccacctcaatactcaccaggcagtcatttttaatctggccttccttcataggccatcttcaggaggaggctaggctgactcaagtattgggctacttgacagttatatttctccttttaataaatatattgacacctgcgtagttttaggcaactgacttctttctgacccccagattccttatctgtaaagaaagaacattgagtgattaaattatagtgtttgtaaagcacttaaagggagagagaagaacacagaaagtgctcagtaagtggaaagtgttatttccactgttacatataattaatcagtgaacttggctaatgtgagacctcccttgatagacaactctgcagatgatgccaacaggctcaggttttaagtctgcgttattgctactgactctcatttccctggtatgaactggcaaagagcttatagtatcgtgtctgggcagtcagctgccttccccaggccactcccctgtgtatgaaattctgacgtgaaagtattagcgtccccgttttatggataacagaaaccaatacctaaacagaccaagtgtccaagatcatcctgctaataagaggaagactaggtcttgaactctgatctctgacataaaactctgtggttgtctcgcagccctgggctaccttgtctgcaataagcaggggatgaccttctctgttcttgctgcagccactgccctgatggttatatctgccttaaaacttctgacaacccggattttaactacaccagctttgattcctttgcttgggctttcctctcactgttccgcctcatgacacaggattcctgggaacgcctctaccagcaggtactgagctgcattcccccacgcagacttggttggaggctggtgggtcagctgcatggctgtgcttttcctggaggaggctgacttaaattcaggggtccatgtgctatgggtacaggtttctcttctttcccttgaacctgcagaccctgaggacttctgggaaaatctatatgatcttttttgtgctcgtaatcttcctgggatctttctacctggtcaacttgatcttggctgtagtcaccatggcgtatgaggagcagaaccaggcaaccactgatgaaattgaagcaaaggagaagaagttccaggaggccctcgagatgctccggaaggagcaggaggtttgtgaggagtggaagctttgtgaagaaggttgcagactgtccattcttggatactgttctggactagccacttcaattagggcaccgtttagggagctataggaggaatcatcttgcctcagggaccatattagatcaggttttctcaaagaagaagctaagtgaggattcttgtgcaagtgacctattgagggagtgctctcaggagaaagcgaatgaagcaaaacagaatggggcagagggtggaactaaacaaggagtgttctcagctagagaccagcttcagcttgatcccatggggaactctggggcatgacctgtaccacagttagtcctaccttgaggcaagggggccagctttttttttttaccctccccatacctatcccagaagcaggcagccaaaagagactttttttgtagaatgctgcaagtatgagccatcagctgctgccatgcaagcagctcgggatagctgtgctgacctggtgaaagggatctgggtggggcaccaacagagtaccccatgaatgagtgggggtgacccgaggtgtctgttcctgccatggcctaatcccaccaccaccctggtcctaacccttcagcttctctgtttcagatctctcacccctggcaccccatgtctgggggacacattcatgctaagtccaagcaaatactattggctacacctgctgttctctcttcgcaggtgctagcagcactagggattgacacaacctctctccactcccacaatggatcacctttaacctccaaaaatgccagtgagagaaggcatagaataaagccaagagtgtcagagggctccacagaagacaacaaatcaccccgctctgatccttacaaccagcgcaggatggtaagaggctcaggtttgtgctctaaagattacccaccattgcagctgccgtagacaatgagttggagtgggaagaggtgtgtggcagagaaagagctggaggcatagagcctaaaaggatccagacacccctccaaaatggtgtcttaaactaggaaagtgtaattatagatggggaaaaggggtgaattataaggacaccttagggaagtggatcaacaagattgggattgtggactgtggaaaaaggaaaggggagtccaatttgactcccaggtttcaggattgggcaatcaaatgggtggtgattccaagatgaggacactggaggaagaaccccggtttgtaggaaaggtgggaagcccatactgaacatgccaatcttaaggtgtctgcggacatcaaaggtcagcttccttctgaggctctggtctgcagttctagagtgcaaggttccctgtccgtggtgctgagatccttcatgcaccttttttttttctgatgcgtcgaggtggtttttatttttttacttagttttttttaattgacacttcacaattttatataattattgggtataatttctgacctccttcctaaggtcctgcaattcaagctgtcacctgttgttatcagaaaagtttccagcacccatctctgtgacacaatccagcctgggaatggcttcagcacctcacctcagaccctgtagcaattcttttccccccataataactttctgcctcccactctaaaatttgcactgcaactttcctcgccacgcttcctcccaccaccttcctgccccttgaaagtccttttaccccaaatatgccctttctataggtctgacagataatatctgctgtgtgggagggtggctccacactaacagtgtggaaaaggggatcaacatggctatttttttatgctttatacctctcacttccctctcaatctcttttcctgtgctaagccgaaggatattttacttttttgcaataccatctctccaaccctcagatttatgtgtgcatatacaaacacagacacacttgcatgcacactgacctcatgacacatccacacttcagcatttatctgcatctgtgccctcctctttcttgctttgccccttttgagcagcacctggcatacatggggcacagttcagacaatcacagaacaggatgaatcacagcttccatggaaatgtcaatgacactgaattgggctttaatttcccccattctgtcagccccacacagattagcacttggatgtccaataattggtatgtgtgcttgtctctccagtgatgcttactttcaaagggaaaaaagaggagctgtaacttgttcattcaacaatactaggtgcttggtataaagagatgactagaacatgttcttttccctaaggatttccatttgggtggaggaggcagatataaacacagctatgtgttaaatagtgtattagagacacatacatggtgttttgagaatcagggaagaaacatccactcttatggggctggataggtatcagaaaaggcttcctggaggaaggcataattgggatcaacaataaatagcatgtaggggttcttctagtaattgaagacttgagagagtttggggaggagtattttcctggcagaaagaacaacatgtatgtgcaaagacagggaggcaccatttaagtacttctttaatgctaattgatttattggagcccactcaggaaggcatcctctccctcttttcccaggtacattcatgtggtaaatagacctaatgcagtttttatctaaagccattttataaccaatagaaattaaatagaggaatatatagaagagacccaggagggtttttgtggaaaatcacagaccagttggtctcgttagaggatgaattttaaagcaattctaatgcttatactcagaagacattgcccaccatttgtcaaaaccttaattctaaaataactcgtggccaaggagacactgctgtcaaatatgcaaccaaaattttcttctcagtttcttcattggtttgcttggtgctcaagtgcaaataatgtagtattcccttccttaatatggatgtgtcaatttttctcatttgcttcaaaaattggaaggatttttgcattttatgagttctatagtccttgggcatgtattacaggcagagagtactctatttataatactgagcttttaataatggttgctaaacaggatcaggcttcaaattatcaagagaggaaacttcagttctgtgagataaggggattagtaaggagaaccccaattggcaagattctccactttagtagcttagtaataaaaaggagttaaggaaggtgagtggaataaatcggtatgatcagagtttggtatgaagtcaatgtttagattttgtacatactatagaccacctgaggacacaaatgatggtttattatggtcaagtttcactatggtcatgggaactacctaacccagcacactaattctctgagggctctgggtttatgaattagctcttttctctggcaactttaagccacacagttccctcaatggaagattttgatgggaaatgtttattgatttggaggaatgacattattcttccaggaaattaggctgcaacccttccttcagtctctccattgttgactgttcaagcctcgagggatcctagaaactcattgcactgtacagctcttgtctcctcctttgcaacacaaactctcacattcatacagatgggatctaatgaattgtactacctaattttcagacaatgaagtgcacttattcattcaacaaccacttaccaagtatgttccagtactggtgtgcatagtagcctccttaggtcacaactttgcatgtggaaaagtgaacttaggacagctttgtctagccctgtggccaaaggttggcaatcaactgaactatccaggtgacaaggtttcctctgacatgttcctgaccatgataacctatttgctgagcatcagcacgctgtaatctctcctctctcctggtctttcccggagtctatctagagtctccttttttctttttccccaccatgcatacctagaataccccttagatttgtgcctttacttagtgactgaaaggtcataaagacaggggcagggaaatgggagtaggtagagggaagtgttgggctctagatttcccagaggaccagtttccagccttcttgctcctttggggcaatgcccagtcttttctaggcctcgcctctggaaaacgccgggctagtcatggcagtgtgttccatttccggtcccctggccgagatatctcactccctgagggagtcacagatgatggagtctttcctggagaccacgaaagccatcggggctctctgctgctgggtgggggtgctggccagcaaggccccctccctagaagccctcttcctcaacccagcaaccctgactccaggcatggagaagatgaacaccaaccgccgcccactagtgagcttgcccctggagctgtcgatgtctcggtgagtttgtgaatgcttcagactccctcaggctgtcttccacctagaagccttgagccaagaagcctgagtatcaccaatggaagggatctttagccatcatcctgtccaatgcctccccattctactccttttttacagacatagaagatgagacccagagagagagagagattgagttggcctgaggtcaaacaggtttcctggtttattctgcagtagtgatgcaaattatattccatttgaccccatatttcttatcagtgcttctctgtccccactcaacatcactgcctcagtgataggcctgctttcttgttggacaggtatgagaaaaactgaaggacccttctcttcctgcttatggctctatgcaaactcttctaggctgggcaaatggcacccagagaaattcaggaagtttcttaggacagatctgaatagaagcacagtattccttgctttactcacagaagaaataatttgccaaaatgagcaaattaggcaacagtgactaactggccagcactctttaatagaataatcgcagagtgtaatggcaagtcagggattcctcattggattgggagctgtgagttaatgtgagctctcccctccagtttcagcaatgatgtttctagtgtttttcatttgccctctctggctagccagggatacagcgcaattgcagacagaattgtaaagagaccaataaatggttccactgatacagataagtcttagagttgccttagctcagtctctgactcaatgtcatgtgattcagggtcccagcaagaaacagatggaccactccgatgggctaatagagagagtttagtaaagtatttacagaggtgtgggctgggcttagggaatgaataagggacagtgaggcacctagaaactagtaacagggggaagctgttacatgcctaggctgaagggatgaaggaaaggaccagaattagactacagcagcagctgccctcatgtgtcagagaggctgcctggcagaacttgtgatcttagtagaggatcacagctctgctactcagccatagcacaggagagaagaagccaggggaaaatacctgacttgtctctccttctatccttgaatgtcctgcctatgtctcccattaaccaaacctggccagaaccagagggtaaggataacacattttgtacaggtctccctccccaggaacagagacagtggagaaggtagagagtaggtctccagggcaaatggaatcaccaaaacagagccttaaagtcaaaggcatcctgcagggctcgctgggagtgcattagcactctagaaaatgcctcactgaaggcatttatgcctctcttgtgatgggcccccaccctcctttctctgttcctgagattatcatgtgtctagatattctgaccttgattcattctagttaaattaccaggctagtgaaagattgactctttaggcccttctgtttagtatggacctatattttagtcccaactgtgccagttaccacctgagtcacatttagcaagtcctttaaattatccaagcctccttatctccccttgtaaaaaggtttctaaatagctggagggttaaatgaaataacaaagtgcctacatttttatacatgtctgacagataacaataaatagtgactactagtatcatttgcttagtcctcatggttggaagctttataaactttctttatgtttattaactgtttatacttacagtattcagcaataacatgctgtacagatttgtagcctaggagcaataggccacactatttagcctagatgtatagaaggctatagcatttgtttgtgtaaatacaatgtaggatattcacagaatgatgaaatcacctaatgatgtatttgtcagaacatatctctatctgtaagtgacatatgactatatatgagattggccaataagaggctgaatgatccaactttgccatgaagatgtcaggttaaaggagcgtcctgactctgtttgtgtctcaacaggcattcgatgcaggacaaaagaagactttcttgtcagcagaatacttagatgaacctttccgggcccaaagggcaatgagtgttgtcagtatcataacctccgtccttgagggtaagtgctgctcactgcattgttcatccactgtgtcatgatgaattcccatgtgagcagcagaagcaatgtctctaactcgtgtcaaagcgtccatctctgtgtactggaattcctaatactcctcattcttatgtcttaggccccaccatcttttatcaatgtggttttttagatgcataatttttcaaaaacaaaataatttgatgaataaaatatcctagctcatctcttgttcaaattagcatctgctttgcatgcatcacaaaactagatttttaaaagtgatctggcaggcatcagagaatttcaggccagctctccggtgtacaagaaatttaaccatccttaattttccaacatggcaaaattatccttttcatggtttcataattatatttttcatggttgtaacttacacagttgtaatttaatttcttgttcaagcccacattatgctgaatattggtagacaatttaagtccattaatcagtcaatttaactaagtccttgttaatttagaattctaccaatcaagtgggaatccactcagtctccccagcaatgtatctaagttccaagccaaagggtagaggaagagagtggcaatggtcatggccacctatccacacactttgccatagagcgtgattgcatccctctaaccttgagcaggaggtctgttctaatccagcctttttttgccttagggtatggagaatgcaaccttcatcatttccagttatcttactcccctagacaaattaaactgacctaggctggaggagttgtaagggagcttgagtgctggtgtgcccctgagaaggagtcctgtgtgttttcctcccagccctaggctgaatcctaatttgaggggaagaagtggtgagcaatagaaaccaaaaaaatgtttgagggatttcaaaacagagccaatgtgtgccctactttctaggtaaagccagaggtggcaagccttagagagagattcacatgcacagaaactgtagagtagaactagccagtaatttaccagatatgcagagatgtatctgttttgctcacagctggatctccattacctagaagagcagtgcattaacaaaggtgatatctggggggtgatgctactttatagtggtgtaaactgataaaaaggaagaaaataaggaatagtcaggtatcttggggtaggatagacttccgctcaaggaagatactgtgagagtagagtaagaaaggcaggagaaacaaagacgtttttaagaaaatctggggaaaggcaaccttagcttaggtcaaccttaggttagagaaggcctgaagcagcctcagagagagccctgtggctccagaatggcagagaggagctgggtgatgacttagcccccagtgaaggctatggaaaaagatgagtgagacccatagagggaaactagagagagaagagccatcttcatggactctcccaccagggaccagatgggagctacaactcaggcaaaatacgcttagcaatgacaaaggaccagctcaactctcctccaggtttgagccctacaaaactcagacacagactcagatattgaaatagtacccaacattgacttaacaagagacagttcccatggtgaggacttgaagcataaattgaattcaactaagttacatttcttgcatacctgagtttgtgctttgagaaatgtgtactcatttctcaacaacaacgtgtacagactctcttctattattttttctcattgataattatttaatatcactgttcattgtaatagagtctgtacttctaacatttttcatggcatagaatttgaccaagctgctattcccacaatttctttcttggccagataggtttcttggtttttgtttgtttgttttggtttttgttttgctattagtcatcaaacagcaaacattgaatacaaacagtttgtttttttcatttattctcgaaaactgttaagcttcctccttctctcttctttcatttattctcttatcaacaagcatttgttgagcccctgttgtgtgtgtggcattgcttcaggtgctgggattcagtggtgaactgatataagcttgcgctcatggaatctacatcctagcagggaaggggacatgaaagatgaatagatattcagatataagaagtaggagaaaaaataaagtaggaaaggagatggaaaattctctccaagaagaacagaaatttgaattaaataaaggaatcagctatgtaagaagctgaggagaaagttcgcagacacaaatagcaagtacaatgcattctgcaagaatgagatagcaacaagcaaaatgcatgtcccaaacacatcccagtgtaggtaagacaaaagaaggtcatgggatgaatgagaggcaacagagggtagtagttagaacactgctctggaacccggctgcctgggtttgcatcctagctcttccacttatggtacacagtgtgaccttggagcttcagtaacttttctgtgcctcagatttttagcctgtaaagtagtgagaatatacttatcttgtagagttttgtgaggattaaatgagtcaggtcaagcaaaatgcttagaaccacgactggcatgtagtaaatactcatcacatttggctattatgatttactaggttgtaaaatctatgagggcggagatgtgtctgttttgctcacagcctgacctccattacccagaagacaagtgcatgcacaaaggtgatatttgggtggttggcggcgggagtgatgctaatttataacagtgtgaactgataaaaaggaagaaaataagtaataggcaaatatgttggggtagggtagacttcccctcaaggaagatgctgtgacagtagagtaagaaaggccagagaaacaatgatgttttaaagaaaatctgaggagaggaaaccttaggttaaataaaagaggtcaaagttttctgagcatagggcacatcatcttctctggttggatgttatattcattacacacatgagacacctgaaggatgcttcatgctgccagagtcgtaataggatttataaaggccacctctttaagagggattatgcttaagaaagtttggcccaaaccaacaggagtttgacaattcactgaactcaaagcatgtgaaccttctatgcttggcatgcaagctgagatttcactgttgtccaagccagaattccagaagctgggtcacagcagtgagcttactggagtggtgagtgccttaaagaggaagtgcaggatactaagtgaaatatggtaagatttgcctggagccagggaattatcccaggctgaaaggactgcaaagcagaagagagaataacatttgaaggaatgaaaaagcctaatgtagctgtaacctagagaaccaggagaactgaaaataaggctagagggatgagttggggccagatcccaagaaactcctagactgcattaaggatatgggacttcatgctaagaggagtgaggtgccattaaaggattggaggcagggaagttacatttgcattttataaaagttactctggatacttgtagatataagaggggaagtatgttgtcagggaaaccagttaggaggaagccaagtacaagatggcagtgcttgaactctggggtagtgacagtggggctgatgggaaatggaaggatatgagagctatctaaggggcataagattcaggacttgatgatgcatatggttctggtataagtgccttaagatatgctgatacaataactcataaagggagcattttaggggaagaagggggctttaatggggaaagatgaaagaagattatgagttgagtctgggatatattgggtttcaggtgcccttggagcatctaggtaggggtgtccagtaggaagttgactttaggatataggggtctagaacttagatgacaaagatggcatatatatatatatatatatatatatatatatatatacacatacacacacatatatatatgtatatatatatatttgaaagcagtttgaatgtaagtggtaattttgaaaagatgcaactggatgagttaacacagaagggttgaagtaagaagagaagaaggcctcagacacagttctaacaaactaaatgtttaatagttaagcagaagagatggacccagcagaggagactgaaaaggaaggtacagaaataggaaaagatctagaagaatacaatgcagagccaagagtaaaaatttcttcagaaagaatagaaaggccaacagaggcaatgctgtggaaaggtcaggtaaaatgaaacatgaaaaggtccaggggctttagtcacatggatgtctttggtgatctaagcaaaagaggattaatggagtaaaagggtaggcagaggtcatattgaaggggcttaaagagcgggtgagaggtgaagaaatggagatatggtgtacagacaattttttcaagaagtttgcctgtgaggaaaaggagatagtaagatggcactagggagtagggagaattgaaagaagactttttggtttttgtgtttgggggagtttttgtttgtttgtttgttttgagcatatttgcatgctaatgggaaggatctgggagaataagagagactgaagattaagggaagaaagggtatattcaacagactcctgcagtggcaggagagaatgcacagtggagacactggtgttaacaggagcagggggacctctttaagcgtaacaggatgaagggaggaaagttctctctgttatcaattttatataggagatccttttgaggtggggccatggtcatgttttaagctggcaagtagatacttttagtctctgtgtctctgcaatcaatcaagttcaacaatgtcaaggctgtttacaaagatgcctctcttttcccatcatgcctcacaggtggctgcttcctgccaaaatggcacatctaaagtgtcctcattcatgactacttcctgtgcttctttttagtgccaaaataggtccagggaagttcttgcttttgttccaaacagggattgttgattttggtcccaggatgtgccaacttctttagagaactatgctttgccagtttggacatctgtagtttctaaaatccagtcagtgattaaaacagcatgacagtgaaaataaatagtctgatctgtggaagagaaatggacatgtgtatatgaaaacacatgaacataaatggtaataacatgacaaaaatgacatttcaaatcttgggaaaatgaaaaattattcaataagtaatgttgatataaataatcagagacaggaaaaaataaaccacatcaatatcttactctttacccaaaataaatttcaaatgcaccaaagttttaagtgaaaaaagtgaaactacaaaagaaagaaaaaaacatggagaaggtattttccaagccttgtagtgagaaaagcttcatatgtaaggcatgtatgcatatgtggctaacctgcataatgtgcacatttaccctaaaacttaaagtataatttaaaaaaagaaaaaaatttaaaataaaaaaatgaagaaaattgaaaaaaaaagaaaacaaataaaaatactactgataaatcttgactacatacacatttttaaattatcaggaaaaaacactgttagcaaaatttgggggcacacagttatttctctaaactgatttttcaagtgcatatagtaaaaaaaaccctaaacactgcaagtgtgtatgcaatgacaactatgtctccttcccactatagacccttcctgctccccagactcctggtgcacccccctcccactccagtttatcttatattcttcaagcaatgttctatgcatatataagcacatgcatgcacatacacacactacacatacatatttttctacatcaccacaaataaatctgcctcattctttttcacaatgtattatgctttatcagttgttgttttccattattattataaacaatggacatcatctttctttgcccacataggctgatatctgttcaagatgcatgtcttgccgaggaatttatagataaacctaaagctaagaaattgccctccatcgaggtgaacacagttacacatccacatggagatttaacggaggcaggtagagagataagcctagtgttcaggaagggatcagaaattggacacataatttggtgggaattggcatagagatggttttttagggctatgagattcaaaaacacagagaagctaaggtgagaatgcttgagttattcaacatttacaagcaggaaaggaaaagggagacaaaaacagaaagtgaaaagaagtggagaaatatgggagaaaaagcaagagatgatgcagtccccagagccaaatgaacactggtttcaaagagaacaatataaattctgtcaaatgttataagggtaagatgagaactggaaatcaattatttgaatttggaagcagttaaagtcagattccaggggctgcagagaaaaaaagaggtaaggagctgtagaaggttaagtgtagaaaactcttgcaaggaattttactgtcaaagaagcagtaatgaaagagagcatggggtccagagagactttttcaaagccgcgagataattaaagcatgtttacctgctcatggcaatggtctggaagggagacaggtctggatgatgcaggccttgaataggtgggagaggaaagagcccggcacaagtgggaggggtagagccacccacgcactgtgtggggcacgaagacagaataccaggtggacttgcagatatgccagagatttagtggtaggaagaaggggaagttcttttgtgaactagtctatattctgagtgaaataaaagggagctcatcaacagagagtaagtagaaagaagagccggaggttagacgggggaagaggaagtgagaaacagtcatctggaagaatgaaggaatggaatataatatagaaacacagccagatttctgggcagggcaaggctggggctcacagatctctaggagggttggtaagcatagttgtgtattttttccagccaggtccagctggttgggtgcaagtacagagtagtctacaaattgggtctattcacagttcaggttttgccaggcaagtacaatgaaggaggagaggggcaaaggaattgagggtgcctacaagggagtagttagagagatggatgtgaaatctaagctgggcaaattgagaagtaaggacatgatataggtgatgggcagtaaaaatatgtaatgtcagcagtttaaaggactggatggggcagatattaattggagttgcaggactaaaggagttcaaaatataggaaatgaataccagagacagagagagggctgaagtcaaaatgttggaggtggtacttattattaacaacaaggtctagaggatgaccgcagaattggggtccaaggtgacacatggctgacagctgtcattgaccacactataatgcagaactcgaggagtctgaacagaagtgcccaccctgcttgaccagcttgtctcagaagtatctgatctgggattgctgccccatgtgggtgaagctcaagacaattctctttgggcttgtgacggatccctttgcagagctcaccatcaccttgtgcatcgtggtgaacaccatcttcatggccatggagcaccatggcatgagccctaccttcgaagccatgctccagataggcaacatcgtgagtgctctggctggtactgccctcactggcgtggtcggggcggggtggggatgatggcagggtgcagttcgggtggggtggggcatgcccttattggttagtgtgttgagccagttagctgagagcagagcagcagtgcaggagacatgtggacactgggttcaggaggtcaagtgtgggaggacccaggctgagctggtgggaatggctttgggatgaacaagcacaggaaagtgaaccaggagagcctggagccagaggcagctagttgccctttacaaaacataggacaaccacttgaattttctggatctcagttgcctctaccttgaaatgaggataaatgtcacttttttatctaaagacaatctttggacttgtctgtttccttccaatgtaattacttttatgaccacaattaacagtagccacgattttcaatgttgtcacttaaggagaaaaagagttggggagggaaggggaagacagtggaagggaggaaacatggaaacaaggttgctgttgtaacaaaagcatcaggaagtcggaacttttctttggcatctagtttagacatcatgctgctttaaattttcctccatcacttgttagtattatttactcttaacaagatacaatccatactggatttcactatatactggataaagtatctgactcagagggacaacaactgctccaaccttgccccacccacaggaatagtaataatactcagatgcttctcatggattatctcattttattttcacaacaaccctacatggtaggcactcttgttattccctttcccagatggaaaaatggagatgcaaaaggttaaataatcttcccaagatcatagagttgagtttagtggccacatcagaatttgaacccagacagaccggctgccaagcccgcttttcttaacccctgaattaagccacctcacaagacttgcgtgtgtgtgtgtgtgtgtgtgtgtgtgtgtgtgttcaaacacacgcacacatgataggcagaagctagaaagggtcagcatcctgccttcatgtccgcagcagggtccaccaagctggaggtgacctactggattcaccagaactgtctggctttggggtccagcttcttataggctgcagacttaggtggagggggaaggcccagaggaaatgtgactacttgtccctagaaaccactccctccgccataatccagggctgtgaaaggggcagcagtaggttctggaacatggtggaatcagcatgcctcatgttttggcagcacctaggctgaggtcacatcctaaagttgatatgaaaaggaaaaatggaaagagaagagaatgcttattcccaagaagtcagcctaagaccacagagggccttatggaatagacatttgagcccacaccctcattctacagttagaaaagtggaagcaagagagagaaaaggcctttcccacagtgtcagaggaaagtgccacttttttaaagcaagaaagtcatgtgcttggtgcctgcaatgagtcaggtgctttatgaatgttatttcagtgtcacaacaacattatgaggttaacatcaccctcacatgacaaaagagagcactaagactcagagaggttaaatatcctgcccaaaattgtatagctggtgagggtggatccagggtggacccaggtctctggaagacacaagacctcaaccctaccccccaccacaccacactgacttgcctacaagggacactccatagatactctttgaatcagtcttgtggcatgagaaagtcacttaaactctcagcctgttttcttctccataagaaggatgcattgtctgtttctcaggctggtgaggggctcagataaaaagatatgaaggaaaagcacctgaccctggtcgttgctttcctccttctctgtctcccttccctgctggttgttgtgttacccgagcctggttctgacctctctcagtgtcagaattctgtcctatttaagacaattagagacacacagagcctaaaagaatcttagaggcaatgaatcattgttcttactagtcactgttacttatgaatgaattactgtctgccaggccctttgttaagaactgcacatgcattggctcattttatgcccattatacagatgaggaaattgaggtacaggaaggatgcattatttgtccaagcttacataagctaggaaatgtctgggctgggattttaatccaggtctgtgatgtcccacaacccacacgttttaactactgaaccagactgactcttcactgacaaaatgatattataataatgatcttaaagactatccgcttattccactcccaccaccattcacgtggaaaaactgcagcatgcacagcccctgagaatggtgcagaaatgtctccattctgtcacgttgactgttaccctggccaatcctcaggagcccacagataacatagcaactgaacaaaacaaaaggattttctattttgtaaataagacattttcttgctgccatttttatcattgcctccgaccccacagatcccactgtgatgaaagcttgtttccactcctaggtctttaccatattttttactgctgaaatggtcttcaaaatcattgccttcgacccatactattatttccagaagaagtggaatatctttgactgcatcatcgtcactgtgagtctgctagagctgggcgtggccaagaagggaagcctgtctgtgctgcggagcttccgcttggtaatgtttttctcttgatggcttggggaaactcccacccagattcagggaagacactgtgctctggggactgcaccagccagctcccccttcctctcctgtccttgtgggagggagcagggtctgactcctgggcgactggagacttgggtctgtggccccagcttttcgctgactcagagtggggacatgccttctcctttctgggccttggctcccttatctgcaccaagaggggacttccaagcactgtcctcgtctcttatcaaataacaataacagcaataatcacagcagctaatacttactgagcacttacaatgtgtcaggcatagcactggacacttgaaaaaacgcacctcattttatgctcacaacaaccctgagagatagtcgtttttaagatcctcaggggtgggtgaggaaaaagaatggttccatgatgacccgaaagtctcccatctgccaagcaagcgaataagccacagacctggatctcaaatccaggttgtctgactccagagccccagctccttccagcctcaaggaagtcattctctgattcccttgtgcccgaaatcacagccccaatgtctcaagcaccttcaacctgcctattagtctcactcacatgcaatgatggctcttctctaaactcagctccaggacgccctctacaggagaagtgccacaggccacccacttttatcagagccacaggtttgtcagccaaacctgtcagattcccaggagtgtcgggtcactaggtctccaggccatctggaggaagcttggcatctcactgactcttgggaataggaaagaggcctgaagaaatgtcacggcttgttagcgcaggccgcctgctctcaggaatctctcagtattaactgggagccctgcatctagacttgaagagaggtgacaaaacaaaggggagtatccaacaatcttcccaaggtcctgacaagtgttggcatccagaggttgaagggggtgcatggttcaggaggcaacgagactctaggacagatctgcttgggaccctatcacaggggccagtgagacagtgctgagcccctgaacttggcgtacctggattaggggtggcaaactcaaatgcccatgtgcagtgacatagagccagccatggaagagatgtgggcactggatatttgcctcaggtagacaggcaaagatgactccatttcacctaggcagacccaaagcagtgcacaactcctgggagggatgtttacatagaaatcaatgtgaccatctcaggccaggtgcagtggctcacacctgtaatcctagtactttgggaggccgaggcaggcagatcgcttgagcccaggagttcaagggcaacatggtgaaaccccgtctctacaaaaaatgaaaaaattagccaggcatggtggtgcacatctgttatcctagctactcagaagactgaggtgggaggatcacctgagaccagggaggtggaggctgcagtgcaccatgatcgtgccactgcactccagcctgggagacagagtaagaacctgtctcaaaaaagaaaggagacacagagagagaggaataaagatagaaaaagcgagagaaagacagatgaaagaaagagagagagcaagagggagagagaaagaaaaagagaaagaaagaaagaagaaagagaaagaaagaaagaaagaaagaaagaaagaaagaggaagggagggagggagggagagagagagggagggagggagggagagagagagggagggagggagggaaggacgagctatggcctgtccattattgtcagagttactaattttccaaaaaagtcagaaatccagatttttgtgcaaatgtctttaatattggctactaatccagtttttaaaaacactctaaagaccaaataaagcatgtcctgagacacagctgtgccatgaaacgctggttgatggcatctgcctaagctgatggtactgtcaccatcccagggaggagaagggtagagtaggcctggtaggactctttatccataacttgaaaatcttacaaggtcagaattaaatcacatttttagaaggacagatttctctaggtatctagaaattgatgtcaagatgtaggcccctaagctaatggtcaatataaggtacctatgcacaatcgtcaagagagcaggagatatcacacccccataccctggcaggcccacagttagttttctaataaaatacgaggctgggcgcggtggctcacgcctgtaatcccagcactttgggaggccgaggcaggcggatcacaaggtcaggagatcgagaccatcttggctaacacggtgaaaccccgtctctactaaaaatacaaaaaattagccgggcacggtggcgggcgcctgtagtcccagctactcgggaggctgaggcaggagaatggcgtgaacctgggaggcggagcttacagtgagccgagattgcgccactgcaatccggcctgggctaaacagcgggactccgtctcaaaaaaaaaaaaaaaaaaaaaaaaacgaacatttctgctacacttggggaagcagaagcttagtgttttaaggtctatgtgctacttttgttctgatcccacagtctaaagtcccaaacaaccaaaaataggcaagtttacttcacagtctgcccctacaggattctgcaggggaatgctaccctgtccccacctcgctgatttaacatgctgatcagtgctcaattccctaaccacacccaccaactacacactttcttgggatctattccacttccctcatgacctagcttagatttcacagcccaccaatattattatgcccttgaaaacaaactcaatcaccttttccctctgcctctttgcgtttttgtgtttgccaaaacctcaccggagagtctaagtcaaatatttctctccaccttgtctgcacctgagctgtgagaaatgctggagaaaaatcaccgccagctggtcagtttcctggttttaattaatagactttattttcaggacagttttcagttttcagaaaactggagcagattgaacagaaagctttcatataccatcaatcccacaacacacacacacacacacacacacacacacacacacacacacacagagtttccctattaccaacatcttatgttagtacctacatttgttacaaataacttcactggtttcccattgctctgagaataaaatccagactcctcatgatggtgtacaaagttctgcataatcaggacctgccagttcaccagtctccgtcttgcccactttgctccagccaaaaaggcctactctctcttcttcacacataacagagaacttcttggctttgggcctttgaagtttttttcgctgtgcctggaatacttttcctttagtcttcacttagctcacttattctcaaactctgtgttcaatgcacttgtcacctccttagaggggacctccccaaccacactatctaaagttggattccttcatcaaattaacctggcatttacaattgtcctgctatcccatgaggcaaaaaccagagtttcttgtctaccgttttatcccaagggcctagcacaaggcccagcacatacataggaactcaataaacacctgttgattgattgaaggaaggaaagaaagagaggaaggtggagggaaaaaggaagaaataaaaagtctgtcttccttctctcccaaaatagcattgcttctcctcccgtcacttaaagccttgctccatttgctctgttagtccattggtctatcctggcaccaatatcagtcttaattatggcagctttaaatatatctgtgtctgtaaatcaagtaatccacctaatttacttcaagaatatcttggcctgcacactttcatattcactttagaattatcttgccaagttacatacccacatacacacaaaactgctattgtttttcccattagggactgctgtaattgataggtcaatttgggaagacttataatctttacataattcagtcttctgatctatgaagatagtatacgctgtataccagtctttcaataaagtttaaaaatgtttccatgaggtttttataattttctccataggatcttgcatatcttcttaaatgttcttttctggcatttttggctagcattttgatatttaacatttttgtatctagaaatgtctcttattaattctaataatttatctatacaatgttttaaattttctaacataatcacatcatgtgaaaataacaatgagtttaatttcttcttttctttcttttttttttttttttttttgagacagagtctcgctctgtcacccaggctagagtgcagtggcgtgatctcggctcattgccagctccacctcccgggttcacgccattctcctgcctcagcctcctgagtagctgggactacaggcacccaccaccatgcctggctaattctttgtatttttagtagagacggggtttcaccgtgttagccaggatggtctcgatctcctgacctcatgatctgcctgccttggcctcctaaagtgctgggattacaggcatgagccacccacgcccagcctaatttcttcttttctaatccttatgccattaggttctttttactagatcactgtgctagttaggacatccagtacactgttgaaaagaagtgttaataacaggtatctttatcaattttctgatcccaaaaagaatcctttcaatatttcaccacctctaacaattgtggcaggctttttttaaagataagaaatctttatcagttcaggaagttctcttttatcaagaatatttatcatgaatggatgtttaattttatcagacaattattctacatgtattgagataatcatgtattttctccttcaatctgttaaagtggtgaattatattaattgattttctaatgttaaatcaactttacattcccagctcaaacctagcttgatcgtgatgcattttttaatacattggaagatttagtttgctaaaaatttgcttaagatttttttatccatatcaatgagtaatatttgatctataattttcctgactttcattgtccttgccaggttttggtatcaaggttccaagattatgccattttttttttaaagccaagggggccaggtggggtggctcacgcctgtaatcccagaattttgggaggccaaggtgggaggattgcttgaggacaggagttggagaccagcctggccaacaggagaaaaccccatctctactaaaaatatataaattagctgggtgtggtggcacacacctgtaatcccagctactcaggagggtgaggcatgagaattgcttgaatcccagagacagaggttgcagtgagctgagatcatgccactgcactccagcctgggcaacagagcgagactccgtctcattgaaaacaataaaaagaaggccaggggcagtggttaatgcctgtaatcccagcactgttggaggcgcaggcaggcggatcacctgaggtcgggagttcgagaccagcctgaccaacatggagaagacccatctctaccaaaaatacaaaattagccaggtgtgatggtgcatacttttaatcccagctacttgggaggctgagggaggagaattgcttgaacccgggaggcggaggttgcggtgagctgagattgcaccattgcactccagcctgggcaacaagggcaaaactccatctcaaaaataaataaataaataaataaattttaaatttaaaaaagaaaaggaaagaaattagctgggcatgatggcacgtgtctgtagtctcagctatttgggaggctgaggtgggaggatgacttgagcccaggaggtcgtggctgcagaaattacagcataaattaactctccattagttaacttaatcaaagccaaaagttagctaaaatctttaaccttcctccaagacaacttttcattccagatatcctttcccaatttattgtaatgataagtattttaattttatcttgtttataaaaatttttattaatcaatgaaaaataaagctacctattatacagacaatctctaaaactgagtaactgaccccaataaaggtttatttctcactcgtatcatagcctaatgcaagccagacagctctaggtgggactccaagaagtgactttgccatgcctgaaggaggccaatataacttcaaagtttgcctcctgcttgtgggaaaatggaaagccaaggtttgttttaaggtttaaacagtgaaaggctttttcagtcagggattttgatttatttcacaatacaattacttcaaaaacttagatggcttcagacctctcattgccacacaaagtgctttctttgacaaagttctcaattgttctttatttctttgctttcctttccccatgcctttctcttgcacaagaaacagtggctacaccattactacaagctttgctaagagttgtttcatttaattggaaaatttaactagtcttcaacatttgaagacttaatcccattgctcactgcctggaatctagaagcagtacagttccctaaatcgtcaaggctctaaacttctggattatattttcttttattcttataaaccagctaaatctttcctgagctaatctctttcttgtactgtcttgaccaacatagccaattacaactgacccacaatactaaggtttaataaacccttcccctagggttgctggttcatgaggctcgtgctctgcctcaaaatttttgccagcaatatttttgtcactgaataacatagattgacattccaagccttctcctatcagcttccttgttgcccaccacatgatcattaagccagtgccacatagttgatgcttttgaaaaggcaataccttttttcaatgaagcaatttctccattactcaagataagtacaactagctgcagtgataccctctaaatctgtgagttaacataatagagatgtatgtctcacagcacattcagtgcttgttgggaagctctcctgggagtgtctacttcaagtagcgcctcaaggatctaggattatcccatatcgtgatgtcaccatcttcagttagtgacctttatggtgaacatgaaagggaaagaaaaagttcagggggtttaaggctatgcctaaaagtcatgtatattacttctgtctccatctccattccaccagacagaacccactaacatgaccccaactatttgcaagcaaaactggaaaacagtcttccgttgtgtctgggaggagaaaagtgaatggagactatatgaccagtctcttccacatctcacaagacattgttgttgtgtccactcaatgtttatttagattcactctcatgcttagcactttcttgctctttatacctttgttatagagccagtgggggctcactgcccaatgctctagaagccaatactatgactttggaagccaagacgaggacaccaggcttttgagaaaagaaaagcttaatactgcaagctggctggcaagaagacaggaggtcaagctcagatctgtctccctgtgctgtcttcaaggcagtatttttattagaaaatgtttagtgggtggataccgggatttgcaggtgattggtggaaggaaaggggaggtttggagagtccatgggcctgcacagttatctcttcatgcttactcatgggttgcatatgcaaatctggggggagttagtatgcaatatgaagtggaaattcagtccatgacgtcagcaagctcattctgcacaaactccagtcggccatcctggttccaattgatttcagcctgttttttcatcatcacacaaggggagggagtttcagtgtctcagcaagttgtttctttacctatctgctatcctaaaaactcaagaatttttgtaagttactgatttcttactctttggaacacagtttgagtttcagattttcagtgagttatttcttatctggtatcctgtaagcctaaaaatttagttattgatttcttcaaccctttggagcacagtttcacattcttgtatattacacattacatattacttctgggatcactttctatctacctgaagtacctcctttagaatttcttttagtaagtgccttctggccataacctctttgtttatctgaaatttgctcttcagtttgcccgtgtctttgagagacatttcttatgaatgtaaaattctagttgatactttatcttccttcagtgaagatagtattccaacaattagcctccattgttgctaatgagcagtcagctttcaatttaactgttattccttcctttctggatgctttttaaatcttctatccatctttggtgttctgcagtttcactgtaatatgtctaggtgtggacttctttccatttataatgcttaagatatactgacttcttgaatctttagttttgtaattttcttcaattctggaaagttcccagacatgatgtgggcagtcatagcctccacgccattctattttttctccttctggactttggttagatagatgttaaactctctcattctatcctctatgtctcttacactattttgttatttttcatcttatgtctctctaggttacattctgaataatttattctgatatatcctcagttcactaattctctcccaaactgtgtcaaatctgatgcaaaccttcttcataatatttttaattttaagtattatatttttcatttctaagagtgtatttttcacaacttgttattgttatctatagtttttttattctctgcacatagtttcaagttattattttatttctttaacatattatatctaattatactgttatctctgactaataattctatcatctgaagaaatggaatgactatttccacatctgtggtttcttcaagatctcattcactcttgatgactcattccttctgtttttgtttgtttttttactgcaactcttaaacaatttttgagggaatagtttgaaacctgagataaaggcaggttcctccagaggtatttgcatttaattctgcagagcactttgtagaattgctctaaattaaattctcaacttaaaatacctaggtagtgtgaattccagataaaatcctatatgagcaccactttgttgtttcaaatgctcagcgtcaattttcctcctgtagctggtacctaacaccagccattcaattttccttgcattctcctgggattgtttgtggttcatccttacatgaagggtatagctctttgggatctagtcttaaagcagggagaaattcctgctaggcttacaaccttcggcaggccatggactacgtttcctgctccccatactagttactaatgctcagtttttatttgtgtttatcagctgcctctgtgaccagtccacagagttgttgttttaagctctgcttcccatatgaggagagtaacttccagattgggtgtaaggtgaacgtggacccgctctcccccatcacataaagaggtgcatacagcacttactgtataacaggattaaacctcctcccgtgggatttactcacggatatgggtgataaaattgtagctacactgttgtgttcagcattgcatcctagcacctaagccacagcctggctcttagtaggtgctccataaacacaccttgactgacagactgacagttgagctcagattttttttcctgacaaattagagaaccatacaaatatattttaaaacacatacatttttatgcttgatgattttgctgtcttgtgggacttagcatatttgagtttacagtgaagacttttgagacttcatcttttctcagtaactaaaccattggttccatgagagcaagagcccacacacctctcttcatacacctcataggctagcacactgccatgcacctgcacggctggagttctggggggtaggttcgttggtcaattaaatcaacttatgaatgctgagtccatgaaatcatggacatttgcagtttcaaagctggtgggagcaacagatgttgtccactgccccaagatgagaaatgccctaagagatgttttgccaatacctatcgaatgcagtgggtcatcccctacccgaaggaggctggtctctcttcagtcataaataagcttgttctcacttatttgtgagccccatcacacccaccccacctccacagaagaggcccatattcaggagggatcaggcctgtggctatagaacagagtacagatcgcaaggccaccaccccagtagaagaccctgactcagccacagtcaatgaagcacattgatacttatgaaccatagaaggcagatcatatttttgagtaatttatagcataggaagaaaggtctccaaaagcagtgtccagaaaacgccctggtttaatgggatgagaggccttgtgtttttcccagatctttggtttccaggcaaaactttagatgaaaggtaatgagcacagctaccaaaacctgacggtctctgtttctctgcagctgcgcgtattcaagctggccaaatcctggcccaccttaaacacactcatcaagatcatcggaaactcagtgggggcactggggaacctcaccatcatcctggccatcattgtctttgtctttgctctggttggcaagcagctcctaggggaaaactaccgtaacaaccgaaaaaatatctccgcgccccatgaagactggccccgctggcacatgcacgacttcttccactctttcctcattgtcttccgtatcctctgtggagagtggattgagaacatgtgggcctgcatggaagttggccaaaaatccatatgcctcatccttttcttgacggtgatggtgctagggaacctggtggtgagtggtgaaccctgctgggggcactgtctcctggggaaaggagaaggcttctgggttatctgaaaaagctttgatctgcatttttatgcccagattgtacttctctggttgaaaagtcttcaaacttttcaaattcatgtgggattcattacaagaagtgtgccttgggaggcagtctgacttgcaggaatgagaacatatgattagaaaagaaagacctggtgtagaatctctgctccaccatttactaggtgggtgaccccaggcaagagacttaatctcctcaagatctaatttccttaaaatcaagaaaataatgcttactcatgggtttactgggagaattaaatgacaggagatgacatatgcaaattgcctaatgcaatgtctgggctgaggcaggaactcaataaacggtgtctattagctgttaaaggaaaaatgtccttccccaatctgagggggctcagaaaacatttttattcagggaagtaagagctgactgatttctccaagctgcacaggtcctagctgggagcagggggagaggctgcagggagggggcacaatgggtcacggacaacatccaaggccacagaaataataacaaaatctactccatgtttggaggaagcccctctggagactcacttgccaataagccccaataccccttctccgccccagcctggccccctgccctcagcttgtctccacccactctggtcatggtggggtccttgccctcctgggactgactggttgtgtgggaggatgcagtcttccagaagcccctttcttattgccctggacatcaaccaacttgggttctttcctcatgagttttatagacagaagaaagctaaaccaagaaaagggaagcaacaacaaatccagactctttagtcttttccaccctggtgcctgagccagggatgcctctgcctgcatcccagaaactctgttcttccaggctgagcccaccatccctgcagagccacagatgcccctcaccctcagacaggaagtttacccctctgagcacttttacatttctcatatcattttgtcttcacaaccgctcttcatctgctctcaagtgaagaactggaagcagcaagatgtgcccaggattccagagtcaggaacagagcccagggctttggcacatgagggtggttgcaggaagggctggtgccttctctctgttgtccctaaatgtccctctgctcagcggggggctcctcctttatggtggaaaatatgcttccaagcctcgtccactgaggcgggtcactccaggacatccccaaactttccctcaactgctctcagaaagtccattcccccaaaagggacagcatcccgggtgggcaggaagaggcccaggccgtggctgtcttgccagccagctgctaacccggtaggccaatgtggggctcagcttagagattgatcaatcttcccttccattccttctcttcaggtgcttaacctgttcatcgccctgctattgaactctttcagtgctgacaacctcacagccccggaggacgatggggaggtgaacaacctgcaggtggccctggcacggatccaggtctttggccatcgtaccaaacaggctctttgcagcttcttcagcaggtcctgcccattcccccagcccaaggcagagcctgagctggtggtgaaactcccactctccagctccaaggctgagaaccacattgctgccaacactgccagggggagctctggagggctccaagctcccagaggccccagggatgagcacagtgacttcatcgctaatccgactgtgtgggtctctgtgcccattgctgagggtgaatctgatcttgatgacttggaggatgatggtggggaagatgctcagagcttccagcaggaagtgatccccaaaggacaggtaagagttatccccaagggacagccacaggcagtggggaggggcttcagggcttgagtgacaaagggcaaaagggaaatgcagaggagaccttgacataaagaagtttaaaccatgccaagctttccagaggagttggcgtttgagcagggcctggaagaaaaagtcagaattccccaggcagacaaacagggagtggggggcagcaggtgagcaaaaggccaccttgaggtgcttggggattgtctttcacacagctgtcccatgcgctctgcccaacccaggctctgtgcatgagatgctaatgagatttctctaagaacaggatgttgtccaagagcaaggctcatctaatctttaccagcatcctaagaagtcctgattcttatgtgactcatttagccagcttttccccacaagtggtatcacagggaaatgacacgctccttttggcaccaactaatttaaagcacatttgagccatttgataatatatatttttaaatacttggcactattccttactaccttaagctggtatatcaaccctcgctaacctcttctcagtaactcagggcattcacctctgcccaacgtgggaaggcagggaaccctgtgaggcctcaggaacatgcagggctgctggccaggttactaagtggtccagaaaagctgtgctttgagtctgtagctctcccatagccttcttccctgcagtcgtcacttgtgttccagcagctgctgttatcagctgccatattttacatgcctttgtctaggtaacagcagagagcatgaactctgtgacagctgtctgccactcagaagcattttcagttactttggggctcttagggagctccaggtggccaagttccctacaattttgacctctggacaaataacaatggtcatggctaaaatctattgagccaagcacttcgtgcaaagtgttttacaagcgctaacatatttagtcatcaaaacagctgaatgatgcagatctagccttttcaattttgaagctgggaaaaatgaagattagagaggttaaacaacttgcctaaggtcacacatcttataattaatggagcccaaggataaaacataggtctatctagctatagtcttcatgctcacttcacacacgtgtatgtatatatgtatgtacatgagttgcatatatgaaactcttggctctggcagcctgtgatgtgcaagatcccttcaaatttagaactggtcatctaagggtggggccaggcacccagttgggaccctctctcactagcaggagcagctgcagcaagtcgagaggtgtggggaccacctgacacccaggagcccaggcactggaacatcttctgaggacctggctccatccctgggtgagacgtggaaagatgagtctgttcctcaggtccctgctgaggtaggtatgtcagcttcctggagaggttggacagccagccagacactgagcagtgggctggtagaggctggagggtggcggtgaaggtggggtattccagactgcactcaatcacataacctcatttcttatcctgggaatttttaaagtccctcccaacctccggctaatccgcacaatttcaactttcaccatataccattgccacaatctcactccagggtggttctaggtatagaaagaaagagtgagactccacaagctgtgggacctaagatcagttcccaaacctctctgagccgccatttattcatctatgaaactgaatggtaatgcctacttggtaggattattttgaagcttaaatgagatgctgcttgtcaaatgtttaggtcctgcctgagacaaagtaagtgcccaggaaatgacagccaagaaaaaaggaaacgaaagacaacgcacaaagaaagtcaaatatctttcagagccagcaaataagagttggaggtgctcacagatgaagaagttttcccttgtgattctcccccactttcttttgtccacatcattttctctaggcaaaagtagcctggggctagggagaggctctctataggtgagtagtgaagtgacagcctcacagagactgagctggaagattagaggtttaggattgtcttatacaaggtaaaaataaatgtggtttcacttacaaatcttgaaggaaacaagctatagggaaagaggcatctataaaagtttagcatctttaataacactgccttcaattcaagaatttaatttgacacctagccactgagtgctgactttgtgacaggcactgggctcaacagagataaggaagtcataattcatccccaaagttatcaagcccttcagcttgaagaatgtcagctactggctgtgtgccctaggcaaggctgaccacagcagggtaagataagagggagggctgggacgggatttgggggctgtgggtgaacagaagccgcttggttcccactgggtgagggctgtcacattctgcacgtggatgtcatgcttcttcccaaatgttccaaggactcccctggctagttgtccctactcaatgttttcagtacacaacttctgggtgttggttttttgtttttgttttcttgtccatgaccccggctaggcaggaggggcctgacagcgacaaatggggacccgccccaccatttgggtccattagcaaagctatcaggtttactaatatgagagcaacttcaacccctaattgaattcatctggagacattatagggctggagctgccaggagggcagcaggcccctgcagcattactccatgattaaatattcaagcccagtgaatgctgagagtcgttatgggtgtaattacggtgtctcgggccattgccagcactccatcaggggccccgaaggtttacagtctcacacagctaagcctctggggctccagggagaagagcagtgttccaggcctcagctggcgaggcaccaaacatgggtgcagttgaacctgcagtgaccgtgtgcaattccccgggccccgcggagagacgagttcactgccctgggcttctcccctgcagggagtggacgacacaagctcctctgagggcagcacggtggactgcctagatcctgaggaaatcctgaggaagatccctgagctggcagatgacctggaagaaccagatgactgcttcacagaaggtgaagggacagccacaggccccctcacactgatgttaattagggccagaatccagttgagcgaacactcacctgggatccacagaagacaaacaagctgtgcccacttgctgcctcactcccaggcttgagggcgcccgcatcagacacacatgccccaggtggcagcagcctggccgtggtatctgcatctcatgccctatcagacactacggagagacgtgggccttcctctttaccctcaaaaacccctccgtgagttctaaaccagccctcttgagttgaaagggggaaacgtagtcaccaccataaacaccactgaaaactcttgatttggaccatgaaggacccagaggaaggccatgatgtatctgcttccctcaatcttttgtttagctctcaaaagcagaacctgtgtcttagtcatctttcctctcagtgtttagaacagtgaggcacattacattctcaataaatatttgtgcaatgaatgaatcaagagtccattctataaagggaattgtggcctcaatgctttctaaaaatacaaagaaaaattttttaaatacttgagtttttattaatagttttatttgaccctgggctgggctgagctgggctggacccaatccccatcccagccacgtcgtggccctcagttcagcttgggcttggagcatatccccctcaggcacccccaggctcatacgccgtagcttgtctgttttccaggtataggtgggcagaaggacagggaccactggtgtcatctgtaagaaggatatggctaggaaaaacatcagagtgggcaagactgatgatggagaggaacacctgttggtctggattgagggactccctggaagggacccctcttcacccatattccaggaaagaatttttttccaagggcatgacaagtgggtttcctagcagaatggtttctctgcagcaggagcagaaattatcccctttgcccactggccatcacccaccatcagtcacctctccccacaggatgcattcgccactgtccctgctgcaaactggataccaccaagagtccatgggatgtgggctggcaggtgcgcaagacttgctaccgtatcgtggagcacagctggtttgagagcttcatcatcttcatgatcctgctcagcagtggatctctggtaaggggaggcatagtccctgcccccaaatcctccagataggaatctcctacaatccaaaggccctggagctgcatcagtgggttctcctgactactgagctgaaagtccccaaccttgtcactagaaggagagctgcagcccagggcgagggcccctcttagcagcagagcatgggaggtgttcaaggtgcccgtgccatggcctgccaaacctggctgcaagcatttgagtgagtgagtgtatgcctcccactatatagatggggaaactgacactcaaaatgtttaaaaggcttgtccaaggtcacccaacttgtcagtagcaaaacccagctttgcccttatttaatcccgaagcccctggcttcccaccctctgacctccccaacacacggccttctctgaaggcctacaatacaaaaaggactatctttccttatcaaaccacttccaaatgctactaattactcctttaaagctcacagaaaatcattacaatagcacttctcaaaatttaatctcccaggagcttgttcaaatgcagattctcattccataaatctgtggcagggcctgagaatttgcatttctaacaagctcccaggtgatgcttgcactgccctcagtgacccacactttgaataacaaggccttatgggaatagagattcagagttgggagacatctctaaggccctggctgaatactgggctttgtagagcaaagaaggaaggttctctctgtactgtggcttaagctccttacacaatctcaactactccgccaatagaccaaggtagacatagacacaggaaggaacttaacatcctcagttgtttgcattttctaaatgaggaagtcaaagcccaaaggcatgaggggcttcaggtaattagttgaagggctgggaatagagagttcagggtggcagctaattagttgaagggctaggactacagtcccgctcttccgattcacggctgcagtgttttcactcatcttgcgcctcatgtgtcatttactctctaaaaacaacctactaaatatctaggcctccatctaaatgccagattgtccaggaagggtgacaaaactgctcggtgcatggcctcagctttagggaggagcacaggtgcgggacgaggcaggatctgagaggtgggaggaaaactagggtggcaatgacgcaaagccaagggagaagagagtttcggggcagggactggtctgccatcctgggtggagggggaactgtgtgacagcggctgcaggtgcccagtgccctggcacagggcagtgattgtccacacggacctcagcacagtgtagaggccaaattgcaggggcaagagagggctgggcagtgctttctccacacctatgctcttctccttccagtcctgctggattaaagtaataaccacatgtgctgttggccaggtgctctcctcactacgtcattggcttgtgggccttctctcctcattttgcttctctgctctcccttgctccctcccttctctctctagcccccttctcttcacaccccggtccaccccccacattcccaggaggaagctcagacctgcagcactgcgccagcccagcccgccccctgcagctctcccttccctcccatctccttcccctgggactgaacaggctggcaccaaatttagccttctttaggctttcactttgagtaccttttaaaaataacatgcattttcatctgacaaagtaaagtaccaaaaaaatacttggaaattatagaaaaaggtaaagaaaaaaaaatcatccatttccctatcactcaaagagaaactcacttgaaaacatgctggtatacctctttctcatcttgcttatgcataaaatatacacatattacaaaaataaaaccacatttatgcattctataacctcagtacatttttctcagtaaatagtctcatattatctcatttaatggctataacatattcctttataatttactcaaccaatctctatgtttacttctaatacacattgaatattccctgtgtgtactcccttagagacgttggataatctcccatcttagtcctcgtcctagacacagaatcggaagctgagaaaagatgtgggttcagttgaaatccggcttcagctgatcccatggaaagccctgaagcacaaaggacaccaaagagctgtcccaccttgaggcaaagaagacagccttgtaaatccccctgtcactgtccctggctgagggctgccccagcggggaggataagcatttcccaaggtggacacagtttcctccagcccagcgaagccatcaggaagggggtgtctgcatccatgaactattagcagccgacactcccagcagatgaaggataggggcactggccccttaaagaggacctgagtgggcaccaacagcctccagtgtccttaggattagtgcttgaaggaggaattgctaggttcctgaaacctctgagtcacattgccaatttggcttcacacaggactggccaggttttcactcctgccagtcacttgtaagagtggccgggcgcggtggctcacgcctgtaatcccagcactttgggaggctgaggcgggcggatcatgaggtcaggagatcgagaccatcccggctaaaacggtgaaaccccgtctctactaaaaatacaaaaaattagccgggcgtagtggcgggcgcctgtagtcccagctacttgggaggctgaggcaggagaatggcgtgaacctgggaggcagagcttgcagtgagccgagatcccgctactgcactccagcctgggcgacagagcgagactccgtctcaaaaaaaaaaaaaaaaaaaaaaaaaaaaaaaaaaaaaaaaaaaagagtggcagccccccacagccacagcatcctagggtttcccctattcttttccatctccaccagtctgataaaagaaaaacagcatcttcttttaatttgaatttccttgattaccagtgagatagaacattctttttcagaggtgtgttggcgattcttactttcatttttgtaaactgcctgtgaacatccgttgatgcttttatttttaaacaaagtcactgttagcatccctttggttcacttccaaaatccaatttgagaaggttttctttctcccttgcattcagcatccctgcaagtatcagcagggctgtttgtccccattggccctgaagaagtcatgctttggatctcacagtacctcctccactatcccactttacctccccacagcaaacaaaatgctactggcaagctgactaccaaatccccttccagggactgtggtcagggctggctgggtccttccctatcagtctgggccccagtgctgtgggtccaggcagcctgccattctgcatcctttcttccttccaggcctttgaagactattacctggaccagaagcccacggtgaaagctttgctggagtacactgacagggtcttcacctttatctttgtgttcgagatgctgcttaagtgggtggcctatggcttcaaaaagtacttcaccaatgcctggtgctggctggacttcctcattgtgaatgtgagtggctcagtgggaacacgtggggtttggggtcctcccctctgactcctggctacagctagggcaaaggaagctcagagacctggccctcaagggctactccaaagaaaagttttgagcatttagtgaggagtctgagaatagccctgacacccatgagtggtaaagtccaggcagtatgtgactgtgacacaatagtgactgttaggtgagttattaggtctccattcagaaagatccctgcaatcctctgcatttttacatccaaagtgagatgacacatgcagctctcagaggtcttatggccctgcatccatagatgggtcttctggaccttggggagccatgaactgtgagcacagagaatcttcccacctgcggttctgtggtcctcacacctggctgcacttgagaatcacctggggagctatgaaatatgcagtgaccgaccaccactaccccagagattctgatcttattggtcttgggtggtgcccaggcacctgtattttataaatgctcccaggcatttccaaggtgcagccatggcttagaaccactgagcttatactgctgcctcctccccagtggcattgaaaagaacagagggcgcatttggagaggtaatgagctggagttcatgtgttcacactcatggtaacctgtggccagtaatccctgcattagagaattgactgtgtgcttctcacacatcagacatgtgattcctcagtcatctcttcctcatcttaaccaccacattgcactatcactgtctaggccactaccttctttgctttgcagcatggttaactgagttatctgttcactgccgcatagctgagggtttctgcaagcagggtgaggcatgtgctgtgttggtctctgcctgccccactcaagcagctgccagcagcaaggtctgcccagcagaggtgtcaggaaatgtgtctgtatttggtgcttgcctcctgaagctggatgaggttcagcacagaacattctgtccagcctcctgtgctggcaggtcctccatagcaggcctgtgcattcaattctcttcttccctgatgccaatgcactagcagcttcaggccactgtaccacaaggattagctgtgaggcctgaaatctgagtcatgggtgataattctgtgcatatgaaataattattcataaatgaaaggaaaattatttattccggtgtcccacccctttgggggcacagtcactcctgcttatgttgatctcaccagtctcagtcctaatcaccttaaacggtcatgcactcatttcatccatcttcctactgattcttccttccaaccatccatccttccttccatacatttcaccttttgtatccaaccattcagtcttcctttttccttcctcccaaacatccatccatctttatttcttccagctgtacatcttcatcagtcctccccttccatccatccattcccattcttctttccctcttctcttctgcccaatcttttattctaaacttccttccatctattcatcatccttaacccttatatctttctatcttttgattcattcttctatccaactgtccaatcatctaacattctgttcactcattcacgcatcttccatccaagcatgcttctactcactcatccttctatccactcattcttctatctttccattcttgtttcaacctatccatctattcttcctttcttccacttatctgttcattcatccctttcccttccattcatcatccattcatccatcctatcaaccttccagtcattcactaatttattccattcatctattctgtccagctccccatctttccattcatgcattagtcattttacccagccatccatccttctcttatccacctatctcatctatccattcactattccctgctttcatacttttcctttcttgtttgtttctcccatccttccattcaactatctatcctatccatctttttgtgtctgttatcttttaaaattttaaaaaatatattttattgtatatatttgtattagtctattttcatgctgctgataaagacatacctaagactgggcaatttataaaagaaagaggtttaattggacttacagcttcacatggctggggaagccttacaatcatggcaaaaggaaaggaggtgcgagtcacgtcttatgtggatggcagcaggcaaagagagaggttgggcagggaaactcccccttataataccgtcacatctcatgaaacttattcactatcatgagaacagcatgggaaagacctgctcccatgattcacttacctcccacagggtccctcccctcccacaacacatgggaattcaagataagatttgggtggggacacagccaaaccatatcaatttttaagggatacaaaatgatgttataagatatatatatatataaatgattactatagtggaacatattaacatatccatcatctcacatagttacccatttctccccctgtggcaagagcagctataattactcagcgagcaaaaatactgaaaacaatatgctattattaactatagtattcatgttatacattaaatctatcctatttatcattgtatcctttaattcatccctctatgcaatcacccttcaacttttcatccagctgtacttctttctttctttccttctagccatcccaatgatcctatttttcttccatttgctatacatctaactattgaatacaggattgtcttatgaagtgctttgtaagaaacagaagcacagaataaatactcactatctccaggatcttacactttagtctttcagcagacaagacacacatggaaataaatgtattataagggtgaatgtgttgagcactgctgggggcaattagtatcttggagacacagagacatgagccttcttccactcttggggtggggtggttgagaattcttcctatgggaggtggcattagatgtggggcatagaaatgagcaggaccaaggagctgcgagaggactggggaaggcccgtcttagctaaaggctgaccttgaacaaaggcacagacacaagtatgctcagggaacaatttgatttgggtagaatgtgtgggtgaaatatgactggaaaagtaggttgtgaccatatgacacaggctacagagtatggagtttatcctgagggtgataaagtaccagtgatgtttgggagtaagagaaagacatgatcataatcagatttgcagtggagaatagatgcatggtgcagtactagggcctggagactacttgggaggctagtgggctgagcagtgggaatggaggtgggcttgggtggacagactttgctggagaggcacagcacctgtctgccccagctgcagattatccatgtgaggcagacttcccagggggctgagcaaaagactgaatagggttcagcatggaactggccccaaacctccctaccctcatgcacccaggcagctgggtctcacctgctgatgtctggagccttgcatgaatgaaggaagagggtcccttccattccggttctttgtcctggtgcaataagccactcatccaaagaatggacattgcttggggctctgccactcaagtataaagcccttcttttctgaagctcctgtgtgcatcccacctaactgccaggataagctgagcctgaattcagcccaccatctgtggtgtggctaagatctcacaggacagggtcatagcccgtatctatgacatctccctggcaccttcaaagttcctagcaggggaacttttttcatgtaagtttctgtcctttgcagtctttggaccaccacttaaagaaaactgacagaccaaaaggggctcacaagtcagtcattatatctcagatatctattgaagctagatctcatggacccataccagaaactttttgaagaactgcagagctatcagaactttggaattctcttagtctgactttttcattttacaaagggtgaaagtaccctggactagccaggcactaacccaagctcacaaaaaatcagggttcaaatgggaattagaccccacccaaaccactattctttccaccccacttctctgagcaaatataattcagattactatattcctcagaatagactctcagcatagcccctaggagggaacatcatgtctccaagtctctgaaaatcagtttcaaggttgttgaggcctgactgctgcccctagaaggaaaaggaagagttgatttaatacactggaagcttggccacctacgtaccagaggttggtgatgttagagactgagtttttcttgcccagattgtttaagagagtggtgaataaaatttttaataaaagggaagagacaaaactctttctagacctctcattggagttccgaataaggtgggagctaggatgatggcttagacgtgtaggaatgggaggctgggcagggagttcctgtctccttccacgaggactgcctttctggaaacctagagtgatgtttctgccctctcctgcactcagatctcactgataagtctcacagcgaagattctggaatattctgaagtggctcccatcaaagcccttcgaacccttcgcgctctgcggccactgcgggctctttctcgatttgaaggcatgcgggtaagtctgatctcaaaacttctctcatctggccaggcacggtggttcatgcctgtaatcccagcactttgggaggctgaggcgggcggatcacctgaggttaggagttcaaaaccaccctggccaacatgccgaaaccctgtctctgctaaaagtacaaaaatcactaccaccacgaggtgtggtggtagtgagccgagattgtgccattatactccagcctgggtgacagagcgagactccgcctcaaaaaacaaacaaaaaacttctctggtctgcaggttttggtaacccttccccctttatgccctccatcccaccaaccctgagctccggggccccacctccaaaggtaggctctgagtcttcacttcctgctctgactttggtggtgctgcatgtcctaactctcttagttctctttcaagtctttttgtgggcccatcttcccttgtcacccataaatattacagccaccaggacccagacctcaccccctttgctcttagtgaagtaatcctgaatcatcgctccacaagcatctattatctcaatcacccaactctgcctcttattgccaacatctccagaacatcccaagttctctgtctttccatgacaaatgagtctttcctctaatactccatgagtgacatcatcagctcattacctcagctgccacccactggaatgcttcttctctcctacttaatgcaatcatcaggtcctgtaaatttttcccttccatccacccctttccttatccaccactgtcagcctccaccttgccctaactgcctccgtcaggacagaatgctcacagccagagccttgtcttagagattgctgattgacacccacctcttcctcataattacaaatggctccccagcagaaagtaaggttttgctttgctccactatcattggctggaagtagtcatcatagcttcaaaaacaaaagtgggcttttgaaattaacttgtacctttacaaacactaggacccgaagattgaaatagtttgaaatttattctattttgtatctaatagattctcatttgcttatttacaaataagctattttgtgaatatggatttaggttttcactggttcttgaccacggcatactttaaattgtatttaaattgtgtttgtgttttatgtatggtatttaaggagaataagtcaaggttctagaagtctgtatgtgcaagtataatacacacactcacacttctaaatgagtgcagtatgcttgtaaactcatccatcttctcactgcaacccaccctgaatgaggttaagggaagaaggtctaaatccatcttcagctgcccaatgtctctcagtcttctgagtctgaattattgcactaattaacccacttctcttgcttcttccaaaggccactggctcatgaagcagcctgaatgagtatagaaagagatagaatccagcagagggggtggggcattgggaggttccaggtctttctctatctcccaccaggtggtggtggatgccctggtgggcgccatcccatccatcatgaatgtcctcctcgtctgcctcatcttctggctcatcttcagcatcatgggtgtgaacctcttcgcagggaagttttggaggtgcatcaactataccgatggagagttttcccttgtacctttgtcgattgtgaataacaagtctgactgcaagattcaaaactccactggcagcttcttctgggtcaatgtgaaagtcaactttgataatgttgcaatgggttaccttgcacttctgcaggtggtgagtcaaccatgagatcaaccatatctcttgctttggccgctcaataaaatggagagtctaggttcccagaagatgctatgtggggactttgcaaggagtagcactcagtgtgaactgaggtcattctctattcctacagactacaccatgaggctagagggccttcctagtgaatatgatatcacagtggtgcaattacacaagtgtgggctagtagaatagcataaagggatgggcctgccatgggattatcaggtggtgagttaaaacacagaacctgtacaaaatagacacggcatagccacatgttcagtcttcaacttcacatcatttcctaaatggtaataaattatgtctcattaggtctattgtaatgatatataatgttggtgataatgacagtcaaacacattcatcctgtctttctttctttcatcatccagtcaatcactcatttcttgccttcatctacctgttcattcagtcctctgttcattcaagtgttaatacaattacttatacatttgtcatgcagttactcttgagtgtctacattccaccattggttcttgcatttattcaacaaataatctctgagtagctctggtatgccaggcatggtactactcagccctgggagatacagtcagaactgggcttggacactgatgctgtatgagaaacagactaataggtgaattaaaacagctcattaagtgctgtaacaggcctaggagtgtaagaactaagatgtcttgcatgctctgaacatgctggaaggcacacccagtttctagacctcaagaatgctaaagctgaaggcaggaacatggaggtcttctattctcaacttctccatctggaagatataccattcttacatcatgtgcataaggtgggaaagtggctgagaaaatggcagccctgagaggggaaaccttaggcaagtgcacagagcagacttgtagcaattggcactagaaccagacacctagacactcagtcctcagtccatactacattctgaaaggctctgtgtctttaatgctactctattcttaaacagccacatgtgggattactttaaatcatcatatgagattagtcaagtaacccaagggaacttttcctttcattctttctgcacaagccctttccaacacaggactctctcctctctcactgggccaccatggcttgggaagggtccagtatagatggatgggcagacactgagtggcctctgctccttgtctccaggcaacctttaaaggctggatggacattatgtatgcagctgttgattcccgggaggtgagtctcagcccactgtccctacagccttcccctctgtgcattctacccatatcagtctgcatttgaaatgaagtgacgatgaccctggtactggaagaggcgatcacccagcaacctcacactgtccctccttgcagcagtgtccagctggctctctgttgagtgtttcagccaccgaggctttccccctttcatctacactccccaggcttctcgaggttttcctctgttcactgttgaggaaagcatcagataacctctaagagacagttcatgtgagccactccctggacaagggtgggagcaaagcaagggtagtagctaaatcaaggtgcatagggaggaatgaggtagaatctcaggaactatcataaaacccaggatgggccaggcgcagtggttcatgcctgtaatcctagcactttgggaggccgaggtgggcagattgcctgagctcaggagaccagcctgggcaatacggtgaaaccccatctctactaaaatatgaaagaaattagcagggcatggcggcttgtgcctgtagtcccagctgctcgggagactgagacaggagaatctcttgaacccgggaggcagaagttgcagtgagctgagattgcgtcactgcactccagcttgggcgagacagcgagactcaatctcaaaaaaaaagaaaagaaaagaaaaagccaggctggggagacactattggggaatgaccacttcctgctgtggcaggcactgtcaattccctgccacctcttcccttagcccacttctgatttcacctgcaggctgcacttctgattctctgtataaagactccagggcttaggagcttgtgcagcaacttctcccccaagtaccagggatttaatgtccctaggggcaacccttaccaataagttttgggagtctgaggataaatactccagtttccctgtcccttggtgatataatcctgcatgtgctctacacagttactcagaggaccccagtaggattgcgcttcagttgcccacaatgatgccctgcttaacaacatcctcttcacaggctcttctcccattcccgcttattcttccccactccctcattcctgcttccttggatcacctcccagataaatcacctgcacccaggtccatgtcttaggcttggctttcagagtgaacctgaactaagacacccaccctccttcccactctcccttgtctggtcacaggtcaacatgcaacccaagtgggaggacaacgtgtacatgtatttgtactttgtcatcttcatcatttttggaggcttcttcacactgaatctctttgttggggtcataattgacaacttcaatcaacagaaaaaaaagataagtggtgctcaggagtttctggtttctgctgtagtggtaagccttatatttcctgttccctgcccagctctggcctcctgacaaaagccaacactactcacagcccatcactttaatatcagtgctaacccttgccctgtgattgctgttgcaggaagagttgcatttctctctgtcagcaatgccccactaacatcctcactcaggattcacatctcaaagggatcttggtcttcccaactggaaccaggtgtgttagatgtgttccaagtgagccctgggagaatacaagcagggaaagaaagggatctagaacttgctgacctgttgggggatatgatccccacaaaggactgagtcagggcacctcaggaaaggccatggcccagcactggcagaatcccaaccctccttgggatggggaggaaggcttgtgcctccaagggtgccgactctgattaataggaatcgaatcccagataacctctcatgtttataagaaaatgtcagggcaataaaggtataaagtattttcctattatcctttcatttaatgccttccatacccctgaggtagataggcgctgttctagatttgcgtaactgagatcccgagagaaaaggggctacatggataagtcacagagtacatgcaaacctgggtttgcattcctgactcaactacttgtggatggctcatgctggcaatattttaaacccctctgagtctcagttttctcattcattcaatggggctaataatacctactctctggattgtggtgaggggtaaacaaaatcctgaacaaagatcactgagcataagacaactttggtggtgcagtttctggcactgtaacagcagaggggagtgtgactggcagcgcctcaagagcaccagatgctgttgctattaacaatttaaaatatatacctactagggcaggcattccacttacaggaaatccttgcccagggttctgagcataagaagaggacaggataggtctgggacaagacagtgctatttagtaccctggggaggtttgagattattgaagcaatcatttctctcattttacagatgagaaaactgaggtcaagaaacagattacagagggagatattaggtaacggaaggagatgagctagtgaccaggctggggtcactgagaaactgcatctactgaatccttggtcagagttctcagcatgacctcacctggagctcacctacccactgcccttgccctttccttctctccccccataaagatggtcctcccaggaagccctttgtgtccacagatcttctcagatctcctttcaaattccacagatctcagcccagtttcccagcatttgcagggactaacttacataaacatgttattaaaataggtggctttcaaattatgtcaggaagctaaaggtgagagtttgaatgaagaaaatccaaagggcccctaaagaaaaactaatacccaatcctaagggaggaaaacatcttcgttggtgcagtttctggcactgtaacagcagagggcagtgtgactggcagggcctcaagagaaccagaggtccctctgagaccaaggacccaaggataaggcagtaattgtcctcatctcctcctctccagaaaagatttgagggcttctgtccctcccagagtctttgcttcaaggtcctcaggaaatctcttgccccctgggagggactgtgactctagaagcccaaagaattttactggaatgaacaggctagatccaaggctcagatttgaaccaacatgtaccttctccttgagtcctgtttaccaaccctccccaccctttatccagcatctctggatccctggagaacagaaactggctttgctttagagacccaggcagggagtcagcaatggaactcagtcccaccgttccgacactggatgtggcaagacactccttgatgctgggcttggtttgtctatctgcagaggaggggagaaggttgatatgatcctttctctcctgcctgttctgattttggtatccgtagggggttcctcttgctttagtaacagtgtggccctctctgcacttagggggccaggacatcttcatgacagaggagcagaagaaatactacaatgccatgaagaagttgggctccaagaagccccagaagcccatcccacggcccctggtgagccccagaggtttcctctagcacagcctgtctgtgaatccaacatgacagtctatgcctgtgtcaggcaggggcctgagggagtgctgtttatggaagagaagatctgggttgacgttgggatgagggtgatgagggttcctaggcccaaggaatgagaagttcaaaagaagcaactctggtcttctggagtaaacataccttttacagctatttgaaatgaatctgttgggggaagcactgagtttctccaacagttttagagttcaagtacaggattggaggcaggttaagctaagtgacagtaagggtagttagaacccagggattaaacttgtgtggttatgtatcatggtctaggtcgcagtagatctccagtatcaccctatattctaccccacgcctacaggtatagagaggaaatgacaacaacccaactcccctgtcaggatccaagatgcagtcatggtagtggtcaagtggcccagtaggaaccaaaagttatcccactcgagtttaaagattgggcaaaaattagggccagactctagtttcactccttttttcataaagatctcaagagacatggctttgcgttcctccattaaatgtactacccataccacacatgatatcacctaagttcttctcagtcttctgccagaagatagaaaacatcaagcctctgagaggccctaagatagcacttttttgggaatggatgaacaggtttgggggtgaagatgttgatgtgtcagaaattattgttgatcgtcttcaaagaatttctgagccatccactccagtgaatggaattggccctgtgtccttctacataaactttctgtggctaagatgcagcattagtgaagaaaatcacaggtattgctgatgacacaatttcattagcccttccccacacaagggaaaagtccaaaggacatttaacaaaggaacaagcctttccctaaatgaattatggagacatgcattctgttagccaagctattagatttttttaaatcaaggtataggatttgcataatttacttcaaactttgtcagaacaaagtgaaaaacatttacaagagaaaaaagtgatgacttttgacactgtattttgaaatagtggtcatgaatttattactagtctagattctgataagaagtattacaatggggagtggggagtgataggaggttcagacctctgtaggggcacagctttcttcctaaatcacccatacaatcaagataactggatttgagtgaacctgagcaaaagtccttaggctcattgagtatccctccatcaacaagttcagtggagaggagcaggctcaaaattaaaattaggtgaaaggctgagtcccaaccacattcaagtcatgggtaatgagaggaggaccctaagacttactgagaagcaagcagctgagtccacactggcctttacttgtggctggagtaagattgaatccacatttgagccagatgccaaggaggtgtgtgctagggacaacccttggcaaaaacatgaaagtttttggcaccttcccccacatactactcaatctctctttgacatcccagcttcttccctgtcatcacccaaccccataggctgccaaagaaagcttcctcccctcaaggaagacaacattcttaggacaagataaatcatatttcaaaaagggaccctggagagggcatctacctacaaaggcatgaccctaatgttgaaattccaggcagtaaataggagtgggagacggagttgatggtcaggcaggaagacctgcaacaaaatcaccatttctcctaattaagctgcaactaagatcctccgaggatggcacagggggagacctccacatgtggaggggaagtgaaacctcataaccaattctgttcctgagattctccatcctttgaatggaagaagagtggattagtaattcactctcaaccttttgctagccttagtggaggaacgtggctctccccttaatattctggcccaagcaaggtaaacactctttcctttgttccctaatttcgcatagctgaggcaaggctagaacatttaaacaaaactttgaagtggcagggatgccaacagagaaatcagcacaaagcagagtccaagcagcacctgcagatggctgcactccaggacccataggtcttggaccatcctagctcctgaccagcatccaaatggcaggcaacatctttgacacccacatgcccagtggcacaagccggatcatcttccctcttcaaagtctagaaccaagaaagaaatccaaggcaaaaggaaattcccactcccaactaagacccttcttcccaggcccagcttgcttttggccagattattggccctggaatgtccaccttctccccttaggagccccaaaggtcaagctggtcataccagcaaagcactgacacaggatttctgccccatcagtgcatgggtgccatttcatgacagagcttacctgggaccacataggagcctcacacacctcctctcacctctgatgatgctcaggctctaaatcttgtttcttccataggaaaagttaaggattccacaagactgggaaattttattctttaacattccctgctacagaaatcaataaaagcagctctcacatactccactttatagaaatataataggctctagagaatatcacataatcaatcacccacttcatcgtctctgagagcaccaagggttgcaaaggtatgatccctgaccgtgggctaatccaagagcagctagcaagctactccattccctaaagtcagaatatccagggcaaacttcacacccagccacttaacgatgccgttgcctgctctgtttaattagaagtcatgtgaccatgaatgggcctgtattttttcaccattttcagtgatgaaatggaagggattagtggctcagcaatccccctcctgccccaggaaagatgtgagccagcagttctgccatgagcaaaggccactttggtctgattctttgctctaacccaacaggatagcaacccatccccaccatgaagcagaaggcaaggatcagcctcatcacagcacttccccctctgcttgctgtgcagctcccgtgggctccctggaagggatcagacaggttcttctcttcctccctcatagccactcatgcagaggcttgcacatcccatacattcagtatgtacccttggtacagaattgaatttagtcaaataaagggtgactttaaattttcatttgagctatggttaactcagagctgcccattctgtcttccattcatttacaaatttgcagagcatctgttgcagccaggcactatgcagacaccagggttagagcagtgagcaagacagacaaagttcctactcttacagtttacagtccagtgacagaggcaaacagttggccaaaagttgcacatatatgttaattcctggctggataaattgtcaagggagaaaaaatggggtgaagagcaaaggatgctcaagactgagcctcgaagaactctgatgtctaaaagttgggtaaaggagactataaaagagcatcacaaatggcaagaaaagaagcagaaatgtaaggcatggtggagaccaagaaagcaacatttcaaggtagaagggtactaggcaatatcagacaagcgtccttggatctaatattatgggaagtcattcatgatcttagtgagaacaatctctgtcaggatagaggcaaaagctctgttgatgtgggctgaggagtgaatgagggacactgattgtacacaactctttcaagaaattttgctttgaaggtgggaagagatctaagatggtagctggagggagatgtaagtttctgaaatattctgctttaagttaggagaaactaggtcattagagatttgtgcaataaaccaagagacaaagagtaatgcacatggacattaatgttgcctaggataatagccaagagtgggcaaatatggccaagagcctcacccatcattactgaggcagagggaccaagagtttggcaagcggcagtaatgaagaagtgacaaaactaggtggcaaagcttcaaagcaagaaggggttttacaagacacaggaagagcagtggtgtggaagggtcagtggtgaacaaggagaacgccaggcctaacccctgaggtacatggggtaggggagaatggcagcctttgaatagggggagatatgtgcagatcaaggcaggtgagctccatagaggtcaggagaagttttgggagaaggtcaaagcgtggggaatggggttgggatcaaggactcacagagcagtaagatgttcacagcactaaaagaagagaagatcacagtaggagctttttaaagacaccataaaaataaccagatataaatgatctcttggttatccaggccactctgcctccttccaagatgcaaacaaccaagacttgaccctacgccctatacctgcatttgcttaggcatttgcacagcaccaggaacagagggaacatttccaagaataagtttcccctttgcacttgactttactctcagcaaagtagctcaaattaatatttcaagcagctcttgaactcttgcaatgtgcagggcactgcagggaaacaaagttaaggaaggtatagcccttgtcctcaaacagctcattgtctagtagagaagacgcatatacaaaatgctagaactcgaggctgactgaaaagtgggatccccaaagggacagggtagtgtgttgtcacgtgactaagggacactccatgcagtaagtggagcttaaaagagatggattactcaagactgttggaatttagacagccaagagaggagataggagggcattgtgaatagaggcaagggcacagaccaggacaaaagaagggcctggtggcatcaaagggccaggagaggtattaaggacttgaactggggcaatgaggtagagtcaactaaaagtgaaattttggaagaggtaaggatagtatttcgcttctgttaagatgtggagtgtgatggagacaaaactcatctacagataacacagatgcctggtttgtgctggcccaaaggccctgatgccactatctcttgttttctcagaacaagttccagggttttgtctttgacatcgtgaccagacaagcttttgacatcaccatcatggtcctcatctgcctcaacatgatcaccatgatggtggagactgatgaccaaagtgaagaaaagacgaaaattctgggcaaaatcaaccagttctttgtggccgtcttcacaggcgaatgtgtcatgaagatgttcgctttgaggcagtactacttcacaaatggctggaatgtgtttgacttcattgtggtggttctctccattgcgagtaagtgggcagccacgtggtggggaagccccacctctgtttgggggtctttgggatgctcttctaaaaccaaggaaataaccaaccaactttttgaaatacgtgtttatgttagaagaaccctgtatttgcagctttccaagagtagcaagttttaaatgccttgggctgctctctcagtgaaatgaagaggttctcttggccttctccatgctcacacgaagtgttttcaggcacctactgtgtgcacagcccatggctagaacctcaggggctgacagggaataatcactcctcctgagaacctcagaccgtaagatgatggagtctccagcagaccttacttttatggtcttgaaagcagggggcaggtggtgtaatgtgagatgagtcttaaaatctgttctggaaaaggagatggattgccatcaaagtgaggaaagactgggaggagattgttcaaaggagattctcaagtctagggtctggaattaaatctctacacaactgttctattagggaacatgagtgatagaaaagtcaagatatcaatgccaagaaattaatactgttaaggcccagtctgggtgttgttgaatgacaggcccagtattttgggtccagtggtgttcagagaaaattactagagttagaggctaacatggggaaatggagctgccttgactgaatacttcctaagttctgagcactgagctgggctccatgaatgttcacagcagccctgtcaagcaggtgttattatccttattttatacatttaaaattgagactcagagatcaagaatattatgcagggtcacagagtttccaagggttgaagctgagtttagaacaggctccaatcttctaatgaacttgctgcctgtcaccaacagccaagagactgtccctgggcttatgggttagctgaagtttgaccctataaaggccaaatcatgctcaccagcttcacctggcattataaatgtatcttgattggttatatcctgacctgcttacttttcatgtcggggtgtagctgtagatttaatttgccactgatttagtaacaagagctgagagtatctaaatacaacttaacagcatttcatcaacctccccaccttggtgctgaaacacagccttgggttgcgtgtatttccggggatttcagtttgtttttgttcttgttttattttgatattgctgctctgttttttaacactttattgaggtatgatccacatgtaaaaagctatacatgtttaatgtacacaactttatgagtttggagataagtatacacccatgaaaccatcaccaccatcaatgccagaaacatgtccataacctccaaatatttcctcctgcctatttatttatttattgggtgctaggaacacttaagatttattctcttggcaaatttttaggtagacaacacggtattgctaactatagggactatgctataagtagagctctaggatttattcatgtcacataactggaagtttgtacactttgacaagtacctccccaatttcccctcctcccagctcctggaaaccaccattctattctctgctcccatgagtttgactattttagattccttatataaatgcaatcatgtcgtttttgtccttctgtgtctggcttatctcacttagcataataggagtttttgttggttggttggttagttgttttcatttttgttttgttttgtttgtcttccaaaatgaaagattccaaaggctattttgattttatattaaagaagggagcttgtttgtgtatcagtaatatagaaataaaacatagccaagtacttagttctatgatggggatatcttaactaccagttcctgtggcttacagggtagcaccatccgctggggcaggaatcccttatagagctggaaaataagcagaaaaaacccacatatcaatctttctaccctctctccttacctccctttcttctttcccaccaacaagaggtgattgagtatctaattgttacaagtacgaggaaccattctcccttaaaataagatcctggagcaaattaaaatgtgctgtagaccagttgtctggcagaaaattttaccagagtatgtagacaaataatgtaccctacacgatgggaacatgtcctagttaaactggaaattcacagaaggtcttccacaaagattttataatccaaaattataattatttcccaagtccccttctactttcttcctctttccaacacaatattgtgacccatgtgcataacaacaaagagcaagtaggggagagggcccagggaacctggcaaggagcgagagcttgctgctacatccctcaccatttttcctgtgagatgttgaaccctctcttacctaaaggccttgcctcatctttggtggaggcctttggtacaaataaggctccccaggtccccaagaccaaaaatcaaacatcttcaagttagacatcatatagagggacatatacattctttatatttccaactttgttcatagttggagttgggggcagtaactgactcccccaaaaaaacctatctccaggccctaacataaagttcaaaaacagctggaaccgaaaaaaaaaaaaaaaaaacaaattaaggcattgtgcagacagctggtcattcaaatcccttatgctttagctgtcagccagttgcccgaatcctcaggcccccttgtaattaacaccaggctccgtacaattagccacaggaccgggtgccagaaacagagtcaatcttcacagtaggaggtagggagaggaatcataaggggtcctggccttcacagagcacaggaccagggtggaggaaagggcatgacccaaaggctgcagtatcagggaggagcagggtctgtgtcataggaaaaaacaggccaaagactgtgagcctgtggaataaactgcagtcacttccagctgaacttggctgcagaagataagtttttgactgtggaggttgaccaagaggatattctaggcggaggcaaagataacatggtaggaagggtaagacggaggaggaagagaggacttatgcaatgggcatttactgagcccctactttgtgctacctaccatgccaggctctgagggcccagagtcctcaaatgtggatgcccaagtggcagtctataccaagcaaagcagagtgtcatcacagccaactttgtcacgtctcatggctggagatactaattagataatttcttccttcttttaaaggcctgattttttctgcaattcttaagtcacttcaaagttacttctccccaacgctcttcagagtcatccgcctggcccgaattggccgcatcctcagactgatccgagcggccaaggggatccgcacactgctctttgccctcatgatgtccctgcctgccctcttcaacatcgggctgttgctattccttgtcatgttcatctactctatcttcggtatgtccagctttccccatgtgaggtgggaggctggcatcgacgacatgttcaacttccagaccttcgccaacagcatgctgtgcctcttccagattaccacgtcggccggctgggatggcctcctcagccccatcctcaacacagggcccccctactgtgaccccaatctgcccaacagcaatggcaccagaggggactgtgggagcccagccgtaggcatcatcttcttcaccacctacatcatcatctccttcctcatcatggtcaacatgtacattgcagtgattctggagaacttcaatgtggccacggaggagagcactgagcccctgagtgaggacgactttgacatgttctatgagacctgggagaagtttgacccagaggccactcagtttattaccttttctgctctctcggactttgcagacactctctctggtcccctgagaatcccaaaacccaatcgaaatatactgatccagatggacctgcctttggtccctggagataagatccactgcttggacatcctttttgctttcaccaagaatgtcctaggagaatccggggagttggattctctgaaggcaaatatggaggagaagtttatggcaactaatctttcaaaatcatcctatgaaccaatagcaaccactctccgatggaagcaagaagacatttcagccactgtcattcaaaaggcctatcggagctatgtgctgcaccgctccatggcactctctaacaccccatgtgtgcccagagctgaggaggaggctgcatcactcccagatgaaggttttgttgcattcacagcaaatgaaaattgtgtactcccagacaaatctgaaactgcttctgccacatcattcccaccgtcctatgagagtgtcactagaggccttagtgatagagtcaacatgaggacatctagctcaatacaaaatgaagatgaagccaccagtatggagctgattgcccctgggccctagtgagaacactccagcctggatatgttcagttatgatgcgtccttctgctctgtgttaactctttcccattgcagatcacacccagctacagcctcaccaatgcatgccactggtcacaatgtcagaactgggcagggaatgcaactggtaaccacctttgaaaaaaccatcatacacaaataggagtcagaagctaagagcacttccactgtgatttcccttctgaatttcaatatcagatcatgggttctcttactctccagaaaatatcccttgtccttttatttttgttgtaatcagattatatttactgagacaaacttctcaggaccagaacttccaaagatatagaacaagaacattactgaaggtccaaggtagtcctctgtggagcaccatacagagattggcaatattatttaggattttgcatgactgcatgtgagagctgtcggacaactgctctgacccagggtaacacctgtggcctatgtcatgaaaagcctttgagatatccattaaaattaatatttttaaatgtatgtccacaccagcgttatatcataaagcatcattttatttttctcttatttctgtgatgctgacctgtatcatgagtcacttacccctcactttctgggatcctgatatttttcagtttgagattgaggctgggtggagcaggaaagagcactgtcctgggatctggaaatgccagttggaatcctaacttttccaccaattgtctggctgaccagggctaaagtctttcccctcttaacttcaatttcctcacttgtaaaattggtgggaagggaagaaaatgaatgctttctatagacttcgcatctcgtgctgtagaactccatggtgcctgccccatttatatgggaaaagcactcttttctgaggctgaaatggctggacctttctgttgtgtagctaaagaggcagcttttgaatacattccagagtctgttcacatctcataatcagacattaaggaggagagtttttacattacctggcgtccagaactccatagttaatataatcagaagaaaaagtataatcatgagaatgatgatccagtagataaaaggtatggccagtagtttctttcattcatcctgcaaatgttattaattacgtactatatgatgggcactgctccaagaacaagagataaaataggaattaagcccccaaaagattaattgtatgaactgaatggagtaagaattgtcagaggagtttatttaggccaaaggcatgttgcagattttgagatgaagaaaagcaaagactccctataacaacataggacatagggattgtaatgacagtcatgatcttccattaactcttggcccattcccagccacaatcacaaagattcaaatatatagccaattcattgtctatatatttgatcatttcataagattttccatttgtataattacaaagcacagtggctgatacatctcacatgcctcaagaatacagatttgccgaggccttgctctcccttttctgtcactattagcccataagaagtcaaagaggctctcaagatgcttactgggagttggcagcatccacagatgcaggttaataagatgatgatgggatagcagaggtaccaagccatctcaaatcagctattctctgaatgcctgatttattctaaaagatgagttcaaccaaataactcttcctctctcgtaccactgaacccgggagcacagatactgactgtgcagcttcttcaacgtctaaatcccatgtggatgatgaaaaagccatctgagatactagcccaagtgtttataagacagctaagtggacagagagtttgggcacaggtttatttttacaatgatatgtgaaagaattaagtgtgccaaaccatcagactggttctattaaagcagatgatactattctcaaaagtatttttactttgagttgaattatgctccctaaacataggaacataattcaactttatgttgaattatgctttgggttgaataatgttccctaaaagggtatgttgaagttctaaccaatagtacctgtgattgtgaccttatttgacattaaggtttttgcagatgtaaacaaattcagatgaaggtgagccctaatccaatgactggtgttgctaaaatatgaggggaatttgaacagagacacacagagaggagaataccatgggaagatgcagaaaaaaacacacacaaagaaaagacagctgtatggagacacaggaagaaatcggagagatacatgtgcaggccaaggaatggcaaagattgctgaagctaggaggagacatggaaggcaacggttctcacctgcgggcttcagagggaacatggctctgccaataccttgattttagacatctagcctcagaagtgtaagagaataaatttctattattgtcatctacctagtttctggtaatttgttacagcatcccagggaaactaatccatttctcattttttctgcacaaatgcatttcctaaattgtaatgggaaacattggaaaagggatgcaatatacacatcttgcatgacacggagtttttggaaatgtatccaaatgcaagattatcttttgaaaatttcactagagccagtttccaagttcacctggtggtacaattacaaggtagaaactagatttccatgggagccaacctgagaaccagagctaccttctcaaccccacccacaagaggtaaaactagaatctctctggcccagaatgtgaggataccttagcactgaagggagataagagacaggataatgatgctgactgtacaaatatctggaacctgcaagttctcaaaagtatgcctccaccataaacaccgccctaactttttataccattaaactgcataacacatagacacagatggcaaataacattcagaacatccacttaacacagaatagtaggtatcggcagagccctggtgtgctggagcatttgcttaagacaaaagtgaagtcactttcctaagtgttagggatgcaagataagacagatcttcagtctggagctgaacacaggctgaaggtttacaaataaattaaaaagacaattccttttttttctttttttaaaattatactttaaattctagggtacatgtgcacaatgtacatgtttgttatataggtatacatgtgccatgttggtttgctgcacccatcaacccgtcatctacattaggtatttctcctaatgctaaaaagtaaaaaaaagtaaaggtttttattatcattagactgtgtaacttaagaatgaatgacttaattattagggttgccagtaacaaatcagaaatagagtatatcatttccaaagtaggacaagggggaactatgctaagaaacaattagccaatcaaaaaagtaaggttaaaaaaaaaacaggattaggattgacttggcaatgtgggctcttttttggttccgtatgaactttaaagtagttttttccaattctgagaagaaagtcattggtagcttgatggggatggcattgaatctataaattaccttgggcagtatggccattttcaagatattgattcttcctacccatgagcatggagtattcttccatttgtttgtatcctcttttatttcactgagcagtggtttgtagttctccttgaagaggtccttcacatcccttgtaagttgcattcctaggtattttattctctttgaagcaattgtgaatgggagttcactcatgatttggctctctgtttgtctgttattggtgtataacaaagctggaggcatcacgctacctgacttcaaactatattacaaggctacagtaaccaaaacagcatggtactggtaccaaaacagagatatagaccaatggaacagaacagagccctcagaaataatgccgcatatctacaactatctgatctttgacaaacctgacaaaaacaagaaatggggaaaggattccctatttaataaatggtgctgggaaaactggctagccatatggagaaagctgaaactggatcccttccttacaccttatacaaaaattaattcaagatggattaaagacttaaatgttagacctaaaaccataaaaaccctagaagagaacctaggcaataccattcaggacataggcatgggcaaggacttcatgtctaaaacaccaaaagcaatggcaacaaaagtcaaaattgacaaatgggatctcattaaactaaagagcttctgagcagcaaaagaaaccaccatcagagtgaacagaaacctacaggatgggagaaaatttttgcaacctactcatctgacgaagggctaatatccagaatctacaatgaactcaaacaaatttacaaggaaaaaaatcccatcaaaaagtgggcgaaggatatgaacagacacttctcaaaagaagacatttatgcagccaaaaaacacatgaaaaaatgctcatcatcactggccatcagagaaatgcaaatcaaaaccacaatgagataccatctcacaccagttagaatggcgatcattaaaaagtcaggaaacaacaggtgctggagaggatgtggagaaataggaacacttttacactgttggtgggtctgtaaactagttcaatcattgtggaagtcggtgtggcaattcctcagggatctagaaccagaaataccatttgacccagccatcccattactgggtatatacccaaaggattataaatcatactgctataaagacacatgcacacgtatgtttattgtggcactattcacaatagcaaagacttggaaccaacccaaatgtccaacagtgatagactggattaagaaaatgtggcacatatacaccatggaatactatgcagccataaaaaatgatgagttcatgtcctttgcagggacatggatgaagctggaaaccatcattctcagcaaactatcgcaaggacaaaaaaaaccaaacaccgcatgttctcactcataggtgggaattgaacaataagaacacatggacacaggaaggggaacatcacacaccggggacagttgtggggtggagggaggggggagggatagcattaggagatatacctaatgtaaatgacaagttaatgggtgcagcacaccaacatggcacatgtatacatatgtaacaaacctgcacgttgtgctcatgtatcctaaaacttaaagtataataataattaaaaaaacccgggatatagagacatacagaataaaagaaacaaatagaaaagacagagtaaagtagtatattcaaaaacaaaaatattcataaattacattaaatttaaatggactctgggaaaaagagtgtcagtcaagatttttaaaaattcaaataaattctgtttacagaaagccacacaaaacctaaggttaccaaaagggtacaaatacaagtacatagggcacatttacaaaaatagtccgtatgcctggccatagaataaaattcaaacaatgt

SEQ ID NO: 5305 - DNA, 20 bp, synthetic construct
  misc_feature 1..20: note = Description of Artificial Sequence: Synthetic oligonucleotide
  misc_feature 1..20: note = Target: SCN10A; (-) strand; PAM type: NAAAAC; PAM sequence: CAAAAC
  source 1..20: mol_type = other DNA
tctgtttacagaaagccaca

SEQ ID NO: 5306 - DNA, 20 bp, synthetic construct
  misc_feature 1..20: note = Description of Artificial Sequence: Synthetic oligonucleotide
  misc_feature 1..20: note = Target: SCN10A; (-) strand; PAM type: NAAAAC; PAM sequence: AAAAAC
  source 1..20: mol_type = other DNA
cagagtaaagtagtatattc

SEQ ID NO: 5307 - DNA, 20 bp, synthetic construct
  misc_feature 1..20: note = Description of Artificial Sequence: Synthetic oligonucleotide
  misc_feature 1..20: note = Target: SCN10A; (-) strand; PAM type: NAAAAC; PAM sequence: AAAAAC
  source 1..20: mol_type = other DNA
taaagtataataataattaa

SEQ ID NO: 5308 - DNA, 20 bp, synthetic construct
  misc_feature 1..20: note = Description of Artificial Sequence: Synthetic oligonucleotide
  misc_feature 1..20: note = Target: SCN10A; (-) strand; PAM type: NAAAAC; PAM sequence: TAAAAC
  source 1..20: mol_type = other DNA
cacgttgtgctcatgtatcc

SEQ ID NO: 5309 - DNA, 20 bp, synthetic construct
  misc_feature 1..20: note = Description of Artificial Sequence: Synthetic oligonucleotide
  misc_feature 1..20: note = Target: SCN10A; (-) strand; PAM type: NAAAAC; PAM sequence: AAAAAC
  source 1..20: mol_type = other DNA
caaactatcgcaaggacaaa

SEQ ID NO: 5310 - DNA, 20 bp, synthetic construct
  misc_feature 1..20: note = Description of Artificial Sequence: Synthetic oligonucleotide
  misc_feature 1..20: note = Target: SCN10A; (-) strand; PAM type: NAAAAC; PAM sequence: CAAAAC
  source 1..20: mol_type = other DNA
gccatcagagaaatgcaaat

SEQ ID NO: 5311 - DNA, 20 bp, synthetic construct
  misc_feature 1..20: note = Description of Artificial Sequence: Synthetic oligonucleotide
  misc_feature 1..20: note = Target: SCN10A; (-) strand; PAM type: NAAAAC; PAM sequence: AAAAAC
  source 1..20: mol_type = other DNA
agaagacatttatgcagcca

SEQ ID NO: 5312 - DNA, 20 bp, synthetic construct
  misc_feature 1..20: note = Description of Artificial Sequence: Synthetic oligonucleotide
  misc_feature 1..20: note = Target: SCN10A; (-) strand; PAM type: NAAAAC; PAM sequence: TAAAAC
  source 1..20: mol_type = other DNA
atgggcaaggacttcatgtc

SEQ ID NO: 5313 - DNA, 20 bp, synthetic construct
  misc_feature 1..20: note = Description of Artificial Sequence: Synthetic oligonucleotide
  misc_feature 1..20: note = Target: SCN10A; (-) strand; PAM type: NAAAAC; PAM sequence: AAAAAC
  source 1..20: mol_type = other DNA
aatgttagacctaaaaccat

SEQ ID NO: 5314 - DNA, 20 bp, synthetic construct
  misc_feature 1..20: note = Description of Artificial Sequence: Synthetic oligonucleotide
  misc_feature 1..20: note = Target: SCN10A; (-) strand; PAM type: NAAAAC; PAM sequence: TAAAAC
  source 1..20: mol_type = other DNA
aaagacttaaatgttagacc

SEQ ID NO: 5315 - DNA, 20 bp, synthetic construct
  misc_feature 1..20: note = Description of Artificial Sequence: Synthetic oligonucleotide
  misc_feature 1..20: note = Target: SCN10A; (-) strand; PAM type: NAAAAC; PAM sequence: GAAAAC
  source 1..20: mol_type = other DNA
tatttaataaatggtgctgg

SEQ ID NO: 5316 - DNA, 20 bp, synthetic construct
  misc_feature 1..20: note = Description of Artificial Sequence: Synthetic oligonucleotide
  misc_feature 1..20: note = Target: SCN10A; (-) strand; PAM type: NAAAAC; PAM sequence: AAAAAC
  source 1..20: mol_type = other DNA
tgatctttgacaaacctgac

SEQ ID NO: 5317 - DNA, 20 bp, synthetic construct
  misc_feature 1..20: note = Description of Artificial Sequence: Synthetic oligonucleotide
  misc_feature 1..20: note = Target: SCN10A; (-) strand; PAM type: NAAAAC; PAM sequence: CAAAAC
  source 1..20: mol_type = other DNA
aaacagcatggtactggtac

SEQ ID NO: 5318 - DNA, 20 bp, synthetic construct
  misc_feature 1..20: note = Description of Artificial Sequence: Synthetic oligonucleotide
  misc_feature 1..20: note = Target: SCN10A; (-) strand; PAM type: NAAAAC; PAM sequence: CAAAAC
  source 1..20: mol_type = other DNA
tattacaaggctacagtaac

SEQ ID NO: 5319 - DNA, 20 bp, synthetic construct
  misc_feature 1..20: note = Description of Artificial Sequence: Synthetic oligonucleotide
  misc_feature 1..20: note = Target: SCN10A; (-) strand; PAM type: NAAAAC; PAM sequence: AAAAAC
  source 1..20: mol_type = other DNA
caaaaaagtaaggttaaaaa

SEQ ID NO: 5320 - DNA, 20 bp, synthetic construct
  misc_feature 1..20: note = Description of Artificial Sequence: Synthetic oligonucleotide
  misc_feature 1..20: note = Target: SCN10A; (-) strand; PAM type: NAAAAC; PAM sequence: TAAAAC
  source 1..20: mol_type = other DNA
tcaaccccacccacaagagg

SEQ ID NO: 5321 - DNA, 20 bp, synthetic construct
  misc_feature 1..20: note = Description of Artificial Sequence: Synthetic oligonucleotide
  misc_feature 1..20: note = Target: SCN10A; (-) strand; PAM type: NAAAAC; PAM sequence: AAAAAC
  source 1..20: mol_type = other DNA
taccatgggaagatgcagaa

SEQ ID NO: 5322 - DNA, 20 bp, synthetic construct
  misc_feature 1..20: note = Description of Artificial Sequence: Synthetic oligonucleotide
  misc_feature 1..20: note = Target: SCN10A; (-) strand; PAM type: NAAAAC; PAM sequence: AAAAAC
  source 1..20: mol_type = other DNA
caactggtaaccacctttga

SEQ ID NO: 5323 - DNA, 20 bp, synthetic construct
  misc_feature 1..20: note = Description of Artificial Sequence: Synthetic oligonucleotide
  misc_feature 1..20: note = Target: SCN10A; (-) strand; PAM type: NAAAAC; PAM sequence: CAAAAC
  source 1..20: mol_type = other DNA
ctctggtcccctgagaatcc

SEQ ID NO: 5324 - DNA, 20 bp, synthetic construct
  misc_feature 1..20: note = Description of Artificial Sequence: Synthetic oligonucleotide
  misc_feature 1..20: note = Target: SCN10A; (-) strand; PAM type: NAAAAC; PAM sequence: AAAAAC
  source 1..20: mol_type = other DNA
gcagggtctgtgtcatagga

SEQ ID NO: 5325 - DNA, 20 bp, synthetic construct
  misc_feature 1..20: note = Description of Artificial Sequence: Synthetic oligonucleotide
  misc_feature 1..20: note = Target: SCN10A; (-) strand; PAM type: NAAAAC; PAM sequence: AAAAAC
  source 1..20: mol_type = other DNA
ggaaccgaaaaaaaaaaaaa

SEQ ID NO: 5326 - DNA, 20 bp, synthetic construct
  misc_feature 1..20: note = Description of Artificial Sequence: Synthetic oligonucleotide
  misc_feature 1..20: note = Target: SCN10A; (-) strand; PAM type: NAAAAC; PAM sequence: AAAAAC
  source 1..20: mol_type = other DNA
caggccctaacataaagttc

SEQ ID NO: 5327 - DNA, 20 bp, synthetic construct
  misc_feature 1..20: note = Description of Artificial Sequence: Synthetic oligonucleotide
  misc_feature 1..20: note = Target: SCN10A; (-) strand; PAM type: NAAAAC; PAM sequence: AAAAAC
  source 1..20: mol_type = other DNA
gcagtaactgactcccccaa

SEQ ID NO: 5328 - DNA, 20 bp, synthetic construct
  misc_feature 1..20: note = Description of Artificial Sequence: Synthetic oligonucleotide
  misc_feature 1..20: note = Target: SCN10A; (-) strand; PAM type: NAAAAC; PAM sequence: AAAAAC
  source 1..20: mol_type = other DNA
agagctggaaaataagcaga

SEQ ID NO: 5329 - DNA, 20 bp, synthetic construct
  misc_feature 1..20: note = Description of Artificial Sequence: Synthetic oligonucleotide
  misc_feature 1..20: note = Target: SCN10A; (-) strand; PAM type: NAAAAC; PAM sequence: TAAAAC
  source 1..20: mol_type = other DNA
gtgtatcagtaatatagaaa

SEQ ID NO: 5330 - DNA, 20 bp, synthetic construct
  misc_feature 1..20: note = Description of Artificial Sequence: Synthetic oligonucleotide
  misc_feature 1..20: note = Target: SCN10A; (-) strand; PAM type: NAAAAC; PAM sequence: TAAAAC
  source 1..20: mol_type = other DNA
gggtctttgggatgctcttc

SEQ ID NO: 5331 - DNA, 20 bp, synthetic construct
  misc_feature 1..20: note = Description of Artificial Sequence: Synthetic oligonucleotide
  misc_feature 1..20: note = Target: SCN10A; (-) strand; PAM type: NAAAAC; PAM sequence: CAAAAC
  source 1..20: mol_type = other DNA
gatgtggagtgtgatggaga

SEQ ID NO: 5332 - DNA, 20 bp, synthetic construct
  misc_feature 1..20: note = Description of Artificial Sequence: Synthetic oligonucleotide
  misc_feature 1..20: note = Target: SCN10A; (-) strand; PAM type: NAAAAC; PAM sequence: CAAAAC
  source 1..20: mol_type = other DNA
cggcagtaatgaagaagtga

SEQ ID NO: 5333 - DNA, 20 bp, synthetic construct
  misc_feature 1..20: note = Description of Artificial Sequence: Synthetic oligonucleotide
  misc_feature 1..20: note = Target: SCN10A; (-) strand; PAM type: NAAAAC; PAM sequence: CAAAAC
  source 1..20: mol_type = other DNA
gcaaggctagaacatttaaa

SEQ ID NO: 5334 - DNA, 20 bp, synthetic construct
  misc_feature 1..20: note = Description of Artificial Sequence: Synthetic oligonucleotide
  misc_feature 1..20: note = Target: SCN10A; (-) strand; PAM type: NAAAAC; PAM sequence: AAAAAC
  source 1..20: mol_type = other DNA
tgctagggacaacccttggc

SEQ ID NO: 5335 - DNA, 20 bp, synthetic construct
  misc_feature 1..20: note = Description of Artificial Sequence: Synthetic oligonucleotide
  misc_feature 1..20: note = Target: SCN10A; (-) strand; PAM type: NAAAAC; PAM sequence: AAAAAC
  source 1..20: mol_type = other DNA
aactttgtcagaacaaagtg

SEQ ID NO: 5336 - DNA, 20 bp, synthetic construct
  misc_feature 1..20: note = Description of Artificial Sequence: Synthetic oligonucleotide
  misc_feature 1..20: note = Target: SCN10A; (-) strand; PAM type: NAAAAC; PAM sequence: GAAAAC
  source 1..20: mol_type = other DNA
cagtcttctgccagaagata

SEQ ID NO: 5337 - DNA, 20 bp, synthetic construct
  misc_feature 1..20: note = Description of Artificial Sequence: Synthetic oligonucleotide
  misc_feature 1..20: note = Target: SCN10A; (-) strand; PAM type: NAAAAC; PAM sequence: GAAAAC
  source 1..20: mol_type = other DNA
aatacccaatcctaagggag

SEQ ID NO: 5338 - DNA, 20 bp, synthetic construct
  misc_feature 1..20: note = Description of Artificial Sequence: Synthetic oligonucleotide
  misc_feature 1..20: note = Target: SCN10A; (-) strand; PAM type: NAAAAC; PAM sequence: AAAAAC
  source 1..20: mol_type = other DNA
aatccaaagggcccctaaag

SEQ ID NO: 5339 - DNA, 20 bp, synthetic construct
  misc_feature 1..20: note = Description of Artificial Sequence: Synthetic oligonucleotide
  misc_feature 1..20: note = Target: SCN10A; (-) strand; PAM type: NAAAAC; PAM sequence: GAAAAC
  source 1..20: mol_type = other DNA
ttctctcattttacagatga

SEQ ID NO: 5340 - DNA, 20 bp, synthetic construct
  misc_feature 1..20: note = Description of Artificial Sequence: Synthetic oligonucleotide
  misc_feature 1..20: note = Target: SCN10A; (-) strand; PAM type: NAAAAC; PAM sequence: TAAAAC
  source 1..20: mol_type = other DNA
tagaatctcaggaactatca

SEQ ID NO: 5341 - DNA, 20 bp, synthetic construct
  misc_feature 1..20: note = Description of Artificial Sequence: Synthetic oligonucleotide
  misc_feature 1..20: note = Target: SCN10A; (-) strand; PAM type: NAAAAC; PAM sequence: TAAAAC
  source 1..20: mol_type = other DNA
aaacagactaataggtgaat

SEQ ID NO: 5342 - DNA, 20 bp, synthetic construct
  misc_feature 1..20: note = Description of Artificial Sequence: Synthetic oligonucleotide
  misc_feature 1..20: note = Target: SCN10A; (-) strand; PAM type: NAAAAC; PAM sequence: TAAAAC
  source 1..20: mol_type = other DNA
gggattatcaggtggtgagt

SEQ ID NO: 5343 - DNA, 20 bp, synthetic construct
  misc_feature 1..20: note = Description of Artificial Sequence: Synthetic oligonucleotide
  misc_feature 1..20: note = Target: SCN10A; (-) strand; PAM type: NAAAAC; PAM sequence: CAAAAC
  source 1..20: mol_type = other DNA
acaagtctgactgcaagatt

SEQ ID NO: 5344 - DNA, 20 bp, synthetic construct
  misc_feature 1..20: note = Description of Artificial Sequence: Synthetic oligonucleotide
  misc_feature 1..20: note = Target: SCN10A; (-) strand; PAM type: NAAAAC; PAM sequence: AAAAAC
  source 1..20: mol_type = other DNA
gaagtagtcatcatagcttc

SEQ ID NO: 5345 - DNA, 20 bp, synthetic construct
  misc_feature 1..20: note = Description of Artificial Sequence: Synthetic oligonucleotide
  misc_feature 1..20: note = Target: SCN10A; (-) strand; PAM type: NAAAAC; PAM sequence: AAAAAC
  source 1..20: mol_type = other DNA
tccgcctcaaaaaacaaaca

SEQ ID NO: 5346 - DNA, 20 bp, synthetic construct
  misc_feature 1..20: note = Description of Artificial Sequence: Synthetic oligonucleotide
  misc_feature 1..20: note = Target: SCN10A; (-) strand; PAM type: NAAAAC; PAM sequence: AAAAAC
  source 1..20: mol_type = other DNA
cagagcgagactccgcctca

SEQ ID NO: 5347 - DNA, 20 bp, synthetic construct
  misc_feature 1..20: note = Description of Artificial Sequence: Synthetic oligonucleotide
  misc_feature 1..20: note = Target: SCN10A; (-) strand; PAM type: NAAAAC; PAM sequence: CAAAAC
  source 1..20: mol_type = other DNA
atcacctgaggttaggagtt

SEQ ID NO: 5348 - DNA, 20 bp, synthetic construct
  misc_feature 1..20: note = Description of Artificial Sequence: Synthetic oligonucleotide
  misc_feature 1..20: note = Target: SCN10A; (-) strand; PAM type: NAAAAC; PAM sequence: CAAAAC
  source 1..20: mol_type = other DNA
catgcgggtaagtctgatct

SEQ ID NO: 5349 - DNA, 20 bp, synthetic construct
  misc_feature 1..20: note = Description of Artificial Sequence: Synthetic oligonucleotide
  misc_feature 1..20: note = Target: SCN10A; (-) strand; PAM type: NAAAAC; PAM sequence: CAAAAC
  source 1..20: mol_type = other DNA
ttttaataaaagggaagaga

SEQ ID NO: 5350 - DNA, 20 bp, synthetic construct
  misc_feature 1..20: note = Description of Artificial Sequence: Synthetic oligonucleotide
  misc_feature 1..20: note = Target: SCN10A; (-) strand; PAM type: NAAAAC; PAM sequence: GAAAAC
  source 1..20: mol_type = other DNA
tctttggaccaccacttaaa

SEQ ID NO: 5351 - DNA, 20 bp, synthetic construct
  misc_feature 1..20: note = Description of Artificial Sequence: Synthetic oligonucleotide
  misc_feature 1..20: note = Target: SCN10A; (-) strand; PAM type: NAAAAC; PAM sequence: GAAAAC
  source 1..20: mol_type = other DNA
actcagcgagcaaaaatact

SEQ ID NO: 5352 - DNA, 20 bp, synthetic construct
  misc_feature 1..20: note = Description of Artificial Sequence: Synthetic oligonucleotide
  misc_feature 1..20: note = Target: SCN10A; (-) strand; PAM type: NAAAAC; PAM sequence: AAAAAC
  source 1..20: mol_type = other DNA
ctccaccagtctgataaaag

SEQ ID NO: 5353 - DNA, 20 bp, synthetic construct
  misc_feature 1..20: note = Description of Artificial Sequence: Synthetic oligonucleotide
  misc_feature 1..20: note = Target: SCN10A; (-) strand; PAM type: NAAAAC; PAM sequence: TAAAAC
  source 1..20: mol_type = other DNA
gagatcgagaccatcccggc

SEQ ID NO: 5354 - DNA, 20 bp, synthetic construct
  misc_feature 1..20: note = Description of Artificial Sequence: Synthetic oligonucleotide
  misc_feature 1..20: note = Target: SCN10A; (-) strand; PAM type: NAAAAC; PAM sequence: TAAAAC
  source 1..20: mol_type = other DNA
atatacacatattacaaaaa

SEQ ID NO: 5355 - DNA, 20 bp, synthetic construct
  misc_feature 1..20: note = Description of Artificial Sequence: Synthetic oligonucleotide
  misc_feature 1..20: note = Target: SCN10A; (-) strand; PAM type: NAAAAC; PAM sequence: GAAAAC
  source 1..20: mol_type = other DNA
actcaaagagaaactcactt

SEQ ID NO: 5356 - DNA, 20 bp, synthetic construct
  misc_feature 1..20: note = Description of Artificial Sequence: Synthetic oligonucleotide
  misc_feature 1..20: note = Target: SCN10A; (-) strand; PAM type: NAAAAC; PAM sequence: GAAAAC
  source 1..20: mol_type = other DNA
caggatctgagaggtgggag

SEQ ID NO: 5357 - DNA, 20 bp, synthetic construct
  misc_feature 1..20: note = Description of Artificial Sequence: Synthetic oligonucleotide
  misc_feature 1..20: note = Target: SCN10A; (-) strand; PAM type: NAAAAC; PAM sequence: CAAAAC
  source 1..20: mol_type = other DNA
agattgtccaggaagggtga

SEQ ID NO: 5358 - DNA, 20 bp, synthetic construct
  misc_feature 1..20: note = Description of Artificial Sequence: Synthetic oligonucleotide
  misc_feature 1..20: note = Target: SCN10A; (-) strand; PAM type: NAAAAC; PAM sequence: AAAAAC
  source 1..20: mol_type = other DNA
tcatgtgtcatttactctct

SEQ ID NO: 5359 - DNA, 20 bp, synthetic construct
  misc_feature 1..20: note = Description of Artificial Sequence: Synthetic oligonucleotide
  misc_feature 1..20: note = Target: SCN10A; (-) strand; PAM type: NAAAAC; PAM sequence: CAAAAC
  source 1..20: mol_type = other DNA
gtcacccaacttgtcagtag

SEQ ID NO: 5360 - DNA, 20 bp, synthetic construct
  misc_feature 1..20: note = Description of Artificial Sequence: Synthetic oligonucleotide
  misc_feature 1..20: note = Target: SCN10A; (-) strand; PAM type: NAAAAC; PAM sequence: AAAAAC
  source 1..20: mol_type = other DNA
gtaagaaggatatggctagg

SEQ ID NO: 5361 - DNA, 20 bp, synthetic construct
  misc_feature 1..20: note = Description of Artificial Sequence: Synthetic oligonucleotide
  misc_feature 1..20: note = Target: SCN10A; (-) strand; PAM type: NAAAAC; PAM sequence: GAAAAC
  source 1..20: mol_type = other DNA
tcaccaccataaacaccact

SEQ ID NO: 5362 - DNA, 20 bp, synthetic construct
  misc_feature 1..20: note = Description of Artificial Sequence: Synthetic oligonucleotide
  misc_feature 1..20: note = Target: SCN10A; (-) strand; PAM type: NAAAAC; PAM sequence: AAAAAC
  source 1..20: mol_type = other DNA
gggccttcctctttaccctc

SEQ ID NO: 5363 - DNA, 20 bp, synthetic construct
  misc_feature 1..20: note = Description of Artificial Sequence: Synthetic oligonucleotide
  misc_feature 1..20: note = Target: SCN10A; (-) strand; PAM type: NAAAAC; PAM sequence: TAAAAC
  source 1..20: mol_type = other DNA
taattaatggagcccaagga

SEQ ID NO: 5364 - DNA, 20 bp, synthetic construct
  misc_feature 1..20: note = Description of Artificial Sequence: Synthetic oligonucleotide
  misc_feature 1..20: note = Target: SCN10A; (-) strand; PAM type: NAAAAC; PAM sequence: CAAAAC
  source 1..20: mol_type = other DNA
gcgctaacatatttagtcat

SEQ ID NO: 5365 - DNA, 20 bp, synthetic construct
  misc_feature 1..20: note = Description of Artificial Sequence: Synthetic oligonucleotide
  misc_feature 1..20: note = Target: SCN10A; (-) strand; PAM type: NAAAAC; PAM sequence: GAAAAC
  source 1..20: mol_type = other DNA
ccccaatctgagggggctca

SEQ ID NO: 5366 - DNA, 20 bp, synthetic construct
  misc_feature 1..20: note = Description of Artificial Sequence: Synthetic oligonucleotide
  misc_feature 1..20: note = Target: SCN10A; (-) strand; PAM type: NAAAAC; PAM sequence: GAAAAC
  source 1..20: mol_type = other DNA
ttggcaagcagctcctaggg

SEQ ID NO: 5367 - DNA, 20 bp, synthetic construct
  misc_feature 1..20: note = Description of Artificial Sequence: Synthetic oligonucleotide
  misc_feature 1..20: note = Target: SCN10A; (-) strand; PAM type: NAAAAC; PAM sequence: CAAAAC
  source 1..20: mol_type = other DNA
aaggtaatgagcacagctac

SEQ ID NO: 5368 - DNA, 20 bp, synthetic construct
  misc_feature 1..20: note = Description of Artificial Sequence: Synthetic oligonucleotide
  misc_feature 1..20: note = Target: SCN10A; (-) strand; PAM type: NAAAAC; PAM sequence: CAAAAC
  source 1..20: mol_type = other DNA
ccagatctttggtttccagg

SEQ ID NO: 5369 - DNA, 20 bp, synthetic construct
  misc_feature 1..20: note = Description of Artificial Sequence: Synthetic oligonucleotide
  misc_feature 1..20: note = Target: SCN10A; (-) strand; PAM type: NAAAAC; PAM sequence: GAAAAC
  source 1..20: mol_type = other DNA
gtctccaaaagcagtgtcca

SEQ ID NO: 5370 - DNA, 20 bp, synthetic construct
  misc_feature 1..20: note = Description of Artificial Sequence: Synthetic oligonucleotide
  misc_feature 1..20: note = Target: SCN10A; (-) strand; PAM type: NAAAAC; PAM sequence: TAAAAC
  source 1..20: mol_type = other DNA
agaaccatacaaatatattt

SEQ ID NO: 5371 - DNA, 20 bp, synthetic construct
  misc_feature 1..20: note = Description of Artificial Sequence: Synthetic oligonucleotide
  misc_feature 1..20: note = Target: SCN10A; (-) strand; PAM type: NAAAAC; PAM sequence: AAAAAC
  source 1..20: mol_type = other DNA
ctttacctatctgctatcct

SEQ ID NO: 5372 - DNA, 20 bp, synthetic construct
  misc_feature 1..20: note = Description of Artificial Sequence: Synthetic oligonucleotide
  misc_feature 1..20: note = Target: SCN10A; (-) strand; PAM type: NAAAAC; PAM sequence: GAAAAC
  source 1..20: mol_type = other DNA
actatttgcaagcaaaactg

SEQ ID NO: 5373 - DNA, 20 bp, synthetic construct
  misc_feature 1..20: note = Description of Artificial Sequence: Synthetic oligonucleotide
  misc_feature 1..20: note = Target: SCN10A; (-) strand; PAM type: NAAAAC; PAM sequence: CAAAAC
  source 1..20: mol_type = other DNA
tgaccccaactatttgcaag

SEQ ID NO: 5374 - DNA, 20 bp, synthetic construct
  misc_feature 1..20: note = Description of Artificial Sequence: Synthetic oligonucleotide
  misc_feature 1..20: note = Target: SCN10A; (-) strand; PAM type: NAAAAC; PAM sequence: AAAAAC
  source 1..20: mol_type = other DNA
tttcacaatacaattacttc

SEQ ID NO: 5375 - DNA, 20 bp, synthetic construct
  misc_feature 1..20: note = Description of Artificial Sequence: Synthetic oligonucleotide
  misc_feature 1..20: note = Target: SCN10A; (-) strand; PAM type: NAAAAC; PAM sequence: TAAAAC
  source 1..20: mol_type = other DNA
cctattatacagacaatctc

SEQ ID NO: 5376 - DNA, 20 bp, synthetic construct
  misc_feature 1..20: note = Description of Artificial Sequence: Synthetic oligonucleotide
  misc_feature 1..20: note = Target: SCN10A; (-) strand; PAM type: NAAAAC; PAM sequence: CAAAAC
  source 1..20: mol_type = other DNA
tccagcctgggcaacaaggg

SEQ ID NO: 5377 - DNA, 20 bp, synthetic construct
  misc_feature 1..20: note = Description of Artificial Sequence: Synthetic oligonucleotide
  misc_feature 1..20: note = Target: SCN10A; (-) strand; PAM type: NAAAAC; PAM sequence: GAAAAC
  source 1..20: mol_type = other DNA
gagcgagactccgtctcatt

SEQ ID NO: 5378 - DNA, 20 bp, synthetic construct
  misc_feature 1..20: note = Description of Artificial Sequence: Synthetic oligonucleotide
  misc_feature 1..20: note = Target: SCN10A; (-) strand; PAM type: NAAAAC; PAM sequence: GAAAAC
  source 1..20: mol_type = other DNA
gaccagcctggccaacagga

SEQ ID NO: 5379 - DNA, 20 bp, synthetic construct
  misc_feature 1..20: note = Description of Artificial Sequence: Synthetic oligonucleotide
  misc_feature 1..20: note = Target: SCN10A; (-) strand; PAM type: NAAAAC; PAM sequence: CAAAAC
  source 1..20: mol_type = other DNA
gttacatacccacatacaca

SEQ ID NO: 5380 - DNA, 20 bp, synthetic construct
  misc_feature 1..20: note = Description of Artificial Sequence: Synthetic oligonucleotide
  misc_feature 1..20: note = Target: SCN10A; (-) strand; PAM type: NAAAAC; PAM sequence: AAAAAC
  source 1..20: mol_type = other DNA
gtcctgctatcccatgaggc

SEQ ID NO: 5381 - DNA, 20 bp, synthetic construct
  misc_feature 1..20: note = Description of Artificial Sequence: Synthetic oligonucleotide
  misc_feature 1..20: note = Target: SCN10A; (-) strand; PAM type: NAAAAC; PAM sequence: GAAAAC
  source 1..20: mol_type = other DNA
aggacagttttcagttttca

SEQ ID NO: 5382 - DNA, 20 bp, synthetic construct
  misc_feature 1..20: note = Description of Artificial Sequence: Synthetic oligonucleotide
  misc_feature 1..20: note = Target: SCN10A; (-) strand; PAM type: NAAAAC; PAM sequence: CAAAAC
  source 1..20: mol_type = other DNA
ctttgcgtttttgtgtttgc

SEQ ID NO: 5383 - DNA, 20 bp, synthetic construct
  misc_feature 1..20: note = Description of Artificial Sequence: Synthetic oligonucleotide
  misc_feature 1..20: note = Target: SCN10A; (-) strand; PAM type: NAAAAC; PAM sequence: GAAAAC
  source 1..20: mol_type = other DNA
accaatattattatgccctt

SEQ ID NO: 5384 - DNA, 20 bp, synthetic construct
  misc_feature 1..20: note = Description of Artificial Sequence: Synthetic oligonucleotide
  misc_feature 1..20: note = Target: SCN10A; (-) strand; PAM type: NAAAAC; PAM sequence: AAAAAC
  source 1..20: mol_type = other DNA
aaaaaaaaaaaaaaaaaaaa

SEQ ID NO: 5385 - DNA, 20 bp, synthetic construct
  misc_feature 1..20: note = Description of Artificial Sequence: Synthetic oligonucleotide
  misc_feature 1..20: note = Target: SCN10A; (-) strand; PAM type: NAAAAC; PAM sequence: AAAAAC
  source 1..20: mol_type = other DNA
tggctactaatccagttttt

SEQ ID NO: 5386 - DNA, 20 bp, synthetic construct
  misc_feature 1..20: note = Description of Artificial Sequence: Synthetic oligonucleotide
  misc_feature 1..20: note = Target: SCN10A; (-) strand; PAM type: NAAAAC; PAM sequence: CAAAAC
  source 1..20: mol_type = other DNA
ctagacttgaagagaggtga

SEQ ID NO: 5387 - DNA, 20 bp, synthetic construct
  misc_feature 1..20: note = Description of Artificial Sequence: Synthetic oligonucleotide
  misc_feature 1..20: note = Target: SCN10A; (-) strand; PAM type: NAAAAC; PAM sequence: AAAAAC
  source 1..20: mol_type = other DNA
gcatagcactggacacttga

SEQ ID NO: 5388 - DNA, 20 bp, synthetic construct
  misc_feature 1..20: note = Description of Artificial Sequence: Synthetic oligonucleotide
  misc_feature 1..20: note = Target: SCN10A; (-) strand; PAM type: NAAAAC; PAM sequence: CAAAAC
  source 1..20: mol_type = other DNA
cagataacatagcaactgaa

SEQ ID NO: 5389 - DNA, 20 bp, synthetic construct
  misc_feature 1..20: note = Description of Artificial Sequence: Synthetic oligonucleotide
  misc_feature 1..20: note = Target: SCN10A; (-) strand; PAM type: NAAAAC; PAM sequence: AAAAAC
  source 1..20: mol_type = other DNA
tcccaccaccattcacgtgg

SEQ ID NO: 5390 - DNA, 20 bp, synthetic construct
  misc_feature 1..20: note = Description of Artificial Sequence: Synthetic oligonucleotide
  misc_feature 1..20: note = Target: SCN10A; (-) strand; PAM type: NAAAAC; PAM sequence: CAAAAC
  source 1..20: mol_type = other DNA
aggcagctagttgcccttta

SEQ ID NO: 5391 - DNA, 20 bp, synthetic construct
  misc_feature 1..20: note = Description of Artificial Sequence: Synthetic oligonucleotide
  misc_feature 1..20: note = Target: SCN10A; (-) strand; PAM type: NAAAAC; PAM sequence: GAAAAC
  source 1..20: mol_type = other DNA
gctgtagaaggttaagtgta

SEQ ID NO: 5392 - DNA, 20 bp, synthetic construct
  misc_feature 1..20: note = Description of Artificial Sequence: Synthetic oligonucleotide
  misc_feature 1..20: note = Target: SCN10A; (-) strand; PAM type: NAAAAC; PAM sequence: AAAAAC
  source 1..20: mol_type = other DNA
caggaaaggaaaagggagac

SEQ ID NO: 5393 - DNA, 20 bp, synthetic construct
  misc_feature 1..20: note = Description of Artificial Sequence: Synthetic oligonucleotide
  misc_feature 1..20: note = Target: SCN10A; (-) strand; PAM type: NAAAAC; PAM sequence: AAAAAC
  source 1..20: mol_type = other DNA
tttttagggctatgagattc

SEQ ID NO: 5394 - DNA, 20 bp, synthetic construct
  misc_feature 1..20: note = Description of Artificial Sequence: Synthetic oligonucleotide
  misc_feature 1..20: note = Target: SCN10A; (-) strand; PAM type: NAAAAC; PAM sequence: AAAAAC
  source 1..20: mol_type = other DNA
tttcaagtgcatatagtaaa

SEQ ID NO: 5395 - DNA, 20 bp, synthetic construct
  misc_feature 1..20: note = Description of Artificial Sequence: Synthetic oligonucleotide
  misc_feature 1..20: note = Target: SCN10A; (-) strand; PAM type: NAAAAC; PAM sequence: AAAAAC
  source 1..20: mol_type = other DNA
acatttttaaattatcagga

SEQ ID NO: 5396 - DNA, 20 bp, synthetic construct
  misc_feature 1..20: note = Description of Artificial Sequence: Synthetic oligonucleotide
  misc_feature 1..20: note = Target: SCN10A; (-) strand; PAM type: NAAAAC; PAM sequence: GAAAAC
  source 1..20: mol_type = other DNA
gaagaaaattgaaaaaaaaa

SEQ ID NO: 5397 - DNA, 20 bp, synthetic construct
  misc_feature 1..20: note = Description of Artificial Sequence: Synthetic oligonucleotide
  misc_feature 1..20: note = Target: SCN10A; (-) strand; PAM type: NAAAAC; PAM sequence: TAAAAC
  source 1..20: mol_type = other DNA
cataatgtgcacatttaccc

SEQ ID NO: 5398 - DNA, 20 bp, synthetic construct
  misc_feature 1..20: note = Description of Artificial Sequence: Synthetic oligonucleotide
  misc_feature 1..20: note = Target: SCN10A; (-) strand; PAM type: NAAAAC; PAM sequence: AAAAAC
  source 1..20: mol_type = other DNA
tgaaactacaaaagaaagaa

SEQ ID NO: 5399 - DNA, 20 bp, synthetic construct
  misc_feature 1..20: note = Description of Artificial Sequence: Synthetic oligonucleotide
  misc_feature 1..20: note = Target: SCN10A; (-) strand; PAM type: NAAAAC; PAM sequence: GAAAAC
  source 1..20: mol_type = other DNA
agaaatggacatgtgtatat

SEQ ID NO: 5400 - DNA, 20 bp, synthetic construct
  misc_feature 1..20: note = Description of Artificial Sequence: Synthetic oligonucleotide
  misc_feature 1..20: note = Target: SCN10A; (-) strand; PAM type: NAAAAC; PAM sequence: TAAAAC
  source 1..20: mol_type = other DNA
tctaaaatccagtcagtgat

SEQ ID NO: 5401 - DNA, 20 bp, synthetic construct
  misc_feature 1..20: note = Description of Artificial Sequence: Synthetic oligonucleotide
  misc_feature 1..20: note = Target: SCN10A; (-) strand; PAM type: NAAAAC; PAM sequence: GAAAAC
  source 1..20: mol_type = other DNA
tgtttttttcatttattctc

SEQ ID NO: 5402 - DNA, 20 bp, synthetic construct
  misc_feature 1..20: note = Description of Artificial Sequence: Synthetic oligonucleotide
  misc_feature 1..20: note = Target: SCN10A; (-) strand; PAM type: NAAAAC; PAM sequence: CAAAAC
  source 1..20: mol_type = other DNA
tcctccaggtttgagcccta

SEQ ID NO: 5403 - DNA, 20 bp, synthetic construct
  misc_feature 1..20: note = Description of Artificial Sequence: Synthetic oligonucleotide
  misc_feature 1..20: note = Target: SCN10A; (-) strand; PAM type: NAAAAC; PAM sequence: CAAAAC
  source 1..20: mol_type = other DNA
aaaaaatgtttgagggattt

SEQ ID NO: 5404 - DNA, 20 bp, synthetic construct
  misc_feature 1..20: note = Description of Artificial Sequence: Synthetic oligonucleotide
  misc_feature 1..20: note = Target: SCN10A; (-) strand; PAM type: NAAAAC; PAM sequence: CAAAAC
  source 1..20: mol_type = other DNA
catctgctttgcatgcatca

SEQ ID NO: 5405 - DNA, 20 bp, synthetic construct
  misc_feature 1..20: note = Description of Artificial Sequence: Synthetic oligonucleotide
  misc_feature 1..20: note = Target: SCN10A; (-) strand; PAM type: NAAAAC; PAM sequence: AAAAAC
  source 1..20: mol_type = other DNA
ttttagatgcataatttttc

SEQ ID NO: 5406 - DNA, 20 bp, synthetic construct
  misc_feature 1..20: note = Description of Artificial Sequence: Synthetic oligonucleotide
  misc_feature 1..20: note = Target: SCN10A; (-) strand; PAM type: NAAAAC; PAM sequence: CAAAAC
  source 1..20: mol_type = other DNA
tccagggcaaatggaatcac

SEQ ID NO: 5407 - DNA, 20 bp, synthetic construct
  misc_feature 1..20: note = Description of Artificial Sequence: Synthetic oligonucleotide
  misc_feature 1..20: note = Target: SCN10A; (-) strand; PAM type: NAAAAC; PAM sequence: AAAAAC
  source 1..20: mol_type = other DNA
tcttgttggacaggtatgag

SEQ ID NO: 5408 - DNA, 20 bp, synthetic construct
  misc_feature 1..20: note = Description of Artificial Sequence: Synthetic oligonucleotide
  misc_feature 1..20: note = Target: SCN10A; (-) strand; PAM type: NAAAAC; PAM sequence: GAAAAC
  source 1..20: mol_type = other DNA
ttttctaggcctcgcctctg

SEQ ID NO: 5409 - DNA, 20 bp, synthetic construct
  misc_feature 1..20: note = Description of Artificial Sequence: Synthetic oligonucleotide
  misc_feature 1..20: note = Target: SCN10A; (-) strand; PAM type: NAAAAC; PAM sequence: CAAAAC
  source 1..20: mol_type = other DNA
agacattgcccaccatttgt

SEQ ID NO: 5410 - DNA, 20 bp, synthetic construct
  misc_feature 1..20: note = Description of Artificial Sequence: Synthetic oligonucleotide
  misc_feature 1..20: note = Target: SCN10A; (-) strand; PAM type: NAAAAC; PAM sequence: CAAAAC
  source 1..20: mol_type = other DNA
tcaggagaaagcgaatgaag

SEQ ID NO: 5411 - DNA, 20 bp, synthetic construct
  misc_feature 1..20: note = Description of Artificial Sequence: Synthetic oligonucleotide
  misc_feature 1..20: note = Target: SCN10A; (-) strand; PAM type: NAAAAC; PAM sequence: TAAAAC
  source 1..20: mol_type = other DNA
cctgatggttatatctgcct

SEQ ID NO: 5412 - DNA, 20 bp, synthetic construct
  misc_feature 1..20: note = Description of Artificial Sequence: Synthetic oligonucleotide
  misc_feature 1..20: note = Target: SCN10A; (-) strand; PAM type: NAAAAC; PAM sequence: TAAAAC
  source 1..20: mol_type = other DNA
ttgaactctgatctctgaca

SEQ ID NO: 5413 - DNA, 20 bp, synthetic construct
  misc_feature 1..20: note = Description of Artificial Sequence: Synthetic oligonucleotide
  misc_feature 1..20: note = Target: SCN10A; (-) strand; PAM type: NAAAAC; PAM sequence: TAAAAC
  source 1..20: mol_type = other DNA
tcacaaggaatgcaggtaaa

SEQ ID NO: 5414 - DNA, 20 bp, synthetic construct
  misc_feature 1..20: note = Description of Artificial Sequence: Synthetic oligonucleotide
  misc_feature 1..20: note = Target: SCN10A; (-) strand; PAM type: NAAAAC; PAM sequence: AAAAAC
  source 1..20: mol_type = other DNA
tttcagcagcttccaaggtt

SEQ ID NO: 5415 - DNA, 20 bp, synthetic construct
  misc_feature 1..20: note = Description of Artificial Sequence: Synthetic oligonucleotide
  misc_feature 1..20: note = Target: SCN10A; (-) strand; PAM type: NAAAAC; PAM sequence: GAAAAC
  source 1..20: mol_type = other DNA
caccttcatcagctcactag

SEQ ID NO: 5416 - DNA, 20 bp, synthetic construct
  misc_feature 1..20: note = Description of Artificial Sequence: Synthetic oligonucleotide
  misc_feature 1..20: note = Target: SCN10A; (-) strand; PAM type: NAAAAC; PAM sequence: GAAAAC
  source 1..20: mol_type = other DNA
cataaagatgctaccctgtg

SEQ ID NO: 5417 - DNA, 20 bp, synthetic construct
  misc_feature 1..20: note = Description of Artificial Sequence: Synthetic oligonucleotide
  misc_feature 1..20: note = Target: SCN10A; (-) strand; PAM type: NAAAAC; PAM sequence: AAAAAC
  source 1..20: mol_type = other DNA
ttaccctcacaagtagagga

SEQ ID NO: 5418 - DNA, 20 bp, synthetic construct
  misc_feature 1..20: note = Description of Artificial Sequence: Synthetic oligonucleotide
  misc_feature 1..20: note = Target: SCN10A; (-) strand; PAM type: NAAAAC; PAM sequence: AAAAAC
  source 1..20: mol_type = other DNA
tctcatggcagtgttcccag

SEQ ID NO: 5419 - DNA, 20 bp, synthetic construct
  misc_feature 1..20: note = Description of Artificial Sequence: Synthetic oligonucleotide
  misc_feature 1..20: note = Target: SCN10A; (-) strand; PAM type: NAAAAC; PAM sequence: TAAAAC
  source 1..20: mol_type = other DNA
gaccccaaaattttgtgaat

SEQ ID NO: 5420 - DNA, 20 bp, synthetic construct
  misc_feature 1..20: note = Description of Artificial Sequence: Synthetic oligonucleotide
  misc_feature 1..20: note = Target: SCN10A; (-) strand; PAM type: NAAAAC; PAM sequence: GAAAAC
  source 1..20: mol_type = other DNA
aaccaactactcatctcaca

SEQ ID NO: 5421 - DNA, 20 bp, synthetic construct
  misc_feature 1..20: note = Description of Artificial Sequence: Synthetic oligonucleotide
  misc_feature 1..20: note = Target: SCN10A; (-) strand; PAM type: NAAAAC; PAM sequence: AAAAAC
  source 1..20: mol_type = other DNA
ttcagagttcttagagcatt

SEQ ID NO: 5422 - DNA, 20 bp, synthetic construct
  misc_feature 1..20: note = Description of Artificial Sequence: Synthetic oligonucleotide
  misc_feature 1..20: note = Target: SCN10A; (-) strand; PAM type: NAAAAC; PAM sequence: CAAAAC
  source 1..20: mol_type = other DNA
ccaaaaaccacctgttccct

SEQ ID NO: 5423 - DNA, 20 bp, synthetic construct
  misc_feature 1..20: note = Description of Artificial Sequence: Synthetic oligonucleotide
  misc_feature 1..20: note = Target: SCN10A; (-) strand; PAM type: NAAAAC; PAM sequence: AAAAAC
  source 1..20: mol_type = other DNA
aagaacttattcatgtaacc

SEQ ID NO: 5424 - DNA, 20 bp, synthetic construct
  misc_feature 1..20: note = Description of Artificial Sequence: Synthetic oligonucleotide
  misc_feature 1..20: note = Target: SCN10A; (-) strand; PAM type: NAAAAC; PAM sequence: CAAAAC
  source 1..20: mol_type = other DNA
acccaacaccacctgtttcc

SEQ ID NO: 5425 - DNA, 20 bp, synthetic construct
  misc_feature 1..20: note = Description of Artificial Sequence: Synthetic oligonucleotide
  misc_feature 1..20: note = Target: SCN10A; (-) strand; PAM type: NAAAAC; PAM sequence: GAAAAC
  source 1..20: mol_type = other DNA
aaactagtacaaccactaag

SEQ ID NO: 5426 - DNA, 20 bp, synthetic construct
  misc_feature 1..20: note = Description of Artificial Sequence: Synthetic oligonucleotide
  misc_feature 1..20: note = Target: SCN10A; (-) strand; PAM type: NAAAAC; PAM sequence: TAAAAC
  source 1..20: mol_type = other DNA
attatcagggaaatgcaaat

SEQ ID NO: 5427 - DNA, 20 bp, synthetic construct
  misc_feature 1..20: note = Description of Artificial Sequence: Synthetic oligonucleotide
  misc_feature 1..20: note = Target: SCN10A; (-) strand; PAM type: NAAAAC; PAM sequence: GAAAAC
  source 1..20: mol_type = other DNA
aaacacaaataaatcagcaa

SEQ ID NO: 5428 - DNA, 20 bp, synthetic construct
  misc_feature 1..20: note = Description of Artificial Sequence: Synthetic oligonucleotide
  misc_feature 1..20: note = Target: SCN10A; (-) strand; PAM type: NAAAAC; PAM sequence: AAAAAC
  source 1..20: mol_type = other DNA
ggacccaaagcaaatccaac

SEQ ID NO: 5429 - DNA, 20 bp, synthetic construct
  misc_feature 1..20: note = Description of Artificial Sequence: Synthetic oligonucleotide
  misc_feature 1..20: note = Target: SCN10A; (-) strand; PAM type: NAAAAC; PAM sequence: CAAAAC
  source 1..20: mol_type = other DNA
cttctagacattggcttagg

SEQ ID NO: 5430 - DNA, 20 bp, synthetic construct
  misc_feature 1..20: note = Description of Artificial Sequence: Synthetic oligonucleotide
  misc_feature 1..20: note = Target: SCN10A; (-) strand; PAM type: NAAAAC; PAM sequence: AAAAAC
  source 1..20: mol_type = other DNA
attctagaagataacattgg

SEQ ID NO: 5431 - DNA, 20 bp, synthetic construct
  misc_feature 1..20: note = Description of Artificial Sequence: Synthetic oligonucleotide
  misc_feature 1..20: note = Target: SCN10A; (-) strand; PAM type: NAAAAC; PAM sequence: AAAAAC
  source 1..20: mol_type = other DNA
tgatctttgaaaaagcaaac

SEQ ID NO: 5432 - DNA, 20 bp, synthetic construct
  misc_feature 1..20: note = Description of Artificial Sequence: Synthetic oligonucleotide
  misc_feature 1..20: note = Target: SCN10A; (-) strand; PAM type: NAAAAC; PAM sequence: CAAAAC
  source 1..20: mol_type = other DNA
ggctatagtatagcctgtac

SEQ ID NO: 5433 - DNA, 20 bp, synthetic construct
  misc_feature 1..20: note = Description of Artificial Sequence: Synthetic oligonucleotide
  misc_feature 1..20: note = Target: SCN10A; (-) strand; PAM type: NAAAAC; PAM sequence: CAAAAC
  source 1..20: mol_type = other DNA
gatttctacaaggaaaacta

SEQ ID NO: 5434 - DNA, 20 bp, synthetic construct
  misc_feature 1..20: note = Description of Artificial Sequence: Synthetic oligonucleotide
  misc_feature 1..20: note = Target: SCN10A; (-) strand; PAM type: NAAAAC; PAM sequence: GAAAAC
  source 1..20: mol_type = other DNA
aggtgaaagatttctacaag

SEQ ID NO: 5435 - DNA, 20 bp, synthetic construct
  misc_feature 1..20: note = Description of Artificial Sequence: Synthetic oligonucleotide
  misc_feature 1..20: note = Target: SCN10A; (-) strand; PAM type: NAAAAC; PAM sequence: AAAAAC
  source 1..20: mol_type = other DNA
tgcaaaaaaaaaacaaaaat

SEQ ID NO: 5436 - DNA, 20 bp, synthetic construct
  misc_feature 1..20: note = Description of Artificial Sequence: Synthetic oligonucleotide
  misc_feature 1..20: note = Target: SCN10A; (-) strand; PAM type: NAAAAC; PAM sequence: AAAAAC
  source 1..20: mol_type = other DNA
ttttacaacagctgcaaaaa

SEQ ID NO: 5437 - DNA, 20 bp, synthetic construct
  misc_feature 1..20: note = Description of Artificial Sequence: Synthetic oligonucleotide
  misc_feature 1..20: note = Target: SCN10A; (-) strand; PAM type: NAAAAC; PAM sequence: AAAAAC
  source 1..20: mol_type = other DNA
tcagtaaagtttcaggatac

SEQ ID NO: 5438 - DNA, 20 bp, synthetic construct
  misc_feature 1..20: note = Description of Artificial Sequence: Synthetic oligonucleotide
  misc_feature 1..20: note = Target: SCN10A; (-) strand; PAM type: NAAAAC; PAM sequence: TAAAAC
  source 1..20: mol_type = other DNA
atccagcatcccattatgat

SEQ ID NO: 5439 - DNA, 20 bp, synthetic construct
  misc_feature 1..20: note = Description of Artificial Sequence: Synthetic oligonucleotide
  misc_feature 1..20: note = Target: SCN10A; (-) strand; PAM type: NAAAAC; PAM sequence: AAAAAC
  source 1..20: mol_type = other DNA
cacgtcacataaacagaatt

SEQ ID NO: 5440 - DNA, 20 bp, synthetic construct
  misc_feature 1..20: note = Description of Artificial Sequence: Synthetic oligonucleotide
  misc_feature 1..20: note = Target: SCN10A; (-) strand; PAM type: NAAAAC; PAM sequence: CAAAAC
  source 1..20: mol_type = other DNA
agccagtatcaccctaatac

SEQ ID NO: 5441 - DNA, 20 bp, synthetic construct
  misc_feature 1..20: note = Description of Artificial Sequence: Synthetic oligonucleotide
  misc_feature 1..20: note = Target: SCN10A; (-) strand; PAM type: NAAAAC; PAM sequence: CAAAAC
  source 1..20: mol_type = other DNA
aggaattagagaaacaagaa

SEQ ID NO: 5442 - DNA, 20 bp, synthetic construct
  misc_feature 1..20: note = Description of Artificial Sequence: Synthetic oligonucleotide
  misc_feature 1..20: note = Target: SCN10A; (-) strand; PAM type: NAAAAC; PAM sequence: CAAAAC
  source 1..20: mol_type = other DNA
ataatagtcacacaacttat

SEQ ID NO: 5443 - DNA, 20 bp, synthetic construct
  misc_feature 1..20: note = Description of Artificial Sequence: Synthetic oligonucleotide
  misc_feature 1..20: note = Target: SCN10A; (-) strand; PAM type: NAAAAC; PAM sequence: GAAAAC
  source 1..20: mol_type = other DNA
tcaaaactatacaaatacat

SEQ ID NO: 5444 - DNA, 20 bp, synthetic construct
  misc_feature 1..20: note = Description of Artificial Sequence: Synthetic oligonucleotide
  misc_feature 1..20: note = Target: SCN10A; (-) strand; PAM type: NAAAAC; PAM sequence: CAAAAC
  source 1..20: mol_type = other DNA
ttaactccaaaagaaaccct

SEQ ID NO: 5445 - DNA, 20 bp, synthetic construct
  misc_feature 1..20: note = Description of Artificial Sequence: Synthetic oligonucleotide
  misc_feature 1..20: note = Target: SCN10A; (-) strand; PAM type: NAAAAC; PAM sequence: AAAAAC
  source 1..20: mol_type = other DNA
atggacttaacagatattta

SEQ ID NO: 5446 - DNA, 20 bp, synthetic construct
  misc_feature 1..20: note = Description of Artificial Sequence: Synthetic oligonucleotide
  misc_feature 1..20: note = Target: SCN10A; (-) strand; PAM type: NAAAAC; PAM sequence: TAAAAC
  source 1..20: mol_type = other DNA
cactggagctcccaaattta

SEQ ID NO: 5447 - DNA, 20 bp, synthetic construct
  misc_feature 1..20: note = Description of Artificial Sequence: Synthetic oligonucleotide
  misc_feature 1..20: note = Target: SCN10A; (-) strand; PAM type: NAAAAC; PAM sequence: GAAAAC
  source 1..20: mol_type = other DNA
gtagctattcttatatcaga

SEQ ID NO: 5448 - DNA, 20 bp, synthetic construct
  misc_feature 1..20: note = Description of Artificial Sequence: Synthetic oligonucleotide
  misc_feature 1..20: note = Target: SCN10A; (-) strand; PAM type: NAAAAC; PAM sequence: TAAAAC
  source 1..20: mol_type = other DNA
cataaatatcaaaggaccta

SEQ ID NO: 5449 - DNA, 20 bp, synthetic construct
  misc_feature 1..20: note = Description of Artificial Sequence: Synthetic oligonucleotide
  misc_feature 1..20: note = Target: SCN10A; (-) strand; PAM type: NAAAAC; PAM sequence: TAAAAC
  source 1..20: mol_type = other DNA
aggaattctaaatcttgaaa

SEQ ID NO: 5450 - DNA, 20 bp, synthetic construct
  misc_feature 1..20: note = Description of Artificial Sequence: Synthetic oligonucleotide
  misc_feature 1..20: note = Target: SCN10A; (-) strand; PAM type: NAAAAC; PAM sequence: GAAAAC
  source 1..20: mol_type = other DNA
tatttgagggaataattgag

SEQ ID NO: 5451 - DNA, 20 bp, synthetic construct
  misc_feature 1..20: note = Description of Artificial Sequence: Synthetic oligonucleotide
  misc_feature 1..20: note = Target: SCN10A; (-) strand; PAM type: NAAAAC; PAM sequence: GAAAAC
  source 1..20: mol_type = other DNA
aatagaaatctaaaagtttg

SEQ ID NO: 5452 - DNA, 20 bp, synthetic construct
  misc_feature 1..20: note = Description of Artificial Sequence: Synthetic oligonucleotide
  misc_feature 1..20: note = Target: SCN10A; (-) strand; PAM type: NAAAAC; PAM sequence: AAAAAC
  source 1..20: mol_type = other DNA
cagagaaatagatataaaga

SEQ ID NO: 5453 - DNA, 20 bp, synthetic construct
  misc_feature 1..20: note = Description of Artificial Sequence: Synthetic oligonucleotide
  misc_feature 1..20: note = Target: SCN10A; (-) strand; PAM type: NAAAAC; PAM sequence: TAAAAC
  source 1..20: mol_type = other DNA
aaccaacttaaagaaatttt

SEQ ID NO: 5454 - DNA, 20 bp, synthetic construct
  misc_feature 1..20: note = Description of Artificial Sequence: Synthetic oligonucleotide
  misc_feature 1..20: note = Target: SCN10A; (-) strand; PAM type: NAAAAC; PAM sequence: AAAAAC
  source 1..20: mol_type = other DNA
aggagacaccagagaaagat

SEQ ID NO: 5455 - DNA, 20 bp, synthetic construct
  misc_feature 1..20: note = Description of Artificial Sequence: Synthetic oligonucleotide
  misc_feature 1..20: note = Target: SCN10A; (-) strand; PAM type: NAAAAC; PAM sequence: GAAAAC
  source 1..20: mol_type = other DNA
aactttgatcccaggaaaaa

SEQ ID NO: 5456 - DNA, 20 bp, synthetic construct
  misc_feature 1..20: note = Description of Artificial Sequence: Synthetic oligonucleotide
  misc_feature 1..20: note = Target: SCN10A; (-) strand; PAM type: NAAAAC; PAM sequence: CAAAAC
  source 1..20: mol_type = other DNA
cctgccttggtagctgaaca

SEQ ID NO: 5457 - DNA, 20 bp, synthetic construct
  misc_feature 1..20: note = Description of Artificial Sequence: Synthetic oligonucleotide
  misc_feature 1..20: note = Target: SCN10A; (-) strand; PAM type: NAAAAC; PAM sequence: AAAAAC
  source 1..20: mol_type = other DNA
gaaattctgcaagacaggtg

SEQ ID NO: 5458 - DNA, 20 bp, synthetic construct
  misc_feature 1..20: note = Description of Artificial Sequence: Synthetic oligonucleotide
  misc_feature 1..20: note = Target: SCN10A; (-) strand; PAM type: NAAAAC; PAM sequence: AAAAAC
  source 1..20: mol_type = other DNA
cagtctgcactccagtttct

SEQ ID NO: 5459 - DNA, 20 bp, synthetic construct
  misc_feature 1..20: note = Description of Artificial Sequence: Synthetic oligonucleotide
  misc_feature 1..20: note = Target: SCN10A; (-) strand; PAM type: NAAAAC; PAM sequence: AAAAAC
  source 1..20: mol_type = other DNA
aagctcaactggttcctgta

SEQ ID NO: 5460 - DNA, 20 bp, synthetic construct
  misc_feature 1..20: note = Description of Artificial Sequence: Synthetic oligonucleotide
  misc_feature 1..20: note = Target: SCN10A; (-) strand; PAM type: NAAAAC; PAM sequence: CAAAAC
  source 1..20: mol_type = other DNA
tccacttcctgtgagatttc

SEQ ID NO: 5461 - DNA, 20 bp, synthetic construct
  misc_feature 1..20: note = Description of Artificial Sequence: Synthetic oligonucleotide
  misc_feature 1..20: note = Target: SCN10A; (-) strand; PAM type: NAAAAC; PAM sequence: AAAAAC
  source 1..20: mol_type = other DNA
attggcttcctattatgaga

SEQ ID NO: 5462 - DNA, 20 bp, synthetic construct
  misc_feature 1..20: note = Description of Artificial Sequence: Synthetic oligonucleotide
  misc_feature 1..20: note = Target: SCN10A; (-) strand; PAM type: NAAAAC; PAM sequence: AAAAAC
  source 1..20: mol_type = other DNA
tttataaagattctgacaaa

SEQ ID NO: 5463 - DNA, 20 bp, synthetic construct
  misc_feature 1..20: note = Description of Artificial Sequence: Synthetic oligonucleotide
  misc_feature 1..20: note = Target: SCN10A; (-) strand; PAM type: NAAAAC; PAM sequence: GAAAAC
  source 1..20: mol_type = other DNA
agttaagattttctaattta

SEQ ID NO: 5464 - DNA, 20 bp, synthetic construct
  misc_feature 1..20: note = Description of Artificial Sequence: Synthetic oligonucleotide
  misc_feature 1..20: note = Target: SCN10A; (-) strand; PAM type: NAAAAC; PAM sequence: CAAAAC
  source 1..20: mol_type = other DNA
gtatattatgcatattttac

SEQ ID NO: 5465 - DNA, 20 bp, synthetic construct
  misc_feature 1..20: note = Description of Artificial Sequence: Synthetic oligonucleotide
  misc_feature 1..20: note = Target: SCN10A; (-) strand; PAM type: NAAAAC; PAM sequence: CAAAAC
  source 1..20: mol_type = other DNA
cattttattttatagttgaa

SEQ ID NO: 5466 - DNA, 20 bp, synthetic construct
  misc_feature 1..20: note = Description of Artificial Sequence: Synthetic oligonucleotide
  misc_feature 1..20: note = Target: SCN10A; (-) strand; PAM type: NAAAAC; PAM sequence: AAAAAC
  source 1..20: mol_type = other DNA
gtggttggagaagaaacaag

SEQ ID NO: 5467 - DNA, 20 bp, synthetic construct
  misc_feature 1..20: note = Description of Artificial Sequence: Synthetic oligonucleotide
  misc_feature 1..20: note = Target: SCN10A; (-) strand; PAM type: NAAAAC; PAM sequence: CAAAAC
  source 1..20: mol_type = other DNA
gcactcctgctggtaagata

SEQ ID NO: 5468 - DNA, 20 bp, synthetic construct
  misc_feature 1..20: note = Description of Artificial Sequence: Synthetic oligonucleotide
  misc_feature 1..20: note = Target: SCN10A; (-) strand; PAM type: NAAAAC; PAM sequence: CAAAAC
  source 1..20: mol_type = other DNA
gttaaaggttgagaagacaa

SEQ ID NO: 5469 - DNA, 20 bp, synthetic construct
  misc_feature 1..20: note = Description of Artificial Sequence: Synthetic oligonucleotide
  misc_feature 1..20: note = Target: SCN10A; (-) strand; PAM type: NAAAAC; PAM sequence: CAAAAC
  source 1..20: mol_type = other DNA
aagtaatgatataaagctat

SEQ ID NO: 5470 - DNA, 20 bp, synthetic construct
  misc_feature 1..20: note = Description of Artificial Sequence: Synthetic oligonucleotide
  misc_feature 1..20: note = Target: SCN10A; (-) strand; PAM type: NAAAAC; PAM sequence: CAAAAC
  source 1..20: mol_type = other DNA
aatggatgtggataatctcc

SEQ ID NO: 5471 - DNA, 20 bp, synthetic construct
  misc_feature 1..20: note = Description of Artificial Sequence: Synthetic oligonucleotide
  misc_feature 1..20: note = Target: SCN10A; (-) strand; PAM type: NAAAAC; PAM sequence: AAAAAC
  source 1..20: mol_type = other DNA
aaaaacagtgtatgtgcttc

SEQ ID NO: 5472 - DNA, 20 bp, synthetic construct
  misc_feature 1..20: note = Description of Artificial Sequence: Synthetic oligonucleotide
  misc_feature 1..20: note = Target: SCN10A; (-) strand; PAM type: NAAAAC; PAM sequence: AAAAAC
  source 1..20: mol_type = other DNA
ttctaactttttatgttttc

SEQ ID NO: 5473 - DNA, 20 bp, synthetic construct
  misc_feature 1..20: note = Description of Artificial Sequence: Synthetic oligonucleotide
  misc_feature 1..20: note = Target: SCN10A; (-) strand; PAM type: NAAAAC; PAM sequence: GAAAAC
  source 1..20: mol_type = other DNA
ctaagcataacaatattctg

SEQ ID NO: 5474 - DNA, 20 bp, synthetic construct
  misc_feature 1..20: note = Description of Artificial Sequence: Synthetic oligonucleotide
  misc_feature 1..20: note = Target: SCN10A; (-) strand; PAM type: NAAAAC; PAM sequence: AAAAAC
  source 1..20: mol_type = other DNA
agcaataaattacaaaatag

SEQ ID NO: 5475 - DNA, 20 bp, synthetic construct
  misc_feature 1..20: note = Description of Artificial Sequence: Synthetic oligonucleotide
  misc_feature 1..20: note = Target: SCN10A; (-) strand; PAM type: NAAAAC; PAM sequence: CAAAAC
  source 1..20: mol_type = other DNA
gaaattatttaaagacctaa

SEQ ID NO: 5476 - DNA, 20 bp, synthetic construct
  misc_feature 1..20: note = Description of Artificial Sequence: Synthetic oligonucleotide
  misc_feature 1..20: note = Target: SCN10A; (-) strand; PAM type: NAAAAC; PAM sequence: AAAAAC
  source 1..20: mol_type = other DNA
tttcgagggaaggaaagata

SEQ ID NO: 5477 - DNA, 20 bp, synthetic construct
  misc_feature 1..20: note = Description of Artificial Sequence: Synthetic oligonucleotide
  misc_feature 1..20: note = Target: SCN10A; (-) strand; PAM type: NAAAAC; PAM sequence: GAAAAC
  source 1..20: mol_type = other DNA
cagaaagtggaaataatata

SEQ ID NO: 5478 - DNA, 20 bp, synthetic construct
  misc_feature 1..20: note = Description of Artificial Sequence: Synthetic oligonucleotide
  misc_feature 1..20: note = Target: SCN10A; (-) strand; PAM type: NAAAAC; PAM sequence: AAAAAC
  source 1..20: mol_type = other DNA
accaaatattaagccatgac

SEQ ID NO: 5479 - DNA, 20 bp, synthetic construct
  misc_feature 1..20: note = Description of Artificial Sequence: Synthetic oligonucleotide
  misc_feature 1..20: note = Target: SCN10A; (-) strand; PAM type: NAAAAC; PAM sequence: AAAAAC
  source 1..20: mol_type = other DNA
gaaaatgcacctccttttca

SEQ ID NO: 5480 - DNA, 20 bp, synthetic construct
  misc_feature 1..20: note = Description of Artificial Sequence: Synthetic oligonucleotide
  misc_feature 1..20: note = Target: SCN10A; (-) strand; PAM type: NAAAAC; PAM sequence: AAAAAC
  source 1..20: mol_type = other DNA
attagagtaggaggataaat

SEQ ID NO: 5481 - DNA, 20 bp, synthetic construct
  misc_feature 1..20: note = Description of Artificial Sequence: Synthetic oligonucleotide
  misc_feature 1..20: note = Target: SCN10A; (-) strand; PAM type: NAAAAC; PAM sequence: AAAAAC
  source 1..20: mol_type = other DNA
ttgtaccaacctaatatttt

SEQ ID NO: 5482 - DNA, 20 bp, synthetic construct
  misc_feature 1..20: note = Description of Artificial Sequence: Synthetic oligonucleotide
  misc_feature 1..20: note = Target: SCN10A; (-) strand; PAM type: NAAAAC; PAM sequence: AAAAAC
  source 1..20: mol_type = other DNA
acggcaaatttcaacaatgc

SEQ ID NO: 5483 - DNA, 20 bp, synthetic construct
  misc_feature 1..20: note = Description of Artificial Sequence: Synthetic oligonucleotide
  misc_feature 1..20: note = Target: SCN10A; (-) strand; PAM type: NAAAAC; PAM sequence: CAAAAC
  source 1..20: mol_type = other DNA
caaggttctcatctcctttg

SEQ ID NO: 5484 - DNA, 20 bp, synthetic construct
  misc_feature 1..20: note = Description of Artificial Sequence: Synthetic oligonucleotide
  misc_feature 1..20: note = Target: SCN10A; (-) strand; PAM type: NAAAAC; PAM sequence: CAAAAC
  source 1..20: mol_type = other DNA
ggtgaatatggtggatgagg

SEQ ID NO: 5485 - DNA, 20 bp, synthetic construct
  misc_feature 1..20: note = Description of Artificial Sequence: Synthetic oligonucleotide
  misc_feature 1..20: note = Target: SCN10A; (-) strand; PAM type: NAAAAC; PAM sequence: TAAAAC
  source 1..20: mol_type = other DNA
aaatacagtcagataatgga

SEQ ID NO: 5486 - DNA, 20 bp, synthetic construct
  misc_feature 1..20: note = Description of Artificial Sequence: Synthetic oligonucleotide
  misc_feature 1..20: note = Target: SCN10A; (-) strand; PAM type: NAAAAC; PAM sequence: CAAAAC
  source 1..20: mol_type = other DNA
acacagaggacaaatgatgt

SEQ ID NO: 5487 - DNA, 20 bp, synthetic construct
  misc_feature 1..20: note = Description of Artificial Sequence: Synthetic oligonucleotide
  misc_feature 1..20: note = Target: SCN10A; (-) strand; PAM type: NAAAAC; PAM sequence: GAAAAC
  source 1..20: mol_type = other DNA
gaacaaagagaaagagaatg

SEQ ID NO: 5488 - DNA, 20 bp, synthetic construct
  misc_feature 1..20: note = Description of Artificial Sequence: Synthetic oligonucleotide
  misc_feature 1..20: note = Target: SCN10A; (-) strand; PAM type: NAAAAC; PAM sequence: TAAAAC
  source 1..20: mol_type = other DNA
cttcttttggagttttaatg

SEQ ID NO: 5489 - DNA, 20 bp, synthetic construct
  misc_feature 1..20: note = Description of Artificial Sequence: Synthetic oligonucleotide
  misc_feature 1..20: note = Target: SCN10A; (-) strand; PAM type: NAAAAC; PAM sequence: AAAAAC
  source 1..20: mol_type = other DNA
tgcatgttacatatcataat

SEQ ID NO: 5490 - DNA, 20 bp, synthetic construct
  misc_feature 1..20: note = Description of Artificial Sequence: Synthetic oligonucleotide
  misc_feature 1..20: note = Target: SCN10A; (-) strand; PAM type: NAAAAC; PAM sequence: CAAAAC
  source 1..20: mol_type = other DNA
atataaagtttgaaatcaag

SEQ ID NO: 5491 - DNA, 20 bp, synthetic construct
  misc_feature 1..20: note = Description of Artificial Sequence: Synthetic oligonucleotide
  misc_feature 1..20: note = Target: SCN10A; (-) strand; PAM type: NAAAAC; PAM sequence: GAAAAC
  source 1..20: mol_type = other DNA
tctgttatattctaaaatga

SEQ ID NO: 5492 - DNA, 20 bp, synthetic construct
  misc_feature 1..20: note = Description of Artificial Sequence: Synthetic oligonucleotide
  misc_feature 1..20: note = Target: SCN10A; (-) strand; PAM type: NAAAAC; PAM sequence: AAAAAC
  source 1..20: mol_type = other DNA
gtttatgaacatttgcccat

SEQ ID NO: 5493 - DNA, 20 bp, synthetic construct
  misc_feature 1..20: note = Description of Artificial Sequence: Synthetic oligonucleotide
  misc_feature 1..20: note = Target: SCN10A; (-) strand; PAM type: NAAAAC; PAM sequence: AAAAAC
  source 1..20: mol_type = other DNA
gaagcactaactatacagga

SEQ ID NO: 5494 - DNA, 20 bp, synthetic construct
  misc_feature 1..20: note = Description of Artificial Sequence: Synthetic oligonucleotide
  misc_feature 1..20: note = Target: SCN10A; (-) strand; PAM type: NAAAAC; PAM sequence: AAAAAC
  source 1..20: mol_type = other DNA
ctttatgacctcagactaag

SEQ ID NO: 5495 - DNA, 20 bp, synthetic construct
  misc_feature 1..20: note = Description of Artificial Sequence: Synthetic oligonucleotide
  misc_feature 1..20: note = Target: SCN10A; (-) strand; PAM type: NAAAAC; PAM sequence: AAAAAC
  source 1..20: mol_type = other DNA
ggataagctttttgaaagga

SEQ ID NO: 5496 - DNA, 20 bp, synthetic construct
  misc_feature 1..20: note = Description of Artificial Sequence: Synthetic oligonucleotide
  misc_feature 1..20: note = Target: SCN10A; (-) strand; PAM type: NAAAAC; PAM sequence: AAAAAC
  source 1..20: mol_type = other DNA
agaattaggaatctcactgg

SEQ ID NO: 5497 - DNA, 20 bp, synthetic construct
  misc_feature 1..20: note = Description of Artificial Sequence: Synthetic oligonucleotide
  misc_feature 1..20: note = Target: SCN10A; (-) strand; PAM type: NAAAAC; PAM sequence: GAAAAC
  source 1..20: mol_type = other DNA
tattgtgtaaagtttttaaa

SEQ ID NO: 5498 - DNA, 20 bp, synthetic construct
  misc_feature 1..20: note = Description of Artificial Sequence: Synthetic oligonucleotide
  misc_feature 1..20: note = Target: SCN10A; (-) strand; PAM type: NAAAAC; PAM sequence: AAAAAC
  source 1..20: mol_type = other DNA
cctttgagatcaaaagaaaa

SEQ ID NO: 5499 - DNA, 20 bp, synthetic construct
  misc_feature 1..20: note = Description of Artificial Sequence: Synthetic oligonucleotide
  misc_feature 1..20: note = Target: SCN10A; (-) strand; PAM type: NAAAAC; PAM sequence: GAAAAC
  source 1..20: mol_type = other DNA
agcaaactaacacaagaaca

SEQ ID NO: 5500 - DNA, 20 bp, synthetic construct
  misc_feature 1..20: note = Description of Artificial Sequence: Synthetic oligonucleotide
  misc_feature 1..20: note = Target: SCN10A; (-) strand; PAM type: NAAAAC; PAM sequence: AAAAAC
  source 1..20: mol_type = other DNA
tcagaatctgggagttttcc

SEQ ID NO: 5501 - DNA, 20 bp, synthetic construct
  misc_feature 1..20: note = Description of Artificial Sequence: Synthetic oligonucleotide
  misc_feature 1..20: note = Target: SCN10A; (-) strand; PAM type: NAAAAC; PAM sequence: CAAAAC
  source 1..20: mol_type = other DNA
ctatgaaagagagacaggag

SEQ ID NO: 5502 - DNA, 20 bp, synthetic construct
  misc_feature 1..20: note = Description of Artificial Sequence: Synthetic oligonucleotide
  misc_feature 1..20: note = Target: SCN10A; (-) strand; PAM type: NAAAAC; PAM sequence: GAAAAC
  source 1..20: mol_type = other DNA
gacacatcaaggcatttaca

SEQ ID NO: 5503 - DNA, 20 bp, synthetic construct
  misc_feature 1..20: note = Description of Artificial Sequence: Synthetic oligonucleotide
  misc_feature 1..20: note = Target: SCN10A; (-) strand; PAM type: NAAAAC; PAM sequence: TAAAAC
  source 1..20: mol_type = other DNA
gatgtgttcctaagtaactg

SEQ ID NO: 5504 - DNA, 20 bp, synthetic construct
  misc_feature 1..20: note = Description of Artificial Sequence: Synthetic oligonucleotide
  misc_feature 1..20: note = Target: SCN10A; (-) strand; PAM type: NAAAAC; PAM sequence: AAAAAC
  source 1..20: mol_type = other DNA
gttaacatcacaaattactc

SEQ ID NO: 5505 - DNA, 20 bp, synthetic construct
  misc_feature 1..20: note = Description of Artificial Sequence: Synthetic oligonucleotide
  misc_feature 1..20: note = Target: SCN10A; (-) strand; PAM type: NAAAAC; PAM sequence: GAAAAC
  source 1..20: mol_type = other DNA
agcacctcccagagggcaag

SEQ ID NO: 5506 - DNA, 20 bp, synthetic construct
  misc_feature 1..20: note = Description of Artificial Sequence: Synthetic oligonucleotide
  misc_feature 1..20: note = Target: SCN10A; (-) strand; PAM type: NAAAAC; PAM sequence: AAAAAC
  source 1..20: mol_type = other DNA
acctgtggatgcacaacttg

SEQ ID NO: 5507 - DNA, 20 bp, synthetic construct
  misc_feature 1..20: note = Description of Artificial Sequence: Synthetic oligonucleotide
  misc_feature 1..20: note = Target: SCN10A; (-) strand; PAM type: NAAAAC; PAM sequence: AAAAAC
  source 1..20: mol_type = other DNA
agataatgcctctcatgttt

SEQ ID NO: 5508 - DNA, 20 bp, synthetic construct
  misc_feature 1..20: note = Description of Artificial Sequence: Synthetic oligonucleotide
  misc_feature 1..20: note = Target: SCN10A; (-) strand; PAM type: NAAAAC; PAM sequence: CAAAAC
  source 1..20: mol_type = other DNA
tggagacagaagaaacatta

SEQ ID NO: 5509 - DNA, 20 bp, synthetic construct
  misc_feature 1..20: note = Description of Artificial Sequence: Synthetic oligonucleotide
  misc_feature 1..20: note = Target: SCN10A; (-) strand; PAM type: NAAAAC; PAM sequence: GAAAAC
  source 1..20: mol_type = other DNA
ttttagtgggtttataaaat

SEQ ID NO: 5510 - DNA, 20 bp, synthetic construct
  misc_feature 1..20: note = Description of Artificial Sequence: Synthetic oligonucleotide
  misc_feature 1..20: note = Target: SCN10A; (-) strand; PAM type: NAAAAC; PAM sequence: CAAAAC
  source 1..20: mol_type = other DNA
cttggaacccctggtgtccc

SEQ ID NO: 5511 - DNA, 20 bp, synthetic construct
  misc_feature 1..20: note = Description of Artificial Sequence: Synthetic oligonucleotide
  misc_feature 1..20: note = Target: SCN10A; (-) strand; PAM type: NAAAAC; PAM sequence: AAAAAC
  source 1..20: mol_type = other DNA
aaaaagaaaaagaaaaagaa

SEQ ID NO: 5512 - DNA, 20 bp, synthetic construct
  misc_feature 1..20: note = Description of Artificial Sequence: Synthetic oligonucleotide
  misc_feature 1..20: note = Target: SCN10A; (-) strand; PAM type: NAAAAC; PAM sequence: CAAAAC
  source 1..20: mol_type = other DNA
tgcctacaaaaaaatttttt

SEQ ID NO: 5513 - DNA, 20 bp, synthetic construct
  misc_feature 1..20: note = Description of Artificial Sequence: Synthetic oligonucleotide
  misc_feature 1..20: note = Target: SCN10A; (-) strand; PAM type: NAAAAC; PAM sequence: CAAAAC
  source 1..20: mol_type = other DNA
tattttaaggaggaaattgt

SEQ ID NO: 5514 - DNA, 20 bp, synthetic construct
  misc_feature 1..20: note = Description of Artificial Sequence: Synthetic oligonucleotide
  misc_feature 1..20: note = Target: SCN10A; (-) strand; PAM type: NAAAAC; PAM sequence: GAAAAC
  source 1..20: mol_type = other DNA
aggagaagagagaaagttag

SEQ ID NO: 5515 - DNA, 20 bp, synthetic construct
  misc_feature 1..20: note = Description of Artificial Sequence: Synthetic oligonucleotide
  misc_feature 1..20: note = Target: SCN10A; (-) strand; PAM type: NAAAAC; PAM sequence: GAAAAC
  source 1..20: mol_type = other DNA
gttactattgttattattct

SEQ ID NO: 5516 - DNA, 20 bp, synthetic construct
  misc_feature 1..20: note = Description of Artificial Sequence: Synthetic oligonucleotide
  misc_feature 1..20: note = Target: SCN10A; (-) strand; PAM type: NAAAAC; PAM sequence: GAAAAC
  source 1..20: mol_type = other DNA
caaattcccaccccaatgtt

SEQ ID NO: 5517 - DNA, 20 bp, synthetic construct
  misc_feature 1..20: note = Description of Artificial Sequence: Synthetic oligonucleotide
  misc_feature 1..20: note = Target: SCN10A; (-) strand; PAM type: NAAAAC; PAM sequence: TAAAAC
  source 1..20: mol_type = other DNA
taagggacaggactggtaga

SEQ ID NO: 5518 - DNA, 20 bp, synthetic construct
  misc_feature 1..20: note = Description of Artificial Sequence: Synthetic oligonucleotide
  misc_feature 1..20: note = Target: SCN10A; (-) strand; PAM type: NAAAAC; PAM sequence: AAAAAC
  source 1..20: mol_type = other DNA
acttaagggaatatacctgc

SEQ ID NO: 5519 - DNA, 20 bp, synthetic construct
  misc_feature 1..20: note = Description of Artificial Sequence: Synthetic oligonucleotide
  misc_feature 1..20: note = Target: SCN10A; (-) strand; PAM type: NAAAAC; PAM sequence: AAAAAC
  source 1..20: mol_type = other DNA
gaccagcctggggaacatgg

SEQ ID NO: 5520 - DNA, 20 bp, synthetic construct
  misc_feature 1..20: note = Description of Artificial Sequence: Synthetic oligonucleotide
  misc_feature 1..20: note = Target: SCN10A; (+) strand; PAM type: NAAAAC; PAM sequence: AAAAAC
  source 1..20: mol_type = other DNA
actttcttctcagaattgga

SEQ ID NO: 5521 - DNA, 20 bp, synthetic construct
  misc_feature 1..20: note = Description of Artificial Sequence: Synthetic oligonucleotide
  misc_feature 1..20: note = Target: SCN10A; (+) strand; PAM type: NAAAAC; PAM sequence: AAAAAC
  source 1..20: mol_type = other DNA
ttacacagtctaatgataat

SEQ ID NO: 5522 - DNA, 20 bp, synthetic construct
  misc_feature 1..20: note = Description of Artificial Sequence: Synthetic oligonucleotide
  misc_feature 1..20: note = Target: SCN10A; (+) strand; PAM type: NAAAAC; PAM sequence: AAAAAC
  source 1..20: mol_type = other DNA
ttgcatttggatacatttcc

SEQ ID NO: 5523 - DNA, 20 bp, synthetic construct
  misc_feature 1..20: note = Description of Artificial Sequence: Synthetic oligonucleotide
  misc_feature 1..20: note = Target: SCN10A; (+) strand; PAM type: NAAAAC; PAM sequence: AAAAAC
  source 1..20: mol_type = other DNA
ctgaatttgtttacatctgc

SEQ ID NO: 5524 - DNA, 20 bp, synthetic construct
  misc_feature 1..20: note = Description of Artificial Sequence: Synthetic oligonucleotide
  misc_feature 1..20: note = Target: SCN10A; (+) strand; PAM type: NAAAAC; PAM sequence: AAAAAC
  source 1..20: mol_type = other DNA
ttctggacgccaggtaatgt

SEQ ID NO: 5525 - DNA, 20 bp, synthetic construct
  misc_feature 1..20: note = Description of Artificial Sequence: Synthetic oligonucleotide
  misc_feature 1..20: note = Target: SCN10A; (+) strand; PAM type: NAAAAC; PAM sequence: CAAAAC
  source 1..20: mol_type = other DNA
ttcatttgctgtgaatgcaa

SEQ ID NO: 5526 - DNA, 20 bp, synthetic construct
  misc_feature 1..20: note = Description of Artificial Sequence: Synthetic oligonucleotide
  misc_feature 1..20: note = Target: SCN10A; (+) strand; PAM type: NAAAAC; PAM sequence: AAAAAC
  source 1..20: mol_type = other DNA
cttggtcaacctccacagtc

SEQ ID NO: 5527 - DNA, 20 bp, synthetic construct
  misc_feature 1..20: note = Description of Artificial Sequence: Synthetic oligonucleotide
  misc_feature 1..20: note = Target: SCN10A; (+) strand; PAM type: NAAAAC; PAM sequence: CAAAAC
  source 1..20: mol_type = other DNA
ctttcattttggaagacaaa

SEQ ID NO: 5528 - DNA, 20 bp, synthetic construct
  misc_feature 1..20: note = Description of Artificial Sequence: Synthetic oligonucleotide
  misc_feature 1..20: note = Target: SCN10A; (+) strand; PAM type: NAAAAC; PAM sequence: CAAAAC
  source 1..20: mol_type = other DNA
attttggaagacaaacaaaa

SEQ ID NO: 5529 - DNA, 20 bp, synthetic construct
  misc_feature 1..20: note = Description of Artificial Sequence: Synthetic oligonucleotide
  misc_feature 1..20: note = Target: SCN10A; (+) strand; PAM type: NAAAAC; PAM sequence: GAAAAC
  source 1..20: mol_type = other DNA
aaacaaaacaaaacaaaaat

SEQ ID NO: 5530 - DNA, 20 bp, synthetic construct
  misc_feature 1..20: note = Description of Artificial Sequence: Synthetic oligonucleotide
  misc_feature 1..20: note = Target: SCN10A; (+) strand; PAM type: NAAAAC; PAM sequence: AAAAAC
  source 1..20: mol_type = other DNA
caactaaccaaccaaccaac

SEQ ID NO: 5531 - DNA, 20 bp, synthetic construct
  misc_feature 1..20: note = Description of Artificial Sequence: Synthetic oligonucleotide
  misc_feature 1..20: note = Target: SCN10A; (+) strand; PAM type: NAAAAC; PAM sequence: AAAAAC
  source 1..20: mol_type = other DNA
taagccagacacagaaggac

SEQ ID NO: 5532 - DNA, 20 bp, synthetic construct
  misc_feature 1..20: note = Description of Artificial Sequence: Synthetic oligonucleotide
  misc_feature 1..20: note = Target: SCN10A; (+) strand; PAM type: NAAAAC; PAM sequence: AAAAAC
  source 1..20: mol_type = other DNA
catacctcaataaagtgtta

SEQ ID NO: 5533 - DNA, 20 bp, synthetic construct
  misc_feature 1..20: note = Description of Artificial Sequence: Synthetic oligonucleotide
  misc_feature 1..20: note = Target: SCN10A; (+) strand; PAM type: NAAAAC; PAM sequence: TAAAAC
  source 1..20: mol_type = other DNA
acagagcagcaatatcaaaa

SEQ ID NO: 5534 - DNA, 20 bp, synthetic construct
  misc_feature 1..20: note = Description of Artificial Sequence: Synthetic oligonucleotide
  misc_feature 1..20: note = Target: SCN10A; (+) strand; PAM type: NAAAAC; PAM sequence: AAAAAC
  source 1..20: mol_type = other DNA
tatcaaaataaaacaagaac

SEQ ID NO: 5535 - DNA, 20 bp, synthetic construct
  misc_feature 1..20: note = Description of Artificial Sequence: Synthetic oligonucleotide
  misc_feature 1..20: note = Target: SCN10A; (+) strand; PAM type: NAAAAC; PAM sequence: GAAAAC
  source 1..20: mol_type = other DNA
tgtgcacacagtaggtgcct

SEQ ID NO: 5536 - DNA, 20 bp, synthetic construct
  misc_feature 1..20: note = Description of Artificial Sequence: Synthetic oligonucleotide
  misc_feature 1..20: note = Target: SCN10A; (+) strand; PAM type: NAAAAC; PAM sequence: TAAAAC
  source 1..20: mol_type = other DNA
agagagcagcccaaggcatt

SEQ ID NO: 5537 - DNA, 20 bp, synthetic construct
  misc_feature 1..20: note = Description of Artificial Sequence: Synthetic oligonucleotide
  misc_feature 1..20: note = Target: SCN10A; (+) strand; PAM type: NAAAAC; PAM sequence: CAAAAC
  source 1..20: mol_type = other DNA
tctggtcacgatgtcaaaga

SEQ ID NO: 5538 - DNA, 20 bp, synthetic construct
  misc_feature 1..20: note = Description of Artificial Sequence: Synthetic oligonucleotide
  misc_feature 1..20: note = Target: SCN10A; (+) strand; PAM type: NAAAAC; PAM sequence: GAAAAC
  source 1..20: mol_type = other DNA
aaccctggaacttgttctga

SEQ ID NO: 5539 - DNA, 20 bp, synthetic construct
  misc_feature 1..20: note = Description of Artificial Sequence: Synthetic oligonucleotide
  misc_feature 1..20: note = Target: SCN10A; (+) strand; PAM type: NAAAAC; PAM sequence: CAAAAC
  source 1..20: mol_type = other DNA
cccacgctttgaccttctcc

SEQ ID NO: 5540 - DNA, 20 bp, synthetic construct
  misc_feature 1..20: note = Description of Artificial Sequence: Synthetic oligonucleotide
  misc_feature 1..20: note = Target: SCN10A; (+) strand; PAM type: NAAAAC; PAM sequence: TAAAAC
  source 1..20: mol_type = other DNA
actgctcttcctgtgtcttg

SEQ ID NO: 5541 - DNA, 20 bp, synthetic construct
  misc_feature 1..20: note = Description of Artificial Sequence: Synthetic oligonucleotide
  misc_feature 1..20: note = Target: SCN10A; (+) strand; PAM type: NAAAAC; PAM sequence: AAAAAC
  source 1..20: mol_type = other DNA
agtatgtgggggaaggtgcc

SEQ ID NO: 5542 - DNA, 20 bp, synthetic construct
  misc_feature 1..20: note = Description of Artificial Sequence: Synthetic oligonucleotide
  misc_feature 1..20: note = Target: SCN10A; (+) strand; PAM type: NAAAAC; PAM sequence: TAAAAC
  source 1..20: mol_type = other DNA
ccaatcctgtacttgaactc

SEQ ID NO: 5543 - DNA, 20 bp, synthetic construct
  misc_feature 1..20: note = Description of Artificial Sequence: Synthetic oligonucleotide
  misc_feature 1..20: note = Target: SCN10A; (+) strand; PAM type: NAAAAC; PAM sequence: GAAAAC
  source 1..20: mol_type = other DNA
tagccccattgaatgaatga

SEQ ID NO: 5544 - DNA, 20 bp, synthetic construct
  misc_feature 1..20: note = Description of Artificial Sequence: Synthetic oligonucleotide
  misc_feature 1..20: note = Target: SCN10A; (+) strand; PAM type: NAAAAC; PAM sequence: CAAAAC
  source 1..20: mol_type = other DNA
agtatttatcctcagactcc

SEQ ID NO: 5545 - DNA, 20 bp, synthetic construct
  misc_feature 1..20: note = Description of Artificial Sequence: Synthetic oligonucleotide
  misc_feature 1..20: note = Target: SCN10A; (+) strand; PAM type: NAAAAC; PAM sequence: GAAAAC
  source 1..20: mol_type = other DNA
ttcctcaacagtgaacagag

SEQ ID NO: 5546 - DNA, 20 bp, synthetic construct
  misc_feature 1..20: note = Description of Artificial Sequence: Synthetic oligonucleotide
  misc_feature 1..20: note = Target: SCN10A; (+) strand; PAM type: NAAAAC; PAM sequence: GAAAAC
  source 1..20: mol_type = other DNA
caatcgacaaaggtacaagg

SEQ ID NO: 5547 - DNA, 20 bp, synthetic construct
  misc_feature 1..20: note = Description of Artificial Sequence: Synthetic oligonucleotide
  misc_feature 1..20: note = Target: SCN10A; (+) strand; PAM type: NAAAAC; PAM sequence: CAAAAC
  source 1..20: mol_type = other DNA
cggtatagttgatgcacctc

SEQ ID NO: 5548 - DNA, 20 bp, synthetic construct
  misc_feature 1..20: note = Description of Artificial Sequence: Synthetic oligonucleotide
  misc_feature 1..20: note = Target: SCN10A; (+) strand; PAM type: NAAAAC; PAM sequence: TAAAAC
  source 1..20: mol_type = other DNA
ttctccttaaataccataca

SEQ ID NO: 5549 - DNA, 20 bp, synthetic construct
  misc_feature 1..20: note = Description of Artificial Sequence: Synthetic oligonucleotide
  misc_feature 1..20: note = Target: SCN10A; (+) strand; PAM type: NAAAAC; PAM sequence: GAAAAC
  source 1..20: mol_type = other DNA
tgccgtggtcaagaaccagt

SEQ ID NO: 5550 - DNA, 20 bp, synthetic construct
  misc_feature 1..20: note = Description of Artificial Sequence: Synthetic oligonucleotide
  misc_feature 1..20: note = Target: SCN10A; (+) strand; PAM type: NAAAAC; PAM sequence: CAAAAC
  source 1..20: mol_type = other DNA
ccaatgatagtggagcaaag

SEQ ID NO: 5551 - DNA, 20 bp, synthetic construct
  misc_feature 1..20: note = Description of Artificial Sequence: Synthetic oligonucleotide
  misc_feature 1..20: note = Target: SCN10A; (+) strand; PAM type: NAAAAC; PAM sequence: CAAAAC
  source 1..20: mol_type = other DNA
cataaagggggaagggttac

SEQ ID NO: 5552 - DNA, 20 bp, synthetic construct
  misc_feature 1..20: note = Description of Artificial Sequence: Synthetic oligonucleotide
  misc_feature 1..20: note = Target: SCN10A; (+) strand; PAM type: NAAAAC; PAM sequence: AAAAAC
  source 1..20: mol_type = other DNA
tcttaaacaatctgggcaag

SEQ ID NO: 5553 - DNA, 20 bp, synthetic construct
  misc_feature 1..20: note = Description of Artificial Sequence: Synthetic oligonucleotide
  misc_feature 1..20: note = Target: SCN10A; (+) strand; PAM type: NAAAAC; PAM sequence: CAAAAC
  source 1..20: mol_type = other DNA
cagactcctcactaaatgct

SEQ ID NO: 5554 - DNA, 20 bp, synthetic construct
  misc_feature 1..20: note = Description of Artificial Sequence: Synthetic oligonucleotide
  misc_feature 1..20: note = Target: SCN10A; (+) strand; PAM type: NAAAAC; PAM sequence: GAAAAC
  source 1..20: mol_type = other DNA
tgctgaatgcaagggagaaa

SEQ ID NO: 5555 - DNA, 20 bp, synthetic construct
  misc_feature 1..20: note = Description of Artificial Sequence: Synthetic oligonucleotide
  misc_feature 1..20: note = Target: SCN10A; (+) strand; PAM type: NAAAAC; PAM sequence: GAAAAC
  source 1..20: mol_type = other DNA
tacaagtgactggcaggagt

SEQ ID NO: 5556 - DNA, 20 bp, synthetic construct
  misc_feature 1..20: note = Description of Artificial Sequence: Synthetic oligonucleotide
  misc_feature 1..20: note = Target: SCN10A; (+) strand; PAM type: NAAAAC; PAM sequence: GAAAAC
  source 1..20: mol_type = other DNA
acatgaggcgcaagatgagt

SEQ ID NO: 5557 - DNA, 20 bp, synthetic construct
  misc_feature 1..20: note = Description of Artificial Sequence: Synthetic oligonucleotide
  misc_feature 1..20: note = Target: SCN10A; (+) strand; PAM type: NAAAAC; PAM sequence: GAAAAC
  source 1..20: mol_type = other DNA
cttctgcccacctatacctg

SEQ ID NO: 5558 - DNA, 20 bp, synthetic construct
  misc_feature 1..20: note = Description of Artificial Sequence: Synthetic oligonucleotide
  misc_feature 1..20: note = Target: SCN10A; (+) strand; PAM type: NAAAAC; PAM sequence: TAAAAC
  source 1..20: mol_type = other DNA
cagcccagcccagggtcaaa

SEQ ID NO: 5559 - DNA, 20 bp, synthetic construct
  misc_feature 1..20: note = Description of Artificial Sequence: Synthetic oligonucleotide
  misc_feature 1..20: note = Target: SCN10A; (+) strand; PAM type: NAAAAC; PAM sequence: AAAAAC
  source 1..20: mol_type = other DNA
ggtcaaataaaactattaat

SEQ ID NO: 5560 - DNA, 20 bp, synthetic construct
  misc_feature 1..20: note = Description of Artificial Sequence: Synthetic oligonucleotide
  misc_feature 1..20: note = Target: SCN10A; (+) strand; PAM type: NAAAAC; PAM sequence: GAAAAC
  source 1..20: mol_type = other DNA
ctagccggggtcatggacaa

SEQ ID NO: 5561 - DNA, 20 bp, synthetic construct
  misc_feature 1..20: note = Description of Artificial Sequence: Synthetic oligonucleotide
  misc_feature 1..20: note = Target: SCN10A; (+) strand; PAM type: NAAAAC; PAM sequence: AAAAAC
  source 1..20: mol_type = other DNA
ggggtcatggacaagaaaac

SEQ ID NO: 5562 - DNA, 20 bp, synthetic construct
  misc_feature 1..20: note = Description of Artificial Sequence: Synthetic oligonucleotide
  misc_feature 1..20: note = Target: SCN10A; (+) strand; PAM type: NAAAAC; PAM sequence: AAAAAC
  source 1..20: mol_type = other DNA
tggacaagaaaacaaaaaca

SEQ ID NO: 5563 - DNA, 20 bp, synthetic construct
  misc_feature 1..20: note = Description of Artificial Sequence: Synthetic oligonucleotide
  misc_feature 1..20: note = Target: SCN10A; (+) strand; PAM type: NAAAAC; PAM sequence: GAAAAC
  source 1..20: mol_type = other DNA
acacccagaagttgtgtact

SEQ ID NO: 5564 - DNA, 20 bp, synthetic construct
  misc_feature 1..20: note = Description of Artificial Sequence: Synthetic oligonucleotide
  misc_feature 1..20: note = Target: SCN10A; (+) strand; PAM type: NAAAAC; PAM sequence: GAAAAC
  source 1..20: mol_type = other DNA
agtgggggagaatcacaagg

SEQ ID NO: 5565 - DNA, 20 bp, synthetic construct
  misc_feature 1..20: note = Description of Artificial Sequence: Synthetic oligonucleotide
  misc_feature 1..20: note = Target: SCN10A; (+) strand; PAM type: NAAAAC; PAM sequence: TAAAAC
  source 1..20: mol_type = other DNA
actaaatatgttagcgcttg

SEQ ID NO: 5566 - DNA, 20 bp, synthetic construct
  misc_feature 1..20: note = Description of Artificial Sequence: Synthetic oligonucleotide
  misc_feature 1..20: note = Target: SCN10A; (+) strand; PAM type: NAAAAC; PAM sequence: TAAAAC
  source 1..20: mol_type = other DNA
gtttagctttcttctgtcta

SEQ ID NO: 5567 - DNA, 20 bp, synthetic construct
  misc_feature 1..20: note = Description of Artificial Sequence: Synthetic oligonucleotide
  misc_feature 1..20: note = Target: SCN10A; (+) strand; PAM type: NAAAAC; PAM sequence: AAAAAC
  source 1..20: mol_type = other DNA
ctggaaaccaaagatctggg

SEQ ID NO: 5568 - DNA, 20 bp, synthetic construct
  misc_feature 1..20: note = Description of Artificial Sequence: Synthetic oligonucleotide
  misc_feature 1..20: note = Target: SCN10A; (+) strand; PAM type: NAAAAC; PAM sequence: CAAAAC
  source 1..20: mol_type = other DNA
ctgcattcgataggtattgg

(The sequence listing continues in the following parts.)
